United States Patent Application Publication US 2004/0241651 A1 - sequence listing, part 11

SEQ ID NO: 294056 - DNA, 12 bp, Artificial Sequence
  Oligonucleotide primer for the detection of SNP TSC0015934
attgtggtttag

SEQ ID NO: 294057 - DNA, 12 bp, Artificial Sequence
  Oligonucleotide primer for the detection of SNP TSC0015935
aaaataaacatt

SEQ ID NO: 294058 - DNA, 12 bp, Artificial Sequence
  Oligonucleotide primer for the detection of SNP TSC0015935
aaattttttatg

SEQ ID NO: 294059 - DNA, 12 bp, Artificial Sequence
  Oligonucleotide primer for the detection of SNP TSC0015936
atacctaaaatt

SEQ ID NO: 294060 - DNA, 12 bp, Artificial Sequence
  Oligonucleotide primer for the detection of SNP TSC0015936
taaagagtttag

SEQ ID NO: 294061 - DNA, 12 bp, Artificial Sequence
  Oligonucleotide primer for the detection of SNP TSC0015936
taaaaaatttaa

SEQ ID NO: 294062 - DNA, 12 bp, Artificial Sequence
  Oligonucleotide primer for the detection of SNP TSC0015936
gtgtttgaagtt

SEQ ID NO: 294063 - DNA, 12 bp, Artificial Sequence
  Oligonucleotide primer for the detection of SNP TSC0015939
gttgtagttata

SEQ ID NO: 294064 - DNA, 12 bp, Artificial Sequence
  Oligonucleotide primer for the detection of SNP TSC0015939
actacaattata

SEQ ID NO: 294065 - DNA, 12 bp, Artificial Sequence
  Oligonucleotide primer for the detection of SNP TSC0015939
gctacaattata

SEQ ID NO: 294066 - DNA, 12 bp, Artificial Sequence
  Oligonucleotide primer for the detection of SNP TSC0015939
aaaaatgggatg

SEQ ID NO: 294067 - DNA, 12 bp, Artificial Sequence
  Oligonucleotide primer for the detection of SNP TSC0015940
aaaagttggatt

SEQ ID NO: 294068 - DNA, 12 bp, Artificial Sequence
  Oligonucleotide primer for the detection of SNP TSC0015940
aaaactaaacta

SEQ ID NO: 294069 - DNA, 12 bp, Artificial Sequence
  Oligonucleotide primer for the detection of SNP TSC0015944
ctcaaaaactcc

SEQ ID NO: 294070 - DNA, 12 bp, Artificial Sequence
  Oligonucleotide primer for the detection of SNP TSC0015944
gtttaaagttat

SEQ ID NO: 294071 - DNA, 12 bp, Artificial Sequence
  Oligonucleotide primer for the detection of SNP TSC0015944
tttaaaaatttt

SEQ ID NO: 294072 - DNA, 12 bp, Artificial Sequence
  Oligonucleotide primer for the detection of SNP TSC0015944
tttaaaaatttc

SEQ ID NO: 294073 - DNA, 12 bp, Artificial Sequence
  Oligonucleotide primer for the detection of SNP TSC0015945
ttttcattccaa

SEQ ID NO: 294074 - DNA, 12 bp, Artificial Sequence
  Oligonucleotide primer for the detection of SNP TSC0015945
agtttttgagaa

SEQ ID NO: 294075 - DNA, 12 bp, Artificial Sequence
  Oligonucleotide primer for the detection of SNP TSC0015945
aatttttaaaaa

SEQ ID NO: 294076 - DNA, 12 bp, Artificial Sequence
  Oligonucleotide primer for the detection of SNP TSC0015945
ttttattttagt

SEQ ID NO: 294077 - DNA, 12 bp, Artificial Sequence
  Oligonucleotide primer for the detection of SNP TSC0015945
ttttattttagc

SEQ ID NO: 294078 - DNA, 12 bp, Artificial Sequence
  Oligonucleotide primer for the detection of SNP TSC0015946
tacaaaacaata

SEQ ID NO: 294079 - DNA, 12 bp, Artificial Sequence
  Oligonucleotide primer for the detection of SNP TSC0015946
tacaaaacgata

SEQ ID NO: 294080 - DNA, 12 bp, Artificial Sequence
  Oligonucleotide primer for the detection of SNP TSC0015946
gtttattagagt

SEQ ID NO: 294081 - DNA, 12 bp, Artificial Sequence
  Oligonucleotide primer for the detection of SNP TSC0015946
acttattaaaac

SEQ ID NO: 294082 - DNA, 12 bp, Artificial Sequence
  Oligonucleotide primer for the detection of SNP TSC0015946
tgtaaaatggtg

SEQ ID NO: 294083 - DNA, 12 bp, Artificial Sequence
  Oligonucleotide primer for the detection of SNP TSC0015946
tgtaaaacggtg

SEQ ID NO: 294084 - DNA, 12 bp, Artificial Sequence
  Oligonucleotide primer for the detection of SNP TSC0015947
aatacaaaatat

SEQ ID NO: 294085 - DNA, 12 bp, Artificial Sequence
  Oligonucleotide primer for the detection of SNP TSC0015947
gtattttataga

SEQ ID NO: 294086 - DNA, 12 bp, Artificial Sequence
  Oligonucleotide primer for the detection of SNP TSC0015947
acattctacaaa

SEQ ID NO: 294087 - DNA, 12 bp, Artificial Sequence
  Oligonucleotide primer for the detection of SNP TSC0015947
gatgtagagtgt

SEQ ID NO: 294088 - DNA, 12 bp, Artificial Sequence
  Oligonucleotide primer for the detection of SNP TSC0015948
cctttcaaaaac

SEQ ID NO: 294089 - DNA, 12 bp, Artificial Sequence
  Oligonucleotide primer for the detection of SNP TSC0015948
ttaataacaaca

SEQ ID NO: 294090 - DNA, 12 bp, Artificial Sequence
  Oligonucleotide primer for the detection of SNP TSC0015948
ttttttaggggt

SEQ ID NO: 294091 - DNA, 12 bp, Artificial Sequence
  Oligonucleotide primer for the detection of SNP TSC0015949
aaatcccaaaat

SEQ ID NO: 294092 - DNA, 12 bp, Artificial Sequence
  Oligonucleotide primer for the detection of SNP TSC0015949
aattataaatta

SEQ ID NO: 294093 - DNA, 12 bp, Artificial Sequence
  Oligonucleotide primer for the detection of SNP TSC0015949
aatcacaaacta

SEQ ID NO: 294094 - DNA, 12 bp, Artificial Sequence
  Oligonucleotide primer for the detection of SNP TSC0015949
gggttttagagt

SEQ ID NO: 294095 - DNA, 12 bp, Artificial Sequence
  Oligonucleotide primer for the detection of SNP TSC0015952
aaccccaccctc

SEQ ID NO: 294096 - DNA, 12 bp, Artificial Sequence
  Oligonucleotide primer for the detection of SNP TSC0015952
gtgattgaggtg

SEQ ID NO: 294097 - DNA, 12 bp, Artificial Sequence
  Oligonucleotide primer for the detection of SNP TSC0015952
gtgattgaggcg

SEQ ID NO: 294098 - DNA, 12 bp, Artificial Sequence
  Oligonucleotide primer for the detection of SNP TSC0015957
atcatcctcctc

SEQ ID NO: 294099 - DNA, 12 bp, Artificial Sequence
  Oligonucleotide primer for the detection of SNP TSC0015957
gaatggtggggg

SEQ ID NO: 294100 - DNA, 12 bp, Artificial Sequence
  Oligonucleotide primer for the detection of SNP TSC0015959
tcacatttctct

SEQ ID NO: 294101 - DNA, 12 bp, Artificial Sequence
  Oligonucleotide primer for the detection of SNP TSC0015959
tgggggtaattt

SEQ ID NO: 294102 - DNA, 12 bp, Artificial Sequence
  Oligonucleotide primer for the detection of SNP TSC0015959
tatatttttttc

SEQ ID NO: 294103 - DNA, 12 bp, Artificial Sequence
  Oligonucleotide primer for the detection of SNP TSC0015960
taactttctcta

SEQ ID NO: 294104 - DNA, 12 bp, Artificial Sequence
  Oligonucleotide primer for the detection of SNP TSC0015960
aggaggtatatt

SEQ ID NO: 294105 - DNA, 12 bp, Artificial Sequence
  Oligonucleotide primer for the detection of SNP TSC0015960
tgatttttttta

SEQ ID NO: 294106 - DNA, 12 bp, Artificial Sequence
  Oligonucleotide primer for the detection of SNP TSC0015961
aaaaacactatc

SEQ ID NO: 294107 - DNA, 12 bp, Artificial Sequence
  Oligonucleotide primer for the detection of SNP TSC0015961
agtattgagaag

SEQ ID NO: 294108 - DNA, 12 bp, Artificial Sequence
  Oligonucleotide primer for the detection of SNP TSC0015962
aacatcccacca

SEQ ID NO: 294109 - DNA, 12 bp, Artificial Sequence
  Oligonucleotide primer for the detection of SNP TSC0015962
aacatcccgcca

SEQ ID NO: 294110 - DNA, 12 bp, Artificial Sequence
  Oligonucleotide primer for the detection of SNP TSC0015962
aacgtcccacca

SEQ ID NO: 294111 - DNA, 12 bp, Artificial Sequence
  Oligonucleotide primer for the detection of SNP TSC0015962
aacgtcccgcca

SEQ ID NO: 294112 - DNA, 12 bp, Artificial Sequence
  Oligonucleotide primer for the detection of SNP TSC0015962
aaaacctcccct

SEQ ID NO: 294113 - DNA, 12 bp, Artificial Sequence
  Oligonucleotide primer for the detection of SNP TSC0015962
gaaacctcccct

SEQ ID NO: 294114 - DNA, 12 bp, Artificial Sequence
  Oligonucleotide primer for the detection of SNP TSC0015962
ggtgttttgtta

SEQ ID NO: 294115 - DNA, 12 bp, Artificial Sequence
  Oligonucleotide primer for the detection of SNP TSC0015962
ggcgttttgtta

SEQ ID NO: 294116 - DNA, 12 bp, Artificial Sequence
  Oligonucleotide primer for the detection of SNP TSC0015962
ggtgtttcgtta

SEQ ID NO: 294117 - DNA, 12 bp, Artificial Sequence
  Oligonucleotide primer for the detection of SNP TSC0015962
ggcgtttcgtta

SEQ ID NO: 294118 - DNA, 12 bp, Artificial Sequence
  Oligonucleotide primer for the detection of SNP TSC0015963
tccaaaaaccac

SEQ ID NO: 294119 - DNA, 12 bp, Artificial Sequence
  Oligonucleotide primer for the detection of SNP TSC0015963
tcctattcccca

SEQ ID NO: 294120 - DNA, 12 bp, Artificial Sequence
  Oligonucleotide primer for the detection of SNP TSC0015963
tttagagattat

SEQ ID NO: 294121 - DNA, 12 bp, Artificial Sequence
  Oligonucleotide primer for the detection of SNP TSC0015963
tttagagattac

SEQ ID NO: 294122 - DNA, 12 bp, Artificial Sequence
  Oligonucleotide primer for the detection of SNP TSC0015965
accacttaaaac

SEQ ID NO: 294123 - DNA, 12 bp, Artificial Sequence
  Oligonucleotide primer for the detection of SNP TSC0015965
atttgttttaaa

SEQ ID NO: 294124 - DNA, 12 bp, Artificial Sequence
  Oligonucleotide primer for the detection of SNP TSC0015966
caacaaaataaa

SEQ ID NO: 294125 - DNA, 12 bp, Artificial Sequence
  Oligonucleotide primer for the detection of SNP TSC0015966
cgacaaaataaa

SEQ ID NO: 294126 - DNA, 12 bp, Artificial Sequence
  Oligonucleotide primer for the detection of SNP TSC0015966
ttttttggagat

SEQ ID NO: 294127 - DNA, 12 bp, Artificial Sequence
  Oligonucleotide primer for the detection of SNP TSC0015966
tgatagagtgag

SEQ ID NO: 294128 - DNA, 12 bp, Artificial Sequence
  Oligonucleotide primer for the detection of SNP TSC0015966
cgatagagtgag

SEQ ID NO: 294129 - DNA, 12 bp, Artificial Sequence
  Oligonucleotide primer for the detection of SNP TSC0015967
taaaaaaaaact

SEQ ID NO: 294130 - DNA, 12 bp, Artificial Sequence
  Oligonucleotide primer for the detection of SNP TSC0015967
tattgttatgta

SEQ ID NO: 294131 - DNA, 12 bp, Artificial Sequence
  Oligonucleotide primer for the detection of SNP TSC0015967
tatcgttatgta

SEQ ID NO: 294132 - DNA, 12 bp, Artificial Sequence
  Oligonucleotide primer for the detection of SNP TSC0015968
catattccatct

SEQ ID NO: 294133 - DNA, 12 bp, Artificial Sequence
  Oligonucleotide primer for the detection of SNP TSC0015968
aagaattttatg

SEQ ID NO: 294134 - DNA, 12 bp, Artificial Sequence
  Oligonucleotide primer for the detection of SNP TSC0015968
aagaattttacg

SEQ ID NO: 294135 - DNA, 12 bp, Artificial Sequence
  Oligonucleotide primer for the detection of SNP TSC0015969
tataatatttat

SEQ ID NO: 294136 - DNA, 12 bp, Artificial Sequence
  Oligonucleotide primer for the detection of SNP TSC0015969
cataacatttat

SEQ ID NO: 294137 - DNA, 12 bp, Artificial Sequence
  Oligonucleotide primer for the detection of SNP TSC0015969
agagtttgtgtt

SEQ ID NO: 294138 - DNA, 12 bp, Artificial Sequence
  Oligonucleotide primer for the detection of SNP TSC0015972
actaaaaaacct

SEQ ID NO: 294139 - DNA, 12 bp, Artificial Sequence
  Oligonucleotide primer for the detection of SNP TSC0015972
tgttaatatagg

SEQ ID NO: 294140 - DNA, 12 bp, Artificial Sequence
  Oligonucleotide primer for the detection of SNP TSC0015972
cgttaatatagg

SEQ ID NO: 294141 - DNA, 12 bp, Artificial Sequence
  Oligonucleotide primer for the detection of SNP TSC0015972
catcaacacaaa

SEQ ID NO: 294142 - DNA, 12 bp, Artificial Sequence
  Oligonucleotide primer for the detection of SNP TSC0015972
cgtcaacacaaa

SEQ ID NO: 294143 - DNA, 12 bp, Artificial Sequence
  Oligonucleotide primer for the detection of SNP TSC0015972
attgggaggttt

SEQ ID NO: 294144 - DNA, 12 bp, Artificial Sequence
  Oligonucleotide primer for the detection of SNP TSC0015973
aacataacaaca

SEQ ID NO: 294145 - DNA, 12 bp, Artificial Sequence
  Oligonucleotide primer for the detection of SNP TSC0015973
gtttttgtggtt

SEQ ID NO: 294146 - DNA, 12 bp, Artificial Sequence
  Oligonucleotide primer for the detection of SNP TSC0015973
acctctataact

SEQ ID NO: 294147 - DNA, 12 bp, Artificial Sequence
  Oligonucleotide primer for the detection of SNP TSC0015973
gcctctataact

SEQ ID NO: 294148 - DNA, 12 bp, Artificial Sequence
  Oligonucleotide primer for the detection of SNP TSC0015973
ggtatgataata

SEQ ID NO: 294149 - DNA, 12 bp, Artificial Sequence
  Oligonucleotide primer for the detection of SNP TSC0015976
ccaatcaaatta

SEQ ID NO: 294150 - DNA, 12 bp, Artificial Sequence
  Oligonucleotide primer for the detection of SNP TSC0015976
ccgatcaaatta

SEQ ID NO: 294151 - DNA, 12 bp, Artificial Sequence
  Oligonucleotide primer for the detection of SNP TSC0015976
tataatggttgt

SEQ ID NO: 294152 - DNA, 12 bp, Artificial Sequence
  Oligonucleotide primer for the detection of SNP TSC0015976
tataacggttgt

SEQ ID NO: 294153 - DNA, 12 bp, Artificial Sequence
  Oligonucleotide primer for the detection of SNP TSC0015976
cacaacaactac

SEQ ID NO: 294154 - DNA, 12 bp, Artificial Sequence
  Oligonucleotide primer for the detection of SNP TSC0015976
cacaacgactac

SEQ ID NO: 294155 - DNA, 12 bp, Artificial Sequence
  Oligonucleotide primer for the detection of SNP TSC0015976
ttgattaggttg

SEQ ID NO: 294156 - DNA, 12 bp, Artificial Sequence
  Oligonucleotide primer for the detection of SNP TSC0015976
tcgattaggttg

SEQ ID NO: 294157 - DNA, 12 bp, Artificial Sequence
  Oligonucleotide primer for the detection of SNP TSC0015977
tctatataacct

SEQ ID NO: 294158 - DNA, 12 bp, Artificial Sequence
  Oligonucleotide primer for the detection of SNP TSC0015977
atggggttagag

SEQ ID NO: 294159 - DNA, 12 bp, Artificial Sequence
  Oligonucleotide primer for the detection of SNP TSC0015977
ataaaatcaaaa

SEQ ID NO: 294160 - DNA, 12 bp, Artificial Sequence
  Oligonucleotide primer for the detection of SNP TSC0015977
tttgtgtggttt

SEQ ID NO: 294161 - DNA, 12 bp, Artificial Sequence
  Oligonucleotide primer for the detection of SNP TSC0015978
atcaacacaaat

SEQ ID NO: 294162 - DNA, 12 bp, Artificial Sequence
  Oligonucleotide primer for the detection of SNP TSC0015978
aagagaaatttt

SEQ ID NO: 294163 - DNA, 12 bp, Artificial Sequence
  Oligonucleotide primer for the detection of SNP TSC0015978
aaaaaaaacttt

SEQ ID NO: 294164 - DNA, 12 bp, Artificial Sequence
  Oligonucleotide primer for the detection of SNP TSC0015978
gttaatatagat

SEQ ID NO: 294165 - DNA, 12 bp, Artificial Sequence
  Oligonucleotide primer for the detection of SNP TSC0015980
tccatcactaat

SEQ ID NO: 294166 - DNA, 12 bp, Artificial Sequence
  Oligonucleotide primer for the detection of SNP TSC0015980
tattgtttgtta

SEQ ID NO: 294167 - DNA, 12 bp, Artificial Sequence
  Oligonucleotide primer for the detection of SNP TSC0015981
ttctttctctct

SEQ ID NO: 294168 - DNA, 12 bp, Artificial Sequence
  Oligonucleotide primer for the detection of SNP TSC0015982
aaatataatttt

SEQ ID NO: 294169 - DNA, 12 bp, Artificial Sequence
  Oligonucleotide primer for the detection of SNP TSC0015982
gttgtttttgta

SEQ ID NO: 294170 - DNA, 12 bp, Artificial Sequence
  Oligonucleotide primer for the detection of SNP TSC0015982
gttgttttcgta

SEQ ID NO: 294171 - DNA, 12 bp, Artificial Sequence
  Oligonucleotide primer for the detection of SNP TSC0015982
actatcctcata

SEQ ID NO: 294172 - DNA, 12 bp, Artificial Sequence
  Oligonucleotide primer for the detection of SNP TSC0015982
actatcctcgta

SEQ ID NO: 294173 - DNA, 12 bp, Artificial Sequence
  Oligonucleotide primer for the detection of SNP TSC0015982
aggtgtagtttt

SEQ ID NO: 294174 - DNA, 12 bp, Artificial Sequence
  Oligonucleotide primer for the detection of SNP TSC0015983
aaatttaccttt

SEQ ID NO: 294175 - DNA, 12 bp, Artificial Sequence
  Oligonucleotide primer for the detection of SNP TSC0015983
taaaaatatttt

SEQ ID NO: 294176 - DNA, 12 bp, Artificial Sequence
  Oligonucleotide primer for the detection of SNP TSC0015983
taaaaatatttc

SEQ ID NO: 294177 - DNA, 12 bp, Artificial Sequence
  Oligonucleotide primer for the detection of SNP TSC0015985
ttataaaaaata

SEQ ID NO: 294178 - DNA, 12 bp, Artificial Sequence
  Oligonucleotide primer for the detection of SNP TSC0015985
tttagttatttt

SEQ ID NO: 294179 - DNA, 12 bp, Artificial Sequence
  Oligonucleotide primer for the detection of SNP TSC0015985
cccaatcacctt

SEQ ID NO: 294180 - DNA, 12 bp, Artificial Sequence
  Oligonukleotid-Primer
tataaaggatat

SEQ ID NO: 294181 - DNA, 12 bp, Artificial Sequence
  Oligonucleotide primer for the detection of SNP TSC0015988
ggtaagaatggg

SEQ ID NO: 294182 - DNA, 12 bp, Artificial Sequence
  Oligonucleotide primer for the detection of SNP TSC0015989
aataaattacat

SEQ ID NO: 294183 - DNA, 12 bp, Artificial Sequence
  Oligonucleotide primer for the detection of SNP TSC0015989
aaatagaaaatg

SEQ ID NO: 294184 - DNA, 12 bp, Artificial Sequence
  Oligonucleotide primer for the detection of SNP TSC0015992
attttggagttt

SEQ ID NO: 294185 - DNA, 12 bp, Artificial Sequence
  Oligonucleotide primer for the detection of SNP TSC0015993
acaaaaaatcac

SEQ ID NO: 294186 - DNA, 12 bp, Artificial Sequence
  Oligonucleotide primer for the detection of SNP TSC0015993
gtatttattagt

SEQ ID NO: 294187 - DNA, 12 bp, Artificial Sequence
  Oligonucleotide primer for the detection of SNP TSC0015993
gtatttattagc

SEQ ID NO: 294188 - DNA, 12 bp, Artificial Sequence
  Oligonukleotid-Primer
tatacccattaa

SEQ ID NO: 294189 - DNA, 12 bp, Artificial Sequence
  Oligonucleotide primer for the detection of SNP TSC0015993
atagagggttat

SEQ ID NO: 294190 - DNA, 12 bp, Artificial Sequence
  Oligonucleotide primer for the detection of SNP TSC0015994
acaaatatacaa

SEQ ID NO: 294191 - DNA, 12 bp, Artificial Sequence
  Oligonucleotide primer for the detection of SNP TSC0015994
aaatatatagat

SEQ ID NO: 294192 - DNA, 12 bp, Artificial Sequence
  Oligonucleotide primer for the detection of SNP TSC0015994
aaacacataaat

SEQ ID NO: 294193 - DNA, 12 bp, Artificial Sequence
  Oligonucleotide primer for the detection of SNP TSC0015994
gtaggtatataa

SEQ ID NO: 294194 - DNA, 12 bp, Artificial Sequence
  Oligonucleotide primer for the detection of SNP TSC0015999
ttatggttattt

SEQ ID NO: 294195 - DNA, 12 bp, Artificial Sequence
  Oligonucleotide primer for the detection of SNP TSC0015999
ttacggttattt

SEQ ID NO: 294196 - DNA, 12 bp, Artificial Sequence
  Oligonucleotide primer for the detection of SNP TSC0015999
ctcccacaacca

SEQ ID NO: 294197 - DNA, 12 bp, Artificial Sequence
  Oligonucleotide primer for the detection of SNP TSC0015999
ctcccacgacca

SEQ ID NO: 294198 - DNA, 12 bp, Artificial Sequence
  Oligonucleotide primer for the detection of SNP TSC0015999
gggagataggag

SEQ ID NO: 294199 - DNA, 12 bp, Artificial Sequence
  Oligonucleotide primer for the detection of SNP TSC0016002
ctacctactttc

SEQ ID NO: 294200 - DNA, 12 bp, Artificial Sequence
  Oligonucleotide primer for the detection of SNP TSC0016002
tttttatatcta

SEQ ID NO: 294201 - DNA, 12 bp, Artificial Sequence
  Oligonucleotide primer for the detection of SNP TSC0016002
ttgtttgttttt

SEQ ID NO: 294202 - DNA, 12 bp, Artificial Sequence
  Oligonucleotide primer for the detection of SNP TSC0016003
caacatcctacc

SEQ ID NO: 294203 - DNA, 12 bp, Artificial Sequence
  Oligonucleotide primer for the detection of SNP TSC0016003
ttgtattttaag

SEQ ID NO: 294204 - DNA, 12 bp, Artificial Sequence
  Oligonucleotide primer for the detection of SNP TSC0016003
tcgtattttaag

SEQ ID NO: 294205 - DNA, 12 bp, Artificial Sequence
  Oligonucleotide primer for the detection of SNP TSC0016003
ccacaccccaaa

SEQ ID NO: 294206 - DNA, 12 bp, Artificial Sequence
  Oligonucleotide primer for the detection of SNP TSC0016003
ccgcaccccaaa

SEQ ID NO: 294207 - DNA, 12 bp, Artificial Sequence
  Oligonucleotide primer for the detection of SNP TSC0016003
taatattttgtt

SEQ ID NO: 294208 - DNA, 12 bp, Artificial Sequence
  Oligonucleotide primer for the detection of SNP TSC0016006
ctaaaacacaaa

SEQ ID NO: 294209 - DNA, 12 bp, Artificial Sequence
  Oligonucleotide primer for the detection of SNP TSC0016006
ctaaaacacgaa

SEQ ID NO: 294210 - DNA, 12 bp, Artificial Sequence
  Oligonucleotide primer for the detection of SNP TSC0016006
aggattggattt

SEQ ID NO: 294211 - DNA, 12 bp, Artificial Sequence
  Oligonucleotide primer for the detection of SNP TSC0016007
tactaaacactc

SEQ ID NO: 294212 - DNA, 12 bp, Artificial Sequence
  Oligonucleotide primer for the detection of SNP TSC0016007
ttggtattgttt

SEQ ID NO: 294213 - DNA, 12 bp, Artificial Sequence
  Oligonucleotide primer for the detection of SNP TSC0016007
ttaacactatcc

SEQ ID NO: 294214 - DNA, 12 bp, Artificial Sequence
  Oligonucleotide primer for the detection of SNP TSC0016007
tgttagatattt

SEQ ID NO: 294215 - DNA, 12 bp, Artificial Sequence
  Oligonucleotide primer for the detection of SNP TSC0016008
tcactatcttta

SEQ ID NO: 294216 - DNA, 12 bp, Artificial Sequence
  Oligonucleotide primer for the detection of SNP TSC0016008
ttaatttataat

SEQ ID NO: 294217 - DNA, 12 bp, Artificial Sequence
  Oligonucleotide primer for the detection of SNP TSC0016008
ttaatttacaat

SEQ ID NO: 294218 - DNA, 12 bp, Artificial Sequence
  Oligonucleotide primer for the detection of SNP TSC0016008
tattatttttat

SEQ ID NO: 294219 - DNA, 12 bp, Artificial Sequence
  Oligonucleotide primer for the detection of SNP TSC0016009
tctcactctact

SEQ ID NO: 294220 - DNA, 12 bp, Artificial Sequence
  Oligonucleotide primer for the detection of SNP TSC0016009
ttatattttaaa

SEQ ID NO: 294221 - DNA, 12 bp, Artificial Sequence
  Oligonucleotide primer for the detection of SNP TSC0016010
tgtatagataat

SEQ ID NO: 294222 - DNA, 12 bp, Artificial Sequence
  Oligonucleotide primer for the detection of SNP TSC0016010
atatataaataa

SEQ ID NO: 294223 - DNA, 12 bp, Artificial Sequence
  Oligonucleotide primer for the detection of SNP TSC0016010
aagtttaaaagt

SEQ ID NO: 294224 - DNA, 12 bp, Artificial Sequence
  Oligonucleotide primer for the detection of SNP TSC0016010
aagtttaaaagc

SEQ ID NO: 294225 - DNA, 12 bp, Artificial Sequence
  Oligonucleotide primer for the detection of SNP TSC0016011
cctaaaactcct

SEQ ID NO: 294226 - DNA, 12 bp, Artificial Sequence
  Oligonucleotide primer for the detection of SNP TSC0016011
agttttatgtta

SEQ ID NO: 294227 - DNA, 12 bp, Artificial Sequence
  Oligonucleotide primer for the detection of SNP TSC0016011
agttttacgtta

SEQ ID NO: 294228 - DNA, 12 bp, Artificial Sequence
  Oligonucleotide primer for the detection of SNP TSC0016011
aaccccacacca

SEQ ID NO: 294229 - DNA, 12 bp, Artificial Sequence
  Oligonucleotide primer for the detection of SNP TSC0016011
aaccccacgcca

SEQ ID NO: 294230 - DNA, 12 bp, Artificial Sequence
  Oligonucleotide primer for the detection of SNP TSC0016011
tttggagttttt

SEQ ID NO: 294231 - DNA, 12 bp, Artificial Sequence
  Oligonucleotide primer for the detection of SNP TSC0016012
tttaataaacac

SEQ ID NO: 294232 - DNA, 12 bp, Artificial Sequence
  Oligonucleotide primer for the detection of SNP TSC0016012
tgttatatagta

SEQ ID NO: 294233 - DNA, 12 bp, Artificial Sequence
  Oligonucleotide primer for the detection of SNP TSC0016013
ccaaacacaaaa

SEQ ID NO: 294234 - DNA, 12 bp, Artificial Sequence
  Oligonucleotide primer for the detection of SNP TSC0016013
attttttgatat

SEQ ID NO: 294235 - DNA, 12 bp, Artificial Sequence
  Oligonucleotide primer for the detection of SNP TSC0016013
attttctaatat

SEQ ID NO: 294236 - DNA, 12 bp, Artificial Sequence
  Oligonucleotide primer for the detection of SNP TSC0016013
ttagatataaaa

SEQ ID NO: 294237 - DNA, 12 bp, Artificial Sequence
  Oligonucleotide primer for the detection of SNP TSC0016014
ttatcctttcat

SEQ ID NO: 294238 - DNA, 12 bp, Artificial Sequence
  Oligonucleotide primer for the detection of SNP TSC0016014
agttggagattg

SEQ ID NO: 294239 - DNA, 12 bp, Artificial Sequence
  Oligonucleotide primer for the detection of SNP TSC0016016
cacattctaact

SEQ ID NO: 294240 - DNA, 12 bp, Artificial Sequence
  Oligonucleotide primer for the detection of SNP TSC0016016
ttttatatatta

SEQ ID NO: 294241 - DNA, 12 bp, Artificial Sequence
  Oligonucleotide primer for the detection of SNP TSC0016017
tttaaaataaca

SEQ ID NO: 294242 - DNA, 12 bp, Artificial Sequence
  Oligonucleotide primer for the detection of SNP TSC0016017
aaaatcccctca

SEQ ID NO: 294243 - DNA, 12 bp, Artificial Sequence
  Oligonucleotide primer for the detection of SNP TSC0016017
ttgaaataatat

SEQ ID NO: 294244 - DNA, 12 bp, Artificial Sequence
  Oligonucleotide primer for the detection of SNP TSC0016018
atcttttaaaaa

SEQ ID NO: 294245 - DNA, 12 bp, Artificial Sequence
  Oligonucleotide primer for the detection of SNP TSC0016018
cctcttttttta

SEQ ID NO: 294246 - DNA, 12 bp, Artificial Sequence
  Oligonucleotide primer for the detection of SNP TSC0016019
taatcccaaata

SEQ ID NO: 294247 - DNA, 12 bp, Artificial Sequence
  Oligonucleotide primer for the detection of SNP TSC0016019
acctcaacctcc

SEQ ID NO: 294248 - DNA, 12 bp, Artificial Sequence
  Oligonucleotide primer for the detection of SNP TSC0016019
tggttttaggta

SEQ ID NO: 294249 - DNA, 12 bp, Artificial Sequence
  Oligonucleotide primer for the detection of SNP TSC0016020
gtatatttaggg

SEQ ID NO: 294250 - DNA, 12 bp, Artificial Sequence
  Oligonucleotide primer for the detection of SNP TSC0016021
accttccaacca

SEQ ID NO: 294251 - DNA, 12 bp, Artificial Sequence
  Oligonucleotide primer for the detection of SNP TSC0016021
accttccaaccg

SEQ ID NO: 294252 - DNA, 12 bp, Artificial Sequence
  Oligonucleotide primer for the detection of SNP TSC0016021
aaaagtaaaggt

SEQ ID NO: 294253 - DNA, 12 bp, Artificial Sequence
  Oligonucleotide primer for the detection of SNP TSC0016021
tttttagtcgtt

SEQ ID NO: 294254 - DNA, 12 bp, Artificial Sequence
  Oligonucleotide primer for the detection of SNP TSC0016022
aaatcttattaa

SEQ ID NO: 294255 - DNA, 12 bp, Artificial Sequence
  Oligonucleotide primer for the detection of SNP TSC0016022
taggtttaaagt

SEQ ID NO: 294256 - DNA, 12 bp, Artificial Sequence
  Oligonucleotide primer for the detection of SNP TSC0016022
taaatttaaaac

SEQ ID NO: 294257 - DNA, 12 bp, Artificial Sequence
  Oligonucleotide primer for the detection of SNP TSC0016022
aggttttattgg

SEQ ID NO: 294258 - DNA, 12 bp, Artificial Sequence
  Oligonucleotide primer for the detection of SNP TSC0016023
acaacaccttcc

SEQ ID NO: 294259 - DNA, 12 bp, Artificial Sequence
  Oligonucleotide primer for the detection of SNP TSC0016023
acaacgccttcc

SEQ ID NO: 294260 - DNA, 12 bp, Artificial Sequence
  Oligonucleotide primer for the detection of SNP TSC0016023
tgttgagaagag

SEQ ID NO: 294261 - DNA, 12 bp, Artificial Sequence
  Oligonucleotide primer for the detection of SNP TSC0016023
tactaaaaaaaa

SEQ ID NO: 294262 - DNA, 12 bp, Artificial Sequence
  Oligonucleotide primer for the detection of SNP TSC0016023
ataatgtttttt

SEQ ID NO: 294263 - DNA, 12 bp, Artificial Sequence
  Oligonucleotide primer for the detection of SNP TSC0016023
ataacgtttttt

SEQ ID NO: 294264 - DNA, 12 bp, Artificial Sequence
  Oligonucleotide primer for the detection of SNP TSC0016026
atttttaaagga

SEQ ID NO: 294265 - DNA, 12 bp, Artificial Sequence
  Oligonucleotide primer for the detection of SNP TSC0016027
tattacaaatct

SEQ ID NO: 294266 - DNA, 12 bp, Artificial Sequence
  Oligonucleotide primer for the detection of SNP TSC0016027
atctcatctcta

SEQ ID NO: 294267 - DNA, 12 bp, Artificial Sequence
  Oligonucleotide primer for the detection of SNP TSC0016027
tattgtaggttt

SEQ ID NO: 294268 - DNA, 12 bp, Artificial Sequence
  Oligonucleotide primer for the detection of SNP TSC0016029
aacattaaacct

SEQ ID NO: 294269 - DNA, 12 bp, Artificial Sequence
  Oligonukleotid-Primer
aacgttaaacct

SEQ ID NO: 294270 - DNA, 12 bp, Artificial Sequence
  Oligonucleotide primer for the detection of SNP TSC0016029
agttggggaaaa

SEQ ID NO: 294271 - DNA, 12 bp, Artificial Sequence
  Oligonucleotide primer for the detection of SNP TSC0016030
acatctaaaaac

SEQ ID NO: 294272 - DNA, 12 bp, Artificial Sequence
  Oligonucleotide primer for the detection of SNP TSC0016031
caatcaacaaat

SEQ ID NO: 294273 - DNA, 12 bp, Artificial Sequence
  Oligonukleotid-Primer
gttgagattttg

SEQ ID NO: 294274 - DNA, 12 bp, Artificial Sequence
  Oligonucleotide primer for the detection of SNP TSC0016032
cccgaaacaaca

SEQ ID NO: 294275 - DNA, 12 bp, Artificial Sequence
  Oligonucleotide primer for the detection of SNP TSC0016032
ttattattgagg

SEQ ID NO: 294276 - DNA, 12 bp, Artificial Sequence
  Oligonucleotide primer for the detection of SNP TSC0016032
ccattattaaaa

SEQ ID NO: 294277 - DNA, 12 bp, Artificial Sequence
  Oligonucleotide primer for the detection of SNP TSC0016032
tttggggtagta

SEQ ID NO: 294278 - DNA, 12 bp, Artificial Sequence
  Oligonucleotide primer for the detection of SNP TSC0016032
ttcggggtagta

SEQ ID NO: 294279 - DNA, 12 bp, Artificial Sequence
  Oligonucleotide primer for the detection of SNP TSC0016033
tgggttttttgg

SEQ ID NO: 294280 - DNA, 12 bp, Artificial Sequence
  Oligonucleotide primer for the detection of SNP TSC0016033
taaatcccctaa

SEQ ID NO: 294281 - DNA, 12 bp, Artificial Sequence
  Oligonucleotide primer for the detection of SNP TSC0016033
agagatgagttt

SEQ ID NO: 294282 - DNA, 12 bp, Artificial Sequence
  Oligonucleotide primer for the detection of SNP TSC0016034
atcactatacct

SEQ ID NO: 294283 - DNA, 12 bp, Artificial Sequence
  Oligonucleotide primer for the detection of SNP TSC0016034
agtgatgttata

SEQ ID NO: 294284 - DNA, 12 bp, Artificial Sequence
  Oligonucleotide primer for the detection of SNP TSC0016036
aaatacaaaatt

SEQ ID NO: 294285 - DNA, 12 bp, Artificial Sequence
  Oligonucleotide primer for the detection of SNP TSC0016036
tagtttatggta

SEQ ID NO: 294286 - DNA, 12 bp, Artificial Sequence
  Oligonucleotide primer for the detection of SNP TSC0016037
aaacccctcata

SEQ ID NO: 294287 - DNA, 12 bp, Artificial Sequence
  Oligonucleotide primer for the detection of SNP TSC0016037
ttgtatgtttgt

SEQ ID NO: 294288 - DNA, 12 bp, Artificial Sequence
  Oligonucleotide primer for the detection of SNP TSC0016037
ctatatacctat

SEQ ID NO: 294289 - DNA, 12 bp, Artificial Sequence
  Oligonucleotide primer for the detection of SNP TSC0016037
aggttttttatg

SEQ ID NO: 294290 - DNA, 12 bp, Artificial Sequence
  Oligonucleotide primer for the detection of SNP TSC0016038
cactaaacaaaa

SEQ ID NO: 294291 - DNA, 12 bp, Artificial Sequence
  Oligonucleotide primer for the detection of SNP TSC0016038
ttaatttggtgt

SEQ ID NO: 294292 - DNA, 12 bp, Artificial Sequence
  Oligonucleotide primer for the detection of SNP TSC0016038
ccaacctaatac

SEQ ID NO: 294293 - DNA, 12 bp, Artificial Sequence
  Oligonucleotide primer for the detection of SNP TSC0016038
attgggtagggt

SEQ ID NO: 294294 - DNA, 12 bp, Artificial Sequence
  Oligonucleotide primer for the detection of SNP TSC0016038
attgggtagggc

SEQ ID NO: 294295 - DNA, 12 bp, Artificial Sequence
  Oligonucleotide primer for the detection of SNP TSC0016041
aaaatttacata

SEQ ID NO: 294296 - DNA, 12 bp, Artificial Sequence
  Oligonucleotide primer for the detection of SNP TSC0016041
aaaatttacgta

SEQ ID NO: 294297 - DNA, 12 bp, Artificial Sequence
  Oligonucleotide primer for the detection of SNP TSC0016041
tttttaggaaaa

SEQ ID NO: 294298 - DNA, 12 bp, Artificial Sequence
  Oligonucleotide primer for the detection of SNP TSC0016041
gagatttgtgtg

SEQ ID NO: 294299 - DNA, 12 bp, Artificial Sequence
  Oligonucleotide primer for the detection of SNP TSC0016041
gagatttgcgtg

SEQ ID NO: 294300 - DNA, 12 bp, Artificial Sequence
  Oligonucleotide primer for the detection of SNP TSC0016042
aaaatataactc

SEQ ID NO: 294301 - DNA, 12 bp, Artificial Sequence
  Oligonucleotide primer for the detection of SNP TSC0016042
tatgagtgttta

SEQ ID NO: 294302 - DNA, 12 bp, Artificial Sequence
  Oligonucleotide primer for the detection of SNP TSC0016048
tttttctataca

SEQ ID NO: 294303 - DNA, 12 bp, Artificial Sequence
  Oligonucleotide primer for the detection of SNP TSC0016049
taccctaaaaaa

SEQ ID NO: 294304 - DNA, 12 bp, Artificial Sequence
  Oligonucleotide primer for the detection of SNP TSC0016049
tttgggtattat

SEQ ID NO: 294305 - DNA, 12 bp, Artificial Sequence
  Oligonucleotide primer for the detection of SNP TSC0016049
cctaaacatcat

SEQ ID NO: 294306 - DNA, 12 bp, Artificial Sequence
  Oligonucleotide primer for the detection of SNP TSC0016049
tgttttggggga

SEQ ID NO: 294307 - DNA, 12 bp, Artificial Sequence
  Oligonucleotide primer for the detection of SNP TSC0016052
aacacccccccc

SEQ ID NO: 294308 - DNA, 12 bp, Artificial Sequence
  Oligonucleotide primer for the detection of SNP TSC0016052
atttttttaggg

SEQ ID NO: 294309 - DNA, 12 bp, Artificial Sequence
  Oligonucleotide primer for the detection of SNP TSC0016052
accctctcaaaa

SEQ ID NO: 294310 - DNA, 12 bp, Artificial Sequence
  Oligonucleotide primer for the detection of SNP TSC0016052
gatatttttttt

SEQ ID NO: 294311 - DNA, 12 bp, Artificial Sequence
  Oligonucleotide primer for the detection of SNP TSC0016053
tatttatataac

SEQ ID NO: 294312 - DNA, 12 bp, Artificial Sequence
  Oligonucleotide primer for the detection of SNP TSC0016053
atgtttttttaa

SEQ ID NO: 294313 - DNA, 12 bp, Artificial Sequence
  Oligonucleotide primer for the detection of SNP TSC0016054
acacttcccact

SEQ ID NO: 294314 - DNA, 12 bp, Artificial Sequence
  Oligonucleotide primer for the detection of SNP TSC0016054
tttgttatataa

SEQ ID NO: 294315 - DNA, 12 bp, Artificial Sequence
  Oligonucleotide primer for the detection of SNP TSC0016055
gtttggaattag

SEQ ID NO: 294316 - DNA, 12 bp, Artificial Sequence
  Oligonucleotide primer for the detection of SNP TSC0016056
caaactaaaaaa

SEQ ID NO: 294317 - DNA, 12 bp, Artificial Sequence
  Oligonucleotide primer for the detection of SNP TSC0016056
aaatcttattct

SEQ ID NO: 294318 - DNA, 12 bp, Artificial Sequence
  Oligonucleotide primer for the detection of SNP TSC0016056
tagattgggaga

SEQ ID NO: 294319 - DNA, 12 bp, Artificial Sequence
  Oligonucleotide primer for the detection of SNP TSC0016057
atcttattctat

SEQ ID NO: 294320 - DNA, 12 bp, Artificial Sequence
  Oligonucleotide primer for the detection of SNP TSC0016057
tttagattggga

SEQ ID NO: 294321 - DNA, 12 bp, Artificial Sequence
  Oligonucleotide primer for the detection of SNP TSC0016059
aataataaaaac

SEQ ID NO: 294322 - DNA, 12 bp, Artificial Sequence
  Oligonucleotide primer for the detection of SNP TSC0016059
gatatatagaaa

SEQ ID NO: 294323 - DNA, 12 bp, Artificial Sequence
  Oligonucleotide primer for the detection of SNP TSC0016061
taacaaacttct

SEQ ID NO: 294324 - DNA, 12 bp, Artificial Sequence
  Oligonucleotide primer for the detection of SNP TSC0016061
aaaattgggggg

SEQ ID NO: 294325 - DNA, 12 bp, Artificial Sequence
  Oligonucleotide primer for the detection of SNP TSC0016061
aaaactaaaaaa

SEQ ID NO: 294326 - DNA, 12 bp, Artificial Sequence
  Oligonucleotide primer for the detection of SNP TSC0016061
tagtaggttttt

SEQ ID NO: 294327 - DNA, 12 bp, Artificial Sequence
  Oligonucleotide primer for the detection of SNP TSC0016063
tttatttaagtt

SEQ ID NO: 294328 - DNA, 12 bp, Artificial Sequence
  Oligonucleotide primer for the detection of SNP TSC0016064
ttttttcccaat

SEQ ID NO: 294329 - DNA, 12 bp, Artificial Sequence
  Oligonucleotide primer for the detection of SNP TSC0016064
ttgtttatagta

SEQ ID NO: 294330 - DNA, 12 bp, Artificial Sequence
  Oligonucleotide primer for the detection of SNP TSC0016064
tcgtttatagta

SEQ ID NO: 294331 - DNA, 12 bp, Artificial Sequence
  Oligonucleotide primer for the detection of SNP TSC0016064
tcacttataaca

SEQ ID NO: 294332 - DNA, 12 bp, Artificial Sequence
  Oligonucleotide primer for the detection of SNP TSC0016064
tcgcttataaca

SEQ ID NO: 294333 - DNA, 12 bp, Artificial Sequence
  Oligonucleotide primer for the detection of SNP TSC0016071
atctttaaaaat

SEQ ID NO: 294334 - DNA, 12 bp, Artificial Sequence
  Oligonucleotide primer for the detection of SNP TSC0016071
ttatataataga

SEQ ID NO: 294335 - DNA, 12 bp, Artificial Sequence
  Oligonucleotide primer for the detection of SNP TSC0016073
acccacttcccc

SEQ ID NO: 294336 - DNA, 12 bp, Artificial Sequence
  Oligonucleotide primer for the detection of SNP TSC0016073
acccgcttcccc

SEQ ID NO: 294337 - DNA, 12 bp, Artificial Sequence
  Oligonucleotide primer for the detection of SNP TSC0016073
ggtttgggaaag

SEQ ID NO: 294338 - DNA, 12 bp, Artificial Sequence
  Oligonucleotide primer for the detection of SNP TSC0016073
attcgttttttt

SEQ ID NO: 294339 - DNA, 12 bp, Artificial Sequence
  Oligonucleotide primer for the detection of SNP TSC0016074
aaacccaatact

SEQ ID NO: 294340 - DNA, 12 bp, Artificial Sequence
  Oligonucleotide primer for the detection of SNP TSC0016074
ttgaaggttaaa

SEQ ID NO: 294341 - DNA, 12 bp, Artificial Sequence
  Oligonucleotide primer for the detection of SNP TSC0016074
gagtttaatgtt

SEQ ID NO: 294342 - DNA, 12 bp, Artificial Sequence
  Oligonucleotide primer for the detection of SNP TSC0016075
aaacaatataaa

SEQ ID NO: 294343 - DNA, 12 bp, Artificial Sequence
  Oligonucleotide primer for the detection of SNP TSC0016075
tatatgtaaatg

SEQ ID NO: 294344 - DNA, 12 bp, Artificial Sequence
  Oligonucleotide primer for the detection of SNP TSC0016075
tatatgtaaacg

SEQ ID NO: 294345 - DNA, 12 bp, Artificial Sequence
  Oligonucleotide primer for the detection of SNP TSC0016075
cacatacaaaca

SEQ ID NO: 294346 - DNA, 12 bp, Artificial Sequence
  Oligonucleotide primer for the detection of SNP TSC0016075
cacatacaaacg

SEQ ID NO: 294347 - DNA, 12 bp, Artificial Sequence
  Oligonucleotide primer for the detection of SNP TSC0016075
aaataatgtaaa

SEQ ID NO: 294348 - DNA, 12 bp, Artificial Sequence
  Oligonucleotide primer for the detection of SNP TSC0016076
ataaccaaatac

SEQ ID NO: 294349 - DNA, 12 bp, Artificial Sequence
  Oligonucleotide primer for the detection of SNP TSC0016076
ttaagttattta

SEQ ID NO: 294350 - DNA, 12 bp, Artificial Sequence
  Oligonucleotide primer for the detection of SNP TSC0016077
ataaatacataa

SEQ ID NO: 294351 - DNA, 12 bp, Artificial Sequence
  Oligonucleotide primer for the detection of SNP TSC0016077
ataaatacgtaa

SEQ ID NO: 294352 - DNA, 12 bp, Artificial Sequence
  Oligonucleotide primer for the detection of SNP TSC0016077
gtgttgtttttt

SEQ ID NO: 294353 - DNA, 12 bp, Artificial Sequence
  Oligonucleotide primer for the detection of SNP TSC0016077
gcgttgtttttt

SEQ ID NO: 294354 - DNA, 12 bp, Artificial Sequence
  Oligonucleotide primer for the detection of SNP TSC0016077
gtgtcgtttttt

SEQ ID NO: 294355 - DNA, 12 bp, Artificial Sequence
  Oligonucleotide primer for the detection of SNP TSC0016077
gcgtcgtttttt

SEQ ID NO: 294356 - DNA, 12 bp, Artificial Sequence
  Oligonucleotide primer for the detection of SNP TSC0016077
acaccaccttct

SEQ ID NO: 294357 - DNA, 12 bp, Artificial Sequence
  Oligonucleotide primer for the detection of SNP TSC0016077
acaccgccttct

SEQ ID NO: 294358 - DNA, 12 bp, Artificial Sequence
  Oligonukleotid-Primer
acgccaccttct

SEQ ID NO: 294359 - DNA, 12 bp, Artificial Sequence
  Oligonucleotide primer for the detection of SNP TSC0016077
acgccgccttct

SEQ ID NO: 294360 - DNA, 12 bp, Artificial Sequence
  Oligonucleotide primer for the detection of SNP TSC0016077
atgagtatgtag

SEQ ID NO: 294361 - DNA, 12 bp, Artificial Sequence
  Oligonucleotide primer for the detection of SNP TSC0016077
atgagtacgtag

SEQ ID NO: 294362 - DNA, 12 bp, Artificial Sequence
  Oligonucleotide primer for the detection of SNP TSC0016078
cacttaaatctc

SEQ ID NO: 294363 - DNA, 12 bp, Artificial Sequence
  Oligonucleotide primer for the detection of SNP TSC0016078
gtggggtgatta

SEQ ID NO: 294364 - DNA, 12 bp, Artificial Sequence
  Oligonucleotide primer for the detection of SNP TSC0016079
cttatataacat

SEQ ID NO: 294365 - DNA, 12 bp, Artificial Sequence
  Oligonucleotide primer for the detection of SNP TSC0016079
agagggaattgg

SEQ ID NO: 294366 - DNA, 12 bp, Artificial Sequence
  Oligonucleotide primer for the detection of SNP TSC0016080
gggtggtgagaa

SEQ ID NO: 294367 - DNA, 12 bp, Artificial Sequence
  Oligonucleotide primer for the detection of SNP TSC0016080
gggcggtgagaa

SEQ ID NO: 294368 - DNA, 12 bp, Artificial Sequence
  Oligonucleotide primer for the detection of SNP TSC0016081
tatctaaacaaa

SEQ ID NO: 294369 - DNA, 12 bp, Artificial Sequence
  Oligonucleotide primer for the detection of SNP TSC0016081
aagtttattttt

SEQ ID NO: 294370 - DNA, 12 bp, Artificial Sequence
  Oligonucleotide primer for the detection of SNP TSC0016081
aagtttattttc

SEQ ID NO: 294371 - DNA, 12 bp, Artificial Sequence
  Oligonucleotide primer for the detection of SNP TSC0016081
aaatttacttcc

SEQ ID NO: 294372 - DNA, 12 bp, Artificial Sequence
  Oligonucleotide primer for the detection of SNP TSC0016081
ttatttaagtag

SEQ ID NO: 294373 - DNA, 12 bp, Artificial Sequence
  Oligonucleotide primer for the detection of SNP TSC0016082
cctaccccatct

SEQ ID NO: 294374 - DNA, 12 bp, Artificial Sequence
  Oligonucleotide primer for the detection of SNP TSC0016082
agaggggtatgg

SEQ ID NO: 294375 - DNA, 12 bp, Artificial Sequence
  Oligonucleotide primer for the detection of SNP TSC0016082
agaggggtacgg

SEQ ID NO: 294376 - DNA, 12 bp, Artificial Sequence
  Oligonucleotide primer for the detection of SNP TSC0016083
tatccactaaca

SEQ ID NO: 294377 - DNA, 12 bp, Artificial Sequence
  Oligonucleotide primer for the detection of SNP TSC0016083
gagaaagtatat

SEQ ID NO: 294378 - DNA, 12 bp, Artificial Sequence
  Oligonucleotide primer for the detection of SNP TSC0016083
aaaacacataaa

SEQ ID NO: 294379 - DNA, 12 bp, Artificial Sequence
  Oligonucleotide primer for the detection of SNP TSC0016083
atttattggtat

SEQ ID NO: 294380 - DNA, 12 bp, Artificial Sequence
  Oligonucleotide primer for the detection of SNP TSC0016084
ttttaatttaat

SEQ ID NO: 294381 - DNA, 12 bp, Artificial Sequence
  Oligonucleotide primer for the detection of SNP TSC0016084
ccccaacccaac

SEQ ID NO: 294382 - DNA, 12 bp, Artificial Sequence
  Oligonucleotide primer for the detection of SNP TSC0016084
gaaggaaggaga

SEQ ID NO: 294383 - DNA, 12 bp, Artificial Sequence
  Oligonucleotide primer for the detection of SNP TSC0016085
aacacacttcac

SEQ ID NO: 294384 - DNA, 12 bp, Artificial Sequence
  Oligonucleotide primer for the detection of SNP TSC0016085
tgtagtgaattt

SEQ ID NO: 294385 - DNA, 12 bp, Artificial Sequence
  Oligonucleotide primer for the detection of SNP TSC0016085
cgtagtgaattt

SEQ ID NO: 294386 - DNA, 12 bp, Artificial Sequence
  Oligonucleotide primer for the detection of SNP TSC0016085
tgtagtgaattc

SEQ ID NO: 294387 - DNA, 12 bp, Artificial Sequence
  Oligonucleotide primer for the detection of SNP TSC0016085
cgtagtgaattc

SEQ ID NO: 294388 - DNA, 12 bp, Artificial Sequence
  Oligonucleotide primer for the detection of SNP TSC0016085
cataataaattc

SEQ ID NO: 294389 - DNA, 12 bp, Artificial Sequence
  Oligonucleotide primer for the detection of SNP TSC0016085
cgtaataaattc

SEQ ID NO: 294390 - DNA, 12 bp, Artificial Sequence
  Oligonucleotide primer for the detection of SNP TSC0016085
gatatattttat

SEQ ID NO: 294391 - DNA, 12 bp, Artificial Sequence
  Oligonucleotide primer for the detection of SNP TSC0016085
gatatattttac

SEQ ID NO: 294392 - DNA, 12 bp, Artificial Sequence
  Oligonucleotide primer for the detection of SNP TSC0016086
atcccctctctc

SEQ ID NO: 294393 - DNA, 12 bp, Artificial Sequence
  Oligonucleotide primer for the detection of SNP TSC0016086
ataaaggaggtg

SEQ ID NO: 294394 - DNA, 12 bp, Artificial Sequence
  Oligonucleotide primer for the detection of SNP TSC0016091
acttataatcct

SEQ ID NO: 294395 - DNA, 12 bp, Artificial Sequence
  Oligonucleotide primer for the detection of SNP TSC0016091
tagagttttgta

SEQ ID NO: 294396 - DNA, 12 bp, Artificial Sequence
  Oligonucleotide primer for the detection of SNP TSC0016097
cttaaaatatat

SEQ ID NO: 294397 - DNA, 12 bp, Artificial Sequence
  Oligonucleotide primer for the detection of SNP TSC0016097
taaataatttta

SEQ ID NO: 294398 - DNA, 12 bp, Artificial Sequence
  Oligonucleotide primer for the detection of SNP TSC0016098
atacatttcact

SEQ ID NO: 294399 - DNA, 12 bp, Artificial Sequence
  Oligonucleotide primer for the detection of SNP TSC0016098
gttgttttaagg

SEQ ID NO: 294400 - DNA, 12 bp, Artificial Sequence
  Oligonucleotide primer for the detection of SNP TSC0016099
cacttaccattt

SEQ ID NO: 294401 - DNA, 12 bp, Artificial Sequence
  Oligonucleotide primer for the detection of SNP TSC0016099
ttaataggtgat

SEQ ID NO: 294402 - DNA, 12 bp, Artificial Sequence
  Oligonucleotide primer for the detection of SNP TSC0016099
tttaataaataa

SEQ ID NO: 294403 - DNA, 12 bp, Artificial Sequence
  Oligonucleotide primer for the detection of SNP TSC0016099
tatttattattt

SEQ ID NO: 294404 - DNA, 12 bp, Artificial Sequence
  Oligonucleotide primer for the detection of SNP TSC0016100
aattttatactt

SEQ ID NO: 294405 - DNA, 12 bp, Artificial Sequence
  Oligonucleotide primer for the detection of SNP TSC0016100
tggtaaaatata

SEQ ID NO: 294406 - DNA, 12 bp, Artificial Sequence
  Oligonucleotide primer for the detection of SNP TSC0016100
taataaaatata

SEQ ID NO: 294407 - DNA, 12 bp, Artificial Sequence
  Oligonucleotide primer for the detection of SNP TSC0016101
ttttgaaaatta

SEQ ID NO: 294408 - DNA, 12 bp, Artificial Sequence
  Oligonucleotide primer for the detection of SNP TSC0016104
aacctccctccc

SEQ ID NO: 294409 - DNA, 12 bp, Artificial Sequence
  Oligonucleotide primer for the detection of SNP TSC0016104
tagggggttttg

SEQ ID NO: 294410 - DNA, 12 bp, Artificial Sequence
  Oligonucleotide primer for the detection of SNP TSC0016105
cctaacaaacct

SEQ ID NO: 294411 - DNA, 12 bp, Artificial Sequence
  Oligonucleotide primer for the detection of SNP TSC0016105
cctaacgaacct

SEQ ID NO: 294412 - DNA, 12 bp, Artificial Sequence
  Oligonucleotide primer for the detection of SNP TSC0016105
tgttagtgttga

SEQ ID NO: 294413 - DNA, 12 bp, Artificial Sequence
  Oligonucleotide primer for the detection of SNP TSC0016105
tgttagcgttga

SEQ ID NO: 294414 - DNA, 12 bp, Artificial Sequence
  Oligonucleotide primer for the detection of SNP TSC0016105
tgttagtgtcga

SEQ ID NO: 294415 - DNA, 12 bp, Artificial Sequence
  Oligonucleotide primer for the detection of SNP TSC0016105
tgttagcgtcga

SEQ ID NO: 294416 - DNA, 12 bp, Artificial Sequence
  Oligonucleotide primer for the detection of SNP TSC0016106
taaaaatactaa

SEQ ID NO: 294417 - DNA, 12 bp, Artificial Sequence
  Oligonucleotide primer for the detection of SNP TSC0016106
attttatatatt

SEQ ID NO: 294418 - DNA, 12 bp, Artificial Sequence
  Oligonucleotide primer for the detection of SNP TSC0016106
atcccacacatt

SEQ ID NO: 294419 - DNA, 12 bp, Artificial Sequence
  Oligonucleotide primer for the detection of SNP TSC0016106
tttggggatgtt

SEQ ID NO: 294420 - DNA, 12 bp, Artificial Sequence
  Oligonucleotide primer for the detection of SNP TSC0016107
atttttaagtta

SEQ ID NO: 294421 - DNA, 12 bp, Artificial Sequence
  Oligonucleotide primer for the detection of SNP TSC0016107
atccccaaacta

SEQ ID NO: 294422 - DNA, 12 bp, Artificial Sequence
  Oligonucleotide primer for the detection of SNP TSC0016107
gggtgggaggtt

SEQ ID NO: 294423 - DNA, 12 bp, Artificial Sequence
  Oligonucleotide primer for the detection of SNP TSC0016108
tgttgtttaaag

SEQ ID NO: 294424 - DNA, 12 bp, Artificial Sequence
  Oligonucleotide primer for the detection of SNP TSC0016109
taataactatac

SEQ ID NO: 294425 - DNA, 12 bp, Artificial Sequence
  Oligonucleotide primer for the detection of SNP TSC0016109
atttataatttt

SEQ ID NO: 294426 - DNA, 12 bp, Artificial Sequence
  Oligonucleotide primer for the detection of SNP TSC0016109
ttcataattcta

SEQ ID NO: 294427 - DNA, 12 bp, Artificial Sequence
  Oligonucleotide primer for the detection of SNP TSC0016109
taataattatgt

SEQ ID NO: 294428 - DNA, 12 bp, Artificial Sequence
  Oligonucleotide primer for the detection of SNP TSC0016110
actacaataatc

SEQ ID NO: 294429 - DNA, 12 bp, Artificial Sequence
  Oligonucleotide primer for the detection of SNP TSC0016110
tgttagaatttg

SEQ ID NO: 294430 - DNA, 12 bp, Artificial Sequence
  Oligonucleotide primer for the detection of SNP TSC0016110
cgttagaatttg

SEQ ID NO: 294431 - DNA, 12 bp, Artificial Sequence
  Oligonucleotide primer for the detection of SNP TSC0016110
tgttagaattcg

SEQ ID NO: 294432 - DNA, 12 bp, Artificial Sequence
  Oligonucleotide primer for the detection of SNP TSC0016110
cgttagaattcg

SEQ ID NO: 294433 - DNA, 12 bp, Artificial Sequence
  Oligonucleotide primer for the detection of SNP TSC0016114
acctcacatcct

SEQ ID NO: 294434 - DNA, 12 bp, Artificial Sequence
  Oligonucleotide primer for the detection of SNP TSC0016114
acctcacgtcct

SEQ ID NO: 294435 - DNA, 12 bp, Artificial Sequence
  Oligonucleotide primer for the detection of SNP TSC0016114
gttttttggaga

SEQ ID NO: 294436 - DNA, 12 bp, Artificial Sequence
  Oligonucleotide primer for the detection of SNP TSC0016115
ccaacctcataa

SEQ ID NO: 294437 - DNA, 12 bp, Artificial Sequence
  Oligonucleotide primer for the detection of SNP TSC0016115
attaaaagttat

SEQ ID NO: 294438 - DNA, 12 bp, Artificial Sequence
  Oligonucleotide primer for the detection of SNP TSC0016115
cactaaaaatta

SEQ ID NO: 294439 - DNA, 12 bp, Artificial Sequence
  Oligonukleotid-Primer
atttagttttat

SEQ ID NO: 294440 - DNA, 12 bp, Artificial Sequence
  Oligonucleotide primer for the detection of SNP TSC0016118
gaaatatagtaa

SEQ ID NO: 294441 - DNA, 12 bp, Artificial Sequence
  Oligonucleotide primer for the detection of SNP TSC0016119
tctataaataac

SEQ ID NO: 294442 - DNA, 12 bp, Artificial Sequence
  Oligonucleotide primer for the detection of SNP TSC0016119
ttaaattagttg

SEQ ID NO: 294443 - DNA, 12 bp, Artificial Sequence
  Oligonukleotid-Primer
ccaaactaatta

SEQ ID NO: 294444 - DNA, 12 bp, Artificial Sequence
  Oligonucleotide primer for the detection of SNP TSC0016119
tttgtaagtggt

SEQ ID NO: 294445 - DNA, 12 bp, Artificial Sequence
  Oligonucleotide primer for the detection of SNP TSC0016123
aactaaatataa

SEQ ID NO: 294446 - DNA, 12 bp, Artificial Sequence
  Oligonucleotide primer for the detection of SNP TSC0016123
tttagataaatt

SEQ ID NO: 294447 - DNA, 12 bp, Artificial Sequence
  Oligonucleotide primer for the detection of SNP TSC0016123
ttcaaataaacc

SEQ ID NO: 294448 - DNA, 12 bp, Artificial Sequence
  Oligonucleotide primer for the detection of SNP TSC0016123
ggttggatatgg

SEQ ID NO: 294449 - DNA, 12 bp, Artificial Sequence
  Oligonucleotide primer for the detection of SNP TSC0016124
aaaaaaaatact

SEQ ID NO: 294450 - DNA, 12 bp, Artificial Sequence
  Oligonucleotide primer for the detection of SNP TSC0016124
atttgatttaaa

SEQ ID NO: 294451 - DNA, 12 bp, Artificial Sequence
  Oligonukleotid-Primer
taatagtagtgg

SEQ ID NO: 294452 - DNA, 12 bp, Artificial Sequence
  Oligonucleotide primer for the detection of SNP TSC0016128
actccattctac

SEQ ID NO: 294453 - DNA, 12 bp, Artificial Sequence
  Oligonucleotide primer for the detection of SNP TSC0016128
attttggttatg

SEQ ID NO: 294454 - DNA, 12 bp, Artificial Sequence
  Oligonucleotide primer for the detection of SNP TSC0016128
attttggttacg

SEQ ID NO: 294455 - DNA, 12 bp, Artificial Sequence
  Oligonukleotid-Primer
aaactaaaatcg

SEQ ID NO: 294456 - DNA, 12 bp, Artificial Sequence
  Oligonucleotide primer for the detection of SNP TSC0016130
gtggtggtgtga

SEQ ID NO: 294457 - DNA, 12 bp, Artificial Sequence
  Oligonucleotide primer for the detection of SNP TSC0016130
gcggtggtgtga

SEQ ID NO: 294458 - DNA, 12 bp, Artificial Sequence
  Oligonucleotide primer for the detection of SNP TSC0016130
gtggtggcgtga

SEQ ID NO: 294459 - DNA, 12 bp, Artificial Sequence
  Oligonucleotide primer for the detection of SNP TSC0016130
gtggtggtgcga

SEQ ID NO: 294460 - DNA, 12 bp, Artificial Sequence
  Oligonucleotide primer for the detection of SNP TSC0016130
gcggtggcgtga

SEQ ID NO: 294461 - DNA, 12 bp, Artificial Sequence
  Oligonucleotide primer for the detection of SNP TSC0016130
gcggtggtgcga

SEQ ID NO: 294462 - DNA, 12 bp, Artificial Sequence
  Oligonucleotide primer for the detection of SNP TSC0016130
gtggtggcgcga

SEQ ID NO: 294463 - DNA, 12 bp, Artificial Sequence
  Oligonucleotide primer for the detection of SNP TSC0016130
gcggtggcgcga

SEQ ID NO: 294464 - DNA, 12 bp, Artificial Sequence
  Oligonucleotide primer for the detection of SNP TSC0016130
acgataacacaa

SEQ ID NO: 294465 - DNA, 12 bp, Artificial Sequence
  Oligonucleotide primer for the detection of SNP TSC0016130
acgataacacga

SEQ ID NO: 294466 - DNA, 12 bp, Artificial Sequence
  Oligonucleotide primer for the detection of SNP TSC0016130
acgataacgcaa

SEQ ID NO: 294467 - DNA, 12 bp, Artificial Sequence
  Oligonucleotide primer for the detection of SNP TSC0016130
acgataacgcga

SEQ ID NO: 294468 - DNA, 12 bp, Artificial Sequence
  Oligonucleotide primer for the detection of SNP TSC0016130
attgtagtgagt

SEQ ID NO: 294469 - DNA, 12 bp, Artificial Sequence
  Oligonucleotide primer for the detection of SNP TSC0016133
taaatcaaaact

SEQ ID NO: 294470 - DNA, 12 bp, Artificial Sequence
  Oligonucleotide primer for the detection of SNP TSC0016133
tggagttaagtt

SEQ ID NO: 294471 - DNA, 12 bp, Artificial Sequence
  Oligonucleotide primer for the detection of SNP TSC0016133
taaaaccaaacc

SEQ ID NO: 294472 - DNA, 12 bp, Artificial Sequence
  Oligonucleotide primer for the detection of SNP TSC0016133
taagttagggtt

SEQ ID NO: 294473 - DNA, 12 bp, Artificial Sequence
  Oligonucleotide primer for the detection of SNP TSC0016134
tgaaaattttga

SEQ ID NO: 294474 - DNA, 12 bp, Artificial Sequence
  Oligonucleotide primer for the detection of SNP TSC0016134
taaaaactttaa

SEQ ID NO: 294475 - DNA, 12 bp, Artificial Sequence
  Oligonucleotide primer for the detection of SNP TSC0016134
gtaaagagttat

SEQ ID NO: 294476 - DNA, 12 bp, Artificial Sequence
  Oligonucleotide primer for the detection of SNP TSC0016135
acataataacac

SEQ ID NO: 294477 - DNA, 12 bp, Artificial Sequence
  Oligonucleotide primer for the detection of SNP TSC0016135
gcataataacac

SEQ ID NO: 294478 - DNA, 12 bp, Artificial Sequence
  Oligonucleotide primer for the detection of SNP TSC0016138
ttctccctatat

SEQ ID NO: 294479 - DNA, 12 bp, Artificial Sequence
  Oligonucleotide primer for the detection of SNP TSC0016138
tttttaggagta

SEQ ID NO: 294480 - DNA, 12 bp, Artificial Sequence
  Oligonucleotide primer for the detection of SNP TSC0016138
ccctcaaaaaca

SEQ ID NO: 294481 - DNA, 12 bp, Artificial Sequence
  Oligonucleotide primer for the detection of SNP TSC0016139
ataataatcaaa

SEQ ID NO: 294482 - DNA, 12 bp, Artificial Sequence
  Oligonucleotide primer for the detection of SNP TSC0016139
tatatagggaga

SEQ ID NO: 294483 - DNA, 12 bp, Artificial Sequence
  Oligonucleotide primer for the detection of SNP TSC0016139
gtaataattagg

SEQ ID NO: 294484 - DNA, 12 bp, Artificial Sequence
  Oligonucleotide primer for the detection of SNP TSC0016140
actttttactac

SEQ ID NO: 294485 - DNA, 12 bp, Artificial Sequence
  Oligonucleotide primer for the detection of SNP TSC0016140
ttaatgatagga

SEQ ID NO: 294486 - DNA, 12 bp, Artificial Sequence
  Oligonucleotide primer for the detection of SNP TSC0016143
taaacccctatc

SEQ ID NO: 294487 - DNA, 12 bp, Artificial Sequence
  Oligonucleotide primer for the detection of SNP TSC0016143
tttagatttaag

SEQ ID NO: 294488 - DNA, 12 bp, Artificial Sequence
  Oligonucleotide primer for the detection of SNP TSC0016145
ctatataaaacc

SEQ ID NO: 294489 - DNA, 12 bp, Artificial Sequence
  Oligonucleotide primer for the detection of SNP TSC0016145
ggttttttgaga

SEQ ID NO: 294490 - DNA, 12 bp, Artificial Sequence
  Oligonucleotide primer for the detection of SNP TSC0016146
taaaataaacta

SEQ ID NO: 294491 - DNA, 12 bp, Artificial Sequence
  Oligonucleotide primer for the detection of SNP TSC0016146
aataaaattaag

SEQ ID NO: 294492 - DNA, 12 bp, Artificial Sequence
  Oligonucleotide primer for the detection of SNP TSC0016146
aataaaattaaa

SEQ ID NO: 294493 - DNA, 12 bp, Artificial Sequence
  Oligonucleotide primer for the detection of SNP TSC0016146
taaaataagtta

SEQ ID NO: 294494 - DNA, 12 bp, Artificial Sequence
  Oligonucleotide primer for the detection of SNP TSC0016149
ttctaaatcaat

SEQ ID NO: 294495 - DNA, 12 bp, Artificial Sequence
  Oligonucleotide primer for the detection of SNP TSC0016149
tttgtaggataa

SEQ ID NO: 294496 - DNA, 12 bp, Artificial Sequence
  Oligonucleotide primer for the detection of SNP TSC0016150
acccccattaac

SEQ ID NO: 294497 - DNA, 12 bp, Artificial Sequence
  Oligonucleotide primer for the detection of SNP TSC0016150
acccccgttaac

SEQ ID NO: 294498 - DNA, 12 bp, Artificial Sequence
  Oligonucleotide primer for the detection of SNP TSC0016150
gtgttttggtta

SEQ ID NO: 294499 - DNA, 12 bp, Artificial Sequence
  Oligonucleotide primer for the detection of SNP TSC0016150
gcgttttggtta

SEQ ID NO: 294500 - DNA, 12 bp, Artificial Sequence
  Oligonucleotide primer for the detection of SNP TSC0016151
aaataacaactt

SEQ ID NO: 294501 - DNA, 12 bp, Artificial Sequence
  Oligonucleotide primer for the detection of SNP TSC0016151
cctttaatccaa

SEQ ID NO: 294502 - DNA, 12 bp, Artificial Sequence
  Oligonucleotide primer for the detection of SNP TSC0016151
gagtggtaattt

SEQ ID NO: 294503 - DNA, 12 bp, Artificial Sequence
  Oligonucleotide primer for the detection of SNP TSC0016152
gatattttttaa

SEQ ID NO: 294504 - DNA, 12 bp, Artificial Sequence
  Oligonucleotide primer for the detection of SNP TSC0016153
tcaatactcttt

SEQ ID NO: 294505 - DNA, 12 bp, Artificial Sequence
  Oligonucleotide primer for the detection of SNP TSC0016153
ccattcttttac

SEQ ID NO: 294506 - DNA, 12 bp, Artificial Sequence
  Oligonucleotide primer for the detection of SNP TSC0016153
ttaatatttttt

SEQ ID NO: 294507 - DNA, 12 bp, Artificial Sequence
  Oligonucleotide primer for the detection of SNP TSC0016154
aacttaaacatc

SEQ ID NO: 294508 - DNA, 12 bp, Artificial Sequence
  Oligonucleotide primer for the detection of SNP TSC0016154
tggtattgtaaa

SEQ ID NO: 294509 - DNA, 12 bp, Artificial Sequence
  Oligonucleotide primer for the detection of SNP TSC0016155
atattgtggttt

SEQ ID NO: 294510 - DNA, 12 bp, Artificial Sequence
  Oligonucleotide primer for the detection of SNP TSC0016155
atatcgtggttt

SEQ ID NO: 294511 - DNA, 12 bp, Artificial Sequence
  Oligonucleotide primer for the detection of SNP TSC0016155
atatcataactc

SEQ ID NO: 294512 - DNA, 12 bp, Artificial Sequence
  Oligonucleotide primer for the detection of SNP TSC0016155
atatcgtaactc

SEQ ID NO: 294513 - DNA, 12 bp, Artificial Sequence
  Oligonucleotide primer for the detection of SNP TSC0016155
tagaattatagg

SEQ ID NO: 294514 - DNA, 12 bp, Artificial Sequence
  Oligonucleotide primer for the detection of SNP TSC0016156
tttgtgtagggt

SEQ ID NO: 294515 - DNA, 12 bp, Artificial Sequence
  Oligonucleotide primer for the detection of SNP TSC0016156
ttatacaaaata

SEQ ID NO: 294516 - DNA, 12 bp, Artificial Sequence
  Oligonucleotide primer for the detection of SNP TSC0016156
ggaagataaaaa

SEQ ID NO: 294517 - DNA, 12 bp, Artificial Sequence
  Oligonucleotide primer for the detection of SNP TSC0016157
aaaccaaaacaa

SEQ ID NO: 294518 - DNA, 12 bp, Artificial Sequence
  Oligonucleotide primer for the detection of SNP TSC0016157
atttttaggtat

SEQ ID NO: 294519 - DNA, 12 bp, Artificial Sequence
  Oligonucleotide primer for the detection of SNP TSC0016157
actcccaaacat

SEQ ID NO: 294520 - DNA, 12 bp, Artificial Sequence
  Oligonucleotide primer for the detection of SNP TSC0016157
gggttagggtaa

SEQ ID NO: 294521 - DNA, 12 bp, Artificial Sequence
  Oligonucleotide primer for the detection of SNP TSC0016158
atccccaataaa

SEQ ID NO: 294522 - DNA, 12 bp, Artificial Sequence
  Oligonucleotide primer for the detection of SNP TSC0016158
ttgtatattttt

SEQ ID NO: 294523 - DNA, 12 bp, Artificial Sequence
  Oligonucleotide primer for the detection of SNP TSC0016158
tatacaccttta

SEQ ID NO: 294524 - DNA, 12 bp, Artificial Sequence
  Oligonucleotide primer for the detection of SNP TSC0016159
ggttttattttt

SEQ ID NO: 294525 - DNA, 12 bp, Artificial Sequence
  Oligonucleotide primer for the detection of SNP TSC0016159
ggttttattttc

SEQ ID NO: 294526 - DNA, 12 bp, Artificial Sequence
  Oligonucleotide primer for the detection of SNP TSC0016159
taattctattct

SEQ ID NO: 294527 - DNA, 12 bp, Artificial Sequence
  Oligonucleotide primer for the detection of SNP TSC0016159
aaaaaagagaga

SEQ ID NO: 294528 - DNA, 12 bp, Artificial Sequence
  Oligonucleotide primer for the detection of SNP TSC0016162
taataaaaataa

SEQ ID NO: 294529 - DNA, 12 bp, Artificial Sequence
  Oligonucleotide primer for the detection of SNP TSC0016162
atatggggaaat

SEQ ID NO: 294530 - DNA, 12 bp, Artificial Sequence
  Oligonucleotide primer for the detection of SNP TSC0016162
atacggggaaat

SEQ ID NO: 294531 - DNA, 12 bp, Artificial Sequence
  Oligonucleotide primer for the detection of SNP TSC0016162
acacaaaaaaac

SEQ ID NO: 294532 - DNA, 12 bp, Artificial Sequence
  Oligonukleotid-Primer
acacgaaaaaac

SEQ ID NO: 294533 - DNA, 12 bp, Artificial Sequence
  Oligonucleotide primer for the detection of SNP TSC0016162
tagtagagatgg

SEQ ID NO: 294534 - DNA, 12 bp, Artificial Sequence
  Oligonucleotide primer for the detection of SNP TSC0016163
acaaatatacac

SEQ ID NO: 294535 - DNA, 12 bp, Artificial Sequence
  Oligonucleotide primer for the detection of SNP TSC0016163
acaaatatacgc

SEQ ID NO: 294536 - DNA, 12 bp, Artificial Sequence
  Oligonucleotide primer for the detection of SNP TSC0016163
agttaggtgtgg

SEQ ID NO: 294537 - DNA, 12 bp, Artificial Sequence
  Oligonucleotide primer for the detection of SNP TSC0016163
agttaggcgtgg

SEQ ID NO: 294538 - DNA, 12 bp, Artificial Sequence
  Oligonucleotide primer for the detection of SNP TSC0016164
taaatataaacc

SEQ ID NO: 294539 - DNA, 12 bp, Artificial Sequence
  Oligonucleotide primer for the detection of SNP TSC0016164
ttaagggttagg

SEQ ID NO: 294540 - DNA, 12 bp, Artificial Sequence
  Oligonucleotide primer for the detection of SNP TSC0016164
ttaaaaaccaaa

SEQ ID NO: 294541 - DNA, 12 bp, Artificial Sequence
  Oligonucleotide primer for the detection of SNP TSC0016164
taggtgtgagtt

SEQ ID NO: 294542 - DNA, 12 bp, Artificial Sequence
  Oligonucleotide primer for the detection of SNP TSC0016166
cttcttaaaact

SEQ ID NO: 294543 - DNA, 12 bp, Artificial Sequence
  Oligonucleotide primer for the detection of SNP TSC0016166
aaaagaaaaaaa

SEQ ID NO: 294544 - DNA, 12 bp, Artificial Sequence
  Oligonucleotide primer for the detection of SNP TSC0016169
ccatcctatcct

SEQ ID NO: 294545 - DNA, 12 bp, Artificial Sequence
  Oligonucleotide primer for the detection of SNP TSC0016169
gagagatagtta

SEQ ID NO: 294546 - DNA, 12 bp, Artificial Sequence
  Oligonucleotide primer for the detection of SNP TSC0016170
tacccactatcc

SEQ ID NO: 294547 - DNA, 12 bp, Artificial Sequence
  Oligonucleotide primer for the detection of SNP TSC0016171
ttaacctatact

SEQ ID NO: 294548 - DNA, 12 bp, Artificial Sequence
  Oligonucleotide primer for the detection of SNP TSC0016171
aaggttttttaa

SEQ ID NO: 294549 - DNA, 12 bp, Artificial Sequence
  Oligonucleotide primer for the detection of SNP TSC0016175
ttatattttatt

SEQ ID NO: 294550 - DNA, 12 bp, Artificial Sequence
  Oligonucleotide primer for the detection of SNP TSC0016175
tgttttaaaata

SEQ ID NO: 294551 - DNA, 12 bp, Artificial Sequence
  Oligonucleotide primer for the detection of SNP TSC0016175
tacttcaaaata

SEQ ID NO: 294552 - DNA, 12 bp, Artificial Sequence
  Oligonucleotide primer for the detection of SNP TSC0016175
gtgttttgtttc

SEQ ID NO: 294553 - DNA, 12 bp, Artificial Sequence
  Oligonucleotide primer for the detection of SNP TSC0016177
ataaaaaaacat

SEQ ID NO: 294554 - DNA, 12 bp, Artificial Sequence
  Oligonucleotide primer for the detection of SNP TSC0016177
ataaaaaaacgt

SEQ ID NO: 294555 - DNA, 12 bp, Artificial Sequence
  Oligonucleotide primer for the detection of SNP TSC0016177
tttgggtgaggg

SEQ ID NO: 294556 - DNA, 12 bp, Artificial Sequence
  Oligonucleotide primer for the detection of SNP TSC0016178
ctaattaaaaat

SEQ ID NO: 294557 - DNA, 12 bp, Artificial Sequence
  Oligonucleotide primer for the detection of SNP TSC0016179
ctataacttaat

SEQ ID NO: 294558 - DNA, 12 bp, Artificial Sequence
  Oligonucleotide primer for the detection of SNP TSC0016179
gataatttagga

SEQ ID NO: 294559 - DNA, 12 bp, Artificial Sequence
  Oligonucleotide primer for the detection of SNP TSC0016180
aactaaaatcac

SEQ ID NO: 294560 - DNA, 12 bp, Artificial Sequence
  Oligonucleotide primer for the detection of SNP TSC0016180
aactaaaatcgc

SEQ ID NO: 294561 - DNA, 12 bp, Artificial Sequence
  Oligonucleotide primer for the detection of SNP TSC0016180
tagagtgtagtg

SEQ ID NO: 294562 - DNA, 12 bp, Artificial Sequence
  Oligonucleotide primer for the detection of SNP TSC0016181
actctatttttc

SEQ ID NO: 294563 - DNA, 12 bp, Artificial Sequence
  Oligonucleotide primer for the detection of SNP TSC0016184
aaaaatcatcat

SEQ ID NO: 294564 - DNA, 12 bp, Artificial Sequence
  Oligonucleotide primer for the detection of SNP TSC0016184
attagtaggaag

SEQ ID NO: 294565 - DNA, 12 bp, Artificial Sequence
  Oligonucleotide primer for the detection of SNP TSC0016186
ccaccttaaaaa

SEQ ID NO: 294566 - DNA, 12 bp, Artificial Sequence
  Oligonucleotide primer for the detection of SNP TSC0016186
ttgtttggtaat

SEQ ID NO: 294567 - DNA, 12 bp, Artificial Sequence
  Oligonucleotide primer for the detection of SNP TSC0016186
ctatctaacaac

SEQ ID NO: 294568 - DNA, 12 bp, Artificial Sequence
  Oligonucleotide primer for the detection of SNP TSC0016186
ttattttgggag

SEQ ID NO: 294569 - DNA, 12 bp, Artificial Sequence
  Oligonucleotide primer for the detection of SNP TSC0016187
catatattccta

SEQ ID NO: 294570 - DNA, 12 bp, Artificial Sequence
  Oligonucleotide primer for the detection of SNP TSC0016187
ccattcaaccct

SEQ ID NO: 294571 - DNA, 12 bp, Artificial Sequence
  Oligonucleotide primer for the detection of SNP TSC0016187
tatgtgtttttg

SEQ ID NO: 294572 - DNA, 12 bp, Artificial Sequence
  Oligonucleotide primer for the detection of SNP TSC0016188
actaatttccaa

SEQ ID NO: 294573 - DNA, 12 bp, Artificial Sequence
  Oligonucleotide primer for the detection of SNP TSC0016188
atttattatttt

SEQ ID NO: 294574 - DNA, 12 bp, Artificial Sequence
  Oligonucleotide primer for the detection of SNP TSC0016188
acatctattacc

SEQ ID NO: 294575 - DNA, 12 bp, Artificial Sequence
  Oligonucleotide primer for the detection of SNP TSC0016188
ggtttttagttt

SEQ ID NO: 294576 - DNA, 12 bp, Artificial Sequence
  Oligonucleotide primer for the detection of SNP TSC0016190
caaacattttaa

SEQ ID NO: 294577 - DNA, 12 bp, Artificial Sequence
  Oligonucleotide primer for the detection of SNP TSC0016190
agtaaatgtatt

SEQ ID NO: 294578 - DNA, 12 bp, Artificial Sequence
  Oligonucleotide primer for the detection of SNP TSC0016190
aacaaatatatt

SEQ ID NO: 294579 - DNA, 12 bp, Artificial Sequence
  Oligonucleotide primer for the detection of SNP TSC0016190
taaatattttgg

SEQ ID NO: 294580 - DNA, 12 bp, Artificial Sequence
  Oligonucleotide primer for the detection of SNP TSC0016191
taaaacaaaacc

SEQ ID NO: 294581 - DNA, 12 bp, Artificial Sequence
  Oligonucleotide primer for the detection of SNP TSC0016191
gtgatttatgtt

SEQ ID NO: 294582 - DNA, 12 bp, Artificial Sequence
  Oligonucleotide primer for the detection of SNP TSC0016191
ataacctatact

SEQ ID NO: 294583 - DNA, 12 bp, Artificial Sequence
  Oligonucleotide primer for the detection of SNP TSC0016191
tagaatagggtt

SEQ ID NO: 294584 - DNA, 12 bp, Artificial Sequence
  Oligonucleotide primer for the detection of SNP TSC0016192
gggttttgatta

SEQ ID NO: 294585 - DNA, 12 bp, Artificial Sequence
  Oligonucleotide primer for the detection of SNP TSC0016192
gggtttcgatta

SEQ ID NO: 294586 - DNA, 12 bp, Artificial Sequence
  Oligonucleotide primer for the detection of SNP TSC0016192
aaactccaacta

SEQ ID NO: 294587 - DNA, 12 bp, Artificial Sequence
  Oligonucleotide primer for the detection of SNP TSC0016192
aaactccgacta

SEQ ID NO: 294588 - DNA, 12 bp, Artificial Sequence
  Oligonucleotide primer for the detection of SNP TSC0016192
gaaaaggggttt

SEQ ID NO: 294589 - DNA, 12 bp, Artificial Sequence
  Oligonucleotide primer for the detection of SNP TSC0016193
gggagaaattta

SEQ ID NO: 294590 - DNA, 12 bp, Artificial Sequence
  Oligonucleotide primer for the detection of SNP TSC0016194
ttacaacaaaac

SEQ ID NO: 294591 - DNA, 12 bp, Artificial Sequence
  Oligonucleotide primer for the detection of SNP TSC0016194
ttttgtttaagg

SEQ ID NO: 294592 - DNA, 12 bp, Artificial Sequence
  Oligonucleotide primer for the detection of SNP TSC0016195
aaaaaactattc

SEQ ID NO: 294593 - DNA, 12 bp, Artificial Sequence
  Oligonucleotide primer for the detection of SNP TSC0016195
ttagatattgat

SEQ ID NO: 294594 - DNA, 12 bp, Artificial Sequence
  Oligonucleotide primer for the detection of SNP TSC0016195
aaatactaacaa

SEQ ID NO: 294595 - DNA, 12 bp, Artificial Sequence
  Oligonucleotide primer for the detection of SNP TSC0016195
agaaaattgttt

SEQ ID NO: 294596 - DNA, 12 bp, Artificial Sequence
  Oligonucleotide primer for the detection of SNP TSC0016196
aaatccaaattt

SEQ ID NO: 294597 - DNA, 12 bp, Artificial Sequence
  Oligonucleotide primer for the detection of SNP TSC0016196
aaatccgaattt

SEQ ID NO: 294598 - DNA, 12 bp, Artificial Sequence
  Oligonucleotide primer for the detection of SNP TSC0016196
gggatttggggg

SEQ ID NO: 294599 - DNA, 12 bp, Artificial Sequence
  Oligonucleotide primer for the detection of SNP TSC0016197
caaatccaaatt

SEQ ID NO: 294600 - DNA, 12 bp, Artificial Sequence
  Oligonucleotide primer for the detection of SNP TSC0016197
caaatccgaatt

SEQ ID NO: 294601 - DNA, 12 bp, Artificial Sequence
  Oligonucleotide primer for the detection of SNP TSC0016197
atttgggggtta

SEQ ID NO: 294602 - DNA, 12 bp, Artificial Sequence
  Oligonucleotide primer for the detection of SNP TSC0016197
acctaaaaatta

SEQ ID NO: 294603 - DNA, 12 bp, Artificial Sequence
  Oligonucleotide primer for the detection of SNP TSC0016197
taggtttggatt

SEQ ID NO: 294604 - DNA, 12 bp, Artificial Sequence
  Oligonucleotide primer for the detection of SNP TSC0016197
taggttcggatt

SEQ ID NO: 294605 - DNA, 12 bp, Artificial Sequence
  Oligonucleotide primer for the detection of SNP TSC0016198
aaacctacaata

SEQ ID NO: 294606 - DNA, 12 bp, Artificial Sequence
  Oligonucleotide primer for the detection of SNP TSC0016198
ccccctcctccc

SEQ ID NO: 294607 - DNA, 12 bp, Artificial Sequence
  Oligonucleotide primer for the detection of SNP TSC0016198
gagtttgtagtg

SEQ ID NO: 294608 - DNA, 12 bp, Artificial Sequence
  Oligonucleotide primer for the detection of SNP TSC0016204
gtagttatatta

SEQ ID NO: 294609 - DNA, 12 bp, Artificial Sequence
  Oligonucleotide primer for the detection of SNP TSC0016204
ataaccacatta

SEQ ID NO: 294610 - DNA, 12 bp, Artificial Sequence
  Oligonucleotide primer for the detection of SNP TSC0016204
aaagagtaatgt

SEQ ID NO: 294611 - DNA, 12 bp, Artificial Sequence
  Oligonucleotide primer for the detection of SNP TSC0016205
attgggagttag

SEQ ID NO: 294612 - DNA, 12 bp, Artificial Sequence
  Oligonucleotide primer for the detection of SNP TSC0016206
caaccaacttac

SEQ ID NO: 294613 - DNA, 12 bp, Artificial Sequence
  Oligonucleotide primer for the detection of SNP TSC0016206
ttttggtttttc

SEQ ID NO: 294614 - DNA, 12 bp, Artificial Sequence
  Oligonucleotide primer for the detection of SNP TSC0016206
tttcggtttttc

SEQ ID NO: 294615 - DNA, 12 bp, Artificial Sequence
  Oligonucleotide primer for the detection of SNP TSC0016206
tcccaatctctc

SEQ ID NO: 294616 - DNA, 12 bp, Artificial Sequence
  Oligonucleotide primer for the detection of SNP TSC0016206
tcccgatctctc

SEQ ID NO: 294617 - DNA, 12 bp, Artificial Sequence
  Oligonucleotide primer for the detection of SNP TSC0016206
tagttaatttgt

SEQ ID NO: 294618 - DNA, 12 bp, Artificial Sequence
  Oligonucleotide primer for the detection of SNP TSC0016206
tagttaatttgc

SEQ ID NO: 294619 - DNA, 12 bp, Artificial Sequence
  Oligonucleotide primer for the detection of SNP TSC0016207
caaccaatctcc

SEQ ID NO: 294620 - DNA, 12 bp, Artificial Sequence
  Oligonucleotide primer for the detection of SNP TSC0016207
ttgtagatagaa

SEQ ID NO: 294621 - DNA, 12 bp, Artificial Sequence
  Oligonucleotide primer for the detection of SNP TSC0016207
tcgtagatagaa

SEQ ID NO: 294622 - DNA, 12 bp, Artificial Sequence
  Oligonucleotide primer for the detection of SNP TSC0016208
cccacatcaaaa

SEQ ID NO: 294623 - DNA, 12 bp, Artificial Sequence
  Oligonucleotide primer for the detection of SNP TSC0016208
cccacgtcaaaa

SEQ ID NO: 294624 - DNA, 12 bp, Artificial Sequence
  Oligonucleotide primer for the detection of SNP TSC0016208
ttctaacccaat

SEQ ID NO: 294625 - DNA, 12 bp, Artificial Sequence
  Oligonukleotid-Primer
tttatgttagaa

SEQ ID NO: 294626 - DNA, 12 bp, Artificial Sequence
  Oligonucleotide primer for the detection of SNP TSC0016208
tttacgttagaa

SEQ ID NO: 294627 - DNA, 12 bp, Artificial Sequence
  Oligonucleotide primer for the detection of SNP TSC0016210
aatcaaaaaaaa

SEQ ID NO: 294628 - DNA, 12 bp, Artificial Sequence
  Oligonucleotide primer for the detection of SNP TSC0016210
ggtttttagtag

SEQ ID NO: 294629 - DNA, 12 bp, Artificial Sequence
  Oligonucleotide primer for the detection of SNP TSC0016210
attttcaacaaa

SEQ ID NO: 294630 - DNA, 12 bp, Artificial Sequence
  Oligonucleotide primer for the detection of SNP TSC0016210
agttagaaaagg

SEQ ID NO: 294631 - DNA, 12 bp, Artificial Sequence
  Oligonucleotide primer for the detection of SNP TSC0016211
ctaaacaaataa

SEQ ID NO: 294632 - DNA, 12 bp, Artificial Sequence
  Oligonucleotide primer for the detection of SNP TSC0016211
tgatattaattt

SEQ ID NO: 294633 - DNA, 12 bp, Artificial Sequence
  Oligonucleotide primer for the detection of SNP TSC0016211
taatattaatct

SEQ ID NO: 294634 - DNA, 12 bp, Artificial Sequence
  Oligonucleotide primer for the detection of SNP TSC0016211
ttaagtaagtag

SEQ ID NO: 294635 - DNA, 12 bp, Artificial Sequence
  Oligonucleotide primer for the detection of SNP TSC0016212
aaattcctaaac

SEQ ID NO: 294636 - DNA, 12 bp, Artificial Sequence
  Oligonucleotide primer for the detection of SNP TSC0016212
ttaatttgtggg

SEQ ID NO: 294637 - DNA, 12 bp, Artificial Sequence
  Oligonucleotide primer for the detection of SNP TSC0016212
ttaatttgcggg

SEQ ID NO: 294638 - DNA, 12 bp, Artificial Sequence
  Oligonucleotide primer for the detection of SNP TSC0016213
taatatcataat

SEQ ID NO: 294639 - DNA, 12 bp, Artificial Sequence
  Oligonucleotide primer for the detection of SNP TSC0016213
gttattgattag

SEQ ID NO: 294640 - DNA, 12 bp, Artificial Sequence
  Oligonucleotide primer for the detection of SNP TSC0016213
gttatcgattag

SEQ ID NO: 294641 - DNA, 12 bp, Artificial Sequence
  Oligonucleotide primer for the detection of SNP TSC0016214
ttaatatcataa

SEQ ID NO: 294642 - DNA, 12 bp, Artificial Sequence
  Oligonucleotide primer for the detection of SNP TSC0016214
ttgattagttat

SEQ ID NO: 294643 - DNA, 12 bp, Artificial Sequence
  Oligonucleotide primer for the detection of SNP TSC0016214
tcgattagttat

SEQ ID NO: 294644 - DNA, 12 bp, Artificial Sequence
  Oligonucleotide primer for the detection of SNP TSC0016214
ccaactaactac

SEQ ID NO: 294645 - DNA, 12 bp, Artificial Sequence
  Oligonucleotide primer for the detection of SNP TSC0016214
ccgactaactac

SEQ ID NO: 294646 - DNA, 12 bp, Artificial Sequence
  Oligonucleotide primer for the detection of SNP TSC0016214
ttaatattatag

SEQ ID NO: 294647 - DNA, 12 bp, Artificial Sequence
  Oligonucleotide primer for the detection of SNP TSC0016215
cttccctatatc

SEQ ID NO: 294648 - DNA, 12 bp, Artificial Sequence
  Oligonucleotide primer for the detection of SNP TSC0016215
tgaggatagttg

SEQ ID NO: 294649 - DNA, 12 bp, Artificial Sequence
  Oligonucleotide primer for the detection of SNP TSC0016215
tgaggatagtcg

SEQ ID NO: 294650 - DNA, 12 bp, Artificial Sequence
  Oligonucleotide primer for the detection of SNP TSC0016215
taaaaacaatcg

SEQ ID NO: 294651 - DNA, 12 bp, Artificial Sequence
  Oligonucleotide primer for the detection of SNP TSC0016215
tttttttgtgtc

SEQ ID NO: 294652 - DNA, 12 bp, Artificial Sequence
  Oligonucleotide primer for the detection of SNP TSC0016216
acaacaccacct

SEQ ID NO: 294653 - DNA, 12 bp, Artificial Sequence
  Oligonucleotide primer for the detection of SNP TSC0016216
acaacaccgcct

SEQ ID NO: 294654 - DNA, 12 bp, Artificial Sequence
  Oligonucleotide primer for the detection of SNP TSC0016216
gtggagagttgg

SEQ ID NO: 294655 - DNA, 12 bp, Artificial Sequence
  Oligonucleotide primer for the detection of SNP TSC0016216
ataaaaaactaa

SEQ ID NO: 294656 - DNA, 12 bp, Artificial Sequence
  Oligonucleotide primer for the detection of SNP TSC0016216
gtaatattgttt

SEQ ID NO: 294657 - DNA, 12 bp, Artificial Sequence
  Oligonucleotide primer for the detection of SNP TSC0016216
gtaatatcgttt

SEQ ID NO: 294658 - DNA, 12 bp, Artificial Sequence
  Oligonucleotide primer for the detection of SNP TSC0016217
aaaacaatattt

SEQ ID NO: 294659 - DNA, 12 bp, Artificial Sequence
  Oligonucleotide primer for the detection of SNP TSC0016217
attaatagttat

SEQ ID NO: 294660 - DNA, 12 bp, Artificial Sequence
  Oligonucleotide primer for the detection of SNP TSC0016217
attaataaccac

SEQ ID NO: 294661 - DNA, 12 bp, Artificial Sequence
  Oligonucleotide primer for the detection of SNP TSC0016217
aaaatagtattt

SEQ ID NO: 294662 - DNA, 12 bp, Artificial Sequence
  Oligonucleotide primer for the detection of SNP TSC0016218
aaccataaaccg

SEQ ID NO: 294663 - DNA, 12 bp, Artificial Sequence
  Oligonucleotide primer for the detection of SNP TSC0016218
tagggattggta

SEQ ID NO: 294664 - DNA, 12 bp, Artificial Sequence
  Oligonucleotide primer for the detection of SNP TSC0016218
caaaaactaata

SEQ ID NO: 294665 - DNA, 12 bp, Artificial Sequence
  Oligonucleotide primer for the detection of SNP TSC0016218
ggttatggattg

SEQ ID NO: 294666 - DNA, 12 bp, Artificial Sequence
  Oligonucleotide primer for the detection of SNP TSC0016218
ggttatggatcg

SEQ ID NO: 294667 - DNA, 12 bp, Artificial Sequence
  Oligonucleotide primer for the detection of SNP TSC0016224
ataccgttacac

SEQ ID NO: 294668 - DNA, 12 bp, Artificial Sequence
  Oligonucleotide primer for the detection of SNP TSC0016224
gtaccattacac

SEQ ID NO: 294669 - DNA, 12 bp, Artificial Sequence
  Oligonucleotide primer for the detection of SNP TSC0016224
gtaccgttacac

SEQ ID NO: 294670 - DNA, 12 bp, Artificial Sequence
  Oligonucleotide primer for the detection of SNP TSC0016224
ttgtttaggttg

SEQ ID NO: 294671 - DNA, 12 bp, Artificial Sequence
  Oligonucleotide primer for the detection of SNP TSC0016224
tgttgttgtatt

SEQ ID NO: 294672 - DNA, 12 bp, Artificial Sequence
  Oligonucleotide primer for the detection of SNP TSC0016224
tgtcgttgtatt

SEQ ID NO: 294673 - DNA, 12 bp, Artificial Sequence
  Oligonucleotide primer for the detection of SNP TSC0016225
ctcctaaaaata

SEQ ID NO: 294674 - DNA, 12 bp, Artificial Sequence
  Oligonucleotide primer for the detection of SNP TSC0016225
tttagttaattt

SEQ ID NO: 294675 - DNA, 12 bp, Artificial Sequence
  Oligonucleotide primer for the detection of SNP TSC0016225
tccaactaattt

SEQ ID NO: 294676 - DNA, 12 bp, Artificial Sequence
  Oligonucleotide primer for the detection of SNP TSC0016225
tttttaaaaata

SEQ ID NO: 294677 - DNA, 12 bp, Artificial Sequence
  Oligonucleotide primer for the detection of SNP TSC0016226
cctcaataatac

SEQ ID NO: 294678 - DNA, 12 bp, Artificial Sequence
  Oligonucleotide primer for the detection of SNP TSC0016226
tgtttttgtttg

SEQ ID NO: 294679 - DNA, 12 bp, Artificial Sequence
  Oligonucleotide primer for the detection of SNP TSC0016227
aactttatttat

SEQ ID NO: 294680 - DNA, 12 bp, Artificial Sequence
  Oligonucleotide primer for the detection of SNP TSC0016228
aaaaaaataatt

SEQ ID NO: 294681 - DNA, 12 bp, Artificial Sequence
  Oligonucleotide primer for the detection of SNP TSC0016228
ttggttttaaaa

SEQ ID NO: 294682 - DNA, 12 bp, Artificial Sequence
  Oligonucleotide primer for the detection of SNP TSC0016229
caacacttcccc

SEQ ID NO: 294683 - DNA, 12 bp, Artificial Sequence
  Oligonucleotide primer for the detection of SNP TSC0016229
tttttggaattg

SEQ ID NO: 294684 - DNA, 12 bp, Artificial Sequence
  Oligonucleotide primer for the detection of SNP TSC0016230
ggttttgatgtg

SEQ ID NO: 294685 - DNA, 12 bp, Artificial Sequence
  Oligonucleotide primer for the detection of SNP TSC0016231
acaacaaactct

SEQ ID NO: 294686 - DNA, 12 bp, Artificial Sequence
  Oligonucleotide primer for the detection of SNP TSC0016231
tatatttgaaaa

SEQ ID NO: 294687 - DNA, 12 bp, Artificial Sequence
  Oligonucleotide primer for the detection of SNP TSC0016232
acaacaaaaacg

SEQ ID NO: 294688 - DNA, 12 bp, Artificial Sequence
  Oligonucleotide primer for the detection of SNP TSC0016232
acgacaaaaaca

SEQ ID NO: 294689 - DNA, 12 bp, Artificial Sequence
  Oligonucleotide primer for the detection of SNP TSC0016232
acgacaaaaacg

SEQ ID NO: 294690 - DNA, 12 bp, Artificial Sequence
  Oligonucleotide primer for the detection of SNP TSC0016232
ttattattttct

SEQ ID NO: 294691 - DNA, 12 bp, Artificial Sequence
  Oligonucleotide primer for the detection of SNP TSC0016232
atgataaaaatg

SEQ ID NO: 294692 - DNA, 12 bp, Artificial Sequence
  Oligonucleotide primer for the detection of SNP TSC0016232
acgataaaaatg

SEQ ID NO: 294693 - DNA, 12 bp, Artificial Sequence
  Oligonucleotide primer for the detection of SNP TSC0016232
atgataaaaacg

SEQ ID NO: 294694 - DNA, 12 bp, Artificial Sequence
  Oligonukleotid-Primer
acgataaaaacg

SEQ ID NO: 294695 - DNA, 12 bp, Artificial Sequence
  Oligonucleotide primer for the detection of SNP TSC0016233
cttttcactcca

SEQ ID NO: 294696 - DNA, 12 bp, Artificial Sequence
  Oligonucleotide primer for the detection of SNP TSC0016233
cttttcactccg

SEQ ID NO: 294697 - DNA, 12 bp, Artificial Sequence
  Oligonucleotide primer for the detection of SNP TSC0016233
cttttcgctcca

SEQ ID NO: 294698 - DNA, 12 bp, Artificial Sequence
  Oligonucleotide primer for the detection of SNP TSC0016233
cttttcgctccg

SEQ ID NO: 294699 - DNA, 12 bp, Artificial Sequence
  Oligonucleotide primer for the detection of SNP TSC0016233
ttcgtttttgtt

SEQ ID NO: 294700 - DNA, 12 bp, Artificial Sequence
  Oligonucleotide primer for the detection of SNP TSC0016233
tttgttttcgtt

SEQ ID NO: 294701 - DNA, 12 bp, Artificial Sequence
  Oligonucleotide primer for the detection of SNP TSC0016233
ttcgttttcgtt

SEQ ID NO: 294702 - DNA, 12 bp, Artificial Sequence
  Oligonucleotide primer for the detection of SNP TSC0016233
tttcattctcac

SEQ ID NO: 294703 - DNA, 12 bp, Artificial Sequence
  Oligonucleotide primer for the detection of SNP TSC0016233
tttcattctcgc

SEQ ID NO: 294704 - DNA, 12 bp, Artificial Sequence
  Oligonucleotide primer for the detection of SNP TSC0016233
tttcgttctcac

SEQ ID NO: 294705 - DNA, 12 bp, Artificial Sequence
  Oligonucleotide primer for the detection of SNP TSC0016233
tttcgttctcgc

SEQ ID NO: 294706 - DNA, 12 bp, Artificial Sequence
  Oligonucleotide primer for the detection of SNP TSC0016233
tttttcgttttg

SEQ ID NO: 294707 - DNA, 12 bp, Artificial Sequence
  Oligonucleotide primer for the detection of SNP TSC0016233
ttttttgtttcg

SEQ ID NO: 294708 - DNA, 12 bp, Artificial Sequence
  Oligonucleotide primer for the detection of SNP TSC0016233
tttttcgtttcg

SEQ ID NO: 294709 - DNA, 12 bp, Artificial Sequence
  Oligonucleotide primer for the detection of SNP TSC0016238
acacacacgcaa

SEQ ID NO: 294710 - DNA, 12 bp, Artificial Sequence
  Oligonucleotide primer for the detection of SNP TSC0016238
acgcacacacaa

SEQ ID NO: 294711 - DNA, 12 bp, Artificial Sequence
  Oligonucleotide primer for the detection of SNP TSC0016238
acgcacacgcaa

SEQ ID NO: 294712 - DNA, 12 bp, Artificial Sequence
  Oligonucleotide primer for the detection of SNP TSC0016238
aaatatagaagg

SEQ ID NO: 294713 - DNA, 12 bp, Artificial Sequence
  Oligonucleotide primer for the detection of SNP TSC0016238
aaatacaaaaaa

SEQ ID NO: 294714 - DNA, 12 bp, Artificial Sequence
  Oligonucleotide primer for the detection of SNP TSC0016238
tatgtatatgta

SEQ ID NO: 294715 - DNA, 12 bp, Artificial Sequence
  Oligonucleotide primer for the detection of SNP TSC0016238
tacgtatatgta

SEQ ID NO: 294716 - DNA, 12 bp, Artificial Sequence
  Oligonucleotide primer for the detection of SNP TSC0016238
tatgtatacgta

SEQ ID NO: 294717 - DNA, 12 bp, Artificial Sequence
  Oligonucleotide primer for the detection of SNP TSC0016238
tacgtatacgta

SEQ ID NO: 294718 - DNA, 12 bp, Artificial Sequence
  Oligonucleotide primer for the detection of SNP TSC0016239
aactattacctc

SEQ ID NO: 294719 - DNA, 12 bp, Artificial Sequence
  Oligonucleotide primer for the detection of SNP TSC0016239
gtgtttagagtg

SEQ ID NO: 294720 - DNA, 12 bp, Artificial Sequence
  Oligonucleotide primer for the detection of SNP TSC0016239
atctaaaataaa

SEQ ID NO: 294721 - DNA, 12 bp, Artificial Sequence
  Oligonucleotide primer for the detection of SNP TSC0016239
gattattatttt

SEQ ID NO: 294722 - DNA, 12 bp, Artificial Sequence
  Oligonucleotide primer for the detection of SNP TSC0016240
ctctaacctcaa

SEQ ID NO: 294723 - DNA, 12 bp, Artificial Sequence
  Oligonucleotide primer for the detection of SNP TSC0016240
agtatttttttt

SEQ ID NO: 294724 - DNA, 12 bp, Artificial Sequence
  Oligonucleotide primer for the detection of SNP TSC0016240
aacatccctcct

SEQ ID NO: 294725 - DNA, 12 bp, Artificial Sequence
  Oligonucleotide primer for the detection of SNP TSC0016240
ttttggttttaa

SEQ ID NO: 294726 - DNA, 12 bp, Artificial Sequence
  Oligonucleotide primer for the detection of SNP TSC0016241
aaaaaattacct

SEQ ID NO: 294727 - DNA, 12 bp, Artificial Sequence
  Oligonucleotide primer for the detection of SNP TSC0016241
gggtaggagtta

SEQ ID NO: 294728 - DNA, 12 bp, Artificial Sequence
  Oligonucleotide primer for the detection of SNP TSC0016241
gggagattgttt

SEQ ID NO: 294729 - DNA, 12 bp, Artificial Sequence
  Oligonucleotide primer for the detection of SNP TSC0016244
tttacatcctat

SEQ ID NO: 294730 - DNA, 12 bp, Artificial Sequence
  Oligonucleotide primer for the detection of SNP TSC0016244
taatttttttaa

SEQ ID NO: 294731 - DNA, 12 bp, Artificial Sequence
  Oligonucleotide primer for the detection of SNP TSC0016245
aacctaaattac

SEQ ID NO: 294732 - DNA, 12 bp, Artificial Sequence
  Oligonucleotide primer for the detection of SNP TSC0016245
gtttttttcgtg

SEQ ID NO: 294733 - DNA, 12 bp, Artificial Sequence
  Oligonucleotide primer for the detection of SNP TSC0016246
cactacaacctc

SEQ ID NO: 294734 - DNA, 12 bp, Artificial Sequence
  Oligonucleotide primer for the detection of SNP TSC0016246
gaatttgggagg

SEQ ID NO: 294735 - DNA, 12 bp, Artificial Sequence
  Oligonucleotide primer for the detection of SNP TSC0016246
gaattcgggagg

SEQ ID NO: 294736 - DNA, 12 bp, Artificial Sequence
  Oligonucleotide primer for the detection of SNP TSC0016251
ccaaaacaacta

SEQ ID NO: 294737 - DNA, 12 bp, Artificial Sequence
  Oligonucleotide primer for the detection of SNP TSC0016251
aaaacccatctc

SEQ ID NO: 294738 - DNA, 12 bp, Artificial Sequence
  Oligonucleotide primer for the detection of SNP TSC0016251
tttaaggtaatt

SEQ ID NO: 294739 - DNA, 12 bp, Artificial Sequence
  Oligonucleotide primer for the detection of SNP TSC0016252
caacctctactt

SEQ ID NO: 294740 - DNA, 12 bp, Artificial Sequence
  Oligonucleotide primer for the detection of SNP TSC0016252
gtttatagttat

SEQ ID NO: 294741 - DNA, 12 bp, Artificial Sequence
  Oligonucleotide primer for the detection of SNP TSC0016252
tacccacaacca

SEQ ID NO: 294742 - DNA, 12 bp, Artificial Sequence
  Oligonucleotide primer for the detection of SNP TSC0016253
tttaatacccct

SEQ ID NO: 294743 - DNA, 12 bp, Artificial Sequence
  Oligonucleotide primer for the detection of SNP TSC0016253
tgttgggttttg

SEQ ID NO: 294744 - DNA, 12 bp, Artificial Sequence
  Oligonucleotide primer for the detection of SNP TSC0016255
ataaaattctta

SEQ ID NO: 294745 - DNA, 12 bp, Artificial Sequence
  Oligonucleotide primer for the detection of SNP TSC0016255
tttattttgggt

SEQ ID NO: 294746 - DNA, 12 bp, Artificial Sequence
  Oligonucleotide primer for the detection of SNP TSC0016255
tccactttaaat

SEQ ID NO: 294747 - DNA, 12 bp, Artificial Sequence
  Oligonucleotide primer for the detection of SNP TSC0016255
atagggtttttg

SEQ ID NO: 294748 - DNA, 12 bp, Artificial Sequence
  Oligonucleotide primer for the detection of SNP TSC0016256
atctctacaaaa

SEQ ID NO: 294749 - DNA, 12 bp, Artificial Sequence
  Oligonucleotide primer for the detection of SNP TSC0016256
atttttataaaa

SEQ ID NO: 294750 - DNA, 12 bp, Artificial Sequence
  Oligonucleotide primer for the detection of SNP TSC0016257
accaaccataat

SEQ ID NO: 294751 - DNA, 12 bp, Artificial Sequence
  Oligonucleotide primer for the detection of SNP TSC0016257
gaaggggtagta

SEQ ID NO: 294752 - DNA, 12 bp, Artificial Sequence
  Oligonucleotide primer for the detection of SNP TSC0016258
aaaacaccacac

SEQ ID NO: 294753 - DNA, 12 bp, Artificial Sequence
  Oligonucleotide primer for the detection of SNP TSC0016258
aaaacaccgcac

SEQ ID NO: 294754 - DNA, 12 bp, Artificial Sequence
  Oligonucleotide primer for the detection of SNP TSC0016258
gttaaggattga

SEQ ID NO: 294755 - DNA, 12 bp, Artificial Sequence
  Oligonucleotide primer for the detection of SNP TSC0016260
acccttactttc

SEQ ID NO: 294756 - DNA, 12 bp, Artificial Sequence
  Oligonucleotide primer for the detection of SNP TSC0016260
gcccttactttc

SEQ ID NO: 294757 - DNA, 12 bp, Artificial Sequence
  Oligonucleotide primer for the detection of SNP TSC0016260
ttttttttggag

SEQ ID NO: 294758 - DNA, 12 bp, Artificial Sequence
  Oligonucleotide primer for the detection of SNP TSC0016260
cttcccttaaaa

SEQ ID NO: 294759 - DNA, 12 bp, Artificial Sequence
  Oligonucleotide primer for the detection of SNP TSC0016264
ccaaataattct

SEQ ID NO: 294760 - DNA, 12 bp, Artificial Sequence
  Oligonucleotide primer for the detection of SNP TSC0016264
gaggttgaggta

SEQ ID NO: 294761 - DNA, 12 bp, Artificial Sequence
  Oligonucleotide primer for the detection of SNP TSC0016265
ccttaacttctc

SEQ ID NO: 294762 - DNA, 12 bp, Artificial Sequence
  Oligonucleotide primer for the detection of SNP TSC0016265
gtaaaaggagat

SEQ ID NO: 294763 - DNA, 12 bp, Artificial Sequence
  Oligonukleotid-Primer
gtaaaaggagac

SEQ ID NO: 294764 - DNA, 12 bp, Artificial Sequence
  Oligonucleotide primer for the detection of SNP TSC0016266
taaaaatacttt

SEQ ID NO: 294765 - DNA, 12 bp, Artificial Sequence
  Oligonucleotide primer for the detection of SNP TSC0016266
gttgtagaatag

SEQ ID NO: 294766 - DNA, 12 bp, Artificial Sequence
  Oligonucleotide primer for the detection of SNP TSC0016266
actacaaaataa

SEQ ID NO: 294767 - DNA, 12 bp, Artificial Sequence
  Oligonukleotid-Primer
ccccaaaacaat

SEQ ID NO: 294768 - DNA, 12 bp, Artificial Sequence
  Oligonucleotide primer for the detection of SNP TSC0016268
ccccgaaacaat

SEQ ID NO: 294769 - DNA, 12 bp, Artificial Sequence
  Oligonucleotide primer for the detection of SNP TSC0016268
ttgatagagata

SEQ ID NO: 294770 - DNA, 12 bp, Artificial Sequence
  Oligonucleotide primer for the detection of SNP TSC0016269
aaaaaaaccttt

SEQ ID NO: 294771 - DNA, 12 bp, Artificial Sequence
  Oligonucleotide primer for the detection of SNP TSC0016269
ttttttctttta

SEQ ID NO: 294772 - DNA, 12 bp, Artificial Sequence
  Oligonucleotide primer for the detection of SNP TSC0016269
aaaaagattttt

SEQ ID NO: 294773 - DNA, 12 bp, Artificial Sequence
  Oligonucleotide primer for the detection of SNP TSC0016272
acacataatacc

SEQ ID NO: 294774 - DNA, 12 bp, Artificial Sequence
  Oligonucleotide primer for the detection of SNP TSC0016272
gagggttatagg

SEQ ID NO: 294775 - DNA, 12 bp, Artificial Sequence
  Oligonukleotid-Primer
acccaattcatt

SEQ ID NO: 294776 - DNA, 12 bp, Artificial Sequence
  Oligonucleotide primer for the detection of SNP TSC0016274
agtttttgggta

SEQ ID NO: 294777 - DNA, 12 bp, Artificial Sequence
  Oligonucleotide primer for the detection of SNP TSC0016278
ttttatccttct

SEQ ID NO: 294778 - DNA, 12 bp, Artificial Sequence
  Oligonucleotide primer for the detection of SNP TSC0016278
gagggttttgag

SEQ ID NO: 294779 - DNA, 12 bp, Artificial Sequence
  Oligonukleotid-Primer
cccactcctcct

SEQ ID NO: 294780 - DNA, 12 bp, Artificial Sequence
  Oligonucleotide primer for the detection of SNP TSC0016279
agaaatgagtta

SEQ ID NO: 294781 - DNA, 12 bp, Artificial Sequence
  Oligonucleotide primer for the detection of SNP TSC0016280
gttgaattgatg

SEQ ID NO: 294782 - DNA, 12 bp, Artificial Sequence
  Oligonucleotide primer for the detection of SNP TSC0016281
aaaaactactcc

SEQ ID NO: 294783 - DNA, 12 bp, Artificial Sequence
  Oligonukleotid-Primer
gagttttttggg

SEQ ID NO: 294784 - DNA, 12 bp, Artificial Sequence
  Oligonucleotide primer for the detection of SNP TSC0016281
aaactctctaaa

SEQ ID NO: 294785 - DNA, 12 bp, Artificial Sequence
  Oligonucleotide primer for the detection of SNP TSC0016281
ggaggttgtttt

SEQ ID NO: 294786 - DNA, 12 bp, Artificial Sequence
  Oligonucleotide primer for the detection of SNP TSC0016282
agtttttggggt

SEQ ID NO: 294787 - DNA, 12 bp, Artificial Sequence
  Oligonucleotide primer for the detection of SNP TSC0016282
aacctttaaaat

SEQ ID NO: 294788 - DNA, 12 bp, Artificial Sequence
  Oligonucleotide primer for the detection of SNP TSC0016283
aacaattataca

SEQ ID NO: 294789 - DNA, 12 bp, Artificial Sequence
  Oligonucleotide primer for the detection of SNP TSC0016283
aacaattatacg

SEQ ID NO: 294790 - DNA, 12 bp, Artificial Sequence
  Oligonucleotide primer for the detection of SNP TSC0016283
aacgattataca

SEQ ID NO: 294791 - DNA, 12 bp, Artificial Sequence
  Oligonucleotide primer for the detection of SNP TSC0016283
aacgattatacg

SEQ ID NO: 294792 - DNA, 12 bp, Artificial Sequence
  Oligonucleotide primer for the detection of SNP TSC0016283
ctcccaaacttc

SEQ ID NO: 294793 - DNA, 12 bp, Artificial Sequence
  Oligonucleotide primer for the detection of SNP TSC0016283
agtggttatatg

SEQ ID NO: 294794 - DNA, 12 bp, Artificial Sequence
  Oligonucleotide primer for the detection of SNP TSC0016283
agcggttatatg

SEQ ID NO: 294795 - DNA, 12 bp, Artificial Sequence
  Oligonucleotide primer for the detection of SNP TSC0016283
agtggttatacg

SEQ ID NO: 294796 - DNA, 12 bp, Artificial Sequence
  Oligonucleotide primer for the detection of SNP TSC0016283
agcggttatacg

SEQ ID NO: 294797 - DNA, 12 bp, Artificial Sequence
  Oligonucleotide primer for the detection of SNP TSC0016285
ttaacataaccc

SEQ ID NO: 294798 - DNA, 12 bp, Artificial Sequence
  Oligonucleotide primer for the detection of SNP TSC0016285
ggttaatgtttg

SEQ ID NO: 294799 - DNA, 12 bp, Artificial Sequence
  Oligonucleotide primer for the detection of SNP TSC0016286
acacaaaacaaa

SEQ ID NO: 294800 - DNA, 12 bp, Artificial Sequence
  Oligonucleotide primer for the detection of SNP TSC0016286
ggtggtgtagat

SEQ ID NO: 294801 - DNA, 12 bp, Artificial Sequence
  Oligonucleotide primer for the detection of SNP TSC0016286
aataatacaaac

SEQ ID NO: 294802 - DNA, 12 bp, Artificial Sequence
  Oligonucleotide primer for the detection of SNP TSC0016286
gtatagggtagg

SEQ ID NO: 294803 - DNA, 12 bp, Artificial Sequence
  Oligonucleotide primer for the detection of SNP TSC0016288
cctactcaaaaa

SEQ ID NO: 294804 - DNA, 12 bp, Artificial Sequence
  Oligonucleotide primer for the detection of SNP TSC0016288
cttctacctcaa

SEQ ID NO: 294805 - DNA, 12 bp, Artificial Sequence
  Oligonucleotide primer for the detection of SNP TSC0016288
tttatttaggag

SEQ ID NO: 294806 - DNA, 12 bp, Artificial Sequence
  Oligonucleotide primer for the detection of SNP TSC0016289
aaactaaatata

SEQ ID NO: 294807 - DNA, 12 bp, Artificial Sequence
  Oligonucleotide primer for the detection of SNP TSC0016289
tgaggtttatgg

SEQ ID NO: 294808 - DNA, 12 bp, Artificial Sequence
  Oligonucleotide primer for the detection of SNP TSC0016289
tgaggtttacgg

SEQ ID NO: 294809 - DNA, 12 bp, Artificial Sequence
  Oligonucleotide primer for the detection of SNP TSC0016289
taaaacctacaa

SEQ ID NO: 294810 - DNA, 12 bp, Artificial Sequence
  Oligonucleotide primer for the detection of SNP TSC0016289
taaaacctacga

SEQ ID NO: 294811 - DNA, 12 bp, Artificial Sequence
  Oligonucleotide primer for the detection of SNP TSC0016289
agagttgggtgt

SEQ ID NO: 294812 - DNA, 12 bp, Artificial Sequence
  Oligonucleotide primer for the detection of SNP TSC0016290
tagggtgagatt

SEQ ID NO: 294813 - DNA, 12 bp, Artificial Sequence
  Oligonucleotide primer for the detection of SNP TSC0016290
acaaaataaaac

SEQ ID NO: 294814 - DNA, 12 bp, Artificial Sequence
  Oligonucleotide primer for the detection of SNP TSC0016291
gaaggtaatgaa

SEQ ID NO: 294815 - DNA, 12 bp, Artificial Sequence
  Oligonucleotide primer for the detection of SNP TSC0016293
taacaaactttc

SEQ ID NO: 294816 - DNA, 12 bp, Artificial Sequence
  Oligonucleotide primer for the detection of SNP TSC0016293
gtgttagattta

SEQ ID NO: 294817 - DNA, 12 bp, Artificial Sequence
  Oligonucleotide primer for the detection of SNP TSC0016294
atatattctctt

SEQ ID NO: 294818 - DNA, 12 bp, Artificial Sequence
  Oligonucleotide primer for the detection of SNP TSC0016294
gttttttagatg

SEQ ID NO: 294819 - DNA, 12 bp, Artificial Sequence
  Oligonucleotide primer for the detection of SNP TSC0016295
aaaattaccaaa

SEQ ID NO: 294820 - DNA, 12 bp, Artificial Sequence
  Oligonucleotide primer for the detection of SNP TSC0016295
aaaattaccgaa

SEQ ID NO: 294821 - DNA, 12 bp, Artificial Sequence
  Oligonucleotide primer for the detection of SNP TSC0016295
ttttttaatttg

SEQ ID NO: 294822 - DNA, 12 bp, Artificial Sequence
  Oligonucleotide primer for the detection of SNP TSC0016296
ttccctaattac

SEQ ID NO: 294823 - DNA, 12 bp, Artificial Sequence
  Oligonucleotide primer for the detection of SNP TSC0016296
aattttatttaa

SEQ ID NO: 294824 - DNA, 12 bp, Artificial Sequence
  Oligonucleotide primer for the detection of SNP TSC0016298
atatacatccta

SEQ ID NO: 294825 - DNA, 12 bp, Artificial Sequence
  Oligonucleotide primer for the detection of SNP TSC0016298
atatacgtccta

SEQ ID NO: 294826 - DNA, 12 bp, Artificial Sequence
  Oligonucleotide primer for the detection of SNP TSC0016298
tttagtataagg

SEQ ID NO: 294827 - DNA, 12 bp, Artificial Sequence
  Oligonucleotide primer for the detection of SNP TSC0016298
cttaacataaaa

SEQ ID NO: 294828 - DNA, 12 bp, Artificial Sequence
  Oligonucleotide primer for the detection of SNP TSC0016298
atgtatgttttg

SEQ ID NO: 294829 - DNA, 12 bp, Artificial Sequence
  Oligonucleotide primer for the detection of SNP TSC0016298
atgtacgttttg

SEQ ID NO: 294830 - DNA, 12 bp, Artificial Sequence
  Oligonucleotide primer for the detection of SNP TSC0016299
tccaaacatacc

SEQ ID NO: 294831 - DNA, 12 bp, Artificial Sequence
  Oligonucleotide primer for the detection of SNP TSC0016299
tccaaacgtacc

SEQ ID NO: 294832 - DNA, 12 bp, Artificial Sequence
  Oligonucleotide primer for the detection of SNP TSC0016299
gtttattgtgtg

SEQ ID NO: 294833 - DNA, 12 bp, Artificial Sequence
  Oligonucleotide primer for the detection of SNP TSC0016300
atataaaaatta

SEQ ID NO: 294834 - DNA, 12 bp, Artificial Sequence
  Oligonucleotide primer for the detection of SNP TSC0016300
attattatatta

SEQ ID NO: 294835 - DNA, 12 bp, Artificial Sequence
  Oligonucleotide primer for the detection of SNP TSC0016300
caccacaccaaa

SEQ ID NO: 294836 - DNA, 12 bp, Artificial Sequence
  Oligonucleotide primer for the detection of SNP TSC0016300
aatataaaaatt

SEQ ID NO: 294837 - DNA, 12 bp, Artificial Sequence
  Oligonucleotide primer for the detection of SNP TSC0016301
tataaactcccc

SEQ ID NO: 294838 - DNA, 12 bp, Artificial Sequence
  Oligonucleotide primer for the detection of SNP TSC0016301
attgtatgtgga

SEQ ID NO: 294839 - DNA, 12 bp, Artificial Sequence
  Oligonucleotide primer for the detection of SNP TSC0016302
aatactcacaaa

SEQ ID NO: 294840 - DNA, 12 bp, Artificial Sequence
  Oligonucleotide primer for the detection of SNP TSC0016302
ataaggaggatt

SEQ ID NO: 294841 - DNA, 12 bp, Artificial Sequence
  Oligonucleotide primer for the detection of SNP TSC0016302
aggtatttatag

SEQ ID NO: 294842 - DNA, 12 bp, Artificial Sequence
  Oligonucleotide primer for the detection of SNP TSC0016303
aaatcaaccaat

SEQ ID NO: 294843 - DNA, 12 bp, Artificial Sequence
  Oligonucleotide primer for the detection of SNP TSC0016303
aaatcaaccgat

SEQ ID NO: 294844 - DNA, 12 bp, Artificial Sequence
  Oligonucleotide primer for the detection of SNP TSC0016303
ttcactaaccta

SEQ ID NO: 294845 - DNA, 12 bp, Artificial Sequence
  Oligonucleotide primer for the detection of SNP TSC0016303
gagttaattgat

SEQ ID NO: 294846 - DNA, 12 bp, Artificial Sequence
  Oligonucleotide primer for the detection of SNP TSC0016303
gagttaatcgat

SEQ ID NO: 294847 - DNA, 12 bp, Artificial Sequence
  Oligonucleotide primer for the detection of SNP TSC0016306
cccccaaattaa

SEQ ID NO: 294848 - DNA, 12 bp, Artificial Sequence
  Oligonucleotide primer for the detection of SNP TSC0016306
ttttttatgaat

SEQ ID NO: 294849 - DNA, 12 bp, Artificial Sequence
  Oligonucleotide primer for the detection of SNP TSC0016306
ttttccataaat

SEQ ID NO: 294850 - DNA, 12 bp, Artificial Sequence
  Oligonucleotide primer for the detection of SNP TSC0016306
gtttttaaatta

SEQ ID NO: 294851 - DNA, 12 bp, Artificial Sequence
  Oligonucleotide primer for the detection of SNP TSC0016307
atataacttact

SEQ ID NO: 294852 - DNA, 12 bp, Artificial Sequence
  Oligonucleotide primer for the detection of SNP TSC0016307
gaaggtaaggag

SEQ ID NO: 294853 - DNA, 12 bp, Artificial Sequence
  Oligonucleotide primer for the detection of SNP TSC0016312
aaaaacacttaa

SEQ ID NO: 294854 - DNA, 12 bp, Artificial Sequence
  Oligonucleotide primer for the detection of SNP TSC0016312
ttgtttgtaggt

SEQ ID NO: 294855 - DNA, 12 bp, Artificial Sequence
  Oligonucleotide primer for the detection of SNP TSC0016312
ctatttacaaat

SEQ ID NO: 294856 - DNA, 12 bp, Artificial Sequence
  Oligonucleotide primer for the detection of SNP TSC0016313
acccacaacaaa

SEQ ID NO: 294857 - DNA, 12 bp, Artificial Sequence
  Oligonucleotide primer for the detection of SNP TSC0016313
acccacaacgaa

SEQ ID NO: 294858 - DNA, 12 bp, Artificial Sequence
  Oligonucleotide primer for the detection of SNP TSC0016313
acccacgacaaa

SEQ ID NO: 294859 - DNA, 12 bp, Artificial Sequence
  Oligonucleotide primer for the detection of SNP TSC0016313
acccacgacgaa

SEQ ID NO: 294860 - DNA, 12 bp, Artificial Sequence
  Oligonukleotid-Primer
gtttgtttttta

SEQ ID NO: 294861 - DNA, 12 bp, Artificial Sequence
  Oligonucleotide primer for the detection of SNP TSC0016313
acttactcctca

SEQ ID NO: 294862 - DNA, 12 bp, Artificial Sequence
  Oligonucleotide primer for the detection of SNP TSC0016313
atttatgatggg

SEQ ID NO: 294863 - DNA, 12 bp, Artificial Sequence
  Oligonucleotide primer for the detection of SNP TSC0016313
atttacgatggg

SEQ ID NO: 294864 - DNA, 12 bp, Artificial Sequence
  Oligonucleotide primer for the detection of SNP TSC0016313
atttatgacggg

SEQ ID NO: 294865 - DNA, 12 bp, Artificial Sequence
  Oligonucleotide primer for the detection of SNP TSC0016313
atttacgacggg

SEQ ID NO: 294866 - DNA, 12 bp, Artificial Sequence
  Oligonucleotide primer for the detection of SNP TSC0016314
tctcaaccccac

SEQ ID NO: 294867 - DNA, 12 bp, Artificial Sequence
  Oligonucleotide primer for the detection of SNP TSC0016314
tctcgaccccac

SEQ ID NO: 294868 - DNA, 12 bp, Artificial Sequence
  Oligonucleotide primer for the detection of SNP TSC0016314
tggttattttaa

SEQ ID NO: 294869 - DNA, 12 bp, Artificial Sequence
  Oligonucleotide primer for the detection of SNP TSC0016315
tcttaaactaaa

SEQ ID NO: 294870 - DNA, 12 bp, Artificial Sequence
  Oligonucleotide primer for the detection of SNP TSC0016315
agtgaaggggaa

SEQ ID NO: 294871 - DNA, 12 bp, Artificial Sequence
  Oligonucleotide primer for the detection of SNP TSC0016315
ttttgggttgga

SEQ ID NO: 294872 - DNA, 12 bp, Artificial Sequence
  Oligonucleotide primer for the detection of SNP TSC0016317
ataaaacccaaa

SEQ ID NO: 294873 - DNA, 12 bp, Artificial Sequence
  Oligonucleotide primer for the detection of SNP TSC0016317
gtgggaaggtgg

SEQ ID NO: 294874 - DNA, 12 bp, Artificial Sequence
  Oligonucleotide primer for the detection of SNP TSC0016317
tgaagtttaaat

SEQ ID NO: 294875 - DNA, 12 bp, Artificial Sequence
  Oligonucleotide primer for the detection of SNP TSC0016321
aaactttaattc

SEQ ID NO: 294876 - DNA, 12 bp, Artificial Sequence
  Oligonucleotide primer for the detection of SNP TSC0016324
actaacacataa

SEQ ID NO: 294877 - DNA, 12 bp, Artificial Sequence
  Oligonucleotide primer for the detection of SNP TSC0016324
attattagtata

SEQ ID NO: 294878 - DNA, 12 bp, Artificial Sequence
  Oligonucleotide primer for the detection of SNP TSC0016325
cacctccttcta

SEQ ID NO: 294879 - DNA, 12 bp, Artificial Sequence
  Oligonucleotide primer for the detection of SNP TSC0016325
gtttagaagttt

SEQ ID NO: 294880 - DNA, 12 bp, Artificial Sequence
  Oligonucleotide primer for the detection of SNP TSC0016325
acttaaaaatct

SEQ ID NO: 294881 - DNA, 12 bp, Artificial Sequence
  Oligonucleotide primer for the detection of SNP TSC0016325
gcttaaaaatct

SEQ ID NO: 294882 - DNA, 12 bp, Artificial Sequence
  Oligonucleotide primer for the detection of SNP TSC0016326
atccaaataaaa

SEQ ID NO: 294883 - DNA, 12 bp, Artificial Sequence
  Oligonucleotide primer for the detection of SNP TSC0016326
tatatgttgttt

SEQ ID NO: 294884 - DNA, 12 bp, Artificial Sequence
  Oligonucleotide primer for the detection of SNP TSC0016326
catatactactc

SEQ ID NO: 294885 - DNA, 12 bp, Artificial Sequence
  Oligonucleotide primer for the detection of SNP TSC0016326
atttaagtggga

SEQ ID NO: 294886 - DNA, 12 bp, Artificial Sequence
  Oligonucleotide primer for the detection of SNP TSC0016327
tcaccttccctt

SEQ ID NO: 294887 - DNA, 12 bp, Artificial Sequence
  Oligonucleotide primer for the detection of SNP TSC0016327
tcgccttccctt

SEQ ID NO: 294888 - DNA, 12 bp, Artificial Sequence
  Oligonucleotide primer for the detection of SNP TSC0016327
tagagggaggga

SEQ ID NO: 294889 - DNA, 12 bp, Artificial Sequence
  Oligonucleotide primer for the detection of SNP TSC0016328
ttctccctccct

SEQ ID NO: 294890 - DNA, 12 bp, Artificial Sequence
  Oligonucleotide primer for the detection of SNP TSC0016328
ttggtgttttta

SEQ ID NO: 294891 - DNA, 12 bp, Artificial Sequence
  Oligonucleotide primer for the detection of SNP TSC0016329
actacactaaat

SEQ ID NO: 294892 - DNA, 12 bp, Artificial Sequence
  Oligonucleotide primer for the detection of SNP TSC0016329
actacgctaaat

SEQ ID NO: 294893 - DNA, 12 bp, Artificial Sequence
  Oligonucleotide primer for the detection of SNP TSC0016329
ttttttatgtgg

SEQ ID NO: 294894 - DNA, 12 bp, Artificial Sequence
  Oligonucleotide primer for the detection of SNP TSC0016329
ttttttacgtgg

SEQ ID NO: 294895 - DNA, 12 bp, Artificial Sequence
  Oligonucleotide primer for the detection of SNP TSC0016329
ttttttatgcgg

SEQ ID NO: 294896 - DNA, 12 bp, Artificial Sequence
  Oligonucleotide primer for the detection of SNP TSC0016329
ttttttacgcgg

SEQ ID NO: 294897 - DNA, 12 bp, Artificial Sequence
  Oligonucleotide primer for the detection of SNP TSC0016335
taaaaaactaac

SEQ ID NO: 294898 - DNA, 12 bp, Artificial Sequence
  Oligonucleotide primer for the detection of SNP TSC0016336
caacctacttat

SEQ ID NO: 294899 - DNA, 12 bp, Artificial Sequence
  Oligonucleotide primer for the detection of SNP TSC0016336
tatgttttagaa

SEQ ID NO: 294900 - DNA, 12 bp, Artificial Sequence
  Oligonucleotide primer for the detection of SNP TSC0016337
actctctttttt

SEQ ID NO: 294901 - DNA, 12 bp, Artificial Sequence
  Oligonucleotide primer for the detection of SNP TSC0016337
aaatttattggg

SEQ ID NO: 294902 - DNA, 12 bp, Artificial Sequence
  Oligonucleotide primer for the detection of SNP TSC0016338
aatatatcctaa

SEQ ID NO: 294903 - DNA, 12 bp, Artificial Sequence
  Oligonucleotide primer for the detection of SNP TSC0016338
gattggtgaaat

SEQ ID NO: 294904 - DNA, 12 bp, Artificial Sequence
  Oligonucleotide primer for the detection of SNP TSC0016338
attaataaaata

SEQ ID NO: 294905 - DNA, 12 bp, Artificial Sequence
  Oligonucleotide primer for the detection of SNP TSC0016338
gatatattttaa

SEQ ID NO: 294906 - DNA, 12 bp, Artificial Sequence
  Oligonucleotide primer for the detection of SNP TSC0016340
tataacacccac

SEQ ID NO: 294907 - DNA, 12 bp, Artificial Sequence
  Oligonucleotide primer for the detection of SNP TSC0016340
ggtttaggtatg

SEQ ID NO: 294908 - DNA, 12 bp, Artificial Sequence
  Oligonucleotide primer for the detection of SNP TSC0016341
gttttaaaatgt

SEQ ID NO: 294909 - DNA, 12 bp, Artificial Sequence
  Oligonucleotide primer for the detection of SNP TSC0016341
ctctaaaatata

SEQ ID NO: 294910 - DNA, 12 bp, Artificial Sequence
  Oligonucleotide primer for the detection of SNP TSC0016341
taatggagagag

SEQ ID NO: 294911 - DNA, 12 bp, Artificial Sequence
  Oligonucleotide primer for the detection of SNP TSC0016342
aattatattaaa

SEQ ID NO: 294912 - DNA, 12 bp, Artificial Sequence
  Oligonucleotide primer for the detection of SNP TSC0016342
atttttattaat

SEQ ID NO: 294913 - DNA, 12 bp, Artificial Sequence
  Oligonucleotide primer for the detection of SNP TSC0016342
atcctcaccaac

SEQ ID NO: 294914 - DNA, 12 bp, Artificial Sequence
  Oligonucleotide primer for the detection of SNP TSC0016342
aattatgttgaa

SEQ ID NO: 294915 - DNA, 12 bp, Artificial Sequence
  Oligonucleotide primer for the detection of SNP TSC0016347
ttttatgatttg

SEQ ID NO: 294916 - DNA, 12 bp, Artificial Sequence
  Oligonucleotide primer for the detection of SNP TSC0016347
ttttatgattcg

SEQ ID NO: 294917 - DNA, 12 bp, Artificial Sequence
  Oligonucleotide primer for the detection of SNP TSC0016348
tcaataataaat

SEQ ID NO: 294918 - DNA, 12 bp, Artificial Sequence
  Oligonucleotide primer for the detection of SNP TSC0016348
tcgataataaat

SEQ ID NO: 294919 - DNA, 12 bp, Artificial Sequence
  Oligonucleotide primer for the detection of SNP TSC0016348
taatattgttta

SEQ ID NO: 294920 - DNA, 12 bp, Artificial Sequence
  Oligonucleotide primer for the detection of SNP TSC0016348
caacactaccta

SEQ ID NO: 294921 - DNA, 12 bp, Artificial Sequence
  Oligonucleotide primer for the detection of SNP TSC0016348
ttgatagtgggt

SEQ ID NO: 294922 - DNA, 12 bp, Artificial Sequence
  Oligonucleotide primer for the detection of SNP TSC0016348
tcgatagtgggt

SEQ ID NO: 294923 - DNA, 12 bp, Artificial Sequence
  Oligonucleotide primer for the detection of SNP TSC0016349
aggtaggattgt

SEQ ID NO: 294924 - DNA, 12 bp, Artificial Sequence
  Oligonucleotide primer for the detection of SNP TSC0016349
gtgaagtgggag

SEQ ID NO: 294925 - DNA, 12 bp, Artificial Sequence
  Oligonucleotide primer for the detection of SNP TSC0016350
ttactatcctcc

SEQ ID NO: 294926 - DNA, 12 bp, Artificial Sequence
  Oligonucleotide primer for the detection of SNP TSC0016350
ggtgagaattag

SEQ ID NO: 294927 - DNA, 12 bp, Artificial Sequence
  Oligonucleotide primer for the detection of SNP TSC0016351
atacaaactcaa

SEQ ID NO: 294928 - DNA, 12 bp, Artificial Sequence
  Oligonucleotide primer for the detection of SNP TSC0016351
atacaaactcga

SEQ ID NO: 294929 - DNA, 12 bp, Artificial Sequence
  Oligonucleotide primer for the detection of SNP TSC0016351
gatgtgttgggt

SEQ ID NO: 294930 - DNA, 12 bp, Artificial Sequence
  Oligonucleotide primer for the detection of SNP TSC0016351
gatgtgtcgggt

SEQ ID NO: 294931 - DNA, 12 bp, Artificial Sequence
  Oligonucleotide primer for the detection of SNP TSC0016351
aatataccaaac

SEQ ID NO: 294932 - DNA, 12 bp, Artificial Sequence
  Oligonucleotide primer for the detection of SNP TSC0016351
aatataccgaac

SEQ ID NO: 294933 - DNA, 12 bp, Artificial Sequence
  Oligonucleotide primer for the detection of SNP TSC0016351
gtgtaggtttgg

SEQ ID NO: 294934 - DNA, 12 bp, Artificial Sequence
  Oligonucleotide primer for the detection of SNP TSC0016351
gtgtaggttcgg

SEQ ID NO: 294935 - DNA, 12 bp, Artificial Sequence
  Oligonucleotide primer for the detection of SNP TSC0016355
aaccccatctct

SEQ ID NO: 294936 - DNA, 12 bp, Artificial Sequence
  Oligonucleotide primer for the detection of SNP TSC0016356
aaaattacttat

SEQ ID NO: 294937 - DNA, 12 bp, Artificial Sequence
  Oligonucleotide primer for the detection of SNP TSC0016356
ttattatgttta

SEQ ID NO: 294938 - DNA, 12 bp, Artificial Sequence
  Oligonucleotide primer for the detection of SNP TSC0016356
ttactatattca

SEQ ID NO: 294939 - DNA, 12 bp, Artificial Sequence
  Oligonucleotide primer for the detection of SNP TSC0016356
agaattgtttat

SEQ ID NO: 294940 - DNA, 12 bp, Artificial Sequence
  Oligonucleotide primer for the detection of SNP TSC0016361
aaacatcacaaa

SEQ ID NO: 294941 - DNA, 12 bp, Artificial Sequence
  Oligonucleotide primer for the detection of SNP TSC0016361
tttggtttttaa

SEQ ID NO: 294942 - DNA, 12 bp, Artificial Sequence
  Oligonucleotide primer for the detection of SNP TSC0016361
tttaacttttaa

SEQ ID NO: 294943 - DNA, 12 bp, Artificial Sequence
  Oligonucleotide primer for the detection of SNP TSC0016361
agatattataag

SEQ ID NO: 294944 - DNA, 12 bp, Artificial Sequence
  Oligonucleotide primer for the detection of SNP TSC0016362
ccaatcttacat

SEQ ID NO: 294945 - DNA, 12 bp, Artificial Sequence
  Oligonukleotid-Primer
tatttagaagtg

SEQ ID NO: 294946 - DNA, 12 bp, Artificial Sequence
  Oligonucleotide primer for the detection of SNP TSC0016363
atctatacaaat

SEQ ID NO: 294947 - DNA, 12 bp, Artificial Sequence
  Oligonucleotide primer for the detection of SNP TSC0016363
tagtgtatagta

SEQ ID NO: 294948 - DNA, 12 bp, Artificial Sequence
  Oligonucleotide primer for the detection of SNP TSC0016364
actattctctct

SEQ ID NO: 294949 - DNA, 12 bp, Artificial Sequence
  Oligonukleotid-Primer
taaatatattaa

SEQ ID NO: 294950 - DNA, 12 bp, Artificial Sequence
  Oligonucleotide primer for the detection of SNP TSC0016364
caaacatatcaa

SEQ ID NO: 294951 - DNA, 12 bp, Artificial Sequence
  Oligonucleotide primer for the detection of SNP TSC0016365
ctctccaaattc

SEQ ID NO: 294952 - DNA, 12 bp, Artificial Sequence
  Oligonucleotide primer for the detection of SNP TSC0016366
aacataaattac

SEQ ID NO: 294953 - DNA, 12 bp, Artificial Sequence
  Oligonukleotid-Primer
gtgtgattttgg

SEQ ID NO: 294954 - DNA, 12 bp, Artificial Sequence
  Oligonucleotide primer for the detection of SNP TSC0016366
gcgtgattttgg

SEQ ID NO: 294955 - DNA, 12 bp, Artificial Sequence
  Oligonucleotide primer for the detection of SNP TSC0016366
acataatcttaa

SEQ ID NO: 294956 - DNA, 12 bp, Artificial Sequence
  Oligonucleotide primer for the detection of SNP TSC0016366
acgtaatcttaa

SEQ ID NO: 294957 - DNA, 12 bp, Artificial Sequence
  Oligonucleotide primer for the detection of SNP TSC0016366
ggtataggttgt

SEQ ID NO: 294958 - DNA, 12 bp, Artificial Sequence
  Oligonucleotide primer for the detection of SNP TSC0016367
ttttttattttg

SEQ ID NO: 294959 - DNA, 12 bp, Artificial Sequence
  Oligonucleotide primer for the detection of SNP TSC0016367
cctcccacctta

SEQ ID NO: 294960 - DNA, 12 bp, Artificial Sequence
  Oligonucleotide primer for the detection of SNP TSC0016369
cctccaataacc

SEQ ID NO: 294961 - DNA, 12 bp, Artificial Sequence
  Oligonucleotide primer for the detection of SNP TSC0016369
gatgttttgtgg

SEQ ID NO: 294962 - DNA, 12 bp, Artificial Sequence
  Oligonucleotide primer for the detection of SNP TSC0016370
ctcattctatct

SEQ ID NO: 294963 - DNA, 12 bp, Artificial Sequence
  Oligonucleotide primer for the detection of SNP TSC0016370
gaggatattaat

SEQ ID NO: 294964 - DNA, 12 bp, Artificial Sequence
  Oligonucleotide primer for the detection of SNP TSC0016371
tttcctctcatt

SEQ ID NO: 294965 - DNA, 12 bp, Artificial Sequence
  Oligonucleotide primer for the detection of SNP TSC0016371
attttttaagat

SEQ ID NO: 294966 - DNA, 12 bp, Artificial Sequence
  Oligonucleotide primer for the detection of SNP TSC0016372
atacacaaccat

SEQ ID NO: 294967 - DNA, 12 bp, Artificial Sequence
  Oligonucleotide primer for the detection of SNP TSC0016372
attaagttataa

SEQ ID NO: 294968 - DNA, 12 bp, Artificial Sequence
  Oligonucleotide primer for the detection of SNP TSC0016376
atcatcaattta

SEQ ID NO: 294969 - DNA, 12 bp, Artificial Sequence
  Oligonucleotide primer for the detection of SNP TSC0016376
gggtttggatat

SEQ ID NO: 294970 - DNA, 12 bp, Artificial Sequence
  Oligonucleotide primer for the detection of SNP TSC0016376
aaacctaaacac

SEQ ID NO: 294971 - DNA, 12 bp, Artificial Sequence
  Oligonucleotide primer for the detection of SNP TSC0016376
gttattaatttg

SEQ ID NO: 294972 - DNA, 12 bp, Artificial Sequence
  Oligonucleotide primer for the detection of SNP TSC0016381
aataaaaatttt

SEQ ID NO: 294973 - DNA, 12 bp, Artificial Sequence
  Oligonucleotide primer for the detection of SNP TSC0016381
aagtattggggg

SEQ ID NO: 294974 - DNA, 12 bp, Artificial Sequence
  Oligonucleotide primer for the detection of SNP TSC0016386
ttaacttaccaa

SEQ ID NO: 294975 - DNA, 12 bp, Artificial Sequence
  Oligonucleotide primer for the detection of SNP TSC0016386
ttaacttaccga

SEQ ID NO: 294976 - DNA, 12 bp, Artificial Sequence
  Oligonucleotide primer for the detection of SNP TSC0016386
atttagtaggtt

SEQ ID NO: 294977 - DNA, 12 bp, Artificial Sequence
  Oligonucleotide primer for the detection of SNP TSC0016386
atttagtaggtc

SEQ ID NO: 294978 - DNA, 12 bp, Artificial Sequence
  Oligonucleotide primer for the detection of SNP TSC0016386
attcaacaaatc

SEQ ID NO: 294979 - DNA, 12 bp, Artificial Sequence
  Oligonucleotide primer for the detection of SNP TSC0016386
attgatttattg

SEQ ID NO: 294980 - DNA, 12 bp, Artificial Sequence
  Oligonucleotide primer for the detection of SNP TSC0016386
attgatttatcg

SEQ ID NO: 294981 - DNA, 12 bp, Artificial Sequence
  Oligonucleotide primer for the detection of SNP TSC0016387
aaactccatacc

SEQ ID NO: 294982 - DNA, 12 bp, Artificial Sequence
  Oligonucleotide primer for the detection of SNP TSC0016387
gattttttgagg

SEQ ID NO: 294983 - DNA, 12 bp, Artificial Sequence
  Oligonucleotide primer for the detection of SNP TSC0016387
aaccttctaaaa

SEQ ID NO: 294984 - DNA, 12 bp, Artificial Sequence
  Oligonucleotide primer for the detection of SNP TSC0016387
gagttttatgtt

SEQ ID NO: 294985 - DNA, 12 bp, Artificial Sequence
  Oligonucleotide primer for the detection of SNP TSC0016388
aaataaatacac

SEQ ID NO: 294986 - DNA, 12 bp, Artificial Sequence
  Oligonucleotide primer for the detection of SNP TSC0016388
ttttgttttgga

SEQ ID NO: 294987 - DNA, 12 bp, Artificial Sequence
  Oligonucleotide primer for the detection of SNP TSC0016388
ttttgtttcgga

SEQ ID NO: 294988 - DNA, 12 bp, Artificial Sequence
  Oligonucleotide primer for the detection of SNP TSC0016391
acttaaaaacat

SEQ ID NO: 294989 - DNA, 12 bp, Artificial Sequence
  Oligonucleotide primer for the detection of SNP TSC0016391
gttttgggggga

SEQ ID NO: 294990 - DNA, 12 bp, Artificial Sequence
  Oligonucleotide primer for the detection of SNP TSC0016392
caccatacttcc

SEQ ID NO: 294991 - DNA, 12 bp, Artificial Sequence
  Oligonucleotide primer for the detection of SNP TSC0016392
caccgtacttcc

SEQ ID NO: 294992 - DNA, 12 bp, Artificial Sequence
  Oligonucleotide primer for the detection of SNP TSC0016392
atagaaagggag

SEQ ID NO: 294993 - DNA, 12 bp, Artificial Sequence
  Oligonucleotide primer for the detection of SNP TSC0016393
tactaacatcct

SEQ ID NO: 294994 - DNA, 12 bp, Artificial Sequence
  Oligonucleotide primer for the detection of SNP TSC0016393
gggttttgggga

SEQ ID NO: 294995 - DNA, 12 bp, Artificial Sequence
  Oligonucleotide primer for the detection of SNP TSC0016394
aattgaaagatt

SEQ ID NO: 294996 - DNA, 12 bp, Artificial Sequence
  Oligonucleotide primer for the detection of SNP TSC0016394
aatcgaaagatt

SEQ ID NO: 294997 - DNA, 12 bp, Artificial Sequence
  Oligonucleotide primer for the detection of SNP TSC0016394
aaatcaaaaaac

SEQ ID NO: 294998 - DNA, 12 bp, Artificial Sequence
  Oligonucleotide primer for the detection of SNP TSC0016394
aaatcgaaaaac

SEQ ID NO: 294999 - DNA, 12 bp, Artificial Sequence
  Oligonucleotide primer for the detection of SNP TSC0016394
attttatagaat

SEQ ID NO: 295000 - DNA, 12 bp, Artificial Sequence
  Oligonucleotide primer for the detection of SNP TSC0016395
gttagagttatt

SEQ ID NO: 295001 - DNA, 12 bp, Artificial Sequence
  Oligonucleotide primer for the detection of SNP TSC0016395
atcaaaattacc

SEQ ID NO: 295002 - DNA, 12 bp, Artificial Sequence
  Oligonucleotide primer for the detection of SNP TSC0016395
gtagagatatat

SEQ ID NO: 295003 - DNA, 12 bp, Artificial Sequence
  Oligonucleotide primer for the detection of SNP TSC0016395
gtagagatatac

SEQ ID NO: 295004 - DNA, 12 bp, Artificial Sequence
  Oligonucleotide primer for the detection of SNP TSC0016396
ttcccacctccc

SEQ ID NO: 295005 - DNA, 12 bp, Artificial Sequence
  Oligonucleotide primer for the detection of SNP TSC0016396
tttagaaggggg

SEQ ID NO: 295006 - DNA, 12 bp, Artificial Sequence
  Oligonucleotide primer for the detection of SNP TSC0016396
cccaaaaaaaaa

SEQ ID NO: 295007 - DNA, 12 bp, Artificial Sequence
  Oligonucleotide primer for the detection of SNP TSC0016398
acacaaatcaaa

SEQ ID NO: 295008 - DNA, 12 bp, Artificial Sequence
  Oligonucleotide primer for the detection of SNP TSC0016398
tatgttgtgttt

SEQ ID NO: 295009 - DNA, 12 bp, Artificial Sequence
  Oligonucleotide primer for the detection of SNP TSC0016398
tatgttgtgttc

SEQ ID NO: 295010 - DNA, 12 bp, Artificial Sequence
  Oligonucleotide primer for the detection of SNP TSC0016398
tatactatatcc

SEQ ID NO: 295011 - DNA, 12 bp, Artificial Sequence
  Oligonucleotide primer for the detection of SNP TSC0016398
tatagattaagt

SEQ ID NO: 295012 - DNA, 12 bp, Artificial Sequence
  Oligonucleotide primer for the detection of SNP TSC0016399
aactaacaaaac

SEQ ID NO: 295013 - DNA, 12 bp, Artificial Sequence
  Oligonucleotide primer for the detection of SNP TSC0016399
tgttaataaagg

SEQ ID NO: 295014 - DNA, 12 bp, Artificial Sequence
  Oligonucleotide primer for the detection of SNP TSC0016400
aaccactcaaaa

SEQ ID NO: 295015 - DNA, 12 bp, Artificial Sequence
  Oligonucleotide primer for the detection of SNP TSC0016400
aaccactcgaaa

SEQ ID NO: 295016 - DNA, 12 bp, Artificial Sequence
  Oligonucleotide primer for the detection of SNP TSC0016400
ttagtaggggtg

SEQ ID NO: 295017 - DNA, 12 bp, Artificial Sequence
  Oligonucleotide primer for the detection of SNP TSC0016400
ttagtaggggcg

SEQ ID NO: 295018 - DNA, 12 bp, Artificial Sequence
  Oligonucleotide primer for the detection of SNP TSC0016400
ccaacaaaaaca

SEQ ID NO: 295019 - DNA, 12 bp, Artificial Sequence
  Oligonucleotide primer for the detection of SNP TSC0016400
ccaacaaaaacg

SEQ ID NO: 295020 - DNA, 12 bp, Artificial Sequence
  Oligonucleotide primer for the detection of SNP TSC0016400
aattatttggag

SEQ ID NO: 295021 - DNA, 12 bp, Artificial Sequence
  Oligonucleotide primer for the detection of SNP TSC0016400
aattattcggag

SEQ ID NO: 295022 - DNA, 12 bp, Artificial Sequence
  Oligonucleotide primer for the detection of SNP TSC0016401
acaaaaacaact

SEQ ID NO: 295023 - DNA, 12 bp, Artificial Sequence
  Oligonucleotide primer for the detection of SNP TSC0016401
gtttgatttttt

SEQ ID NO: 295024 - DNA, 12 bp, Artificial Sequence
  Oligonucleotide primer for the detection of SNP TSC0016401
gtttgatttttc

SEQ ID NO: 295025 - DNA, 12 bp, Artificial Sequence
  Oligonucleotide primer for the detection of SNP TSC0016401
cctaacttccca

SEQ ID NO: 295026 - DNA, 12 bp, Artificial Sequence
  Oligonukleotid-Primer
cctaacttcccg

SEQ ID NO: 295027 - DNA, 12 bp, Artificial Sequence
  Oligonucleotide primer for the detection of SNP TSC0016401
gtaggagtaatt

SEQ ID NO: 295028 - DNA, 12 bp, Artificial Sequence
  Oligonucleotide primer for the detection of SNP TSC0016404
ttttaagtatta

SEQ ID NO: 295029 - DNA, 12 bp, Artificial Sequence
  Oligonucleotide primer for the detection of SNP TSC0016404
tctcaaatatca

SEQ ID NO: 295030 - DNA, 12 bp, Artificial Sequence
  Oligonucleotide primer for the detection of SNP TSC0016404
tagattagtgag

SEQ ID NO: 295031 - DNA, 12 bp, Artificial Sequence
  Oligonucleotide primer for the detection of SNP TSC0016405
acatttcatcat

SEQ ID NO: 295032 - DNA, 12 bp, Artificial Sequence
  Oligonucleotide primer for the detection of SNP TSC0016406
atcctcaaaacc

SEQ ID NO: 295033 - DNA, 12 bp, Artificial Sequence
  Oligonucleotide primer for the detection of SNP TSC0016406
tgagtttggggt

SEQ ID NO: 295034 - DNA, 12 bp, Artificial Sequence
  Oligonucleotide primer for the detection of SNP TSC0016406
aaacctaaaaca

SEQ ID NO: 295035 - DNA, 12 bp, Artificial Sequence
  Oligonucleotide primer for the detection of SNP TSC0016407
aaaatacaaact

SEQ ID NO: 295036 - DNA, 12 bp, Artificial Sequence
  Oligonucleotide primer for the detection of SNP TSC0016407
aatttggttata

SEQ ID NO: 295037 - DNA, 12 bp, Artificial Sequence
  Oligonucleotide primer for the detection of SNP TSC0016408
taacaacaaccc

SEQ ID NO: 295038 - DNA, 12 bp, Artificial Sequence
  Oligonucleotide primer for the detection of SNP TSC0016408
gaattattttga

SEQ ID NO: 295039 - DNA, 12 bp, Artificial Sequence
  Oligonucleotide primer for the detection of SNP TSC0016408
aaattactttaa

SEQ ID NO: 295040 - DNA, 12 bp, Artificial Sequence
  Oligonucleotide primer for the detection of SNP TSC0016408
tgataatagttt

SEQ ID NO: 295041 - DNA, 12 bp, Artificial Sequence
  Oligonucleotide primer for the detection of SNP TSC0016409
gtgtagtggttt

SEQ ID NO: 295042 - DNA, 12 bp, Artificial Sequence
  Oligonucleotide primer for the detection of SNP TSC0016409
gcgtagtggttt

SEQ ID NO: 295043 - DNA, 12 bp, Artificial Sequence
  Oligonucleotide primer for the detection of SNP TSC0016409
acgcaataactc

SEQ ID NO: 295044 - DNA, 12 bp, Artificial Sequence
  Oligonucleotide primer for the detection of SNP TSC0016410
aataatctcaat

SEQ ID NO: 295045 - DNA, 12 bp, Artificial Sequence
  Oligonucleotide primer for the detection of SNP TSC0016410
aataatctcgat

SEQ ID NO: 295046 - DNA, 12 bp, Artificial Sequence
  Oligonucleotide primer for the detection of SNP TSC0016410
ggattatgaggt

SEQ ID NO: 295047 - DNA, 12 bp, Artificial Sequence
  Oligonucleotide primer for the detection of SNP TSC0016410
aaatcataaaat

SEQ ID NO: 295048 - DNA, 12 bp, Artificial Sequence
  Oligonucleotide primer for the detection of SNP TSC0016410
gatggttttgat

SEQ ID NO: 295049 - DNA, 12 bp, Artificial Sequence
  Oligonucleotide primer for the detection of SNP TSC0016410
gatggtttcgat

SEQ ID NO: 295050 - DNA, 12 bp, Artificial Sequence
  Oligonucleotide primer for the detection of SNP TSC0016411
tttattaaaaat

SEQ ID NO: 295051 - DNA, 12 bp, Artificial Sequence
  Oligonucleotide primer for the detection of SNP TSC0016411
ctctactaaaaa

SEQ ID NO: 295052 - DNA, 12 bp, Artificial Sequence
  Oligonucleotide primer for the detection of SNP TSC0016412
taatctccctac

SEQ ID NO: 295053 - DNA, 12 bp, Artificial Sequence
  Oligonucleotide primer for the detection of SNP TSC0016412
aaggggaaaaaa

SEQ ID NO: 295054 - DNA, 12 bp, Artificial Sequence
  Oligonucleotide primer for the detection of SNP TSC0016413
tacaaaataaaa

SEQ ID NO: 295055 - DNA, 12 bp, Artificial Sequence
  Oligonucleotide primer for the detection of SNP TSC0016413
catctttattta

SEQ ID NO: 295056 - DNA, 12 bp, Artificial Sequence
  Oligonucleotide primer for the detection of SNP TSC0016413
gtgtaaaatgaa

SEQ ID NO: 295057 - DNA, 12 bp, Artificial Sequence
  Oligonucleotide primer for the detection of SNP TSC0016414
tcatctttattt

SEQ ID NO: 295058 - DNA, 12 bp, Artificial Sequence
  Oligonucleotide primer for the detection of SNP TSC0016417
cctaaactcacc

SEQ ID NO: 295059 - DNA, 12 bp, Artificial Sequence
  Oligonucleotide primer for the detection of SNP TSC0016417
ggatagagaagg

SEQ ID NO: 295060 - DNA, 12 bp, Artificial Sequence
  Oligonucleotide primer for the detection of SNP TSC0016417
tttgagtttatt

SEQ ID NO: 295061 - DNA, 12 bp, Artificial Sequence
  Oligonucleotide primer for the detection of SNP TSC0016418
ttccatactttt

SEQ ID NO: 295062 - DNA, 12 bp, Artificial Sequence
  Oligonucleotide primer for the detection of SNP TSC0016418
agaagtttttta

SEQ ID NO: 295063 - DNA, 12 bp, Artificial Sequence
  Oligonucleotide primer for the detection of SNP TSC0016418
aaaaactctcta

SEQ ID NO: 295064 - DNA, 12 bp, Artificial Sequence
  Oligonucleotide primer for the detection of SNP TSC0016421
ttacaaaaaatt

SEQ ID NO: 295065 - DNA, 12 bp, Artificial Sequence
  Oligonucleotide primer for the detection of SNP TSC0016422
ctcaaacaatcc

SEQ ID NO: 295066 - DNA, 12 bp, Artificial Sequence
  Oligonucleotide primer for the detection of SNP TSC0016422
aatttgaggtag

SEQ ID NO: 295067 - DNA, 12 bp, Artificial Sequence
  Oligonucleotide primer for the detection of SNP TSC0016422
aattcgaggtag

SEQ ID NO: 295068 - DNA, 12 bp, Artificial Sequence
  Oligonucleotide primer for the detection of SNP TSC0016423
aaaatttgaggt

SEQ ID NO: 295069 - DNA, 12 bp, Artificial Sequence
  Oligonucleotide primer for the detection of SNP TSC0016423
aaaattcgaggt

SEQ ID NO: 295070 - DNA, 12 bp, Artificial Sequence
  Oligonucleotide primer for the detection of SNP TSC0016423
aaaatccaaaac

SEQ ID NO: 295071 - DNA, 12 bp, Artificial Sequence
  Oligonucleotide primer for the detection of SNP TSC0016423
aaaatccgaaac

SEQ ID NO: 295072 - DNA, 12 bp, Artificial Sequence
  Oligonucleotide primer for the detection of SNP TSC0016423
gggtttaagtaa

SEQ ID NO: 295073 - DNA, 12 bp, Artificial Sequence
  Oligonucleotide primer for the detection of SNP TSC0016424
accactaaacta

SEQ ID NO: 295074 - DNA, 12 bp, Artificial Sequence
  Oligonucleotide primer for the detection of SNP TSC0016424
taatattgaaat

SEQ ID NO: 295075 - DNA, 12 bp, Artificial Sequence
  Oligonucleotide primer for the detection of SNP TSC0016424
taatattgaaac

SEQ ID NO: 295076 - DNA, 12 bp, Artificial Sequence
  Oligonucleotide primer for the detection of SNP TSC0016424
taatattaaaac

SEQ ID NO: 295077 - DNA, 12 bp, Artificial Sequence
  Oligonucleotide primer for the detection of SNP TSC0016424
tattggattatt

SEQ ID NO: 295078 - DNA, 12 bp, Artificial Sequence
  Oligonucleotide primer for the detection of SNP TSC0016425
cattctaacatt

SEQ ID NO: 295079 - DNA, 12 bp, Artificial Sequence
  Oligonucleotide primer for the detection of SNP TSC0016425
cgttctaacatt

SEQ ID NO: 295080 - DNA, 12 bp, Artificial Sequence
  Oligonucleotide primer for the detection of SNP TSC0016425
gttttttatatg

SEQ ID NO: 295081 - DNA, 12 bp, Artificial Sequence
  Oligonucleotide primer for the detection of SNP TSC0016427
tacactccaacc

SEQ ID NO: 295082 - DNA, 12 bp, Artificial Sequence
  Oligonucleotide primer for the detection of SNP TSC0016427
tttgttttgtta

SEQ ID NO: 295083 - DNA, 12 bp, Artificial Sequence
  Oligonucleotide primer for the detection of SNP TSC0016427
cttactctatca

SEQ ID NO: 295084 - DNA, 12 bp, Artificial Sequence
  Oligonucleotide primer for the detection of SNP TSC0016427
tatattttagtt

SEQ ID NO: 295085 - DNA, 12 bp, Artificial Sequence
  Oligonucleotide primer for the detection of SNP TSC0016428
ctttaaaaatat

SEQ ID NO: 295086 - DNA, 12 bp, Artificial Sequence
  Oligonucleotide primer for the detection of SNP TSC0016428
atttttagagtt

SEQ ID NO: 295087 - DNA, 12 bp, Artificial Sequence
  Oligonucleotide primer for the detection of SNP TSC0016428
ttttggaaatgt

SEQ ID NO: 295088 - DNA, 12 bp, Artificial Sequence
  Oligonucleotide primer for the detection of SNP TSC0016429
atttagagatta

SEQ ID NO: 295089 - DNA, 12 bp, Artificial Sequence
  Oligonucleotide primer for the detection of SNP TSC0016430
atctatctcata

SEQ ID NO: 295090 - DNA, 12 bp, Artificial Sequence
  Oligonucleotide primer for the detection of SNP TSC0016430
ggttgtagttgt

SEQ ID NO: 295091 - DNA, 12 bp, Artificial Sequence
  Oligonucleotide primer for the detection of SNP TSC0016430
taattacaatta

SEQ ID NO: 295092 - DNA, 12 bp, Artificial Sequence
  Oligonucleotide primer for the detection of SNP TSC0016430
agtttgttttat

SEQ ID NO: 295093 - DNA, 12 bp, Artificial Sequence
  Oligonucleotide primer for the detection of SNP TSC0016431
caccattaataa

SEQ ID NO: 295094 - DNA, 12 bp, Artificial Sequence
  Oligonucleotide primer for the detection of SNP TSC0016431
ttttgatgatag

SEQ ID NO: 295095 - DNA, 12 bp, Artificial Sequence
  Oligonucleotide primer for the detection of SNP TSC0016431
ccttaataataa

SEQ ID NO: 295096 - DNA, 12 bp, Artificial Sequence
  Oligonucleotide primer for the detection of SNP TSC0016433
caaaaaacccaa

SEQ ID NO: 295097 - DNA, 12 bp, Artificial Sequence
  Oligonucleotide primer for the detection of SNP TSC0016433
cgaaaaacccaa

SEQ ID NO: 295098 - DNA, 12 bp, Artificial Sequence
  Oligonucleotide primer for the detection of SNP TSC0016433
cttaaaccttta

SEQ ID NO: 295099 - DNA, 12 bp, Artificial Sequence
  Oligonucleotide primer for the detection of SNP TSC0016433
ttggggggttta

SEQ ID NO: 295100 - DNA, 12 bp, Artificial Sequence
  Oligonucleotide primer for the detection of SNP TSC0016433
tcggggggttta

SEQ ID NO: 295101 - DNA, 12 bp, Artificial Sequence
  Oligonucleotide primer for the detection of SNP TSC0016434
cctattcaaaaa

SEQ ID NO: 295102 - DNA, 12 bp, Artificial Sequence
  Oligonucleotide primer for the detection of SNP TSC0016434
ggttttttgttg

SEQ ID NO: 295103 - DNA, 12 bp, Artificial Sequence
  Oligonucleotide primer for the detection of SNP TSC0016434
aacttcttatta

SEQ ID NO: 295104 - DNA, 12 bp, Artificial Sequence
  Oligonucleotide primer for the detection of SNP TSC0016434
tttgtttaagga

SEQ ID NO: 295105 - DNA, 12 bp, Artificial Sequence
  Oligonucleotide primer for the detection of SNP TSC0016435
ttcttaattaac

SEQ ID NO: 295106 - DNA, 12 bp, Artificial Sequence
  Oligonucleotide primer for the detection of SNP TSC0016435
gttaattaagaa

SEQ ID NO: 295107 - DNA, 12 bp, Artificial Sequence
  Oligonucleotide primer for the detection of SNP TSC0016436
atccaaaataca

SEQ ID NO: 295108 - DNA, 12 bp, Artificial Sequence
  Oligonucleotide primer for the detection of SNP TSC0016436
gtttttgtaatt

SEQ ID NO: 295109 - DNA, 12 bp, Artificial Sequence
  Oligonucleotide primer for the detection of SNP TSC0016436
gttttcgtaatt

SEQ ID NO: 295110 - DNA, 12 bp, Artificial Sequence
  Oligonucleotide primer for the detection of SNP TSC0016436
tcataattaaaa

SEQ ID NO: 295111 - DNA, 12 bp, Artificial Sequence
  Oligonucleotide primer for the detection of SNP TSC0016436
tcgtaattaaaa

SEQ ID NO: 295112 - DNA, 12 bp, Artificial Sequence
  Oligonucleotide primer for the detection of SNP TSC0016436
tgtttaaagtgt

SEQ ID NO: 295113 - DNA, 12 bp, Artificial Sequence
  Oligonucleotide primer for the detection of SNP TSC0016437
aaaaacaataaa

SEQ ID NO: 295114 - DNA, 12 bp, Artificial Sequence
  Oligonucleotide primer for the detection of SNP TSC0016437
taggtgtgttta

SEQ ID NO: 295115 - DNA, 12 bp, Artificial Sequence
  Oligonucleotide primer for the detection of SNP TSC0016438
gtttgttttaaa

SEQ ID NO: 295116 - DNA, 12 bp, Artificial Sequence
  Oligonucleotide primer for the detection of SNP TSC0016440
acaaccttttca

SEQ ID NO: 295117 - DNA, 12 bp, Artificial Sequence
  Oligonucleotide primer for the detection of SNP TSC0016440
gaagttgtttgt

SEQ ID NO: 295118 - DNA, 12 bp, Artificial Sequence
  Oligonucleotide primer for the detection of SNP TSC0016440
aaaattatttac

SEQ ID NO: 295119 - DNA, 12 bp, Artificial Sequence
  Oligonucleotide primer for the detection of SNP TSC0016441
tcatcattctac

SEQ ID NO: 295120 - DNA, 12 bp, Artificial Sequence
  Oligonucleotide primer for the detection of SNP TSC0016441
cttctctataca

SEQ ID NO: 295121 - DNA, 12 bp, Artificial Sequence
  Oligonucleotide primer for the detection of SNP TSC0016443
aaaatcaaacac

SEQ ID NO: 295122 - DNA, 12 bp, Artificial Sequence
  Oligonucleotide primer for the detection of SNP TSC0016443
tgtttatataga

SEQ ID NO: 295123 - DNA, 12 bp, Artificial Sequence
  Oligonucleotide primer for the detection of SNP TSC0016444
ccatatctttat

SEQ ID NO: 295124 - DNA, 12 bp, Artificial Sequence
  Oligonucleotide primer for the detection of SNP TSC0016444
ccgtatctttat

SEQ ID NO: 295125 - DNA, 12 bp, Artificial Sequence
  Oligonucleotide primer for the detection of SNP TSC0016444
ttgttattttta

SEQ ID NO: 295126 - DNA, 12 bp, Artificial Sequence
  Oligonucleotide primer for the detection of SNP TSC0016444
ttattattccca

SEQ ID NO: 295127 - DNA, 12 bp, Artificial Sequence
  Oligonucleotide primer for the detection of SNP TSC0016444
ttgtgtttttgt

SEQ ID NO: 295128 - DNA, 12 bp, Artificial Sequence
  Oligonucleotide primer for the detection of SNP TSC0016444
tcgtgtttttgt

SEQ ID NO: 295129 - DNA, 12 bp, Artificial Sequence
  Oligonucleotide primer for the detection of SNP TSC0016446
gtttgtgtgatt

SEQ ID NO: 295130 - DNA, 12 bp, Artificial Sequence
  Oligonucleotide primer for the detection of SNP TSC0016446
atctatataact

SEQ ID NO: 295131 - DNA, 12 bp, Artificial Sequence
  Oligonucleotide primer for the detection of SNP TSC0016446
taaaaattttgg

SEQ ID NO: 295132 - DNA, 12 bp, Artificial Sequence
  Oligonucleotide primer for the detection of SNP TSC0016447
catacccaaaac

SEQ ID NO: 295133 - DNA, 12 bp, Artificial Sequence
  Oligonucleotide primer for the detection of SNP TSC0016449
gagtaggtttta

SEQ ID NO: 295134 - DNA, 12 bp, Artificial Sequence
  Oligonucleotide primer for the detection of SNP TSC0016453
ctaattactact

SEQ ID NO: 295135 - DNA, 12 bp, Artificial Sequence
  Oligonucleotide primer for the detection of SNP TSC0016453
agtaggtaggtg

SEQ ID NO: 295136 - DNA, 12 bp, Artificial Sequence
  Oligonucleotide primer for the detection of SNP TSC0016454
tataacctaaaa

SEQ ID NO: 295137 - DNA, 12 bp, Artificial Sequence
  Oligonucleotide primer for the detection of SNP TSC0016454
aaggtagaattt

SEQ ID NO: 295138 - DNA, 12 bp, Artificial Sequence
  Oligonucleotide primer for the detection of SNP TSC0016454
tgtgatttaggg

SEQ ID NO: 295139 - DNA, 12 bp, Artificial Sequence
  Oligonucleotide primer for the detection of SNP TSC0016455
aatcaatcaacc

SEQ ID NO: 295140 - DNA, 12 bp, Artificial Sequence
  Oligonucleotide primer for the detection of SNP TSC0016455
ggaatttaataa

SEQ ID NO: 295141 - DNA, 12 bp, Artificial Sequence
  Oligonucleotide primer for the detection of SNP TSC0016458
ccttccattcct

SEQ ID NO: 295142 - DNA, 12 bp, Artificial Sequence
  Oligonucleotide primer for the detection of SNP TSC0016459
ccaaccctaccc

SEQ ID NO: 295143 - DNA, 12 bp, Artificial Sequence
  Oligonucleotide primer for the detection of SNP TSC0016459
tgtagatttatg

SEQ ID NO: 295144 - DNA, 12 bp, Artificial Sequence
  Oligonucleotide primer for the detection of SNP TSC0016460
acattatcatcc

SEQ ID NO: 295145 - DNA, 12 bp, Artificial Sequence
  Oligonucleotide primer for the detection of SNP TSC0016460
acattatcgtcc

SEQ ID NO: 295146 - DNA, 12 bp, Artificial Sequence
  Oligonucleotide primer for the detection of SNP TSC0016460
agttttgggaaa

SEQ ID NO: 295147 - DNA, 12 bp, Artificial Sequence
  Oligonucleotide primer for the detection of SNP TSC0016460
agtttcgggaaa

SEQ ID NO: 295148 - DNA, 12 bp, Artificial Sequence
  Oligonucleotide primer for the detection of SNP TSC0016460
aacctcaaaaaa

SEQ ID NO: 295149 - DNA, 12 bp, Artificial Sequence
  Oligonucleotide primer for the detection of SNP TSC0016460
aacctcgaaaaa

SEQ ID NO: 295150 - DNA, 12 bp, Artificial Sequence
  Oligonucleotide primer for the detection of SNP TSC0016460
atattgttgttt

SEQ ID NO: 295151 - DNA, 12 bp, Artificial Sequence
  Oligonucleotide primer for the detection of SNP TSC0016460
atattgtcgttt

SEQ ID NO: 295152 - DNA, 12 bp, Artificial Sequence
  Oligonucleotide primer for the detection of SNP TSC0016461
actacatttttt

SEQ ID NO: 295153 - DNA, 12 bp, Artificial Sequence
  Oligonucleotide primer for the detection of SNP TSC0016461
aattaacttttt

SEQ ID NO: 295154 - DNA, 12 bp, Artificial Sequence
  Oligonucleotide primer for the detection of SNP TSC0016462
ctatcatttatc

SEQ ID NO: 295155 - DNA, 12 bp, Artificial Sequence
  Oligonucleotide primer for the detection of SNP TSC0016463
actcctaactat

SEQ ID NO: 295156 - DNA, 12 bp, Artificial Sequence
  Oligonucleotide primer for the detection of SNP TSC0016463
ttagttaatagg

SEQ ID NO: 295157 - DNA, 12 bp, Artificial Sequence
  Oligonucleotide primer for the detection of SNP TSC0016464
gttaagaaagta

SEQ ID NO: 295158 - DNA, 12 bp, Artificial Sequence
  Oligonucleotide primer for the detection of SNP TSC0016465
tcctatatctaa

SEQ ID NO: 295159 - DNA, 12 bp, Artificial Sequence
  Oligonucleotide primer for the detection of SNP TSC0016466
aacatacttaaa

SEQ ID NO: 295160 - DNA, 12 bp, Artificial Sequence
  Oligonucleotide primer for the detection of SNP TSC0016466
ctatataacact

SEQ ID NO: 295161 - DNA, 12 bp, Artificial Sequence
  Oligonucleotide primer for the detection of SNP TSC0016466
tatatttgagtt

SEQ ID NO: 295162 - DNA, 12 bp, Artificial Sequence
  Oligonucleotide primer for the detection of SNP TSC0016467
ctttaacaaaca

SEQ ID NO: 295163 - DNA, 12 bp, Artificial Sequence
  Oligonucleotide primer for the detection of SNP TSC0016467
ctaaactcaaat

SEQ ID NO: 295164 - DNA, 12 bp, Artificial Sequence
  Oligonucleotide primer for the detection of SNP TSC0016467
ttttaataaata

SEQ ID NO: 295165 - DNA, 12 bp, Artificial Sequence
  Oligonucleotide primer for the detection of SNP TSC0016469
aaaaaaattcct

SEQ ID NO: 295166 - DNA, 12 bp, Artificial Sequence
  Oligonucleotide primer for the detection of SNP TSC0016469
tttgtgatgtta

SEQ ID NO: 295167 - DNA, 12 bp, Artificial Sequence
  Oligonucleotide primer for the detection of SNP TSC0016469
ttcgtgatgtta

SEQ ID NO: 295168 - DNA, 12 bp, Artificial Sequence
  Oligonucleotide primer for the detection of SNP TSC0016469
tccataatatta

SEQ ID NO: 295169 - DNA, 12 bp, Artificial Sequence
  Oligonucleotide primer for the detection of SNP TSC0016469
tccgtaatatta

SEQ ID NO: 295170 - DNA, 12 bp, Artificial Sequence
  Oligonucleotide primer for the detection of SNP TSC0016469
aggagaattttt

SEQ ID NO: 295171 - DNA, 12 bp, Artificial Sequence
  Oligonucleotide primer for the detection of SNP TSC0016471
taaattaatatc

SEQ ID NO: 295172 - DNA, 12 bp, Artificial Sequence
  Oligonucleotide primer for the detection of SNP TSC0016471
ttatgagatgag

SEQ ID NO: 295173 - DNA, 12 bp, Artificial Sequence
  Oligonucleotide primer for the detection of SNP TSC0016471
tggattaatatt

SEQ ID NO: 295174 - DNA, 12 bp, Artificial Sequence
  Oligonucleotide primer for the detection of SNP TSC0016472
gttagattatag

SEQ ID NO: 295175 - DNA, 12 bp, Artificial Sequence
  Oligonucleotide primer for the detection of SNP TSC0016472
atcaaattacaa

SEQ ID NO: 295176 - DNA, 12 bp, Artificial Sequence
  Oligonucleotide primer for the detection of SNP TSC0016473
ttaaataaaaac

SEQ ID NO: 295177 - DNA, 12 bp, Artificial Sequence
  Oligonucleotide primer for the detection of SNP TSC0016473
gttttttttaat

SEQ ID NO: 295178 - DNA, 12 bp, Artificial Sequence
  Oligonucleotide primer for the detection of SNP TSC0016473
acttcctccaac

SEQ ID NO: 295179 - DNA, 12 bp, Artificial Sequence
  Oligonucleotide primer for the detection of SNP TSC0016473
ttagatgggggt

SEQ ID NO: 295180 - DNA, 12 bp, Artificial Sequence
  Oligonucleotide primer for the detection of SNP TSC0016474
ttaaaaaaaaac

SEQ ID NO: 295181 - DNA, 12 bp, Artificial Sequence
  Oligonucleotide primer for the detection of SNP TSC0016474
atataagggaag

SEQ ID NO: 295182 - DNA, 12 bp, Artificial Sequence
  Oligonucleotide primer for the detection of SNP TSC0016475
actacaaaccaa

SEQ ID NO: 295183 - DNA, 12 bp, Artificial Sequence
  Oligonucleotide primer for the detection of SNP TSC0016475
ttttgaggttat

SEQ ID NO: 295184 - DNA, 12 bp, Artificial Sequence
  Oligonucleotide primer for the detection of SNP TSC0016475
tctaaaaccata

SEQ ID NO: 295185 - DNA, 12 bp, Artificial Sequence
  Oligonucleotide primer for the detection of SNP TSC0016475
taggttagtttt

SEQ ID NO: 295186 - DNA, 12 bp, Artificial Sequence
  Oligonucleotide primer for the detection of SNP TSC0016477
aacaaaacccct

SEQ ID NO: 295187 - DNA, 12 bp, Artificial Sequence
  Oligonucleotide primer for the detection of SNP TSC0016477
gtatagatagtt

SEQ ID NO: 295188 - DNA, 12 bp, Artificial Sequence
  Oligonucleotide primer for the detection of SNP TSC0016480
aaccactaaata

SEQ ID NO: 295189 - DNA, 12 bp, Artificial Sequence
  Oligonucleotide primer for the detection of SNP TSC0016480
atgggtttttta

SEQ ID NO: 295190 - DNA, 12 bp, Artificial Sequence
  Oligonucleotide primer for the detection of SNP TSC0016480
acgggtttttta

SEQ ID NO: 295191 - DNA, 12 bp, Artificial Sequence
  Oligonucleotide primer for the detection of SNP TSC0016481
ctactatttcct

SEQ ID NO: 295192 - DNA, 12 bp, Artificial Sequence
  Oligonucleotide primer for the detection of SNP TSC0016481
tgagaggaagaa

SEQ ID NO: 295193 - DNA, 12 bp, Artificial Sequence
  Oligonucleotide primer for the detection of SNP TSC0016482
cacctttaaacc

SEQ ID NO: 295194 - DNA, 12 bp, Artificial Sequence
  Oligonucleotide primer for the detection of SNP TSC0016482
cgcctttaaacc

SEQ ID NO: 295195 - DNA, 12 bp, Artificial Sequence
  Oligonucleotide primer for the detection of SNP TSC0016482
gtttgagttatg

SEQ ID NO: 295196 - DNA, 12 bp, Artificial Sequence
  Oligonucleotide primer for the detection of SNP TSC0016482
gttcgagttatg

SEQ ID NO: 295197 - DNA, 12 bp, Artificial Sequence
  Oligonucleotide primer for the detection of SNP TSC0016482
acccaaatcata

SEQ ID NO: 295198 - DNA, 12 bp, Artificial Sequence
  Oligonucleotide primer for the detection of SNP TSC0016482
acccgaatcata

SEQ ID NO: 295199 - DNA, 12 bp, Artificial Sequence
  Oligonucleotide primer for the detection of SNP TSC0016482
tgtttttgggtt

SEQ ID NO: 295200 - DNA, 12 bp, Artificial Sequence
  Oligonucleotide primer for the detection of SNP TSC0016482
cgtttttgggtt

SEQ ID NO: 295201 - DNA, 12 bp, Artificial Sequence
  Oligonucleotide primer for the detection of SNP TSC0016483
tctttcaaaaac

SEQ ID NO: 295202 - DNA, 12 bp, Artificial Sequence
  Oligonucleotide primer for the detection of SNP TSC0016483
ggtattattata

SEQ ID NO: 295203 - DNA, 12 bp, Artificial Sequence
  Oligonucleotide primer for the detection of SNP TSC0016484
accccataaaaa

SEQ ID NO: 295204 - DNA, 12 bp, Artificial Sequence
  Oligonucleotide primer for the detection of SNP TSC0016484
aatattatatat

SEQ ID NO: 295205 - DNA, 12 bp, Artificial Sequence
  Oligonucleotide primer for the detection of SNP TSC0016484
aacaccatatat

SEQ ID NO: 295206 - DNA, 12 bp, Artificial Sequence
  Oligonucleotide primer for the detection of SNP TSC0016484
tagttttataaa

SEQ ID NO: 295207 - DNA, 12 bp, Artificial Sequence
  Oligonucleotide primer for the detection of SNP TSC0016489
ccactatattac

SEQ ID NO: 295208 - DNA, 12 bp, Artificial Sequence
  Oligonucleotide primer for the detection of SNP TSC0016489
gagattagttta

SEQ ID NO: 295209 - DNA, 12 bp, Artificial Sequence
  Oligonucleotide primer for the detection of SNP TSC0016490
ctaaaccattaa

SEQ ID NO: 295210 - DNA, 12 bp, Artificial Sequence
  Oligonucleotide primer for the detection of SNP TSC0016490
agttattttagt

SEQ ID NO: 295211 - DNA, 12 bp, Artificial Sequence
  Oligonucleotide primer for the detection of SNP TSC0016490
aaactaccttaa

SEQ ID NO: 295212 - DNA, 12 bp, Artificial Sequence
  Oligonucleotide primer for the detection of SNP TSC0016490
tggattattggt

SEQ ID NO: 295213 - DNA, 12 bp, Artificial Sequence
  Oligonucleotide primer for the detection of SNP TSC0016491
caatttcttaca

SEQ ID NO: 295214 - DNA, 12 bp, Artificial Sequence
  Oligonucleotide primer for the detection of SNP TSC0016491
caatttcttacg

SEQ ID NO: 295215 - DNA, 12 bp, Artificial Sequence
  Oligonucleotide primer for the detection of SNP TSC0016491
atggaggggttt

SEQ ID NO: 295216 - DNA, 12 bp, Artificial Sequence
  Oligonucleotide primer for the detection of SNP TSC0016491
ataaaaaaatcc

SEQ ID NO: 295217 - DNA, 12 bp, Artificial Sequence
  Oligonucleotide primer for the detection of SNP TSC0016491
tagttttttatg

SEQ ID NO: 295218 - DNA, 12 bp, Artificial Sequence
  Oligonucleotide primer for the detection of SNP TSC0016491
tagttttttacg

SEQ ID NO: 295219 - DNA, 12 bp, Artificial Sequence
  Oligonucleotide primer for the detection of SNP TSC0016492
ctcaatttctta

SEQ ID NO: 295220 - DNA, 12 bp, Artificial Sequence
  Oligonucleotide primer for the detection of SNP TSC0016492
ggaggggtttat

SEQ ID NO: 295221 - DNA, 12 bp, Artificial Sequence
  Oligonucleotide primer for the detection of SNP TSC0016492
ggaggggtttac

SEQ ID NO: 295222 - DNA, 12 bp, Artificial Sequence
  Oligonucleotide primer for the detection of SNP TSC0016492
aaaaaaatccac

SEQ ID NO: 295223 - DNA, 12 bp, Artificial Sequence
  Oligonucleotide primer for the detection of SNP TSC0016493
acactcccacac

SEQ ID NO: 295224 - DNA, 12 bp, Artificial Sequence
  Oligonukleotid-Primer
acactcccgcac

SEQ ID NO: 295225 - DNA, 12 bp, Artificial Sequence
  Oligonucleotide primer for the detection of SNP TSC0016493
gtagtgggggga

SEQ ID NO: 295226 - DNA, 12 bp, Artificial Sequence
  Oligonucleotide primer for the detection of SNP TSC0016493
gtagcgggggga

SEQ ID NO: 295227 - DNA, 12 bp, Artificial Sequence
  Oligonucleotide primer for the detection of SNP TSC0016494
aaacccaccact

SEQ ID NO: 295228 - DNA, 12 bp, Artificial Sequence
  Oligonucleotide primer for the detection of SNP TSC0016494
aaacccaccgct

SEQ ID NO: 295229 - DNA, 12 bp, Artificial Sequence
  Oligonucleotide primer for the detection of SNP TSC0016494
aaacccgccact

SEQ ID NO: 295230 - DNA, 12 bp, Artificial Sequence
  Oligonucleotide primer for the detection of SNP TSC0016494
aaacccgccgct

SEQ ID NO: 295231 - DNA, 12 bp, Artificial Sequence
  Oligonucleotide primer for the detection of SNP TSC0016494
ggaagggaagga

SEQ ID NO: 295232 - DNA, 12 bp, Artificial Sequence
  Oligonucleotide primer for the detection of SNP TSC0016499
accatacacaca

SEQ ID NO: 295233 - DNA, 12 bp, Artificial Sequence
  Oligonucleotide primer for the detection of SNP TSC0016499
acaccttcccta

SEQ ID NO: 295234 - DNA, 12 bp, Artificial Sequence
  Oligonucleotide primer for the detection of SNP TSC0016499
ttatgtatatat

SEQ ID NO: 295235 - DNA, 12 bp, Artificial Sequence
  Oligonucleotide primer for the detection of SNP TSC0016499
ttatgtatatac

SEQ ID NO: 295236 - DNA, 12 bp, Artificial Sequence
  Oligonucleotide primer for the detection of SNP TSC0016500
atacatacaacc

SEQ ID NO: 295237 - DNA, 12 bp, Artificial Sequence
  Oligonucleotide primer for the detection of SNP TSC0016500
aggtatttgata

SEQ ID NO: 295238 - DNA, 12 bp, Artificial Sequence
  Oligonucleotide primer for the detection of SNP TSC0016502
ctatcttaacct

SEQ ID NO: 295239 - DNA, 12 bp, Artificial Sequence
  Oligonucleotide primer for the detection of SNP TSC0016502
ttagttatttaa

SEQ ID NO: 295240 - DNA, 12 bp, Artificial Sequence
  Oligonucleotide primer for the detection of SNP TSC0016504
catatattcaaa

SEQ ID NO: 295241 - DNA, 12 bp, Artificial Sequence
  Oligonucleotide primer for the detection of SNP TSC0016504
catatattcgaa

SEQ ID NO: 295242 - DNA, 12 bp, Artificial Sequence
  Oligonucleotide primer for the detection of SNP TSC0016504
agatgagtatgt

SEQ ID NO: 295243 - DNA, 12 bp, Artificial Sequence
  Oligonucleotide primer for the detection of SNP TSC0016504
tatgtatttgaa

SEQ ID NO: 295244 - DNA, 12 bp, Artificial Sequence
  Oligonucleotide primer for the detection of SNP TSC0016504
tatgtattcgaa

SEQ ID NO: 295245 - DNA, 12 bp, Artificial Sequence
  Oligonucleotide primer for the detection of SNP TSC0016508
caaacccaaccc

SEQ ID NO: 295246 - DNA, 12 bp, Artificial Sequence
  Oligonucleotide primer for the detection of SNP TSC0016508
caaacccgaccc

SEQ ID NO: 295247 - DNA, 12 bp, Artificial Sequence
  Oligonucleotide primer for the detection of SNP TSC0016508
taggggatttta

SEQ ID NO: 295248 - DNA, 12 bp, Artificial Sequence
  Oligonucleotide primer for the detection of SNP TSC0016509
taaaaactacct

SEQ ID NO: 295249 - DNA, 12 bp, Artificial Sequence
  Oligonucleotide primer for the detection of SNP TSC0016509
aaattttttgtg

SEQ ID NO: 295250 - DNA, 12 bp, Artificial Sequence
  Oligonucleotide primer for the detection of SNP TSC0016510
tacaaataactc

SEQ ID NO: 295251 - DNA, 12 bp, Artificial Sequence
  Oligonucleotide primer for the detection of SNP TSC0016510
attatatagtta

SEQ ID NO: 295252 - DNA, 12 bp, Artificial Sequence
  Oligonucleotide primer for the detection of SNP TSC0016510
attatacaatta

SEQ ID NO: 295253 - DNA, 12 bp, Artificial Sequence
  Oligonucleotide primer for the detection of SNP TSC0016510
tgtagataattt

SEQ ID NO: 295254 - DNA, 12 bp, Artificial Sequence
  Oligonucleotide primer for the detection of SNP TSC0016511
attacctaaaac

SEQ ID NO: 295255 - DNA, 12 bp, Artificial Sequence
  Oligonucleotide primer for the detection of SNP TSC0016511
tggtttttaatg

SEQ ID NO: 295256 - DNA, 12 bp, Artificial Sequence
  Oligonucleotide primer for the detection of SNP TSC0016511
taatctccaata

SEQ ID NO: 295257 - DNA, 12 bp, Artificial Sequence
  Oligonucleotide primer for the detection of SNP TSC0016511
attatttgaggt

SEQ ID NO: 295258 - DNA, 12 bp, Artificial Sequence
  Oligonucleotide primer for the detection of SNP TSC0016512
aggttagtgggt

SEQ ID NO: 295259 - DNA, 12 bp, Artificial Sequence
  Oligonucleotide primer for the detection of SNP TSC0016512
aggttagcgggt

SEQ ID NO: 295260 - DNA, 12 bp, Artificial Sequence
  Oligonucleotide primer for the detection of SNP TSC0016512
aaaccaacaaat

SEQ ID NO: 295261 - DNA, 12 bp, Artificial Sequence
  Oligonucleotide primer for the detection of SNP TSC0016512
aaaccaacgaat

SEQ ID NO: 295262 - DNA, 12 bp, Artificial Sequence
  Oligonucleotide primer for the detection of SNP TSC0016512
gggtatgagggg

SEQ ID NO: 295263 - DNA, 12 bp, Artificial Sequence
  Oligonucleotide primer for the detection of SNP TSC0016513
ttaaataaaagt

SEQ ID NO: 295264 - DNA, 12 bp, Artificial Sequence
  Oligonucleotide primer for the detection of SNP TSC0016513
aaagtaaaaaat

SEQ ID NO: 295265 - DNA, 12 bp, Artificial Sequence
  Oligonucleotide primer for the detection of SNP TSC0016514
ttaaattctaac

SEQ ID NO: 295266 - DNA, 12 bp, Artificial Sequence
  Oligonucleotide primer for the detection of SNP TSC0016514
aaaaaacttctt

SEQ ID NO: 295267 - DNA, 12 bp, Artificial Sequence
  Oligonucleotide primer for the detection of SNP TSC0016514
ttaaattttgat

SEQ ID NO: 295268 - DNA, 12 bp, Artificial Sequence
  Oligonucleotide primer for the detection of SNP TSC0016515
cactattaacaa

SEQ ID NO: 295269 - DNA, 12 bp, Artificial Sequence
  Oligonucleotide primer for the detection of SNP TSC0016515
agttattgagta

SEQ ID NO: 295270 - DNA, 12 bp, Artificial Sequence
  Oligonucleotide primer for the detection of SNP TSC0016515
aaccattaaata

SEQ ID NO: 295271 - DNA, 12 bp, Artificial Sequence
  Oligonucleotide primer for the detection of SNP TSC0016515
ttattggtagtt

SEQ ID NO: 295272 - DNA, 12 bp, Artificial Sequence
  Oligonucleotide primer for the detection of SNP TSC0016518
cctcacctataa

SEQ ID NO: 295273 - DNA, 12 bp, Artificial Sequence
  Oligonucleotide primer for the detection of SNP TSC0016518
aaggggtttttg

SEQ ID NO: 295274 - DNA, 12 bp, Artificial Sequence
  Oligonucleotide primer for the detection of SNP TSC0016518
aaaaaactccta

SEQ ID NO: 295275 - DNA, 12 bp, Artificial Sequence
  Oligonucleotide primer for the detection of SNP TSC0016518
tttttatttgtg

SEQ ID NO: 295276 - DNA, 12 bp, Artificial Sequence
  Oligonucleotide primer for the detection of SNP TSC0016519
tccaatcactct

SEQ ID NO: 295277 - DNA, 12 bp, Artificial Sequence
  Oligonucleotide primer for the detection of SNP TSC0016519
taggaggaggaa

SEQ ID NO: 295278 - DNA, 12 bp, Artificial Sequence
  Oligonucleotide primer for the detection of SNP TSC0016520
gtaattctccta

SEQ ID NO: 295279 - DNA, 12 bp, Artificial Sequence
  Oligonucleotide primer for the detection of SNP TSC0016520
taggagaattat

SEQ ID NO: 295280 - DNA, 12 bp, Artificial Sequence
  Oligonucleotide primer for the detection of SNP TSC0016520
taggagaattac

SEQ ID NO: 295281 - DNA, 12 bp, Artificial Sequence
  Oligonucleotide primer for the detection of SNP TSC0016520
caaaaaaatcac

SEQ ID NO: 295282 - DNA, 12 bp, Artificial Sequence
  Oligonucleotide primer for the detection of SNP TSC0016520
gtgatttttttg

SEQ ID NO: 295283 - DNA, 12 bp, Artificial Sequence
  Oligonucleotide primer for the detection of SNP TSC0016521
tccctcctctcc

SEQ ID NO: 295284 - DNA, 12 bp, Artificial Sequence
  Oligonucleotide primer for the detection of SNP TSC0016521
taagttgaggtt

SEQ ID NO: 295285 - DNA, 12 bp, Artificial Sequence
  Oligonucleotide primer for the detection of SNP TSC0016521
taagttgaggtc

SEQ ID NO: 295286 - DNA, 12 bp, Artificial Sequence
  Oligonucleotide primer for the detection of SNP TSC0016522
attttcatctta

SEQ ID NO: 295287 - DNA, 12 bp, Artificial Sequence
  Oligonucleotide primer for the detection of SNP TSC0016522
gaaattaaaaag

SEQ ID NO: 295288 - DNA, 12 bp, Artificial Sequence
  Oligonucleotide primer for the detection of SNP TSC0016523
tttttaaaatat

SEQ ID NO: 295289 - DNA, 12 bp, Artificial Sequence
  Oligonucleotide primer for the detection of SNP TSC0016523
gggattaggtat

SEQ ID NO: 295290 - DNA, 12 bp, Artificial Sequence
  Oligonucleotide primer for the detection of SNP TSC0016523
aaaatcaaacat

SEQ ID NO: 295291 - DNA, 12 bp, Artificial Sequence
  Oligonucleotide primer for the detection of SNP TSC0016523
ttttagggtatt

SEQ ID NO: 295292 - DNA, 12 bp, Artificial Sequence
  Oligonucleotide primer for the detection of SNP TSC0016524
acttttttttca

SEQ ID NO: 295293 - DNA, 12 bp, Artificial Sequence
  Oligonucleotide primer for the detection of SNP TSC0016524
gggatttttttt

SEQ ID NO: 295294 - DNA, 12 bp, Artificial Sequence
  Oligonucleotide primer for the detection of SNP TSC0016524
gggatttttttc

SEQ ID NO: 295295 - DNA, 12 bp, Artificial Sequence
  Oligonucleotide primer for the detection of SNP TSC0016524
aaaatttctctc

SEQ ID NO: 295296 - DNA, 12 bp, Artificial Sequence
  Oligonucleotide primer for the detection of SNP TSC0016525
aattacttcaaa

SEQ ID NO: 295297 - DNA, 12 bp, Artificial Sequence
  Oligonucleotide primer for the detection of SNP TSC0016525
agttggtagaat

SEQ ID NO: 295298 - DNA, 12 bp, Artificial Sequence
  Oligonucleotide primer for the detection of SNP TSC0016528
ttttctattttt

SEQ ID NO: 295299 - DNA, 12 bp, Artificial Sequence
  Oligonucleotide primer for the detection of SNP TSC0016528
ggaaattaaaaa

SEQ ID NO: 295300 - DNA, 12 bp, Artificial Sequence
  Oligonucleotide primer for the detection of SNP TSC0016529
aattacttaatc

SEQ ID NO: 295301 - DNA, 12 bp, Artificial Sequence
  Oligonucleotide primer for the detection of SNP TSC0016529
ggtaataatttg

SEQ ID NO: 295302 - DNA, 12 bp, Artificial Sequence
  Oligonucleotide primer for the detection of SNP TSC0016529
acaacaatctaa

SEQ ID NO: 295303 - DNA, 12 bp, Artificial Sequence
  Oligonucleotide primer for the detection of SNP TSC0016529
gttatttagttt

SEQ ID NO: 295304 - DNA, 12 bp, Artificial Sequence
  Oligonucleotide primer for the detection of SNP TSC0016530
ccacatatccaa

SEQ ID NO: 295305 - DNA, 12 bp, Artificial Sequence
  Oligonukleotid-Primer
aagaatttgatt

SEQ ID NO: 295306 - DNA, 12 bp, Artificial Sequence
  Oligonucleotide primer for the detection of SNP TSC0016530
aagaatttgatc

SEQ ID NO: 295307 - DNA, 12 bp, Artificial Sequence
  Oligonucleotide primer for the detection of SNP TSC0016530
aaaaatttaatc

SEQ ID NO: 295308 - DNA, 12 bp, Artificial Sequence
  Oligonucleotide primer for the detection of SNP TSC0016530
tatatatttagt

SEQ ID NO: 295309 - DNA, 12 bp, Artificial Sequence
  Oligonucleotide primer for the detection of SNP TSC0016531
tctttctctttt

SEQ ID NO: 295310 - DNA, 12 bp, Artificial Sequence
  Oligonucleotide primer for the detection of SNP TSC0016531
ttttttgagata

SEQ ID NO: 295311 - DNA, 12 bp, Artificial Sequence
  Oligonucleotide primer for the detection of SNP TSC0016531
tttttcgagata

SEQ ID NO: 295312 - DNA, 12 bp, Artificial Sequence
  Oligonucleotide primer for the detection of SNP TSC0016532
acaacaaccact

SEQ ID NO: 295313 - DNA, 12 bp, Artificial Sequence
  Oligonucleotide primer for the detection of SNP TSC0016532
acaacgaccact

SEQ ID NO: 295314 - DNA, 12 bp, Artificial Sequence
  Oligonucleotide primer for the detection of SNP TSC0016532
agtggagggttg

SEQ ID NO: 295315 - DNA, 12 bp, Artificial Sequence
  Oligonucleotide primer for the detection of SNP TSC0016532
gtagtggttatt

SEQ ID NO: 295316 - DNA, 12 bp, Artificial Sequence
  Oligonucleotide primer for the detection of SNP TSC0016532
gtagcggttatt

SEQ ID NO: 295317 - DNA, 12 bp, Artificial Sequence
  Oligonucleotide primer for the detection of SNP TSC0016533
cacctaaatatt

SEQ ID NO: 295318 - DNA, 12 bp, Artificial Sequence
  Oligonucleotide primer for the detection of SNP TSC0016533
gatgagtagaaa

SEQ ID NO: 295319 - DNA, 12 bp, Artificial Sequence
  Oligonucleotide primer for the detection of SNP TSC0016534
aaacaaaccctc

SEQ ID NO: 295320 - DNA, 12 bp, Artificial Sequence
  Oligonucleotide primer for the detection of SNP TSC0016534
ttgtatgtagtt

SEQ ID NO: 295321 - DNA, 12 bp, Artificial Sequence
  Oligonucleotide primer for the detection of SNP TSC0016534
ctacatataatc

SEQ ID NO: 295322 - DNA, 12 bp, Artificial Sequence
  Oligonucleotide primer for the detection of SNP TSC0016534
aagtaagttttt

SEQ ID NO: 295323 - DNA, 12 bp, Artificial Sequence
  Oligonucleotide primer for the detection of SNP TSC0016535
aacaaacaaatc

SEQ ID NO: 295324 - DNA, 12 bp, Artificial Sequence
  Oligonucleotide primer for the detection of SNP TSC0016535
aacgaacaaatc

SEQ ID NO: 295325 - DNA, 12 bp, Artificial Sequence
  Oligonucleotide primer for the detection of SNP TSC0016535
tttttgattttg

SEQ ID NO: 295326 - DNA, 12 bp, Artificial Sequence
  Oligonucleotide primer for the detection of SNP TSC0016535
tttttgatttcg

SEQ ID NO: 295327 - DNA, 12 bp, Artificial Sequence
  Oligonucleotide primer for the detection of SNP TSC0016535
ctcctaacctca

SEQ ID NO: 295328 - DNA, 12 bp, Artificial Sequence
  Oligonucleotide primer for the detection of SNP TSC0016535
ctcctaacctcg

SEQ ID NO: 295329 - DNA, 12 bp, Artificial Sequence
  Oligonucleotide primer for the detection of SNP TSC0016535
ggtgggtagatt

SEQ ID NO: 295330 - DNA, 12 bp, Artificial Sequence
  Oligonucleotide primer for the detection of SNP TSC0016535
ggcgggtagatt

SEQ ID NO: 295331 - DNA, 12 bp, Artificial Sequence
  Oligonucleotide primer for the detection of SNP TSC0016536
ataccttctaaa

SEQ ID NO: 295332 - DNA, 12 bp, Artificial Sequence
  Oligonucleotide primer for the detection of SNP TSC0016536
gtattttttaaa

SEQ ID NO: 295333 - DNA, 12 bp, Artificial Sequence
  Oligonucleotide primer for the detection of SNP TSC0016537
tacactaccctc

SEQ ID NO: 295334 - DNA, 12 bp, Artificial Sequence
  Oligonucleotide primer for the detection of SNP TSC0016537
tacgctaccctc

SEQ ID NO: 295335 - DNA, 12 bp, Artificial Sequence
  Oligonucleotide primer for the detection of SNP TSC0016537
gaagaaagagga

SEQ ID NO: 295336 - DNA, 12 bp, Artificial Sequence
  Oligonucleotide primer for the detection of SNP TSC0016538
ctcaaaactatc

SEQ ID NO: 295337 - DNA, 12 bp, Artificial Sequence
  Oligonucleotide primer for the detection of SNP TSC0016538
aggttatttttt

SEQ ID NO: 295338 - DNA, 12 bp, Artificial Sequence
  Oligonucleotide primer for the detection of SNP TSC0016538
aaaccatcctcc

SEQ ID NO: 295339 - DNA, 12 bp, Artificial Sequence
  Oligonucleotide primer for the detection of SNP TSC0016538
tttaaggttgtt

SEQ ID NO: 295340 - DNA, 12 bp, Artificial Sequence
  Oligonucleotide primer for the detection of SNP TSC0016539
ctaattccataa

SEQ ID NO: 295341 - DNA, 12 bp, Artificial Sequence
  Oligonucleotide primer for the detection of SNP TSC0016539
tagggttagggg

SEQ ID NO: 295342 - DNA, 12 bp, Artificial Sequence
  Oligonucleotide primer for the detection of SNP TSC0016541
ttaaaaaacacc

SEQ ID NO: 295343 - DNA, 12 bp, Artificial Sequence
  Oligonucleotide primer for the detection of SNP TSC0016541
ttgtgtgtgggt

SEQ ID NO: 295344 - DNA, 12 bp, Artificial Sequence
  Oligonucleotide primer for the detection of SNP TSC0016541
ttgtgcgtgggt

SEQ ID NO: 295345 - DNA, 12 bp, Artificial Sequence
  Oligonucleotide primer for the detection of SNP TSC0016541
ctatacataaac

SEQ ID NO: 295346 - DNA, 12 bp, Artificial Sequence
  Oligonucleotide primer for the detection of SNP TSC0016541
ctatacgtaaac

SEQ ID NO: 295347 - DNA, 12 bp, Artificial Sequence
  Oligonucleotide primer for the detection of SNP TSC0016541
ttagggggtatt

SEQ ID NO: 295348 - DNA, 12 bp, Artificial Sequence
  Oligonucleotide primer for the detection of SNP TSC0016542
ttattatttctt

SEQ ID NO: 295349 - DNA, 12 bp, Artificial Sequence
  Oligonucleotide primer for the detection of SNP TSC0016542
aataataagtta

SEQ ID NO: 295350 - DNA, 12 bp, Artificial Sequence
  Oligonucleotide primer for the detection of SNP TSC0016543
atttaataactt

SEQ ID NO: 295351 - DNA, 12 bp, Artificial Sequence
  Oligonucleotide primer for the detection of SNP TSC0016543
aagtaatatatg

SEQ ID NO: 295352 - DNA, 12 bp, Artificial Sequence
  Oligonucleotide primer for the detection of SNP TSC0016543
aagtaatatacg

SEQ ID NO: 295353 - DNA, 12 bp, Artificial Sequence
  Oligonucleotide primer for the detection of SNP TSC0016544
atgtatttttag

SEQ ID NO: 295354 - DNA, 12 bp, Artificial Sequence
  Oligonucleotide primer for the detection of SNP TSC0016546
agagttattgtt

SEQ ID NO: 295355 - DNA, 12 bp, Artificial Sequence
  Oligonucleotide primer for the detection of SNP TSC0016546
aaaaccattacc

SEQ ID NO: 295356 - DNA, 12 bp, Artificial Sequence
  Oligonucleotide primer for the detection of SNP TSC0016546
ggggaaatagtg

SEQ ID NO: 295357 - DNA, 12 bp, Artificial Sequence
  Oligonucleotide primer for the detection of SNP TSC0016546
ggggaaatagcg

SEQ ID NO: 295358 - DNA, 12 bp, Artificial Sequence
  Oligonucleotide primer for the detection of SNP TSC0016547
acttacttaatc

SEQ ID NO: 295359 - DNA, 12 bp, Artificial Sequence
  Oligonucleotide primer for the detection of SNP TSC0016547
gattaagaatgg

SEQ ID NO: 295360 - DNA, 12 bp, Artificial Sequence
  Oligonucleotide primer for the detection of SNP TSC0016548
actaaaataatt

SEQ ID NO: 295361 - DNA, 12 bp, Artificial Sequence
  Oligonucleotide primer for the detection of SNP TSC0016548
attttttgttaa

SEQ ID NO: 295362 - DNA, 12 bp, Artificial Sequence
  Oligonucleotide primer for the detection of SNP TSC0016550
acccttttcctc

SEQ ID NO: 295363 - DNA, 12 bp, Artificial Sequence
  Oligonucleotide primer for the detection of SNP TSC0016550
aaatgaaattta

SEQ ID NO: 295364 - DNA, 12 bp, Artificial Sequence
  Oligonucleotide primer for the detection of SNP TSC0016550
aaataaaaccca

SEQ ID NO: 295365 - DNA, 12 bp, Artificial Sequence
  Oligonucleotide primer for the detection of SNP TSC0016551
attcaaacgatt

SEQ ID NO: 295366 - DNA, 12 bp, Artificial Sequence
  Oligonucleotide primer for the detection of SNP TSC0016551
gttgagatagga

SEQ ID NO: 295367 - DNA, 12 bp, Artificial Sequence
  Oligonucleotide primer for the detection of SNP TSC0016554
aataatcaaaaa

SEQ ID NO: 295368 - DNA, 12 bp, Artificial Sequence
  Oligonucleotide primer for the detection of SNP TSC0016554
ttatggaaaggg

SEQ ID NO: 295369 - DNA, 12 bp, Artificial Sequence
  Oligonucleotide primer for the detection of SNP TSC0016555
attatcttattt

SEQ ID NO: 295370 - DNA, 12 bp, Artificial Sequence
  Oligonucleotide primer for the detection of SNP TSC0016555
ggtgaaaattaa

SEQ ID NO: 295371 - DNA, 12 bp, Artificial Sequence
  Oligonucleotide primer for the detection of SNP TSC0016558
taaaattctttt

SEQ ID NO: 295372 - DNA, 12 bp, Artificial Sequence
  Oligonucleotide primer for the detection of SNP TSC0016558
ggatgatttaaa

SEQ ID NO: 295373 - DNA, 12 bp, Artificial Sequence
  Oligonucleotide primer for the detection of SNP TSC0016559
tttttggttgga

SEQ ID NO: 295374 - DNA, 12 bp, Artificial Sequence
  Oligonucleotide primer for the detection of SNP TSC0016561
actatacctaaa

SEQ ID NO: 295375 - DNA, 12 bp, Artificial Sequence
  Oligonucleotide primer for the detection of SNP TSC0016561
attggttttaag

SEQ ID NO: 295376 - DNA, 12 bp, Artificial Sequence
  Oligonucleotide primer for the detection of SNP TSC0016561
actaaccccaaa

SEQ ID NO: 295377 - DNA, 12 bp, Artificial Sequence
  Oligonucleotide primer for the detection of SNP TSC0016561
attgtgtttaga

SEQ ID NO: 295378 - DNA, 12 bp, Artificial Sequence
  Oligonucleotide primer for the detection of SNP TSC0016564
aattaaaaaatc

SEQ ID NO: 295379 - DNA, 12 bp, Artificial Sequence
  Oligonucleotide primer for the detection of SNP TSC0016564
ttagagtagtta

SEQ ID NO: 295380 - DNA, 12 bp, Artificial Sequence
  Oligonucleotide primer for the detection of SNP TSC0016567
ttccataatatc

SEQ ID NO: 295381 - DNA, 12 bp, Artificial Sequence
  Oligonucleotide primer for the detection of SNP TSC0016567
tatagtgtttga

SEQ ID NO: 295382 - DNA, 12 bp, Artificial Sequence
  Oligonucleotide primer for the detection of SNP TSC0016567
tataatacctaa

SEQ ID NO: 295383 - DNA, 12 bp, Artificial Sequence
  Oligonucleotide primer for the detection of SNP TSC0016567
ttttatggtgtt

SEQ ID NO: 295384 - DNA, 12 bp, Artificial Sequence
  Oligonucleotide primer for the detection of SNP TSC0016568
tgtgtgtgtggg

SEQ ID NO: 295385 - DNA, 12 bp, Artificial Sequence
  Oligonucleotide primer for the detection of SNP TSC0016568
tatatatataaa

SEQ ID NO: 295386 - DNA, 12 bp, Artificial Sequence
  Oligonucleotide primer for the detection of SNP TSC0016574
caaaataacacc

SEQ ID NO: 295387 - DNA, 12 bp, Artificial Sequence
  Oligonucleotide primer for the detection of SNP TSC0016574
ttgtgtgtgttg

SEQ ID NO: 295388 - DNA, 12 bp, Artificial Sequence
  Oligonucleotide primer for the detection of SNP TSC0016574
tcgtgtgtgttg

SEQ ID NO: 295389 - DNA, 12 bp, Artificial Sequence
  Oligonucleotide primer for the detection of SNP TSC0016574
ccatatatacta

SEQ ID NO: 295390 - DNA, 12 bp, Artificial Sequence
  Oligonucleotide primer for the detection of SNP TSC0016574
ccgtatatacta

SEQ ID NO: 295391 - DNA, 12 bp, Artificial Sequence
  Oligonucleotide primer for the detection of SNP TSC0016574
tagggtggtatt

SEQ ID NO: 295392 - DNA, 12 bp, Artificial Sequence
  Oligonucleotide primer for the detection of SNP TSC0016576
attatatatctt

SEQ ID NO: 295393 - DNA, 12 bp, Artificial Sequence
  Oligonucleotide primer for the detection of SNP TSC0016576
tgtagatatgtg

SEQ ID NO: 295394 - DNA, 12 bp, Artificial Sequence
  Oligonucleotide primer for the detection of SNP TSC0016577
tcacaataccca

SEQ ID NO: 295395 - DNA, 12 bp, Artificial Sequence
  Oligonucleotide primer for the detection of SNP TSC0016577
tgtttagtgtgt

SEQ ID NO: 295396 - DNA, 12 bp, Artificial Sequence
  Oligonucleotide primer for the detection of SNP TSC0016577
cgtttagtgtgt

SEQ ID NO: 295397 - DNA, 12 bp, Artificial Sequence
  Oligonucleotide primer for the detection of SNP TSC0016577
cactcaatatat

SEQ ID NO: 295398 - DNA, 12 bp, Artificial Sequence
  Oligonucleotide primer for the detection of SNP TSC0016577
cgctcaatatat

SEQ ID NO: 295399 - DNA, 12 bp, Artificial Sequence
  Oligonucleotide primer for the detection of SNP TSC0016577
ttatagtgttta

SEQ ID NO: 295400 - DNA, 12 bp, Artificial Sequence
  Oligonucleotide primer for the detection of SNP TSC0016579
aaaattcttccc

SEQ ID NO: 295401 - DNA, 12 bp, Artificial Sequence
  Oligonucleotide primer for the detection of SNP TSC0016579
ttcctcaaaata

SEQ ID NO: 295402 - DNA, 12 bp, Artificial Sequence
  Oligonucleotide primer for the detection of SNP TSC0016581
caaaactactct

SEQ ID NO: 295403 - DNA, 12 bp, Artificial Sequence
  Oligonucleotide primer for the detection of SNP TSC0016581
cgaaactactct

SEQ ID NO: 295404 - DNA, 12 bp, Artificial Sequence
  Oligonucleotide primer for the detection of SNP TSC0016581
tattaggtttag

SEQ ID NO: 295405 - DNA, 12 bp, Artificial Sequence
  Oligonucleotide primer for the detection of SNP TSC0016581
caccaaacccaa

SEQ ID NO: 295406 - DNA, 12 bp, Artificial Sequence
  Oligonucleotide primer for the detection of SNP TSC0016581
tggagttgtttt

SEQ ID NO: 295407 - DNA, 12 bp, Artificial Sequence
  Oligonucleotide primer for the detection of SNP TSC0016581
cggagttgtttt

SEQ ID NO: 295408 - DNA, 12 bp, Artificial Sequence
  Oligonucleotide primer for the detection of SNP TSC0016582
gtagggtatata

SEQ ID NO: 295409 - DNA, 12 bp, Artificial Sequence
  Oligonucleotide primer for the detection of SNP TSC0016583
gtatgttttaaa

SEQ ID NO: 295410 - DNA, 12 bp, Artificial Sequence
  Oligonukleotid-Primer
taatcccctctt

SEQ ID NO: 295411 - DNA, 12 bp, Artificial Sequence
  Oligonucleotide primer for the detection of SNP TSC0016584
aggtgggtgttt

SEQ ID NO: 295412 - DNA, 12 bp, Artificial Sequence
  Oligonucleotide primer for the detection of SNP TSC0016584
aaataaatactt

SEQ ID NO: 295413 - DNA, 12 bp, Artificial Sequence
  Oligonucleotide primer for the detection of SNP TSC0016585
ccatttttttct

SEQ ID NO: 295414 - DNA, 12 bp, Artificial Sequence
  Oligonucleotide primer for the detection of SNP TSC0016585
ttgattattttg

SEQ ID NO: 295415 - DNA, 12 bp, Artificial Sequence
  Oligonucleotide primer for the detection of SNP TSC0016585
ctaaccactcta

SEQ ID NO: 295416 - DNA, 12 bp, Artificial Sequence
  Oligonucleotide primer for the detection of SNP TSC0016586
aaaaataattct

SEQ ID NO: 295417 - DNA, 12 bp, Artificial Sequence
  Oligonucleotide primer for the detection of SNP TSC0016587
accattatccac

SEQ ID NO: 295418 - DNA, 12 bp, Artificial Sequence
  Oligonucleotide primer for the detection of SNP TSC0016587
agttaaggatta

SEQ ID NO: 295419 - DNA, 12 bp, Artificial Sequence
  Oligonucleotide primer for the detection of SNP TSC0016588
ccaacaaaaacc

SEQ ID NO: 295420 - DNA, 12 bp, Artificial Sequence
  Oligonucleotide primer for the detection of SNP TSC0016588
gtgtgattttat

SEQ ID NO: 295421 - DNA, 12 bp, Artificial Sequence
  Oligonucleotide primer for the detection of SNP TSC0016588
aatataatccta

SEQ ID NO: 295422 - DNA, 12 bp, Artificial Sequence
  Oligonucleotide primer for the detection of SNP TSC0016588
tagtagaggttt

SEQ ID NO: 295423 - DNA, 12 bp, Artificial Sequence
  Oligonucleotide primer for the detection of SNP TSC0016589
caaacctcaccc

SEQ ID NO: 295424 - DNA, 12 bp, Artificial Sequence
  Oligonucleotide primer for the detection of SNP TSC0016589
caaacctcgccc

SEQ ID NO: 295425 - DNA, 12 bp, Artificial Sequence
  Oligonucleotide primer for the detection of SNP TSC0016589
gtgggtgttagg

SEQ ID NO: 295426 - DNA, 12 bp, Artificial Sequence
  Oligonucleotide primer for the detection of SNP TSC0016589
gcgggtgttagg

SEQ ID NO: 295427 - DNA, 12 bp, Artificial Sequence
  Oligonucleotide primer for the detection of SNP TSC0016589
acaaatatcaaa

SEQ ID NO: 295428 - DNA, 12 bp, Artificial Sequence
  Oligonucleotide primer for the detection of SNP TSC0016589
acgaatatcaaa

SEQ ID NO: 295429 - DNA, 12 bp, Artificial Sequence
  Oligonucleotide primer for the detection of SNP TSC0016589
tagatttcgttt

SEQ ID NO: 295430 - DNA, 12 bp, Artificial Sequence
  Oligonucleotide primer for the detection of SNP TSC0016591
acttaatacctc

SEQ ID NO: 295431 - DNA, 12 bp, Artificial Sequence
  Oligonucleotide primer for the detection of SNP TSC0016591
ttaagatattta

SEQ ID NO: 295432 - DNA, 12 bp, Artificial Sequence
  Oligonucleotide primer for the detection of SNP TSC0016591
ttaaaacactca

SEQ ID NO: 295433 - DNA, 12 bp, Artificial Sequence
  Oligonucleotide primer for the detection of SNP TSC0016591
atttaatgtttt

SEQ ID NO: 295434 - DNA, 12 bp, Artificial Sequence
  Oligonucleotide primer for the detection of SNP TSC0016592
tataaaaacttc

SEQ ID NO: 295435 - DNA, 12 bp, Artificial Sequence
  Oligonucleotide primer for the detection of SNP TSC0016592
gtttttggttgg

SEQ ID NO: 295436 - DNA, 12 bp, Artificial Sequence
  Oligonucleotide primer for the detection of SNP TSC0016592
acctctaactaa

SEQ ID NO: 295437 - DNA, 12 bp, Artificial Sequence
  Oligonucleotide primer for the detection of SNP TSC0016592
tgtgagaatttt

SEQ ID NO: 295438 - DNA, 12 bp, Artificial Sequence
  Oligonucleotide primer for the detection of SNP TSC0016593
attttttcctaa

SEQ ID NO: 295439 - DNA, 12 bp, Artificial Sequence
  Oligonucleotide primer for the detection of SNP TSC0016593
aagatggaagga

SEQ ID NO: 295440 - DNA, 12 bp, Artificial Sequence
  Oligonucleotide primer for the detection of SNP TSC0016595
tcccacatctaa

SEQ ID NO: 295441 - DNA, 12 bp, Artificial Sequence
  Oligonucleotide primer for the detection of SNP TSC0016595
tcccacgtctaa

SEQ ID NO: 295442 - DNA, 12 bp, Artificial Sequence
  Oligonucleotide primer for the detection of SNP TSC0016595
tcccgcatctaa

SEQ ID NO: 295443 - DNA, 12 bp, Artificial Sequence
  Oligonucleotide primer for the detection of SNP TSC0016595
tcccgcgtctaa

SEQ ID NO: 295444 - DNA, 12 bp, Artificial Sequence
  Oligonucleotide primer for the detection of SNP TSC0016595
ggttagatgtgg

SEQ ID NO: 295445 - DNA, 12 bp, Artificial Sequence
  Oligonucleotide primer for the detection of SNP TSC0016595
ggttagacgtgg

SEQ ID NO: 295446 - DNA, 12 bp, Artificial Sequence
  Oligonucleotide primer for the detection of SNP TSC0016595
ggttagatgcgg

SEQ ID NO: 295447 - DNA, 12 bp, Artificial Sequence
  Oligonucleotide primer for the detection of SNP TSC0016595
ggttagacgcgg

SEQ ID NO: 295448 - DNA, 12 bp, Artificial Sequence
  Oligonucleotide primer for the detection of SNP TSC0016595
aatcaaacacaa

SEQ ID NO: 295449 - DNA, 12 bp, Artificial Sequence
  Oligonucleotide primer for the detection of SNP TSC0016595
aatcaaacacga

SEQ ID NO: 295450 - DNA, 12 bp, Artificial Sequence
  Oligonucleotide primer for the detection of SNP TSC0016595
aatcaaacgcaa

SEQ ID NO: 295451 - DNA, 12 bp, Artificial Sequence
  Oligonucleotide primer for the detection of SNP TSC0016595
aatcaaacgcga

SEQ ID NO: 295452 - DNA, 12 bp, Artificial Sequence
  Oligonucleotide primer for the detection of SNP TSC0016595
ttttgtgtttga

SEQ ID NO: 295453 - DNA, 12 bp, Artificial Sequence
  Oligonucleotide primer for the detection of SNP TSC0016595
tttcgtgtttga

SEQ ID NO: 295454 - DNA, 12 bp, Artificial Sequence
  Oligonucleotide primer for the detection of SNP TSC0016595
ttttgcgtttga

SEQ ID NO: 295455 - DNA, 12 bp, Artificial Sequence
  Oligonucleotide primer for the detection of SNP TSC0016595
tttcgcgtttga

SEQ ID NO: 295456 - DNA, 12 bp, Artificial Sequence
  Oligonucleotide primer for the detection of SNP TSC0016596
caaaaaatttca

SEQ ID NO: 295457 - DNA, 12 bp, Artificial Sequence
  Oligonucleotide primer for the detection of SNP TSC0016596
agtttattgaag

SEQ ID NO: 295458 - DNA, 12 bp, Artificial Sequence
  Oligonucleotide primer for the detection of SNP TSC0016596
aatccactaaaa

SEQ ID NO: 295459 - DNA, 12 bp, Artificial Sequence
  Oligonucleotide primer for the detection of SNP TSC0016596
aaggaattttat

SEQ ID NO: 295460 - DNA, 12 bp, Artificial Sequence
  Oligonucleotide primer for the detection of SNP TSC0016597
acccaaaataaa

SEQ ID NO: 295461 - DNA, 12 bp, Artificial Sequence
  Oligonucleotide primer for the detection of SNP TSC0016597
ttttgttttatt

SEQ ID NO: 295462 - DNA, 12 bp, Artificial Sequence
  Oligonucleotide primer for the detection of SNP TSC0016597
ttttgttttatc

SEQ ID NO: 295463 - DNA, 12 bp, Artificial Sequence
  Oligonucleotide primer for the detection of SNP TSC0016597
tcctatcctacc

SEQ ID NO: 295464 - DNA, 12 bp, Artificial Sequence
  Oligonucleotide primer for the detection of SNP TSC0016597
aagtttagggtg

SEQ ID NO: 295465 - DNA, 12 bp, Artificial Sequence
  Oligonucleotide primer for the detection of SNP TSC0016598
ttatattttacc

SEQ ID NO: 295466 - DNA, 12 bp, Artificial Sequence
  Oligonucleotide primer for the detection of SNP TSC0016598
gaaaaaaattag

SEQ ID NO: 295467 - DNA, 12 bp, Artificial Sequence
  Oligonukleotid-Primer
ttgtattttatt

SEQ ID NO: 295468 - DNA, 12 bp, Artificial Sequence
  Oligonucleotide primer for the detection of SNP TSC0016598
ttgtattttatc

SEQ ID NO: 295469 - DNA, 12 bp, Artificial Sequence
  Oligonucleotide primer for the detection of SNP TSC0016599
aaacacacatta

SEQ ID NO: 295470 - DNA, 12 bp, Artificial Sequence
  Oligonucleotide primer for the detection of SNP TSC0016599
aaacacacgtta

SEQ ID NO: 295471 - DNA, 12 bp, Artificial Sequence
  Oligonucleotide primer for the detection of SNP TSC0016599
tagggaggtgat

SEQ ID NO: 295472 - DNA, 12 bp, Artificial Sequence
  Oligonucleotide primer for the detection of SNP TSC0016599
tagggaggtgac

SEQ ID NO: 295473 - DNA, 12 bp, Artificial Sequence
  Oligonucleotide primer for the detection of SNP TSC0016599
aaatatatgttg

SEQ ID NO: 295474 - DNA, 12 bp, Artificial Sequence
  Oligonucleotide primer for the detection of SNP TSC0016599
aaatatacgttg

SEQ ID NO: 295475 - DNA, 12 bp, Artificial Sequence
  Oligonucleotide primer for the detection of SNP TSC0016602
ttgttagtttat

SEQ ID NO: 295476 - DNA, 12 bp, Artificial Sequence
  Oligonucleotide primer for the detection of SNP TSC0016602
ctaccaacccac

SEQ ID NO: 295477 - DNA, 12 bp, Artificial Sequence
  Oligonucleotide primer for the detection of SNP TSC0016602
gggtgggggtat

SEQ ID NO: 295478 - DNA, 12 bp, Artificial Sequence
  Oligonucleotide primer for the detection of SNP TSC0016604
tataactaaaat

SEQ ID NO: 295479 - DNA, 12 bp, Artificial Sequence
  Oligonucleotide primer for the detection of SNP TSC0016605
aactccaccttt

SEQ ID NO: 295480 - DNA, 12 bp, Artificial Sequence
  Oligonucleotide primer for the detection of SNP TSC0016605
agaggagaagag

SEQ ID NO: 295481 - DNA, 12 bp, Artificial Sequence
  Oligonucleotide primer for the detection of SNP TSC0016606
aaactaaccaaa

SEQ ID NO: 295482 - DNA, 12 bp, Artificial Sequence
  Oligonucleotide primer for the detection of SNP TSC0016606
gggagagttgag

SEQ ID NO: 295483 - DNA, 12 bp, Artificial Sequence
  Oligonucleotide primer for the detection of SNP TSC0016606
aaaaaaactaaa

SEQ ID NO: 295484 - DNA, 12 bp, Artificial Sequence
  Oligonucleotide primer for the detection of SNP TSC0016606
gggttggttaag

SEQ ID NO: 295485 - DNA, 12 bp, Artificial Sequence
  Oligonucleotide primer for the detection of SNP TSC0016607
agtgtgtgtgtg

SEQ ID NO: 295486 - DNA, 12 bp, Artificial Sequence
  Oligonucleotide primer for the detection of SNP TSC0016608
taaaatccccta

SEQ ID NO: 295487 - DNA, 12 bp, Artificial Sequence
  Oligonucleotide primer for the detection of SNP TSC0016608
aaaagatataat

SEQ ID NO: 295488 - DNA, 12 bp, Artificial Sequence
  Oligonucleotide primer for the detection of SNP TSC0016608
tgaaattttttg

SEQ ID NO: 295489 - DNA, 12 bp, Artificial Sequence
  Oligonucleotide primer for the detection of SNP TSC0016609
aaacatccctac

SEQ ID NO: 295490 - DNA, 12 bp, Artificial Sequence
  Oligonucleotide primer for the detection of SNP TSC0016609
ttgtttgttgtg

SEQ ID NO: 295491 - DNA, 12 bp, Artificial Sequence
  Oligonucleotide primer for the detection of SNP TSC0016610
atattttaatga

SEQ ID NO: 295492 - DNA, 12 bp, Artificial Sequence
  Oligonucleotide primer for the detection of SNP TSC0016613
gaggtagtgttt

SEQ ID NO: 295493 - DNA, 12 bp, Artificial Sequence
  Oligonucleotide primer for the detection of SNP TSC0016613
gaggtagcgttt

SEQ ID NO: 295494 - DNA, 12 bp, Artificial Sequence
  Oligonucleotide primer for the detection of SNP TSC0016613
aaaacaacattc

SEQ ID NO: 295495 - DNA, 12 bp, Artificial Sequence
  Oligonucleotide primer for the detection of SNP TSC0016613
aaaacaacgttc

SEQ ID NO: 295496 - DNA, 12 bp, Artificial Sequence
  Oligonucleotide primer for the detection of SNP TSC0016613
ggtgaggggtgg

SEQ ID NO: 295497 - DNA, 12 bp, Artificial Sequence
  Oligonucleotide primer for the detection of SNP TSC0016614
gtaggtatggtt

SEQ ID NO: 295498 - DNA, 12 bp, Artificial Sequence
  Oligonucleotide primer for the detection of SNP TSC0016614
acaaacataacc

SEQ ID NO: 295499 - DNA, 12 bp, Artificial Sequence
  Oligonucleotide primer for the detection of SNP TSC0016614
gcaaacataacc

SEQ ID NO: 295500 - DNA, 12 bp, Artificial Sequence
  Oligonucleotide primer for the detection of SNP TSC0016614
tgtttgttgggg

SEQ ID NO: 295501 - DNA, 12 bp, Artificial Sequence
  Oligonucleotide primer for the detection of SNP TSC0016618
ttctcacctcta

SEQ ID NO: 295502 - DNA, 12 bp, Artificial Sequence
  Oligonucleotide primer for the detection of SNP TSC0016618
gtatagttattt

SEQ ID NO: 295503 - DNA, 12 bp, Artificial Sequence
  Oligonucleotide primer for the detection of SNP TSC0016618
acacaatcacct

SEQ ID NO: 295504 - DNA, 12 bp, Artificial Sequence
  Oligonucleotide primer for the detection of SNP TSC0016619
agttttattagt

SEQ ID NO: 295505 - DNA, 12 bp, Artificial Sequence
  Oligonucleotide primer for the detection of SNP TSC0016619
aaccccaccaac

SEQ ID NO: 295506 - DNA, 12 bp, Artificial Sequence
  Oligonucleotide primer for the detection of SNP TSC0016619
ttagagataaag

SEQ ID NO: 295507 - DNA, 12 bp, Artificial Sequence
  Oligonucleotide primer for the detection of SNP TSC0016620
tcactactaaac

SEQ ID NO: 295508 - DNA, 12 bp, Artificial Sequence
  Oligonucleotide primer for the detection of SNP TSC0016620
ttaaatttatgg

SEQ ID NO: 295509 - DNA, 12 bp, Artificial Sequence
  Oligonucleotide primer for the detection of SNP TSC0016621
tggggttggggt

SEQ ID NO: 295510 - DNA, 12 bp, Artificial Sequence
  Oligonucleotide primer for the detection of SNP TSC0016621
cggggttggggt

SEQ ID NO: 295511 - DNA, 12 bp, Artificial Sequence
  Oligonucleotide primer for the detection of SNP TSC0016621
caaaattaaaac

SEQ ID NO: 295512 - DNA, 12 bp, Artificial Sequence
  Oligonucleotide primer for the detection of SNP TSC0016621
cgaaattaaaac

SEQ ID NO: 295513 - DNA, 12 bp, Artificial Sequence
  Oligonucleotide primer for the detection of SNP TSC0016621
taggtgttgagg

SEQ ID NO: 295514 - DNA, 12 bp, Artificial Sequence
  Oligonucleotide primer for the detection of SNP TSC0016622
ataatcccacct

SEQ ID NO: 295515 - DNA, 12 bp, Artificial Sequence
  Oligonucleotide primer for the detection of SNP TSC0016622
attagtttatgt

SEQ ID NO: 295516 - DNA, 12 bp, Artificial Sequence
  Oligonucleotide primer for the detection of SNP TSC0016622
atcaacccatac

SEQ ID NO: 295517 - DNA, 12 bp, Artificial Sequence
  Oligonucleotide primer for the detection of SNP TSC0016622
agttttattttt

SEQ ID NO: 295518 - DNA, 12 bp, Artificial Sequence
  Oligonucleotide primer for the detection of SNP TSC0016622
agttttattttc

SEQ ID NO: 295519 - DNA, 12 bp, Artificial Sequence
  Oligonucleotide primer for the detection of SNP TSC0016623
ctaacccccccc

SEQ ID NO: 295520 - DNA, 12 bp, Artificial Sequence
  Oligonucleotide primer for the detection of SNP TSC0016623
attttgttagga

SEQ ID NO: 295521 - DNA, 12 bp, Artificial Sequence
  Oligonucleotide primer for the detection of SNP TSC0016623
attctaccaaaa

SEQ ID NO: 295522 - DNA, 12 bp, Artificial Sequence
  Oligonucleotide primer for the detection of SNP TSC0016624
ttttattattat

SEQ ID NO: 295523 - DNA, 12 bp, Artificial Sequence
  Oligonucleotide primer for the detection of SNP TSC0016624
aaatttaaagta

SEQ ID NO: 295524 - DNA, 12 bp, Artificial Sequence
  Oligonucleotide primer for the detection of SNP TSC0016625
aataaatatacc

SEQ ID NO: 295525 - DNA, 12 bp, Artificial Sequence
  Oligonucleotide primer for the detection of SNP TSC0016625
gttatttagtat

SEQ ID NO: 295526 - DNA, 12 bp, Artificial Sequence
  Oligonucleotide primer for the detection of SNP TSC0016625
atcatttaacat

SEQ ID NO: 295527 - DNA, 12 bp, Artificial Sequence
  Oligonucleotide primer for the detection of SNP TSC0016625
gtcatttaacat

SEQ ID NO: 295528 - DNA, 12 bp, Artificial Sequence
  Oligonucleotide primer for the detection of SNP TSC0016625
gtggatatattt

SEQ ID NO: 295529 - DNA, 12 bp, Artificial Sequence
  Oligonucleotide primer for the detection of SNP TSC0016626
ctcctccattat

SEQ ID NO: 295530 - DNA, 12 bp, Artificial Sequence
  Oligonucleotide primer for the detection of SNP TSC0016626
gaagagggagga

SEQ ID NO: 295531 - DNA, 12 bp, Artificial Sequence
  Oligonucleotide primer for the detection of SNP TSC0016627
acgcaaaaattt

SEQ ID NO: 295532 - DNA, 12 bp, Artificial Sequence
  Oligonucleotide primer for the detection of SNP TSC0016627
ttgtaagggata

SEQ ID NO: 295533 - DNA, 12 bp, Artificial Sequence
  Oligonucleotide primer for the detection of SNP TSC0016627
ctacaaaaaaca

SEQ ID NO: 295534 - DNA, 12 bp, Artificial Sequence
  Oligonucleotide primer for the detection of SNP TSC0016627
atgtagggattt

SEQ ID NO: 295535 - DNA, 12 bp, Artificial Sequence
  Oligonucleotide primer for the detection of SNP TSC0016627
acgtagggattt

SEQ ID NO: 295536 - DNA, 12 bp, Artificial Sequence
  Oligonucleotide primer for the detection of SNP TSC0016628
aaatccctacat

SEQ ID NO: 295537 - DNA, 12 bp, Artificial Sequence
  Oligonucleotide primer for the detection of SNP TSC0016628
aaatccctacgt

SEQ ID NO: 295538 - DNA, 12 bp, Artificial Sequence
  Oligonucleotide primer for the detection of SNP TSC0016628
ggtttagtttta

SEQ ID NO: 295539 - DNA, 12 bp, Artificial Sequence
  Oligonucleotide primer for the detection of SNP TSC0016629
aaaaaaatatcc

SEQ ID NO: 295540 - DNA, 12 bp, Artificial Sequence
  Oligonucleotide primer for the detection of SNP TSC0016629
attggtgagtat

SEQ ID NO: 295541 - DNA, 12 bp, Artificial Sequence
  Oligonucleotide primer for the detection of SNP TSC0016629
attggtgagtac

SEQ ID NO: 295542 - DNA, 12 bp, Artificial Sequence
  Oligonucleotide primer for the detection of SNP TSC0016629
cattaataaaca

SEQ ID NO: 295543 - DNA, 12 bp, Artificial Sequence
  Oligonucleotide primer for the detection of SNP TSC0016631
tcttaaaccttc

SEQ ID NO: 295544 - DNA, 12 bp, Artificial Sequence
  Oligonucleotide primer for the detection of SNP TSC0016631
tttgtattttga

SEQ ID NO: 295545 - DNA, 12 bp, Artificial Sequence
  Oligonucleotide primer for the detection of SNP TSC0016631
tctacattttaa

SEQ ID NO: 295546 - DNA, 12 bp, Artificial Sequence
  Oligonucleotide primer for the detection of SNP TSC0016631
ttttaagttttt

SEQ ID NO: 295547 - DNA, 12 bp, Artificial Sequence
  Oligonucleotide primer for the detection of SNP TSC0016634
aaaatcaaatac

SEQ ID NO: 295548 - DNA, 12 bp, Artificial Sequence
  Oligonucleotide primer for the detection of SNP TSC0016634
gtattagtttta

SEQ ID NO: 295549 - DNA, 12 bp, Artificial Sequence
  Oligonucleotide primer for the detection of SNP TSC0016635
atttaataaacc

SEQ ID NO: 295550 - DNA, 12 bp, Artificial Sequence
  Oligonucleotide primer for the detection of SNP TSC0016635
tttggttatatt

SEQ ID NO: 295551 - DNA, 12 bp, Artificial Sequence
  Oligonucleotide primer for the detection of SNP TSC0016635
tttggttatatc

SEQ ID NO: 295552 - DNA, 12 bp, Artificial Sequence
  Oligonukleotid-Primer
cctaatcacatc

SEQ ID NO: 295553 - DNA, 12 bp, Artificial Sequence
  Oligonucleotide primer for the detection of SNP TSC0016635
gtttagtgggtt

SEQ ID NO: 295554 - DNA, 12 bp, Artificial Sequence
  Oligonucleotide primer for the detection of SNP TSC0016635
gtttagtgggtc

SEQ ID NO: 295555 - DNA, 12 bp, Artificial Sequence
  Oligonucleotide primer for the detection of SNP TSC0016637
aaataaccaaaa

SEQ ID NO: 295556 - DNA, 12 bp, Artificial Sequence
  Oligonucleotide primer for the detection of SNP TSC0016637
aaaggaaatttg

SEQ ID NO: 295557 - DNA, 12 bp, Artificial Sequence
  Oligonucleotide primer for the detection of SNP TSC0016637
gaatagttaaag

SEQ ID NO: 295558 - DNA, 12 bp, Artificial Sequence
  Oligonucleotide primer for the detection of SNP TSC0016638
tctctcctatct

SEQ ID NO: 295559 - DNA, 12 bp, Artificial Sequence
  Oligonucleotide primer for the detection of SNP TSC0016638
ggtggtgatggg

SEQ ID NO: 295560 - DNA, 12 bp, Artificial Sequence
  Oligonucleotide primer for the detection of SNP TSC0016639
gtaagtagaggt

SEQ ID NO: 295561 - DNA, 12 bp, Artificial Sequence
  Oligonucleotide primer for the detection of SNP TSC0016639
ttgagtgggagg

SEQ ID NO: 295562 - DNA, 12 bp, Artificial Sequence
  Oligonucleotide primer for the detection of SNP TSC0016640
taagtagtattt

SEQ ID NO: 295563 - DNA, 12 bp, Artificial Sequence
  Oligonucleotide primer for the detection of SNP TSC0016640
tcaaacaacatc

SEQ ID NO: 295564 - DNA, 12 bp, Artificial Sequence
  Oligonucleotide primer for the detection of SNP TSC0016640
tgataggaggat

SEQ ID NO: 295565 - DNA, 12 bp, Artificial Sequence
  Oligonucleotide primer for the detection of SNP TSC0016644
atttctcaaacc

SEQ ID NO: 295566 - DNA, 12 bp, Artificial Sequence
  Oligonucleotide primer for the detection of SNP TSC0016644
gatgggggatat

SEQ ID NO: 295567 - DNA, 12 bp, Artificial Sequence
  Oligonucleotide primer for the detection of SNP TSC0016644
gacgggggatat

SEQ ID NO: 295568 - DNA, 12 bp, Artificial Sequence
  Oligonucleotide primer for the detection of SNP TSC0016644
aacgaaaaatat

SEQ ID NO: 295569 - DNA, 12 bp, Artificial Sequence
  Oligonucleotide primer for the detection of SNP TSC0016645
tcatatccttac

SEQ ID NO: 295570 - DNA, 12 bp, Artificial Sequence
  Oligonucleotide primer for the detection of SNP TSC0016645
tgtataagtatg

SEQ ID NO: 295571 - DNA, 12 bp, Artificial Sequence
  Oligonucleotide primer for the detection of SNP TSC0016645
cgtataagtatg

SEQ ID NO: 295572 - DNA, 12 bp, Artificial Sequence
  Oligonucleotide primer for the detection of SNP TSC0016645
tgtataagtacg

SEQ ID NO: 295573 - DNA, 12 bp, Artificial Sequence
  Oligonucleotide primer for the detection of SNP TSC0016645
cgtataagtacg

SEQ ID NO: 295574 - DNA, 12 bp, Artificial Sequence
  Oligonucleotide primer for the detection of SNP TSC0016646
ttgttaaggtat

SEQ ID NO: 295575 - DNA, 12 bp, Artificial Sequence
  Oligonucleotide primer for the detection of SNP TSC0016646
ttatcaaaacat

SEQ ID NO: 295576 - DNA, 12 bp, Artificial Sequence
  Oligonucleotide primer for the detection of SNP TSC0016646
tggtattaaggg

SEQ ID NO: 295577 - DNA, 12 bp, Artificial Sequence
  Oligonucleotide primer for the detection of SNP TSC0016647
atttcaataaca

SEQ ID NO: 295578 - DNA, 12 bp, Artificial Sequence
  Oligonucleotide primer for the detection of SNP TSC0016647
tgttttagtaat

SEQ ID NO: 295579 - DNA, 12 bp, Artificial Sequence
  Oligonucleotide primer for the detection of SNP TSC0016648
tcacttcctcaa

SEQ ID NO: 295580 - DNA, 12 bp, Artificial Sequence
  Oligonucleotide primer for the detection of SNP TSC0016648
tcacttcctcga

SEQ ID NO: 295581 - DNA, 12 bp, Artificial Sequence
  Oligonucleotide primer for the detection of SNP TSC0016648
gtgtgtaggttt

SEQ ID NO: 295582 - DNA, 12 bp, Artificial Sequence
  Oligonucleotide primer for the detection of SNP TSC0016648
gcgtgtaggttt

SEQ ID NO: 295583 - DNA, 12 bp, Artificial Sequence
  Oligonucleotide primer for the detection of SNP TSC0016648
acatacaaaccc

SEQ ID NO: 295584 - DNA, 12 bp, Artificial Sequence
  Oligonucleotide primer for the detection of SNP TSC0016648
acgtacaaaccc

SEQ ID NO: 295585 - DNA, 12 bp, Artificial Sequence
  Oligonucleotide primer for the detection of SNP TSC0016648
ttatttttttgg

SEQ ID NO: 295586 - DNA, 12 bp, Artificial Sequence
  Oligonucleotide primer for the detection of SNP TSC0016648
ttattttttcgg

SEQ ID NO: 295587 - DNA, 12 bp, Artificial Sequence
  Oligonucleotide primer for the detection of SNP TSC0016650
aatataaactaa

SEQ ID NO: 295588 - DNA, 12 bp, Artificial Sequence
  Oligonucleotide primer for the detection of SNP TSC0016650
gtttttttttcg

SEQ ID NO: 295589 - DNA, 12 bp, Artificial Sequence
  Oligonucleotide primer for the detection of SNP TSC0016650
attctctctcca

SEQ ID NO: 295590 - DNA, 12 bp, Artificial Sequence
  Oligonucleotide primer for the detection of SNP TSC0016650
attctctctccg

SEQ ID NO: 295591 - DNA, 12 bp, Artificial Sequence
  Oligonucleotide primer for the detection of SNP TSC0016650
gaatgtgaatta

SEQ ID NO: 295592 - DNA, 12 bp, Artificial Sequence
  Oligonucleotide primer for the detection of SNP TSC0016651
taattctaatac

SEQ ID NO: 295593 - DNA, 12 bp, Artificial Sequence
  Oligonucleotide primer for the detection of SNP TSC0016651
atggtttggagg

SEQ ID NO: 295594 - DNA, 12 bp, Artificial Sequence
  Oligonucleotide primer for the detection of SNP TSC0016651
acggtttggagg

SEQ ID NO: 295595 - DNA, 12 bp, Artificial Sequence
  Oligonucleotide primer for the detection of SNP TSC0016651
acaacctaaaaa

SEQ ID NO: 295596 - DNA, 12 bp, Artificial Sequence
  Oligonucleotide primer for the detection of SNP TSC0016651
acgacctaaaaa

SEQ ID NO: 295597 - DNA, 12 bp, Artificial Sequence
  Oligonucleotide primer for the detection of SNP TSC0016651
tgattttaatgt

SEQ ID NO: 295598 - DNA, 12 bp, Artificial Sequence
  Oligonucleotide primer for the detection of SNP TSC0016654
aatcccattaaa

SEQ ID NO: 295599 - DNA, 12 bp, Artificial Sequence
  Oligonucleotide primer for the detection of SNP TSC0016654
tggggttaaaga

SEQ ID NO: 295600 - DNA, 12 bp, Artificial Sequence
  Oligonucleotide primer for the detection of SNP TSC0016654
cggggttaaaga

SEQ ID NO: 295601 - DNA, 12 bp, Artificial Sequence
  Oligonucleotide primer for the detection of SNP TSC0016654
cgaaaccaaaaa

SEQ ID NO: 295602 - DNA, 12 bp, Artificial Sequence
  Oligonucleotide primer for the detection of SNP TSC0016654
gttttattgggt

SEQ ID NO: 295603 - DNA, 12 bp, Artificial Sequence
  Oligonucleotide primer for the detection of SNP TSC0016654
gttttattgggc

SEQ ID NO: 295604 - DNA, 12 bp, Artificial Sequence
  Oligonucleotide primer for the detection of SNP TSC0016655
ttttttatttat

SEQ ID NO: 295605 - DNA, 12 bp, Artificial Sequence
  Oligonucleotide primer for the detection of SNP TSC0016655
ccttccattcat

SEQ ID NO: 295606 - DNA, 12 bp, Artificial Sequence
  Oligonucleotide primer for the detection of SNP TSC0016655
tagggtttggag

SEQ ID NO: 295607 - DNA, 12 bp, Artificial Sequence
  Oligonucleotide primer for the detection of SNP TSC0016656
acactcttaaaa

SEQ ID NO: 295608 - DNA, 12 bp, Artificial Sequence
  Oligonucleotide primer for the detection of SNP TSC0016656
acgctcttaaaa

SEQ ID NO: 295609 - DNA, 12 bp, Artificial Sequence
  Oligonucleotide primer for the detection of SNP TSC0016656
tttgaatttttt

SEQ ID NO: 295610 - DNA, 12 bp, Artificial Sequence
  Oligonucleotide primer for the detection of SNP TSC0016656
cctaaacttccc

SEQ ID NO: 295611 - DNA, 12 bp, Artificial Sequence
  Oligonucleotide primer for the detection of SNP TSC0016656
gtgtttttggaa

SEQ ID NO: 295612 - DNA, 12 bp, Artificial Sequence
  Oligonucleotide primer for the detection of SNP TSC0016656
gcgtttttggaa

SEQ ID NO: 295613 - DNA, 12 bp, Artificial Sequence
  Oligonucleotide primer for the detection of SNP TSC0016657
tcttttttacct

SEQ ID NO: 295614 - DNA, 12 bp, Artificial Sequence
  Oligonucleotide primer for the detection of SNP TSC0016657
atagttcgtgta

SEQ ID NO: 295615 - DNA, 12 bp, Artificial Sequence
  Oligonucleotide primer for the detection of SNP TSC0016658
aaaacctaattt

SEQ ID NO: 295616 - DNA, 12 bp, Artificial Sequence
  Oligonucleotide primer for the detection of SNP TSC0016658
aattatattata

SEQ ID NO: 295617 - DNA, 12 bp, Artificial Sequence
  Oligonucleotide primer for the detection of SNP TSC0016660
aatacaaaatcc

SEQ ID NO: 295618 - DNA, 12 bp, Artificial Sequence
  Oligonucleotide primer for the detection of SNP TSC0016660
taatattggatt

SEQ ID NO: 295619 - DNA, 12 bp, Artificial Sequence
  Oligonucleotide primer for the detection of SNP TSC0016660
taacactaaatt

SEQ ID NO: 295620 - DNA, 12 bp, Artificial Sequence
  Oligonucleotide primer for the detection of SNP TSC0016660
aatataagattt

SEQ ID NO: 295621 - DNA, 12 bp, Artificial Sequence
  Oligonukleotid-Primer
aaacaattaata

SEQ ID NO: 295622 - DNA, 12 bp, Artificial Sequence
  Oligonucleotide primer for the detection of SNP TSC0016661
ttgatatataat

SEQ ID NO: 295623 - DNA, 12 bp, Artificial Sequence
  Oligonucleotide primer for the detection of SNP TSC0016661
ctaatatataat

SEQ ID NO: 295624 - DNA, 12 bp, Artificial Sequence
  Oligonucleotide primer for the detection of SNP TSC0016661
gaataattggta

SEQ ID NO: 295625 - DNA, 12 bp, Artificial Sequence
  Oligonucleotide primer for the detection of SNP TSC0016662
tcctcccaccaa

SEQ ID NO: 295626 - DNA, 12 bp, Artificial Sequence
  Oligonucleotide primer for the detection of SNP TSC0016662
tcctcccgccaa

SEQ ID NO: 295627 - DNA, 12 bp, Artificial Sequence
  Oligonucleotide primer for the detection of SNP TSC0016662
agtaaggaaatt

SEQ ID NO: 295628 - DNA, 12 bp, Artificial Sequence
  Oligonucleotide primer for the detection of SNP TSC0016662
caaaaaaaccaa

SEQ ID NO: 295629 - DNA, 12 bp, Artificial Sequence
  Oligonucleotide primer for the detection of SNP TSC0016662
gattttttcgtt

SEQ ID NO: 295630 - DNA, 12 bp, Artificial Sequence
  Oligonucleotide primer for the detection of SNP TSC0016663
ctaacatactat

SEQ ID NO: 295631 - DNA, 12 bp, Artificial Sequence
  Oligonucleotide primer for the detection of SNP TSC0016663
aaagtgaagtta

SEQ ID NO: 295632 - DNA, 12 bp, Artificial Sequence
  Oligonucleotide primer for the detection of SNP TSC0016664
aaacaaaaatac

SEQ ID NO: 295633 - DNA, 12 bp, Artificial Sequence
  Oligonucleotide primer for the detection of SNP TSC0016664
ttgtgtatttgg

SEQ ID NO: 295634 - DNA, 12 bp, Artificial Sequence
  Oligonucleotide primer for the detection of SNP TSC0016664
ctatacacttaa

SEQ ID NO: 295635 - DNA, 12 bp, Artificial Sequence
  Oligonucleotide primer for the detection of SNP TSC0016664
ggataaaagtat

SEQ ID NO: 295636 - DNA, 12 bp, Artificial Sequence
  Oligonucleotide primer for the detection of SNP TSC0016665
caaaccaaaaac

SEQ ID NO: 295637 - DNA, 12 bp, Artificial Sequence
  Oligonucleotide primer for the detection of SNP TSC0016665
ttgttttttgag

SEQ ID NO: 295638 - DNA, 12 bp, Artificial Sequence
  Oligonucleotide primer for the detection of SNP TSC0016665
ctaccctctaaa

SEQ ID NO: 295639 - DNA, 12 bp, Artificial Sequence
  Oligonucleotide primer for the detection of SNP TSC0016665
taggttaggagt

SEQ ID NO: 295640 - DNA, 12 bp, Artificial Sequence
  Oligonucleotide primer for the detection of SNP TSC0016667
aaccccaattcc

SEQ ID NO: 295641 - DNA, 12 bp, Artificial Sequence
  Oligonucleotide primer for the detection of SNP TSC0016667
aaccccgattcc

SEQ ID NO: 295642 - DNA, 12 bp, Artificial Sequence
  Oligonucleotide primer for the detection of SNP TSC0016667
gggatatgagag

SEQ ID NO: 295643 - DNA, 12 bp, Artificial Sequence
  Oligonucleotide primer for the detection of SNP TSC0016667
gggatacgagag

SEQ ID NO: 295644 - DNA, 12 bp, Artificial Sequence
  Oligonucleotide primer for the detection of SNP TSC0016667
aaacacgaaaaa

SEQ ID NO: 295645 - DNA, 12 bp, Artificial Sequence
  Oligonucleotide primer for the detection of SNP TSC0016667
attttgattttt

SEQ ID NO: 295646 - DNA, 12 bp, Artificial Sequence
  Oligonucleotide primer for the detection of SNP TSC0016667
atttcgattttt

SEQ ID NO: 295647 - DNA, 12 bp, Artificial Sequence
  Oligonucleotide primer for the detection of SNP TSC0016670
actatttcccaa

SEQ ID NO: 295648 - DNA, 12 bp, Artificial Sequence
  Oligonucleotide primer for the detection of SNP TSC0016670
agattttgaagt

SEQ ID NO: 295649 - DNA, 12 bp, Artificial Sequence
  Oligonucleotide primer for the detection of SNP TSC0016670
aaatcctaaaac

SEQ ID NO: 295650 - DNA, 12 bp, Artificial Sequence
  Oligonucleotide primer for the detection of SNP TSC0016671
taaattaacctt

SEQ ID NO: 295651 - DNA, 12 bp, Artificial Sequence
  Oligonucleotide primer for the detection of SNP TSC0016671
gttatttattag

SEQ ID NO: 295652 - DNA, 12 bp, Artificial Sequence
  Oligonucleotide primer for the detection of SNP TSC0016672
aaaatcacttaa

SEQ ID NO: 295653 - DNA, 12 bp, Artificial Sequence
  Oligonucleotide primer for the detection of SNP TSC0016672
aaaatcgcttaa

SEQ ID NO: 295654 - DNA, 12 bp, Artificial Sequence
  Oligonucleotide primer for the detection of SNP TSC0016672
agaattgtttga

SEQ ID NO: 295655 - DNA, 12 bp, Artificial Sequence
  Oligonucleotide primer for the detection of SNP TSC0016672
agaatcgtttga

SEQ ID NO: 295656 - DNA, 12 bp, Artificial Sequence
  Oligonucleotide primer for the detection of SNP TSC0016675
attctcaaatac

SEQ ID NO: 295657 - DNA, 12 bp, Artificial Sequence
  Oligonucleotide primer for the detection of SNP TSC0016675
ttatttagatag

SEQ ID NO: 295658 - DNA, 12 bp, Artificial Sequence
  Oligonucleotide primer for the detection of SNP TSC0016675
tatctaaataaa

SEQ ID NO: 295659 - DNA, 12 bp, Artificial Sequence
  Oligonucleotide primer for the detection of SNP TSC0016675
gtttttaggtat

SEQ ID NO: 295660 - DNA, 12 bp, Artificial Sequence
  Oligonucleotide primer for the detection of SNP TSC0016678
caaccttcctaa

SEQ ID NO: 295661 - DNA, 12 bp, Artificial Sequence
  Oligonucleotide primer for the detection of SNP TSC0016678
tttagaggattt

SEQ ID NO: 295662 - DNA, 12 bp, Artificial Sequence
  Oligonucleotide primer for the detection of SNP TSC0016678
cccaaaaaatcc

SEQ ID NO: 295663 - DNA, 12 bp, Artificial Sequence
  Oligonucleotide primer for the detection of SNP TSC0016678
tagtttttttgg

SEQ ID NO: 295664 - DNA, 12 bp, Artificial Sequence
  Oligonucleotide primer for the detection of SNP TSC0016679
atacaaaaaaac

SEQ ID NO: 295665 - DNA, 12 bp, Artificial Sequence
  Oligonucleotide primer for the detection of SNP TSC0016679
tagagttatata

SEQ ID NO: 295666 - DNA, 12 bp, Artificial Sequence
  Oligonucleotide primer for the detection of SNP TSC0016680
ctaaataaaaac

SEQ ID NO: 295667 - DNA, 12 bp, Artificial Sequence
  Oligonucleotide primer for the detection of SNP TSC0016680
ttatttgttttc

SEQ ID NO: 295668 - DNA, 12 bp, Artificial Sequence
  Oligonucleotide primer for the detection of SNP TSC0016680
accttatctatt

SEQ ID NO: 295669 - DNA, 12 bp, Artificial Sequence
  Oligonucleotide primer for the detection of SNP TSC0016680
ttggatggggat

SEQ ID NO: 295670 - DNA, 12 bp, Artificial Sequence
  Oligonucleotide primer for the detection of SNP TSC0016681
tttattggatta

SEQ ID NO: 295671 - DNA, 12 bp, Artificial Sequence
  Oligonucleotide primer for the detection of SNP TSC0016683
atctcaattttt

SEQ ID NO: 295672 - DNA, 12 bp, Artificial Sequence
  Oligonucleotide primer for the detection of SNP TSC0016683
aaataagttatg

SEQ ID NO: 295673 - DNA, 12 bp, Artificial Sequence
  Oligonucleotide primer for the detection of SNP TSC0016683
aaataaatcata

SEQ ID NO: 295674 - DNA, 12 bp, Artificial Sequence
  Oligonucleotide primer for the detection of SNP TSC0016684
caacctataatc

SEQ ID NO: 295675 - DNA, 12 bp, Artificial Sequence
  Oligonucleotide primer for the detection of SNP TSC0016684
atttatgtttta

SEQ ID NO: 295676 - DNA, 12 bp, Artificial Sequence
  Oligonucleotide primer for the detection of SNP TSC0016684
atccatatccca

SEQ ID NO: 295677 - DNA, 12 bp, Artificial Sequence
  Oligonucleotide primer for the detection of SNP TSC0016684
taatttgtggtt

SEQ ID NO: 295678 - DNA, 12 bp, Artificial Sequence
  Oligonucleotide primer for the detection of SNP TSC0016685
aaaaaactttac

SEQ ID NO: 295679 - DNA, 12 bp, Artificial Sequence
  Oligonucleotide primer for the detection of SNP TSC0016685
tatatgttagga

SEQ ID NO: 295680 - DNA, 12 bp, Artificial Sequence
  Oligonucleotide primer for the detection of SNP TSC0016685
tatacgttagga

SEQ ID NO: 295681 - DNA, 12 bp, Artificial Sequence
  Oligonucleotide primer for the detection of SNP TSC0016685
cacacattaaaa

SEQ ID NO: 295682 - DNA, 12 bp, Artificial Sequence
  Oligonucleotide primer for the detection of SNP TSC0016685
cacacgttaaaa

SEQ ID NO: 295683 - DNA, 12 bp, Artificial Sequence
  Oligonucleotide primer for the detection of SNP TSC0016685
aaagggttttat

SEQ ID NO: 295684 - DNA, 12 bp, Artificial Sequence
  Oligonucleotide primer for the detection of SNP TSC0016686
cctttctcctac

SEQ ID NO: 295685 - DNA, 12 bp, Artificial Sequence
  Oligonucleotide primer for the detection of SNP TSC0016686
gggggtggggag

SEQ ID NO: 295686 - DNA, 12 bp, Artificial Sequence
  Oligonucleotide primer for the detection of SNP TSC0016686
gggggcggggag

SEQ ID NO: 295687 - DNA, 12 bp, Artificial Sequence
  Oligonucleotide primer for the detection of SNP TSC0016687
ctctacttctcc

SEQ ID NO: 295688 - DNA, 12 bp, Artificial Sequence
  Oligonucleotide primer for the detection of SNP TSC0016687
ggggttaaaaga

SEQ ID NO: 295689 - DNA, 12 bp, Artificial Sequence
  Oligonucleotide primer for the detection of SNP TSC0016688
ctcatctaacct

SEQ ID NO: 295690 - DNA, 12 bp, Artificial Sequence
  Oligonucleotide primer for the detection of SNP TSC0016688
ctcgtctaacct

SEQ ID NO: 295691 - DNA, 12 bp, Artificial Sequence
  Oligonucleotide primer for the detection of SNP TSC0016688
aagttagtgttt

SEQ ID NO: 295692 - DNA, 12 bp, Artificial Sequence
  Oligonucleotide primer for the detection of SNP TSC0016688
aaaccaatatcc

SEQ ID NO: 295693 - DNA, 12 bp, Artificial Sequence
  Oligonucleotide primer for the detection of SNP TSC0016688
tttgtttaattt

SEQ ID NO: 295694 - DNA, 12 bp, Artificial Sequence
  Oligonukleotid-Primer
ttcgtttaattt

SEQ ID NO: 295695 - DNA, 12 bp, Artificial Sequence
  Oligonucleotide primer for the detection of SNP TSC0016689
actctaaactaa

SEQ ID NO: 295696 - DNA, 12 bp, Artificial Sequence
  Oligonucleotide primer for the detection of SNP TSC0016689
ggatttttatga

SEQ ID NO: 295697 - DNA, 12 bp, Artificial Sequence
  Oligonucleotide primer for the detection of SNP TSC0016689
ggatttttacga

SEQ ID NO: 295698 - DNA, 12 bp, Artificial Sequence
  Oligonucleotide primer for the detection of SNP TSC0016689
aaacccccacaa

SEQ ID NO: 295699 - DNA, 12 bp, Artificial Sequence
  Oligonucleotide primer for the detection of SNP TSC0016689
aaacccccacga

SEQ ID NO: 295700 - DNA, 12 bp, Artificial Sequence
  Oligonucleotide primer for the detection of SNP TSC0016689
ggttttgagttg

SEQ ID NO: 295701 - DNA, 12 bp, Artificial Sequence
  Oligonucleotide primer for the detection of SNP TSC0016690
ctaataatactc

SEQ ID NO: 295702 - DNA, 12 bp, Artificial Sequence
  Oligonucleotide primer for the detection of SNP TSC0016690
tatagttgttga

SEQ ID NO: 295703 - DNA, 12 bp, Artificial Sequence
  Oligonucleotide primer for the detection of SNP TSC0016691
atatcttaaaca

SEQ ID NO: 295704 - DNA, 12 bp, Artificial Sequence
  Oligonucleotide primer for the detection of SNP TSC0016691
tgttggtttgtt

SEQ ID NO: 295705 - DNA, 12 bp, Artificial Sequence
  Oligonucleotide primer for the detection of SNP TSC0016691
actaatttacta

SEQ ID NO: 295706 - DNA, 12 bp, Artificial Sequence
  Oligonucleotide primer for the detection of SNP TSC0016691
tatattttaaat

SEQ ID NO: 295707 - DNA, 12 bp, Artificial Sequence
  Oligonucleotide primer for the detection of SNP TSC0016694
ttctcttcattt

SEQ ID NO: 295708 - DNA, 12 bp, Artificial Sequence
  Oligonucleotide primer for the detection of SNP TSC0016694
tttagaagataa

SEQ ID NO: 295709 - DNA, 12 bp, Artificial Sequence
  Oligonucleotide primer for the detection of SNP TSC0016695
aacattaaacat

SEQ ID NO: 295710 - DNA, 12 bp, Artificial Sequence
  Oligonucleotide primer for the detection of SNP TSC0016695
tttgggaaatgg

SEQ ID NO: 295711 - DNA, 12 bp, Artificial Sequence
  Oligonucleotide primer for the detection of SNP TSC0016695
ttcgggaaatgg

SEQ ID NO: 295712 - DNA, 12 bp, Artificial Sequence
  Oligonucleotide primer for the detection of SNP TSC0016696
cccctcctaaac

SEQ ID NO: 295713 - DNA, 12 bp, Artificial Sequence
  Oligonucleotide primer for the detection of SNP TSC0016696
tagagaggagga

SEQ ID NO: 295714 - DNA, 12 bp, Artificial Sequence
  Oligonucleotide primer for the detection of SNP TSC0016698
cttacccaacac

SEQ ID NO: 295715 - DNA, 12 bp, Artificial Sequence
  Oligonucleotide primer for the detection of SNP TSC0016698
cttacccgacac

SEQ ID NO: 295716 - DNA, 12 bp, Artificial Sequence
  Oligonucleotide primer for the detection of SNP TSC0016698
gtttggtattaa

SEQ ID NO: 295717 - DNA, 12 bp, Artificial Sequence
  Oligonucleotide primer for the detection of SNP TSC0016698
gttcggtattaa

SEQ ID NO: 295718 - DNA, 12 bp, Artificial Sequence
  Oligonucleotide primer for the detection of SNP TSC0016698
acccaacatcaa

SEQ ID NO: 295719 - DNA, 12 bp, Artificial Sequence
  Oligonucleotide primer for the detection of SNP TSC0016698
acccgacatcaa

SEQ ID NO: 295720 - DNA, 12 bp, Artificial Sequence
  Oligonucleotide primer for the detection of SNP TSC0016698
gcccaacatcaa

SEQ ID NO: 295721 - DNA, 12 bp, Artificial Sequence
  Oligonucleotide primer for the detection of SNP TSC0016698
gcccgacatcaa

SEQ ID NO: 295722 - DNA, 12 bp, Artificial Sequence
  Oligonucleotide primer for the detection of SNP TSC0016702
accaaactaaat

SEQ ID NO: 295723 - DNA, 12 bp, Artificial Sequence
  Oligonucleotide primer for the detection of SNP TSC0016702
accgaactaaat

SEQ ID NO: 295724 - DNA, 12 bp, Artificial Sequence
  Oligonucleotide primer for the detection of SNP TSC0016702
ggttttttttaa

SEQ ID NO: 295725 - DNA, 12 bp, Artificial Sequence
  Oligonucleotide primer for the detection of SNP TSC0016703
caaaacaacaaa

SEQ ID NO: 295726 - DNA, 12 bp, Artificial Sequence
  Oligonucleotide primer for the detection of SNP TSC0016703
taaaaagttgtt

SEQ ID NO: 295727 - DNA, 12 bp, Artificial Sequence
  Oligonucleotide primer for the detection of SNP TSC0016704
ccacaataataa

SEQ ID NO: 295728 - DNA, 12 bp, Artificial Sequence
  Oligonucleotide primer for the detection of SNP TSC0016704
ttagagatagtt

SEQ ID NO: 295729 - DNA, 12 bp, Artificial Sequence
  Oligonucleotide primer for the detection of SNP TSC0016704
aaccaaaaacaa

SEQ ID NO: 295730 - DNA, 12 bp, Artificial Sequence
  Oligonucleotide primer for the detection of SNP TSC0016704
ttatagtgatgg

SEQ ID NO: 295731 - DNA, 12 bp, Artificial Sequence
  Oligonucleotide primer for the detection of SNP TSC0016705
actctttcttta

SEQ ID NO: 295732 - DNA, 12 bp, Artificial Sequence
  Oligonucleotide primer for the detection of SNP TSC0016705
tattattgtggt

SEQ ID NO: 295733 - DNA, 12 bp, Artificial Sequence
  Oligonucleotide primer for the detection of SNP TSC0016705
catcactataat

SEQ ID NO: 295734 - DNA, 12 bp, Artificial Sequence
  Oligonucleotide primer for the detection of SNP TSC0016708
aacatcttaaac

SEQ ID NO: 295735 - DNA, 12 bp, Artificial Sequence
  Oligonucleotide primer for the detection of SNP TSC0016708
aggtaaattata

SEQ ID NO: 295736 - DNA, 12 bp, Artificial Sequence
  Oligonucleotide primer for the detection of SNP TSC0016709
aaaaacactact

SEQ ID NO: 295737 - DNA, 12 bp, Artificial Sequence
  Oligonucleotide primer for the detection of SNP TSC0016709
aaatttgtagtg

SEQ ID NO: 295738 - DNA, 12 bp, Artificial Sequence
  Oligonucleotide primer for the detection of SNP TSC0016710
taatctaaaaaa

SEQ ID NO: 295739 - DNA, 12 bp, Artificial Sequence
  Oligonucleotide primer for the detection of SNP TSC0016710
ccaaccccctca

SEQ ID NO: 295740 - DNA, 12 bp, Artificial Sequence
  Oligonucleotide primer for the detection of SNP TSC0016710
taatttagtttg

SEQ ID NO: 295741 - DNA, 12 bp, Artificial Sequence
  Oligonucleotide primer for the detection of SNP TSC0016711
atatccaacatt

SEQ ID NO: 295742 - DNA, 12 bp, Artificial Sequence
  Oligonucleotide primer for the detection of SNP TSC0016711
tggaatttgtga

SEQ ID NO: 295743 - DNA, 12 bp, Artificial Sequence
  Oligonucleotide primer for the detection of SNP TSC0016716
tcttcactacaa

SEQ ID NO: 295744 - DNA, 12 bp, Artificial Sequence
  Oligonucleotide primer for the detection of SNP TSC0016716
tgttttatgatt

SEQ ID NO: 295745 - DNA, 12 bp, Artificial Sequence
  Oligonucleotide primer for the detection of SNP TSC0016716
cgttttatgatt

SEQ ID NO: 295746 - DNA, 12 bp, Artificial Sequence
  Oligonucleotide primer for the detection of SNP TSC0016716
tgttttatgatc

SEQ ID NO: 295747 - DNA, 12 bp, Artificial Sequence
  Oligonucleotide primer for the detection of SNP TSC0016716
cgttttatgatc

SEQ ID NO: 295748 - DNA, 12 bp, Artificial Sequence
  Oligonucleotide primer for the detection of SNP TSC0016716
catttcataatc

SEQ ID NO: 295749 - DNA, 12 bp, Artificial Sequence
  Oligonucleotide primer for the detection of SNP TSC0016716
cgtttcataatc

SEQ ID NO: 295750 - DNA, 12 bp, Artificial Sequence
  Oligonucleotide primer for the detection of SNP TSC0016717
cacacaaaaccc

SEQ ID NO: 295751 - DNA, 12 bp, Artificial Sequence
  Oligonucleotide primer for the detection of SNP TSC0016717
cacgcaaaaccc

SEQ ID NO: 295752 - DNA, 12 bp, Artificial Sequence
  Oligonucleotide primer for the detection of SNP TSC0016717
tgtgatggttta

SEQ ID NO: 295753 - DNA, 12 bp, Artificial Sequence
  Oligonucleotide primer for the detection of SNP TSC0016717
tgtgacggttta

SEQ ID NO: 295754 - DNA, 12 bp, Artificial Sequence
  Oligonucleotide primer for the detection of SNP TSC0016718
atttatatttta

SEQ ID NO: 295755 - DNA, 12 bp, Artificial Sequence
  Oligonucleotide primer for the detection of SNP TSC0016718
tatattgtttat

SEQ ID NO: 295756 - DNA, 12 bp, Artificial Sequence
  Oligonucleotide primer for the detection of SNP TSC0016718
atacattattta

SEQ ID NO: 295757 - DNA, 12 bp, Artificial Sequence
  Oligonucleotide primer for the detection of SNP TSC0016718
aatttgtatttt

SEQ ID NO: 295758 - DNA, 12 bp, Artificial Sequence
  Oligonucleotide primer for the detection of SNP TSC0016721
tctataacaact

SEQ ID NO: 295759 - DNA, 12 bp, Artificial Sequence
  Oligonucleotide primer for the detection of SNP TSC0016721
taaatttggtgg

SEQ ID NO: 295760 - DNA, 12 bp, Artificial Sequence
  Oligonucleotide primer for the detection of SNP TSC0016722
ctatcacttctc

SEQ ID NO: 295761 - DNA, 12 bp, Artificial Sequence
  Oligonucleotide primer for the detection of SNP TSC0016722
taaagggagaag

SEQ ID NO: 295762 - DNA, 12 bp, Artificial Sequence
  Oligonucleotide primer for the detection of SNP TSC0016723
cttaataatact

SEQ ID NO: 295763 - DNA, 12 bp, Artificial Sequence
  Oligonucleotide primer for the detection of SNP TSC0016723
ttcgtttttttt

SEQ ID NO: 295764 - DNA, 12 bp, Artificial Sequence
  Oligonucleotide primer for the detection of SNP TSC0016723
tacccacctttt

SEQ ID NO: 295765 - DNA, 12 bp, Artificial Sequence
  Oligonucleotide primer for the detection of SNP TSC0016723
tacccgcctttt

SEQ ID NO: 295766 - DNA, 12 bp, Artificial Sequence
  Oligonucleotide primer for the detection of SNP TSC0016723
tttgatagtatt

SEQ ID NO: 295767 - DNA, 12 bp, Artificial Sequence
  Oligonucleotide primer for the detection of SNP TSC0016724
accaatactcct

SEQ ID NO: 295768 - DNA, 12 bp, Artificial Sequence
  Oligonucleotide primer for the detection of SNP TSC0016724
tttatgaaagta

SEQ ID NO: 295769 - DNA, 12 bp, Artificial Sequence
  Oligonucleotide primer for the detection of SNP TSC0016726
cttactccacaa

SEQ ID NO: 295770 - DNA, 12 bp, Artificial Sequence
  Oligonucleotide primer for the detection of SNP TSC0016726
ggttgagtttaa

SEQ ID NO: 295771 - DNA, 12 bp, Artificial Sequence
  Oligonucleotide primer for the detection of SNP TSC0016726
aactaaacttaa

SEQ ID NO: 295772 - DNA, 12 bp, Artificial Sequence
  Oligonucleotide primer for the detection of SNP TSC0016726
ttgttttatagt

SEQ ID NO: 295773 - DNA, 12 bp, Artificial Sequence
  Oligonucleotide primer for the detection of SNP TSC0016727
atagatttttag

SEQ ID NO: 295774 - DNA, 12 bp, Artificial Sequence
  Oligonucleotide primer for the detection of SNP TSC0016729
acccactctact

SEQ ID NO: 295775 - DNA, 12 bp, Artificial Sequence
  Oligonucleotide primer for the detection of SNP TSC0016729
agtgaaaaatga

SEQ ID NO: 295776 - DNA, 12 bp, Artificial Sequence
  Oligonucleotide primer for the detection of SNP TSC0016730
acataaaaaacc

SEQ ID NO: 295777 - DNA, 12 bp, Artificial Sequence
  Oligonucleotide primer for the detection of SNP TSC0016730
acgtaaaaaacc

SEQ ID NO: 295778 - DNA, 12 bp, Artificial Sequence
  Oligonucleotide primer for the detection of SNP TSC0016731
aattttaacacc

SEQ ID NO: 295779 - DNA, 12 bp, Artificial Sequence
  Oligonucleotide primer for the detection of SNP TSC0016731
aaatatataggg

SEQ ID NO: 295780 - DNA, 12 bp, Artificial Sequence
  Oligonucleotide primer for the detection of SNP TSC0016731
aaatacacaaaa

SEQ ID NO: 295781 - DNA, 12 bp, Artificial Sequence
  Oligonucleotide primer for the detection of SNP TSC0016731
ggttttggtatt

SEQ ID NO: 295782 - DNA, 12 bp, Artificial Sequence
  Oligonucleotide primer for the detection of SNP TSC0016732
tttttaaattag

SEQ ID NO: 295783 - DNA, 12 bp, Artificial Sequence
  Oligonucleotide primer for the detection of SNP TSC0016734
ttttgggttgat

SEQ ID NO: 295784 - DNA, 12 bp, Artificial Sequence
  Oligonucleotide primer for the detection of SNP TSC0016734
atcttaaactaa

SEQ ID NO: 295785 - DNA, 12 bp, Artificial Sequence
  Oligonucleotide primer for the detection of SNP TSC0016734
taaatatagaag

SEQ ID NO: 295786 - DNA, 12 bp, Artificial Sequence
  Oligonucleotide primer for the detection of SNP TSC0016735
ctttatacaatt

SEQ ID NO: 295787 - DNA, 12 bp, Artificial Sequence
  Oligonukleotid-Primer
atgagaaaatga

SEQ ID NO: 295788 - DNA, 12 bp, Artificial Sequence
  Oligonucleotide primer for the detection of SNP TSC0016735
ttttatatagtt

SEQ ID NO: 295789 - DNA, 12 bp, Artificial Sequence
  Oligonucleotide primer for the detection of SNP TSC0016741
taaaataaatca

SEQ ID NO: 295790 - DNA, 12 bp, Artificial Sequence
  Oligonucleotide primer for the detection of SNP TSC0016741
atgtatttataa

SEQ ID NO: 295791 - DNA, 12 bp, Artificial Sequence
  Oligonucleotide primer for the detection of SNP TSC0016741
atatatttacaa

SEQ ID NO: 295792 - DNA, 12 bp, Artificial Sequence
  Oligonucleotide primer for the detection of SNP TSC0016741
ttgaagtgagtt

SEQ ID NO: 295793 - DNA, 12 bp, Artificial Sequence
  Oligonucleotide primer for the detection of SNP TSC0016742
tcactctctcca

SEQ ID NO: 295794 - DNA, 12 bp, Artificial Sequence
  Oligonucleotide primer for the detection of SNP TSC0016742
atagtaggagag

SEQ ID NO: 295795 - DNA, 12 bp, Artificial Sequence
  Oligonucleotide primer for the detection of SNP TSC0016745
tatttgttttgg

SEQ ID NO: 295796 - DNA, 12 bp, Artificial Sequence
  Oligonucleotide primer for the detection of SNP TSC0016745
tattcgttttgg

SEQ ID NO: 295797 - DNA, 12 bp, Artificial Sequence
  Oligonucleotide primer for the detection of SNP TSC0016746
aatataaaataa

SEQ ID NO: 295798 - DNA, 12 bp, Artificial Sequence
  Oligonucleotide primer for the detection of SNP TSC0016746
taatttgatata

SEQ ID NO: 295799 - DNA, 12 bp, Artificial Sequence
  Oligonucleotide primer for the detection of SNP TSC0016746
taacctaataca

SEQ ID NO: 295800 - DNA, 12 bp, Artificial Sequence
  Oligonucleotide primer for the detection of SNP TSC0016746
aatgtaaagtgg

SEQ ID NO: 295801 - DNA, 12 bp, Artificial Sequence
  Oligonucleotide primer for the detection of SNP TSC0016747
aaataccaacaa

SEQ ID NO: 295802 - DNA, 12 bp, Artificial Sequence
  Oligonucleotide primer for the detection of SNP TSC0016747
agtaagaaaagt

SEQ ID NO: 295803 - DNA, 12 bp, Artificial Sequence
  Oligonucleotide primer for the detection of SNP TSC0016747
aaaatattaata

SEQ ID NO: 295804 - DNA, 12 bp, Artificial Sequence
  Oligonucleotide primer for the detection of SNP TSC0016748
aattatactatc

SEQ ID NO: 295805 - DNA, 12 bp, Artificial Sequence
  Oligonucleotide primer for the detection of SNP TSC0016748
taggttatttta

SEQ ID NO: 295806 - DNA, 12 bp, Artificial Sequence
  Oligonucleotide primer for the detection of SNP TSC0016749
attaaaattata

SEQ ID NO: 295807 - DNA, 12 bp, Artificial Sequence
  Oligonucleotide primer for the detection of SNP TSC0016749
ttttaatttgat

SEQ ID NO: 295808 - DNA, 12 bp, Artificial Sequence
  Oligonucleotide primer for the detection of SNP TSC0016749
tcttaatctaac

SEQ ID NO: 295809 - DNA, 12 bp, Artificial Sequence
  Oligonucleotide primer for the detection of SNP TSC0016749
ttaaaattatac

SEQ ID NO: 295810 - DNA, 12 bp, Artificial Sequence
  Oligonucleotide primer for the detection of SNP TSC0016751
agggaagtgaag

SEQ ID NO: 295811 - DNA, 12 bp, Artificial Sequence
  Oligonucleotide primer for the detection of SNP TSC0016751
ttggaatgaaat

SEQ ID NO: 295812 - DNA, 12 bp, Artificial Sequence
  Oligonucleotide primer for the detection of SNP TSC0016753
aacaacccaaaa

SEQ ID NO: 295813 - DNA, 12 bp, Artificial Sequence
  Oligonucleotide primer for the detection of SNP TSC0016753
aacgacccaaaa

SEQ ID NO: 295814 - DNA, 12 bp, Artificial Sequence
  Oligonucleotide primer for the detection of SNP TSC0016753
ataggtattttt

SEQ ID NO: 295815 - DNA, 12 bp, Artificial Sequence
  Oligonucleotide primer for the detection of SNP TSC0016753
acaaacatcccc

SEQ ID NO: 295816 - DNA, 12 bp, Artificial Sequence
  Oligonucleotide primer for the detection of SNP TSC0016753
agtggtttaagg

SEQ ID NO: 295817 - DNA, 12 bp, Artificial Sequence
  Oligonucleotide primer for the detection of SNP TSC0016753
agcggtttaagg

SEQ ID NO: 295818 - DNA, 12 bp, Artificial Sequence
  Oligonucleotide primer for the detection of SNP TSC0016754
aaactacaacac

SEQ ID NO: 295819 - DNA, 12 bp, Artificial Sequence
  Oligonucleotide primer for the detection of SNP TSC0016754
gaactacaacac

SEQ ID NO: 295820 - DNA, 12 bp, Artificial Sequence
  Oligonucleotide primer for the detection of SNP TSC0016754
gggaggggagta

SEQ ID NO: 295821 - DNA, 12 bp, Artificial Sequence
  Oligonucleotide primer for the detection of SNP TSC0016755
taagttttttag

SEQ ID NO: 295822 - DNA, 12 bp, Artificial Sequence
  Oligonucleotide primer for the detection of SNP TSC0016755
caaattcttcaa

SEQ ID NO: 295823 - DNA, 12 bp, Artificial Sequence
  Oligonucleotide primer for the detection of SNP TSC0016755
gtttaagagttt

SEQ ID NO: 295824 - DNA, 12 bp, Artificial Sequence
  Oligonucleotide primer for the detection of SNP TSC0016761
tttgacgttttg

SEQ ID NO: 295825 - DNA, 12 bp, Artificial Sequence
  Oligonucleotide primer for the detection of SNP TSC0016761
cctaacacccta

SEQ ID NO: 295826 - DNA, 12 bp, Artificial Sequence
  Oligonucleotide primer for the detection of SNP TSC0016761
cctaacgcccta

SEQ ID NO: 295827 - DNA, 12 bp, Artificial Sequence
  Oligonucleotide primer for the detection of SNP TSC0016761
aagattgaaaat

SEQ ID NO: 295828 - DNA, 12 bp, Artificial Sequence
  Oligonucleotide primer for the detection of SNP TSC0016762
ccacctcttaca

SEQ ID NO: 295829 - DNA, 12 bp, Artificial Sequence
  Oligonucleotide primer for the detection of SNP TSC0016762
aagtaatgtttg

SEQ ID NO: 295830 - DNA, 12 bp, Artificial Sequence
  Oligonucleotide primer for the detection of SNP TSC0016763
tcctcataacac

SEQ ID NO: 295831 - DNA, 12 bp, Artificial Sequence
  Oligonucleotide primer for the detection of SNP TSC0016763
ggatgttaaaag

SEQ ID NO: 295832 - DNA, 12 bp, Artificial Sequence
  Oligonucleotide primer for the detection of SNP TSC0016763
ggacgttaaaag

SEQ ID NO: 295833 - DNA, 12 bp, Artificial Sequence
  Oligonucleotide primer for the detection of SNP TSC0016763
aaacattaaaaa

SEQ ID NO: 295834 - DNA, 12 bp, Artificial Sequence
  Oligonucleotide primer for the detection of SNP TSC0016763
aaacgttaaaaa

SEQ ID NO: 295835 - DNA, 12 bp, Artificial Sequence
  Oligonucleotide primer for the detection of SNP TSC0016763
tttttatggtat

SEQ ID NO: 295836 - DNA, 12 bp, Artificial Sequence
  Oligonucleotide primer for the detection of SNP TSC0016764
aaatctaaactc

SEQ ID NO: 295837 - DNA, 12 bp, Artificial Sequence
  Oligonucleotide primer for the detection of SNP TSC0016764
ggatgtttaagg

SEQ ID NO: 295838 - DNA, 12 bp, Artificial Sequence
  Oligonucleotide primer for the detection of SNP TSC0016764
aaatacctaaaa

SEQ ID NO: 295839 - DNA, 12 bp, Artificial Sequence
  Oligonucleotide primer for the detection of SNP TSC0016765
ctcaacctccta

SEQ ID NO: 295840 - DNA, 12 bp, Artificial Sequence
  Oligonucleotide primer for the detection of SNP TSC0016765
cctcctaaaaat

SEQ ID NO: 295841 - DNA, 12 bp, Artificial Sequence
  Oligonucleotide primer for the detection of SNP TSC0016767
cttacacacaaa

SEQ ID NO: 295842 - DNA, 12 bp, Artificial Sequence
  Oligonucleotide primer for the detection of SNP TSC0016767
gaacctcacaaa

SEQ ID NO: 295843 - DNA, 12 bp, Artificial Sequence
  Oligonucleotide primer for the detection of SNP TSC0016767
atttgtatatag

SEQ ID NO: 295844 - DNA, 12 bp, Artificial Sequence
  Oligonucleotide primer for the detection of SNP TSC0016768
gtgcggtggttt

SEQ ID NO: 295845 - DNA, 12 bp, Artificial Sequence
  Oligonucleotide primer for the detection of SNP TSC0016768
gcgcggtggttt

SEQ ID NO: 295846 - DNA, 12 bp, Artificial Sequence
  Oligonucleotide primer for the detection of SNP TSC0016768
acgcgataactc

SEQ ID NO: 295847 - DNA, 12 bp, Artificial Sequence
  Oligonucleotide primer for the detection of SNP TSC0016770
aataaacacata

SEQ ID NO: 295848 - DNA, 12 bp, Artificial Sequence
  Oligonucleotide primer for the detection of SNP TSC0016770
gtttataaataa

SEQ ID NO: 295849 - DNA, 12 bp, Artificial Sequence
  Oligonucleotide primer for the detection of SNP TSC0016770
atttacaaacaa

SEQ ID NO: 295850 - DNA, 12 bp, Artificial Sequence
  Oligonucleotide primer for the detection of SNP TSC0016770
gtttacaaacaa

SEQ ID NO: 295851 - DNA, 12 bp, Artificial Sequence
  Oligonucleotide primer for the detection of SNP TSC0016770
aatagatatatg

SEQ ID NO: 295852 - DNA, 12 bp, Artificial Sequence
  Oligonucleotide primer for the detection of SNP TSC0016772
tcctcaactctc

SEQ ID NO: 295853 - DNA, 12 bp, Artificial Sequence
  Oligonucleotide primer for the detection of SNP TSC0016772
ttgttatattag

SEQ ID NO: 295854 - DNA, 12 bp, Artificial Sequence
  Oligonucleotide primer for the detection of SNP TSC0016772
ctattatattaa

SEQ ID NO: 295855 - DNA, 12 bp, Artificial Sequence
  Oligonucleotide primer for the detection of SNP TSC0016773
atacctaaaaaa

SEQ ID NO: 295856 - DNA, 12 bp, Artificial Sequence
  Oligonucleotide primer for the detection of SNP TSC0016773
tccaaaaaacca

SEQ ID NO: 295857 - DNA, 12 bp, Artificial Sequence
  Oligonucleotide primer for the detection of SNP TSC0016773
ttttatatttgg

SEQ ID NO: 295858 - DNA, 12 bp, Artificial Sequence
  Oligonucleotide primer for the detection of SNP TSC0016777
accacaaaattc

SEQ ID NO: 295859 - DNA, 12 bp, Artificial Sequence
  Oligonucleotide primer for the detection of SNP TSC0016777
aagtaaaattat

SEQ ID NO: 295860 - DNA, 12 bp, Artificial Sequence
  Oligonucleotide primer for the detection of SNP TSC0016777
aagtaaaattac

SEQ ID NO: 295861 - DNA, 12 bp, Artificial Sequence
  Oligonucleotide primer for the detection of SNP TSC0016777
aaacaaaattac

SEQ ID NO: 295862 - DNA, 12 bp, Artificial Sequence
  Oligonucleotide primer for the detection of SNP TSC0016777
ttataggatttt

SEQ ID NO: 295863 - DNA, 12 bp, Artificial Sequence
  Oligonucleotide primer for the detection of SNP TSC0016778
tcaaaccaccac

SEQ ID NO: 295864 - DNA, 12 bp, Artificial Sequence
  Oligonucleotide primer for the detection of SNP TSC0016778
aggattttggtg

SEQ ID NO: 295865 - DNA, 12 bp, Artificial Sequence
  Oligonucleotide primer for the detection of SNP TSC0016779
aacaaaaccaat

SEQ ID NO: 295866 - DNA, 12 bp, Artificial Sequence
  Oligonucleotide primer for the detection of SNP TSC0016779
aacaaaaccgat

SEQ ID NO: 295867 - DNA, 12 bp, Artificial Sequence
  Oligonucleotide primer for the detection of SNP TSC0016779
tttggataatgg

SEQ ID NO: 295868 - DNA, 12 bp, Artificial Sequence
  Oligonukleotid-Primer
ttcggataatgg

SEQ ID NO: 295869 - DNA, 12 bp, Artificial Sequence
  Oligonucleotide primer for the detection of SNP TSC0016780
taaacccattat

SEQ ID NO: 295870 - DNA, 12 bp, Artificial Sequence
  Oligonucleotide primer for the detection of SNP TSC0016780
gtagaaggtttg

SEQ ID NO: 295871 - DNA, 12 bp, Artificial Sequence
  Oligonucleotide primer for the detection of SNP TSC0016780
gtagaaggttcg

SEQ ID NO: 295872 - DNA, 12 bp, Artificial Sequence
  Oligonukleotid-Primer
acaaattcttat

SEQ ID NO: 295873 - DNA, 12 bp, Artificial Sequence
  Oligonucleotide primer for the detection of SNP TSC0016781
ttagatttgttg

SEQ ID NO: 295874 - DNA, 12 bp, Artificial Sequence
  Oligonucleotide primer for the detection of SNP TSC0016782
aatttcaaaacc

SEQ ID NO: 295875 - DNA, 12 bp, Artificial Sequence
  Oligonucleotide primer for the detection of SNP TSC0016782
gatttcaaaacc

SEQ ID NO: 295876 - DNA, 12 bp, Artificial Sequence
  Oligonucleotide primer for the detection of SNP TSC0016782
tttgtggtagta

SEQ ID NO: 295877 - DNA, 12 bp, Artificial Sequence
  Oligonucleotide primer for the detection of SNP TSC0016782
cctataacaaca

SEQ ID NO: 295878 - DNA, 12 bp, Artificial Sequence
  Oligonucleotide primer for the detection of SNP TSC0016782
gattttaaggtt

SEQ ID NO: 295879 - DNA, 12 bp, Artificial Sequence
  Oligonucleotide primer for the detection of SNP TSC0016783
ccaaataactat

SEQ ID NO: 295880 - DNA, 12 bp, Artificial Sequence
  Oligonucleotide primer for the detection of SNP TSC0016783
ccgaataactat

SEQ ID NO: 295881 - DNA, 12 bp, Artificial Sequence
  Oligonucleotide primer for the detection of SNP TSC0016783
aattgatatggg

SEQ ID NO: 295882 - DNA, 12 bp, Artificial Sequence
  Oligonucleotide primer for the detection of SNP TSC0016783
aattgatacggg

SEQ ID NO: 295883 - DNA, 12 bp, Artificial Sequence
  Oligonucleotide primer for the detection of SNP TSC0016784
atagaatggttt

SEQ ID NO: 295884 - DNA, 12 bp, Artificial Sequence
  Oligonucleotide primer for the detection of SNP TSC0016784
tacaaaataatc

SEQ ID NO: 295885 - DNA, 12 bp, Artificial Sequence
  Oligonucleotide primer for the detection of SNP TSC0016784
ttatataaaaat

SEQ ID NO: 295886 - DNA, 12 bp, Artificial Sequence
  Oligonucleotide primer for the detection of SNP TSC0016785
ctactttctata

SEQ ID NO: 295887 - DNA, 12 bp, Artificial Sequence
  Oligonucleotide primer for the detection of SNP TSC0016785
tagagtgaggta

SEQ ID NO: 295888 - DNA, 12 bp, Artificial Sequence
  Oligonucleotide primer for the detection of SNP TSC0016785
aaaataaaacaa

SEQ ID NO: 295889 - DNA, 12 bp, Artificial Sequence
  Oligonucleotide primer for the detection of SNP TSC0016786
acaaaaacctac

SEQ ID NO: 295890 - DNA, 12 bp, Artificial Sequence
  Oligonucleotide primer for the detection of SNP TSC0016786
acgaaaacctac

SEQ ID NO: 295891 - DNA, 12 bp, Artificial Sequence
  Oligonucleotide primer for the detection of SNP TSC0016786
aaaccctatcca

SEQ ID NO: 295892 - DNA, 12 bp, Artificial Sequence
  Oligonucleotide primer for the detection of SNP TSC0016786
gtggagatttat

SEQ ID NO: 295893 - DNA, 12 bp, Artificial Sequence
  Oligonucleotide primer for the detection of SNP TSC0016786
gcggagatttat

SEQ ID NO: 295894 - DNA, 12 bp, Artificial Sequence
  Oligonucleotide primer for the detection of SNP TSC0016787
aaaaaaccaaat

SEQ ID NO: 295895 - DNA, 12 bp, Artificial Sequence
  Oligonucleotide primer for the detection of SNP TSC0016787
attttataggta

SEQ ID NO: 295896 - DNA, 12 bp, Artificial Sequence
  Oligonucleotide primer for the detection of SNP TSC0016788
aatcatcatcat

SEQ ID NO: 295897 - DNA, 12 bp, Artificial Sequence
  Oligonucleotide primer for the detection of SNP TSC0016788
ttaagatggtga

SEQ ID NO: 295898 - DNA, 12 bp, Artificial Sequence
  Oligonucleotide primer for the detection of SNP TSC0016789
tattgatattta

SEQ ID NO: 295899 - DNA, 12 bp, Artificial Sequence
  Oligonucleotide primer for the detection of SNP TSC0016789
cattaacaccca

SEQ ID NO: 295900 - DNA, 12 bp, Artificial Sequence
  Oligonucleotide primer for the detection of SNP TSC0016789
atttttagagat

SEQ ID NO: 295901 - DNA, 12 bp, Artificial Sequence
  Oligonucleotide primer for the detection of SNP TSC0016790
acttcaaactac

SEQ ID NO: 295902 - DNA, 12 bp, Artificial Sequence
  Oligonucleotide primer for the detection of SNP TSC0016790
taggagatggag

SEQ ID NO: 295903 - DNA, 12 bp, Artificial Sequence
  Oligonucleotide primer for the detection of SNP TSC0016790
gttttaggttat

SEQ ID NO: 295904 - DNA, 12 bp, Artificial Sequence
  Oligonucleotide primer for the detection of SNP TSC0016791
ttcatatcaact

SEQ ID NO: 295905 - DNA, 12 bp, Artificial Sequence
  Oligonucleotide primer for the detection of SNP TSC0016791
ttcaaactttcc

SEQ ID NO: 295906 - DNA, 12 bp, Artificial Sequence
  Oligonucleotide primer for the detection of SNP TSC0016792
tcttcatatcaa

SEQ ID NO: 295907 - DNA, 12 bp, Artificial Sequence
  Oligonucleotide primer for the detection of SNP TSC0016792
tcaaactttcca

SEQ ID NO: 295908 - DNA, 12 bp, Artificial Sequence
  Oligonucleotide primer for the detection of SNP TSC0016793
aacccattttaa

SEQ ID NO: 295909 - DNA, 12 bp, Artificial Sequence
  Oligonucleotide primer for the detection of SNP TSC0016793
ggaggtggtgta

SEQ ID NO: 295910 - DNA, 12 bp, Artificial Sequence
  Oligonucleotide primer for the detection of SNP TSC0016794
tattctataaaa

SEQ ID NO: 295911 - DNA, 12 bp, Artificial Sequence
  Oligonucleotide primer for the detection of SNP TSC0016794
ggggatgtttaa

SEQ ID NO: 295912 - DNA, 12 bp, Artificial Sequence
  Oligonucleotide primer for the detection of SNP TSC0016794
gaaaatatccaa

SEQ ID NO: 295913 - DNA, 12 bp, Artificial Sequence
  Oligonucleotide primer for the detection of SNP TSC0016794
atgttttgtggg

SEQ ID NO: 295914 - DNA, 12 bp, Artificial Sequence
  Oligonucleotide primer for the detection of SNP TSC0016795
aatttactaatc

SEQ ID NO: 295915 - DNA, 12 bp, Artificial Sequence
  Oligonucleotide primer for the detection of SNP TSC0016795
gatttagattag

SEQ ID NO: 295916 - DNA, 12 bp, Artificial Sequence
  Oligonucleotide primer for the detection of SNP TSC0016797
tataaacatacc

SEQ ID NO: 295917 - DNA, 12 bp, Artificial Sequence
  Oligonucleotide primer for the detection of SNP TSC0016797
aaattaggaaaa

SEQ ID NO: 295918 - DNA, 12 bp, Artificial Sequence
  Oligonucleotide primer for the detection of SNP TSC0016798
ataccaccttat

SEQ ID NO: 295919 - DNA, 12 bp, Artificial Sequence
  Oligonucleotide primer for the detection of SNP TSC0016798
ataccgccttat

SEQ ID NO: 295920 - DNA, 12 bp, Artificial Sequence
  Oligonucleotide primer for the detection of SNP TSC0016798
ttttggattggg

SEQ ID NO: 295921 - DNA, 12 bp, Artificial Sequence
  Oligonucleotide primer for the detection of SNP TSC0016798
ttttggatcggg

SEQ ID NO: 295922 - DNA, 12 bp, Artificial Sequence
  Oligonucleotide primer for the detection of SNP TSC0016800
aatattaactaa

SEQ ID NO: 295923 - DNA, 12 bp, Artificial Sequence
  Oligonucleotide primer for the detection of SNP TSC0016800
tttaattttttg

SEQ ID NO: 295924 - DNA, 12 bp, Artificial Sequence
  Oligonucleotide primer for the detection of SNP TSC0016800
cttaacctccta

SEQ ID NO: 295925 - DNA, 12 bp, Artificial Sequence
  Oligonucleotide primer for the detection of SNP TSC0016800
tgttaattgatt

SEQ ID NO: 295926 - DNA, 12 bp, Artificial Sequence
  Oligonucleotide primer for the detection of SNP TSC0016802
aacccaaataac

SEQ ID NO: 295927 - DNA, 12 bp, Artificial Sequence
  Oligonucleotide primer for the detection of SNP TSC0016802
aacccgaataac

SEQ ID NO: 295928 - DNA, 12 bp, Artificial Sequence
  Oligonucleotide primer for the detection of SNP TSC0016802
ggaagagttgtg

SEQ ID NO: 295929 - DNA, 12 bp, Artificial Sequence
  Oligonucleotide primer for the detection of SNP TSC0016805
agagttgttgtt

SEQ ID NO: 295930 - DNA, 12 bp, Artificial Sequence
  Oligonucleotide primer for the detection of SNP TSC0016805
aaaactactact

SEQ ID NO: 295931 - DNA, 12 bp, Artificial Sequence
  Oligonucleotide primer for the detection of SNP TSC0016805
gtaaaagtaagt

SEQ ID NO: 295932 - DNA, 12 bp, Artificial Sequence
  Oligonucleotide primer for the detection of SNP TSC0016806
aaccatctctct

SEQ ID NO: 295933 - DNA, 12 bp, Artificial Sequence
  Oligonucleotide primer for the detection of SNP TSC0016806
aaccgtctctct

SEQ ID NO: 295934 - DNA, 12 bp, Artificial Sequence
  Oligonucleotide primer for the detection of SNP TSC0016808
caccaacattat

SEQ ID NO: 295935 - DNA, 12 bp, Artificial Sequence
  Oligonucleotide primer for the detection of SNP TSC0016808
cgccaacattat

SEQ ID NO: 295936 - DNA, 12 bp, Artificial Sequence
  Oligonucleotide primer for the detection of SNP TSC0016808
gtttagttgata

SEQ ID NO: 295937 - DNA, 12 bp, Artificial Sequence
  Oligonucleotide primer for the detection of SNP TSC0016808
acttaattaata

SEQ ID NO: 295938 - DNA, 12 bp, Artificial Sequence
  Oligonucleotide primer for the detection of SNP TSC0016808
tgttagtattat

SEQ ID NO: 295939 - DNA, 12 bp, Artificial Sequence
  Oligonucleotide primer for the detection of SNP TSC0016808
cgttagtattat

SEQ ID NO: 295940 - DNA, 12 bp, Artificial Sequence
  Oligonucleotide primer for the detection of SNP TSC0016809
aagtttgatttg

SEQ ID NO: 295941 - DNA, 12 bp, Artificial Sequence
  Oligonucleotide primer for the detection of SNP TSC0016814
tagagtttttga

SEQ ID NO: 295942 - DNA, 12 bp, Artificial Sequence
  Oligonucleotide primer for the detection of SNP TSC0016816
tcctaattttat

SEQ ID NO: 295943 - DNA, 12 bp, Artificial Sequence
  Oligonucleotide primer for the detection of SNP TSC0016816
gggtgggtgggg

SEQ ID NO: 295944 - DNA, 12 bp, Artificial Sequence
  Oligonucleotide primer for the detection of SNP TSC0016819
taaaacccaacc

SEQ ID NO: 295945 - DNA, 12 bp, Artificial Sequence
  Oligonucleotide primer for the detection of SNP TSC0016819
tgagagtattga

SEQ ID NO: 295946 - DNA, 12 bp, Artificial Sequence
  Oligonucleotide primer for the detection of SNP TSC0016820
aataccctttca

SEQ ID NO: 295947 - DNA, 12 bp, Artificial Sequence
  Oligonucleotide primer for the detection of SNP TSC0016820
gttgtaggtttt

SEQ ID NO: 295948 - DNA, 12 bp, Artificial Sequence
  Oligonucleotide primer for the detection of SNP TSC0016820
taactataaact

SEQ ID NO: 295949 - DNA, 12 bp, Artificial Sequence
  Oligonucleotide primer for the detection of SNP TSC0016820
gatgttttttta

SEQ ID NO: 295950 - DNA, 12 bp, Artificial Sequence
  Oligonucleotide primer for the detection of SNP TSC0016821
aaaaaaacgaca

SEQ ID NO: 295951 - DNA, 12 bp, Artificial Sequence
  Oligonucleotide primer for the detection of SNP TSC0016821
tgtttatattaa

SEQ ID NO: 295952 - DNA, 12 bp, Artificial Sequence
  Oligonucleotide primer for the detection of SNP TSC0016823
ctaaaaaaaacc

SEQ ID NO: 295953 - DNA, 12 bp, Artificial Sequence
  Oligonucleotide primer for the detection of SNP TSC0016823
tatgagttattg

SEQ ID NO: 295954 - DNA, 12 bp, Artificial Sequence
  Oligonucleotide primer for the detection of SNP TSC0016823
ttgaaaagggtt

SEQ ID NO: 295955 - DNA, 12 bp, Artificial Sequence
  Oligonucleotide primer for the detection of SNP TSC0016823
ttgaaaagggtc

SEQ ID NO: 295956 - DNA, 12 bp, Artificial Sequence
  Oligonucleotide primer for the detection of SNP TSC0016825
aaaacactatat

SEQ ID NO: 295957 - DNA, 12 bp, Artificial Sequence
  Oligonucleotide primer for the detection of SNP TSC0016825
aaaacgctatat

SEQ ID NO: 295958 - DNA, 12 bp, Artificial Sequence
  Oligonucleotide primer for the detection of SNP TSC0016826
taaacaaaacac

SEQ ID NO: 295959 - DNA, 12 bp, Artificial Sequence
  Oligonucleotide primer for the detection of SNP TSC0016826
gtggtgtaggtt

SEQ ID NO: 295960 - DNA, 12 bp, Artificial Sequence
  Oligonucleotide primer for the detection of SNP TSC0016826
gtggcgtaggtt

SEQ ID NO: 295961 - DNA, 12 bp, Artificial Sequence
  Oligonucleotide primer for the detection of SNP TSC0016826
gtggtgtaggtc

SEQ ID NO: 295962 - DNA, 12 bp, Artificial Sequence
  Oligonucleotide primer for the detection of SNP TSC0016826
gtggcgtaggtc

SEQ ID NO: 295963 - DNA, 12 bp, Artificial Sequence
  Oligonucleotide primer for the detection of SNP TSC0016826
ataacgtaaacc

SEQ ID NO: 295964 - DNA, 12 bp, Artificial Sequence
  Oligonucleotide primer for the detection of SNP TSC0016826
gtaacataaacc

SEQ ID NO: 295965 - DNA, 12 bp, Artificial Sequence
  Oligonucleotide primer for the detection of SNP TSC0016826
gtaacgtaaacc

SEQ ID NO: 295966 - DNA, 12 bp, Artificial Sequence
  Oligonucleotide primer for the detection of SNP TSC0016826
tgagtaaggtat

SEQ ID NO: 295967 - DNA, 12 bp, Artificial Sequence
  Oligonucleotide primer for the detection of SNP TSC0016826
tgagtaaggtac

SEQ ID NO: 295968 - DNA, 12 bp, Artificial Sequence
  Oligonucleotide primer for the detection of SNP TSC0016827
ataacataaata

SEQ ID NO: 295969 - DNA, 12 bp, Artificial Sequence
  Oligonukleotid-Primer
atgttaagaatt

SEQ ID NO: 295970 - DNA, 12 bp, Artificial Sequence
  Oligonucleotide primer for the detection of SNP TSC0016827
atattaaaaact

SEQ ID NO: 295971 - DNA, 12 bp, Artificial Sequence
  Oligonucleotide primer for the detection of SNP TSC0016827
tgtaatatgaat

SEQ ID NO: 295972 - DNA, 12 bp, Artificial Sequence
  Oligonucleotide primer for the detection of SNP TSC0016828
ttcatattacat

SEQ ID NO: 295973 - DNA, 12 bp, Artificial Sequence
  Oligonukleotid-Primer
tatctcaaaaac

SEQ ID NO: 295974 - DNA, 12 bp, Artificial Sequence
  Oligonucleotide primer for the detection of SNP TSC0016829
tatgtaatataa

SEQ ID NO: 295975 - DNA, 12 bp, Artificial Sequence
  Oligonucleotide primer for the detection of SNP TSC0016830
tacaaattttta

SEQ ID NO: 295976 - DNA, 12 bp, Artificial Sequence
  Oligonucleotide primer for the detection of SNP TSC0016830
atttgtttttga

SEQ ID NO: 295977 - DNA, 12 bp, Artificial Sequence
  Oligonucleotide primer for the detection of SNP TSC0016830
tttactcctaaa

SEQ ID NO: 295978 - DNA, 12 bp, Artificial Sequence
  Oligonucleotide primer for the detection of SNP TSC0016830
tataaatttttg

SEQ ID NO: 295979 - DNA, 12 bp, Artificial Sequence
  Oligonucleotide primer for the detection of SNP TSC0016832
tcaaaacttcat

SEQ ID NO: 295980 - DNA, 12 bp, Artificial Sequence
  Oligonucleotide primer for the detection of SNP TSC0016832
tcaaaacttcgt

SEQ ID NO: 295981 - DNA, 12 bp, Artificial Sequence
  Oligonucleotide primer for the detection of SNP TSC0016832
gtttaataaaaa

SEQ ID NO: 295982 - DNA, 12 bp, Artificial Sequence
  Oligonucleotide primer for the detection of SNP TSC0016833
gaatttttggaa

SEQ ID NO: 295983 - DNA, 12 bp, Artificial Sequence
  Oligonucleotide primer for the detection of SNP TSC0016834
caccaatcatat

SEQ ID NO: 295984 - DNA, 12 bp, Artificial Sequence
  Oligonucleotide primer for the detection of SNP TSC0016834
aattttttttaa

SEQ ID NO: 295985 - DNA, 12 bp, Artificial Sequence
  Oligonucleotide primer for the detection of SNP TSC0016835
tatacttattta

SEQ ID NO: 295986 - DNA, 12 bp, Artificial Sequence
  Oligonucleotide primer for the detection of SNP TSC0016835
taatttattggt

SEQ ID NO: 295987 - DNA, 12 bp, Artificial Sequence
  Oligonucleotide primer for the detection of SNP TSC0016835
aacccactaata

SEQ ID NO: 295988 - DNA, 12 bp, Artificial Sequence
  Oligonucleotide primer for the detection of SNP TSC0016835
tatgtttattta

SEQ ID NO: 295989 - DNA, 12 bp, Artificial Sequence
  Oligonucleotide primer for the detection of SNP TSC0016838
cctaaaaaaata

SEQ ID NO: 295990 - DNA, 12 bp, Artificial Sequence
  Oligonucleotide primer for the detection of SNP TSC0016838
ttgtgattatgt

SEQ ID NO: 295991 - DNA, 12 bp, Artificial Sequence
  Oligonucleotide primer for the detection of SNP TSC0016838
attataatcata

SEQ ID NO: 295992 - DNA, 12 bp, Artificial Sequence
  Oligonucleotide primer for the detection of SNP TSC0016838
ttttaggaaaat

SEQ ID NO: 295993 - DNA, 12 bp, Artificial Sequence
  Oligonucleotide primer for the detection of SNP TSC0016839
ttaaactaaaat

SEQ ID NO: 295994 - DNA, 12 bp, Artificial Sequence
  Oligonucleotide primer for the detection of SNP TSC0016839
gttttttaatga

SEQ ID NO: 295995 - DNA, 12 bp, Artificial Sequence
  Oligonucleotide primer for the detection of SNP TSC0016839
ctctctaataaa

SEQ ID NO: 295996 - DNA, 12 bp, Artificial Sequence
  Oligonucleotide primer for the detection of SNP TSC0016839
ttggattgaaat

SEQ ID NO: 295997 - DNA, 12 bp, Artificial Sequence
  Oligonucleotide primer for the detection of SNP TSC0016840
ttcaaatacttt

SEQ ID NO: 295998 - DNA, 12 bp, Artificial Sequence
  Oligonucleotide primer for the detection of SNP TSC0016840
tttaaatatttt

SEQ ID NO: 295999 - DNA, 12 bp, Artificial Sequence
  Oligonucleotide primer for the detection of SNP TSC0016843
aatagagtaaga

SEQ ID NO: 296000 - DNA, 12 bp, Artificial Sequence
  Oligonucleotide primer for the detection of SNP TSC0016844
ctaaaaatcaat

SEQ ID NO: 296001 - DNA, 12 bp, Artificial Sequence
  Oligonucleotide primer for the detection of SNP TSC0016844
ctaaaaatcgat

SEQ ID NO: 296002 - DNA, 12 bp, Artificial Sequence
  Oligonucleotide primer for the detection of SNP TSC0016844
aaagggggattg

SEQ ID NO: 296003 - DNA, 12 bp, Artificial Sequence
  Oligonucleotide primer for the detection of SNP TSC0016845
taaaaaatttat

SEQ ID NO: 296004 - DNA, 12 bp, Artificial Sequence
  Oligonucleotide primer for the detection of SNP TSC0016845
ttagggaaattg

SEQ ID NO: 296005 - DNA, 12 bp, Artificial Sequence
  Oligonucleotide primer for the detection of SNP TSC0016846
cataataataat

SEQ ID NO: 296006 - DNA, 12 bp, Artificial Sequence
  Oligonucleotide primer for the detection of SNP TSC0016846
gtgggtttataa

SEQ ID NO: 296007 - DNA, 12 bp, Artificial Sequence
  Oligonucleotide primer for the detection of SNP TSC0016846
gcgggtttataa

SEQ ID NO: 296008 - DNA, 12 bp, Artificial Sequence
  Oligonucleotide primer for the detection of SNP TSC0016846
acaaactcacaa

SEQ ID NO: 296009 - DNA, 12 bp, Artificial Sequence
  Oligonucleotide primer for the detection of SNP TSC0016846
acgaactcacaa

SEQ ID NO: 296010 - DNA, 12 bp, Artificial Sequence
  Oligonucleotide primer for the detection of SNP TSC0016846
tatggtgatggt

SEQ ID NO: 296011 - DNA, 12 bp, Artificial Sequence
  Oligonucleotide primer for the detection of SNP TSC0016847
tttgattttgag

SEQ ID NO: 296012 - DNA, 12 bp, Artificial Sequence
  Oligonucleotide primer for the detection of SNP TSC0016848
tactaactatat

SEQ ID NO: 296013 - DNA, 12 bp, Artificial Sequence
  Oligonucleotide primer for the detection of SNP TSC0016848
tgattagattag

SEQ ID NO: 296014 - DNA, 12 bp, Artificial Sequence
  Oligonucleotide primer for the detection of SNP TSC0016853
taatctaaccat

SEQ ID NO: 296015 - DNA, 12 bp, Artificial Sequence
  Oligonucleotide primer for the detection of SNP TSC0016853
taaatttagtaa

SEQ ID NO: 296016 - DNA, 12 bp, Artificial Sequence
  Oligonucleotide primer for the detection of SNP TSC0016854
actctaaataac

SEQ ID NO: 296017 - DNA, 12 bp, Artificial Sequence
  Oligonucleotide primer for the detection of SNP TSC0016854
aaggtagaagaa

SEQ ID NO: 296018 - DNA, 12 bp, Artificial Sequence
  Oligonucleotide primer for the detection of SNP TSC0016855
atatatccaaaa

SEQ ID NO: 296019 - DNA, 12 bp, Artificial Sequence
  Oligonucleotide primer for the detection of SNP TSC0016855
tttttgtttttg

SEQ ID NO: 296020 - DNA, 12 bp, Artificial Sequence
  Oligonucleotide primer for the detection of SNP TSC0016856
ttagggataaaa

SEQ ID NO: 296021 - DNA, 12 bp, Artificial Sequence
  Oligonucleotide primer for the detection of SNP TSC0016856
ccaaaaacaaaa

SEQ ID NO: 296022 - DNA, 12 bp, Artificial Sequence
  Oligonucleotide primer for the detection of SNP TSC0016857
atatttatttta

SEQ ID NO: 296023 - DNA, 12 bp, Artificial Sequence
  Oligonucleotide primer for the detection of SNP TSC0016857
atgtttgttttg

SEQ ID NO: 296024 - DNA, 12 bp, Artificial Sequence
  Oligonucleotide primer for the detection of SNP TSC0016858
ttaaacatccaa

SEQ ID NO: 296025 - DNA, 12 bp, Artificial Sequence
  Oligonucleotide primer for the detection of SNP TSC0016858
ttaaacatccga

SEQ ID NO: 296026 - DNA, 12 bp, Artificial Sequence
  Oligonucleotide primer for the detection of SNP TSC0016858
agagtggaaata

SEQ ID NO: 296027 - DNA, 12 bp, Artificial Sequence
  Oligonucleotide primer for the detection of SNP TSC0016858
gagtatttggtt

SEQ ID NO: 296028 - DNA, 12 bp, Artificial Sequence
  Oligonucleotide primer for the detection of SNP TSC0016858
gagtattcggtt

SEQ ID NO: 296029 - DNA, 12 bp, Artificial Sequence
  Oligonucleotide primer for the detection of SNP TSC0016859
ataaacttccat

SEQ ID NO: 296030 - DNA, 12 bp, Artificial Sequence
  Oligonucleotide primer for the detection of SNP TSC0016859
ggggattttata

SEQ ID NO: 296031 - DNA, 12 bp, Artificial Sequence
  Oligonucleotide primer for the detection of SNP TSC0016860
atttttaatgtg

SEQ ID NO: 296032 - DNA, 12 bp, Artificial Sequence
  Oligonucleotide primer for the detection of SNP TSC0016860
atttttaacgtg

SEQ ID NO: 296033 - DNA, 12 bp, Artificial Sequence
  Oligonucleotide primer for the detection of SNP TSC0016861
ttctatcaacct

SEQ ID NO: 296034 - DNA, 12 bp, Artificial Sequence
  Oligonucleotide primer for the detection of SNP TSC0016861
tattttttaaga

SEQ ID NO: 296035 - DNA, 12 bp, Artificial Sequence
  Oligonucleotide primer for the detection of SNP TSC0016865
actccatcaaca

SEQ ID NO: 296036 - DNA, 12 bp, Artificial Sequence
  Oligonucleotide primer for the detection of SNP TSC0016865
actccgtcaaca

SEQ ID NO: 296037 - DNA, 12 bp, Artificial Sequence
  Oligonucleotide primer for the detection of SNP TSC0016865
gttttgttaata

SEQ ID NO: 296038 - DNA, 12 bp, Artificial Sequence
  Oligonucleotide primer for the detection of SNP TSC0016865
gtttcgttaata

SEQ ID NO: 296039 - DNA, 12 bp, Artificial Sequence
  Oligonucleotide primer for the detection of SNP TSC0016866
gtggtaggggga

SEQ ID NO: 296040 - DNA, 12 bp, Artificial Sequence
  Oligonucleotide primer for the detection of SNP TSC0016866
gcggtaggggga

SEQ ID NO: 296041 - DNA, 12 bp, Artificial Sequence
  Oligonucleotide primer for the detection of SNP TSC0016866
acgacaaaaaaa

SEQ ID NO: 296042 - DNA, 12 bp, Artificial Sequence
  Oligonucleotide primer for the detection of SNP TSC0016866
aataggtatttt

SEQ ID NO: 296043 - DNA, 12 bp, Artificial Sequence
  Oligonucleotide primer for the detection of SNP TSC0016867
cctccaaactaa

SEQ ID NO: 296044 - DNA, 12 bp, Artificial Sequence
  Oligonucleotide primer for the detection of SNP TSC0016867
agaaaagatagt

SEQ ID NO: 296045 - DNA, 12 bp, Artificial Sequence
  Oligonucleotide primer for the detection of SNP TSC0016867
agaaaagatagc

SEQ ID NO: 296046 - DNA, 12 bp, Artificial Sequence
  Oligonucleotide primer for the detection of SNP TSC0016871
aataactatatt

SEQ ID NO: 296047 - DNA, 12 bp, Artificial Sequence
  Oligonucleotide primer for the detection of SNP TSC0016871
tagaattttgta

SEQ ID NO: 296048 - DNA, 12 bp, Artificial Sequence
  Oligonucleotide primer for the detection of SNP TSC0016871
caaaatcttata

SEQ ID NO: 296049 - DNA, 12 bp, Artificial Sequence
  Oligonucleotide primer for the detection of SNP TSC0016871
ggtgattgtgtt

SEQ ID NO: 296050 - DNA, 12 bp, Artificial Sequence
  Oligonucleotide primer for the detection of SNP TSC0016872
caccccatcaac

SEQ ID NO: 296051 - DNA, 12 bp, Artificial Sequence
  Oligonucleotide primer for the detection of SNP TSC0016872
ttttatatgtta

SEQ ID NO: 296052 - DNA, 12 bp, Artificial Sequence
  Oligonucleotide primer for the detection of SNP TSC0016873
ataataccaata

SEQ ID NO: 296053 - DNA, 12 bp, Artificial Sequence
  Oligonucleotide primer for the detection of SNP TSC0016873
ttataattgttg

SEQ ID NO: 296054 - DNA, 12 bp, Artificial Sequence
  Oligonucleotide primer for the detection of SNP TSC0016873
ttataatcgttg

SEQ ID NO: 296055 - DNA, 12 bp, Artificial Sequence
  Oligonucleotide primer for the detection of SNP TSC0016873
tcacaatcatta

SEQ ID NO: 296056 - DNA, 12 bp, Artificial Sequence
  Oligonucleotide primer for the detection of SNP TSC0016873
tcacaatcgtta

SEQ ID NO: 296057 - DNA, 12 bp, Artificial Sequence
  Oligonucleotide primer for the detection of SNP TSC0016873
tgtgatattaat

SEQ ID NO: 296058 - DNA, 12 bp, Artificial Sequence
  Oligonucleotide primer for the detection of SNP TSC0016874
cctcaaaaaata

SEQ ID NO: 296059 - DNA, 12 bp, Artificial Sequence
  Oligonucleotide primer for the detection of SNP TSC0016874
ggtattatattg

SEQ ID NO: 296060 - DNA, 12 bp, Artificial Sequence
  Oligonucleotide primer for the detection of SNP TSC0016874
aatatcacacta

SEQ ID NO: 296061 - DNA, 12 bp, Artificial Sequence
  Oligonucleotide primer for the detection of SNP TSC0016877
caattccaaaat

SEQ ID NO: 296062 - DNA, 12 bp, Artificial Sequence
  Oligonucleotide primer for the detection of SNP TSC0016877
ttttataaggga

SEQ ID NO: 296063 - DNA, 12 bp, Artificial Sequence
  Oligonucleotide primer for the detection of SNP TSC0016878
caattcatcaac

SEQ ID NO: 296064 - DNA, 12 bp, Artificial Sequence
  Oligonucleotide primer for the detection of SNP TSC0016878
aggtttttgtta

SEQ ID NO: 296065 - DNA, 12 bp, Artificial Sequence
  Oligonucleotide primer for the detection of SNP TSC0016878
aggttttcgtta

SEQ ID NO: 296066 - DNA, 12 bp, Artificial Sequence
  Oligonucleotide primer for the detection of SNP TSC0016883
actacattactt

SEQ ID NO: 296067 - DNA, 12 bp, Artificial Sequence
  Oligonucleotide primer for the detection of SNP TSC0016883
gttaggatgtag

SEQ ID NO: 296068 - DNA, 12 bp, Artificial Sequence
  Oligonucleotide primer for the detection of SNP TSC0016883
accaaaatataa

SEQ ID NO: 296069 - DNA, 12 bp, Artificial Sequence
  Oligonucleotide primer for the detection of SNP TSC0016883
gttgtattgttt

SEQ ID NO: 296070 - DNA, 12 bp, Artificial Sequence
  Oligonucleotide primer for the detection of SNP TSC0016887
caaaaaaccaaa

SEQ ID NO: 296071 - DNA, 12 bp, Artificial Sequence
  Oligonucleotide primer for the detection of SNP TSC0016887
ttttattattgg

SEQ ID NO: 296072 - DNA, 12 bp, Artificial Sequence
  Oligonucleotide primer for the detection of SNP TSC0016887
ttttattatcgg

SEQ ID NO: 296073 - DNA, 12 bp, Artificial Sequence
  Oligonucleotide primer for the detection of SNP TSC0016887
ccccaccaccaa

SEQ ID NO: 296074 - DNA, 12 bp, Artificial Sequence
  Oligonukleotid-Primer
ccccaccaccga

SEQ ID NO: 296075 - DNA, 12 bp, Artificial Sequence
  Oligonucleotide primer for the detection of SNP TSC0016887
tttagagagtta

SEQ ID NO: 296076 - DNA, 12 bp, Artificial Sequence
  Oligonucleotide primer for the detection of SNP TSC0016888
ccaattaacttc

SEQ ID NO: 296077 - DNA, 12 bp, Artificial Sequence
  Oligonucleotide primer for the detection of SNP TSC0016888
tttatgttaatg

SEQ ID NO: 296078 - DNA, 12 bp, Artificial Sequence
  Oligonukleotid-Primer
taccttaaaaac

SEQ ID NO: 296079 - DNA, 12 bp, Artificial Sequence
  Oligonucleotide primer for the detection of SNP TSC0016890
taagatatagtg

SEQ ID NO: 296080 - DNA, 12 bp, Artificial Sequence
  Oligonucleotide primer for the detection of SNP TSC0016890
taagatatagcg

SEQ ID NO: 296081 - DNA, 12 bp, Artificial Sequence
  Oligonucleotide primer for the detection of SNP TSC0016890
caaaacacaacg

SEQ ID NO: 296082 - DNA, 12 bp, Artificial Sequence
  Oligonucleotide primer for the detection of SNP TSC0016890
tgttttgaaggt

SEQ ID NO: 296083 - DNA, 12 bp, Artificial Sequence
  Oligonucleotide primer for the detection of SNP TSC0016893
acaaaaataata

SEQ ID NO: 296084 - DNA, 12 bp, Artificial Sequence
  Oligonucleotide primer for the detection of SNP TSC0016893
ttagattttttc

SEQ ID NO: 296085 - DNA, 12 bp, Artificial Sequence
  Oligonucleotide primer for the detection of SNP TSC0016893
acccaaacccct

SEQ ID NO: 296086 - DNA, 12 bp, Artificial Sequence
  Oligonucleotide primer for the detection of SNP TSC0016893
aataaggataat

SEQ ID NO: 296087 - DNA, 12 bp, Artificial Sequence
  Oligonucleotide primer for the detection of SNP TSC0016894
ttccaaaaaaca

SEQ ID NO: 296088 - DNA, 12 bp, Artificial Sequence
  Oligonucleotide primer for the detection of SNP TSC0016894
taaaataaattg

SEQ ID NO: 296089 - DNA, 12 bp, Artificial Sequence
  Oligonucleotide primer for the detection of SNP TSC0016894
caaaacaaatta

SEQ ID NO: 296090 - DNA, 12 bp, Artificial Sequence
  Oligonucleotide primer for the detection of SNP TSC0016894
ttttagagaata

SEQ ID NO: 296091 - DNA, 12 bp, Artificial Sequence
  Oligonucleotide primer for the detection of SNP TSC0016896
ccccatcttctc

SEQ ID NO: 296092 - DNA, 12 bp, Artificial Sequence
  Oligonucleotide primer for the detection of SNP TSC0016896
tttgggagaaga

SEQ ID NO: 296093 - DNA, 12 bp, Artificial Sequence
  Oligonucleotide primer for the detection of SNP TSC0016898
aatctcaactaa

SEQ ID NO: 296094 - DNA, 12 bp, Artificial Sequence
  Oligonucleotide primer for the detection of SNP TSC0016898
ctcttttccacc

SEQ ID NO: 296095 - DNA, 12 bp, Artificial Sequence
  Oligonucleotide primer for the detection of SNP TSC0016898
gaggttttagtt

SEQ ID NO: 296096 - DNA, 12 bp, Artificial Sequence
  Oligonucleotide primer for the detection of SNP TSC0016899
aaatcttctatc

SEQ ID NO: 296097 - DNA, 12 bp, Artificial Sequence
  Oligonucleotide primer for the detection of SNP TSC0016899
tagtgagtgtag

SEQ ID NO: 296098 - DNA, 12 bp, Artificial Sequence
  Oligonucleotide primer for the detection of SNP TSC0016900
tatggagaaatg

SEQ ID NO: 296099 - DNA, 12 bp, Artificial Sequence
  Oligonucleotide primer for the detection of SNP TSC0016900
tatggagaaacg

SEQ ID NO: 296100 - DNA, 12 bp, Artificial Sequence
  Oligonucleotide primer for the detection of SNP TSC0016901
ataagagtgaaa

SEQ ID NO: 296101 - DNA, 12 bp, Artificial Sequence
  Oligonucleotide primer for the detection of SNP TSC0016901
ataagagcgaaa

SEQ ID NO: 296102 - DNA, 12 bp, Artificial Sequence
  Oligonucleotide primer for the detection of SNP TSC0016901
acaaaaacgaaa

SEQ ID NO: 296103 - DNA, 12 bp, Artificial Sequence
  Oligonucleotide primer for the detection of SNP TSC0016902
ttactcattatc

SEQ ID NO: 296104 - DNA, 12 bp, Artificial Sequence
  Oligonucleotide primer for the detection of SNP TSC0016902
taaattgaataa

SEQ ID NO: 296105 - DNA, 12 bp, Artificial Sequence
  Oligonucleotide primer for the detection of SNP TSC0016903
ggtaggagaatt

SEQ ID NO: 296106 - DNA, 12 bp, Artificial Sequence
  Oligonucleotide primer for the detection of SNP TSC0016904
ccaacaatataa

SEQ ID NO: 296107 - DNA, 12 bp, Artificial Sequence
  Oligonucleotide primer for the detection of SNP TSC0016904
gatttggtattt

SEQ ID NO: 296108 - DNA, 12 bp, Artificial Sequence
  Oligonucleotide primer for the detection of SNP TSC0016904
acctaacaccta

SEQ ID NO: 296109 - DNA, 12 bp, Artificial Sequence
  Oligonucleotide primer for the detection of SNP TSC0016904
tagtagtgtggt

SEQ ID NO: 296110 - DNA, 12 bp, Artificial Sequence
  Oligonucleotide primer for the detection of SNP TSC0016905
ccaaaacctcta

SEQ ID NO: 296111 - DNA, 12 bp, Artificial Sequence
  Oligonucleotide primer for the detection of SNP TSC0016905
tatagatgtatt

SEQ ID NO: 296112 - DNA, 12 bp, Artificial Sequence
  Oligonucleotide primer for the detection of SNP TSC0016905
tatagatgtatc

SEQ ID NO: 296113 - DNA, 12 bp, Artificial Sequence
  Oligonucleotide primer for the detection of SNP TSC0016905
aatataaataca

SEQ ID NO: 296114 - DNA, 12 bp, Artificial Sequence
  Oligonucleotide primer for the detection of SNP TSC0016905
tttaggattttt

SEQ ID NO: 296115 - DNA, 12 bp, Artificial Sequence
  Oligonucleotide primer for the detection of SNP TSC0016907
caccctctcctc

SEQ ID NO: 296116 - DNA, 12 bp, Artificial Sequence
  Oligonucleotide primer for the detection of SNP TSC0016907
ttgtgtatttta

SEQ ID NO: 296117 - DNA, 12 bp, Artificial Sequence
  Oligonucleotide primer for the detection of SNP TSC0016908
taccaaaaatac

SEQ ID NO: 296118 - DNA, 12 bp, Artificial Sequence
  Oligonucleotide primer for the detection of SNP TSC0016908
tatatttagtta

SEQ ID NO: 296119 - DNA, 12 bp, Artificial Sequence
  Oligonucleotide primer for the detection of SNP TSC0016910
ctctacctatat

SEQ ID NO: 296120 - DNA, 12 bp, Artificial Sequence
  Oligonucleotide primer for the detection of SNP TSC0016910
ttatattaattg

SEQ ID NO: 296121 - DNA, 12 bp, Artificial Sequence
  Oligonucleotide primer for the detection of SNP TSC0016912
acaaataaattt

SEQ ID NO: 296122 - DNA, 12 bp, Artificial Sequence
  Oligonucleotide primer for the detection of SNP TSC0016912
atagataaattt

SEQ ID NO: 296123 - DNA, 12 bp, Artificial Sequence
  Oligonucleotide primer for the detection of SNP TSC0016915
aaacataataat

SEQ ID NO: 296124 - DNA, 12 bp, Artificial Sequence
  Oligonucleotide primer for the detection of SNP TSC0016915
aggtatggtggt

SEQ ID NO: 296125 - DNA, 12 bp, Artificial Sequence
  Oligonucleotide primer for the detection of SNP TSC0016918
ctatctccccct

SEQ ID NO: 296126 - DNA, 12 bp, Artificial Sequence
  Oligonucleotide primer for the detection of SNP TSC0016918
ggtggtgggggt

SEQ ID NO: 296127 - DNA, 12 bp, Artificial Sequence
  Oligonucleotide primer for the detection of SNP TSC0016920
atatattttaaa

SEQ ID NO: 296128 - DNA, 12 bp, Artificial Sequence
  Oligonucleotide primer for the detection of SNP TSC0016920
tttattatattg

SEQ ID NO: 296129 - DNA, 12 bp, Artificial Sequence
  Oligonucleotide primer for the detection of SNP TSC0016920
cttattatatta

SEQ ID NO: 296130 - DNA, 12 bp, Artificial Sequence
  Oligonucleotide primer for the detection of SNP TSC0016920
atatattttaga

SEQ ID NO: 296131 - DNA, 12 bp, Artificial Sequence
  Oligonucleotide primer for the detection of SNP TSC0016923
tatcccactacc

SEQ ID NO: 296132 - DNA, 12 bp, Artificial Sequence
  Oligonucleotide primer for the detection of SNP TSC0016923
tatcccgctacc

SEQ ID NO: 296133 - DNA, 12 bp, Artificial Sequence
  Oligonucleotide primer for the detection of SNP TSC0016923
aggttgagttta

SEQ ID NO: 296134 - DNA, 12 bp, Artificial Sequence
  Oligonucleotide primer for the detection of SNP TSC0016924
aacattaaccct

SEQ ID NO: 296135 - DNA, 12 bp, Artificial Sequence
  Oligonucleotide primer for the detection of SNP TSC0016924
ttgtgggaaggg

SEQ ID NO: 296136 - DNA, 12 bp, Artificial Sequence
  Oligonucleotide primer for the detection of SNP TSC0016924
ttgcgggaaggg

SEQ ID NO: 296137 - DNA, 12 bp, Artificial Sequence
  Oligonucleotide primer for the detection of SNP TSC0016925
ataacataaacg

SEQ ID NO: 296138 - DNA, 12 bp, Artificial Sequence
  Oligonucleotide primer for the detection of SNP TSC0016925
ataacgtaaaca

SEQ ID NO: 296139 - DNA, 12 bp, Artificial Sequence
  Oligonucleotide primer for the detection of SNP TSC0016925
ataacgtaaacg

SEQ ID NO: 296140 - DNA, 12 bp, Artificial Sequence
  Oligonucleotide primer for the detection of SNP TSC0016925
taatccttcctc

SEQ ID NO: 296141 - DNA, 12 bp, Artificial Sequence
  Oligonucleotide primer for the detection of SNP TSC0016925
gtgatgtgaatg

SEQ ID NO: 296142 - DNA, 12 bp, Artificial Sequence
  Oligonucleotide primer for the detection of SNP TSC0016925
gtgacgtgaatg

SEQ ID NO: 296143 - DNA, 12 bp, Artificial Sequence
  Oligonucleotide primer for the detection of SNP TSC0016925
gtgatgtgaacg

SEQ ID NO: 296144 - DNA, 12 bp, Artificial Sequence
  Oligonucleotide primer for the detection of SNP TSC0016925
gtgacgtgaacg

SEQ ID NO: 296145 - DNA, 12 bp, Artificial Sequence
  Oligonucleotide primer for the detection of SNP TSC0016927
taaaaatacaat

SEQ ID NO: 296146 - DNA, 12 bp, Artificial Sequence
  Oligonucleotide primer for the detection of SNP TSC0016927
tattttattaaa

SEQ ID NO: 296147 - DNA, 12 bp, Artificial Sequence
  Oligonucleotide primer for the detection of SNP TSC0016928
tatttaaaataa

SEQ ID NO: 296148 - DNA, 12 bp, Artificial Sequence
  Oligonucleotide primer for the detection of SNP TSC0016928
ttgatttatatt

SEQ ID NO: 296149 - DNA, 12 bp, Artificial Sequence
  Oligonucleotide primer for the detection of SNP TSC0016928
ctaatttatatt

SEQ ID NO: 296150 - DNA, 12 bp, Artificial Sequence
  Oligonucleotide primer for the detection of SNP TSC0016928
tgtttgaaataa

SEQ ID NO: 296151 - DNA, 12 bp, Artificial Sequence
  Oligonucleotide primer for the detection of SNP TSC0016929
taatcttcaatt

SEQ ID NO: 296152 - DNA, 12 bp, Artificial Sequence
  Oligonucleotide primer for the detection of SNP TSC0016929
tatttcacataa

SEQ ID NO: 296153 - DNA, 12 bp, Artificial Sequence
  Oligonucleotide primer for the detection of SNP TSC0016929
aatttttaattt

SEQ ID NO: 296154 - DNA, 12 bp, Artificial Sequence
  Oligonucleotide primer for the detection of SNP TSC0016930
acattactcata

SEQ ID NO: 296155 - DNA, 12 bp, Artificial Sequence
  Oligonucleotide primer for the detection of SNP TSC0016930
tattatttgaat

SEQ ID NO: 296156 - DNA, 12 bp, Artificial Sequence
  Oligonucleotide primer for the detection of SNP TSC0016930
ttatcatttaaa

SEQ ID NO: 296157 - DNA, 12 bp, Artificial Sequence
  Oligonucleotide primer for the detection of SNP TSC0016930
atattatttata

SEQ ID NO: 296158 - DNA, 12 bp, Artificial Sequence
  Oligonucleotide primer for the detection of SNP TSC0016932
ttctaccatata

SEQ ID NO: 296159 - DNA, 12 bp, Artificial Sequence
  Oligonucleotide primer for the detection of SNP TSC0016932
tgtgtataaatt

SEQ ID NO: 296160 - DNA, 12 bp, Artificial Sequence
  Oligonucleotide primer for the detection of SNP TSC0016932
tatatacaaatc

SEQ ID NO: 296161 - DNA, 12 bp, Artificial Sequence
  Oligonucleotide primer for the detection of SNP TSC0016932
ttttattatgta

SEQ ID NO: 296162 - DNA, 12 bp, Artificial Sequence
  Oligonucleotide primer for the detection of SNP TSC0016933
tttttttctttt

SEQ ID NO: 296163 - DNA, 12 bp, Artificial Sequence
  Oligonucleotide primer for the detection of SNP TSC0016935
accccctatatt

SEQ ID NO: 296164 - DNA, 12 bp, Artificial Sequence
  Oligonucleotide primer for the detection of SNP TSC0016938
tactacccatta

SEQ ID NO: 296165 - DNA, 12 bp, Artificial Sequence
  Oligonucleotide primer for the detection of SNP TSC0016938
ggaatgggaaat

SEQ ID NO: 296166 - DNA, 12 bp, Artificial Sequence
  Oligonucleotide primer for the detection of SNP TSC0016938
atattgtttatt

SEQ ID NO: 296167 - DNA, 12 bp, Artificial Sequence
  Oligonucleotide primer for the detection of SNP TSC0016942
ccactccaaaaa

SEQ ID NO: 296168 - DNA, 12 bp, Artificial Sequence
  Oligonucleotide primer for the detection of SNP TSC0016942
tttttaggtttt

SEQ ID NO: 296169 - DNA, 12 bp, Artificial Sequence
  Oligonucleotide primer for the detection of SNP TSC0016942
tttttaggtttc

SEQ ID NO: 296170 - DNA, 12 bp, Artificial Sequence
  Oligonucleotide primer for the detection of SNP TSC0016942
ctcccaaattcc

SEQ ID NO: 296171 - DNA, 12 bp, Artificial Sequence
  Oligonucleotide primer for the detection of SNP TSC0016942
atttattttaag

SEQ ID NO: 296172 - DNA, 12 bp, Artificial Sequence
  Oligonucleotide primer for the detection of SNP TSC0016943
ctccctcctcca

SEQ ID NO: 296173 - DNA, 12 bp, Artificial Sequence
  Oligonucleotide primer for the detection of SNP TSC0016943
agaatagggagg

SEQ ID NO: 296174 - DNA, 12 bp, Artificial Sequence
  Oligonucleotide primer for the detection of SNP TSC0016944
caatttaaaaac

SEQ ID NO: 296175 - DNA, 12 bp, Artificial Sequence
  Oligonucleotide primer for the detection of SNP TSC0016944
tttttaattgtt

SEQ ID NO: 296176 - DNA, 12 bp, Artificial Sequence
  Oligonucleotide primer for the detection of SNP TSC0016944
tttttaatcgtt

SEQ ID NO: 296177 - DNA, 12 bp, Artificial Sequence
  Oligonucleotide primer for the detection of SNP TSC0016944
tttttaatcatt

SEQ ID NO: 296178 - DNA, 12 bp, Artificial Sequence
  Oligonucleotide primer for the detection of SNP TSC0016944
taatttgaaaat

SEQ ID NO: 296179 - DNA, 12 bp, Artificial Sequence
  Oligonukleotid-Primer
ttcaaaacaact

SEQ ID NO: 296180 - DNA, 12 bp, Artificial Sequence
  Oligonucleotide primer for the detection of SNP TSC0016945
atgttatggata

SEQ ID NO: 296181 - DNA, 12 bp, Artificial Sequence
  Oligonucleotide primer for the detection of SNP TSC0016945
atgttacggata

SEQ ID NO: 296182 - DNA, 12 bp, Artificial Sequence
  Oligonucleotide primer for the detection of SNP TSC0016945
ataccacaaata

SEQ ID NO: 296183 - DNA, 12 bp, Artificial Sequence
  Oligonucleotide primer for the detection of SNP TSC0016945
ataccacgaata

SEQ ID NO: 296184 - DNA, 12 bp, Artificial Sequence
  Oligonucleotide primer for the detection of SNP TSC0016945
tttagggtagtt

SEQ ID NO: 296185 - DNA, 12 bp, Artificial Sequence
  Oligonucleotide primer for the detection of SNP TSC0016946
cttcaaaacaac

SEQ ID NO: 296186 - DNA, 12 bp, Artificial Sequence
  Oligonucleotide primer for the detection of SNP TSC0016946
tgttatggataa

SEQ ID NO: 296187 - DNA, 12 bp, Artificial Sequence
  Oligonucleotide primer for the detection of SNP TSC0016946
tgttacggataa

SEQ ID NO: 296188 - DNA, 12 bp, Artificial Sequence
  Oligonucleotide primer for the detection of SNP TSC0016952
tctttaataaaa

SEQ ID NO: 296189 - DNA, 12 bp, Artificial Sequence
  Oligonucleotide primer for the detection of SNP TSC0016952
tgtaaagaattg

SEQ ID NO: 296190 - DNA, 12 bp, Artificial Sequence
  Oligonucleotide primer for the detection of SNP TSC0016952
tataaaaaatta

SEQ ID NO: 296191 - DNA, 12 bp, Artificial Sequence
  Oligonucleotide primer for the detection of SNP TSC0016952
tttttaatgaag

SEQ ID NO: 296192 - DNA, 12 bp, Artificial Sequence
  Oligonucleotide primer for the detection of SNP TSC0016953
acaacataaaaa

SEQ ID NO: 296193 - DNA, 12 bp, Artificial Sequence
  Oligonucleotide primer for the detection of SNP TSC0016953
tataaagttatt

SEQ ID NO: 296194 - DNA, 12 bp, Artificial Sequence
  Oligonucleotide primer for the detection of SNP TSC0016953
cacaaaatcact

SEQ ID NO: 296195 - DNA, 12 bp, Artificial Sequence
  Oligonucleotide primer for the detection of SNP TSC0016953
gtaatatgaaga

SEQ ID NO: 296196 - DNA, 12 bp, Artificial Sequence
  Oligonucleotide primer for the detection of SNP TSC0016954
aatatcatatct

SEQ ID NO: 296197 - DNA, 12 bp, Artificial Sequence
  Oligonucleotide primer for the detection of SNP TSC0016954
ttttttattggg

SEQ ID NO: 296198 - DNA, 12 bp, Artificial Sequence
  Oligonucleotide primer for the detection of SNP TSC0016955
aatctcccaacc

SEQ ID NO: 296199 - DNA, 12 bp, Artificial Sequence
  Oligonucleotide primer for the detection of SNP TSC0016955
aggtttagatag

SEQ ID NO: 296200 - DNA, 12 bp, Artificial Sequence
  Oligonucleotide primer for the detection of SNP TSC0016955
aaatccaaacaa

SEQ ID NO: 296201 - DNA, 12 bp, Artificial Sequence
  Oligonucleotide primer for the detection of SNP TSC0016955
ggttttttagtt

SEQ ID NO: 296202 - DNA, 12 bp, Artificial Sequence
  Oligonucleotide primer for the detection of SNP TSC0016957
acaaaaataatc

SEQ ID NO: 296203 - DNA, 12 bp, Artificial Sequence
  Oligonucleotide primer for the detection of SNP TSC0016957
taattgtgttag

SEQ ID NO: 296204 - DNA, 12 bp, Artificial Sequence
  Oligonucleotide primer for the detection of SNP TSC0016957
taatcgtgttag

SEQ ID NO: 296205 - DNA, 12 bp, Artificial Sequence
  Oligonucleotide primer for the detection of SNP TSC0016957
caaccataccaa

SEQ ID NO: 296206 - DNA, 12 bp, Artificial Sequence
  Oligonucleotide primer for the detection of SNP TSC0016957
caaccgtaccaa

SEQ ID NO: 296207 - DNA, 12 bp, Artificial Sequence
  Oligonucleotide primer for the detection of SNP TSC0016957
gtagaaatagtt

SEQ ID NO: 296208 - DNA, 12 bp, Artificial Sequence
  Oligonucleotide primer for the detection of SNP TSC0016960
aaacaccattcc

SEQ ID NO: 296209 - DNA, 12 bp, Artificial Sequence
  Oligonucleotide primer for the detection of SNP TSC0016960
aaacgccattcc

SEQ ID NO: 296210 - DNA, 12 bp, Artificial Sequence
  Oligonucleotide primer for the detection of SNP TSC0016960
ttcggttttttg

SEQ ID NO: 296211 - DNA, 12 bp, Artificial Sequence
  Oligonucleotide primer for the detection of SNP TSC0016960
cccaaccctcta

SEQ ID NO: 296212 - DNA, 12 bp, Artificial Sequence
  Oligonucleotide primer for the detection of SNP TSC0016960
cccgaccctcta

SEQ ID NO: 296213 - DNA, 12 bp, Artificial Sequence
  Oligonucleotide primer for the detection of SNP TSC0016960
aggtgttatttt

SEQ ID NO: 296214 - DNA, 12 bp, Artificial Sequence
  Oligonucleotide primer for the detection of SNP TSC0016960
aggcgttatttt

SEQ ID NO: 296215 - DNA, 12 bp, Artificial Sequence
  Oligonucleotide primer for the detection of SNP TSC0016961
tctaccaccccc

SEQ ID NO: 296216 - DNA, 12 bp, Artificial Sequence
  Oligonucleotide primer for the detection of SNP TSC0016961
aattttatggag

SEQ ID NO: 296217 - DNA, 12 bp, Artificial Sequence
  Oligonucleotide primer for the detection of SNP TSC0016961
aacttcataaaa

SEQ ID NO: 296218 - DNA, 12 bp, Artificial Sequence
  Oligonucleotide primer for the detection of SNP TSC0016961
tttgttattttt

SEQ ID NO: 296219 - DNA, 12 bp, Artificial Sequence
  Oligonucleotide primer for the detection of SNP TSC0016962
aaatttcaatta

SEQ ID NO: 296220 - DNA, 12 bp, Artificial Sequence
  Oligonucleotide primer for the detection of SNP TSC0016962
ttgtattatgtt

SEQ ID NO: 296221 - DNA, 12 bp, Artificial Sequence
  Oligonucleotide primer for the detection of SNP TSC0016962
ctatatcatatt

SEQ ID NO: 296222 - DNA, 12 bp, Artificial Sequence
  Oligonucleotide primer for the detection of SNP TSC0016962
gagttttagtta

SEQ ID NO: 296223 - DNA, 12 bp, Artificial Sequence
  Oligonucleotide primer for the detection of SNP TSC0016963
ttatccccattt

SEQ ID NO: 296224 - DNA, 12 bp, Artificial Sequence
  Oligonucleotide primer for the detection of SNP TSC0016963
ttaattagttgt

SEQ ID NO: 296225 - DNA, 12 bp, Artificial Sequence
  Oligonucleotide primer for the detection of SNP TSC0016963
ttaattaactat

SEQ ID NO: 296226 - DNA, 12 bp, Artificial Sequence
  Oligonucleotide primer for the detection of SNP TSC0016972
catttaaaatat

SEQ ID NO: 296227 - DNA, 12 bp, Artificial Sequence
  Oligonucleotide primer for the detection of SNP TSC0016972
tgtttatagaaa

SEQ ID NO: 296228 - DNA, 12 bp, Artificial Sequence
  Oligonucleotide primer for the detection of SNP TSC0016973
taattaaaacta

SEQ ID NO: 296229 - DNA, 12 bp, Artificial Sequence
  Oligonucleotide primer for the detection of SNP TSC0016973
ggtgtatgtttg

SEQ ID NO: 296230 - DNA, 12 bp, Artificial Sequence
  Oligonucleotide primer for the detection of SNP TSC0016973
aatacataccta

SEQ ID NO: 296231 - DNA, 12 bp, Artificial Sequence
  Oligonucleotide primer for the detection of SNP TSC0016974
caaaaaaaaatc

SEQ ID NO: 296232 - DNA, 12 bp, Artificial Sequence
  Oligonucleotide primer for the detection of SNP TSC0016974
gtaatgagtgtg

SEQ ID NO: 296233 - DNA, 12 bp, Artificial Sequence
  Oligonucleotide primer for the detection of SNP TSC0016975
ctacaaaaaaac

SEQ ID NO: 296234 - DNA, 12 bp, Artificial Sequence
  Oligonucleotide primer for the detection of SNP TSC0016975
tatttggtttta

SEQ ID NO: 296235 - DNA, 12 bp, Artificial Sequence
  Oligonucleotide primer for the detection of SNP TSC0016976
caaacactcaaa

SEQ ID NO: 296236 - DNA, 12 bp, Artificial Sequence
  Oligonucleotide primer for the detection of SNP TSC0016976
gaaaatatgtag

SEQ ID NO: 296237 - DNA, 12 bp, Artificial Sequence
  Oligonucleotide primer for the detection of SNP TSC0016976
gaaaatacgtag

SEQ ID NO: 296238 - DNA, 12 bp, Artificial Sequence
  Oligonucleotide primer for the detection of SNP TSC0016976
aaaaacacgcaa

SEQ ID NO: 296239 - DNA, 12 bp, Artificial Sequence
  Oligonucleotide primer for the detection of SNP TSC0016976
taagtatttaag

SEQ ID NO: 296240 - DNA, 12 bp, Artificial Sequence
  Oligonucleotide primer for the detection of SNP TSC0016977
aaaatctccacc

SEQ ID NO: 296241 - DNA, 12 bp, Artificial Sequence
  Oligonucleotide primer for the detection of SNP TSC0016977
tttggtttatag

SEQ ID NO: 296242 - DNA, 12 bp, Artificial Sequence
  Oligonucleotide primer for the detection of SNP TSC0016978
ctacctaatcct

SEQ ID NO: 296243 - DNA, 12 bp, Artificial Sequence
  Oligonucleotide primer for the detection of SNP TSC0016978
ttaatttgaagg

SEQ ID NO: 296244 - DNA, 12 bp, Artificial Sequence
  Oligonucleotide primer for the detection of SNP TSC0016978
ttaattcgaagg

SEQ ID NO: 296245 - DNA, 12 bp, Artificial Sequence
  Oligonucleotide primer for the detection of SNP TSC0016979
caaacaaatact

SEQ ID NO: 296246 - DNA, 12 bp, Artificial Sequence
  Oligonucleotide primer for the detection of SNP TSC0016979
aattagtttaga

SEQ ID NO: 296247 - DNA, 12 bp, Artificial Sequence
  Oligonucleotide primer for the detection of SNP TSC0016980
ccctactcaaaa

SEQ ID NO: 296248 - DNA, 12 bp, Artificial Sequence
  Oligonucleotide primer for the detection of SNP TSC0016980
tggattagaggt

SEQ ID NO: 296249 - DNA, 12 bp, Artificial Sequence
  Oligonucleotide primer for the detection of SNP TSC0016980
aatcaaaaataa

SEQ ID NO: 296250 - DNA, 12 bp, Artificial Sequence
  Oligonucleotide primer for the detection of SNP TSC0016980
gttattttattt

SEQ ID NO: 296251 - DNA, 12 bp, Artificial Sequence
  Oligonucleotide primer for the detection of SNP TSC0016981
tactaaatcctc

SEQ ID NO: 296252 - DNA, 12 bp, Artificial Sequence
  Oligonukleotid-Primer
gtttttgtttta

SEQ ID NO: 296253 - DNA, 12 bp, Artificial Sequence
  Oligonucleotide primer for the detection of SNP TSC0016982
taaaaaaataac

SEQ ID NO: 296254 - DNA, 12 bp, Artificial Sequence
  Oligonucleotide primer for the detection of SNP TSC0016982
tgtggaggattt

SEQ ID NO: 296255 - DNA, 12 bp, Artificial Sequence
  Oligonucleotide primer for the detection of SNP TSC0016982
ctataaaaaacc

SEQ ID NO: 296256 - DNA, 12 bp, Artificial Sequence
  Oligonucleotide primer for the detection of SNP TSC0016982
ggaggggtaatt

SEQ ID NO: 296257 - DNA, 12 bp, Artificial Sequence
  Oligonucleotide primer for the detection of SNP TSC0016983
tgtgtagtagaa

SEQ ID NO: 296258 - DNA, 12 bp, Artificial Sequence
  Oligonucleotide primer for the detection of SNP TSC0016984
acccacactcca

SEQ ID NO: 296259 - DNA, 12 bp, Artificial Sequence
  Oligonucleotide primer for the detection of SNP TSC0016987
aacctaaaaccc

SEQ ID NO: 296260 - DNA, 12 bp, Artificial Sequence
  Oligonukleotid-Primer
ttgaaggaaagg

SEQ ID NO: 296261 - DNA, 12 bp, Artificial Sequence
  Oligonucleotide primer for the detection of SNP TSC0016988
tttagattattg

SEQ ID NO: 296262 - DNA, 12 bp, Artificial Sequence
  Oligonucleotide primer for the detection of SNP TSC0016988
ctcaaaccatta

SEQ ID NO: 296263 - DNA, 12 bp, Artificial Sequence
  Oligonucleotide primer for the detection of SNP TSC0016988
gttatagagtgg

SEQ ID NO: 296264 - DNA, 12 bp, Artificial Sequence
  Oligonukleotid-Primer
cctattcttttc

SEQ ID NO: 296265 - DNA, 12 bp, Artificial Sequence
  Oligonucleotide primer for the detection of SNP TSC0016989
ttagagtagttt

SEQ ID NO: 296266 - DNA, 12 bp, Artificial Sequence
  Oligonucleotide primer for the detection of SNP TSC0016989
ttaaaataaccc

SEQ ID NO: 296267 - DNA, 12 bp, Artificial Sequence
  Oligonucleotide primer for the detection of SNP TSC0016991
cacatcaataat

SEQ ID NO: 296268 - DNA, 12 bp, Artificial Sequence
  Oligonucleotide primer for the detection of SNP TSC0016991
gtatataggata

SEQ ID NO: 296269 - DNA, 12 bp, Artificial Sequence
  Oligonucleotide primer for the detection of SNP TSC0016992
tggaggataggg

SEQ ID NO: 296270 - DNA, 12 bp, Artificial Sequence
  Oligonucleotide primer for the detection of SNP TSC0016992
gattaaaaagat

SEQ ID NO: 296271 - DNA, 12 bp, Artificial Sequence
  Oligonucleotide primer for the detection of SNP TSC0016993
tcaacccaccaa

SEQ ID NO: 296272 - DNA, 12 bp, Artificial Sequence
  Oligonucleotide primer for the detection of SNP TSC0016993
ggtatttaatat

SEQ ID NO: 296273 - DNA, 12 bp, Artificial Sequence
  Oligonucleotide primer for the detection of SNP TSC0016993
aatactcaacac

SEQ ID NO: 296274 - DNA, 12 bp, Artificial Sequence
  Oligonucleotide primer for the detection of SNP TSC0016993
ttagtttattag

SEQ ID NO: 296275 - DNA, 12 bp, Artificial Sequence
  Oligonucleotide primer for the detection of SNP TSC0016995
attttcactacc

SEQ ID NO: 296276 - DNA, 12 bp, Artificial Sequence
  Oligonucleotide primer for the detection of SNP TSC0016995
gtttttattatt

SEQ ID NO: 296277 - DNA, 12 bp, Artificial Sequence
  Oligonucleotide primer for the detection of SNP TSC0016997
tttttaaaactt

SEQ ID NO: 296278 - DNA, 12 bp, Artificial Sequence
  Oligonucleotide primer for the detection of SNP TSC0016997
atattttgataa

SEQ ID NO: 296279 - DNA, 12 bp, Artificial Sequence
  Oligonucleotide primer for the detection of SNP TSC0017000
ctaaacaccaac

SEQ ID NO: 296280 - DNA, 12 bp, Artificial Sequence
  Oligonucleotide primer for the detection of SNP TSC0017001
cttaaattcatc

SEQ ID NO: 296281 - DNA, 12 bp, Artificial Sequence
  Oligonucleotide primer for the detection of SNP TSC0017002
ttataacaatcc

SEQ ID NO: 296282 - DNA, 12 bp, Artificial Sequence
  Oligonucleotide primer for the detection of SNP TSC0017002
gggttttattta

SEQ ID NO: 296283 - DNA, 12 bp, Artificial Sequence
  Oligonucleotide primer for the detection of SNP TSC0017002
aaacttcattca

SEQ ID NO: 296284 - DNA, 12 bp, Artificial Sequence
  Oligonucleotide primer for the detection of SNP TSC0017002
ttgtggtagttt

SEQ ID NO: 296285 - DNA, 12 bp, Artificial Sequence
  Oligonucleotide primer for the detection of SNP TSC0017003
ccaaaaattcat

SEQ ID NO: 296286 - DNA, 12 bp, Artificial Sequence
  Oligonucleotide primer for the detection of SNP TSC0017003
aaatgaagggta

SEQ ID NO: 296287 - DNA, 12 bp, Artificial Sequence
  Oligonucleotide primer for the detection of SNP TSC0017004
aacttaatccat

SEQ ID NO: 296288 - DNA, 12 bp, Artificial Sequence
  Oligonucleotide primer for the detection of SNP TSC0017004
ttattttgaaga

SEQ ID NO: 296289 - DNA, 12 bp, Artificial Sequence
  Oligonucleotide primer for the detection of SNP TSC0017005
gtaaggatagag

SEQ ID NO: 296290 - DNA, 12 bp, Artificial Sequence
  Oligonucleotide primer for the detection of SNP TSC0017010
aatactaacatt

SEQ ID NO: 296291 - DNA, 12 bp, Artificial Sequence
  Oligonucleotide primer for the detection of SNP TSC0017010
attttgtatgga

SEQ ID NO: 296292 - DNA, 12 bp, Artificial Sequence
  Oligonucleotide primer for the detection of SNP TSC0017011
acttatcaaaac

SEQ ID NO: 296293 - DNA, 12 bp, Artificial Sequence
  Oligonucleotide primer for the detection of SNP TSC0017011
aggaagttttaa

SEQ ID NO: 296294 - DNA, 12 bp, Artificial Sequence
  Oligonucleotide primer for the detection of SNP TSC0017012
tttaataccata

SEQ ID NO: 296295 - DNA, 12 bp, Artificial Sequence
  Oligonucleotide primer for the detection of SNP TSC0017012
ctaacttctact

SEQ ID NO: 296296 - DNA, 12 bp, Artificial Sequence
  Oligonucleotide primer for the detection of SNP TSC0017012
tttgatattatg

SEQ ID NO: 296297 - DNA, 12 bp, Artificial Sequence
  Oligonucleotide primer for the detection of SNP TSC0017013
ataaacttttac

SEQ ID NO: 296298 - DNA, 12 bp, Artificial Sequence
  Oligonucleotide primer for the detection of SNP TSC0017013
gtaaacttttac

SEQ ID NO: 296299 - DNA, 12 bp, Artificial Sequence
  Oligonucleotide primer for the detection of SNP TSC0017013
tttatatataag

SEQ ID NO: 296300 - DNA, 12 bp, Artificial Sequence
  Oligonucleotide primer for the detection of SNP TSC0017016
tatgttgtttag

SEQ ID NO: 296301 - DNA, 12 bp, Artificial Sequence
  Oligonucleotide primer for the detection of SNP TSC0017017
cctcccttcaat

SEQ ID NO: 296302 - DNA, 12 bp, Artificial Sequence
  Oligonucleotide primer for the detection of SNP TSC0017017
tttgtattggat

SEQ ID NO: 296303 - DNA, 12 bp, Artificial Sequence
  Oligonucleotide primer for the detection of SNP TSC0017017
cttatactaaat

SEQ ID NO: 296304 - DNA, 12 bp, Artificial Sequence
  Oligonucleotide primer for the detection of SNP TSC0017018
tatctctacaaa

SEQ ID NO: 296305 - DNA, 12 bp, Artificial Sequence
  Oligonucleotide primer for the detection of SNP TSC0017018
ccctccacccca

SEQ ID NO: 296306 - DNA, 12 bp, Artificial Sequence
  Oligonucleotide primer for the detection of SNP TSC0017018
gtttttataggt

SEQ ID NO: 296307 - DNA, 12 bp, Artificial Sequence
  Oligonucleotide primer for the detection of SNP TSC0017019
tttgtaatttta

SEQ ID NO: 296308 - DNA, 12 bp, Artificial Sequence
  Oligonucleotide primer for the detection of SNP TSC0017020
caaattcctaaa

SEQ ID NO: 296309 - DNA, 12 bp, Artificial Sequence
  Oligonucleotide primer for the detection of SNP TSC0017020
agggtgtttttt

SEQ ID NO: 296310 - DNA, 12 bp, Artificial Sequence
  Oligonucleotide primer for the detection of SNP TSC0017020
aaaatacccctc

SEQ ID NO: 296311 - DNA, 12 bp, Artificial Sequence
  Oligonucleotide primer for the detection of SNP TSC0017020
taaatttttgag

SEQ ID NO: 296312 - DNA, 12 bp, Artificial Sequence
  Oligonucleotide primer for the detection of SNP TSC0017021
taatacttccct

SEQ ID NO: 296313 - DNA, 12 bp, Artificial Sequence
  Oligonucleotide primer for the detection of SNP TSC0017021
tttaattatttg

SEQ ID NO: 296314 - DNA, 12 bp, Artificial Sequence
  Oligonucleotide primer for the detection of SNP TSC0017021
tttaattattcg

SEQ ID NO: 296315 - DNA, 12 bp, Artificial Sequence
  Oligonucleotide primer for the detection of SNP TSC0017022
acaaaccaaccc

SEQ ID NO: 296316 - DNA, 12 bp, Artificial Sequence
  Oligonucleotide primer for the detection of SNP TSC0017022
ttgagggagagg

SEQ ID NO: 296317 - DNA, 12 bp, Artificial Sequence
  Oligonucleotide primer for the detection of SNP TSC0017022
atagattaattt

SEQ ID NO: 296318 - DNA, 12 bp, Artificial Sequence
  Oligonucleotide primer for the detection of SNP TSC0017022
atagattaattc

SEQ ID NO: 296319 - DNA, 12 bp, Artificial Sequence
  Oligonucleotide primer for the detection of SNP TSC0017023
tctcctacctca

SEQ ID NO: 296320 - DNA, 12 bp, Artificial Sequence
  Oligonucleotide primer for the detection of SNP TSC0017023
ttattttagagg

SEQ ID NO: 296321 - DNA, 12 bp, Artificial Sequence
  Oligonucleotide primer for the detection of SNP TSC0017023
ctactccaaaaa

SEQ ID NO: 296322 - DNA, 12 bp, Artificial Sequence
  Oligonucleotide primer for the detection of SNP TSC0017026
aaataaaatcca

SEQ ID NO: 296323 - DNA, 12 bp, Artificial Sequence
  Oligonucleotide primer for the detection of SNP TSC0017026
ggggttttttgt

SEQ ID NO: 296324 - DNA, 12 bp, Artificial Sequence
  Oligonucleotide primer for the detection of SNP TSC0017026
agagtaaaattt

SEQ ID NO: 296325 - DNA, 12 bp, Artificial Sequence
  Oligonucleotide primer for the detection of SNP TSC0017027
tactaaaaccct

SEQ ID NO: 296326 - DNA, 12 bp, Artificial Sequence
  Oligonucleotide primer for the detection of SNP TSC0017027
ataatttttata

SEQ ID NO: 296327 - DNA, 12 bp, Artificial Sequence
  Oligonucleotide primer for the detection of SNP TSC0017030
ctacctataaat

SEQ ID NO: 296328 - DNA, 12 bp, Artificial Sequence
  Oligonucleotide primer for the detection of SNP TSC0017030
gggaggtagatg

SEQ ID NO: 296329 - DNA, 12 bp, Artificial Sequence
  Oligonucleotide primer for the detection of SNP TSC0017031
accatcaaaaaa

SEQ ID NO: 296330 - DNA, 12 bp, Artificial Sequence
  Oligonucleotide primer for the detection of SNP TSC0017031
gtttttagattt

SEQ ID NO: 296331 - DNA, 12 bp, Artificial Sequence
  Oligonucleotide primer for the detection of SNP TSC0017031
acttccaaactt

SEQ ID NO: 296332 - DNA, 12 bp, Artificial Sequence
  Oligonucleotide primer for the detection of SNP TSC0017031
gttattagggag

SEQ ID NO: 296333 - DNA, 12 bp, Artificial Sequence
  Oligonucleotide primer for the detection of SNP TSC0017032
ttatgtaaaatt

SEQ ID NO: 296334 - DNA, 12 bp, Artificial Sequence
  Oligonucleotide primer for the detection of SNP TSC0017032
ttatacaaaact

SEQ ID NO: 296335 - DNA, 12 bp, Artificial Sequence
  Oligonucleotide primer for the detection of SNP TSC0017032
agagagtggaag

SEQ ID NO: 296336 - DNA, 12 bp, Artificial Sequence
  Oligonucleotide primer for the detection of SNP TSC0017033
tcaaccttcaat

SEQ ID NO: 296337 - DNA, 12 bp, Artificial Sequence
  Oligonucleotide primer for the detection of SNP TSC0017033
gttttggggtta

SEQ ID NO: 296338 - DNA, 12 bp, Artificial Sequence
  Oligonucleotide primer for the detection of SNP TSC0017034
tatactattttt

SEQ ID NO: 296339 - DNA, 12 bp, Artificial Sequence
  Oligonucleotide primer for the detection of SNP TSC0017038
caactaccaacc

SEQ ID NO: 296340 - DNA, 12 bp, Artificial Sequence
  Oligonucleotide primer for the detection of SNP TSC0017038
cgactaccaacc

SEQ ID NO: 296341 - DNA, 12 bp, Artificial Sequence
  Oligonucleotide primer for the detection of SNP TSC0017038
ggaaatgtgggg

SEQ ID NO: 296342 - DNA, 12 bp, Artificial Sequence
  Oligonucleotide primer for the detection of SNP TSC0017038
ggaaacgtgggg

SEQ ID NO: 296343 - DNA, 12 bp, Artificial Sequence
  Oligonucleotide primer for the detection of SNP TSC0017038
aaaaacgtaaaa

SEQ ID NO: 296344 - DNA, 12 bp, Artificial Sequence
  Oligonucleotide primer for the detection of SNP TSC0017038
gaaaacataaaa

SEQ ID NO: 296345 - DNA, 12 bp, Artificial Sequence
  Oligonucleotide primer for the detection of SNP TSC0017038
gaaaacgtaaaa

SEQ ID NO: 296346 - DNA, 12 bp, Artificial Sequence
  Oligonucleotide primer for the detection of SNP TSC0017038
tggttgttagtt

SEQ ID NO: 296347 - DNA, 12 bp, Artificial Sequence
  Oligonucleotide primer for the detection of SNP TSC0017038
cggttgttagtt

SEQ ID NO: 296348 - DNA, 12 bp, Artificial Sequence
  Oligonucleotide primer for the detection of SNP TSC0017039
caaactcctaac

SEQ ID NO: 296349 - DNA, 12 bp, Artificial Sequence
  Oligonucleotide primer for the detection of SNP TSC0017039
taaatcacctaa

SEQ ID NO: 296350 - DNA, 12 bp, Artificial Sequence
  Oligonucleotide primer for the detection of SNP TSC0017039
taaatttttgat

SEQ ID NO: 296351 - DNA, 12 bp, Artificial Sequence
  Oligonucleotide primer for the detection of SNP TSC0017041
cttcccaccttc

SEQ ID NO: 296352 - DNA, 12 bp, Artificial Sequence
  Oligonucleotide primer for the detection of SNP TSC0017041
ttaggtggataa

SEQ ID NO: 296353 - DNA, 12 bp, Artificial Sequence
  Oligonucleotide primer for the detection of SNP TSC0017043
ttttggggtaat

SEQ ID NO: 296354 - DNA, 12 bp, Artificial Sequence
  Oligonucleotide primer for the detection of SNP TSC0017043
actttaaaataa

SEQ ID NO: 296355 - DNA, 12 bp, Artificial Sequence
  Oligonucleotide primer for the detection of SNP TSC0017043
tgtgtttgggga

SEQ ID NO: 296356 - DNA, 12 bp, Artificial Sequence
  Oligonucleotide primer for the detection of SNP TSC0017045
cctaaacttaaa

SEQ ID NO: 296357 - DNA, 12 bp, Artificial Sequence
  Oligonucleotide primer for the detection of SNP TSC0017045
tgttagggtggt

SEQ ID NO: 296358 - DNA, 12 bp, Artificial Sequence
  Oligonucleotide primer for the detection of SNP TSC0017045
ctaccaaaataa

SEQ ID NO: 296359 - DNA, 12 bp, Artificial Sequence
  Oligonucleotide primer for the detection of SNP TSC0017045
ttttgggtttga

SEQ ID NO: 296360 - DNA, 12 bp, Artificial Sequence
  Oligonucleotide primer for the detection of SNP TSC0017048
tatctttatatt

SEQ ID NO: 296361 - DNA, 12 bp, Artificial Sequence
  Oligonucleotide primer for the detection of SNP TSC0017048
tatgaaattaga

SEQ ID NO: 296362 - DNA, 12 bp, Artificial Sequence
  Oligonucleotide primer for the detection of SNP TSC0017049
acactatcctcc

SEQ ID NO: 296363 - DNA, 12 bp, Artificial Sequence
  Oligonucleotide primer for the detection of SNP TSC0017049
acgctatcctcc

SEQ ID NO: 296364 - DNA, 12 bp, Artificial Sequence
  Oligonucleotide primer for the detection of SNP TSC0017049
ttgggtaattag

SEQ ID NO: 296365 - DNA, 12 bp, Artificial Sequence
  Oligonucleotide primer for the detection of SNP TSC0017049
tcgggtaattag

SEQ ID NO: 296366 - DNA, 12 bp, Artificial Sequence
  Oligonucleotide primer for the detection of SNP TSC0017049
ccaaataaccaa

SEQ ID NO: 296367 - DNA, 12 bp, Artificial Sequence
  Oligonucleotide primer for the detection of SNP TSC0017049
ccgaataaccaa

SEQ ID NO: 296368 - DNA, 12 bp, Artificial Sequence
  Oligonucleotide primer for the detection of SNP TSC0017049
gtgttatttttt

SEQ ID NO: 296369 - DNA, 12 bp, Artificial Sequence
  Oligonucleotide primer for the detection of SNP TSC0017049
gcgttatttttt

SEQ ID NO: 296370 - DNA, 12 bp, Artificial Sequence
  Oligonucleotide primer for the detection of SNP TSC0017050
atctaaaaataa

SEQ ID NO: 296371 - DNA, 12 bp, Artificial Sequence
  Oligonucleotide primer for the detection of SNP TSC0017050
ttggtaggtgtt

SEQ ID NO: 296372 - DNA, 12 bp, Artificial Sequence
  Oligonucleotide primer for the detection of SNP TSC0017050
aactaacaaata

SEQ ID NO: 296373 - DNA, 12 bp, Artificial Sequence
  Oligonukleotid-Primer
gtttgggaatgg

SEQ ID NO: 296374 - DNA, 12 bp, Artificial Sequence
  Oligonucleotide primer for the detection of SNP TSC0017051
ccaattcaaata

SEQ ID NO: 296375 - DNA, 12 bp, Artificial Sequence
  Oligonucleotide primer for the detection of SNP TSC0017051
ttaaagaaatgt

SEQ ID NO: 296376 - DNA, 12 bp, Artificial Sequence
  Oligonucleotide primer for the detection of SNP TSC0017051
ccaaaaaaatat

SEQ ID NO: 296377 - DNA, 12 bp, Artificial Sequence
  Oligonucleotide primer for the detection of SNP TSC0017051
attaatttaaat

SEQ ID NO: 296378 - DNA, 12 bp, Artificial Sequence
  Oligonucleotide primer for the detection of SNP TSC0017052
ataactactctt

SEQ ID NO: 296379 - DNA, 12 bp, Artificial Sequence
  Oligonucleotide primer for the detection of SNP TSC0017052
agattaatggag

SEQ ID NO: 296380 - DNA, 12 bp, Artificial Sequence
  Oligonucleotide primer for the detection of SNP TSC0017052
atggttattttt

SEQ ID NO: 296381 - DNA, 12 bp, Artificial Sequence
  Oligonucleotide primer for the detection of SNP TSC0017053
aaaataatattc

SEQ ID NO: 296382 - DNA, 12 bp, Artificial Sequence
  Oligonucleotide primer for the detection of SNP TSC0017053
agagaaatttag

SEQ ID NO: 296383 - DNA, 12 bp, Artificial Sequence
  Oligonucleotide primer for the detection of SNP TSC0017054
tactaatttttt

SEQ ID NO: 296384 - DNA, 12 bp, Artificial Sequence
  Oligonucleotide primer for the detection of SNP TSC0017054
atagagagggga

SEQ ID NO: 296385 - DNA, 12 bp, Artificial Sequence
  Oligonucleotide primer for the detection of SNP TSC0017055
acaacccactct

SEQ ID NO: 296386 - DNA, 12 bp, Artificial Sequence
  Oligonucleotide primer for the detection of SNP TSC0017055
acgacccactct

SEQ ID NO: 296387 - DNA, 12 bp, Artificial Sequence
  Oligonucleotide primer for the detection of SNP TSC0017055
atatgtttttta

SEQ ID NO: 296388 - DNA, 12 bp, Artificial Sequence
  Oligonucleotide primer for the detection of SNP TSC0017055
atacgtttttta

SEQ ID NO: 296389 - DNA, 12 bp, Artificial Sequence
  Oligonucleotide primer for the detection of SNP TSC0017056
acttcaaaactt

SEQ ID NO: 296390 - DNA, 12 bp, Artificial Sequence
  Oligonucleotide primer for the detection of SNP TSC0017056
gagtagaagatg

SEQ ID NO: 296391 - DNA, 12 bp, Artificial Sequence
  Oligonucleotide primer for the detection of SNP TSC0017057
ctatttctattt

SEQ ID NO: 296392 - DNA, 12 bp, Artificial Sequence
  Oligonucleotide primer for the detection of SNP TSC0017058
aaaaaataacat

SEQ ID NO: 296393 - DNA, 12 bp, Artificial Sequence
  Oligonucleotide primer for the detection of SNP TSC0017058
ttgaaaaggttg

SEQ ID NO: 296394 - DNA, 12 bp, Artificial Sequence
  Oligonucleotide primer for the detection of SNP TSC0017058
ctaaaaaaacta

SEQ ID NO: 296395 - DNA, 12 bp, Artificial Sequence
  Oligonucleotide primer for the detection of SNP TSC0017058
agagaatggtat

SEQ ID NO: 296396 - DNA, 12 bp, Artificial Sequence
  Oligonucleotide primer for the detection of SNP TSC0017060
cactttaactac

SEQ ID NO: 296397 - DNA, 12 bp, Artificial Sequence
  Oligonucleotide primer for the detection of SNP TSC0017060
tttttgaaaaga

SEQ ID NO: 296398 - DNA, 12 bp, Artificial Sequence
  Oligonucleotide primer for the detection of SNP TSC0017062
tgtgggtgttta

SEQ ID NO: 296399 - DNA, 12 bp, Artificial Sequence
  Oligonucleotide primer for the detection of SNP TSC0017062
tgtgggcgttta

SEQ ID NO: 296400 - DNA, 12 bp, Artificial Sequence
  Oligonucleotide primer for the detection of SNP TSC0017062
tataaacaccca

SEQ ID NO: 296401 - DNA, 12 bp, Artificial Sequence
  Oligonucleotide primer for the detection of SNP TSC0017062
tataaacgccca

SEQ ID NO: 296402 - DNA, 12 bp, Artificial Sequence
  Oligonucleotide primer for the detection of SNP TSC0017062
gtggagtttagg

SEQ ID NO: 296403 - DNA, 12 bp, Artificial Sequence
  Oligonucleotide primer for the detection of SNP TSC0017064
ccctcactacta

SEQ ID NO: 296404 - DNA, 12 bp, Artificial Sequence
  Oligonucleotide primer for the detection of SNP TSC0017064
tttttagttgta

SEQ ID NO: 296405 - DNA, 12 bp, Artificial Sequence
  Oligonucleotide primer for the detection of SNP TSC0017064
cttctaactata

SEQ ID NO: 296406 - DNA, 12 bp, Artificial Sequence
  Oligonucleotide primer for the detection of SNP TSC0017064
ttttattgttgt

SEQ ID NO: 296407 - DNA, 12 bp, Artificial Sequence
  Oligonucleotide primer for the detection of SNP TSC0017066
aaacaacaaaaa

SEQ ID NO: 296408 - DNA, 12 bp, Artificial Sequence
  Oligonucleotide primer for the detection of SNP TSC0017066
agatagagtttt

SEQ ID NO: 296409 - DNA, 12 bp, Artificial Sequence
  Oligonucleotide primer for the detection of SNP TSC0017066
agatagagtttc

SEQ ID NO: 296410 - DNA, 12 bp, Artificial Sequence
  Oligonucleotide primer for the detection of SNP TSC0017066
aaacaaaacttc

SEQ ID NO: 296411 - DNA, 12 bp, Artificial Sequence
  Oligonucleotide primer for the detection of SNP TSC0017066
gggtaataagag

SEQ ID NO: 296412 - DNA, 12 bp, Artificial Sequence
  Oligonucleotide primer for the detection of SNP TSC0017068
tctataacacct

SEQ ID NO: 296413 - DNA, 12 bp, Artificial Sequence
  Oligonucleotide primer for the detection of SNP TSC0017068
ttaaataaatta

SEQ ID NO: 296414 - DNA, 12 bp, Artificial Sequence
  Oligonucleotide primer for the detection of SNP TSC0017072
ttaacaaccaac

SEQ ID NO: 296415 - DNA, 12 bp, Artificial Sequence
  Oligonucleotide primer for the detection of SNP TSC0017072
gtgagtggttgg

SEQ ID NO: 296416 - DNA, 12 bp, Artificial Sequence
  Oligonucleotide primer for the detection of SNP TSC0017072
gcgagtggttgg

SEQ ID NO: 296417 - DNA, 12 bp, Artificial Sequence
  Oligonucleotide primer for the detection of SNP TSC0017072
gtgagcggttgg

SEQ ID NO: 296418 - DNA, 12 bp, Artificial Sequence
  Oligonucleotide primer for the detection of SNP TSC0017072
gcgagcggttgg

SEQ ID NO: 296419 - DNA, 12 bp, Artificial Sequence
  Oligonucleotide primer for the detection of SNP TSC0017073
ctccataaaacc

SEQ ID NO: 296420 - DNA, 12 bp, Artificial Sequence
  Oligonucleotide primer for the detection of SNP TSC0017073
ctccgtaaaacc

SEQ ID NO: 296421 - DNA, 12 bp, Artificial Sequence
  Oligonucleotide primer for the detection of SNP TSC0017073
tattgtttaata

SEQ ID NO: 296422 - DNA, 12 bp, Artificial Sequence
  Oligonucleotide primer for the detection of SNP TSC0017075
aatcaattttac

SEQ ID NO: 296423 - DNA, 12 bp, Artificial Sequence
  Oligonucleotide primer for the detection of SNP TSC0017075
ataatagtaatg

SEQ ID NO: 296424 - DNA, 12 bp, Artificial Sequence
  Oligonucleotide primer for the detection of SNP TSC0017075
ataatagtaacg

SEQ ID NO: 296425 - DNA, 12 bp, Artificial Sequence
  Oligonucleotide primer for the detection of SNP TSC0017075
ataacaacaaca

SEQ ID NO: 296426 - DNA, 12 bp, Artificial Sequence
  Oligonucleotide primer for the detection of SNP TSC0017075
ataacaacaacg

SEQ ID NO: 296427 - DNA, 12 bp, Artificial Sequence
  Oligonucleotide primer for the detection of SNP TSC0017075
ggttagttttgt

SEQ ID NO: 296428 - DNA, 12 bp, Artificial Sequence
  Oligonucleotide primer for the detection of SNP TSC0017077
taaaatataaat

SEQ ID NO: 296429 - DNA, 12 bp, Artificial Sequence
  Oligonucleotide primer for the detection of SNP TSC0017077
attattttgagg

SEQ ID NO: 296430 - DNA, 12 bp, Artificial Sequence
  Oligonucleotide primer for the detection of SNP TSC0017077
attatttcgagg

SEQ ID NO: 296431 - DNA, 12 bp, Artificial Sequence
  Oligonucleotide primer for the detection of SNP TSC0017078
tcaatttttttt

SEQ ID NO: 296432 - DNA, 12 bp, Artificial Sequence
  Oligonucleotide primer for the detection of SNP TSC0017078
tgttaaggaggg

SEQ ID NO: 296433 - DNA, 12 bp, Artificial Sequence
  Oligonucleotide primer for the detection of SNP TSC0017079
accattcatccc

SEQ ID NO: 296434 - DNA, 12 bp, Artificial Sequence
  Oligonucleotide primer for the detection of SNP TSC0017079
tttttgtttatg

SEQ ID NO: 296435 - DNA, 12 bp, Artificial Sequence
  Oligonucleotide primer for the detection of SNP TSC0017081
aaataaatctaa

SEQ ID NO: 296436 - DNA, 12 bp, Artificial Sequence
  Oligonucleotide primer for the detection of SNP TSC0017081
ttgtagatgata

SEQ ID NO: 296437 - DNA, 12 bp, Artificial Sequence
  Oligonucleotide primer for the detection of SNP TSC0017081
tcgtagatgata

SEQ ID NO: 296438 - DNA, 12 bp, Artificial Sequence
  Oligonucleotide primer for the detection of SNP TSC0017082
tttatattactc

SEQ ID NO: 296439 - DNA, 12 bp, Artificial Sequence
  Oligonucleotide primer for the detection of SNP TSC0017082
tttttatataaa

SEQ ID NO: 296440 - DNA, 12 bp, Artificial Sequence
  Oligonucleotide primer for the detection of SNP TSC0017083
aaacaaaaacct

SEQ ID NO: 296441 - DNA, 12 bp, Artificial Sequence
  Oligonucleotide primer for the detection of SNP TSC0017083
aaggtgatagag

SEQ ID NO: 296442 - DNA, 12 bp, Artificial Sequence
  Oligonucleotide primer for the detection of SNP TSC0017084
ttctaaataact

SEQ ID NO: 296443 - DNA, 12 bp, Artificial Sequence
  Oligonucleotide primer for the detection of SNP TSC0017084
ggtaaaattttt

SEQ ID NO: 296444 - DNA, 12 bp, Artificial Sequence
  Oligonucleotide primer for the detection of SNP TSC0017084
acaaaaccctta

SEQ ID NO: 296445 - DNA, 12 bp, Artificial Sequence
  Oligonucleotide primer for the detection of SNP TSC0017084
ttttaggtgatt

SEQ ID NO: 296446 - DNA, 12 bp, Artificial Sequence
  Oligonucleotide primer for the detection of SNP TSC0017085
atctaaattttt

SEQ ID NO: 296447 - DNA, 12 bp, Artificial Sequence
  Oligonucleotide primer for the detection of SNP TSC0017085
atttgggttttt

SEQ ID NO: 296448 - DNA, 12 bp, Artificial Sequence
  Oligonucleotide primer for the detection of SNP TSC0017086
aacaccctcata

SEQ ID NO: 296449 - DNA, 12 bp, Artificial Sequence
  Oligonucleotide primer for the detection of SNP TSC0017086
ttccaaaattct

SEQ ID NO: 296450 - DNA, 12 bp, Artificial Sequence
  Oligonucleotide primer for the detection of SNP TSC0017086
ttccgaaattct

SEQ ID NO: 296451 - DNA, 12 bp, Artificial Sequence
  Oligonucleotide primer for the detection of SNP TSC0017086
gatatttttatg

SEQ ID NO: 296452 - DNA, 12 bp, Artificial Sequence
  Oligonucleotide primer for the detection of SNP TSC0017087
acctatcaccct

SEQ ID NO: 296453 - DNA, 12 bp, Artificial Sequence
  Oligonucleotide primer for the detection of SNP TSC0017087
ggatatttaagg

SEQ ID NO: 296454 - DNA, 12 bp, Artificial Sequence
  Oligonucleotide primer for the detection of SNP TSC0017087
aaacacccaaaa

SEQ ID NO: 296455 - DNA, 12 bp, Artificial Sequence
  Oligonucleotide primer for the detection of SNP TSC0017087
gtttgttatttt

SEQ ID NO: 296456 - DNA, 12 bp, Artificial Sequence
  Oligonucleotide primer for the detection of SNP TSC0017088
acaactctaaac

SEQ ID NO: 296457 - DNA, 12 bp, Artificial Sequence
  Oligonucleotide primer for the detection of SNP TSC0017088
tgtgattagata

SEQ ID NO: 296458 - DNA, 12 bp, Artificial Sequence
  Oligonucleotide primer for the detection of SNP TSC0017088
tataaccaaaca

SEQ ID NO: 296459 - DNA, 12 bp, Artificial Sequence
  Oligonucleotide primer for the detection of SNP TSC0017088
gtagttttgggt

SEQ ID NO: 296460 - DNA, 12 bp, Artificial Sequence
  Oligonucleotide primer for the detection of SNP TSC0017089
taaattaaagag

SEQ ID NO: 296461 - DNA, 12 bp, Artificial Sequence
  Oligonucleotide primer for the detection of SNP TSC0017089
caaaccaaaaaa

SEQ ID NO: 296462 - DNA, 12 bp, Artificial Sequence
  Oligonucleotide primer for the detection of SNP TSC0017089
gagaagataggt

SEQ ID NO: 296463 - DNA, 12 bp, Artificial Sequence
  Oligonucleotide primer for the detection of SNP TSC0017090
caacctaactac

SEQ ID NO: 296464 - DNA, 12 bp, Artificial Sequence
  Oligonucleotide primer for the detection of SNP TSC0017090
ttttttatggtg

SEQ ID NO: 296465 - DNA, 12 bp, Artificial Sequence
  Oligonucleotide primer for the detection of SNP TSC0017092
ttcattttcaac

SEQ ID NO: 296466 - DNA, 12 bp, Artificial Sequence
  Oligonucleotide primer for the detection of SNP TSC0017092
ttcgttttcaac

SEQ ID NO: 296467 - DNA, 12 bp, Artificial Sequence
  Oligonucleotide primer for the detection of SNP TSC0017092
agtaagagtagg

SEQ ID NO: 296468 - DNA, 12 bp, Artificial Sequence
  Oligonucleotide primer for the detection of SNP TSC0017092
tttgtttttagt

SEQ ID NO: 296469 - DNA, 12 bp, Artificial Sequence
  Oligonucleotide primer for the detection of SNP TSC0017092
ttcgtttttagt

SEQ ID NO: 296470 - DNA, 12 bp, Artificial Sequence
  Oligonucleotide primer for the detection of SNP TSC0017093
caccaaaaaaca

SEQ ID NO: 296471 - DNA, 12 bp, Artificial Sequence
  Oligonucleotide primer for the detection of SNP TSC0017093
ccataacctccc

SEQ ID NO: 296472 - DNA, 12 bp, Artificial Sequence
  Oligonucleotide primer for the detection of SNP TSC0017093
ttattagggggt

SEQ ID NO: 296473 - DNA, 12 bp, Artificial Sequence
  Oligonucleotide primer for the detection of SNP TSC0017097
taaaataataat

SEQ ID NO: 296474 - DNA, 12 bp, Artificial Sequence
  Oligonucleotide primer for the detection of SNP TSC0017097
gtgggagattgg

SEQ ID NO: 296475 - DNA, 12 bp, Artificial Sequence
  Oligonucleotide primer for the detection of SNP TSC0017098
tttcatcaaaca

SEQ ID NO: 296476 - DNA, 12 bp, Artificial Sequence
  Oligonucleotide primer for the detection of SNP TSC0017098
aaagatgatgtt

SEQ ID NO: 296477 - DNA, 12 bp, Artificial Sequence
  Oligonucleotide primer for the detection of SNP TSC0017099
cttaaatcattt

SEQ ID NO: 296478 - DNA, 12 bp, Artificial Sequence
  Oligonucleotide primer for the detection of SNP TSC0017099
cttaaatcgttt

SEQ ID NO: 296479 - DNA, 12 bp, Artificial Sequence
  Oligonucleotide primer for the detection of SNP TSC0017099
ttaaattataga

SEQ ID NO: 296480 - DNA, 12 bp, Artificial Sequence
  Oligonucleotide primer for the detection of SNP TSC0017099
ctaaaccataaa

SEQ ID NO: 296481 - DNA, 12 bp, Artificial Sequence
  Oligonucleotide primer for the detection of SNP TSC0017099
tttgaattgttt

SEQ ID NO: 296482 - DNA, 12 bp, Artificial Sequence
  Oligonucleotide primer for the detection of SNP TSC0017099
tttgaatcgttt

SEQ ID NO: 296483 - DNA, 12 bp, Artificial Sequence
  Oligonucleotide primer for the detection of SNP TSC0017100
aaatcctctacc

SEQ ID NO: 296484 - DNA, 12 bp, Artificial Sequence
  Oligonucleotide primer for the detection of SNP TSC0017100
agttgtagtagt

SEQ ID NO: 296485 - DNA, 12 bp, Artificial Sequence
  Oligonucleotide primer for the detection of SNP TSC0017100
aactacaacaat

SEQ ID NO: 296486 - DNA, 12 bp, Artificial Sequence
  Oligonucleotide primer for the detection of SNP TSC0017100
gagttttttatt

SEQ ID NO: 296487 - DNA, 12 bp, Artificial Sequence
  Oligonucleotide primer for the detection of SNP TSC0017101
ggagtagaagtt

SEQ ID NO: 296488 - DNA, 12 bp, Artificial Sequence
  Oligonucleotide primer for the detection of SNP TSC0017101
tttgggaaggta

SEQ ID NO: 296489 - DNA, 12 bp, Artificial Sequence
  Oligonucleotide primer for the detection of SNP TSC0017102
tcaaatacctac

SEQ ID NO: 296490 - DNA, 12 bp, Artificial Sequence
  Oligonucleotide primer for the detection of SNP TSC0017102
tatttatagtgg

SEQ ID NO: 296491 - DNA, 12 bp, Artificial Sequence
  Oligonucleotide primer for the detection of SNP TSC0017103
taactttttttt

SEQ ID NO: 296492 - DNA, 12 bp, Artificial Sequence
  Oligonucleotide primer for the detection of SNP TSC0017103
tagagagagaga

SEQ ID NO: 296493 - DNA, 12 bp, Artificial Sequence
  Oligonucleotide primer for the detection of SNP TSC0017104
accaaaaataat

SEQ ID NO: 296494 - DNA, 12 bp, Artificial Sequence
  Oligonucleotide primer for the detection of SNP TSC0017104
aaattacaaacg

SEQ ID NO: 296495 - DNA, 12 bp, Artificial Sequence
  Oligonucleotide primer for the detection of SNP TSC0017104
gttaagagtggt

SEQ ID NO: 296496 - DNA, 12 bp, Artificial Sequence
  Oligonucleotide primer for the detection of SNP TSC0017105
gaatatttattg

SEQ ID NO: 296497 - DNA, 12 bp, Artificial Sequence
  Oligonucleotide primer for the detection of SNP TSC0017107
atcaaccaaaca

SEQ ID NO: 296498 - DNA, 12 bp, Artificial Sequence
  Oligonucleotide primer for the detection of SNP TSC0017107
attagttaggta

SEQ ID NO: 296499 - DNA, 12 bp, Artificial Sequence
  Oligonucleotide primer for the detection of SNP TSC0017108
taaaaccatcta

SEQ ID NO: 296500 - DNA, 12 bp, Artificial Sequence
  Oligonucleotide primer for the detection of SNP TSC0017108
gttgttaatttt

SEQ ID NO: 296501 - DNA, 12 bp, Artificial Sequence
  Oligonucleotide primer for the detection of SNP TSC0017108
ctactaacccta

SEQ ID NO: 296502 - DNA, 12 bp, Artificial Sequence
  Oligonucleotide primer for the detection of SNP TSC0017109
actatattaacc

SEQ ID NO: 296503 - DNA, 12 bp, Artificial Sequence
  Oligonucleotide primer for the detection of SNP TSC0017109
ggtttaagatta

SEQ ID NO: 296504 - DNA, 12 bp, Artificial Sequence
  Oligonucleotide primer for the detection of SNP TSC0017115
atataaaatttt

SEQ ID NO: 296505 - DNA, 12 bp, Artificial Sequence
  Oligonucleotide primer for the detection of SNP TSC0017115
taaaattttgta

SEQ ID NO: 296506 - DNA, 12 bp, Artificial Sequence
  Oligonucleotide primer for the detection of SNP TSC0017116
ttactaaaccaa

SEQ ID NO: 296507 - DNA, 12 bp, Artificial Sequence
  Oligonucleotide primer for the detection of SNP TSC0017116
atgggaagtttt

SEQ ID NO: 296508 - DNA, 12 bp, Artificial Sequence
  Oligonucleotide primer for the detection of SNP TSC0017116
acgggaagtttt

SEQ ID NO: 296509 - DNA, 12 bp, Artificial Sequence
  Oligonucleotide primer for the detection of SNP TSC0017116
acaaaaaatctc

SEQ ID NO: 296510 - DNA, 12 bp, Artificial Sequence
  Oligonucleotide primer for the detection of SNP TSC0017116
acgaaaaatctc

SEQ ID NO: 296511 - DNA, 12 bp, Artificial Sequence
  Oligonucleotide primer for the detection of SNP TSC0017116
ttgttgaattaa

SEQ ID NO: 296512 - DNA, 12 bp, Artificial Sequence
  Oligonucleotide primer for the detection of SNP TSC0017117
ttttacaaccat

SEQ ID NO: 296513 - DNA, 12 bp, Artificial Sequence
  Oligonucleotide primer for the detection of SNP TSC0017117
attttatggttg

SEQ ID NO: 296514 - DNA, 12 bp, Artificial Sequence
  Oligonucleotide primer for the detection of SNP TSC0017118
atttaaaactct

SEQ ID NO: 296515 - DNA, 12 bp, Artificial Sequence
  Oligonucleotide primer for the detection of SNP TSC0017118
gtaaaatggtta

SEQ ID NO: 296516 - DNA, 12 bp, Artificial Sequence
  Oligonucleotide primer for the detection of SNP TSC0017118
acaaaataacta

SEQ ID NO: 296517 - DNA, 12 bp, Artificial Sequence
  Oligonucleotide primer for the detection of SNP TSC0017118
gtttggagtttt

SEQ ID NO: 296518 - DNA, 12 bp, Artificial Sequence
  Oligonucleotide primer for the detection of SNP TSC0017119
caaaaatatttt

SEQ ID NO: 296519 - DNA, 12 bp, Artificial Sequence
  Oligonucleotide primer for the detection of SNP TSC0017119
tttattggttag

SEQ ID NO: 296520 - DNA, 12 bp, Artificial Sequence
  Oligonucleotide primer for the detection of SNP TSC0017120
cacaacaaccct

SEQ ID NO: 296521 - DNA, 12 bp, Artificial Sequence
  Oligonucleotide primer for the detection of SNP TSC0017120
ttgtgagttttg

SEQ ID NO: 296522 - DNA, 12 bp, Artificial Sequence
  Oligonucleotide primer for the detection of SNP TSC0017129
aataaaatctaa

SEQ ID NO: 296523 - DNA, 12 bp, Artificial Sequence
  Oligonucleotide primer for the detection of SNP TSC0017129
atagggaatttt

SEQ ID NO: 296524 - DNA, 12 bp, Artificial Sequence
  Oligonucleotide primer for the detection of SNP TSC0017129
aacaaaaaattc

SEQ ID NO: 296525 - DNA, 12 bp, Artificial Sequence
  Oligonucleotide primer for the detection of SNP TSC0017129
tgaatggggttt

SEQ ID NO: 296526 - DNA, 12 bp, Artificial Sequence
  Oligonucleotide primer for the detection of SNP TSC0017130
aatataaaaatc

SEQ ID NO: 296527 - DNA, 12 bp, Artificial Sequence
  Oligonucleotide primer for the detection of SNP TSC0017130
aaggaatattta

SEQ ID NO: 296528 - DNA, 12 bp, Artificial Sequence
  Oligonucleotide primer for the detection of SNP TSC0017131
ctcccacaaaaa

SEQ ID NO: 296529 - DNA, 12 bp, Artificial Sequence
  Oligonucleotide primer for the detection of SNP TSC0017132
cccattaactaa

SEQ ID NO: 296530 - DNA, 12 bp, Artificial Sequence
  Oligonucleotide primer for the detection of SNP TSC0017132
ataaaaatgttt

SEQ ID NO: 296531 - DNA, 12 bp, Artificial Sequence
  Oligonucleotide primer for the detection of SNP TSC0017132
tcaacaaaaata

SEQ ID NO: 296532 - DNA, 12 bp, Artificial Sequence
  Oligonucleotide primer for the detection of SNP TSC0017132
gatttattgatt

SEQ ID NO: 296533 - DNA, 12 bp, Artificial Sequence
  Oligonucleotide primer for the detection of SNP TSC0017135
aataaccccccc

SEQ ID NO: 296534 - DNA, 12 bp, Artificial Sequence
  Oligonucleotide primer for the detection of SNP TSC0017135
gtaggagtgggg

SEQ ID NO: 296535 - DNA, 12 bp, Artificial Sequence
  Oligonucleotide primer for the detection of SNP TSC0017135
gtaggagcgggg

SEQ ID NO: 296536 - DNA, 12 bp, Artificial Sequence
  Oligonucleotide primer for the detection of SNP TSC0017136
aattatatatcc

SEQ ID NO: 296537 - DNA, 12 bp, Artificial Sequence
  Oligonucleotide primer for the detection of SNP TSC0017136
atcttcttccta

SEQ ID NO: 296538 - DNA, 12 bp, Artificial Sequence
  Oligonucleotide primer for the detection of SNP TSC0017136
gttatgtgtttt

SEQ ID NO: 296539 - DNA, 12 bp, Artificial Sequence
  Oligonucleotide primer for the detection of SNP TSC0017137
ataccctcttca

SEQ ID NO: 296540 - DNA, 12 bp, Artificial Sequence
  Oligonucleotide primer for the detection of SNP TSC0017137
tttaaatagttt

SEQ ID NO: 296541 - DNA, 12 bp, Artificial Sequence
  Oligonucleotide primer for the detection of SNP TSC0017137
ttcaaataattc

SEQ ID NO: 296542 - DNA, 12 bp, Artificial Sequence
  Oligonucleotide primer for the detection of SNP TSC0017137
atatttttttta

SEQ ID NO: 296543 - DNA, 12 bp, Artificial Sequence
  Oligonucleotide primer for the detection of SNP TSC0017138
actaacccacta

SEQ ID NO: 296544 - DNA, 12 bp, Artificial Sequence
  Oligonucleotide primer for the detection of SNP TSC0017138
actaacccgcta

SEQ ID NO: 296545 - DNA, 12 bp, Artificial Sequence
  Oligonucleotide primer for the detection of SNP TSC0017138
cccccctcccct

SEQ ID NO: 296546 - DNA, 12 bp, Artificial Sequence
  Oligonucleotide primer for the detection of SNP TSC0017138
attagtttgttg

SEQ ID NO: 296547 - DNA, 12 bp, Artificial Sequence
  Oligonucleotide primer for the detection of SNP TSC0017138
attagttcgttg

SEQ ID NO: 296548 - DNA, 12 bp, Artificial Sequence
  Oligonucleotide primer for the detection of SNP TSC0017139
ataacaaaaaaa

SEQ ID NO: 296549 - DNA, 12 bp, Artificial Sequence
  Oligonucleotide primer for the detection of SNP TSC0017139
gggtgtatagtt

SEQ ID NO: 296550 - DNA, 12 bp, Artificial Sequence
  Oligonucleotide primer for the detection of SNP TSC0017139
aaatacacaatc

SEQ ID NO: 296551 - DNA, 12 bp, Artificial Sequence
  Oligonucleotide primer for the detection of SNP TSC0017139
atggtaaagggg

SEQ ID NO: 296552 - DNA, 12 bp, Artificial Sequence
  Oligonucleotide primer for the detection of SNP TSC0017140
cacttctacaaa

SEQ ID NO: 296553 - DNA, 12 bp, Artificial Sequence
  Oligonucleotide primer for the detection of SNP TSC0017140
ttttgtaggtga

SEQ ID NO: 296554 - DNA, 12 bp, Artificial Sequence
  Oligonucleotide primer for the detection of SNP TSC0017143
tttcatattcat

SEQ ID NO: 296555 - DNA, 12 bp, Artificial Sequence
  Oligonucleotide primer for the detection of SNP TSC0017143
tttttgtattta

SEQ ID NO: 296556 - DNA, 12 bp, Artificial Sequence
  Oligonucleotide primer for the detection of SNP TSC0017145
aactacttcccc

SEQ ID NO: 296557 - DNA, 12 bp, Artificial Sequence
  Oligonucleotide primer for the detection of SNP TSC0017145
taattagtaatt

SEQ ID NO: 296558 - DNA, 12 bp, Artificial Sequence
  Oligonucleotide primer for the detection of SNP TSC0017145
ataatcaacaac

SEQ ID NO: 296559 - DNA, 12 bp, Artificial Sequence
  Oligonucleotide primer for the detection of SNP TSC0017145
aattgttttttc

SEQ ID NO: 296560 - DNA, 12 bp, Artificial Sequence
  Oligonucleotide primer for the detection of SNP TSC0017148
taccaataatct

SEQ ID NO: 296561 - DNA, 12 bp, Artificial Sequence
  Oligonucleotide primer for the detection of SNP TSC0017148
atttatggtaag

SEQ ID NO: 296562 - DNA, 12 bp, Artificial Sequence
  Oligonucleotide primer for the detection of SNP TSC0017150
ttagttttttaa

SEQ ID NO: 296563 - DNA, 12 bp, Artificial Sequence
  Oligonucleotide primer for the detection of SNP TSC0017150
ttaacctctcaa

SEQ ID NO: 296564 - DNA, 12 bp, Artificial Sequence
  Oligonucleotide primer for the detection of SNP TSC0017151
tctaaccacacc

SEQ ID NO: 296565 - DNA, 12 bp, Artificial Sequence
  Oligonucleotide primer for the detection of SNP TSC0017151
tatagagggtag

SEQ ID NO: 296566 - DNA, 12 bp, Artificial Sequence
  Oligonucleotide primer for the detection of SNP TSC0017151
cacaaaaaacaa

SEQ ID NO: 296567 - DNA, 12 bp, Artificial Sequence
  Oligonucleotide primer for the detection of SNP TSC0017152
ataaacatcaaa

SEQ ID NO: 296568 - DNA, 12 bp, Artificial Sequence
  Oligonucleotide primer for the detection of SNP TSC0017152
ataaacatcgaa

SEQ ID NO: 296569 - DNA, 12 bp, Artificial Sequence
  Oligonucleotide primer for the detection of SNP TSC0017152
ttgaaggggtgt

SEQ ID NO: 296570 - DNA, 12 bp, Artificial Sequence
  Oligonucleotide primer for the detection of SNP TSC0017152
ttgaaggggcgt

SEQ ID NO: 296571 - DNA, 12 bp, Artificial Sequence
  Oligonucleotide primer for the detection of SNP TSC0017152
ctaaaaaaacgc

SEQ ID NO: 296572 - DNA, 12 bp, Artificial Sequence
  Oligonucleotide primer for the detection of SNP TSC0017152
atgggtattggg

SEQ ID NO: 296573 - DNA, 12 bp, Artificial Sequence
  Oligonucleotide primer for the detection of SNP TSC0017152
atgggtatcggg

SEQ ID NO: 296574 - DNA, 12 bp, Artificial Sequence
  Oligonucleotide primer for the detection of SNP TSC0017153
cctaaaacccaa

SEQ ID NO: 296575 - DNA, 12 bp, Artificial Sequence
  Oligonucleotide primer for the detection of SNP TSC0017153
taggtgtagagt

SEQ ID NO: 296576 - DNA, 12 bp, Artificial Sequence
  Oligonucleotide primer for the detection of SNP TSC0017153
taggcgtagagt

SEQ ID NO: 296577 - DNA, 12 bp, Artificial Sequence
  Oligonucleotide primer for the detection of SNP TSC0017153
caaacacaaaac

SEQ ID NO: 296578 - DNA, 12 bp, Artificial Sequence
  Oligonucleotide primer for the detection of SNP TSC0017153
caaacgcaaaac

SEQ ID NO: 296579 - DNA, 12 bp, Artificial Sequence
  Oligonucleotide primer for the detection of SNP TSC0017153
tttggggtttag

SEQ ID NO: 296580 - DNA, 12 bp, Artificial Sequence
  Oligonucleotide primer for the detection of SNP TSC0017154
aacccaaaccta

SEQ ID NO: 296581 - DNA, 12 bp, Artificial Sequence
  Oligonucleotide primer for the detection of SNP TSC0017154
gaaattttgatt

SEQ ID NO: 296582 - DNA, 12 bp, Artificial Sequence
  Oligonucleotide primer for the detection of SNP TSC0017154
aaaattctaatt

SEQ ID NO: 296583 - DNA, 12 bp, Artificial Sequence
  Oligonucleotide primer for the detection of SNP TSC0017154
aatttagattta

SEQ ID NO: 296584 - DNA, 12 bp, Artificial Sequence
  Oligonucleotide primer for the detection of SNP TSC0017155
actcaaaaaaat

SEQ ID NO: 296585 - DNA, 12 bp, Artificial Sequence
  Oligonucleotide primer for the detection of SNP TSC0017155
actcgaaaaaat

SEQ ID NO: 296586 - DNA, 12 bp, Artificial Sequence
  Oligonucleotide primer for the detection of SNP TSC0017155
attttaagtata

SEQ ID NO: 296587 - DNA, 12 bp, Artificial Sequence
  Oligonucleotide primer for the detection of SNP TSC0017157
acacaaacaaat

SEQ ID NO: 296588 - DNA, 12 bp, Artificial Sequence
  Oligonucleotide primer for the detection of SNP TSC0017157
tgtatatgtata

SEQ ID NO: 296589 - DNA, 12 bp, Artificial Sequence
  Oligonucleotide primer for the detection of SNP TSC0017157
gtatagataggt

SEQ ID NO: 296590 - DNA, 12 bp, Artificial Sequence
  Oligonucleotide primer for the detection of SNP TSC0017158
ccatataaaaat

SEQ ID NO: 296591 - DNA, 12 bp, Artificial Sequence
  Oligonucleotide primer for the detection of SNP TSC0017158
ttgtgagtagaa

SEQ ID NO: 296592 - DNA, 12 bp, Artificial Sequence
  Oligonucleotide primer for the detection of SNP TSC0017159
aaacttttactc

SEQ ID NO: 296593 - DNA, 12 bp, Artificial Sequence
  Oligonucleotide primer for the detection of SNP TSC0017159
agtgaatgaaag

SEQ ID NO: 296594 - DNA, 12 bp, Artificial Sequence
  Oligonucleotide primer for the detection of SNP TSC0017160
cctccctacatt

SEQ ID NO: 296595 - DNA, 12 bp, Artificial Sequence
  Oligonucleotide primer for the detection of SNP TSC0017160
tgtttggatagg

SEQ ID NO: 296596 - DNA, 12 bp, Artificial Sequence
  Oligonucleotide primer for the detection of SNP TSC0017162
aatcttttttaa

SEQ ID NO: 296597 - DNA, 12 bp, Artificial Sequence
  Oligonucleotide primer for the detection of SNP TSC0017162
tgtttaagatat

SEQ ID NO: 296598 - DNA, 12 bp, Artificial Sequence
  Oligonucleotide primer for the detection of SNP TSC0017162
cgtttaagatat

SEQ ID NO: 296599 - DNA, 12 bp, Artificial Sequence
  Oligonucleotide primer for the detection of SNP TSC0017162
ccattcaaaaca

SEQ ID NO: 296600 - DNA, 12 bp, Artificial Sequence
  Oligonucleotide primer for the detection of SNP TSC0017162
ccgttcaaaaca

SEQ ID NO: 296601 - DNA, 12 bp, Artificial Sequence
  Oligonucleotide primer for the detection of SNP TSC0017162
gttttttttgat

SEQ ID NO: 296602 - DNA, 12 bp, Artificial Sequence
  Oligonucleotide primer for the detection of SNP TSC0017162
gttttttttgac

SEQ ID NO: 296603 - DNA, 12 bp, Artificial Sequence
  Oligonucleotide primer for the detection of SNP TSC0017163
aaaatacttaac

SEQ ID NO: 296604 - DNA, 12 bp, Artificial Sequence
  Oligonucleotide primer for the detection of SNP TSC0017163
ctaaatatcaaa

SEQ ID NO: 296605 - DNA, 12 bp, Artificial Sequence
  Oligonucleotide primer for the detection of SNP TSC0017163
aaagtatttagt

SEQ ID NO: 296606 - DNA, 12 bp, Artificial Sequence
  Oligonucleotide primer for the detection of SNP TSC0017166
acatttccataa

SEQ ID NO: 296607 - DNA, 12 bp, Artificial Sequence
  Oligonucleotide primer for the detection of SNP TSC0017166
acatttccgtaa

SEQ ID NO: 296608 - DNA, 12 bp, Artificial Sequence
  Oligonucleotide primer for the detection of SNP TSC0017166
tagaaagggagt

SEQ ID NO: 296609 - DNA, 12 bp, Artificial Sequence
  Oligonucleotide primer for the detection of SNP TSC0017166
caaaaaaaaaat

SEQ ID NO: 296610 - DNA, 12 bp, Artificial Sequence
  Oligonucleotide primer for the detection of SNP TSC0017166
atatttttgtag

SEQ ID NO: 296611 - DNA, 12 bp, Artificial Sequence
  Oligonucleotide primer for the detection of SNP TSC0017166
atattttcgtag

SEQ ID NO: 296612 - DNA, 12 bp, Artificial Sequence
  Oligonucleotide primer for the detection of SNP TSC0017167
tataatttctcc

SEQ ID NO: 296613 - DNA, 12 bp, Artificial Sequence
  Oligonucleotide primer for the detection of SNP TSC0017167
gatttatatgga

SEQ ID NO: 296614 - DNA, 12 bp, Artificial Sequence
  Oligonucleotide primer for the detection of SNP TSC0017168
aactatccaact

SEQ ID NO: 296615 - DNA, 12 bp, Artificial Sequence
  Oligonucleotide primer for the detection of SNP TSC0017168
ttaaatatataa

SEQ ID NO: 296616 - DNA, 12 bp, Artificial Sequence
  Oligonucleotide primer for the detection of SNP TSC0017169
caaactacttta

SEQ ID NO: 296617 - DNA, 12 bp, Artificial Sequence
  Oligonucleotide primer for the detection of SNP TSC0017169
ttatgaaatgaa

SEQ ID NO: 296618 - DNA, 12 bp, Artificial Sequence
  Oligonucleotide primer for the detection of SNP TSC0017169
taaattgttttg

SEQ ID NO: 296619 - DNA, 12 bp, Artificial Sequence
  Oligonucleotide primer for the detection of SNP TSC0017170
cctttaaaaaat

SEQ ID NO: 296620 - DNA, 12 bp, Artificial Sequence
  Oligonucleotide primer for the detection of SNP TSC0017170
taaaattgaaga

SEQ ID NO: 296621 - DNA, 12 bp, Artificial Sequence
  Oligonucleotide primer for the detection of SNP TSC0017170
ttttagagggtt

SEQ ID NO: 296622 - DNA, 12 bp, Artificial Sequence
  Oligonucleotide primer for the detection of SNP TSC0017170
ttttagagggtc

SEQ ID NO: 296623 - DNA, 12 bp, Artificial Sequence
  Oligonucleotide primer for the detection of SNP TSC0017174
atctctaaataa

SEQ ID NO: 296624 - DNA, 12 bp, Artificial Sequence
  Oligonucleotide primer for the detection of SNP TSC0017174
gtttttaaatga

SEQ ID NO: 296625 - DNA, 12 bp, Artificial Sequence
  Oligonucleotide primer for the detection of SNP TSC0017182
tctctacaaaaa

SEQ ID NO: 296626 - DNA, 12 bp, Artificial Sequence
  Oligonucleotide primer for the detection of SNP TSC0017182
tttgtttgtttg

SEQ ID NO: 296627 - DNA, 12 bp, Artificial Sequence
  Oligonucleotide primer for the detection of SNP TSC0017187
aaatacttctaa

SEQ ID NO: 296628 - DNA, 12 bp, Artificial Sequence
  Oligonucleotide primer for the detection of SNP TSC0017187
ttgggaatttgt

SEQ ID NO: 296629 - DNA, 12 bp, Artificial Sequence
  Oligonucleotide primer for the detection of SNP TSC0017187
cttaaaaaccta

SEQ ID NO: 296630 - DNA, 12 bp, Artificial Sequence
  Oligonucleotide primer for the detection of SNP TSC0017187
taggtgtttttg

SEQ ID NO: 296631 - DNA, 12 bp, Artificial Sequence
  Oligonucleotide primer for the detection of SNP TSC0017188
ttgttataaagg

SEQ ID NO: 296632 - DNA, 12 bp, Artificial Sequence
  Oligonucleotide primer for the detection of SNP TSC0017188
ctattacaaaaa

SEQ ID NO: 296633 - DNA, 12 bp, Artificial Sequence
  Oligonucleotide primer for the detection of SNP TSC0017188
tggggttgtaat

SEQ ID NO: 296634 - DNA, 12 bp, Artificial Sequence
  Oligonucleotide primer for the detection of SNP TSC0017189
atctccatctat

SEQ ID NO: 296635 - DNA, 12 bp, Artificial Sequence
  Oligonucleotide primer for the detection of SNP TSC0017189
attgtattttga

SEQ ID NO: 296636 - DNA, 12 bp, Artificial Sequence
  Oligonucleotide primer for the detection of SNP TSC0017191
cacaatatttcc

SEQ ID NO: 296637 - DNA, 12 bp, Artificial Sequence
  Oligonucleotide primer for the detection of SNP TSC0017191
cacgatatttcc

SEQ ID NO: 296638 - DNA, 12 bp, Artificial Sequence
  Oligonucleotide primer for the detection of SNP TSC0017191
tggtttgggtta

SEQ ID NO: 296639 - DNA, 12 bp, Artificial Sequence
  Oligonucleotide primer for the detection of SNP TSC0017191
tggttcgggtta

SEQ ID NO: 296640 - DNA, 12 bp, Artificial Sequence
  Oligonucleotide primer for the detection of SNP TSC0017191
taatccaaacca

SEQ ID NO: 296641 - DNA, 12 bp, Artificial Sequence
  Oligonucleotide primer for the detection of SNP TSC0017191
taatccgaacca

SEQ ID NO: 296642 - DNA, 12 bp, Artificial Sequence
  Oligonucleotide primer for the detection of SNP TSC0017191
tatgatgttttt

SEQ ID NO: 296643 - DNA, 12 bp, Artificial Sequence
  Oligonucleotide primer for the detection of SNP TSC0017191
tacgatgttttt

SEQ ID NO: 296644 - DNA, 12 bp, Artificial Sequence
  Oligonucleotide primer for the detection of SNP TSC0017192
tgttttgtgtgt

SEQ ID NO: 296645 - DNA, 12 bp, Artificial Sequence
  Oligonucleotide primer for the detection of SNP TSC0017192
cgttttgtgtgt

SEQ ID NO: 296646 - DNA, 12 bp, Artificial Sequence
  Oligonucleotide primer for the detection of SNP TSC0017192
cactctatatac

SEQ ID NO: 296647 - DNA, 12 bp, Artificial Sequence
  Oligonucleotide primer for the detection of SNP TSC0017192
cgctctatatac

SEQ ID NO: 296648 - DNA, 12 bp, Artificial Sequence
  Oligonucleotide primer for the detection of SNP TSC0017192
tttaggaggaag

SEQ ID NO: 296649 - DNA, 12 bp, Artificial Sequence
  Oligonucleotide primer for the detection of SNP TSC0017196
ttaataacaaaa

SEQ ID NO: 296650 - DNA, 12 bp, Artificial Sequence
  Oligonucleotide primer for the detection of SNP TSC0017196
attatggagttt

SEQ ID NO: 296651 - DNA, 12 bp, Artificial Sequence
  Oligonucleotide primer for the detection of SNP TSC0017196
attataaaatcc

SEQ ID NO: 296652 - DNA, 12 bp, Artificial Sequence
  Oligonukleotid-Primer
ttagtgatagag

SEQ ID NO: 296653 - DNA, 12 bp, Artificial Sequence
  Oligonucleotide primer for the detection of SNP TSC0017197
attttctaaaaa

SEQ ID NO: 296654 - DNA, 12 bp, Artificial Sequence
  Oligonucleotide primer for the detection of SNP TSC0017197
aaatttcttatt

SEQ ID NO: 296655 - DNA, 12 bp, Artificial Sequence
  Oligonucleotide primer for the detection of SNP TSC0017199
actaaaaatacg

SEQ ID NO: 296656 - DNA, 12 bp, Artificial Sequence
  Oligonukleotid-Primer
tgggttaatgat

SEQ ID NO: 296657 - DNA, 12 bp, Artificial Sequence
  Oligonucleotide primer for the detection of SNP TSC0017199
cgggttaatgat

SEQ ID NO: 296658 - DNA, 12 bp, Artificial Sequence
  Oligonucleotide primer for the detection of SNP TSC0017199
caaactaataat

SEQ ID NO: 296659 - DNA, 12 bp, Artificial Sequence
  Oligonucleotide primer for the detection of SNP TSC0017199
cgaactaataat

SEQ ID NO: 296660 - DNA, 12 bp, Artificial Sequence
  Oligonucleotide primer for the detection of SNP TSC0017199
attaagggtatg

SEQ ID NO: 296661 - DNA, 12 bp, Artificial Sequence
  Oligonucleotide primer for the detection of SNP TSC0017199
attaagggtacg

SEQ ID NO: 296662 - DNA, 12 bp, Artificial Sequence
  Oligonucleotide primer for the detection of SNP TSC0017200
acaaaaattaac

SEQ ID NO: 296663 - DNA, 12 bp, Artificial Sequence
  Oligonucleotide primer for the detection of SNP TSC0017200
acgaaaattaac

SEQ ID NO: 296664 - DNA, 12 bp, Artificial Sequence
  Oligonucleotide primer for the detection of SNP TSC0017200
tggagtggtgta

SEQ ID NO: 296665 - DNA, 12 bp, Artificial Sequence
  Oligonucleotide primer for the detection of SNP TSC0017200
tggagcggtgta

SEQ ID NO: 296666 - DNA, 12 bp, Artificial Sequence
  Oligonucleotide primer for the detection of SNP TSC0017200
tggagtggcgta

SEQ ID NO: 296667 - DNA, 12 bp, Artificial Sequence
  Oligonucleotide primer for the detection of SNP TSC0017200
tggagcggcgta

SEQ ID NO: 296668 - DNA, 12 bp, Artificial Sequence
  Oligonucleotide primer for the detection of SNP TSC0017207
ttttgattattg

SEQ ID NO: 296669 - DNA, 12 bp, Artificial Sequence
  Oligonucleotide primer for the detection of SNP TSC0017207
ttttaatcacta

SEQ ID NO: 296670 - DNA, 12 bp, Artificial Sequence
  Oligonucleotide primer for the detection of SNP TSC0017207
ggatttggagat

SEQ ID NO: 296671 - DNA, 12 bp, Artificial Sequence
  Oligonucleotide primer for the detection of SNP TSC0017208
atatattcaaaa

SEQ ID NO: 296672 - DNA, 12 bp, Artificial Sequence
  Oligonucleotide primer for the detection of SNP TSC0017208
ctttatctccaa

SEQ ID NO: 296673 - DNA, 12 bp, Artificial Sequence
  Oligonucleotide primer for the detection of SNP TSC0017208
agtatgtttagg

SEQ ID NO: 296674 - DNA, 12 bp, Artificial Sequence
  Oligonucleotide primer for the detection of SNP TSC0017209
aaactacccaac

SEQ ID NO: 296675 - DNA, 12 bp, Artificial Sequence
  Oligonucleotide primer for the detection of SNP TSC0017209
ttttgatttatg

SEQ ID NO: 296676 - DNA, 12 bp, Artificial Sequence
  Oligonucleotide primer for the detection of SNP TSC0017209
tttcgatttatg

SEQ ID NO: 296677 - DNA, 12 bp, Artificial Sequence
  Oligonucleotide primer for the detection of SNP TSC0017210
aaaaccatatca

SEQ ID NO: 296678 - DNA, 12 bp, Artificial Sequence
  Oligonucleotide primer for the detection of SNP TSC0017210
aaaaccatatcg

SEQ ID NO: 296679 - DNA, 12 bp, Artificial Sequence
  Oligonucleotide primer for the detection of SNP TSC0017210
gaggttggggtt

SEQ ID NO: 296680 - DNA, 12 bp, Artificial Sequence
  Oligonucleotide primer for the detection of SNP TSC0017210
ggggttatgttg

SEQ ID NO: 296681 - DNA, 12 bp, Artificial Sequence
  Oligonucleotide primer for the detection of SNP TSC0017210
ggggttatgtcg

SEQ ID NO: 296682 - DNA, 12 bp, Artificial Sequence
  Oligonucleotide primer for the detection of SNP TSC0017213
gagtatgttatt

SEQ ID NO: 296683 - DNA, 12 bp, Artificial Sequence
  Oligonucleotide primer for the detection of SNP TSC0017213
aaaatataccat

SEQ ID NO: 296684 - DNA, 12 bp, Artificial Sequence
  Oligonucleotide primer for the detection of SNP TSC0017213
gagtttgtgaga

SEQ ID NO: 296685 - DNA, 12 bp, Artificial Sequence
  Oligonucleotide primer for the detection of SNP TSC0017217
accaaaatacaa

SEQ ID NO: 296686 - DNA, 12 bp, Artificial Sequence
  Oligonucleotide primer for the detection of SNP TSC0017217
tttgtgaatagt

SEQ ID NO: 296687 - DNA, 12 bp, Artificial Sequence
  Oligonucleotide primer for the detection of SNP TSC0017217
cctataaataat

SEQ ID NO: 296688 - DNA, 12 bp, Artificial Sequence
  Oligonucleotide primer for the detection of SNP TSC0017217
gttagagtgtag

SEQ ID NO: 296689 - DNA, 12 bp, Artificial Sequence
  Oligonucleotide primer for the detection of SNP TSC0017219
aattaactaaac

SEQ ID NO: 296690 - DNA, 12 bp, Artificial Sequence
  Oligonucleotide primer for the detection of SNP TSC0017219
tgtttattattg

SEQ ID NO: 296691 - DNA, 12 bp, Artificial Sequence
  Oligonucleotide primer for the detection of SNP TSC0017219
cgtttattattg

SEQ ID NO: 296692 - DNA, 12 bp, Artificial Sequence
  Oligonucleotide primer for the detection of SNP TSC0017219
tgtttattatcg

SEQ ID NO: 296693 - DNA, 12 bp, Artificial Sequence
  Oligonucleotide primer for the detection of SNP TSC0017219
cgtttattatcg

SEQ ID NO: 296694 - DNA, 12 bp, Artificial Sequence
  Oligonucleotide primer for the detection of SNP TSC0017219
cacccaccaccg

SEQ ID NO: 296695 - DNA, 12 bp, Artificial Sequence
  Oligonucleotide primer for the detection of SNP TSC0017219
cgcccaccaccg

SEQ ID NO: 296696 - DNA, 12 bp, Artificial Sequence
  Oligonucleotide primer for the detection of SNP TSC0017220
taaaaccccatc

SEQ ID NO: 296697 - DNA, 12 bp, Artificial Sequence
  Oligonucleotide primer for the detection of SNP TSC0017220
taaaaccccgtc

SEQ ID NO: 296698 - DNA, 12 bp, Artificial Sequence
  Oligonucleotide primer for the detection of SNP TSC0017220
ttttttttctaa

SEQ ID NO: 296699 - DNA, 12 bp, Artificial Sequence
  Oligonucleotide primer for the detection of SNP TSC0017220
tgaaattttgtt

SEQ ID NO: 296700 - DNA, 12 bp, Artificial Sequence
  Oligonucleotide primer for the detection of SNP TSC0017220
tgaaatttcgtt

SEQ ID NO: 296701 - DNA, 12 bp, Artificial Sequence
  Oligonucleotide primer for the detection of SNP TSC0017221
aaaccactatac

SEQ ID NO: 296702 - DNA, 12 bp, Artificial Sequence
  Oligonucleotide primer for the detection of SNP TSC0017221
gataataagttg

SEQ ID NO: 296703 - DNA, 12 bp, Artificial Sequence
  Oligonucleotide primer for the detection of SNP TSC0017224
tcatctaaaccc

SEQ ID NO: 296704 - DNA, 12 bp, Artificial Sequence
  Oligonucleotide primer for the detection of SNP TSC0017224
aggggttaaagt

SEQ ID NO: 296705 - DNA, 12 bp, Artificial Sequence
  Oligonucleotide primer for the detection of SNP TSC0017224
aggggttaaagc

SEQ ID NO: 296706 - DNA, 12 bp, Artificial Sequence
  Oligonucleotide primer for the detection of SNP TSC0017224
ttatttgagttt

SEQ ID NO: 296707 - DNA, 12 bp, Artificial Sequence
  Oligonucleotide primer for the detection of SNP TSC0017228
aatcctcactcc

SEQ ID NO: 296708 - DNA, 12 bp, Artificial Sequence
  Oligonucleotide primer for the detection of SNP TSC0017228
ggtggaggagtg

SEQ ID NO: 296709 - DNA, 12 bp, Artificial Sequence
  Oligonucleotide primer for the detection of SNP TSC0017228
ggtggaggagcg

SEQ ID NO: 296710 - DNA, 12 bp, Artificial Sequence
  Oligonucleotide primer for the detection of SNP TSC0017229
caaaccaccaaa

SEQ ID NO: 296711 - DNA, 12 bp, Artificial Sequence
  Oligonucleotide primer for the detection of SNP TSC0017229
caaaccaccgaa

SEQ ID NO: 296712 - DNA, 12 bp, Artificial Sequence
  Oligonucleotide primer for the detection of SNP TSC0017229
ggagtgaggatt

SEQ ID NO: 296713 - DNA, 12 bp, Artificial Sequence
  Oligonucleotide primer for the detection of SNP TSC0017229
aaaataaaaacc

SEQ ID NO: 296714 - DNA, 12 bp, Artificial Sequence
  Oligonucleotide primer for the detection of SNP TSC0017229
taagttattgag

SEQ ID NO: 296715 - DNA, 12 bp, Artificial Sequence
  Oligonucleotide primer for the detection of SNP TSC0017229
taagttatcgag

SEQ ID NO: 296716 - DNA, 12 bp, Artificial Sequence
  Oligonucleotide primer for the detection of SNP TSC0017230
aacaacctactc

SEQ ID NO: 296717 - DNA, 12 bp, Artificial Sequence
  Oligonukleotid-Primer
attttaggaaag

SEQ ID NO: 296718 - DNA, 12 bp, Artificial Sequence
  Oligonucleotide primer for the detection of SNP TSC0017231
tattaggttttg

SEQ ID NO: 296719 - DNA, 12 bp, Artificial Sequence
  Oligonucleotide primer for the detection of SNP TSC0017231
actaaatcttaa

SEQ ID NO: 296720 - DNA, 12 bp, Artificial Sequence
  Oligonucleotide primer for the detection of SNP TSC0017231
atgatataaggt

SEQ ID NO: 296721 - DNA, 12 bp, Artificial Sequence
  Oligonukleotid-Primer
aaaccaaccttc

SEQ ID NO: 296722 - DNA, 12 bp, Artificial Sequence
  Oligonucleotide primer for the detection of SNP TSC0017232
aaaccgaccttc

SEQ ID NO: 296723 - DNA, 12 bp, Artificial Sequence
  Oligonucleotide primer for the detection of SNP TSC0017232
aggtttggtagg

SEQ ID NO: 296724 - DNA, 12 bp, Artificial Sequence
  Oligonucleotide primer for the detection of SNP TSC0017235
tatataaaatca

SEQ ID NO: 296725 - DNA, 12 bp, Artificial Sequence
  Oligonucleotide primer for the detection of SNP TSC0017235
tatataaaatcg

SEQ ID NO: 296726 - DNA, 12 bp, Artificial Sequence
  Oligonucleotide primer for the detection of SNP TSC0017235
gttggttattta

SEQ ID NO: 296727 - DNA, 12 bp, Artificial Sequence
  Oligonucleotide primer for the detection of SNP TSC0017236
taacaaaattct

SEQ ID NO: 296728 - DNA, 12 bp, Artificial Sequence
  Oligonucleotide primer for the detection of SNP TSC0017236
aagtttagttgg

SEQ ID NO: 296729 - DNA, 12 bp, Artificial Sequence
  Oligonucleotide primer for the detection of SNP TSC0017238
ttaaaatatcta

SEQ ID NO: 296730 - DNA, 12 bp, Artificial Sequence
  Oligonucleotide primer for the detection of SNP TSC0017238
ataaatgaagat

SEQ ID NO: 296731 - DNA, 12 bp, Artificial Sequence
  Oligonucleotide primer for the detection of SNP TSC0017238
ataaataaaaac

SEQ ID NO: 296732 - DNA, 12 bp, Artificial Sequence
  Oligonucleotide primer for the detection of SNP TSC0017238
ttagagtgtttg

SEQ ID NO: 296733 - DNA, 12 bp, Artificial Sequence
  Oligonucleotide primer for the detection of SNP TSC0017240
ttttaaaataat

SEQ ID NO: 296734 - DNA, 12 bp, Artificial Sequence
  Oligonucleotide primer for the detection of SNP TSC0017240
tgtggtttagga

SEQ ID NO: 296735 - DNA, 12 bp, Artificial Sequence
  Oligonucleotide primer for the detection of SNP TSC0017243
taaacaaattct

SEQ ID NO: 296736 - DNA, 12 bp, Artificial Sequence
  Oligonucleotide primer for the detection of SNP TSC0017243
tgatttttaaga

SEQ ID NO: 296737 - DNA, 12 bp, Artificial Sequence
  Oligonucleotide primer for the detection of SNP TSC0017244
cttttcccaatt

SEQ ID NO: 296738 - DNA, 12 bp, Artificial Sequence
  Oligonucleotide primer for the detection of SNP TSC0017244
aaaagaataagt

SEQ ID NO: 296739 - DNA, 12 bp, Artificial Sequence
  Oligonucleotide primer for the detection of SNP TSC0017245
taaatcatatac

SEQ ID NO: 296740 - DNA, 12 bp, Artificial Sequence
  Oligonucleotide primer for the detection of SNP TSC0017245
ggtggagtaagg

SEQ ID NO: 296741 - DNA, 12 bp, Artificial Sequence
  Oligonucleotide primer for the detection of SNP TSC0017245
gaattatatgtt

SEQ ID NO: 296742 - DNA, 12 bp, Artificial Sequence
  Oligonucleotide primer for the detection of SNP TSC0017246
taggtggagata

SEQ ID NO: 296743 - DNA, 12 bp, Artificial Sequence
  Oligonucleotide primer for the detection of SNP TSC0017247
taatactatcca

SEQ ID NO: 296744 - DNA, 12 bp, Artificial Sequence
  Oligonucleotide primer for the detection of SNP TSC0017247
agttttgtttta

SEQ ID NO: 296745 - DNA, 12 bp, Artificial Sequence
  Oligonucleotide primer for the detection of SNP TSC0017247
aaccttatttca

SEQ ID NO: 296746 - DNA, 12 bp, Artificial Sequence
  Oligonucleotide primer for the detection of SNP TSC0017247
tggtgttattta

SEQ ID NO: 296747 - DNA, 12 bp, Artificial Sequence
  Oligonucleotide primer for the detection of SNP TSC0017248
tgtgtattttat

SEQ ID NO: 296748 - DNA, 12 bp, Artificial Sequence
  Oligonucleotide primer for the detection of SNP TSC0017248
tgtgtattttac

SEQ ID NO: 296749 - DNA, 12 bp, Artificial Sequence
  Oligonucleotide primer for the detection of SNP TSC0017248
tatatattctac

SEQ ID NO: 296750 - DNA, 12 bp, Artificial Sequence
  Oligonucleotide primer for the detection of SNP TSC0017248
atggtgagaagg

SEQ ID NO: 296751 - DNA, 12 bp, Artificial Sequence
  Oligonucleotide primer for the detection of SNP TSC0017249
ccaaatattaaa

SEQ ID NO: 296752 - DNA, 12 bp, Artificial Sequence
  Oligonucleotide primer for the detection of SNP TSC0017249
ccgaatattaaa

SEQ ID NO: 296753 - DNA, 12 bp, Artificial Sequence
  Oligonucleotide primer for the detection of SNP TSC0017249
ggggaattatta

SEQ ID NO: 296754 - DNA, 12 bp, Artificial Sequence
  Oligonucleotide primer for the detection of SNP TSC0017249
tggatgttggat

SEQ ID NO: 296755 - DNA, 12 bp, Artificial Sequence
  Oligonucleotide primer for the detection of SNP TSC0017249
cggatgttggat

SEQ ID NO: 296756 - DNA, 12 bp, Artificial Sequence
  Oligonucleotide primer for the detection of SNP TSC0017249
tggatgttggac

SEQ ID NO: 296757 - DNA, 12 bp, Artificial Sequence
  Oligonucleotide primer for the detection of SNP TSC0017249
cggatgttggac

SEQ ID NO: 296758 - DNA, 12 bp, Artificial Sequence
  Oligonucleotide primer for the detection of SNP TSC0017252
aacacaacctcc

SEQ ID NO: 296759 - DNA, 12 bp, Artificial Sequence
  Oligonucleotide primer for the detection of SNP TSC0017252
aacacgacctcc

SEQ ID NO: 296760 - DNA, 12 bp, Artificial Sequence
  Oligonucleotide primer for the detection of SNP TSC0017252
aacgcaacctcc

SEQ ID NO: 296761 - DNA, 12 bp, Artificial Sequence
  Oligonucleotide primer for the detection of SNP TSC0017252
aacgcgacctcc

SEQ ID NO: 296762 - DNA, 12 bp, Artificial Sequence
  Oligonucleotide primer for the detection of SNP TSC0017252
aaacccgaaaaa

SEQ ID NO: 296763 - DNA, 12 bp, Artificial Sequence
  Oligonucleotide primer for the detection of SNP TSC0017252
aatgtgattttt

SEQ ID NO: 296764 - DNA, 12 bp, Artificial Sequence
  Oligonucleotide primer for the detection of SNP TSC0017252
aacgtgattttt

SEQ ID NO: 296765 - DNA, 12 bp, Artificial Sequence
  Oligonucleotide primer for the detection of SNP TSC0017252
aatgcgattttt

SEQ ID NO: 296766 - DNA, 12 bp, Artificial Sequence
  Oligonucleotide primer for the detection of SNP TSC0017252
aacgcgattttt

SEQ ID NO: 296767 - DNA, 12 bp, Artificial Sequence
  Oligonucleotide primer for the detection of SNP TSC0017253
aaatttactaaa

SEQ ID NO: 296768 - DNA, 12 bp, Artificial Sequence
  Oligonucleotide primer for the detection of SNP TSC0017253
atgtgatatttt

SEQ ID NO: 296769 - DNA, 12 bp, Artificial Sequence
  Oligonucleotide primer for the detection of SNP TSC0017253
atgtgatatttc

SEQ ID NO: 296770 - DNA, 12 bp, Artificial Sequence
  Oligonucleotide primer for the detection of SNP TSC0017253
taatataatact

SEQ ID NO: 296771 - DNA, 12 bp, Artificial Sequence
  Oligonucleotide primer for the detection of SNP TSC0017253
aggatttgttga

SEQ ID NO: 296772 - DNA, 12 bp, Artificial Sequence
  Oligonucleotide primer for the detection of SNP TSC0017254
acttaaatatac

SEQ ID NO: 296773 - DNA, 12 bp, Artificial Sequence
  Oligonucleotide primer for the detection of SNP TSC0017254
ttttggtgatta

SEQ ID NO: 296774 - DNA, 12 bp, Artificial Sequence
  Oligonucleotide primer for the detection of SNP TSC0017254
ccctaataacta

SEQ ID NO: 296775 - DNA, 12 bp, Artificial Sequence
  Oligonucleotide primer for the detection of SNP TSC0017254
gtttaggtatat

SEQ ID NO: 296776 - DNA, 12 bp, Artificial Sequence
  Oligonucleotide primer for the detection of SNP TSC0017257
ctataaaataca

SEQ ID NO: 296777 - DNA, 12 bp, Artificial Sequence
  Oligonucleotide primer for the detection of SNP TSC0017257
ctataaaatacg

SEQ ID NO: 296778 - DNA, 12 bp, Artificial Sequence
  Oligonucleotide primer for the detection of SNP TSC0017257
gatattagtatt

SEQ ID NO: 296779 - DNA, 12 bp, Artificial Sequence
  Oligonucleotide primer for the detection of SNP TSC0017257
aatatcaacatt

SEQ ID NO: 296780 - DNA, 12 bp, Artificial Sequence
  Oligonucleotide primer for the detection of SNP TSC0017257
tttatgaagtat

SEQ ID NO: 296781 - DNA, 12 bp, Artificial Sequence
  Oligonucleotide primer for the detection of SNP TSC0017257
tttatgaagtac

SEQ ID NO: 296782 - DNA, 12 bp, Artificial Sequence
  Oligonucleotide primer for the detection of SNP TSC0017259
aaaaacaaaata

SEQ ID NO: 296783 - DNA, 12 bp, Artificial Sequence
  Oligonucleotide primer for the detection of SNP TSC0017259
gaagtgtgatta

SEQ ID NO: 296784 - DNA, 12 bp, Artificial Sequence
  Oligonucleotide primer for the detection of SNP TSC0017265
caaacgaaaaaa

SEQ ID NO: 296785 - DNA, 12 bp, Artificial Sequence
  Oligonucleotide primer for the detection of SNP TSC0017265
cgaacaaaaaaa

SEQ ID NO: 296786 - DNA, 12 bp, Artificial Sequence
  Oligonucleotide primer for the detection of SNP TSC0017265
cgaacgaaaaaa

SEQ ID NO: 296787 - DNA, 12 bp, Artificial Sequence
  Oligonucleotide primer for the detection of SNP TSC0017265
gtttttattttg

SEQ ID NO: 296788 - DNA, 12 bp, Artificial Sequence
  Oligonucleotide primer for the detection of SNP TSC0017265
gtttttatttcg

SEQ ID NO: 296789 - DNA, 12 bp, Artificial Sequence
  Oligonucleotide primer for the detection of SNP TSC0017265
accctcactcca

SEQ ID NO: 296790 - DNA, 12 bp, Artificial Sequence
  Oligonukleotid-Primer
accctcactccg

SEQ ID NO: 296791 - DNA, 12 bp, Artificial Sequence
  Oligonucleotide primer for the detection of SNP TSC0017265
tgggtggggagg

SEQ ID NO: 296792 - DNA, 12 bp, Artificial Sequence
  Oligonucleotide primer for the detection of SNP TSC0017265
cgggtggggagg

SEQ ID NO: 296793 - DNA, 12 bp, Artificial Sequence
  Oligonucleotide primer for the detection of SNP TSC0017265
tgggcggggagg

SEQ ID NO: 296794 - DNA, 12 bp, Artificial Sequence
  Oligonucleotide primer for the detection of SNP TSC0017265
cgggcggggagg

SEQ ID NO: 296795 - DNA, 12 bp, Artificial Sequence
  Oligonucleotide primer for the detection of SNP TSC0017267
tagtttgggatg

SEQ ID NO: 296796 - DNA, 12 bp, Artificial Sequence
  Oligonucleotide primer for the detection of SNP TSC0017271
ccctccaacttc

SEQ ID NO: 296797 - DNA, 12 bp, Artificial Sequence
  Oligonucleotide primer for the detection of SNP TSC0017271
taaagggtaagt

SEQ ID NO: 296798 - DNA, 12 bp, Artificial Sequence
  Oligonucleotide primer for the detection of SNP TSC0017271
acaaaaaacaaa

SEQ ID NO: 296799 - DNA, 12 bp, Artificial Sequence
  Oligonucleotide primer for the detection of SNP TSC0017271
ttttttaatttc

SEQ ID NO: 296800 - DNA, 12 bp, Artificial Sequence
  Oligonucleotide primer for the detection of SNP TSC0017272
tcaccctaatat

SEQ ID NO: 296801 - DNA, 12 bp, Artificial Sequence
  Oligonucleotide primer for the detection of SNP TSC0017272
tcgccctaatat

SEQ ID NO: 296802 - DNA, 12 bp, Artificial Sequence
  Oligonucleotide primer for the detection of SNP TSC0017272
tttttattagaa

SEQ ID NO: 296803 - DNA, 12 bp, Artificial Sequence
  Oligonucleotide primer for the detection of SNP TSC0017273
tcaacctcttac

SEQ ID NO: 296804 - DNA, 12 bp, Artificial Sequence
  Oligonucleotide primer for the detection of SNP TSC0017273
tagtggaatggg

SEQ ID NO: 296805 - DNA, 12 bp, Artificial Sequence
  Oligonucleotide primer for the detection of SNP TSC0017274
ggttatagggaa

SEQ ID NO: 296806 - DNA, 12 bp, Artificial Sequence
  Oligonucleotide primer for the detection of SNP TSC0017274
ggataaaggatt

SEQ ID NO: 296807 - DNA, 12 bp, Artificial Sequence
  Oligonucleotide primer for the detection of SNP TSC0017275
ttaaggttattt

SEQ ID NO: 296808 - DNA, 12 bp, Artificial Sequence
  Oligonucleotide primer for the detection of SNP TSC0017275
ctaaaaccattc

SEQ ID NO: 296809 - DNA, 12 bp, Artificial Sequence
  Oligonucleotide primer for the detection of SNP TSC0017275
gaaatatatgag

SEQ ID NO: 296810 - DNA, 12 bp, Artificial Sequence
  Oligonucleotide primer for the detection of SNP TSC0017277
caaaaataaatt

SEQ ID NO: 296811 - DNA, 12 bp, Artificial Sequence
  Oligonucleotide primer for the detection of SNP TSC0017277
gtagaattgaaa

SEQ ID NO: 296812 - DNA, 12 bp, Artificial Sequence
  Oligonucleotide primer for the detection of SNP TSC0017281
aaaaataaccat

SEQ ID NO: 296813 - DNA, 12 bp, Artificial Sequence
  Oligonucleotide primer for the detection of SNP TSC0017281
tgattttttatg

SEQ ID NO: 296814 - DNA, 12 bp, Artificial Sequence
  Oligonucleotide primer for the detection of SNP TSC0017282
atattaaactct

SEQ ID NO: 296815 - DNA, 12 bp, Artificial Sequence
  Oligonucleotide primer for the detection of SNP TSC0017282
tataggtaggaa

SEQ ID NO: 296816 - DNA, 12 bp, Artificial Sequence
  Oligonucleotide primer for the detection of SNP TSC0017283
ccttctctaaac

SEQ ID NO: 296817 - DNA, 12 bp, Artificial Sequence
  Oligonucleotide primer for the detection of SNP TSC0017283
atatttagggag

SEQ ID NO: 296818 - DNA, 12 bp, Artificial Sequence
  Oligonucleotide primer for the detection of SNP TSC0017285
ctttcttccccc

SEQ ID NO: 296819 - DNA, 12 bp, Artificial Sequence
  Oligonucleotide primer for the detection of SNP TSC0017285
gatagttatggg

SEQ ID NO: 296820 - DNA, 12 bp, Artificial Sequence
  Oligonucleotide primer for the detection of SNP TSC0017286
aacaatatataa

SEQ ID NO: 296821 - DNA, 12 bp, Artificial Sequence
  Oligonucleotide primer for the detection of SNP TSC0017286
ttttttgtttat

SEQ ID NO: 296822 - DNA, 12 bp, Artificial Sequence
  Oligonucleotide primer for the detection of SNP TSC0017286
ttccctatttat

SEQ ID NO: 296823 - DNA, 12 bp, Artificial Sequence
  Oligonucleotide primer for the detection of SNP TSC0017286
agtagtgtgtaa

SEQ ID NO: 296824 - DNA, 12 bp, Artificial Sequence
  Oligonucleotide primer for the detection of SNP TSC0017287
gatgttatatag

SEQ ID NO: 296825 - DNA, 12 bp, Artificial Sequence
  Oligonucleotide primer for the detection of SNP TSC0017290
acataaccaaac

SEQ ID NO: 296826 - DNA, 12 bp, Artificial Sequence
  Oligonucleotide primer for the detection of SNP TSC0017290
gagtttgtgtat

SEQ ID NO: 296827 - DNA, 12 bp, Artificial Sequence
  Oligonucleotide primer for the detection of SNP TSC0017290
gagttcgtgtat

SEQ ID NO: 296828 - DNA, 12 bp, Artificial Sequence
  Oligonucleotide primer for the detection of SNP TSC0017290
gagtttgcgtat

SEQ ID NO: 296829 - DNA, 12 bp, Artificial Sequence
  Oligonucleotide primer for the detection of SNP TSC0017290
gagttcgcgtat

SEQ ID NO: 296830 - DNA, 12 bp, Artificial Sequence
  Oligonucleotide primer for the detection of SNP TSC0017290
gagtttgtgtac

SEQ ID NO: 296831 - DNA, 12 bp, Artificial Sequence
  Oligonucleotide primer for the detection of SNP TSC0017290
gagttcgtgtac

SEQ ID NO: 296832 - DNA, 12 bp, Artificial Sequence
  Oligonucleotide primer for the detection of SNP TSC0017290
gagtttgcgtac

SEQ ID NO: 296833 - DNA, 12 bp, Artificial Sequence
  Oligonucleotide primer for the detection of SNP TSC0017290
gagttcgcgtac

SEQ ID NO: 296834 - DNA, 12 bp, Artificial Sequence
  Oligonucleotide primer for the detection of SNP TSC0017290
aaatccacacac

SEQ ID NO: 296835 - DNA, 12 bp, Artificial Sequence
  Oligonucleotide primer for the detection of SNP TSC0017290
aaatccacgcac

SEQ ID NO: 296836 - DNA, 12 bp, Artificial Sequence
  Oligonucleotide primer for the detection of SNP TSC0017290
aaatccgcacac

SEQ ID NO: 296837 - DNA, 12 bp, Artificial Sequence
  Oligonucleotide primer for the detection of SNP TSC0017290
aaatccgcgcac

SEQ ID NO: 296838 - DNA, 12 bp, Artificial Sequence
  Oligonucleotide primer for the detection of SNP TSC0017290
atatggttaggt

SEQ ID NO: 296839 - DNA, 12 bp, Artificial Sequence
  Oligonucleotide primer for the detection of SNP TSC0017290
atatggttaggc

SEQ ID NO: 296840 - DNA, 12 bp, Artificial Sequence
  Oligonucleotide primer for the detection of SNP TSC0017291
cattctaactct

SEQ ID NO: 296841 - DNA, 12 bp, Artificial Sequence
  Oligonucleotide primer for the detection of SNP TSC0017291
cgttctaactct

SEQ ID NO: 296842 - DNA, 12 bp, Artificial Sequence
  Oligonucleotide primer for the detection of SNP TSC0017291
tgggaggggtag

SEQ ID NO: 296843 - DNA, 12 bp, Artificial Sequence
  Oligonucleotide primer for the detection of SNP TSC0017292
tctattcacctt

SEQ ID NO: 296844 - DNA, 12 bp, Artificial Sequence
  Oligonucleotide primer for the detection of SNP TSC0017292
aagtaagttgag

SEQ ID NO: 296845 - DNA, 12 bp, Artificial Sequence
  Oligonucleotide primer for the detection of SNP TSC0017293
ctaatttcctat

SEQ ID NO: 296846 - DNA, 12 bp, Artificial Sequence
  Oligonucleotide primer for the detection of SNP TSC0017293
ttaattttttgt

SEQ ID NO: 296847 - DNA, 12 bp, Artificial Sequence
  Oligonucleotide primer for the detection of SNP TSC0017294
tttccccaccaa

SEQ ID NO: 296848 - DNA, 12 bp, Artificial Sequence
  Oligonucleotide primer for the detection of SNP TSC0017294
tttccccgccaa

SEQ ID NO: 296849 - DNA, 12 bp, Artificial Sequence
  Oligonucleotide primer for the detection of SNP TSC0017294
gaaaatatgagg

SEQ ID NO: 296850 - DNA, 12 bp, Artificial Sequence
  Oligonucleotide primer for the detection of SNP TSC0017294
ttttttcgttag

SEQ ID NO: 296851 - DNA, 12 bp, Artificial Sequence
  Oligonucleotide primer for the detection of SNP TSC0017295
aaaacctatatc

SEQ ID NO: 296852 - DNA, 12 bp, Artificial Sequence
  Oligonucleotide primer for the detection of SNP TSC0017295
tatgtgatggtg

SEQ ID NO: 296853 - DNA, 12 bp, Artificial Sequence
  Oligonucleotide primer for the detection of SNP TSC0017295
tacgtgatggtg

SEQ ID NO: 296854 - DNA, 12 bp, Artificial Sequence
  Oligonucleotide primer for the detection of SNP TSC0017303
atctaaaatatt

SEQ ID NO: 296855 - DNA, 12 bp, Artificial Sequence
  Oligonucleotide primer for the detection of SNP TSC0017303
agtttaatgagg

SEQ ID NO: 296856 - DNA, 12 bp, Artificial Sequence
  Oligonucleotide primer for the detection of SNP TSC0017307
atatcctccatt

SEQ ID NO: 296857 - DNA, 12 bp, Artificial Sequence
  Oligonucleotide primer for the detection of SNP TSC0017307
ttttttagttag

SEQ ID NO: 296858 - DNA, 12 bp, Artificial Sequence
  Oligonucleotide primer for the detection of SNP TSC0017307
ttttctaattaa

SEQ ID NO: 296859 - DNA, 12 bp, Artificial Sequence
  Oligonucleotide primer for the detection of SNP TSC0017307
atattttttatt

SEQ ID NO: 296860 - DNA, 12 bp, Artificial Sequence
  Oligonucleotide primer for the detection of SNP TSC0017310
aaaccctaaata

SEQ ID NO: 296861 - DNA, 12 bp, Artificial Sequence
  Oligonucleotide primer for the detection of SNP TSC0017310
tagtggtttttt

SEQ ID NO: 296862 - DNA, 12 bp, Artificial Sequence
  Oligonucleotide primer for the detection of SNP TSC0017310
tagtggtttttc

SEQ ID NO: 296863 - DNA, 12 bp, Artificial Sequence
  Oligonucleotide primer for the detection of SNP TSC0017310
caataacctccc

SEQ ID NO: 296864 - DNA, 12 bp, Artificial Sequence
  Oligonucleotide primer for the detection of SNP TSC0017310
gagttttggata

SEQ ID NO: 296865 - DNA, 12 bp, Artificial Sequence
  Oligonucleotide primer for the detection of SNP TSC0017311
cccaaccttccc

SEQ ID NO: 296866 - DNA, 12 bp, Artificial Sequence
  Oligonucleotide primer for the detection of SNP TSC0017311
tggtgggggtgg

SEQ ID NO: 296867 - DNA, 12 bp, Artificial Sequence
  Oligonucleotide primer for the detection of SNP TSC0017312
aatccttaaatt

SEQ ID NO: 296868 - DNA, 12 bp, Artificial Sequence
  Oligonucleotide primer for the detection of SNP TSC0017312
agtttgtggatg

SEQ ID NO: 296869 - DNA, 12 bp, Artificial Sequence
  Oligonucleotide primer for the detection of SNP TSC0017313
ttccaatatctt

SEQ ID NO: 296870 - DNA, 12 bp, Artificial Sequence
  Oligonucleotide primer for the detection of SNP TSC0017313
gtttaaaaaata

SEQ ID NO: 296871 - DNA, 12 bp, Artificial Sequence
  Oligonucleotide primer for the detection of SNP TSC0017313
acctaaaaaata

SEQ ID NO: 296872 - DNA, 12 bp, Artificial Sequence
  Oligonucleotide primer for the detection of SNP TSC0017314
atctcactctat

SEQ ID NO: 296873 - DNA, 12 bp, Artificial Sequence
  Oligonucleotide primer for the detection of SNP TSC0017314
ttttagtttggg

SEQ ID NO: 296874 - DNA, 12 bp, Artificial Sequence
  Oligonucleotide primer for the detection of SNP TSC0017314
ctctaacctaaa

SEQ ID NO: 296875 - DNA, 12 bp, Artificial Sequence
  Oligonukleotid-Primer
gttttattttgt

SEQ ID NO: 296876 - DNA, 12 bp, Artificial Sequence
  Oligonucleotide primer for the detection of SNP TSC0017321
tcctcttaaaat

SEQ ID NO: 296877 - DNA, 12 bp, Artificial Sequence
  Oligonucleotide primer for the detection of SNP TSC0017322
acaaaaaaacat

SEQ ID NO: 296878 - DNA, 12 bp, Artificial Sequence
  Oligonucleotide primer for the detection of SNP TSC0017322
aaagatttttaa

SEQ ID NO: 296879 - DNA, 12 bp, Artificial Sequence
  Oligonucleotide primer for the detection of SNP TSC0017326
cccaccaaaatc

SEQ ID NO: 296880 - DNA, 12 bp, Artificial Sequence
  Oligonucleotide primer for the detection of SNP TSC0017326
tttgatggagtg

SEQ ID NO: 296881 - DNA, 12 bp, Artificial Sequence
  Oligonucleotide primer for the detection of SNP TSC0017326
ttcgatggagtg

SEQ ID NO: 296882 - DNA, 12 bp, Artificial Sequence
  Oligonucleotide primer for the detection of SNP TSC0017328
aaaaatattaat

SEQ ID NO: 296883 - DNA, 12 bp, Artificial Sequence
  Oligonukleotid-Primer
ttttcttatatt

SEQ ID NO: 296884 - DNA, 12 bp, Artificial Sequence
  Oligonucleotide primer for the detection of SNP TSC0017329
tttatattaatt

SEQ ID NO: 296885 - DNA, 12 bp, Artificial Sequence
  Oligonucleotide primer for the detection of SNP TSC0017329
cttatattaatt

SEQ ID NO: 296886 - DNA, 12 bp, Artificial Sequence
  Oligonucleotide primer for the detection of SNP TSC0017329
ttttaaaaatat

SEQ ID NO: 296887 - DNA, 12 bp, Artificial Sequence
  Oligonucleotide primer for the detection of SNP TSC0017334
aacataacacct

SEQ ID NO: 296888 - DNA, 12 bp, Artificial Sequence
  Oligonucleotide primer for the detection of SNP TSC0017334
agttgggtggga

SEQ ID NO: 296889 - DNA, 12 bp, Artificial Sequence
  Oligonucleotide primer for the detection of SNP TSC0017336
cccaaaatacta

SEQ ID NO: 296890 - DNA, 12 bp, Artificial Sequence
  Oligonucleotide primer for the detection of SNP TSC0017336
atatttgtaatt

SEQ ID NO: 296891 - DNA, 12 bp, Artificial Sequence
  Oligonukleotid-Primer
atatttgtaatc

SEQ ID NO: 296892 - DNA, 12 bp, Artificial Sequence
  Oligonucleotide primer for the detection of SNP TSC0017336
ttttaaaatgtt

SEQ ID NO: 296893 - DNA, 12 bp, Artificial Sequence
  Oligonucleotide primer for the detection of SNP TSC0017337
accaacataacc

SEQ ID NO: 296894 - DNA, 12 bp, Artificial Sequence
  Oligonucleotide primer for the detection of SNP TSC0017337
ggggttttgtta

SEQ ID NO: 296895 - DNA, 12 bp, Artificial Sequence
  Oligonucleotide primer for the detection of SNP TSC0017337
ggggtttcgtta

SEQ ID NO: 296896 - DNA, 12 bp, Artificial Sequence
  Oligonucleotide primer for the detection of SNP TSC0017338
aaaatttcgcta

SEQ ID NO: 296897 - DNA, 12 bp, Artificial Sequence
  Oligonucleotide primer for the detection of SNP TSC0017338
agtatggttaat

SEQ ID NO: 296898 - DNA, 12 bp, Artificial Sequence
  Oligonucleotide primer for the detection of SNP TSC0017338
caacataaccaa

SEQ ID NO: 296899 - DNA, 12 bp, Artificial Sequence
  Oligonucleotide primer for the detection of SNP TSC0017339
tatataactcaa

SEQ ID NO: 296900 - DNA, 12 bp, Artificial Sequence
  Oligonucleotide primer for the detection of SNP TSC0017339
tgtttttagtaa

SEQ ID NO: 296901 - DNA, 12 bp, Artificial Sequence
  Oligonucleotide primer for the detection of SNP TSC0017339
tatttccaataa

SEQ ID NO: 296902 - DNA, 12 bp, Artificial Sequence
  Oligonucleotide primer for the detection of SNP TSC0017339
tatatagtttag

SEQ ID NO: 296903 - DNA, 12 bp, Artificial Sequence
  Oligonucleotide primer for the detection of SNP TSC0017341
aatatactcccc

SEQ ID NO: 296904 - DNA, 12 bp, Artificial Sequence
  Oligonucleotide primer for the detection of SNP TSC0017341
tgagtggggttg

SEQ ID NO: 296905 - DNA, 12 bp, Artificial Sequence
  Oligonucleotide primer for the detection of SNP TSC0017342
aagcgatttgtt

SEQ ID NO: 296906 - DNA, 12 bp, Artificial Sequence
  Oligonucleotide primer for the detection of SNP TSC0017342
aaacaatctacc

SEQ ID NO: 296907 - DNA, 12 bp, Artificial Sequence
  Oligonucleotide primer for the detection of SNP TSC0017342
aaacgatctacc

SEQ ID NO: 296908 - DNA, 12 bp, Artificial Sequence
  Oligonucleotide primer for the detection of SNP TSC0017344
cctacaaaatac

SEQ ID NO: 296909 - DNA, 12 bp, Artificial Sequence
  Oligonucleotide primer for the detection of SNP TSC0017344
cctacgaaatac

SEQ ID NO: 296910 - DNA, 12 bp, Artificial Sequence
  Oligonucleotide primer for the detection of SNP TSC0017344
ttatattatata

SEQ ID NO: 296911 - DNA, 12 bp, Artificial Sequence
  Oligonucleotide primer for the detection of SNP TSC0017344
ccacaccacata

SEQ ID NO: 296912 - DNA, 12 bp, Artificial Sequence
  Oligonucleotide primer for the detection of SNP TSC0017344
tttgtgaggtat

SEQ ID NO: 296913 - DNA, 12 bp, Artificial Sequence
  Oligonucleotide primer for the detection of SNP TSC0017344
tttgcgaggtat

SEQ ID NO: 296914 - DNA, 12 bp, Artificial Sequence
  Oligonucleotide primer for the detection of SNP TSC0017345
cataccattact

SEQ ID NO: 296915 - DNA, 12 bp, Artificial Sequence
  Oligonucleotide primer for the detection of SNP TSC0017345
ttgtgaaggtga

SEQ ID NO: 296916 - DNA, 12 bp, Artificial Sequence
  Oligonucleotide primer for the detection of SNP TSC0017345
tatgttattgtt

SEQ ID NO: 296917 - DNA, 12 bp, Artificial Sequence
  Oligonucleotide primer for the detection of SNP TSC0017347
aattcacaaacc

SEQ ID NO: 296918 - DNA, 12 bp, Artificial Sequence
  Oligonucleotide primer for the detection of SNP TSC0017347
taaagtgggtaa

SEQ ID NO: 296919 - DNA, 12 bp, Artificial Sequence
  Oligonucleotide primer for the detection of SNP TSC0017347
agtttataggtt

SEQ ID NO: 296920 - DNA, 12 bp, Artificial Sequence
  Oligonucleotide primer for the detection of SNP TSC0017349
cccacaatcatt

SEQ ID NO: 296921 - DNA, 12 bp, Artificial Sequence
  Oligonucleotide primer for the detection of SNP TSC0017349
cccacgatcatt

SEQ ID NO: 296922 - DNA, 12 bp, Artificial Sequence
  Oligonucleotide primer for the detection of SNP TSC0017349
agtgatgggtga

SEQ ID NO: 296923 - DNA, 12 bp, Artificial Sequence
  Oligonucleotide primer for the detection of SNP TSC0017349
aataataaataa

SEQ ID NO: 296924 - DNA, 12 bp, Artificial Sequence
  Oligonucleotide primer for the detection of SNP TSC0017349
tttatggttatt

SEQ ID NO: 296925 - DNA, 12 bp, Artificial Sequence
  Oligonucleotide primer for the detection of SNP TSC0017349
tttacggttatt

SEQ ID NO: 296926 - DNA, 12 bp, Artificial Sequence
  Oligonucleotide primer for the detection of SNP TSC0017350
cctaaacccaac

SEQ ID NO: 296927 - DNA, 12 bp, Artificial Sequence
  Oligonucleotide primer for the detection of SNP TSC0017350
ttgtgggggtgt

SEQ ID NO: 296928 - DNA, 12 bp, Artificial Sequence
  Oligonucleotide primer for the detection of SNP TSC0017350
tcgtgggggtgt

SEQ ID NO: 296929 - DNA, 12 bp, Artificial Sequence
  Oligonucleotide primer for the detection of SNP TSC0017350
ttgtgggggcgt

SEQ ID NO: 296930 - DNA, 12 bp, Artificial Sequence
  Oligonucleotide primer for the detection of SNP TSC0017350
tcgtgggggcgt

SEQ ID NO: 296931 - DNA, 12 bp, Artificial Sequence
  Oligonucleotide primer for the detection of SNP TSC0017350
cataaaaacaca

SEQ ID NO: 296932 - DNA, 12 bp, Artificial Sequence
  Oligonucleotide primer for the detection of SNP TSC0017350
cataaaaacgca

SEQ ID NO: 296933 - DNA, 12 bp, Artificial Sequence
  Oligonucleotide primer for the detection of SNP TSC0017350
cgtaaaaacaca

SEQ ID NO: 296934 - DNA, 12 bp, Artificial Sequence
  Oligonucleotide primer for the detection of SNP TSC0017350
cgtaaaaacgca

SEQ ID NO: 296935 - DNA, 12 bp, Artificial Sequence
  Oligonucleotide primer for the detection of SNP TSC0017350
tttggatttaat

SEQ ID NO: 296936 - DNA, 12 bp, Artificial Sequence
  Oligonucleotide primer for the detection of SNP TSC0017350
tttggatttaac

SEQ ID NO: 296937 - DNA, 12 bp, Artificial Sequence
  Oligonucleotide primer for the detection of SNP TSC0017351
gttgataggatg

SEQ ID NO: 296938 - DNA, 12 bp, Artificial Sequence
  Oligonucleotide primer for the detection of SNP TSC0017351
gtaaggattttt

SEQ ID NO: 296939 - DNA, 12 bp, Artificial Sequence
  Oligonucleotide primer for the detection of SNP TSC0017352
aaaacacaaaac

SEQ ID NO: 296940 - DNA, 12 bp, Artificial Sequence
  Oligonucleotide primer for the detection of SNP TSC0017352
tttgagtttggg

SEQ ID NO: 296941 - DNA, 12 bp, Artificial Sequence
  Oligonucleotide primer for the detection of SNP TSC0017352
ttcgagtttggg

SEQ ID NO: 296942 - DNA, 12 bp, Artificial Sequence
  Oligonucleotide primer for the detection of SNP TSC0017353
aaaaaccttacc

SEQ ID NO: 296943 - DNA, 12 bp, Artificial Sequence
  Oligonucleotide primer for the detection of SNP TSC0017353
ggggagggtgta

SEQ ID NO: 296944 - DNA, 12 bp, Artificial Sequence
  Oligonucleotide primer for the detection of SNP TSC0017354
acaattattttt

SEQ ID NO: 296945 - DNA, 12 bp, Artificial Sequence
  Oligonucleotide primer for the detection of SNP TSC0017354
tctttttttttt

SEQ ID NO: 296946 - DNA, 12 bp, Artificial Sequence
  Oligonucleotide primer for the detection of SNP TSC0017354
gtaattattttt

SEQ ID NO: 296947 - DNA, 12 bp, Artificial Sequence
  Oligonucleotide primer for the detection of SNP TSC0017355
ttcaataccaac

SEQ ID NO: 296948 - DNA, 12 bp, Artificial Sequence
  Oligonucleotide primer for the detection of SNP TSC0017355
gtaggtttttgg

SEQ ID NO: 296949 - DNA, 12 bp, Artificial Sequence
  Oligonucleotide primer for the detection of SNP TSC0017355
gtaggttttcgg

SEQ ID NO: 296950 - DNA, 12 bp, Artificial Sequence
  Oligonucleotide primer for the detection of SNP TSC0017356
aaaaatcaaaac

SEQ ID NO: 296951 - DNA, 12 bp, Artificial Sequence
  Oligonucleotide primer for the detection of SNP TSC0017356
gggggtttaggg

SEQ ID NO: 296952 - DNA, 12 bp, Artificial Sequence
  Oligonucleotide primer for the detection of SNP TSC0017357
ggtttagggatt

SEQ ID NO: 296953 - DNA, 12 bp, Artificial Sequence
  Oligonucleotide primer for the detection of SNP TSC0017357
aacccaaaaact

SEQ ID NO: 296954 - DNA, 12 bp, Artificial Sequence
  Oligonucleotide primer for the detection of SNP TSC0017357
ggaagattagag

SEQ ID NO: 296955 - DNA, 12 bp, Artificial Sequence
  Oligonucleotide primer for the detection of SNP TSC0017363
cttacccctccc

SEQ ID NO: 296956 - DNA, 12 bp, Artificial Sequence
  Oligonucleotide primer for the detection of SNP TSC0017365
aataataacaat

SEQ ID NO: 296957 - DNA, 12 bp, Artificial Sequence
  Oligonucleotide primer for the detection of SNP TSC0017365
tttatgaggtaa

SEQ ID NO: 296958 - DNA, 12 bp, Artificial Sequence
  Oligonucleotide primer for the detection of SNP TSC0017366
ttttcaaaacaa

SEQ ID NO: 296959 - DNA, 12 bp, Artificial Sequence
  Oligonucleotide primer for the detection of SNP TSC0017366
atttgattttat

SEQ ID NO: 296960 - DNA, 12 bp, Artificial Sequence
  Oligonucleotide primer for the detection of SNP TSC0017366
aatctaatccca

SEQ ID NO: 296961 - DNA, 12 bp, Artificial Sequence
  Oligonucleotide primer for the detection of SNP TSC0017366
ttttagaatagt

SEQ ID NO: 296962 - DNA, 12 bp, Artificial Sequence
  Oligonucleotide primer for the detection of SNP TSC0017366
ttttagaatagc

SEQ ID NO: 296963 - DNA, 12 bp, Artificial Sequence
  Oligonucleotide primer for the detection of SNP TSC0017369
tcaataaaactt

SEQ ID NO: 296964 - DNA, 12 bp, Artificial Sequence
  Oligonucleotide primer for the detection of SNP TSC0017369
tcgataaaactt

SEQ ID NO: 296965 - DNA, 12 bp, Artificial Sequence
  Oligonucleotide primer for the detection of SNP TSC0017369
ttaaaattttag

SEQ ID NO: 296966 - DNA, 12 bp, Artificial Sequence
  Oligonucleotide primer for the detection of SNP TSC0017371
ttttgttataaa

SEQ ID NO: 296967 - DNA, 12 bp, Artificial Sequence
  Oligonucleotide primer for the detection of SNP TSC0017372
ccctaaacaaat

SEQ ID NO: 296968 - DNA, 12 bp, Artificial Sequence
  Oligonucleotide primer for the detection of SNP TSC0017372
ggagataatgga

SEQ ID NO: 296969 - DNA, 12 bp, Artificial Sequence
  Oligonucleotide primer for the detection of SNP TSC0017372
ttttgggtagat

SEQ ID NO: 296970 - DNA, 12 bp, Artificial Sequence
  Oligonucleotide primer for the detection of SNP TSC0017373
ataactttccct

SEQ ID NO: 296971 - DNA, 12 bp, Artificial Sequence
  Oligonucleotide primer for the detection of SNP TSC0017373
gtatattttata

SEQ ID NO: 296972 - DNA, 12 bp, Artificial Sequence
  Oligonucleotide primer for the detection of SNP TSC0017376
accaaacctaat

SEQ ID NO: 296973 - DNA, 12 bp, Artificial Sequence
  Oligonucleotide primer for the detection of SNP TSC0017376
ataaatttgtaa

SEQ ID NO: 296974 - DNA, 12 bp, Artificial Sequence
  Oligonucleotide primer for the detection of SNP TSC0017377
catcataaaccc

SEQ ID NO: 296975 - DNA, 12 bp, Artificial Sequence
  Oligonucleotide primer for the detection of SNP TSC0017377
gaaaaaaaagag

SEQ ID NO: 296976 - DNA, 12 bp, Artificial Sequence
  Oligonukleotid-Primer
tattatgaattt

SEQ ID NO: 296977 - DNA, 12 bp, Artificial Sequence
  Oligonucleotide primer for the detection of SNP TSC0017378
ctctctttctct

SEQ ID NO: 296978 - DNA, 12 bp, Artificial Sequence
  Oligonucleotide primer for the detection of SNP TSC0017378
aagagagagaga

SEQ ID NO: 296979 - DNA, 12 bp, Artificial Sequence
  Oligonucleotide primer for the detection of SNP TSC0017379
ggtaatagggtt

SEQ ID NO: 296980 - DNA, 12 bp, Artificial Sequence
  Oligonukleotid-Primer
aaatatagggga

SEQ ID NO: 296981 - DNA, 12 bp, Artificial Sequence
  Oligonucleotide primer for the detection of SNP TSC0017380
atcttcctcatc

SEQ ID NO: 296982 - DNA, 12 bp, Artificial Sequence
  Oligonucleotide primer for the detection of SNP TSC0017380
ttgaataaaata

SEQ ID NO: 296983 - DNA, 12 bp, Artificial Sequence
  Oligonucleotide primer for the detection of SNP TSC0017381
acataaccaaca

SEQ ID NO: 296984 - DNA, 12 bp, Artificial Sequence
  Oligonukleotid-Primer
acataaccaacg

SEQ ID NO: 296985 - DNA, 12 bp, Artificial Sequence
  Oligonucleotide primer for the detection of SNP TSC0017381
cccaacttcccc

SEQ ID NO: 296986 - DNA, 12 bp, Artificial Sequence
  Oligonucleotide primer for the detection of SNP TSC0017381
atatggttagtg

SEQ ID NO: 296987 - DNA, 12 bp, Artificial Sequence
  Oligonucleotide primer for the detection of SNP TSC0017381
atatggttagcg

SEQ ID NO: 296988 - DNA, 12 bp, Artificial Sequence
  Oligonucleotide primer for the detection of SNP TSC0017382
aaattaaccaac

SEQ ID NO: 296989 - DNA, 12 bp, Artificial Sequence
  Oligonucleotide primer for the detection of SNP TSC0017382
aaattaaccgac

SEQ ID NO: 296990 - DNA, 12 bp, Artificial Sequence
  Oligonucleotide primer for the detection of SNP TSC0017382
aagtattttttg

SEQ ID NO: 296991 - DNA, 12 bp, Artificial Sequence
  Oligonucleotide primer for the detection of SNP TSC0017383
tattaattactc

SEQ ID NO: 296992 - DNA, 12 bp, Artificial Sequence
  Oligonucleotide primer for the detection of SNP TSC0017383
tagtatttgtta

SEQ ID NO: 296993 - DNA, 12 bp, Artificial Sequence
  Oligonucleotide primer for the detection of SNP TSC0017384
ataaatctaacc

SEQ ID NO: 296994 - DNA, 12 bp, Artificial Sequence
  Oligonucleotide primer for the detection of SNP TSC0017384
atgtagtgtatt

SEQ ID NO: 296995 - DNA, 12 bp, Artificial Sequence
  Oligonucleotide primer for the detection of SNP TSC0017384
acgtagtgtatt

SEQ ID NO: 296996 - DNA, 12 bp, Artificial Sequence
  Oligonucleotide primer for the detection of SNP TSC0017384
atgtagtgtatc

SEQ ID NO: 296997 - DNA, 12 bp, Artificial Sequence
  Oligonucleotide primer for the detection of SNP TSC0017384
acgtagtgtatc

SEQ ID NO: 296998 - DNA, 12 bp, Artificial Sequence
  Oligonucleotide primer for the detection of SNP TSC0017384
acacaatacacc

SEQ ID NO: 296999 - DNA, 12 bp, Artificial Sequence
  Oligonucleotide primer for the detection of SNP TSC0017384
acgcaatacacc

SEQ ID NO: 297000 - DNA, 12 bp, Artificial Sequence
  Oligonucleotide primer for the detection of SNP TSC0017384
atgaatttggtt

SEQ ID NO: 297001 - DNA, 12 bp, Artificial Sequence
  Oligonucleotide primer for the detection of SNP TSC0017384
atgaatttggtc

SEQ ID NO: 297002 - DNA, 12 bp, Artificial Sequence
  Oligonucleotide primer for the detection of SNP TSC0017385
caaataataact

SEQ ID NO: 297003 - DNA, 12 bp, Artificial Sequence
  Oligonucleotide primer for the detection of SNP TSC0017385
atatggagtagg

SEQ ID NO: 297004 - DNA, 12 bp, Artificial Sequence
  Oligonucleotide primer for the detection of SNP TSC0017386
ttttaccaaaaa

SEQ ID NO: 297005 - DNA, 12 bp, Artificial Sequence
  Oligonucleotide primer for the detection of SNP TSC0017387
atcctaactaac

SEQ ID NO: 297006 - DNA, 12 bp, Artificial Sequence
  Oligonucleotide primer for the detection of SNP TSC0017387
gattaggtttta

SEQ ID NO: 297007 - DNA, 12 bp, Artificial Sequence
  Oligonucleotide primer for the detection of SNP TSC0017387
aaccaaatttca

SEQ ID NO: 297008 - DNA, 12 bp, Artificial Sequence
  Oligonucleotide primer for the detection of SNP TSC0017387
attttggttaat

SEQ ID NO: 297009 - DNA, 12 bp, Artificial Sequence
  Oligonucleotide primer for the detection of SNP TSC0017388
tttctcatcctt

SEQ ID NO: 297010 - DNA, 12 bp, Artificial Sequence
  Oligonucleotide primer for the detection of SNP TSC0017388
tatttgttgtag

SEQ ID NO: 297011 - DNA, 12 bp, Artificial Sequence
  Oligonucleotide primer for the detection of SNP TSC0017388
tacctactataa

SEQ ID NO: 297012 - DNA, 12 bp, Artificial Sequence
  Oligonucleotide primer for the detection of SNP TSC0017389
ataattaattac

SEQ ID NO: 297013 - DNA, 12 bp, Artificial Sequence
  Oligonucleotide primer for the detection of SNP TSC0017389
agtatttgtatg

SEQ ID NO: 297014 - DNA, 12 bp, Artificial Sequence
  Oligonucleotide primer for the detection of SNP TSC0017394
caaaaaaccatt

SEQ ID NO: 297015 - DNA, 12 bp, Artificial Sequence
  Oligonucleotide primer for the detection of SNP TSC0017394
gattggaggaga

SEQ ID NO: 297016 - DNA, 12 bp, Artificial Sequence
  Oligonucleotide primer for the detection of SNP TSC0017395
tcctaactttat

SEQ ID NO: 297017 - DNA, 12 bp, Artificial Sequence
  Oligonucleotide primer for the detection of SNP TSC0017395
aatttgaaggga

SEQ ID NO: 297018 - DNA, 12 bp, Artificial Sequence
  Oligonucleotide primer for the detection of SNP TSC0017396
aacaataactac

SEQ ID NO: 297019 - DNA, 12 bp, Artificial Sequence
  Oligonucleotide primer for the detection of SNP TSC0017396
attggagattgg

SEQ ID NO: 297020 - DNA, 12 bp, Artificial Sequence
  Oligonucleotide primer for the detection of SNP TSC0017396
agtagtagttgt

SEQ ID NO: 297021 - DNA, 12 bp, Artificial Sequence
  Oligonucleotide primer for the detection of SNP TSC0017399
acctacctcttc

SEQ ID NO: 297022 - DNA, 12 bp, Artificial Sequence
  Oligonucleotide primer for the detection of SNP TSC0017399
tttgtatagtgg

SEQ ID NO: 297023 - DNA, 12 bp, Artificial Sequence
  Oligonucleotide primer for the detection of SNP TSC0017399
ttcgtatagtgg

SEQ ID NO: 297024 - DNA, 12 bp, Artificial Sequence
  Oligonucleotide primer for the detection of SNP TSC0017400
tcatcaactatc

SEQ ID NO: 297025 - DNA, 12 bp, Artificial Sequence
  Oligonucleotide primer for the detection of SNP TSC0017400
atattaatatta

SEQ ID NO: 297026 - DNA, 12 bp, Artificial Sequence
  Oligonucleotide primer for the detection of SNP TSC0017401
tattatataact

SEQ ID NO: 297027 - DNA, 12 bp, Artificial Sequence
  Oligonucleotide primer for the detection of SNP TSC0017401
tatttgtgaaga

SEQ ID NO: 297028 - DNA, 12 bp, Artificial Sequence
  Oligonucleotide primer for the detection of SNP TSC0017402
taattttacccc

SEQ ID NO: 297029 - DNA, 12 bp, Artificial Sequence
  Oligonucleotide primer for the detection of SNP TSC0017402
ttagaagatttg

SEQ ID NO: 297030 - DNA, 12 bp, Artificial Sequence
  Oligonucleotide primer for the detection of SNP TSC0017402
ttagaagattcg

SEQ ID NO: 297031 - DNA, 12 bp, Artificial Sequence
  Oligonucleotide primer for the detection of SNP TSC0017402
tcaaaaaatcca

SEQ ID NO: 297032 - DNA, 12 bp, Artificial Sequence
  Oligonucleotide primer for the detection of SNP TSC0017402
tcaaaaaatccg

SEQ ID NO: 297033 - DNA, 12 bp, Artificial Sequence
  Oligonucleotide primer for the detection of SNP TSC0017402
tagttttatttt

SEQ ID NO: 297034 - DNA, 12 bp, Artificial Sequence
  Oligonucleotide primer for the detection of SNP TSC0017407
cacaattcttat

SEQ ID NO: 297035 - DNA, 12 bp, Artificial Sequence
  Oligonucleotide primer for the detection of SNP TSC0017407
cacgattcttat

SEQ ID NO: 297036 - DNA, 12 bp, Artificial Sequence
  Oligonucleotide primer for the detection of SNP TSC0017407
gtagtggtagtg

SEQ ID NO: 297037 - DNA, 12 bp, Artificial Sequence
  Oligonucleotide primer for the detection of SNP TSC0017407
gtagtggtagcg

SEQ ID NO: 297038 - DNA, 12 bp, Artificial Sequence
  Oligonucleotide primer for the detection of SNP TSC0017408
tataaagatagt

SEQ ID NO: 297039 - DNA, 12 bp, Artificial Sequence
  Oligonucleotide primer for the detection of SNP TSC0017408
ccataaaaacaa

SEQ ID NO: 297040 - DNA, 12 bp, Artificial Sequence
  Oligonucleotide primer for the detection of SNP TSC0017408
taggtgaggatt

SEQ ID NO: 297041 - DNA, 12 bp, Artificial Sequence
  Oligonucleotide primer for the detection of SNP TSC0017409
acccccaaattc

SEQ ID NO: 297042 - DNA, 12 bp, Artificial Sequence
  Oligonucleotide primer for the detection of SNP TSC0017409
acccccgaattc

SEQ ID NO: 297043 - DNA, 12 bp, Artificial Sequence
  Oligonucleotide primer for the detection of SNP TSC0017409
ttattgtgttgg

SEQ ID NO: 297044 - DNA, 12 bp, Artificial Sequence
  Oligonucleotide primer for the detection of SNP TSC0017409
ttatcgtgttgg

SEQ ID NO: 297045 - DNA, 12 bp, Artificial Sequence
  Oligonucleotide primer for the detection of SNP TSC0017409
ccatcatactaa

SEQ ID NO: 297046 - DNA, 12 bp, Artificial Sequence
  Oligonucleotide primer for the detection of SNP TSC0017409
ccatcgtactaa

SEQ ID NO: 297047 - DNA, 12 bp, Artificial Sequence
  Oligonucleotide primer for the detection of SNP TSC0017409
attttcgagttt

SEQ ID NO: 297048 - DNA, 12 bp, Artificial Sequence
  Oligonucleotide primer for the detection of SNP TSC0017414
tctacacaaaaa

SEQ ID NO: 297049 - DNA, 12 bp, Artificial Sequence
  Oligonucleotide primer for the detection of SNP TSC0017414
tctacgcaaaaa

SEQ ID NO: 297050 - DNA, 12 bp, Artificial Sequence
  Oligonucleotide primer for the detection of SNP TSC0017414
tattttgatatt

SEQ ID NO: 297051 - DNA, 12 bp, Artificial Sequence
  Oligonucleotide primer for the detection of SNP TSC0017414
cccactttaaca

SEQ ID NO: 297052 - DNA, 12 bp, Artificial Sequence
  Oligonucleotide primer for the detection of SNP TSC0017414
ttatgtagggat

SEQ ID NO: 297053 - DNA, 12 bp, Artificial Sequence
  Oligonucleotide primer for the detection of SNP TSC0017414
ttacgtagggat

SEQ ID NO: 297054 - DNA, 12 bp, Artificial Sequence
  Oligonucleotide primer for the detection of SNP TSC0017415
aatccaacaaac

SEQ ID NO: 297055 - DNA, 12 bp, Artificial Sequence
  Oligonucleotide primer for the detection of SNP TSC0017415
ttttagtatgta

SEQ ID NO: 297056 - DNA, 12 bp, Artificial Sequence
  Oligonucleotide primer for the detection of SNP TSC0017416
tatgtggttagt

SEQ ID NO: 297057 - DNA, 12 bp, Artificial Sequence
  Oligonucleotide primer for the detection of SNP TSC0017416
tacgtggttagt

SEQ ID NO: 297058 - DNA, 12 bp, Artificial Sequence
  Oligonucleotide primer for the detection of SNP TSC0017416
cataactaataa

SEQ ID NO: 297059 - DNA, 12 bp, Artificial Sequence
  Oligonucleotide primer for the detection of SNP TSC0017416
cgtaactaataa

SEQ ID NO: 297060 - DNA, 12 bp, Artificial Sequence
  Oligonucleotide primer for the detection of SNP TSC0017416
taagttgaagag

SEQ ID NO: 297061 - DNA, 12 bp, Artificial Sequence
  Oligonukleotid-Primer
taaccaaataaa

SEQ ID NO: 297062 - DNA, 12 bp, Artificial Sequence
  Oligonucleotide primer for the detection of SNP TSC0017417
taaccgaataaa

SEQ ID NO: 297063 - DNA, 12 bp, Artificial Sequence
  Oligonucleotide primer for the detection of SNP TSC0017417
aggattgtgttt

SEQ ID NO: 297064 - DNA, 12 bp, Artificial Sequence
  Oligonucleotide primer for the detection of SNP TSC0017417
aaaactatatct

SEQ ID NO: 297065 - DNA, 12 bp, Artificial Sequence
  Oligonucleotide primer for the detection of SNP TSC0017417
tggttgagtgga

SEQ ID NO: 297066 - DNA, 12 bp, Artificial Sequence
  Oligonucleotide primer for the detection of SNP TSC0017417
tggtcgagtgga

SEQ ID NO: 297067 - DNA, 12 bp, Artificial Sequence
  Oligonucleotide primer for the detection of SNP TSC0017418
aaaaacgaaacc

SEQ ID NO: 297068 - DNA, 12 bp, Artificial Sequence
  Oligonucleotide primer for the detection of SNP TSC0017418
tgtttgtaagta

SEQ ID NO: 297069 - DNA, 12 bp, Artificial Sequence
  Oligonucleotide primer for the detection of SNP TSC0017418
tatttacaaaca

SEQ ID NO: 297070 - DNA, 12 bp, Artificial Sequence
  Oligonucleotide primer for the detection of SNP TSC0017418
gagagtgggatt

SEQ ID NO: 297071 - DNA, 12 bp, Artificial Sequence
  Oligonucleotide primer for the detection of SNP TSC0017418
gagagcgggatt

SEQ ID NO: 297072 - DNA, 12 bp, Artificial Sequence
  Oligonucleotide primer for the detection of SNP TSC0017418
gagagtgggatc

SEQ ID NO: 297073 - DNA, 12 bp, Artificial Sequence
  Oligonucleotide primer for the detection of SNP TSC0017418
gagagcgggatc

SEQ ID NO: 297074 - DNA, 12 bp, Artificial Sequence
  Oligonucleotide primer for the detection of SNP TSC0017419
caaaaaaatata

SEQ ID NO: 297075 - DNA, 12 bp, Artificial Sequence
  Oligonucleotide primer for the detection of SNP TSC0017419
ttttcgtttgtt

SEQ ID NO: 297076 - DNA, 12 bp, Artificial Sequence
  Oligonucleotide primer for the detection of SNP TSC0017419
tttttgttcgtt

SEQ ID NO: 297077 - DNA, 12 bp, Artificial Sequence
  Oligonucleotide primer for the detection of SNP TSC0017419
ttttcgttcgtt

SEQ ID NO: 297078 - DNA, 12 bp, Artificial Sequence
  Oligonucleotide primer for the detection of SNP TSC0017419
acctctcactca

SEQ ID NO: 297079 - DNA, 12 bp, Artificial Sequence
  Oligonucleotide primer for the detection of SNP TSC0017419
acctctcactcg

SEQ ID NO: 297080 - DNA, 12 bp, Artificial Sequence
  Oligonucleotide primer for the detection of SNP TSC0017419
acctctcgctca

SEQ ID NO: 297081 - DNA, 12 bp, Artificial Sequence
  Oligonucleotide primer for the detection of SNP TSC0017419
gcctctcactca

SEQ ID NO: 297082 - DNA, 12 bp, Artificial Sequence
  Oligonucleotide primer for the detection of SNP TSC0017419
acctctcgctcg

SEQ ID NO: 297083 - DNA, 12 bp, Artificial Sequence
  Oligonucleotide primer for the detection of SNP TSC0017419
gcctctcactcg

SEQ ID NO: 297084 - DNA, 12 bp, Artificial Sequence
  Oligonucleotide primer for the detection of SNP TSC0017419
gcctctcgctca

SEQ ID NO: 297085 - DNA, 12 bp, Artificial Sequence
  Oligonucleotide primer for the detection of SNP TSC0017419
gcctctcgctcg

SEQ ID NO: 297086 - DNA, 12 bp, Artificial Sequence
  Oligonucleotide primer for the detection of SNP TSC0017419
ttaaagggatgt

SEQ ID NO: 297087 - DNA, 12 bp, Artificial Sequence
  Oligonucleotide primer for the detection of SNP TSC0017420
tcttctacctat

SEQ ID NO: 297088 - DNA, 12 bp, Artificial Sequence
  Oligonucleotide primer for the detection of SNP TSC0017420
ttaggaggaaga

SEQ ID NO: 297089 - DNA, 12 bp, Artificial Sequence
  Oligonucleotide primer for the detection of SNP TSC0017420
ttttttgtttgt

SEQ ID NO: 297090 - DNA, 12 bp, Artificial Sequence
  Oligonucleotide primer for the detection of SNP TSC0017421
gtagaagagaat

SEQ ID NO: 297091 - DNA, 12 bp, Artificial Sequence
  Oligonucleotide primer for the detection of SNP TSC0017421
ggagggatggga

SEQ ID NO: 297092 - DNA, 12 bp, Artificial Sequence
  Oligonucleotide primer for the detection of SNP TSC0017422
aatattcccaac

SEQ ID NO: 297093 - DNA, 12 bp, Artificial Sequence
  Oligonucleotide primer for the detection of SNP TSC0017422
aatattcccgac

SEQ ID NO: 297094 - DNA, 12 bp, Artificial Sequence
  Oligonucleotide primer for the detection of SNP TSC0017422
atttagtttaaa

SEQ ID NO: 297095 - DNA, 12 bp, Artificial Sequence
  Oligonucleotide primer for the detection of SNP TSC0017422
attcaacctaaa

SEQ ID NO: 297096 - DNA, 12 bp, Artificial Sequence
  Oligonucleotide primer for the detection of SNP TSC0017422
agtgtttttggt

SEQ ID NO: 297097 - DNA, 12 bp, Artificial Sequence
  Oligonucleotide primer for the detection of SNP TSC0017422
agtgttttcggt

SEQ ID NO: 297098 - DNA, 12 bp, Artificial Sequence
  Oligonucleotide primer for the detection of SNP TSC0017423
actcttaaaaac

SEQ ID NO: 297099 - DNA, 12 bp, Artificial Sequence
  Oligonucleotide primer for the detection of SNP TSC0017423
tttgggaaagta

SEQ ID NO: 297100 - DNA, 12 bp, Artificial Sequence
  Oligonucleotide primer for the detection of SNP TSC0017424
taatttttattg

SEQ ID NO: 297101 - DNA, 12 bp, Artificial Sequence
  Oligonucleotide primer for the detection of SNP TSC0017424
caatttttacta

SEQ ID NO: 297102 - DNA, 12 bp, Artificial Sequence
  Oligonucleotide primer for the detection of SNP TSC0017424
aaaaataaaggt

SEQ ID NO: 297103 - DNA, 12 bp, Artificial Sequence
  Oligonucleotide primer for the detection of SNP TSC0017427
taaaattcctac

SEQ ID NO: 297104 - DNA, 12 bp, Artificial Sequence
  Oligonucleotide primer for the detection of SNP TSC0017427
gagatgaaattt

SEQ ID NO: 297105 - DNA, 12 bp, Artificial Sequence
  Oligonucleotide primer for the detection of SNP TSC0017427
ggggtttttgtt

SEQ ID NO: 297106 - DNA, 12 bp, Artificial Sequence
  Oligonucleotide primer for the detection of SNP TSC0017428
aaccctaaatta

SEQ ID NO: 297107 - DNA, 12 bp, Artificial Sequence
  Oligonucleotide primer for the detection of SNP TSC0017428
agaaataattat

SEQ ID NO: 297108 - DNA, 12 bp, Artificial Sequence
  Oligonucleotide primer for the detection of SNP TSC0017428
agaaataattac

SEQ ID NO: 297109 - DNA, 12 bp, Artificial Sequence
  Oligonucleotide primer for the detection of SNP TSC0017428
aaaaacaaccac

SEQ ID NO: 297110 - DNA, 12 bp, Artificial Sequence
  Oligonucleotide primer for the detection of SNP TSC0017428
agttttggattg

SEQ ID NO: 297111 - DNA, 12 bp, Artificial Sequence
  Oligonucleotide primer for the detection of SNP TSC0017429
aaaaatacttct

SEQ ID NO: 297112 - DNA, 12 bp, Artificial Sequence
  Oligonucleotide primer for the detection of SNP TSC0017429
gttttaattaaa

SEQ ID NO: 297113 - DNA, 12 bp, Artificial Sequence
  Oligonucleotide primer for the detection of SNP TSC0017430
tcctatattccc

SEQ ID NO: 297114 - DNA, 12 bp, Artificial Sequence
  Oligonucleotide primer for the detection of SNP TSC0017430
gagggaataaga

SEQ ID NO: 297115 - DNA, 12 bp, Artificial Sequence
  Oligonucleotide primer for the detection of SNP TSC0017431
actacaacaaaa

SEQ ID NO: 297116 - DNA, 12 bp, Artificial Sequence
  Oligonucleotide primer for the detection of SNP TSC0017431
gtatttttttat

SEQ ID NO: 297117 - DNA, 12 bp, Artificial Sequence
  Oligonucleotide primer for the detection of SNP TSC0017431
tacacctcccca

SEQ ID NO: 297118 - DNA, 12 bp, Artificial Sequence
  Oligonukleotid-Primer
gttgtagtaaag

SEQ ID NO: 297119 - DNA, 12 bp, Artificial Sequence
  Oligonucleotide primer for the detection of SNP TSC0017432
aaataaaaaaac

SEQ ID NO: 297120 - DNA, 12 bp, Artificial Sequence
  Oligonucleotide primer for the detection of SNP TSC0017432
ttgggattagag

SEQ ID NO: 297121 - DNA, 12 bp, Artificial Sequence
  Oligonucleotide primer for the detection of SNP TSC0017434
ataaaaattccc

SEQ ID NO: 297122 - DNA, 12 bp, Artificial Sequence
  Oligonukleotid-Primer
ataaaatgaggg

SEQ ID NO: 297123 - DNA, 12 bp, Artificial Sequence
  Oligonucleotide primer for the detection of SNP TSC0017435
tataaaactaac

SEQ ID NO: 297124 - DNA, 12 bp, Artificial Sequence
  Oligonucleotide primer for the detection of SNP TSC0017435
tatatttttgtg

SEQ ID NO: 297125 - DNA, 12 bp, Artificial Sequence
  Oligonucleotide primer for the detection of SNP TSC0017435
acatttctataa

SEQ ID NO: 297126 - DNA, 12 bp, Artificial Sequence
  Oligonucleotide primer for the detection of SNP TSC0017435
tataaaattgat

SEQ ID NO: 297127 - DNA, 12 bp, Artificial Sequence
  Oligonucleotide primer for the detection of SNP TSC0017435
tataaaattgac

SEQ ID NO: 297128 - DNA, 12 bp, Artificial Sequence
  Oligonucleotide primer for the detection of SNP TSC0017438
accaacaacaaa

SEQ ID NO: 297129 - DNA, 12 bp, Artificial Sequence
  Oligonucleotide primer for the detection of SNP TSC0017438
accaacaacgaa

SEQ ID NO: 297130 - DNA, 12 bp, Artificial Sequence
  Oligonucleotide primer for the detection of SNP TSC0017438
accgacaacaaa

SEQ ID NO: 297131 - DNA, 12 bp, Artificial Sequence
  Oligonucleotide primer for the detection of SNP TSC0017438
accgacaacgaa

SEQ ID NO: 297132 - DNA, 12 bp, Artificial Sequence
  Oligonucleotide primer for the detection of SNP TSC0017438
acctctctaccc

SEQ ID NO: 297133 - DNA, 12 bp, Artificial Sequence
  Oligonucleotide primer for the detection of SNP TSC0017438
gttggtagtgga

SEQ ID NO: 297134 - DNA, 12 bp, Artificial Sequence
  Oligonucleotide primer for the detection of SNP TSC0017438
gtcggtagtgga

SEQ ID NO: 297135 - DNA, 12 bp, Artificial Sequence
  Oligonucleotide primer for the detection of SNP TSC0017438
gttggtagcgga

SEQ ID NO: 297136 - DNA, 12 bp, Artificial Sequence
  Oligonucleotide primer for the detection of SNP TSC0017438
gtcggtagcgga

SEQ ID NO: 297137 - DNA, 12 bp, Artificial Sequence
  Oligonucleotide primer for the detection of SNP TSC0017440
taaacaaacact

SEQ ID NO: 297138 - DNA, 12 bp, Artificial Sequence
  Oligonucleotide primer for the detection of SNP TSC0017440
taaacaaacgct

SEQ ID NO: 297139 - DNA, 12 bp, Artificial Sequence
  Oligonucleotide primer for the detection of SNP TSC0017440
tacttccacata

SEQ ID NO: 297140 - DNA, 12 bp, Artificial Sequence
  Oligonucleotide primer for the detection of SNP TSC0017440
tgggtaggtgtt

SEQ ID NO: 297141 - DNA, 12 bp, Artificial Sequence
  Oligonucleotide primer for the detection of SNP TSC0017440
tgggtaggcgtt

SEQ ID NO: 297142 - DNA, 12 bp, Artificial Sequence
  Oligonucleotide primer for the detection of SNP TSC0017443
tagaagattgga

SEQ ID NO: 297143 - DNA, 12 bp, Artificial Sequence
  Oligonucleotide primer for the detection of SNP TSC0017455
aacctcctacct

SEQ ID NO: 297144 - DNA, 12 bp, Artificial Sequence
  Oligonucleotide primer for the detection of SNP TSC0017455
ttggttgttaga

SEQ ID NO: 297145 - DNA, 12 bp, Artificial Sequence
  Oligonucleotide primer for the detection of SNP TSC0017456
cctcctacctct

SEQ ID NO: 297146 - DNA, 12 bp, Artificial Sequence
  Oligonucleotide primer for the detection of SNP TSC0017456
tattggttgtta

SEQ ID NO: 297147 - DNA, 12 bp, Artificial Sequence
  Oligonucleotide primer for the detection of SNP TSC0017457
acaacacaaaac

SEQ ID NO: 297148 - DNA, 12 bp, Artificial Sequence
  Oligonucleotide primer for the detection of SNP TSC0017457
ttatagtttaag

SEQ ID NO: 297149 - DNA, 12 bp, Artificial Sequence
  Oligonucleotide primer for the detection of SNP TSC0017457
ttacaatccaaa

SEQ ID NO: 297150 - DNA, 12 bp, Artificial Sequence
  Oligonucleotide primer for the detection of SNP TSC0017457
ataatatagaat

SEQ ID NO: 297151 - DNA, 12 bp, Artificial Sequence
  Oligonucleotide primer for the detection of SNP TSC0017458
aaaaaccaaata

SEQ ID NO: 297152 - DNA, 12 bp, Artificial Sequence
  Oligonucleotide primer for the detection of SNP TSC0017458
taatataatttt

SEQ ID NO: 297153 - DNA, 12 bp, Artificial Sequence
  Oligonucleotide primer for the detection of SNP TSC0017458
tctcaacacaac

SEQ ID NO: 297154 - DNA, 12 bp, Artificial Sequence
  Oligonucleotide primer for the detection of SNP TSC0017458
aagggttagatg

SEQ ID NO: 297155 - DNA, 12 bp, Artificial Sequence
  Oligonucleotide primer for the detection of SNP TSC0017459
tatttatacaac

SEQ ID NO: 297156 - DNA, 12 bp, Artificial Sequence
  Oligonucleotide primer for the detection of SNP TSC0017459
ataagtgagggt

SEQ ID NO: 297157 - DNA, 12 bp, Artificial Sequence
  Oligonucleotide primer for the detection of SNP TSC0017459
acaaataaaaac

SEQ ID NO: 297158 - DNA, 12 bp, Artificial Sequence
  Oligonucleotide primer for the detection of SNP TSC0017459
tgtttatgtaat

SEQ ID NO: 297159 - DNA, 12 bp, Artificial Sequence
  Oligonucleotide primer for the detection of SNP TSC0017460
cacttaaaaaaa

SEQ ID NO: 297160 - DNA, 12 bp, Artificial Sequence
  Oligonucleotide primer for the detection of SNP TSC0017460
tatatattgtgt

SEQ ID NO: 297161 - DNA, 12 bp, Artificial Sequence
  Oligonucleotide primer for the detection of SNP TSC0017460
cacacactatac

SEQ ID NO: 297162 - DNA, 12 bp, Artificial Sequence
  Oligonucleotide primer for the detection of SNP TSC0017460
tttggagaagtt

SEQ ID NO: 297163 - DNA, 12 bp, Artificial Sequence
  Oligonucleotide primer for the detection of SNP TSC0017460
tttggagaagtc

SEQ ID NO: 297164 - DNA, 12 bp, Artificial Sequence
  Oligonucleotide primer for the detection of SNP TSC0017468
ccaaacttactc

SEQ ID NO: 297165 - DNA, 12 bp, Artificial Sequence
  Oligonucleotide primer for the detection of SNP TSC0017468
aaaggaggatta

SEQ ID NO: 297166 - DNA, 12 bp, Artificial Sequence
  Oligonucleotide primer for the detection of SNP TSC0017469
tagttaagtttt

SEQ ID NO: 297167 - DNA, 12 bp, Artificial Sequence
  Oligonucleotide primer for the detection of SNP TSC0017469
caaccaaaccct

SEQ ID NO: 297168 - DNA, 12 bp, Artificial Sequence
  Oligonucleotide primer for the detection of SNP TSC0017469
gaaattaaggta

SEQ ID NO: 297169 - DNA, 12 bp, Artificial Sequence
  Oligonucleotide primer for the detection of SNP TSC0017470
atccaatacatc

SEQ ID NO: 297170 - DNA, 12 bp, Artificial Sequence
  Oligonucleotide primer for the detection of SNP TSC0017470
attaatggaagg

SEQ ID NO: 297171 - DNA, 12 bp, Artificial Sequence
  Oligonucleotide primer for the detection of SNP TSC0017470
attaacggaagg

SEQ ID NO: 297172 - DNA, 12 bp, Artificial Sequence
  Oligonucleotide primer for the detection of SNP TSC0017471
attttatgttgt

SEQ ID NO: 297173 - DNA, 12 bp, Artificial Sequence
  Oligonucleotide primer for the detection of SNP TSC0017471
attttacgttgt

SEQ ID NO: 297174 - DNA, 12 bp, Artificial Sequence
  Oligonucleotide primer for the detection of SNP TSC0017471
attccacactat

SEQ ID NO: 297175 - DNA, 12 bp, Artificial Sequence
  Oligonucleotide primer for the detection of SNP TSC0017471
attccacgctat

SEQ ID NO: 297176 - DNA, 12 bp, Artificial Sequence
  Oligonucleotide primer for the detection of SNP TSC0017471
gggggaaggttg

SEQ ID NO: 297177 - DNA, 12 bp, Artificial Sequence
  Oligonucleotide primer for the detection of SNP TSC0017472
acaaacacaaca

SEQ ID NO: 297178 - DNA, 12 bp, Artificial Sequence
  Oligonucleotide primer for the detection of SNP TSC0017472
agtattgtgttt

SEQ ID NO: 297179 - DNA, 12 bp, Artificial Sequence
  Oligonucleotide primer for the detection of SNP TSC0017472
aacactataccc

SEQ ID NO: 297180 - DNA, 12 bp, Artificial Sequence
  Oligonucleotide primer for the detection of SNP TSC0017472
ataggtatagta

SEQ ID NO: 297181 - DNA, 12 bp, Artificial Sequence
  Oligonucleotide primer for the detection of SNP TSC0017473
tctccaccccct

SEQ ID NO: 297182 - DNA, 12 bp, Artificial Sequence
  Oligonucleotide primer for the detection of SNP TSC0017473
tctccgccccct

SEQ ID NO: 297183 - DNA, 12 bp, Artificial Sequence
  Oligonucleotide primer for the detection of SNP TSC0017473
taaggaaggata

SEQ ID NO: 297184 - DNA, 12 bp, Artificial Sequence
  Oligonucleotide primer for the detection of SNP TSC0017474
ataaaaaacaat

SEQ ID NO: 297185 - DNA, 12 bp, Artificial Sequence
  Oligonucleotide primer for the detection of SNP TSC0017474
gtaaaaaacaat

SEQ ID NO: 297186 - DNA, 12 bp, Artificial Sequence
  Oligonucleotide primer for the detection of SNP TSC0017474
tgttttaggtat

SEQ ID NO: 297187 - DNA, 12 bp, Artificial Sequence
  Oligonucleotide primer for the detection of SNP TSC0017474
tacctcaaatat

SEQ ID NO: 297188 - DNA, 12 bp, Artificial Sequence
  Oligonucleotide primer for the detection of SNP TSC0017474
gtggaaagtagt

SEQ ID NO: 297189 - DNA, 12 bp, Artificial Sequence
  Oligonucleotide primer for the detection of SNP TSC0017475
tcccaaactctt

SEQ ID NO: 297190 - DNA, 12 bp, Artificial Sequence
  Oligonucleotide primer for the detection of SNP TSC0017475
gtgttaggagtt

SEQ ID NO: 297191 - DNA, 12 bp, Artificial Sequence
  Oligonukleotid-Primer
atatcaaaaact

SEQ ID NO: 297192 - DNA, 12 bp, Artificial Sequence
  Oligonucleotide primer for the detection of SNP TSC0017475
ttttagattttt

SEQ ID NO: 297193 - DNA, 12 bp, Artificial Sequence
  Oligonucleotide primer for the detection of SNP TSC0017476
aaaccaaaaaac

SEQ ID NO: 297194 - DNA, 12 bp, Artificial Sequence
  Oligonucleotide primer for the detection of SNP TSC0017476
tccattcattaa

SEQ ID NO: 297195 - DNA, 12 bp, Artificial Sequence
  Oligonucleotide primer for the detection of SNP TSC0017476
agattagaaggt

SEQ ID NO: 297196 - DNA, 12 bp, Artificial Sequence
  Oligonucleotide primer for the detection of SNP TSC0017477
cacctatataat

SEQ ID NO: 297197 - DNA, 12 bp, Artificial Sequence
  Oligonucleotide primer for the detection of SNP TSC0017477
aaatttttgtta

SEQ ID NO: 297198 - DNA, 12 bp, Artificial Sequence
  Oligonucleotide primer for the detection of SNP TSC0017481
caaatcacctca

SEQ ID NO: 297199 - DNA, 12 bp, Artificial Sequence
  Oligonucleotide primer for the detection of SNP TSC0017481
ttgaaatttttt

SEQ ID NO: 297200 - DNA, 12 bp, Artificial Sequence
  Oligonucleotide primer for the detection of SNP TSC0017482
taactattctac

SEQ ID NO: 297201 - DNA, 12 bp, Artificial Sequence
  Oligonucleotide primer for the detection of SNP TSC0017482
tggtatggttga

SEQ ID NO: 297202 - DNA, 12 bp, Artificial Sequence
  Oligonucleotide primer for the detection of SNP TSC0017482
cggtatggttga

SEQ ID NO: 297203 - DNA, 12 bp, Artificial Sequence
  Oligonucleotide primer for the detection of SNP TSC0017482
caatataactaa

SEQ ID NO: 297204 - DNA, 12 bp, Artificial Sequence
  Oligonucleotide primer for the detection of SNP TSC0017482
cgatataactaa

SEQ ID NO: 297205 - DNA, 12 bp, Artificial Sequence
  Oligonucleotide primer for the detection of SNP TSC0017482
tgattattttat

SEQ ID NO: 297206 - DNA, 12 bp, Artificial Sequence
  Oligonucleotide primer for the detection of SNP TSC0017483
tatgaggtattt

SEQ ID NO: 297207 - DNA, 12 bp, Artificial Sequence
  Oligonucleotide primer for the detection of SNP TSC0017483
cataaaacatcc

SEQ ID NO: 297208 - DNA, 12 bp, Artificial Sequence
  Oligonucleotide primer for the detection of SNP TSC0017483
ggggaatgagag

SEQ ID NO: 297209 - DNA, 12 bp, Artificial Sequence
  Oligonucleotide primer for the detection of SNP TSC0017484
caaaaaatttaa

SEQ ID NO: 297210 - DNA, 12 bp, Artificial Sequence
  Oligonucleotide primer for the detection of SNP TSC0017484
gaggtttttggt

SEQ ID NO: 297211 - DNA, 12 bp, Artificial Sequence
  Oligonucleotide primer for the detection of SNP TSC0017484
aaaatccctaac

SEQ ID NO: 297212 - DNA, 12 bp, Artificial Sequence
  Oligonucleotide primer for the detection of SNP TSC0017484
tagagggtttgg

SEQ ID NO: 297213 - DNA, 12 bp, Artificial Sequence
  Oligonucleotide primer for the detection of SNP TSC0017487
taacattttttt

SEQ ID NO: 297214 - DNA, 12 bp, Artificial Sequence
  Oligonucleotide primer for the detection of SNP TSC0017487
tggtattttttt

SEQ ID NO: 297215 - DNA, 12 bp, Artificial Sequence
  Oligonucleotide primer for the detection of SNP TSC0017488
ttaaccttcttc

SEQ ID NO: 297216 - DNA, 12 bp, Artificial Sequence
  Oligonucleotide primer for the detection of SNP TSC0017488
gtatggtaagtg

SEQ ID NO: 297217 - DNA, 12 bp, Artificial Sequence
  Oligonucleotide primer for the detection of SNP TSC0017489
aacaaccaccca

SEQ ID NO: 297218 - DNA, 12 bp, Artificial Sequence
  Oligonucleotide primer for the detection of SNP TSC0017489
aacaaccacccg

SEQ ID NO: 297219 - DNA, 12 bp, Artificial Sequence
  Oligonucleotide primer for the detection of SNP TSC0017489
aacaaccgccca

SEQ ID NO: 297220 - DNA, 12 bp, Artificial Sequence
  Oligonucleotide primer for the detection of SNP TSC0017489
aacaaccgcccg

SEQ ID NO: 297221 - DNA, 12 bp, Artificial Sequence
  Oligonucleotide primer for the detection of SNP TSC0017489
ttggttgggtgt

SEQ ID NO: 297222 - DNA, 12 bp, Artificial Sequence
  Oligonucleotide primer for the detection of SNP TSC0017489
ttggtcgggtgt

SEQ ID NO: 297223 - DNA, 12 bp, Artificial Sequence
  Oligonucleotide primer for the detection of SNP TSC0017489
ttggttgggcgt

SEQ ID NO: 297224 - DNA, 12 bp, Artificial Sequence
  Oligonucleotide primer for the detection of SNP TSC0017489
ttggttgggtgc

SEQ ID NO: 297225 - DNA, 12 bp, Artificial Sequence
  Oligonucleotide primer for the detection of SNP TSC0017489
ttggtcgggcgt

SEQ ID NO: 297226 - DNA, 12 bp, Artificial Sequence
  Oligonucleotide primer for the detection of SNP TSC0017489
ttggtcgggtgc

SEQ ID NO: 297227 - DNA, 12 bp, Artificial Sequence
  Oligonucleotide primer for the detection of SNP TSC0017489
ttggttgggcgc

SEQ ID NO: 297228 - DNA, 12 bp, Artificial Sequence
  Oligonucleotide primer for the detection of SNP TSC0017489
ttggtcgggcgc

SEQ ID NO: 297229 - DNA, 12 bp, Artificial Sequence
  Oligonucleotide primer for the detection of SNP TSC0017489
ctaaccaaacgc

SEQ ID NO: 297230 - DNA, 12 bp, Artificial Sequence
  Oligonucleotide primer for the detection of SNP TSC0017489
ctaaccgaacgc

SEQ ID NO: 297231 - DNA, 12 bp, Artificial Sequence
  Oligonucleotide primer for the detection of SNP TSC0017489
agtaattgtttg

SEQ ID NO: 297232 - DNA, 12 bp, Artificial Sequence
  Oligonucleotide primer for the detection of SNP TSC0017489
agtaatcgtttg

SEQ ID NO: 297233 - DNA, 12 bp, Artificial Sequence
  Oligonucleotide primer for the detection of SNP TSC0017489
agtaattgttcg

SEQ ID NO: 297234 - DNA, 12 bp, Artificial Sequence
  Oligonucleotide primer for the detection of SNP TSC0017489
agtaatcgttcg

SEQ ID NO: 297235 - DNA, 12 bp, Artificial Sequence
  Oligonucleotide primer for the detection of SNP TSC0017490
tacaaaataaat

SEQ ID NO: 297236 - DNA, 12 bp, Artificial Sequence
  Oligonucleotide primer for the detection of SNP TSC0017490
gtaagtaattga

SEQ ID NO: 297237 - DNA, 12 bp, Artificial Sequence
  Oligonucleotide primer for the detection of SNP TSC0017490
acaaataactaa

SEQ ID NO: 297238 - DNA, 12 bp, Artificial Sequence
  Oligonucleotide primer for the detection of SNP TSC0017490
tataaagtaggt

SEQ ID NO: 297239 - DNA, 12 bp, Artificial Sequence
  Oligonucleotide primer for the detection of SNP TSC0017491
cgcctataatcc

SEQ ID NO: 297240 - DNA, 12 bp, Artificial Sequence
  Oligonucleotide primer for the detection of SNP TSC0017491
ttttttaagtag

SEQ ID NO: 297241 - DNA, 12 bp, Artificial Sequence
  Oligonucleotide primer for the detection of SNP TSC0017492
ataaactataac

SEQ ID NO: 297242 - DNA, 12 bp, Artificial Sequence
  Oligonucleotide primer for the detection of SNP TSC0017492
gtttgaagggag

SEQ ID NO: 297243 - DNA, 12 bp, Artificial Sequence
  Oligonucleotide primer for the detection of SNP TSC0017494
aattattttaaa

SEQ ID NO: 297244 - DNA, 12 bp, Artificial Sequence
  Oligonucleotide primer for the detection of SNP TSC0017494
aatatattaaat

SEQ ID NO: 297245 - DNA, 12 bp, Artificial Sequence
  Oligonucleotide primer for the detection of SNP TSC0017494
atatactaaata

SEQ ID NO: 297246 - DNA, 12 bp, Artificial Sequence
  Oligonucleotide primer for the detection of SNP TSC0017494
aattattttgga

SEQ ID NO: 297247 - DNA, 12 bp, Artificial Sequence
  Oligonucleotide primer for the detection of SNP TSC0017495
taccaacaacca

SEQ ID NO: 297248 - DNA, 12 bp, Artificial Sequence
  Oligonucleotide primer for the detection of SNP TSC0017495
aaagatttgagg

SEQ ID NO: 297249 - DNA, 12 bp, Artificial Sequence
  Oligonucleotide primer for the detection of SNP TSC0017495
tgttaatagtta

SEQ ID NO: 297250 - DNA, 12 bp, Artificial Sequence
  Oligonucleotide primer for the detection of SNP TSC0017496
atattcaacaat

SEQ ID NO: 297251 - DNA, 12 bp, Artificial Sequence
  Oligonucleotide primer for the detection of SNP TSC0017496
ggaagagtagag

SEQ ID NO: 297252 - DNA, 12 bp, Artificial Sequence
  Oligonucleotide primer for the detection of SNP TSC0017499
acaaaaaccacc

SEQ ID NO: 297253 - DNA, 12 bp, Artificial Sequence
  Oligonucleotide primer for the detection of SNP TSC0017499
acaaaaaccgcc

SEQ ID NO: 297254 - DNA, 12 bp, Artificial Sequence
  Oligonucleotide primer for the detection of SNP TSC0017499
tgggttttgtgt

SEQ ID NO: 297255 - DNA, 12 bp, Artificial Sequence
  Oligonucleotide primer for the detection of SNP TSC0017499
cgggttttgtgt

SEQ ID NO: 297256 - DNA, 12 bp, Artificial Sequence
  Oligonukleotid-Primer
tgggttttgcgt

SEQ ID NO: 297257 - DNA, 12 bp, Artificial Sequence
  Oligonucleotide primer for the detection of SNP TSC0017499
cgggttttgcgt

SEQ ID NO: 297258 - DNA, 12 bp, Artificial Sequence
  Oligonucleotide primer for the detection of SNP TSC0017499
aaccttacacaa

SEQ ID NO: 297259 - DNA, 12 bp, Artificial Sequence
  Oligonucleotide primer for the detection of SNP TSC0017499
aaccttacgcaa

SEQ ID NO: 297260 - DNA, 12 bp, Artificial Sequence
  Oligonucleotide primer for the detection of SNP TSC0017499
gtaaaggttgtt

SEQ ID NO: 297261 - DNA, 12 bp, Artificial Sequence
  Oligonucleotide primer for the detection of SNP TSC0017499
gtaaaggtcgtt

SEQ ID NO: 297262 - DNA, 12 bp, Artificial Sequence
  Oligonucleotide primer for the detection of SNP TSC0017499
gtaaaggttgtc

SEQ ID NO: 297263 - DNA, 12 bp, Artificial Sequence
  Oligonucleotide primer for the detection of SNP TSC0017499
gtaaaggtcgtc

SEQ ID NO: 297264 - DNA, 12 bp, Artificial Sequence
  Oligonucleotide primer for the detection of SNP TSC0017500
aaactaactatc

SEQ ID NO: 297265 - DNA, 12 bp, Artificial Sequence
  Oligonucleotide primer for the detection of SNP TSC0017500
gggagttggatg

SEQ ID NO: 297266 - DNA, 12 bp, Artificial Sequence
  Oligonucleotide primer for the detection of SNP TSC0017501
ttctacaaaaca

SEQ ID NO: 297267 - DNA, 12 bp, Artificial Sequence
  Oligonucleotide primer for the detection of SNP TSC0017501
ttgttttgttta

SEQ ID NO: 297268 - DNA, 12 bp, Artificial Sequence
  Oligonucleotide primer for the detection of SNP TSC0017501
ctaccctattca

SEQ ID NO: 297269 - DNA, 12 bp, Artificial Sequence
  Oligonucleotide primer for the detection of SNP TSC0017501
ttttataggata

SEQ ID NO: 297270 - DNA, 12 bp, Artificial Sequence
  Oligonucleotide primer for the detection of SNP TSC0017502
acaataacaacc

SEQ ID NO: 297271 - DNA, 12 bp, Artificial Sequence
  Oligonucleotide primer for the detection of SNP TSC0017502
acgataacaacc

SEQ ID NO: 297272 - DNA, 12 bp, Artificial Sequence
  Oligonucleotide primer for the detection of SNP TSC0017502
ttagtgtttggg

SEQ ID NO: 297273 - DNA, 12 bp, Artificial Sequence
  Oligonucleotide primer for the detection of SNP TSC0017502
ttagcgtttggg

SEQ ID NO: 297274 - DNA, 12 bp, Artificial Sequence
  Oligonucleotide primer for the detection of SNP TSC0017502
ttagtgttcggg

SEQ ID NO: 297275 - DNA, 12 bp, Artificial Sequence
  Oligonucleotide primer for the detection of SNP TSC0017502
ttagcgttcggg

SEQ ID NO: 297276 - DNA, 12 bp, Artificial Sequence
  Oligonucleotide primer for the detection of SNP TSC0017502
tcaacacccaaa

SEQ ID NO: 297277 - DNA, 12 bp, Artificial Sequence
  Oligonucleotide primer for the detection of SNP TSC0017502
tcaacacccgaa

SEQ ID NO: 297278 - DNA, 12 bp, Artificial Sequence
  Oligonucleotide primer for the detection of SNP TSC0017502
tcaacgcccaaa

SEQ ID NO: 297279 - DNA, 12 bp, Artificial Sequence
  Oligonucleotide primer for the detection of SNP TSC0017502
tcaacgcccgaa

SEQ ID NO: 297280 - DNA, 12 bp, Artificial Sequence
  Oligonucleotide primer for the detection of SNP TSC0017502
atggtgatagtt

SEQ ID NO: 297281 - DNA, 12 bp, Artificial Sequence
  Oligonucleotide primer for the detection of SNP TSC0017502
acggtgatagtt

SEQ ID NO: 297282 - DNA, 12 bp, Artificial Sequence
  Oligonucleotide primer for the detection of SNP TSC0017503
taaccatttaat

SEQ ID NO: 297283 - DNA, 12 bp, Artificial Sequence
  Oligonucleotide primer for the detection of SNP TSC0017503
atatattaaatg

SEQ ID NO: 297284 - DNA, 12 bp, Artificial Sequence
  Oligonucleotide primer for the detection of SNP TSC0017504
taacttatccca

SEQ ID NO: 297285 - DNA, 12 bp, Artificial Sequence
  Oligonucleotide primer for the detection of SNP TSC0017504
aagaggattagg

SEQ ID NO: 297286 - DNA, 12 bp, Artificial Sequence
  Oligonucleotide primer for the detection of SNP TSC0017504
gtggtttgtttt

SEQ ID NO: 297287 - DNA, 12 bp, Artificial Sequence
  Oligonucleotide primer for the detection of SNP TSC0017505
attaatttccta

SEQ ID NO: 297288 - DNA, 12 bp, Artificial Sequence
  Oligonucleotide primer for the detection of SNP TSC0017505
aaaatcctaaat

SEQ ID NO: 297289 - DNA, 12 bp, Artificial Sequence
  Oligonucleotide primer for the detection of SNP TSC0017506
taaaaaattaac

SEQ ID NO: 297290 - DNA, 12 bp, Artificial Sequence
  Oligonucleotide primer for the detection of SNP TSC0017508
acaatacccatt

SEQ ID NO: 297291 - DNA, 12 bp, Artificial Sequence
  Oligonucleotide primer for the detection of SNP TSC0017508
attaatttttaa

SEQ ID NO: 297292 - DNA, 12 bp, Artificial Sequence
  Oligonucleotide primer for the detection of SNP TSC0017508
accaacccttaa

SEQ ID NO: 297293 - DNA, 12 bp, Artificial Sequence
  Oligonucleotide primer for the detection of SNP TSC0017508
atagtatttatt

SEQ ID NO: 297294 - DNA, 12 bp, Artificial Sequence
  Oligonucleotide primer for the detection of SNP TSC0017509
ataaacaaacca

SEQ ID NO: 297295 - DNA, 12 bp, Artificial Sequence
  Oligonucleotide primer for the detection of SNP TSC0017509
ataaacgaacca

SEQ ID NO: 297296 - DNA, 12 bp, Artificial Sequence
  Oligonucleotide primer for the detection of SNP TSC0017509
ttggatgtggtt

SEQ ID NO: 297297 - DNA, 12 bp, Artificial Sequence
  Oligonucleotide primer for the detection of SNP TSC0017509
ctaaatataatt

SEQ ID NO: 297298 - DNA, 12 bp, Artificial Sequence
  Oligonucleotide primer for the detection of SNP TSC0017509
gtgggtgagtta

SEQ ID NO: 297299 - DNA, 12 bp, Artificial Sequence
  Oligonucleotide primer for the detection of SNP TSC0017509
gtgggcgagtta

SEQ ID NO: 297300 - DNA, 12 bp, Artificial Sequence
  Oligonucleotide primer for the detection of SNP TSC0017511
aacgaaataaaa

SEQ ID NO: 297301 - DNA, 12 bp, Artificial Sequence
  Oligonucleotide primer for the detection of SNP TSC0017511
gtttgatatggg

SEQ ID NO: 297302 - DNA, 12 bp, Artificial Sequence
  Oligonucleotide primer for the detection of SNP TSC0017511
gtttgatacggg

SEQ ID NO: 297303 - DNA, 12 bp, Artificial Sequence
  Oligonucleotide primer for the detection of SNP TSC0017511
atttaatacaaa

SEQ ID NO: 297304 - DNA, 12 bp, Artificial Sequence
  Oligonucleotide primer for the detection of SNP TSC0017511
atttaatacgaa

SEQ ID NO: 297305 - DNA, 12 bp, Artificial Sequence
  Oligonucleotide primer for the detection of SNP TSC0017511
gatggagtgaga

SEQ ID NO: 297306 - DNA, 12 bp, Artificial Sequence
  Oligonucleotide primer for the detection of SNP TSC0017511
gacggagtgaga

SEQ ID NO: 297307 - DNA, 12 bp, Artificial Sequence
  Oligonucleotide primer for the detection of SNP TSC0017514
ttataccactac

SEQ ID NO: 297308 - DNA, 12 bp, Artificial Sequence
  Oligonucleotide primer for the detection of SNP TSC0017515
aacatataaaaa

SEQ ID NO: 297309 - DNA, 12 bp, Artificial Sequence
  Oligonucleotide primer for the detection of SNP TSC0017515
cattttttcttc

SEQ ID NO: 297310 - DNA, 12 bp, Artificial Sequence
  Oligonucleotide primer for the detection of SNP TSC0017515
aatatgtagaga

SEQ ID NO: 297311 - DNA, 12 bp, Artificial Sequence
  Oligonucleotide primer for the detection of SNP TSC0017517
aaacacctattt

SEQ ID NO: 297312 - DNA, 12 bp, Artificial Sequence
  Oligonucleotide primer for the detection of SNP TSC0017517
aaacgcctattt

SEQ ID NO: 297313 - DNA, 12 bp, Artificial Sequence
  Oligonucleotide primer for the detection of SNP TSC0017517
atgaaggttgtg

SEQ ID NO: 297314 - DNA, 12 bp, Artificial Sequence
  Oligonucleotide primer for the detection of SNP TSC0017517
acgaaggttgtg

SEQ ID NO: 297315 - DNA, 12 bp, Artificial Sequence
  Oligonucleotide primer for the detection of SNP TSC0017519
atctataactcc

SEQ ID NO: 297316 - DNA, 12 bp, Artificial Sequence
  Oligonucleotide primer for the detection of SNP TSC0017519
tttaattataag

SEQ ID NO: 297317 - DNA, 12 bp, Artificial Sequence
  Oligonucleotide primer for the detection of SNP TSC0017521
ccaaacaaatct

SEQ ID NO: 297318 - DNA, 12 bp, Artificial Sequence
  Oligonucleotide primer for the detection of SNP TSC0017521
atttttataata

SEQ ID NO: 297319 - DNA, 12 bp, Artificial Sequence
  Oligonucleotide primer for the detection of SNP TSC0017522
taactacctata

SEQ ID NO: 297320 - DNA, 12 bp, Artificial Sequence
  Oligonucleotide primer for the detection of SNP TSC0017522
atattcacacac

SEQ ID NO: 297321 - DNA, 12 bp, Artificial Sequence
  Oligonucleotide primer for the detection of SNP TSC0017522
tggttgtttgta

SEQ ID NO: 297322 - DNA, 12 bp, Artificial Sequence
  Oligonucleotide primer for the detection of SNP TSC0017523
aatctcaacccc

SEQ ID NO: 297323 - DNA, 12 bp, Artificial Sequence
  Oligonucleotide primer for the detection of SNP TSC0017523
gagttgtagttt

SEQ ID NO: 297324 - DNA, 12 bp, Artificial Sequence
  Oligonucleotide primer for the detection of SNP TSC0017523
aaactacaaccc

SEQ ID NO: 297325 - DNA, 12 bp, Artificial Sequence
  Oligonucleotide primer for the detection of SNP TSC0017523
gattttagtttt

SEQ ID NO: 297326 - DNA, 12 bp, Artificial Sequence
  Oligonucleotide primer for the detection of SNP TSC0017524
atctaaaactac

SEQ ID NO: 297327 - DNA, 12 bp, Artificial Sequence
  Oligonucleotide primer for the detection of SNP TSC0017524
aaaaatagttta

SEQ ID NO: 297328 - DNA, 12 bp, Artificial Sequence
  Oligonucleotide primer for the detection of SNP TSC0017524
aaaaataactca

SEQ ID NO: 297329 - DNA, 12 bp, Artificial Sequence
  Oligonukleotid-Primer
atttgggattat

SEQ ID NO: 297330 - DNA, 12 bp, Artificial Sequence
  Oligonucleotide primer for the detection of SNP TSC0017525
tttgggaggttg

SEQ ID NO: 297331 - DNA, 12 bp, Artificial Sequence
  Oligonucleotide primer for the detection of SNP TSC0017526
tagtaagttaag

SEQ ID NO: 297332 - DNA, 12 bp, Artificial Sequence
  Oligonucleotide primer for the detection of SNP TSC0017527
aatgtggttagg

SEQ ID NO: 297333 - DNA, 12 bp, Artificial Sequence
  Oligonucleotide primer for the detection of SNP TSC0017533
caaacttcattt

SEQ ID NO: 297334 - DNA, 12 bp, Artificial Sequence
  Oligonucleotide primer for the detection of SNP TSC0017533
tattaggatttg

SEQ ID NO: 297335 - DNA, 12 bp, Artificial Sequence
  Oligonucleotide primer for the detection of SNP TSC0017534
ttaaattttaac

SEQ ID NO: 297336 - DNA, 12 bp, Artificial Sequence
  Oligonucleotide primer for the detection of SNP TSC0017534
aatacttccact

SEQ ID NO: 297337 - DNA, 12 bp, Artificial Sequence
  Oligonucleotide primer for the detection of SNP TSC0017534
ttgagttttgat

SEQ ID NO: 297338 - DNA, 12 bp, Artificial Sequence
  Oligonucleotide primer for the detection of SNP TSC0017536
tctctaaacatc

SEQ ID NO: 297339 - DNA, 12 bp, Artificial Sequence
  Oligonucleotide primer for the detection of SNP TSC0017536
ggtttttatttt

SEQ ID NO: 297340 - DNA, 12 bp, Artificial Sequence
  Oligonucleotide primer for the detection of SNP TSC0017537
ctaaataatttt

SEQ ID NO: 297341 - DNA, 12 bp, Artificial Sequence
  Oligonucleotide primer for the detection of SNP TSC0017537
gtgtgtttttgg

SEQ ID NO: 297342 - DNA, 12 bp, Artificial Sequence
  Oligonucleotide primer for the detection of SNP TSC0017538
atatggtaaaat

SEQ ID NO: 297343 - DNA, 12 bp, Artificial Sequence
  Oligonucleotide primer for the detection of SNP TSC0017538
atatggtaaaac

SEQ ID NO: 297344 - DNA, 12 bp, Artificial Sequence
  Oligonucleotide primer for the detection of SNP TSC0017539
attccaaaatca

SEQ ID NO: 297345 - DNA, 12 bp, Artificial Sequence
  Oligonucleotide primer for the detection of SNP TSC0017539
ggatatgattat

SEQ ID NO: 297346 - DNA, 12 bp, Artificial Sequence
  Oligonucleotide primer for the detection of SNP TSC0017539
aaaacataatca

SEQ ID NO: 297347 - DNA, 12 bp, Artificial Sequence
  Oligonucleotide primer for the detection of SNP TSC0017539
attttagagtta

SEQ ID NO: 297348 - DNA, 12 bp, Artificial Sequence
  Oligonucleotide primer for the detection of SNP TSC0017540
ttaaaacttaac

SEQ ID NO: 297349 - DNA, 12 bp, Artificial Sequence
  Oligonukleotid-Primer
agtatttaattt

SEQ ID NO: 297350 - DNA, 12 bp, Artificial Sequence
  Oligonucleotide primer for the detection of SNP TSC0017540
aaacactcaatc

SEQ ID NO: 297351 - DNA, 12 bp, Artificial Sequence
  Oligonucleotide primer for the detection of SNP TSC0017540
ttgaggtttggt

SEQ ID NO: 297352 - DNA, 12 bp, Artificial Sequence
  Oligonucleotide primer for the detection of SNP TSC0017540
ttgaggtttggc

SEQ ID NO: 297353 - DNA, 12 bp, Artificial Sequence
  Oligonucleotide primer for the detection of SNP TSC0017541
ccatatatcaat

SEQ ID NO: 297354 - DNA, 12 bp, Artificial Sequence
  Oligonucleotide primer for the detection of SNP TSC0017541
ttattgaaagag

SEQ ID NO: 297355 - DNA, 12 bp, Artificial Sequence
  Oligonucleotide primer for the detection of SNP TSC0017542
taactctcacaa

SEQ ID NO: 297356 - DNA, 12 bp, Artificial Sequence
  Oligonucleotide primer for the detection of SNP TSC0017542
taggtaggaaaa

SEQ ID NO: 297357 - DNA, 12 bp, Artificial Sequence
  Oligonucleotide primer for the detection of SNP TSC0017542
tttttatagttt

SEQ ID NO: 297358 - DNA, 12 bp, Artificial Sequence
  Oligonucleotide primer for the detection of SNP TSC0017542
tttttatagttc

SEQ ID NO: 297359 - DNA, 12 bp, Artificial Sequence
  Oligonucleotide primer for the detection of SNP TSC0017543
ccttaactctca

SEQ ID NO: 297360 - DNA, 12 bp, Artificial Sequence
  Oligonucleotide primer for the detection of SNP TSC0017543
ggaaaaagggtt

SEQ ID NO: 297361 - DNA, 12 bp, Artificial Sequence
  Oligonucleotide primer for the detection of SNP TSC0017544
catctactttcc

SEQ ID NO: 297362 - DNA, 12 bp, Artificial Sequence
  Oligonucleotide primer for the detection of SNP TSC0017544
ggaggtggggtt

SEQ ID NO: 297363 - DNA, 12 bp, Artificial Sequence
  Oligonucleotide primer for the detection of SNP TSC0017544
ggaggcggggtt

SEQ ID NO: 297364 - DNA, 12 bp, Artificial Sequence
  Oligonucleotide primer for the detection of SNP TSC0017544
ggaggtggggtc

SEQ ID NO: 297365 - DNA, 12 bp, Artificial Sequence
  Oligonucleotide primer for the detection of SNP TSC0017544
ggaggcggggtc

SEQ ID NO: 297366 - DNA, 12 bp, Artificial Sequence
  Oligonucleotide primer for the detection of SNP TSC0017544
aaaaaacgaaat

SEQ ID NO: 297367 - DNA, 12 bp, Artificial Sequence
  Oligonucleotide primer for the detection of SNP TSC0017545
taaaaatacctc

SEQ ID NO: 297368 - DNA, 12 bp, Artificial Sequence
  Oligonucleotide primer for the detection of SNP TSC0017545
aggtttttaaag

SEQ ID NO: 297369 - DNA, 12 bp, Artificial Sequence
  Oligonucleotide primer for the detection of SNP TSC0017545
taaaaatgtttt

SEQ ID NO: 297370 - DNA, 12 bp, Artificial Sequence
  Oligonucleotide primer for the detection of SNP TSC0017549
tactaacctaaa

SEQ ID NO: 297371 - DNA, 12 bp, Artificial Sequence
  Oligonucleotide primer for the detection of SNP TSC0017549
gtgtggtgtttt

SEQ ID NO: 297372 - DNA, 12 bp, Artificial Sequence
  Oligonucleotide primer for the detection of SNP TSC0017549
gcgtggtgtttt

SEQ ID NO: 297373 - DNA, 12 bp, Artificial Sequence
  Oligonucleotide primer for the detection of SNP TSC0017549
gtgtggcgtttt

SEQ ID NO: 297374 - DNA, 12 bp, Artificial Sequence
  Oligonucleotide primer for the detection of SNP TSC0017549
gcgtggcgtttt

SEQ ID NO: 297375 - DNA, 12 bp, Artificial Sequence
  Oligonucleotide primer for the detection of SNP TSC0017549
cataacacccta

SEQ ID NO: 297376 - DNA, 12 bp, Artificial Sequence
  Oligonucleotide primer for the detection of SNP TSC0017549
cataacgcccta

SEQ ID NO: 297377 - DNA, 12 bp, Artificial Sequence
  Oligonucleotide primer for the detection of SNP TSC0017549
cgtaacacccta

SEQ ID NO: 297378 - DNA, 12 bp, Artificial Sequence
  Oligonucleotide primer for the detection of SNP TSC0017549
cgtaacgcccta

SEQ ID NO: 297379 - DNA, 12 bp, Artificial Sequence
  Oligonucleotide primer for the detection of SNP TSC0017549
tgttggtttgag

SEQ ID NO: 297380 - DNA, 12 bp, Artificial Sequence
  Oligonucleotide primer for the detection of SNP TSC0017550
caaaaatactat

SEQ ID NO: 297381 - DNA, 12 bp, Artificial Sequence
  Oligonucleotide primer for the detection of SNP TSC0017550
tttttaaaggaa

SEQ ID NO: 297382 - DNA, 12 bp, Artificial Sequence
  Oligonucleotide primer for the detection of SNP TSC0017551
ccatttataatc

SEQ ID NO: 297383 - DNA, 12 bp, Artificial Sequence
  Oligonucleotide primer for the detection of SNP TSC0017551
ccaatatcctta

SEQ ID NO: 297384 - DNA, 12 bp, Artificial Sequence
  Oligonucleotide primer for the detection of SNP TSC0017551
tatttgtagttt

SEQ ID NO: 297385 - DNA, 12 bp, Artificial Sequence
  Oligonucleotide primer for the detection of SNP TSC0017552
aataatattaaa

SEQ ID NO: 297386 - DNA, 12 bp, Artificial Sequence
  Oligonucleotide primer for the detection of SNP TSC0017552
tggtttttttat

SEQ ID NO: 297387 - DNA, 12 bp, Artificial Sequence
  Oligonucleotide primer for the detection of SNP TSC0017552
aatctctccata

SEQ ID NO: 297388 - DNA, 12 bp, Artificial Sequence
  Oligonucleotide primer for the detection of SNP TSC0017553
catccaaaaaca

SEQ ID NO: 297389 - DNA, 12 bp, Artificial Sequence
  Oligonucleotide primer for the detection of SNP TSC0017553
catccgaaaaca

SEQ ID NO: 297390 - DNA, 12 bp, Artificial Sequence
  Oligonucleotide primer for the detection of SNP TSC0017553
atgtattgattt

SEQ ID NO: 297391 - DNA, 12 bp, Artificial Sequence
  Oligonucleotide primer for the detection of SNP TSC0017553
aatacactaacc

SEQ ID NO: 297392 - DNA, 12 bp, Artificial Sequence
  Oligonucleotide primer for the detection of SNP TSC0017553
atatttgggggt

SEQ ID NO: 297393 - DNA, 12 bp, Artificial Sequence
  Oligonucleotide primer for the detection of SNP TSC0017553
atattcgggggt

SEQ ID NO: 297394 - DNA, 12 bp, Artificial Sequence
  Oligonucleotide primer for the detection of SNP TSC0017554
acttaataaaaa

SEQ ID NO: 297395 - DNA, 12 bp, Artificial Sequence
  Oligonucleotide primer for the detection of SNP TSC0017554
ttataaataagt

SEQ ID NO: 297396 - DNA, 12 bp, Artificial Sequence
  Oligonucleotide primer for the detection of SNP TSC0017554
ttacaaacaaac

SEQ ID NO: 297397 - DNA, 12 bp, Artificial Sequence
  Oligonucleotide primer for the detection of SNP TSC0017554
gtttgataagag

SEQ ID NO: 297398 - DNA, 12 bp, Artificial Sequence
  Oligonucleotide primer for the detection of SNP TSC0017555
taaaccactcaa

SEQ ID NO: 297399 - DNA, 12 bp, Artificial Sequence
  Oligonucleotide primer for the detection of SNP TSC0017555
ttgtattatttg

SEQ ID NO: 297400 - DNA, 12 bp, Artificial Sequence
  Oligonucleotide primer for the detection of SNP TSC0017555
tcgtattatttg

SEQ ID NO: 297401 - DNA, 12 bp, Artificial Sequence
  Oligonucleotide primer for the detection of SNP TSC0017555
ttgtattattcg

SEQ ID NO: 297402 - DNA, 12 bp, Artificial Sequence
  Oligonucleotide primer for the detection of SNP TSC0017555
tcgtattattcg

SEQ ID NO: 297403 - DNA, 12 bp, Artificial Sequence
  Oligonucleotide primer for the detection of SNP TSC0017555
ccacaccatcca

SEQ ID NO: 297404 - DNA, 12 bp, Artificial Sequence
  Oligonucleotide primer for the detection of SNP TSC0017555
ccacaccatccg

SEQ ID NO: 297405 - DNA, 12 bp, Artificial Sequence
  Oligonucleotide primer for the detection of SNP TSC0017555
ccgcaccatcca

SEQ ID NO: 297406 - DNA, 12 bp, Artificial Sequence
  Oligonukleotid-Primer
ccgcaccatccg

SEQ ID NO: 297407 - DNA, 12 bp, Artificial Sequence
  Oligonucleotide primer for the detection of SNP TSC0017555
gagttatttaat

SEQ ID NO: 297408 - DNA, 12 bp, Artificial Sequence
  Oligonucleotide primer for the detection of SNP TSC0017559
tcttaaaataaa

SEQ ID NO: 297409 - DNA, 12 bp, Artificial Sequence
  Oligonucleotide primer for the detection of SNP TSC0017559
tatttatattat

SEQ ID NO: 297410 - DNA, 12 bp, Artificial Sequence
  Oligonucleotide primer for the detection of SNP TSC0017559
tatctatactat

SEQ ID NO: 297411 - DNA, 12 bp, Artificial Sequence
  Oligonucleotide primer for the detection of SNP TSC0017559
tttgaaatggat

SEQ ID NO: 297412 - DNA, 12 bp, Artificial Sequence
  Oligonucleotide primer for the detection of SNP TSC0017563
tcaaaaaacccc

SEQ ID NO: 297413 - DNA, 12 bp, Artificial Sequence
  Oligonucleotide primer for the detection of SNP TSC0017563
ctcctcacttaa

SEQ ID NO: 297414 - DNA, 12 bp, Artificial Sequence
  Oligonucleotide primer for the detection of SNP TSC0017563
ttagaaggtttt

SEQ ID NO: 297415 - DNA, 12 bp, Artificial Sequence
  Oligonucleotide primer for the detection of SNP TSC0017564
ccaatcacacaa

SEQ ID NO: 297416 - DNA, 12 bp, Artificial Sequence
  Oligonucleotide primer for the detection of SNP TSC0017564
ttaatatagtgt

SEQ ID NO: 297417 - DNA, 12 bp, Artificial Sequence
  Oligonucleotide primer for the detection of SNP TSC0017564
ttaatatagtgc

SEQ ID NO: 297418 - DNA, 12 bp, Artificial Sequence
  Oligonucleotide primer for the detection of SNP TSC0017564
tcaacataatac

SEQ ID NO: 297419 - DNA, 12 bp, Artificial Sequence
  Oligonucleotide primer for the detection of SNP TSC0017564
ttagttatatag

SEQ ID NO: 297420 - DNA, 12 bp, Artificial Sequence
  Oligonucleotide primer for the detection of SNP TSC0017565
attaaaggttga

SEQ ID NO: 297421 - DNA, 12 bp, Artificial Sequence
  Oligonucleotide primer for the detection of SNP TSC0017565
attaaaaattaa

SEQ ID NO: 297422 - DNA, 12 bp, Artificial Sequence
  Oligonucleotide primer for the detection of SNP TSC0017565
gaagaaagaaaa

SEQ ID NO: 297423 - DNA, 12 bp, Artificial Sequence
  Oligonucleotide primer for the detection of SNP TSC0017568
acactcacttct

SEQ ID NO: 297424 - DNA, 12 bp, Artificial Sequence
  Oligonucleotide primer for the detection of SNP TSC0017568
gtaatgtttgta

SEQ ID NO: 297425 - DNA, 12 bp, Artificial Sequence
  Oligonucleotide primer for the detection of SNP TSC0017569
actctttataca

SEQ ID NO: 297426 - DNA, 12 bp, Artificial Sequence
  Oligonucleotide primer for the detection of SNP TSC0017569
tgttattagaat

SEQ ID NO: 297427 - DNA, 12 bp, Artificial Sequence
  Oligonucleotide primer for the detection of SNP TSC0017569
atactatcaaaa

SEQ ID NO: 297428 - DNA, 12 bp, Artificial Sequence
  Oligonucleotide primer for the detection of SNP TSC0017569
aattttttatat

SEQ ID NO: 297429 - DNA, 12 bp, Artificial Sequence
  Oligonucleotide primer for the detection of SNP TSC0017572
ttagttagtttg

SEQ ID NO: 297430 - DNA, 12 bp, Artificial Sequence
  Oligonucleotide primer for the detection of SNP TSC0017573
attacaacccct

SEQ ID NO: 297431 - DNA, 12 bp, Artificial Sequence
  Oligonucleotide primer for the detection of SNP TSC0017573
ttaattaatgta

SEQ ID NO: 297432 - DNA, 12 bp, Artificial Sequence
  Oligonucleotide primer for the detection of SNP TSC0017573
ttaatcaatata

SEQ ID NO: 297433 - DNA, 12 bp, Artificial Sequence
  Oligonucleotide primer for the detection of SNP TSC0017574
aaactcataaac

SEQ ID NO: 297434 - DNA, 12 bp, Artificial Sequence
  Oligonucleotide primer for the detection of SNP TSC0017574
gattggttatga

SEQ ID NO: 297435 - DNA, 12 bp, Artificial Sequence
  Oligonucleotide primer for the detection of SNP TSC0017575
tttaaaacacta

SEQ ID NO: 297436 - DNA, 12 bp, Artificial Sequence
  Oligonucleotide primer for the detection of SNP TSC0017575
gtgttttagttt

SEQ ID NO: 297437 - DNA, 12 bp, Artificial Sequence
  Oligonucleotide primer for the detection of SNP TSC0017576
ggggaaaaatga

SEQ ID NO: 297438 - DNA, 12 bp, Artificial Sequence
  Oligonucleotide primer for the detection of SNP TSC0017577
ttcccaaaatta

SEQ ID NO: 297439 - DNA, 12 bp, Artificial Sequence
  Oligonucleotide primer for the detection of SNP TSC0017577
aatatataccac

SEQ ID NO: 297440 - DNA, 12 bp, Artificial Sequence
  Oligonucleotide primer for the detection of SNP TSC0017577
ttttagagttgt

SEQ ID NO: 297441 - DNA, 12 bp, Artificial Sequence
  Oligonucleotide primer for the detection of SNP TSC0017578
aataccattatt

SEQ ID NO: 297442 - DNA, 12 bp, Artificial Sequence
  Oligonucleotide primer for the detection of SNP TSC0017584
tttatttgatac

SEQ ID NO: 297443 - DNA, 12 bp, Artificial Sequence
  Oligonucleotide primer for the detection of SNP TSC0017584
ttcatctaatac

SEQ ID NO: 297444 - DNA, 12 bp, Artificial Sequence
  Oligonucleotide primer for the detection of SNP TSC0017584
aggtggtttgtg

SEQ ID NO: 297445 - DNA, 12 bp, Artificial Sequence
  Oligonucleotide primer for the detection of SNP TSC0017586
accataaatctc

SEQ ID NO: 297446 - DNA, 12 bp, Artificial Sequence
  Oligonucleotide primer for the detection of SNP TSC0017586
attttggttaaa

SEQ ID NO: 297447 - DNA, 12 bp, Artificial Sequence
  Oligonucleotide primer for the detection of SNP TSC0017588
ttaataaacaaa

SEQ ID NO: 297448 - DNA, 12 bp, Artificial Sequence
  Oligonucleotide primer for the detection of SNP TSC0017588
gataatgtgatt

SEQ ID NO: 297449 - DNA, 12 bp, Artificial Sequence
  Oligonucleotide primer for the detection of SNP TSC0017588
gataacgtgatt

SEQ ID NO: 297450 - DNA, 12 bp, Artificial Sequence
  Oligonucleotide primer for the detection of SNP TSC0017588
aaacaacataac

SEQ ID NO: 297451 - DNA, 12 bp, Artificial Sequence
  Oligonucleotide primer for the detection of SNP TSC0017588
aaacaacgtaac

SEQ ID NO: 297452 - DNA, 12 bp, Artificial Sequence
  Oligonucleotide primer for the detection of SNP TSC0017588
ttgatgagtaag

SEQ ID NO: 297453 - DNA, 12 bp, Artificial Sequence
  Oligonucleotide primer for the detection of SNP TSC0017589
ccccacaaaaaa

SEQ ID NO: 297454 - DNA, 12 bp, Artificial Sequence
  Oligonucleotide primer for the detection of SNP TSC0017589
ccccgcaaaaaa

SEQ ID NO: 297455 - DNA, 12 bp, Artificial Sequence
  Oligonucleotide primer for the detection of SNP TSC0017589
ttagagtaataa

SEQ ID NO: 297456 - DNA, 12 bp, Artificial Sequence
  Oligonucleotide primer for the detection of SNP TSC0017589
gtttttgtagaa

SEQ ID NO: 297457 - DNA, 12 bp, Artificial Sequence
  Oligonucleotide primer for the detection of SNP TSC0017589
gttttcgtagaa

SEQ ID NO: 297458 - DNA, 12 bp, Artificial Sequence
  Oligonucleotide primer for the detection of SNP TSC0017590
aaaaaaccaaac

SEQ ID NO: 297459 - DNA, 12 bp, Artificial Sequence
  Oligonucleotide primer for the detection of SNP TSC0017590
aggggattaggt

SEQ ID NO: 297460 - DNA, 12 bp, Artificial Sequence
  Oligonucleotide primer for the detection of SNP TSC0017591
ctaaatattaac

SEQ ID NO: 297461 - DNA, 12 bp, Artificial Sequence
  Oligonucleotide primer for the detection of SNP TSC0017591
ttgattatgttt

SEQ ID NO: 297462 - DNA, 12 bp, Artificial Sequence
  Oligonucleotide primer for the detection of SNP TSC0017591
ttaaccatattt

SEQ ID NO: 297463 - DNA, 12 bp, Artificial Sequence
  Oligonucleotide primer for the detection of SNP TSC0017591
tagatgttaatt

SEQ ID NO: 297464 - DNA, 12 bp, Artificial Sequence
  Oligonucleotide primer for the detection of SNP TSC0017592
tctcctaaactc

SEQ ID NO: 297465 - DNA, 12 bp, Artificial Sequence
  Oligonucleotide primer for the detection of SNP TSC0017592
gagataggagga

SEQ ID NO: 297466 - DNA, 12 bp, Artificial Sequence
  Oligonucleotide primer for the detection of SNP TSC0017593
aaaatctatttc

SEQ ID NO: 297467 - DNA, 12 bp, Artificial Sequence
  Oligonucleotide primer for the detection of SNP TSC0017593
taataaaatggt

SEQ ID NO: 297468 - DNA, 12 bp, Artificial Sequence
  Oligonucleotide primer for the detection of SNP TSC0017593
aagtttgttttt

SEQ ID NO: 297469 - DNA, 12 bp, Artificial Sequence
  Oligonucleotide primer for the detection of SNP TSC0017597
cctccaaaaccc

SEQ ID NO: 297470 - DNA, 12 bp, Artificial Sequence
  Oligonucleotide primer for the detection of SNP TSC0017597
ggtttgtaaatg

SEQ ID NO: 297471 - DNA, 12 bp, Artificial Sequence
  Oligonucleotide primer for the detection of SNP TSC0017597
ggtttgtaaacg

SEQ ID NO: 297472 - DNA, 12 bp, Artificial Sequence
  Oligonucleotide primer for the detection of SNP TSC0017597
aacctacaaacg

SEQ ID NO: 297473 - DNA, 12 bp, Artificial Sequence
  Oligonucleotide primer for the detection of SNP TSC0017597
tttttagggttt

SEQ ID NO: 297474 - DNA, 12 bp, Artificial Sequence
  Oligonucleotide primer for the detection of SNP TSC0017597
tttttagggttc

SEQ ID NO: 297475 - DNA, 12 bp, Artificial Sequence
  Oligonucleotide primer for the detection of SNP TSC0017598
taaatatctacc

SEQ ID NO: 297476 - DNA, 12 bp, Artificial Sequence
  Oligonucleotide primer for the detection of SNP TSC0017598
ttggtttgattg

SEQ ID NO: 297477 - DNA, 12 bp, Artificial Sequence
  Oligonucleotide primer for the detection of SNP TSC0017599
aatataaaacca

SEQ ID NO: 297478 - DNA, 12 bp, Artificial Sequence
  Oligonucleotide primer for the detection of SNP TSC0017599
gaaatgttttta

SEQ ID NO: 297479 - DNA, 12 bp, Artificial Sequence
  Oligonucleotide primer for the detection of SNP TSC0017599
aaaatatcttca

SEQ ID NO: 297480 - DNA, 12 bp, Artificial Sequence
  Oligonucleotide primer for the detection of SNP TSC0017599
aatatgaggtta

SEQ ID NO: 297481 - DNA, 12 bp, Artificial Sequence
  Oligonucleotide primer for the detection of SNP TSC0017600
aacccatcatac

SEQ ID NO: 297482 - DNA, 12 bp, Artificial Sequence
  Oligonucleotide primer for the detection of SNP TSC0017600
aacccatcgtac

SEQ ID NO: 297483 - DNA, 12 bp, Artificial Sequence
  Oligonucleotide primer for the detection of SNP TSC0017600
agatataggatg

SEQ ID NO: 297484 - DNA, 12 bp, Artificial Sequence
  Oligonucleotide primer for the detection of SNP TSC0017601
aacaattattct

SEQ ID NO: 297485 - DNA, 12 bp, Artificial Sequence
  Oligonucleotide primer for the detection of SNP TSC0017601
tagtaaaagggg

SEQ ID NO: 297486 - DNA, 12 bp, Artificial Sequence
  Oligonucleotide primer for the detection of SNP TSC0017604
aataaaacatac

SEQ ID NO: 297487 - DNA, 12 bp, Artificial Sequence
  Oligonucleotide primer for the detection of SNP TSC0017604
tatattgggagg

SEQ ID NO: 297488 - DNA, 12 bp, Artificial Sequence
  Oligonucleotide primer for the detection of SNP TSC0017605
tttcaaattctt

SEQ ID NO: 297489 - DNA, 12 bp, Artificial Sequence
  Oligonucleotide primer for the detection of SNP TSC0017605
agtgtgagttta

SEQ ID NO: 297490 - DNA, 12 bp, Artificial Sequence
  Oligonucleotide primer for the detection of SNP TSC0017606
acttttctctcc

SEQ ID NO: 297491 - DNA, 12 bp, Artificial Sequence
  Oligonucleotide primer for the detection of SNP TSC0017606
tagttttgtggg

SEQ ID NO: 297492 - DNA, 12 bp, Artificial Sequence
  Oligonucleotide primer for the detection of SNP TSC0017606
tagtttcgtggg

SEQ ID NO: 297493 - DNA, 12 bp, Artificial Sequence
  Oligonucleotide primer for the detection of SNP TSC0017606
caaccccataaa

SEQ ID NO: 297494 - DNA, 12 bp, Artificial Sequence
  Oligonucleotide primer for the detection of SNP TSC0017606
caaccccgtaaa

SEQ ID NO: 297495 - DNA, 12 bp, Artificial Sequence
  Oligonucleotide primer for the detection of SNP TSC0017608
tacaaaaaacct

SEQ ID NO: 297496 - DNA, 12 bp, Artificial Sequence
  Oligonucleotide primer for the detection of SNP TSC0017608
tttagggagttg

SEQ ID NO: 297497 - DNA, 12 bp, Artificial Sequence
  Oligonucleotide primer for the detection of SNP TSC0017608
cttaaaaaatta

SEQ ID NO: 297498 - DNA, 12 bp, Artificial Sequence
  Oligonucleotide primer for the detection of SNP TSC0017608
tatagaggattt

SEQ ID NO: 297499 - DNA, 12 bp, Artificial Sequence
  Oligonucleotide primer for the detection of SNP TSC0017609
acatcctcaacc

SEQ ID NO: 297500 - DNA, 12 bp, Artificial Sequence
  Oligonucleotide primer for the detection of SNP TSC0017609
gaggttttttga

SEQ ID NO: 297501 - DNA, 12 bp, Artificial Sequence
  Oligonucleotide primer for the detection of SNP TSC0017609
gaggtttttcga

SEQ ID NO: 297502 - DNA, 12 bp, Artificial Sequence
  Oligonucleotide primer for the detection of SNP TSC0017610
attacttatccc

SEQ ID NO: 297503 - DNA, 12 bp, Artificial Sequence
  Oligonucleotide primer for the detection of SNP TSC0017610
tttttttataag

SEQ ID NO: 297504 - DNA, 12 bp, Artificial Sequence
  Oligonucleotide primer for the detection of SNP TSC0017611
atttaattatat

SEQ ID NO: 297505 - DNA, 12 bp, Artificial Sequence
  Oligonucleotide primer for the detection of SNP TSC0017612
aaacaataaaca

SEQ ID NO: 297506 - DNA, 12 bp, Artificial Sequence
  Oligonucleotide primer for the detection of SNP TSC0017612
gggatatagttt

SEQ ID NO: 297507 - DNA, 12 bp, Artificial Sequence
  Oligonucleotide primer for the detection of SNP TSC0017612
gggtagtaggta

SEQ ID NO: 297508 - DNA, 12 bp, Artificial Sequence
  Oligonucleotide primer for the detection of SNP TSC0017613
taaaaacaaaac

SEQ ID NO: 297509 - DNA, 12 bp, Artificial Sequence
  Oligonucleotide primer for the detection of SNP TSC0017613
taaaaacgaaac

SEQ ID NO: 297510 - DNA, 12 bp, Artificial Sequence
  Oligonucleotide primer for the detection of SNP TSC0017613
ttggttatgttg

SEQ ID NO: 297511 - DNA, 12 bp, Artificial Sequence
  Oligonukleotid-Primer
ttggttacgttg

SEQ ID NO: 297512 - DNA, 12 bp, Artificial Sequence
  Oligonucleotide primer for the detection of SNP TSC0017613
ttggttatgtcg

SEQ ID NO: 297513 - DNA, 12 bp, Artificial Sequence
  Oligonucleotide primer for the detection of SNP TSC0017613
ttggttacgtcg

SEQ ID NO: 297514 - DNA, 12 bp, Artificial Sequence
  Oligonucleotide primer for the detection of SNP TSC0017613
ctaatcacacca

SEQ ID NO: 297515 - DNA, 12 bp, Artificial Sequence
  Oligonucleotide primer for the detection of SNP TSC0017613
ctaatcacaccg

SEQ ID NO: 297516 - DNA, 12 bp, Artificial Sequence
  Oligonucleotide primer for the detection of SNP TSC0017613
ctaatcacgcca

SEQ ID NO: 297517 - DNA, 12 bp, Artificial Sequence
  Oligonucleotide primer for the detection of SNP TSC0017613
ctaatcacgccg

SEQ ID NO: 297518 - DNA, 12 bp, Artificial Sequence
  Oligonucleotide primer for the detection of SNP TSC0017613
tgggggtggagt

SEQ ID NO: 297519 - DNA, 12 bp, Artificial Sequence
  Oligonucleotide primer for the detection of SNP TSC0017613
tgggggcggagt

SEQ ID NO: 297520 - DNA, 12 bp, Artificial Sequence
  Oligonucleotide primer for the detection of SNP TSC0017613
tgggggtggagc

SEQ ID NO: 297521 - DNA, 12 bp, Artificial Sequence
  Oligonucleotide primer for the detection of SNP TSC0017613
tgggggcggagc

SEQ ID NO: 297522 - DNA, 12 bp, Artificial Sequence
  Oligonucleotide primer for the detection of SNP TSC0017614
tattatccccac

SEQ ID NO: 297523 - DNA, 12 bp, Artificial Sequence
  Oligonucleotide primer for the detection of SNP TSC0017614
atttggggtggg

SEQ ID NO: 297524 - DNA, 12 bp, Artificial Sequence
  Oligonucleotide primer for the detection of SNP TSC0017615
ctaaaataccat

SEQ ID NO: 297525 - DNA, 12 bp, Artificial Sequence
  Oligonucleotide primer for the detection of SNP TSC0017615
ctaaaataccgt

SEQ ID NO: 297526 - DNA, 12 bp, Artificial Sequence
  Oligonucleotide primer for the detection of SNP TSC0017615
agtaaagattga

SEQ ID NO: 297527 - DNA, 12 bp, Artificial Sequence
  Oligonucleotide primer for the detection of SNP TSC0017615
agtaaagatcga

SEQ ID NO: 297528 - DNA, 12 bp, Artificial Sequence
  Oligonucleotide primer for the detection of SNP TSC0017618
atatactttttt

SEQ ID NO: 297529 - DNA, 12 bp, Artificial Sequence
  Oligonucleotide primer for the detection of SNP TSC0017618
tatttaaaaaaa

SEQ ID NO: 297530 - DNA, 12 bp, Artificial Sequence
  Oligonucleotide primer for the detection of SNP TSC0017618
atgtgttttttt

SEQ ID NO: 297531 - DNA, 12 bp, Artificial Sequence
  Oligonucleotide primer for the detection of SNP TSC0017619
aggatattgttg

SEQ ID NO: 297532 - DNA, 12 bp, Artificial Sequence
  Oligonucleotide primer for the detection of SNP TSC0017619
aaaatattacta

SEQ ID NO: 297533 - DNA, 12 bp, Artificial Sequence
  Oligonucleotide primer for the detection of SNP TSC0017620
aacctacacctc

SEQ ID NO: 297534 - DNA, 12 bp, Artificial Sequence
  Oligonucleotide primer for the detection of SNP TSC0017620
gtttgaattcgg

SEQ ID NO: 297535 - DNA, 12 bp, Artificial Sequence
  Oligonucleotide primer for the detection of SNP TSC0017621
tttatatgtttt

SEQ ID NO: 297536 - DNA, 12 bp, Artificial Sequence
  Oligonucleotide primer for the detection of SNP TSC0017621
cctacatacctt

SEQ ID NO: 297537 - DNA, 12 bp, Artificial Sequence
  Oligonucleotide primer for the detection of SNP TSC0017621
ggaagaagaggt

SEQ ID NO: 297538 - DNA, 12 bp, Artificial Sequence
  Oligonucleotide primer for the detection of SNP TSC0017622
acctaacatata

SEQ ID NO: 297539 - DNA, 12 bp, Artificial Sequence
  Oligonucleotide primer for the detection of SNP TSC0017622
atttatagaata

SEQ ID NO: 297540 - DNA, 12 bp, Artificial Sequence
  Oligonucleotide primer for the detection of SNP TSC0017622
atttataaaaca

SEQ ID NO: 297541 - DNA, 12 bp, Artificial Sequence
  Oligonucleotide primer for the detection of SNP TSC0017622
gtttaatatgtg

SEQ ID NO: 297542 - DNA, 12 bp, Artificial Sequence
  Oligonucleotide primer for the detection of SNP TSC0017623
aatttaaaaaat

SEQ ID NO: 297543 - DNA, 12 bp, Artificial Sequence
  Oligonucleotide primer for the detection of SNP TSC0017623
aatttaaaaaac

SEQ ID NO: 297544 - DNA, 12 bp, Artificial Sequence
  Oligonucleotide primer for the detection of SNP TSC0017623
tataagaatata

SEQ ID NO: 297545 - DNA, 12 bp, Artificial Sequence
  Oligonucleotide primer for the detection of SNP TSC0017624
tgtttatggttt

SEQ ID NO: 297546 - DNA, 12 bp, Artificial Sequence
  Oligonucleotide primer for the detection of SNP TSC0017624
tatttataatcc

SEQ ID NO: 297547 - DNA, 12 bp, Artificial Sequence
  Oligonucleotide primer for the detection of SNP TSC0017624
aaagggtaaata

SEQ ID NO: 297548 - DNA, 12 bp, Artificial Sequence
  Oligonucleotide primer for the detection of SNP TSC0017625
aaactaactcca

SEQ ID NO: 297549 - DNA, 12 bp, Artificial Sequence
  Oligonucleotide primer for the detection of SNP TSC0017625
gtgtgtattttt

SEQ ID NO: 297550 - DNA, 12 bp, Artificial Sequence
  Oligonucleotide primer for the detection of SNP TSC0017625
catatacatcct

SEQ ID NO: 297551 - DNA, 12 bp, Artificial Sequence
  Oligonucleotide primer for the detection of SNP TSC0017625
cgtatacatcct

SEQ ID NO: 297552 - DNA, 12 bp, Artificial Sequence
  Oligonucleotide primer for the detection of SNP TSC0017625
aggttggtttta

SEQ ID NO: 297553 - DNA, 12 bp, Artificial Sequence
  Oligonucleotide primer for the detection of SNP TSC0017626
cctactcaaacc

SEQ ID NO: 297554 - DNA, 12 bp, Artificial Sequence
  Oligonucleotide primer for the detection of SNP TSC0017626
gagtagttttta

SEQ ID NO: 297555 - DNA, 12 bp, Artificial Sequence
  Oligonucleotide primer for the detection of SNP TSC0017627
gaggtgagtatg

SEQ ID NO: 297556 - DNA, 12 bp, Artificial Sequence
  Oligonucleotide primer for the detection of SNP TSC0017629
tttatattgatt

SEQ ID NO: 297557 - DNA, 12 bp, Artificial Sequence
  Oligonucleotide primer for the detection of SNP TSC0017629
aaggatattgtt

SEQ ID NO: 297558 - DNA, 12 bp, Artificial Sequence
  Oligonucleotide primer for the detection of SNP TSC0017631
aactaatatata

SEQ ID NO: 297559 - DNA, 12 bp, Artificial Sequence
  Oligonucleotide primer for the detection of SNP TSC0017631
taatggaaatat

SEQ ID NO: 297560 - DNA, 12 bp, Artificial Sequence
  Oligonucleotide primer for the detection of SNP TSC0017631
attggtgtatat

SEQ ID NO: 297561 - DNA, 12 bp, Artificial Sequence
  Oligonucleotide primer for the detection of SNP TSC0017632
ttaaacatatct

SEQ ID NO: 297562 - DNA, 12 bp, Artificial Sequence
  Oligonucleotide primer for the detection of SNP TSC0017632
ttaaacgtatct

SEQ ID NO: 297563 - DNA, 12 bp, Artificial Sequence
  Oligonucleotide primer for the detection of SNP TSC0017632
tattatattgta

SEQ ID NO: 297564 - DNA, 12 bp, Artificial Sequence
  Oligonucleotide primer for the detection of SNP TSC0017635
tttataaaaaat

SEQ ID NO: 297565 - DNA, 12 bp, Artificial Sequence
  Oligonucleotide primer for the detection of SNP TSC0017635
tggaagttatta

SEQ ID NO: 297566 - DNA, 12 bp, Artificial Sequence
  Oligonucleotide primer for the detection of SNP TSC0017636
tactacaatatt

SEQ ID NO: 297567 - DNA, 12 bp, Artificial Sequence
  Oligonucleotide primer for the detection of SNP TSC0017638
acatcttaacaa

SEQ ID NO: 297568 - DNA, 12 bp, Artificial Sequence
  Oligonucleotide primer for the detection of SNP TSC0017638
ctaattcctaat

SEQ ID NO: 297569 - DNA, 12 bp, Artificial Sequence
  Oligonucleotide primer for the detection of SNP TSC0017638
ggtattttagta

SEQ ID NO: 297570 - DNA, 12 bp, Artificial Sequence
  Oligonucleotide primer for the detection of SNP TSC0017639
actttaaaatta

SEQ ID NO: 297571 - DNA, 12 bp, Artificial Sequence
  Oligonucleotide primer for the detection of SNP TSC0017639
atggggtttagt

SEQ ID NO: 297572 - DNA, 12 bp, Artificial Sequence
  Oligonucleotide primer for the detection of SNP TSC0017639
atggggtttagc

SEQ ID NO: 297573 - DNA, 12 bp, Artificial Sequence
  Oligonucleotide primer for the detection of SNP TSC0017639
ataaaattcaac

SEQ ID NO: 297574 - DNA, 12 bp, Artificial Sequence
  Oligonucleotide primer for the detection of SNP TSC0017639
attttggagttg

SEQ ID NO: 297575 - DNA, 12 bp, Artificial Sequence
  Oligonucleotide primer for the detection of SNP TSC0017640
atgaaagtttta

SEQ ID NO: 297576 - DNA, 12 bp, Artificial Sequence
  Oligonucleotide primer for the detection of SNP TSC0017644
acactacccact

SEQ ID NO: 297577 - DNA, 12 bp, Artificial Sequence
  Oligonucleotide primer for the detection of SNP TSC0017644
gaaatttatatg

SEQ ID NO: 297578 - DNA, 12 bp, Artificial Sequence
  Oligonucleotide primer for the detection of SNP TSC0017645
tcacaatcacct

SEQ ID NO: 297579 - DNA, 12 bp, Artificial Sequence
  Oligonucleotide primer for the detection of SNP TSC0017645
tcacaatcgcct

SEQ ID NO: 297580 - DNA, 12 bp, Artificial Sequence
  Oligonucleotide primer for the detection of SNP TSC0017645
tcacgatcacct

SEQ ID NO: 297581 - DNA, 12 bp, Artificial Sequence
  Oligonucleotide primer for the detection of SNP TSC0017645
tcacgatcgcct

SEQ ID NO: 297582 - DNA, 12 bp, Artificial Sequence
  Oligonucleotide primer for the detection of SNP TSC0017645
taagaggggatg

SEQ ID NO: 297583 - DNA, 12 bp, Artificial Sequence
  Oligonucleotide primer for the detection of SNP TSC0017647
ataaaaccctca

SEQ ID NO: 297584 - DNA, 12 bp, Artificial Sequence
  Oligonucleotide primer for the detection of SNP TSC0017647
gggagagggttt

SEQ ID NO: 297585 - DNA, 12 bp, Artificial Sequence
  Oligonucleotide primer for the detection of SNP TSC0017647
gtgaagttttta

SEQ ID NO: 297586 - DNA, 12 bp, Artificial Sequence
  Oligonucleotide primer for the detection of SNP TSC0017648
attatccaaaac

SEQ ID NO: 297587 - DNA, 12 bp, Artificial Sequence
  Oligonucleotide primer for the detection of SNP TSC0017648
gttggtaggtat

SEQ ID NO: 297588 - DNA, 12 bp, Artificial Sequence
  Oligonucleotide primer for the detection of SNP TSC0017648
ttaacaaacaca

SEQ ID NO: 297589 - DNA, 12 bp, Artificial Sequence
  Oligonucleotide primer for the detection of SNP TSC0017648
attgtttagaat

SEQ ID NO: 297590 - DNA, 12 bp, Artificial Sequence
  Oligonucleotide primer for the detection of SNP TSC0017648
attgtttagaac

SEQ ID NO: 297591 - DNA, 12 bp, Artificial Sequence
  Oligonucleotide primer for the detection of SNP TSC0017649
cctcccatcata

SEQ ID NO: 297592 - DNA, 12 bp, Artificial Sequence
  Oligonucleotide primer for the detection of SNP TSC0017649
ggtttttaggtt

SEQ ID NO: 297593 - DNA, 12 bp, Artificial Sequence
  Oligonucleotide primer for the detection of SNP TSC0017649
aatccccaaatt

SEQ ID NO: 297594 - DNA, 12 bp, Artificial Sequence
  Oligonucleotide primer for the detection of SNP TSC0017652
atttgttagatg

SEQ ID NO: 297595 - DNA, 12 bp, Artificial Sequence
  Oligonucleotide primer for the detection of SNP TSC0017654
ctaaaatactta

SEQ ID NO: 297596 - DNA, 12 bp, Artificial Sequence
  Oligonucleotide primer for the detection of SNP TSC0017654
tagaattgggat

SEQ ID NO: 297597 - DNA, 12 bp, Artificial Sequence
  Oligonucleotide primer for the detection of SNP TSC0017654
caaaactaaaac

SEQ ID NO: 297598 - DNA, 12 bp, Artificial Sequence
  Oligonucleotide primer for the detection of SNP TSC0017654
ttggggtgttta

SEQ ID NO: 297599 - DNA, 12 bp, Artificial Sequence
  Oligonucleotide primer for the detection of SNP TSC0017655
ctatatttaaat

SEQ ID NO: 297600 - DNA, 12 bp, Artificial Sequence
  Oligonucleotide primer for the detection of SNP TSC0017655
tgttttatatat

SEQ ID NO: 297601 - DNA, 12 bp, Artificial Sequence
  Oligonucleotide primer for the detection of SNP TSC0017655
ctactccacaca

SEQ ID NO: 297602 - DNA, 12 bp, Artificial Sequence
  Oligonucleotide primer for the detection of SNP TSC0017655
ttgtgtttgaat

SEQ ID NO: 297603 - DNA, 12 bp, Artificial Sequence
  Oligonucleotide primer for the detection of SNP TSC0017656
ctcccaacaatc

SEQ ID NO: 297604 - DNA, 12 bp, Artificial Sequence
  Oligonukleotid-Primer
ttaggtagatgg

SEQ ID NO: 297605 - DNA, 12 bp, Artificial Sequence
  Oligonucleotide primer for the detection of SNP TSC0017656
tcaaataaataa

SEQ ID NO: 297606 - DNA, 12 bp, Artificial Sequence
  Oligonucleotide primer for the detection of SNP TSC0017656
tttagtagtttt

SEQ ID NO: 297607 - DNA, 12 bp, Artificial Sequence
  Oligonucleotide primer for the detection of SNP TSC0017657
ccccttaacact

SEQ ID NO: 297608 - DNA, 12 bp, Artificial Sequence
  Oligonucleotide primer for the detection of SNP TSC0017657
taagttgaaaga

SEQ ID NO: 297609 - DNA, 12 bp, Artificial Sequence
  Oligonucleotide primer for the detection of SNP TSC0017658
ctaccccttata

SEQ ID NO: 297610 - DNA, 12 bp, Artificial Sequence
  Oligonucleotide primer for the detection of SNP TSC0017658
tgtagtgtagtt

SEQ ID NO: 297611 - DNA, 12 bp, Artificial Sequence
  Oligonucleotide primer for the detection of SNP TSC0017658
tacaatacaacc

SEQ ID NO: 297612 - DNA, 12 bp, Artificial Sequence
  Oligonukleotid-Primer
ccctaaaacttc

SEQ ID NO: 297613 - DNA, 12 bp, Artificial Sequence
  Oligonucleotide primer for the detection of SNP TSC0017661
tttgagttggta

SEQ ID NO: 297614 - DNA, 12 bp, Artificial Sequence
  Oligonucleotide primer for the detection of SNP TSC0017663
aatatataaact

SEQ ID NO: 297615 - DNA, 12 bp, Artificial Sequence
  Oligonucleotide primer for the detection of SNP TSC0017663
gatttttattta

SEQ ID NO: 297616 - DNA, 12 bp, Artificial Sequence
  Oligonukleotid-Primer
actcccacccac

SEQ ID NO: 297617 - DNA, 12 bp, Artificial Sequence
  Oligonucleotide primer for the detection of SNP TSC0017664
gtgtatgggttg

SEQ ID NO: 297618 - DNA, 12 bp, Artificial Sequence
  Oligonucleotide primer for the detection of SNP TSC0017664
atatataaacta

SEQ ID NO: 297619 - DNA, 12 bp, Artificial Sequence
  Oligonucleotide primer for the detection of SNP TSC0017668
tcaacaaaatat

SEQ ID NO: 297620 - DNA, 12 bp, Artificial Sequence
  Oligonucleotide primer for the detection of SNP TSC0017668
ccttcacctccc

SEQ ID NO: 297621 - DNA, 12 bp, Artificial Sequence
  Oligonucleotide primer for the detection of SNP TSC0017668
ttagtaaaatat

SEQ ID NO: 297622 - DNA, 12 bp, Artificial Sequence
  Oligonucleotide primer for the detection of SNP TSC0017669
acttcaacaaaa

SEQ ID NO: 297623 - DNA, 12 bp, Artificial Sequence
  Oligonucleotide primer for the detection of SNP TSC0017669
tttttgaaaaat

SEQ ID NO: 297624 - DNA, 12 bp, Artificial Sequence
  Oligonucleotide primer for the detection of SNP TSC0017669
ttttcgaaaaat

SEQ ID NO: 297625 - DNA, 12 bp, Artificial Sequence
  Oligonucleotide primer for the detection of SNP TSC0017669
ctccccgaaaaa

SEQ ID NO: 297626 - DNA, 12 bp, Artificial Sequence
  Oligonucleotide primer for the detection of SNP TSC0017669
ttgagttttagt

SEQ ID NO: 297627 - DNA, 12 bp, Artificial Sequence
  Oligonucleotide primer for the detection of SNP TSC0017670
atatacaaaacc

SEQ ID NO: 297628 - DNA, 12 bp, Artificial Sequence
  Oligonucleotide primer for the detection of SNP TSC0017670
agttttataata

SEQ ID NO: 297629 - DNA, 12 bp, Artificial Sequence
  Oligonucleotide primer for the detection of SNP TSC0017675
ttcccccaaaac

SEQ ID NO: 297630 - DNA, 12 bp, Artificial Sequence
  Oligonucleotide primer for the detection of SNP TSC0017675
tgtttagtagtt

SEQ ID NO: 297631 - DNA, 12 bp, Artificial Sequence
  Oligonucleotide primer for the detection of SNP TSC0017675
cgtttagtagtt

SEQ ID NO: 297632 - DNA, 12 bp, Artificial Sequence
  Oligonucleotide primer for the detection of SNP TSC0017675
tgtttagtagtc

SEQ ID NO: 297633 - DNA, 12 bp, Artificial Sequence
  Oligonucleotide primer for the detection of SNP TSC0017675
cgtttagtagtc

SEQ ID NO: 297634 - DNA, 12 bp, Artificial Sequence
  Oligonucleotide primer for the detection of SNP TSC0017675
catccaacaacc

SEQ ID NO: 297635 - DNA, 12 bp, Artificial Sequence
  Oligonucleotide primer for the detection of SNP TSC0017675
cgtccaacaacc

SEQ ID NO: 297636 - DNA, 12 bp, Artificial Sequence
  Oligonucleotide primer for the detection of SNP TSC0017675
tttttttagagt

SEQ ID NO: 297637 - DNA, 12 bp, Artificial Sequence
  Oligonucleotide primer for the detection of SNP TSC0017675
tttttttagagc

SEQ ID NO: 297638 - DNA, 12 bp, Artificial Sequence
  Oligonucleotide primer for the detection of SNP TSC0017676
aaacaataccat

SEQ ID NO: 297639 - DNA, 12 bp, Artificial Sequence
  Oligonucleotide primer for the detection of SNP TSC0017676
aaacaataccgt

SEQ ID NO: 297640 - DNA, 12 bp, Artificial Sequence
  Oligonucleotide primer for the detection of SNP TSC0017676
ttttaagtagta

SEQ ID NO: 297641 - DNA, 12 bp, Artificial Sequence
  Oligonucleotide primer for the detection of SNP TSC0017677
ataacctcaaca

SEQ ID NO: 297642 - DNA, 12 bp, Artificial Sequence
  Oligonucleotide primer for the detection of SNP TSC0017677
taggggattagg

SEQ ID NO: 297643 - DNA, 12 bp, Artificial Sequence
  Oligonucleotide primer for the detection of SNP TSC0017677
atggttttagta

SEQ ID NO: 297644 - DNA, 12 bp, Artificial Sequence
  Oligonucleotide primer for the detection of SNP TSC0017678
acaacactatcc

SEQ ID NO: 297645 - DNA, 12 bp, Artificial Sequence
  Oligonucleotide primer for the detection of SNP TSC0017678
aaattttaggtt

SEQ ID NO: 297646 - DNA, 12 bp, Artificial Sequence
  Oligonucleotide primer for the detection of SNP TSC0017678
aattccaaatca

SEQ ID NO: 297647 - DNA, 12 bp, Artificial Sequence
  Oligonucleotide primer for the detection of SNP TSC0017678
atagtattgttt

SEQ ID NO: 297648 - DNA, 12 bp, Artificial Sequence
  Oligonucleotide primer for the detection of SNP TSC0017678
atagtattgttc

SEQ ID NO: 297649 - DNA, 12 bp, Artificial Sequence
  Oligonucleotide primer for the detection of SNP TSC0017679
aataactcacaa

SEQ ID NO: 297650 - DNA, 12 bp, Artificial Sequence
  Oligonucleotide primer for the detection of SNP TSC0017679
agtagtattggt

SEQ ID NO: 297651 - DNA, 12 bp, Artificial Sequence
  Oligonucleotide primer for the detection of SNP TSC0017679
aataacattaat

SEQ ID NO: 297652 - DNA, 12 bp, Artificial Sequence
  Oligonucleotide primer for the detection of SNP TSC0017679
aatttataattt

SEQ ID NO: 297653 - DNA, 12 bp, Artificial Sequence
  Oligonucleotide primer for the detection of SNP TSC0017680
cccactacaaaa

SEQ ID NO: 297654 - DNA, 12 bp, Artificial Sequence
  Oligonucleotide primer for the detection of SNP TSC0017680
tttattaaacac

SEQ ID NO: 297655 - DNA, 12 bp, Artificial Sequence
  Oligonucleotide primer for the detection of SNP TSC0017680
tttattgtaagg

SEQ ID NO: 297656 - DNA, 12 bp, Artificial Sequence
  Oligonucleotide primer for the detection of SNP TSC0017683
aacctaactttc

SEQ ID NO: 297657 - DNA, 12 bp, Artificial Sequence
  Oligonucleotide primer for the detection of SNP TSC0017683
taaggttatata

SEQ ID NO: 297658 - DNA, 12 bp, Artificial Sequence
  Oligonucleotide primer for the detection of SNP TSC0017686
catttataacct

SEQ ID NO: 297659 - DNA, 12 bp, Artificial Sequence
  Oligonucleotide primer for the detection of SNP TSC0017686
gtttgaagaagg

SEQ ID NO: 297660 - DNA, 12 bp, Artificial Sequence
  Oligonucleotide primer for the detection of SNP TSC0017687
attctcccttat

SEQ ID NO: 297661 - DNA, 12 bp, Artificial Sequence
  Oligonucleotide primer for the detection of SNP TSC0017687
tgatttgtagaa

SEQ ID NO: 297662 - DNA, 12 bp, Artificial Sequence
  Oligonucleotide primer for the detection of SNP TSC0017689
caaaaacaatcc

SEQ ID NO: 297663 - DNA, 12 bp, Artificial Sequence
  Oligonucleotide primer for the detection of SNP TSC0017689
tgttgaggaata

SEQ ID NO: 297664 - DNA, 12 bp, Artificial Sequence
  Oligonucleotide primer for the detection of SNP TSC0017689
tactaaaaaaca

SEQ ID NO: 297665 - DNA, 12 bp, Artificial Sequence
  Oligonucleotide primer for the detection of SNP TSC0017689
taggggtagttt

SEQ ID NO: 297666 - DNA, 12 bp, Artificial Sequence
  Oligonucleotide primer for the detection of SNP TSC0017690
atataatgaaag

SEQ ID NO: 297667 - DNA, 12 bp, Artificial Sequence
  Oligonucleotide primer for the detection of SNP TSC0017690
acataataaaaa

SEQ ID NO: 297668 - DNA, 12 bp, Artificial Sequence
  Oligonucleotide primer for the detection of SNP TSC0017690
ggagagagagta

SEQ ID NO: 297669 - DNA, 12 bp, Artificial Sequence
  Oligonucleotide primer for the detection of SNP TSC0017692
ataaattactac

SEQ ID NO: 297670 - DNA, 12 bp, Artificial Sequence
  Oligonucleotide primer for the detection of SNP TSC0017692
ttttaggattta

SEQ ID NO: 297671 - DNA, 12 bp, Artificial Sequence
  Oligonucleotide primer for the detection of SNP TSC0017692
tcccaaaaccta

SEQ ID NO: 297672 - DNA, 12 bp, Artificial Sequence
  Oligonucleotide primer for the detection of SNP TSC0017692
atgggttgttat

SEQ ID NO: 297673 - DNA, 12 bp, Artificial Sequence
  Oligonucleotide primer for the detection of SNP TSC0017693
acacaattacac

SEQ ID NO: 297674 - DNA, 12 bp, Artificial Sequence
  Oligonucleotide primer for the detection of SNP TSC0017693
gcacaattacac

SEQ ID NO: 297675 - DNA, 12 bp, Artificial Sequence
  Oligonucleotide primer for the detection of SNP TSC0017694
acccaaccccca

SEQ ID NO: 297676 - DNA, 12 bp, Artificial Sequence
  Oligonucleotide primer for the detection of SNP TSC0017694
aaaagaattatt

SEQ ID NO: 297677 - DNA, 12 bp, Artificial Sequence
  Oligonucleotide primer for the detection of SNP TSC0017697
aaaaataaccta

SEQ ID NO: 297678 - DNA, 12 bp, Artificial Sequence
  Oligonucleotide primer for the detection of SNP TSC0017697
tattgatttttt

SEQ ID NO: 297679 - DNA, 12 bp, Artificial Sequence
  Oligonucleotide primer for the detection of SNP TSC0017697
actaatccctca

SEQ ID NO: 297680 - DNA, 12 bp, Artificial Sequence
  Oligonucleotide primer for the detection of SNP TSC0017697
gagaggtgattt

SEQ ID NO: 297681 - DNA, 12 bp, Artificial Sequence
  Oligonucleotide primer for the detection of SNP TSC0017698
tattataagtta

SEQ ID NO: 297682 - DNA, 12 bp, Artificial Sequence
  Oligonucleotide primer for the detection of SNP TSC0017699
ctaaccaacata

SEQ ID NO: 297683 - DNA, 12 bp, Artificial Sequence
  Oligonucleotide primer for the detection of SNP TSC0017700
ccaacactttaa

SEQ ID NO: 297684 - DNA, 12 bp, Artificial Sequence
  Oligonucleotide primer for the detection of SNP TSC0017700
ttgttttagttt

SEQ ID NO: 297685 - DNA, 12 bp, Artificial Sequence
  Oligonucleotide primer for the detection of SNP TSC0017701
caccttataaaa

SEQ ID NO: 297686 - DNA, 12 bp, Artificial Sequence
  Oligonucleotide primer for the detection of SNP TSC0017701
gtcgtatgttgt

SEQ ID NO: 297687 - DNA, 12 bp, Artificial Sequence
  Oligonucleotide primer for the detection of SNP TSC0017701
gtcgtatgttgc

SEQ ID NO: 297688 - DNA, 12 bp, Artificial Sequence
  Oligonucleotide primer for the detection of SNP TSC0017701
accatatattac

SEQ ID NO: 297689 - DNA, 12 bp, Artificial Sequence
  Oligonucleotide primer for the detection of SNP TSC0017701
accgtatattac

SEQ ID NO: 297690 - DNA, 12 bp, Artificial Sequence
  Oligonucleotide primer for the detection of SNP TSC0017701
aaaatattttgt

SEQ ID NO: 297691 - DNA, 12 bp, Artificial Sequence
  Oligonucleotide primer for the detection of SNP TSC0017702
tatatttctccc

SEQ ID NO: 297692 - DNA, 12 bp, Artificial Sequence
  Oligonucleotide primer for the detection of SNP TSC0017702
attatgggtgga

SEQ ID NO: 297693 - DNA, 12 bp, Artificial Sequence
  Oligonucleotide primer for the detection of SNP TSC0017703
taaattatactt

SEQ ID NO: 297694 - DNA, 12 bp, Artificial Sequence
  Oligonucleotide primer for the detection of SNP TSC0017703
tgattgttagga

SEQ ID NO: 297695 - DNA, 12 bp, Artificial Sequence
  Oligonucleotide primer for the detection of SNP TSC0017704
taaaaataaact

SEQ ID NO: 297696 - DNA, 12 bp, Artificial Sequence
  Oligonucleotide primer for the detection of SNP TSC0017704
ttttggataata

SEQ ID NO: 297697 - DNA, 12 bp, Artificial Sequence
  Oligonucleotide primer for the detection of SNP TSC0017705
aatttacaaaat

SEQ ID NO: 297698 - DNA, 12 bp, Artificial Sequence
  Oligonucleotide primer for the detection of SNP TSC0017705
aagtaaaggaga

SEQ ID NO: 297699 - DNA, 12 bp, Artificial Sequence
  Oligonucleotide primer for the detection of SNP TSC0017705
agtttatagagt

SEQ ID NO: 297700 - DNA, 12 bp, Artificial Sequence
  Oligonucleotide primer for the detection of SNP TSC0017706
accacctataaa

SEQ ID NO: 297701 - DNA, 12 bp, Artificial Sequence
  Oligonucleotide primer for the detection of SNP TSC0017706
ctttttcaactt

SEQ ID NO: 297702 - DNA, 12 bp, Artificial Sequence
  Oligonucleotide primer for the detection of SNP TSC0017706
gttatttgtgaa

SEQ ID NO: 297703 - DNA, 12 bp, Artificial Sequence
  Oligonucleotide primer for the detection of SNP TSC0017707
ataataacatct

SEQ ID NO: 297704 - DNA, 12 bp, Artificial Sequence
  Oligonucleotide primer for the detection of SNP TSC0017707
gtgtttttttag

SEQ ID NO: 297705 - DNA, 12 bp, Artificial Sequence
  Oligonukleotid-Primer
atactcctccaa

SEQ ID NO: 297706 - DNA, 12 bp, Artificial Sequence
  Oligonucleotide primer for the detection of SNP TSC0017713
atgaaaatataa

SEQ ID NO: 297707 - DNA, 12 bp, Artificial Sequence
  Oligonucleotide primer for the detection of SNP TSC0017714
caaaaacatcaa

SEQ ID NO: 297708 - DNA, 12 bp, Artificial Sequence
  Oligonucleotide primer for the detection of SNP TSC0017714
tagtgatgttgt

SEQ ID NO: 297709 - DNA, 12 bp, Artificial Sequence
  Oligonukleotid-Primer
caataatactat

SEQ ID NO: 297710 - DNA, 12 bp, Artificial Sequence
  Oligonucleotide primer for the detection of SNP TSC0017714
taaaaatattag

SEQ ID NO: 297711 - DNA, 12 bp, Artificial Sequence
  Oligonucleotide primer for the detection of SNP TSC0017715
aattttgataaa

SEQ ID NO: 297712 - DNA, 12 bp, Artificial Sequence
  Oligonucleotide primer for the detection of SNP TSC0017718
tccctatattat

SEQ ID NO: 297713 - DNA, 12 bp, Artificial Sequence
  Oligonukleotid-Primer
tatttggtagga

SEQ ID NO: 297714 - DNA, 12 bp, Artificial Sequence
  Oligonucleotide primer for the detection of SNP TSC0017719
cctacctacaat

SEQ ID NO: 297715 - DNA, 12 bp, Artificial Sequence
  Oligonucleotide primer for the detection of SNP TSC0017719
gataaggaaatt

SEQ ID NO: 297716 - DNA, 12 bp, Artificial Sequence
  Oligonucleotide primer for the detection of SNP TSC0017719
tttgtttgtagt

SEQ ID NO: 297717 - DNA, 12 bp, Artificial Sequence
  Oligonukleotid-Primer
aacttacaaaaa

SEQ ID NO: 297718 - DNA, 12 bp, Artificial Sequence
  Oligonucleotide primer for the detection of SNP TSC0017721
aatttttgtttt

SEQ ID NO: 297719 - DNA, 12 bp, Artificial Sequence
  Oligonucleotide primer for the detection of SNP TSC0017721
acaacctctatc

SEQ ID NO: 297720 - DNA, 12 bp, Artificial Sequence
  Oligonucleotide primer for the detection of SNP TSC0017721
gatttatagggg

SEQ ID NO: 297721 - DNA, 12 bp, Artificial Sequence
  Oligonucleotide primer for the detection of SNP TSC0017722
ctttatccattc

SEQ ID NO: 297722 - DNA, 12 bp, Artificial Sequence
  Oligonucleotide primer for the detection of SNP TSC0017722
ttatgaaggaag

SEQ ID NO: 297723 - DNA, 12 bp, Artificial Sequence
  Oligonucleotide primer for the detection of SNP TSC0017722
tcataaaaaaaa

SEQ ID NO: 297724 - DNA, 12 bp, Artificial Sequence
  Oligonucleotide primer for the detection of SNP TSC0017723
acaattaattaa

SEQ ID NO: 297725 - DNA, 12 bp, Artificial Sequence
  Oligonucleotide primer for the detection of SNP TSC0017723
atttggtatata

SEQ ID NO: 297726 - DNA, 12 bp, Artificial Sequence
  Oligonucleotide primer for the detection of SNP TSC0017724
aaactacactta

SEQ ID NO: 297727 - DNA, 12 bp, Artificial Sequence
  Oligonucleotide primer for the detection of SNP TSC0017724
gagggttgtgta

SEQ ID NO: 297728 - DNA, 12 bp, Artificial Sequence
  Oligonucleotide primer for the detection of SNP TSC0017724
aaaaactataca

SEQ ID NO: 297729 - DNA, 12 bp, Artificial Sequence
  Oligonucleotide primer for the detection of SNP TSC0017724
aagttgtatttg

SEQ ID NO: 297730 - DNA, 12 bp, Artificial Sequence
  Oligonucleotide primer for the detection of SNP TSC0017726
taaaattatatt

SEQ ID NO: 297731 - DNA, 12 bp, Artificial Sequence
  Oligonucleotide primer for the detection of SNP TSC0017726
atattgggtaag

SEQ ID NO: 297732 - DNA, 12 bp, Artificial Sequence
  Oligonucleotide primer for the detection of SNP TSC0017727
ataattccctat

SEQ ID NO: 297733 - DNA, 12 bp, Artificial Sequence
  Oligonucleotide primer for the detection of SNP TSC0017727
gtgatagtttta

SEQ ID NO: 297734 - DNA, 12 bp, Artificial Sequence
  Oligonucleotide primer for the detection of SNP TSC0017728
tacctaaaatat

SEQ ID NO: 297735 - DNA, 12 bp, Artificial Sequence
  Oligonucleotide primer for the detection of SNP TSC0017728
aggattttaaaa

SEQ ID NO: 297736 - DNA, 12 bp, Artificial Sequence
  Oligonucleotide primer for the detection of SNP TSC0017735
tagtagaaattg

SEQ ID NO: 297737 - DNA, 12 bp, Artificial Sequence
  Oligonucleotide primer for the detection of SNP TSC0017735
gaagataaaaat

SEQ ID NO: 297738 - DNA, 12 bp, Artificial Sequence
  Oligonucleotide primer for the detection of SNP TSC0017736
atatattatttc

SEQ ID NO: 297739 - DNA, 12 bp, Artificial Sequence
  Oligonucleotide primer for the detection of SNP TSC0017736
taggggtttaaa

SEQ ID NO: 297740 - DNA, 12 bp, Artificial Sequence
  Oligonucleotide primer for the detection of SNP TSC0017737
ctcaaaatctac

SEQ ID NO: 297741 - DNA, 12 bp, Artificial Sequence
  Oligonucleotide primer for the detection of SNP TSC0017737
ggttttattata

SEQ ID NO: 297742 - DNA, 12 bp, Artificial Sequence
  Oligonucleotide primer for the detection of SNP TSC0017738
aacataaaaacc

SEQ ID NO: 297743 - DNA, 12 bp, Artificial Sequence
  Oligonucleotide primer for the detection of SNP TSC0017738
atatgtatgttg

SEQ ID NO: 297744 - DNA, 12 bp, Artificial Sequence
  Oligonucleotide primer for the detection of SNP TSC0017738
acatatatatta

SEQ ID NO: 297745 - DNA, 12 bp, Artificial Sequence
  Oligonucleotide primer for the detection of SNP TSC0017738
ggtatggaaatt

SEQ ID NO: 297746 - DNA, 12 bp, Artificial Sequence
  Oligonucleotide primer for the detection of SNP TSC0017743
atatattttttt

SEQ ID NO: 297747 - DNA, 12 bp, Artificial Sequence
  Oligonucleotide primer for the detection of SNP TSC0017743
tacattcaccta

SEQ ID NO: 297748 - DNA, 12 bp, Artificial Sequence
  Oligonucleotide primer for the detection of SNP TSC0017745
aagttgattttt

SEQ ID NO: 297749 - DNA, 12 bp, Artificial Sequence
  Oligonucleotide primer for the detection of SNP TSC0017745
caaactaacttc

SEQ ID NO: 297750 - DNA, 12 bp, Artificial Sequence
  Oligonucleotide primer for the detection of SNP TSC0017745
aaaaaagataag

SEQ ID NO: 297751 - DNA, 12 bp, Artificial Sequence
  Oligonucleotide primer for the detection of SNP TSC0017746
atcaataataac

SEQ ID NO: 297752 - DNA, 12 bp, Artificial Sequence
  Oligonucleotide primer for the detection of SNP TSC0017746
tagttaaagaat

SEQ ID NO: 297753 - DNA, 12 bp, Artificial Sequence
  Oligonucleotide primer for the detection of SNP TSC0017746
tagttaaagaac

SEQ ID NO: 297754 - DNA, 12 bp, Artificial Sequence
  Oligonucleotide primer for the detection of SNP TSC0017746
taatgatgattt

SEQ ID NO: 297755 - DNA, 12 bp, Artificial Sequence
  Oligonucleotide primer for the detection of SNP TSC0017747
ctaatttataac

SEQ ID NO: 297756 - DNA, 12 bp, Artificial Sequence
  Oligonucleotide primer for the detection of SNP TSC0017747
agtaattgataa

SEQ ID NO: 297757 - DNA, 12 bp, Artificial Sequence
  Oligonucleotide primer for the detection of SNP TSC0017748
tggtggtttatg

SEQ ID NO: 297758 - DNA, 12 bp, Artificial Sequence
  Oligonucleotide primer for the detection of SNP TSC0017748
tggtggtttacg

SEQ ID NO: 297759 - DNA, 12 bp, Artificial Sequence
  Oligonucleotide primer for the detection of SNP TSC0017748
taataactcaca

SEQ ID NO: 297760 - DNA, 12 bp, Artificial Sequence
  Oligonucleotide primer for the detection of SNP TSC0017748
taataactcacg

SEQ ID NO: 297761 - DNA, 12 bp, Artificial Sequence
  Oligonucleotide primer for the detection of SNP TSC0017748
agttttgggatt

SEQ ID NO: 297762 - DNA, 12 bp, Artificial Sequence
  Oligonucleotide primer for the detection of SNP TSC0017749
cacaccctactt

SEQ ID NO: 297763 - DNA, 12 bp, Artificial Sequence
  Oligonucleotide primer for the detection of SNP TSC0017749
aagtttttagag

SEQ ID NO: 297764 - DNA, 12 bp, Artificial Sequence
  Oligonucleotide primer for the detection of SNP TSC0017749
aaactctcaaaa

SEQ ID NO: 297765 - DNA, 12 bp, Artificial Sequence
  Oligonucleotide primer for the detection of SNP TSC0017750
tatttaggaatg

SEQ ID NO: 297766 - DNA, 12 bp, Artificial Sequence
  Oligonucleotide primer for the detection of SNP TSC0017750
cattcaaaaata

SEQ ID NO: 297767 - DNA, 12 bp, Artificial Sequence
  Oligonucleotide primer for the detection of SNP TSC0017750
gggatttgaggt

SEQ ID NO: 297768 - DNA, 12 bp, Artificial Sequence
  Oligonucleotide primer for the detection of SNP TSC0017751
acataaaacttt

SEQ ID NO: 297769 - DNA, 12 bp, Artificial Sequence
  Oligonucleotide primer for the detection of SNP TSC0017751
ggatgggaagta

SEQ ID NO: 297770 - DNA, 12 bp, Artificial Sequence
  Oligonucleotide primer for the detection of SNP TSC0017753
ccctaaaaaaac

SEQ ID NO: 297771 - DNA, 12 bp, Artificial Sequence
  Oligonucleotide primer for the detection of SNP TSC0017753
ttggttgttgag

SEQ ID NO: 297772 - DNA, 12 bp, Artificial Sequence
  Oligonucleotide primer for the detection of SNP TSC0017754
gaattaggtgaa

SEQ ID NO: 297773 - DNA, 12 bp, Artificial Sequence
  Oligonucleotide primer for the detection of SNP TSC0017754
aaatcaaataaa

SEQ ID NO: 297774 - DNA, 12 bp, Artificial Sequence
  Oligonucleotide primer for the detection of SNP TSC0017754
atttagggtgta

SEQ ID NO: 297775 - DNA, 12 bp, Artificial Sequence
  Oligonucleotide primer for the detection of SNP TSC0017756
ttataattcaaa

SEQ ID NO: 297776 - DNA, 12 bp, Artificial Sequence
  Oligonucleotide primer for the detection of SNP TSC0017756
aattatagatat

SEQ ID NO: 297777 - DNA, 12 bp, Artificial Sequence
  Oligonucleotide primer for the detection of SNP TSC0017756
aattatagatac

SEQ ID NO: 297778 - DNA, 12 bp, Artificial Sequence
  Oligonucleotide primer for the detection of SNP TSC0017756
aatcacaaatac

SEQ ID NO: 297779 - DNA, 12 bp, Artificial Sequence
  Oligonucleotide primer for the detection of SNP TSC0017756
ttgttgtgattt

SEQ ID NO: 297780 - DNA, 12 bp, Artificial Sequence
  Oligonucleotide primer for the detection of SNP TSC0017757
tcacacctctcc

SEQ ID NO: 297781 - DNA, 12 bp, Artificial Sequence
  Oligonucleotide primer for the detection of SNP TSC0017757
tcacgcctctcc

SEQ ID NO: 297782 - DNA, 12 bp, Artificial Sequence
  Oligonucleotide primer for the detection of SNP TSC0017757
tcgcacctctcc

SEQ ID NO: 297783 - DNA, 12 bp, Artificial Sequence
  Oligonucleotide primer for the detection of SNP TSC0017757
tcgcgcctctcc

SEQ ID NO: 297784 - DNA, 12 bp, Artificial Sequence
  Oligonucleotide primer for the detection of SNP TSC0017757
gggaggtgtgga

SEQ ID NO: 297785 - DNA, 12 bp, Artificial Sequence
  Oligonucleotide primer for the detection of SNP TSC0017761
tttagtgaaggg

SEQ ID NO: 297786 - DNA, 12 bp, Artificial Sequence
  Oligonucleotide primer for the detection of SNP TSC0017767
tacctatttcta

SEQ ID NO: 297787 - DNA, 12 bp, Artificial Sequence
  Oligonucleotide primer for the detection of SNP TSC0017769
cttactatttct

SEQ ID NO: 297788 - DNA, 12 bp, Artificial Sequence
  Oligonucleotide primer for the detection of SNP TSC0017769
tatttggttata

SEQ ID NO: 297789 - DNA, 12 bp, Artificial Sequence
  Oligonucleotide primer for the detection of SNP TSC0017772
aaaacaaatatt

SEQ ID NO: 297790 - DNA, 12 bp, Artificial Sequence
  Oligonucleotide primer for the detection of SNP TSC0017772
gagagttatagg

SEQ ID NO: 297791 - DNA, 12 bp, Artificial Sequence
  Oligonucleotide primer for the detection of SNP TSC0017776
caacccaacccc

SEQ ID NO: 297792 - DNA, 12 bp, Artificial Sequence
  Oligonucleotide primer for the detection of SNP TSC0017776
caacccgacccc

SEQ ID NO: 297793 - DNA, 12 bp, Artificial Sequence
  Oligonucleotide primer for the detection of SNP TSC0017776
cgacccaacccc

SEQ ID NO: 297794 - DNA, 12 bp, Artificial Sequence
  Oligonucleotide primer for the detection of SNP TSC0017776
cgacccgacccc

SEQ ID NO: 297795 - DNA, 12 bp, Artificial Sequence
  Oligonucleotide primer for the detection of SNP TSC0017776
gtggggtttttg

SEQ ID NO: 297796 - DNA, 12 bp, Artificial Sequence
  Oligonucleotide primer for the detection of SNP TSC0017776
gtggggttttcg

SEQ ID NO: 297797 - DNA, 12 bp, Artificial Sequence
  Oligonucleotide primer for the detection of SNP TSC0017779
attttataatta

SEQ ID NO: 297798 - DNA, 12 bp, Artificial Sequence
  Oligonucleotide primer for the detection of SNP TSC0017779
ttagtaaatgtt

SEQ ID NO: 297799 - DNA, 12 bp, Artificial Sequence
  Oligonucleotide primer for the detection of SNP TSC0017779
ttagtaaacgtt

SEQ ID NO: 297800 - DNA, 12 bp, Artificial Sequence
  Oligonucleotide primer for the detection of SNP TSC0017779
ctaacaaacatt

SEQ ID NO: 297801 - DNA, 12 bp, Artificial Sequence
  Oligonucleotide primer for the detection of SNP TSC0017779
ctaacaaacgtt

SEQ ID NO: 297802 - DNA, 12 bp, Artificial Sequence
  Oligonucleotide primer for the detection of SNP TSC0017779
attttataattg

SEQ ID NO: 297803 - DNA, 12 bp, Artificial Sequence
  Oligonucleotide primer for the detection of SNP TSC0017780
ttcttccctaaa

SEQ ID NO: 297804 - DNA, 12 bp, Artificial Sequence
  Oligonucleotide primer for the detection of SNP TSC0017780
ttgtttaaaaag

SEQ ID NO: 297805 - DNA, 12 bp, Artificial Sequence
  Oligonucleotide primer for the detection of SNP TSC0017781
aaaaaacccaac

SEQ ID NO: 297806 - DNA, 12 bp, Artificial Sequence
  Oligonucleotide primer for the detection of SNP TSC0017781
gaaggaggtgga

SEQ ID NO: 297807 - DNA, 12 bp, Artificial Sequence
  Oligonucleotide primer for the detection of SNP TSC0017782
atacttacctac

SEQ ID NO: 297808 - DNA, 12 bp, Artificial Sequence
  Oligonucleotide primer for the detection of SNP TSC0017783
attccatataca

SEQ ID NO: 297809 - DNA, 12 bp, Artificial Sequence
  Oligonucleotide primer for the detection of SNP TSC0017783
gaatgtatatgt

SEQ ID NO: 297810 - DNA, 12 bp, Artificial Sequence
  Oligonucleotide primer for the detection of SNP TSC0017784
aaacttaaatac

SEQ ID NO: 297811 - DNA, 12 bp, Artificial Sequence
  Oligonucleotide primer for the detection of SNP TSC0017784
tttagtagtagg

SEQ ID NO: 297812 - DNA, 12 bp, Artificial Sequence
  Oligonucleotide primer for the detection of SNP TSC0017784
cccaacaacaaa

SEQ ID NO: 297813 - DNA, 12 bp, Artificial Sequence
  Oligonucleotide primer for the detection of SNP TSC0017784
aggtttgagtgt

SEQ ID NO: 297814 - DNA, 12 bp, Artificial Sequence
  Oligonucleotide primer for the detection of SNP TSC0017785
aggatatggaaa

SEQ ID NO: 297815 - DNA, 12 bp, Artificial Sequence
  Oligonucleotide primer for the detection of SNP TSC0017786
tattaacattta

SEQ ID NO: 297816 - DNA, 12 bp, Artificial Sequence
  Oligonucleotide primer for the detection of SNP TSC0017786
acgttttgtttt

SEQ ID NO: 297817 - DNA, 12 bp, Artificial Sequence
  Oligonucleotide primer for the detection of SNP TSC0017786
atgttttgtttc

SEQ ID NO: 297818 - DNA, 12 bp, Artificial Sequence
  Oligonucleotide primer for the detection of SNP TSC0017786
acgttttgtttc

SEQ ID NO: 297819 - DNA, 12 bp, Artificial Sequence
  Oligonucleotide primer for the detection of SNP TSC0017786
acatcctacccc

SEQ ID NO: 297820 - DNA, 12 bp, Artificial Sequence
  Oligonucleotide primer for the detection of SNP TSC0017786
acgtcctacccc

SEQ ID NO: 297821 - DNA, 12 bp, Artificial Sequence
  Oligonucleotide primer for the detection of SNP TSC0017786
tgttggtatttg

SEQ ID NO: 297822 - DNA, 12 bp, Artificial Sequence
  Oligonucleotide primer for the detection of SNP TSC0017787
acgaattcttcc

SEQ ID NO: 297823 - DNA, 12 bp, Artificial Sequence
  Oligonucleotide primer for the detection of SNP TSC0017788
aaaaattactac

SEQ ID NO: 297824 - DNA, 12 bp, Artificial Sequence
  Oligonucleotide primer for the detection of SNP TSC0017788
attttgtgtttc

SEQ ID NO: 297825 - DNA, 12 bp, Artificial Sequence
  Oligonucleotide primer for the detection of SNP TSC0017788
accctatactcc

SEQ ID NO: 297826 - DNA, 12 bp, Artificial Sequence
  Oligonukleotid-Primer
agaggttgttat

SEQ ID NO: 297827 - DNA, 12 bp, Artificial Sequence
  Oligonucleotide primer for the detection of SNP TSC0017788
agaggttgttac

SEQ ID NO: 297828 - DNA, 12 bp, Artificial Sequence
  Oligonucleotide primer for the detection of SNP TSC0017791
tttatgtattag

SEQ ID NO: 297829 - DNA, 12 bp, Artificial Sequence
  Oligonucleotide primer for the detection of SNP TSC0017792
atctaaattaat

SEQ ID NO: 297830 - DNA, 12 bp, Artificial Sequence
  Oligonukleotid-Primer
aggttttgggag

SEQ ID NO: 297831 - DNA, 12 bp, Artificial Sequence
  Oligonucleotide primer for the detection of SNP TSC0017793
tcaaaaccaaaa

SEQ ID NO: 297832 - DNA, 12 bp, Artificial Sequence
  Oligonucleotide primer for the detection of SNP TSC0017793
tcgaaaccaaaa

SEQ ID NO: 297833 - DNA, 12 bp, Artificial Sequence
  Oligonucleotide primer for the detection of SNP TSC0017793
tggtttttttgt

SEQ ID NO: 297834 - DNA, 12 bp, Artificial Sequence
  Oligonucleotide primer for the detection of SNP TSC0017793
tggttttttcgt

SEQ ID NO: 297835 - DNA, 12 bp, Artificial Sequence
  Oligonucleotide primer for the detection of SNP TSC0017793
taactccctcac

SEQ ID NO: 297836 - DNA, 12 bp, Artificial Sequence
  Oligonucleotide primer for the detection of SNP TSC0017793
taactccctcgc

SEQ ID NO: 297837 - DNA, 12 bp, Artificial Sequence
  Oligonucleotide primer for the detection of SNP TSC0017794
aaaaaattccct

SEQ ID NO: 297838 - DNA, 12 bp, Artificial Sequence
  Oligonucleotide primer for the detection of SNP TSC0017794
atagtttttatg

SEQ ID NO: 297839 - DNA, 12 bp, Artificial Sequence
  Oligonucleotide primer for the detection of SNP TSC0017795
ataaaatcacaa

SEQ ID NO: 297840 - DNA, 12 bp, Artificial Sequence
  Oligonucleotide primer for the detection of SNP TSC0017795
atgtatagagaa

SEQ ID NO: 297841 - DNA, 12 bp, Artificial Sequence
  Oligonucleotide primer for the detection of SNP TSC0017795
atatataaaaaa

SEQ ID NO: 297842 - DNA, 12 bp, Artificial Sequence
  Oligonucleotide primer for the detection of SNP TSC0017795
aatgaaattata

SEQ ID NO: 297843 - DNA, 12 bp, Artificial Sequence
  Oligonucleotide primer for the detection of SNP TSC0017799
cattttaaaaat

SEQ ID NO: 297844 - DNA, 12 bp, Artificial Sequence
  Oligonucleotide primer for the detection of SNP TSC0017799
gatttttagaat

SEQ ID NO: 297845 - DNA, 12 bp, Artificial Sequence
  Oligonucleotide primer for the detection of SNP TSC0017799
aactctcaaaac

SEQ ID NO: 297846 - DNA, 12 bp, Artificial Sequence
  Oligonucleotide primer for the detection of SNP TSC0017799
tattttgggagt

SEQ ID NO: 297847 - DNA, 12 bp, Artificial Sequence
  Oligonucleotide primer for the detection of SNP TSC0017800
taactaatcatc

SEQ ID NO: 297848 - DNA, 12 bp, Artificial Sequence
  Oligonucleotide primer for the detection of SNP TSC0017800
taactaatcgtc

SEQ ID NO: 297849 - DNA, 12 bp, Artificial Sequence
  Oligonucleotide primer for the detection of SNP TSC0017800
tgtataggatag

SEQ ID NO: 297850 - DNA, 12 bp, Artificial Sequence
  Oligonucleotide primer for the detection of SNP TSC0017800
gattggttgttt

SEQ ID NO: 297851 - DNA, 12 bp, Artificial Sequence
  Oligonucleotide primer for the detection of SNP TSC0017800
gattggtcgttt

SEQ ID NO: 297852 - DNA, 12 bp, Artificial Sequence
  Oligonucleotide primer for the detection of SNP TSC0017802
aatatcaaccac

SEQ ID NO: 297853 - DNA, 12 bp, Artificial Sequence
  Oligonucleotide primer for the detection of SNP TSC0017802
tttgtatattta

SEQ ID NO: 297854 - DNA, 12 bp, Artificial Sequence
  Oligonucleotide primer for the detection of SNP TSC0017803
cacactttttcc

SEQ ID NO: 297855 - DNA, 12 bp, Artificial Sequence
  Oligonucleotide primer for the detection of SNP TSC0017803
tttatttaatgt

SEQ ID NO: 297856 - DNA, 12 bp, Artificial Sequence
  Oligonucleotide primer for the detection of SNP TSC0017803
tttatttaacgt

SEQ ID NO: 297857 - DNA, 12 bp, Artificial Sequence
  Oligonucleotide primer for the detection of SNP TSC0017803
tcatttaacata

SEQ ID NO: 297858 - DNA, 12 bp, Artificial Sequence
  Oligonucleotide primer for the detection of SNP TSC0017803
tcatttaacgta

SEQ ID NO: 297859 - DNA, 12 bp, Artificial Sequence
  Oligonucleotide primer for the detection of SNP TSC0017804
attcctacacaa

SEQ ID NO: 297860 - DNA, 12 bp, Artificial Sequence
  Oligonucleotide primer for the detection of SNP TSC0017804
aataaaactata

SEQ ID NO: 297861 - DNA, 12 bp, Artificial Sequence
  Oligonucleotide primer for the detection of SNP TSC0017804
gtttttatatag

SEQ ID NO: 297862 - DNA, 12 bp, Artificial Sequence
  Oligonucleotide primer for the detection of SNP TSC0017806
acacaccacaaa

SEQ ID NO: 297863 - DNA, 12 bp, Artificial Sequence
  Oligonucleotide primer for the detection of SNP TSC0017806
acacaccgcaaa

SEQ ID NO: 297864 - DNA, 12 bp, Artificial Sequence
  Oligonucleotide primer for the detection of SNP TSC0017806
acgcaccacaaa

SEQ ID NO: 297865 - DNA, 12 bp, Artificial Sequence
  Oligonucleotide primer for the detection of SNP TSC0017806
acgcaccgcaaa

SEQ ID NO: 297866 - DNA, 12 bp, Artificial Sequence
  Oligonucleotide primer for the detection of SNP TSC0017806
agtgttgaagta

SEQ ID NO: 297867 - DNA, 12 bp, Artificial Sequence
  Oligonucleotide primer for the detection of SNP TSC0017806
tattaaaacaaa

SEQ ID NO: 297868 - DNA, 12 bp, Artificial Sequence
  Oligonucleotide primer for the detection of SNP TSC0017806
gtattgtaggtt

SEQ ID NO: 297869 - DNA, 12 bp, Artificial Sequence
  Oligonucleotide primer for the detection of SNP TSC0017806
gtatcgtaggtt

SEQ ID NO: 297870 - DNA, 12 bp, Artificial Sequence
  Oligonucleotide primer for the detection of SNP TSC0017806
gtattgtaggtc

SEQ ID NO: 297871 - DNA, 12 bp, Artificial Sequence
  Oligonucleotide primer for the detection of SNP TSC0017806
gtatcgtaggtc

SEQ ID NO: 297872 - DNA, 12 bp, Artificial Sequence
  Oligonucleotide primer for the detection of SNP TSC0017807
accaattatata

SEQ ID NO: 297873 - DNA, 12 bp, Artificial Sequence
  Oligonucleotide primer for the detection of SNP TSC0017807
accgattatata

SEQ ID NO: 297874 - DNA, 12 bp, Artificial Sequence
  Oligonucleotide primer for the detection of SNP TSC0017807
tttttatagaat

SEQ ID NO: 297875 - DNA, 12 bp, Artificial Sequence
  Oligonucleotide primer for the detection of SNP TSC0017807
tcctcacaaaat

SEQ ID NO: 297876 - DNA, 12 bp, Artificial Sequence
  Oligonucleotide primer for the detection of SNP TSC0017807
attgattgtata

SEQ ID NO: 297877 - DNA, 12 bp, Artificial Sequence
  Oligonucleotide primer for the detection of SNP TSC0017807
atcgattgtata

SEQ ID NO: 297878 - DNA, 12 bp, Artificial Sequence
  Oligonucleotide primer for the detection of SNP TSC0017808
ttcttccttcct

SEQ ID NO: 297879 - DNA, 12 bp, Artificial Sequence
  Oligonucleotide primer for the detection of SNP TSC0017808
taaatatattta

SEQ ID NO: 297880 - DNA, 12 bp, Artificial Sequence
  Oligonucleotide primer for the detection of SNP TSC0017808
caaatacattta

SEQ ID NO: 297881 - DNA, 12 bp, Artificial Sequence
  Oligonucleotide primer for the detection of SNP TSC0017810
accacaaatacc

SEQ ID NO: 297882 - DNA, 12 bp, Artificial Sequence
  Oligonucleotide primer for the detection of SNP TSC0017810
agtttagttaga

SEQ ID NO: 297883 - DNA, 12 bp, Artificial Sequence
  Oligonucleotide primer for the detection of SNP TSC0017811
caaataaaataa

SEQ ID NO: 297884 - DNA, 12 bp, Artificial Sequence
  Oligonucleotide primer for the detection of SNP TSC0017811
cgaataaaataa

SEQ ID NO: 297885 - DNA, 12 bp, Artificial Sequence
  Oligonucleotide primer for the detection of SNP TSC0017811
ttggagttttat

SEQ ID NO: 297886 - DNA, 12 bp, Artificial Sequence
  Oligonucleotide primer for the detection of SNP TSC0017811
ctaaaatcccac

SEQ ID NO: 297887 - DNA, 12 bp, Artificial Sequence
  Oligonucleotide primer for the detection of SNP TSC0017811
tgggtggggtgg

SEQ ID NO: 297888 - DNA, 12 bp, Artificial Sequence
  Oligonucleotide primer for the detection of SNP TSC0017811
cgggtggggtgg

SEQ ID NO: 297889 - DNA, 12 bp, Artificial Sequence
  Oligonucleotide primer for the detection of SNP TSC0017813
attaaaacattt

SEQ ID NO: 297890 - DNA, 12 bp, Artificial Sequence
  Oligonucleotide primer for the detection of SNP TSC0017813
attaaaacgttt

SEQ ID NO: 297891 - DNA, 12 bp, Artificial Sequence
  Oligonucleotide primer for the detection of SNP TSC0017818
taggattatggt

SEQ ID NO: 297892 - DNA, 12 bp, Artificial Sequence
  Oligonucleotide primer for the detection of SNP TSC0017818
caaaaccataac

SEQ ID NO: 297893 - DNA, 12 bp, Artificial Sequence
  Oligonucleotide primer for the detection of SNP TSC0017818
agtgagggaggg

SEQ ID NO: 297894 - DNA, 12 bp, Artificial Sequence
  Oligonucleotide primer for the detection of SNP TSC0017819
ttatattctaca

SEQ ID NO: 297895 - DNA, 12 bp, Artificial Sequence
  Oligonucleotide primer for the detection of SNP TSC0017819
tttcttctaaaa

SEQ ID NO: 297896 - DNA, 12 bp, Artificial Sequence
  Oligonucleotide primer for the detection of SNP TSC0017820
gtagtttttgtt

SEQ ID NO: 297897 - DNA, 12 bp, Artificial Sequence
  Oligonucleotide primer for the detection of SNP TSC0017820
gtagttttcgtt

SEQ ID NO: 297898 - DNA, 12 bp, Artificial Sequence
  Oligonucleotide primer for the detection of SNP TSC0017820
taatctccatca

SEQ ID NO: 297899 - DNA, 12 bp, Artificial Sequence
  Oligonucleotide primer for the detection of SNP TSC0017820
taatctccgtca

SEQ ID NO: 297900 - DNA, 12 bp, Artificial Sequence
  Oligonucleotide primer for the detection of SNP TSC0017820
ttgggaagttat

SEQ ID NO: 297901 - DNA, 12 bp, Artificial Sequence
  Oligonucleotide primer for the detection of SNP TSC0017821
aaaatcaatcat

SEQ ID NO: 297902 - DNA, 12 bp, Artificial Sequence
  Oligonucleotide primer for the detection of SNP TSC0017821
tttatttttatg

SEQ ID NO: 297903 - DNA, 12 bp, Artificial Sequence
  Oligonucleotide primer for the detection of SNP TSC0017822
gattgaggatga

SEQ ID NO: 297904 - DNA, 12 bp, Artificial Sequence
  Oligonucleotide primer for the detection of SNP TSC0017823
catcacctacat

SEQ ID NO: 297905 - DNA, 12 bp, Artificial Sequence
  Oligonucleotide primer for the detection of SNP TSC0017824
ttgttgatttga

SEQ ID NO: 297906 - DNA, 12 bp, Artificial Sequence
  Oligonucleotide primer for the detection of SNP TSC0017825
caaattttacat

SEQ ID NO: 297907 - DNA, 12 bp, Artificial Sequence
  Oligonucleotide primer for the detection of SNP TSC0017825
tattttatattg

SEQ ID NO: 297908 - DNA, 12 bp, Artificial Sequence
  Oligonucleotide primer for the detection of SNP TSC0017825
catctcacacta

SEQ ID NO: 297909 - DNA, 12 bp, Artificial Sequence
  Oligonucleotide primer for the detection of SNP TSC0017825
taaattttgtat

SEQ ID NO: 297910 - DNA, 12 bp, Artificial Sequence
  Oligonucleotide primer for the detection of SNP TSC0017826
ctattaacttct

SEQ ID NO: 297911 - DNA, 12 bp, Artificial Sequence
  Oligonucleotide primer for the detection of SNP TSC0017826
tttgagatggaa

SEQ ID NO: 297912 - DNA, 12 bp, Artificial Sequence
  Oligonucleotide primer for the detection of SNP TSC0017827
tttcattttttt

SEQ ID NO: 297913 - DNA, 12 bp, Artificial Sequence
  Oligonucleotide primer for the detection of SNP TSC0017827
tttcgttttttt

SEQ ID NO: 297914 - DNA, 12 bp, Artificial Sequence
  Oligonucleotide primer for the detection of SNP TSC0017828
taaaaccaaaca

SEQ ID NO: 297915 - DNA, 12 bp, Artificial Sequence
  Oligonucleotide primer for the detection of SNP TSC0017828
taaaaccaaacg

SEQ ID NO: 297916 - DNA, 12 bp, Artificial Sequence
  Oligonucleotide primer for the detection of SNP TSC0017828
taggcgtgagtt

SEQ ID NO: 297917 - DNA, 12 bp, Artificial Sequence
  Oligonucleotide primer for the detection of SNP TSC0017828
taaacataaacc

SEQ ID NO: 297918 - DNA, 12 bp, Artificial Sequence
  Oligonucleotide primer for the detection of SNP TSC0017828
taaacgtaaacc

SEQ ID NO: 297919 - DNA, 12 bp, Artificial Sequence
  Oligonucleotide primer for the detection of SNP TSC0017828
taagattaggtg

SEQ ID NO: 297920 - DNA, 12 bp, Artificial Sequence
  Oligonucleotide primer for the detection of SNP TSC0017828
taagattaggcg

SEQ ID NO: 297921 - DNA, 12 bp, Artificial Sequence
  Oligonucleotide primer for the detection of SNP TSC0017833
ccaaattataca

SEQ ID NO: 297922 - DNA, 12 bp, Artificial Sequence
  Oligonucleotide primer for the detection of SNP TSC0017833
ttgggatgtagg

SEQ ID NO: 297923 - DNA, 12 bp, Artificial Sequence
  Oligonucleotide primer for the detection of SNP TSC0017833
tcgggatgtagg

SEQ ID NO: 297924 - DNA, 12 bp, Artificial Sequence
  Oligonucleotide primer for the detection of SNP TSC0017833
ccaaaatacaaa

SEQ ID NO: 297925 - DNA, 12 bp, Artificial Sequence
  Oligonucleotide primer for the detection of SNP TSC0017833
ccgaaatacaaa

SEQ ID NO: 297926 - DNA, 12 bp, Artificial Sequence
  Oligonucleotide primer for the detection of SNP TSC0017833
ttaaattgtgta

SEQ ID NO: 297927 - DNA, 12 bp, Artificial Sequence
  Oligonucleotide primer for the detection of SNP TSC0017834
gatggagtttta

SEQ ID NO: 297928 - DNA, 12 bp, Artificial Sequence
  Oligonucleotide primer for the detection of SNP TSC0017834
aataaaatttta

SEQ ID NO: 297929 - DNA, 12 bp, Artificial Sequence
  Oligonucleotide primer for the detection of SNP TSC0017834
ttagttaatatg

SEQ ID NO: 297930 - DNA, 12 bp, Artificial Sequence
  Oligonucleotide primer for the detection of SNP TSC0017835
tatattctatat

SEQ ID NO: 297931 - DNA, 12 bp, Artificial Sequence
  Oligonucleotide primer for the detection of SNP TSC0017835
tttagagtatgg

SEQ ID NO: 297932 - DNA, 12 bp, Artificial Sequence
  Oligonucleotide primer for the detection of SNP TSC0017835
tccaaaacataa

SEQ ID NO: 297933 - DNA, 12 bp, Artificial Sequence
  Oligonucleotide primer for the detection of SNP TSC0017835
tgtgttttgtgt

SEQ ID NO: 297934 - DNA, 12 bp, Artificial Sequence
  Oligonucleotide primer for the detection of SNP TSC0017836
cacaaaaaccaa

SEQ ID NO: 297935 - DNA, 12 bp, Artificial Sequence
  Oligonucleotide primer for the detection of SNP TSC0017836
cgcaaaaaccaa

SEQ ID NO: 297936 - DNA, 12 bp, Artificial Sequence
  Oligonucleotide primer for the detection of SNP TSC0017836
gagattaggaat

SEQ ID NO: 297937 - DNA, 12 bp, Artificial Sequence
  Oligonucleotide primer for the detection of SNP TSC0017836
tgtagaaattaa

SEQ ID NO: 297938 - DNA, 12 bp, Artificial Sequence
  Oligonucleotide primer for the detection of SNP TSC0017836
cgtagaaattaa

SEQ ID NO: 297939 - DNA, 12 bp, Artificial Sequence
  Oligonucleotide primer for the detection of SNP TSC0017837
tactttctccca

SEQ ID NO: 297940 - DNA, 12 bp, Artificial Sequence
  Oligonucleotide primer for the detection of SNP TSC0017837
ttttcgtttttt

SEQ ID NO: 297941 - DNA, 12 bp, Artificial Sequence
  Oligonucleotide primer for the detection of SNP TSC0017837
aatcctcattcc

SEQ ID NO: 297942 - DNA, 12 bp, Artificial Sequence
  Oligonucleotide primer for the detection of SNP TSC0017837
aatcctcgttcc

SEQ ID NO: 297943 - DNA, 12 bp, Artificial Sequence
  Oligonucleotide primer for the detection of SNP TSC0017838
aatcaaaactaa

SEQ ID NO: 297944 - DNA, 12 bp, Artificial Sequence
  Oligonucleotide primer for the detection of SNP TSC0017838
taagaggtgaag

SEQ ID NO: 297945 - DNA, 12 bp, Artificial Sequence
  Oligonucleotide primer for the detection of SNP TSC0017839
aaacatatccta

SEQ ID NO: 297946 - DNA, 12 bp, Artificial Sequence
  Oligonucleotide primer for the detection of SNP TSC0017839
tgtagatgagtt

SEQ ID NO: 297947 - DNA, 12 bp, Artificial Sequence
  Oligonucleotide primer for the detection of SNP TSC0017839
attacaaataaa

SEQ ID NO: 297948 - DNA, 12 bp, Artificial Sequence
  Oligonucleotide primer for the detection of SNP TSC0017839
ggtatattttat

SEQ ID NO: 297949 - DNA, 12 bp, Artificial Sequence
  Oligonucleotide primer for the detection of SNP TSC0017845
ttaaaattatta

SEQ ID NO: 297950 - DNA, 12 bp, Artificial Sequence
  Oligonucleotide primer for the detection of SNP TSC0017845
ttaaggtaattt

SEQ ID NO: 297951 - DNA, 12 bp, Artificial Sequence
  Oligonucleotide primer for the detection of SNP TSC0017845
taaaataattta

SEQ ID NO: 297952 - DNA, 12 bp, Artificial Sequence
  Oligonucleotide primer for the detection of SNP TSC0017845
aattgttgtttt

SEQ ID NO: 297953 - DNA, 12 bp, Artificial Sequence
  Oligonucleotide primer for the detection of SNP TSC0017845
aattgttgtttc

SEQ ID NO: 297954 - DNA, 12 bp, Artificial Sequence
  Oligonucleotide primer for the detection of SNP TSC0017846
taattaaaatta

SEQ ID NO: 297955 - DNA, 12 bp, Artificial Sequence
  Oligonucleotide primer for the detection of SNP TSC0017846
atttgaggggta

SEQ ID NO: 297956 - DNA, 12 bp, Artificial Sequence
  Oligonucleotide primer for the detection of SNP TSC0017846
atttaaaaaaca

SEQ ID NO: 297957 - DNA, 12 bp, Artificial Sequence
  Oligonucleotide primer for the detection of SNP TSC0017846
atagttggaatt

SEQ ID NO: 297958 - DNA, 12 bp, Artificial Sequence
  Oligonucleotide primer for the detection of SNP TSC0017847
tataaaaatatt

SEQ ID NO: 297959 - DNA, 12 bp, Artificial Sequence
  Oligonucleotide primer for the detection of SNP TSC0017847
ttggtagttttg

SEQ ID NO: 297960 - DNA, 12 bp, Artificial Sequence
  Oligonucleotide primer for the detection of SNP TSC0017851
accaaaactcaa

SEQ ID NO: 297961 - DNA, 12 bp, Artificial Sequence
  Oligonucleotide primer for the detection of SNP TSC0017851
accaaaactcga

SEQ ID NO: 297962 - DNA, 12 bp, Artificial Sequence
  Oligonucleotide primer for the detection of SNP TSC0017851
accgaaactcaa

SEQ ID NO: 297963 - DNA, 12 bp, Artificial Sequence
  Oligonucleotide primer for the detection of SNP TSC0017851
accgaaactcga

SEQ ID NO: 297964 - DNA, 12 bp, Artificial Sequence
  Oligonucleotide primer for the detection of SNP TSC0017851
tggtgggtgtgt

SEQ ID NO: 297965 - DNA, 12 bp, Artificial Sequence
  Oligonucleotide primer for the detection of SNP TSC0017851
cggtgggtgtgt

SEQ ID NO: 297966 - DNA, 12 bp, Artificial Sequence
  Oligonucleotide primer for the detection of SNP TSC0017851
tggcgggtgtgt

SEQ ID NO: 297967 - DNA, 12 bp, Artificial Sequence
  Oligonucleotide primer for the detection of SNP TSC0017851
cggcgggtgtgt

SEQ ID NO: 297968 - DNA, 12 bp, Artificial Sequence
  Oligonucleotide primer for the detection of SNP TSC0017851
tggtgggtgtgc

SEQ ID NO: 297969 - DNA, 12 bp, Artificial Sequence
  Oligonucleotide primer for the detection of SNP TSC0017851
cggtgggtgtgc

SEQ ID NO: 297970 - DNA, 12 bp, Artificial Sequence
  Oligonucleotide primer for the detection of SNP TSC0017851
tggcgggtgtgc

SEQ ID NO: 297971 - DNA, 12 bp, Artificial Sequence
  Oligonucleotide primer for the detection of SNP TSC0017851
cggcgggtgtgc

SEQ ID NO: 297972 - DNA, 12 bp, Artificial Sequence
  Oligonucleotide primer for the detection of SNP TSC0017851
caacgaatatac

SEQ ID NO: 297973 - DNA, 12 bp, Artificial Sequence
  Oligonucleotide primer for the detection of SNP TSC0017851
cgacaaatatac

SEQ ID NO: 297974 - DNA, 12 bp, Artificial Sequence
  Oligonucleotide primer for the detection of SNP TSC0017851
cgacgaatatac

SEQ ID NO: 297975 - DNA, 12 bp, Artificial Sequence
  Oligonucleotide primer for the detection of SNP TSC0017851
gttggggtttgg

SEQ ID NO: 297976 - DNA, 12 bp, Artificial Sequence
  Oligonucleotide primer for the detection of SNP TSC0017851
gtcggggtttgg

SEQ ID NO: 297977 - DNA, 12 bp, Artificial Sequence
  Oligonucleotide primer for the detection of SNP TSC0017851
gttggggttcgg

SEQ ID NO: 297978 - DNA, 12 bp, Artificial Sequence
  Oligonucleotide primer for the detection of SNP TSC0017851
gtcggggttcgg

SEQ ID NO: 297979 - DNA, 12 bp, Artificial Sequence
  Oligonucleotide primer for the detection of SNP TSC0017853
aacaaataatat

SEQ ID NO: 297980 - DNA, 12 bp, Artificial Sequence
  Oligonucleotide primer for the detection of SNP TSC0017857
actttttttttt

SEQ ID NO: 297981 - DNA, 12 bp, Artificial Sequence
  Oligonucleotide primer for the detection of SNP TSC0017857
cctcaattaaaa

SEQ ID NO: 297982 - DNA, 12 bp, Artificial Sequence
  Oligonucleotide primer for the detection of SNP TSC0017858
gttttattttat

SEQ ID NO: 297983 - DNA, 12 bp, Artificial Sequence
  Oligonucleotide primer for the detection of SNP TSC0017858
tacctcatccca

SEQ ID NO: 297984 - DNA, 12 bp, Artificial Sequence
  Oligonucleotide primer for the detection of SNP TSC0017858
gatttgttggtt

SEQ ID NO: 297985 - DNA, 12 bp, Artificial Sequence
  Oligonucleotide primer for the detection of SNP TSC0017859
ttcacttaccta

SEQ ID NO: 297986 - DNA, 12 bp, Artificial Sequence
  Oligonucleotide primer for the detection of SNP TSC0017859
gaggaatgaggt

SEQ ID NO: 297987 - DNA, 12 bp, Artificial Sequence
  Oligonucleotide primer for the detection of SNP TSC0017860
ataaaaaaatca

SEQ ID NO: 297988 - DNA, 12 bp, Artificial Sequence
  Oligonucleotide primer for the detection of SNP TSC0017860
gttggatatttt

SEQ ID NO: 297989 - DNA, 12 bp, Artificial Sequence
  Oligonucleotide primer for the detection of SNP TSC0017860
actaaacactcc

SEQ ID NO: 297990 - DNA, 12 bp, Artificial Sequence
  Oligonucleotide primer for the detection of SNP TSC0017860
gtagggaggtta

SEQ ID NO: 297991 - DNA, 12 bp, Artificial Sequence
  Oligonucleotide primer for the detection of SNP TSC0017862
cacaaatacact

SEQ ID NO: 297992 - DNA, 12 bp, Artificial Sequence
  Oligonucleotide primer for the detection of SNP TSC0017862
tggtttatgtta

SEQ ID NO: 297993 - DNA, 12 bp, Artificial Sequence
  Oligonucleotide primer for the detection of SNP TSC0017863
cttcccacccct

SEQ ID NO: 297994 - DNA, 12 bp, Artificial Sequence
  Oligonucleotide primer for the detection of SNP TSC0017863
agggaggaaaaa

SEQ ID NO: 297995 - DNA, 12 bp, Artificial Sequence
  Oligonucleotide primer for the detection of SNP TSC0017864
acccctcttttt

SEQ ID NO: 297996 - DNA, 12 bp, Artificial Sequence
  Oligonucleotide primer for the detection of SNP TSC0017864
tgttttagggag

SEQ ID NO: 297997 - DNA, 12 bp, Artificial Sequence
  Oligonucleotide primer for the detection of SNP TSC0017865
tattaatattcc

SEQ ID NO: 297998 - DNA, 12 bp, Artificial Sequence
  Oligonucleotide primer for the detection of SNP TSC0017865
atcaaaccacca

SEQ ID NO: 297999 - DNA, 12 bp, Artificial Sequence
  Oligonucleotide primer for the detection of SNP TSC0017865
tattaatatttt

SEQ ID NO: 298000 - DNA, 12 bp, Artificial Sequence
  Oligonucleotide primer for the detection of SNP TSC0017866
ttaataaaatcc

SEQ ID NO: 298001 - DNA, 12 bp, Artificial Sequence
  Oligonucleotide primer for the detection of SNP TSC0017866
aattaaattaag

SEQ ID NO: 298002 - DNA, 12 bp, Artificial Sequence
  Oligonucleotide primer for the detection of SNP TSC0017866
aaccaaattaaa

SEQ ID NO: 298003 - DNA, 12 bp, Artificial Sequence
  Oligonucleotide primer for the detection of SNP TSC0017866
ttaataagattt

SEQ ID NO: 298004 - DNA, 12 bp, Artificial Sequence
  Oligonucleotide primer for the detection of SNP TSC0017867
atccatatattc

SEQ ID NO: 298005 - DNA, 12 bp, Artificial Sequence
  Oligonucleotide primer for the detection of SNP TSC0017867
agaatatatgaa

SEQ ID NO: 298006 - DNA, 12 bp, Artificial Sequence
  Oligonucleotide primer for the detection of SNP TSC0017868
taaaccaaaatt

SEQ ID NO: 298007 - DNA, 12 bp, Artificial Sequence
  Oligonucleotide primer for the detection of SNP TSC0017868
taaaccgaaatt

SEQ ID NO: 298008 - DNA, 12 bp, Artificial Sequence
  Oligonucleotide primer for the detection of SNP TSC0017868
ggagtgtagtgg

SEQ ID NO: 298009 - DNA, 12 bp, Artificial Sequence
  Oligonucleotide primer for the detection of SNP TSC0017870
taactctatact

SEQ ID NO: 298010 - DNA, 12 bp, Artificial Sequence
  Oligonucleotide primer for the detection of SNP TSC0017870
gatttttggaaa

SEQ ID NO: 298011 - DNA, 12 bp, Artificial Sequence
  Oligonucleotide primer for the detection of SNP TSC0017872
actaatatatca

SEQ ID NO: 298012 - DNA, 12 bp, Artificial Sequence
  Oligonucleotide primer for the detection of SNP TSC0017872
aatattatattg

SEQ ID NO: 298013 - DNA, 12 bp, Artificial Sequence
  Oligonucleotide primer for the detection of SNP TSC0017873
aacaaaccttcc

SEQ ID NO: 298014 - DNA, 12 bp, Artificial Sequence
  Oligonucleotide primer for the detection of SNP TSC0017873
aacgaaccttcc

SEQ ID NO: 298015 - DNA, 12 bp, Artificial Sequence
  Oligonucleotide primer for the detection of SNP TSC0017873
tttttttgatgg

SEQ ID NO: 298016 - DNA, 12 bp, Artificial Sequence
  Oligonucleotide primer for the detection of SNP TSC0017873
tttttttgacgg

SEQ ID NO: 298017 - DNA, 12 bp, Artificial Sequence
  Oligonucleotide primer for the detection of SNP TSC0017873
tcttcctaacaa

SEQ ID NO: 298018 - DNA, 12 bp, Artificial Sequence
  Oligonucleotide primer for the detection of SNP TSC0017873
tcttcctaacga

SEQ ID NO: 298019 - DNA, 12 bp, Artificial Sequence
  Oligonucleotide primer for the detection of SNP TSC0017873
ggtggatttttt

SEQ ID NO: 298020 - DNA, 12 bp, Artificial Sequence
  Oligonucleotide primer for the detection of SNP TSC0017873
ggcggatttttt

SEQ ID NO: 298021 - DNA, 12 bp, Artificial Sequence
  Oligonucleotide primer for the detection of SNP TSC0017877
aacctaacaatt

SEQ ID NO: 298022 - DNA, 12 bp, Artificial Sequence
  Oligonucleotide primer for the detection of SNP TSC0017877
taataatagtaa

SEQ ID NO: 298023 - DNA, 12 bp, Artificial Sequence
  Oligonucleotide primer for the detection of SNP TSC0017878
gtaatttgaggg

SEQ ID NO: 298024 - DNA, 12 bp, Artificial Sequence
  Oligonucleotide primer for the detection of SNP TSC0017878
ataacttaaaaa

SEQ ID NO: 298025 - DNA, 12 bp, Artificial Sequence
  Oligonucleotide primer for the detection of SNP TSC0017878
tgatttatatat

SEQ ID NO: 298026 - DNA, 12 bp, Artificial Sequence
  Oligonucleotide primer for the detection of SNP TSC0017880
atcacattacct

SEQ ID NO: 298027 - DNA, 12 bp, Artificial Sequence
  Oligonucleotide primer for the detection of SNP TSC0017880
ggttttgtttag

SEQ ID NO: 298028 - DNA, 12 bp, Artificial Sequence
  Oligonucleotide primer for the detection of SNP TSC0017882
aaatccaaaaac

SEQ ID NO: 298029 - DNA, 12 bp, Artificial Sequence
  Oligonucleotide primer for the detection of SNP TSC0017882
gttgttgttggt

SEQ ID NO: 298030 - DNA, 12 bp, Artificial Sequence
  Oligonucleotide primer for the detection of SNP TSC0017882
actattactaat

SEQ ID NO: 298031 - DNA, 12 bp, Artificial Sequence
  Oligonucleotide primer for the detection of SNP TSC0017882
aggtttaaggat

SEQ ID NO: 298032 - DNA, 12 bp, Artificial Sequence
  Oligonucleotide primer for the detection of SNP TSC0017885
aaacacaaattc

SEQ ID NO: 298033 - DNA, 12 bp, Artificial Sequence
  Oligonucleotide primer for the detection of SNP TSC0017885
ttgttattggaa

SEQ ID NO: 298034 - DNA, 12 bp, Artificial Sequence
  Oligonucleotide primer for the detection of SNP TSC0017885
ttactattaaaa

SEQ ID NO: 298035 - DNA, 12 bp, Artificial Sequence
  Oligonucleotide primer for the detection of SNP TSC0017885
aggtataggttt

SEQ ID NO: 298036 - DNA, 12 bp, Artificial Sequence
  Oligonucleotide primer for the detection of SNP TSC0017886
aaaaactaccta

SEQ ID NO: 298037 - DNA, 12 bp, Artificial Sequence
  Oligonucleotide primer for the detection of SNP TSC0017886
gaaaactaccta

SEQ ID NO: 298038 - DNA, 12 bp, Artificial Sequence
  Oligonucleotide primer for the detection of SNP TSC0017886
attttgttgtgt

SEQ ID NO: 298039 - DNA, 12 bp, Artificial Sequence
  Oligonucleotide primer for the detection of SNP TSC0017886
accctactatat

SEQ ID NO: 298040 - DNA, 12 bp, Artificial Sequence
  Oligonucleotide primer for the detection of SNP TSC0017886
tggaagttgttt

SEQ ID NO: 298041 - DNA, 12 bp, Artificial Sequence
  Oligonucleotide primer for the detection of SNP TSC0017886
cggaagttgttt

SEQ ID NO: 298042 - DNA, 12 bp, Artificial Sequence
  Oligonucleotide primer for the detection of SNP TSC0017887
aggtggaagttg

SEQ ID NO: 298043 - DNA, 12 bp, Artificial Sequence
  Oligonucleotide primer for the detection of SNP TSC0017887
aggcggaagttg

SEQ ID NO: 298044 - DNA, 12 bp, Artificial Sequence
  Oligonucleotide primer for the detection of SNP TSC0017889
acattccaaacc

SEQ ID NO: 298045 - DNA, 12 bp, Artificial Sequence
  Oligonucleotide primer for the detection of SNP TSC0017889
acgttccaaacc

SEQ ID NO: 298046 - DNA, 12 bp, Artificial Sequence
  Oligonucleotide primer for the detection of SNP TSC0017889
tataaggtttgg

SEQ ID NO: 298047 - DNA, 12 bp, Artificial Sequence
  Oligonucleotide primer for the detection of SNP TSC0017889
atgttttaggtt

SEQ ID NO: 298048 - DNA, 12 bp, Artificial Sequence
  Oligonucleotide primer for the detection of SNP TSC0017889
acgttttaggtt

SEQ ID NO: 298049 - DNA, 12 bp, Artificial Sequence
  Oligonucleotide primer for the detection of SNP TSC0017891
aactaaaaatac

SEQ ID NO: 298050 - DNA, 12 bp, Artificial Sequence
  Oligonucleotide primer for the detection of SNP TSC0017892
aacctctacctc

SEQ ID NO: 298051 - DNA, 12 bp, Artificial Sequence
  Oligonucleotide primer for the detection of SNP TSC0017892
tatttgaatttg

SEQ ID NO: 298052 - DNA, 12 bp, Artificial Sequence
  Oligonucleotide primer for the detection of SNP TSC0017895
atcatttaaaaa

SEQ ID NO: 298053 - DNA, 12 bp, Artificial Sequence
  Oligonucleotide primer for the detection of SNP TSC0017895
atttttatagtt

SEQ ID NO: 298054 - DNA, 12 bp, Artificial Sequence
  Oligonucleotide primer for the detection of SNP TSC0017895
attttcataatt

SEQ ID NO: 298055 - DNA, 12 bp, Artificial Sequence
  Oligonucleotide primer for the detection of SNP TSC0017895
attatttaggaa

SEQ ID NO: 298056 - DNA, 12 bp, Artificial Sequence
  Oligonucleotide primer for the detection of SNP TSC0017896
aacttattttat

SEQ ID NO: 298057 - DNA, 12 bp, Artificial Sequence
  Oligonucleotide primer for the detection of SNP TSC0017896
attaaggttata

SEQ ID NO: 298058 - DNA, 12 bp, Artificial Sequence
  Oligonucleotide primer for the detection of SNP TSC0017896
atcaaaatcata

SEQ ID NO: 298059 - DNA, 12 bp, Artificial Sequence
  Oligonucleotide primer for the detection of SNP TSC0017897
cattacaaatat

SEQ ID NO: 298060 - DNA, 12 bp, Artificial Sequence
  Oligonucleotide primer for the detection of SNP TSC0017897
tagatagtggaa

SEQ ID NO: 298061 - DNA, 12 bp, Artificial Sequence
  Oligonucleotide primer for the detection of SNP TSC0017898
tattaatataat

SEQ ID NO: 298062 - DNA, 12 bp, Artificial Sequence
  Oligonucleotide primer for the detection of SNP TSC0017898
gttttttattaa

SEQ ID NO: 298063 - DNA, 12 bp, Artificial Sequence
  Oligonucleotide primer for the detection of SNP TSC0017898
actttttattaa

SEQ ID NO: 298064 - DNA, 12 bp, Artificial Sequence
  Oligonucleotide primer for the detection of SNP TSC0017898
tgttaatatgat

SEQ ID NO: 298065 - DNA, 12 bp, Artificial Sequence
  Oligonucleotide primer for the detection of SNP TSC0017899
atttatttttac

SEQ ID NO: 298066 - DNA, 12 bp, Artificial Sequence
  Oligonucleotide primer for the detection of SNP TSC0017899
ttatattaaaaa

SEQ ID NO: 298067 - DNA, 12 bp, Artificial Sequence
  Oligonucleotide primer for the detection of SNP TSC0017901
ccatctctactt

SEQ ID NO: 298068 - DNA, 12 bp, Artificial Sequence
  Oligonucleotide primer for the detection of SNP TSC0017902
aactatataaaa

SEQ ID NO: 298069 - DNA, 12 bp, Artificial Sequence
  Oligonucleotide primer for the detection of SNP TSC0017902
aaagtaaatttt

SEQ ID NO: 298070 - DNA, 12 bp, Artificial Sequence
  Oligonucleotide primer for the detection of SNP TSC0017902
aaaataaatctc

SEQ ID NO: 298071 - DNA, 12 bp, Artificial Sequence
  Oligonucleotide primer for the detection of SNP TSC0017902
aattatgtaaga

SEQ ID NO: 298072 - DNA, 12 bp, Artificial Sequence
  Oligonucleotide primer for the detection of SNP TSC0017903
atagttgttttt

SEQ ID NO: 298073 - DNA, 12 bp, Artificial Sequence
  Oligonukleotid-Primer
ataattattttt

SEQ ID NO: 298074 - DNA, 12 bp, Artificial Sequence
  Oligonucleotide primer for the detection of SNP TSC0017903
tgaaaaaaattt

SEQ ID NO: 298075 - DNA, 12 bp, Artificial Sequence
  Oligonucleotide primer for the detection of SNP TSC0017904
ataacttatata

SEQ ID NO: 298076 - DNA, 12 bp, Artificial Sequence
  Oligonucleotide primer for the detection of SNP TSC0017904
atttaatttatt

SEQ ID NO: 298077 - DNA, 12 bp, Artificial Sequence
  Oligonucleotide primer for the detection of SNP TSC0017904
atctaatttacc

SEQ ID NO: 298078 - DNA, 12 bp, Artificial Sequence
  Oligonucleotide primer for the detection of SNP TSC0017904
gtgatttgtgtg

SEQ ID NO: 298079 - DNA, 12 bp, Artificial Sequence
  Oligonucleotide primer for the detection of SNP TSC0017905
atacaacacaca

SEQ ID NO: 298080 - DNA, 12 bp, Artificial Sequence
  Oligonucleotide primer for the detection of SNP TSC0017905
atacaacgcaca

SEQ ID NO: 298081 - DNA, 12 bp, Artificial Sequence
  Oligonucleotide primer for the detection of SNP TSC0017905
tagagtgtttgt

SEQ ID NO: 298082 - DNA, 12 bp, Artificial Sequence
  Oligonucleotide primer for the detection of SNP TSC0017905
caaaatacctat

SEQ ID NO: 298083 - DNA, 12 bp, Artificial Sequence
  Oligonucleotide primer for the detection of SNP TSC0017905
atgtagtgtata

SEQ ID NO: 298084 - DNA, 12 bp, Artificial Sequence
  Oligonucleotide primer for the detection of SNP TSC0017905
atgtagcgtata

SEQ ID NO: 298085 - DNA, 12 bp, Artificial Sequence
  Oligonucleotide primer for the detection of SNP TSC0017906
cctatccttaaa

SEQ ID NO: 298086 - DNA, 12 bp, Artificial Sequence
  Oligonucleotide primer for the detection of SNP TSC0017906
gtttttgttttt

SEQ ID NO: 298087 - DNA, 12 bp, Artificial Sequence
  Oligonucleotide primer for the detection of SNP TSC0017906
acctctatcccc

SEQ ID NO: 298088 - DNA, 12 bp, Artificial Sequence
  Oligonucleotide primer for the detection of SNP TSC0017906
gcctctatcccc

SEQ ID NO: 298089 - DNA, 12 bp, Artificial Sequence
  Oligonucleotide primer for the detection of SNP TSC0017907
accaacataaca

SEQ ID NO: 298090 - DNA, 12 bp, Artificial Sequence
  Oligonucleotide primer for the detection of SNP TSC0017907
gtattttatttg

SEQ ID NO: 298091 - DNA, 12 bp, Artificial Sequence
  Oligonucleotide primer for the detection of SNP TSC0017907
catctcatttaa

SEQ ID NO: 298092 - DNA, 12 bp, Artificial Sequence
  Oligonucleotide primer for the detection of SNP TSC0017907
gttaatatgata

SEQ ID NO: 298093 - DNA, 12 bp, Artificial Sequence
  Oligonucleotide primer for the detection of SNP TSC0017908
attgtttggtgg

SEQ ID NO: 298094 - DNA, 12 bp, Artificial Sequence
  Oligonucleotide primer for the detection of SNP TSC0017908
ggtaagtagtgg

SEQ ID NO: 298095 - DNA, 12 bp, Artificial Sequence
  Oligonucleotide primer for the detection of SNP TSC0017910
ctaacactaaat

SEQ ID NO: 298096 - DNA, 12 bp, Artificial Sequence
  Oligonucleotide primer for the detection of SNP TSC0017910
atagggaaagaa

SEQ ID NO: 298097 - DNA, 12 bp, Artificial Sequence
  Oligonucleotide primer for the detection of SNP TSC0017910
ttggtattgagt

SEQ ID NO: 298098 - DNA, 12 bp, Artificial Sequence
  Oligonucleotide primer for the detection of SNP TSC0017912
cccgaattcaaa

SEQ ID NO: 298099 - DNA, 12 bp, Artificial Sequence
  Oligonucleotide primer for the detection of SNP TSC0017912
aggtaggataat

SEQ ID NO: 298100 - DNA, 12 bp, Artificial Sequence
  Oligonucleotide primer for the detection of SNP TSC0017912
aaacaaaataat

SEQ ID NO: 298101 - DNA, 12 bp, Artificial Sequence
  Oligonucleotide primer for the detection of SNP TSC0017912
tttgggtttaag

SEQ ID NO: 298102 - DNA, 12 bp, Artificial Sequence
  Oligonucleotide primer for the detection of SNP TSC0017912
ttcgggtttaag

SEQ ID NO: 298103 - DNA, 12 bp, Artificial Sequence
  Oligonucleotide primer for the detection of SNP TSC0017914
ctctcccaaaac

SEQ ID NO: 298104 - DNA, 12 bp, Artificial Sequence
  Oligonucleotide primer for the detection of SNP TSC0017914
tatggtgtatag

SEQ ID NO: 298105 - DNA, 12 bp, Artificial Sequence
  Oligonucleotide primer for the detection of SNP TSC0017914
cataatacacaa

SEQ ID NO: 298106 - DNA, 12 bp, Artificial Sequence
  Oligonucleotide primer for the detection of SNP TSC0017915
atactcctacaa

SEQ ID NO: 298107 - DNA, 12 bp, Artificial Sequence
  Oligonucleotide primer for the detection of SNP TSC0017915
gtttattaagtt

SEQ ID NO: 298108 - DNA, 12 bp, Artificial Sequence
  Oligonucleotide primer for the detection of SNP TSC0017915
aaactcatcaaa

SEQ ID NO: 298109 - DNA, 12 bp, Artificial Sequence
  Oligonucleotide primer for the detection of SNP TSC0017915
gtatttttgtag

SEQ ID NO: 298110 - DNA, 12 bp, Artificial Sequence
  Oligonucleotide primer for the detection of SNP TSC0017917
tatcttaactac

SEQ ID NO: 298111 - DNA, 12 bp, Artificial Sequence
  Oligonucleotide primer for the detection of SNP TSC0017917
agaggggtgttt

SEQ ID NO: 298112 - DNA, 12 bp, Artificial Sequence
  Oligonucleotide primer for the detection of SNP TSC0017918
aaatatctcaaa

SEQ ID NO: 298113 - DNA, 12 bp, Artificial Sequence
  Oligonucleotide primer for the detection of SNP TSC0017918
ttttattattag

SEQ ID NO: 298114 - DNA, 12 bp, Artificial Sequence
  Oligonucleotide primer for the detection of SNP TSC0017918
tctcattattaa

SEQ ID NO: 298115 - DNA, 12 bp, Artificial Sequence
  Oligonucleotide primer for the detection of SNP TSC0017918
aatattttagat

SEQ ID NO: 298116 - DNA, 12 bp, Artificial Sequence
  Oligonucleotide primer for the detection of SNP TSC0017919
tataactcatta

SEQ ID NO: 298117 - DNA, 12 bp, Artificial Sequence
  Oligonucleotide primer for the detection of SNP TSC0017919
gagtggtttgaa

SEQ ID NO: 298118 - DNA, 12 bp, Artificial Sequence
  Oligonucleotide primer for the detection of SNP TSC0017919
aaataacctaaa

SEQ ID NO: 298119 - DNA, 12 bp, Artificial Sequence
  Oligonucleotide primer for the detection of SNP TSC0017919
tgtagtttatta

SEQ ID NO: 298120 - DNA, 12 bp, Artificial Sequence
  Oligonucleotide primer for the detection of SNP TSC0017922
tttttcttctct

SEQ ID NO: 298121 - DNA, 12 bp, Artificial Sequence
  Oligonucleotide primer for the detection of SNP TSC0017922
ggaaatttttag

SEQ ID NO: 298122 - DNA, 12 bp, Artificial Sequence
  Oligonucleotide primer for the detection of SNP TSC0017923
attacaaaaaaa

SEQ ID NO: 298123 - DNA, 12 bp, Artificial Sequence
  Oligonucleotide primer for the detection of SNP TSC0017923
gggttaatggtt

SEQ ID NO: 298124 - DNA, 12 bp, Artificial Sequence
  Oligonucleotide primer for the detection of SNP TSC0017923
gggttaacggtt

SEQ ID NO: 298125 - DNA, 12 bp, Artificial Sequence
  Oligonucleotide primer for the detection of SNP TSC0017923
aaatcaacaatc

SEQ ID NO: 298126 - DNA, 12 bp, Artificial Sequence
  Oligonucleotide primer for the detection of SNP TSC0017923
aaatcaacgatc

SEQ ID NO: 298127 - DNA, 12 bp, Artificial Sequence
  Oligonucleotide primer for the detection of SNP TSC0017923
attgtaaaggga

SEQ ID NO: 298128 - DNA, 12 bp, Artificial Sequence
  Oligonucleotide primer for the detection of SNP TSC0017926
caatctactacc

SEQ ID NO: 298129 - DNA, 12 bp, Artificial Sequence
  Oligonucleotide primer for the detection of SNP TSC0017927
ttttagatgtta

SEQ ID NO: 298130 - DNA, 12 bp, Artificial Sequence
  Oligonucleotide primer for the detection of SNP TSC0017927
cttaaatattaa

SEQ ID NO: 298131 - DNA, 12 bp, Artificial Sequence
  Oligonucleotide primer for the detection of SNP TSC0017927
agggttaggtga

SEQ ID NO: 298132 - DNA, 12 bp, Artificial Sequence
  Oligonucleotide primer for the detection of SNP TSC0017928
tgtatttttgtt

SEQ ID NO: 298133 - DNA, 12 bp, Artificial Sequence
  Oligonucleotide primer for the detection of SNP TSC0017928
tacatccctact

SEQ ID NO: 298134 - DNA, 12 bp, Artificial Sequence
  Oligonucleotide primer for the detection of SNP TSC0017929
aaaaaaatacaa

SEQ ID NO: 298135 - DNA, 12 bp, Artificial Sequence
  Oligonucleotide primer for the detection of SNP TSC0017929
aaaaaaatacga

SEQ ID NO: 298136 - DNA, 12 bp, Artificial Sequence
  Oligonucleotide primer for the detection of SNP TSC0017929
ttctaaacttct

SEQ ID NO: 298137 - DNA, 12 bp, Artificial Sequence
  Oligonucleotide primer for the detection of SNP TSC0017929
aaaaaagtgtga

SEQ ID NO: 298138 - DNA, 12 bp, Artificial Sequence
  Oligonucleotide primer for the detection of SNP TSC0017929
aaaaaagtgcga

SEQ ID NO: 298139 - DNA, 12 bp, Artificial Sequence
  Oligonucleotide primer for the detection of SNP TSC0017930
aaattacaataa

SEQ ID NO: 298140 - DNA, 12 bp, Artificial Sequence
  Oligonucleotide primer for the detection of SNP TSC0017930
tatttgggttat

SEQ ID NO: 298141 - DNA, 12 bp, Artificial Sequence
  Oligonucleotide primer for the detection of SNP TSC0017930
tatttgggttac

SEQ ID NO: 298142 - DNA, 12 bp, Artificial Sequence
  Oligonucleotide primer for the detection of SNP TSC0017931
gtaaactaaaca

SEQ ID NO: 298143 - DNA, 12 bp, Artificial Sequence
  Oligonucleotide primer for the detection of SNP TSC0017931
gtgggttgggta

SEQ ID NO: 298144 - DNA, 12 bp, Artificial Sequence
  Oligonucleotide primer for the detection of SNP TSC0017934
aacctatttcta

SEQ ID NO: 298145 - DNA, 12 bp, Artificial Sequence
  Oligonucleotide primer for the detection of SNP TSC0017934
tttgttaagtat

SEQ ID NO: 298146 - DNA, 12 bp, Artificial Sequence
  Oligonucleotide primer for the detection of SNP TSC0017934
cctactaaatat

SEQ ID NO: 298147 - DNA, 12 bp, Artificial Sequence
  Oligonucleotide primer for the detection of SNP TSC0017937
acctacccccac

SEQ ID NO: 298148 - DNA, 12 bp, Artificial Sequence
  Oligonucleotide primer for the detection of SNP TSC0017937
gcctacccccac

SEQ ID NO: 298149 - DNA, 12 bp, Artificial Sequence
  Oligonucleotide primer for the detection of SNP TSC0017937
gttttttgggta

SEQ ID NO: 298150 - DNA, 12 bp, Artificial Sequence
  Oligonucleotide primer for the detection of SNP TSC0017937
gtttttcgggta

SEQ ID NO: 298151 - DNA, 12 bp, Artificial Sequence
  Oligonucleotide primer for the detection of SNP TSC0017937
atccctcaaata

SEQ ID NO: 298152 - DNA, 12 bp, Artificial Sequence
  Oligonucleotide primer for the detection of SNP TSC0017937
atccctcgaata

SEQ ID NO: 298153 - DNA, 12 bp, Artificial Sequence
  Oligonucleotide primer for the detection of SNP TSC0017937
gtttgtttttat

SEQ ID NO: 298154 - DNA, 12 bp, Artificial Sequence
  Oligonucleotide primer for the detection of SNP TSC0017940
aactcatttatt

SEQ ID NO: 298155 - DNA, 12 bp, Artificial Sequence
  Oligonucleotide primer for the detection of SNP TSC0017940
tgaagttttttt

SEQ ID NO: 298156 - DNA, 12 bp, Artificial Sequence
  Oligonucleotide primer for the detection of SNP TSC0017940
taaaaccttttt

SEQ ID NO: 298157 - DNA, 12 bp, Artificial Sequence
  Oligonucleotide primer for the detection of SNP TSC0017941
actcaaatataa

SEQ ID NO: 298158 - DNA, 12 bp, Artificial Sequence
  Oligonucleotide primer for the detection of SNP TSC0017941
tttattaagaaa

SEQ ID NO: 298159 - DNA, 12 bp, Artificial Sequence
  Oligonucleotide primer for the detection of SNP TSC0017942
aattctcaaaca

SEQ ID NO: 298160 - DNA, 12 bp, Artificial Sequence
  Oligonucleotide primer for the detection of SNP TSC0017942
tttggttggggt

SEQ ID NO: 298161 - DNA, 12 bp, Artificial Sequence
  Oligonucleotide primer for the detection of SNP TSC0017942
ttcggttggggt

SEQ ID NO: 298162 - DNA, 12 bp, Artificial Sequence
  Oligonukleotid-Primer
cccaactaaaat

SEQ ID NO: 298163 - DNA, 12 bp, Artificial Sequence
  Oligonucleotide primer for the detection of SNP TSC0017942
cccgactaaaat

SEQ ID NO: 298164 - DNA, 12 bp, Artificial Sequence
  Oligonucleotide primer for the detection of SNP TSC0017942
ggtttttaggta

SEQ ID NO: 298165 - DNA, 12 bp, Artificial Sequence
  Oligonucleotide primer for the detection of SNP TSC0017946
ctctcacacaaa

SEQ ID NO: 298166 - DNA, 12 bp, Artificial Sequence
  Oligonucleotide primer for the detection of SNP TSC0017946
agtgttataggt

SEQ ID NO: 298167 - DNA, 12 bp, Artificial Sequence
  Oligonucleotide primer for the detection of SNP TSC0017946
aatactacaaac

SEQ ID NO: 298168 - DNA, 12 bp, Artificial Sequence
  Oligonucleotide primer for the detection of SNP TSC0017946
tttttatataag

SEQ ID NO: 298169 - DNA, 12 bp, Artificial Sequence
  Oligonucleotide primer for the detection of SNP TSC0017947
ttatgtgtattt

SEQ ID NO: 298170 - DNA, 12 bp, Artificial Sequence
  Oligonucleotide primer for the detection of SNP TSC0017947
ttatatatattt

SEQ ID NO: 298171 - DNA, 12 bp, Artificial Sequence
  Oligonucleotide primer for the detection of SNP TSC0017947
gtggtaaaagaa

SEQ ID NO: 298172 - DNA, 12 bp, Artificial Sequence
  Oligonucleotide primer for the detection of SNP TSC0017948
atatttttttct

SEQ ID NO: 298173 - DNA, 12 bp, Artificial Sequence
  Oligonucleotide primer for the detection of SNP TSC0017948
aatatattatat

SEQ ID NO: 298174 - DNA, 12 bp, Artificial Sequence
  Oligonucleotide primer for the detection of SNP TSC0017948
aacatattatat

SEQ ID NO: 298175 - DNA, 12 bp, Artificial Sequence
  Oligonucleotide primer for the detection of SNP TSC0017954
atacataacccc

SEQ ID NO: 298176 - DNA, 12 bp, Artificial Sequence
  Oligonucleotide primer for the detection of SNP TSC0017954
taacctacccta

SEQ ID NO: 298177 - DNA, 12 bp, Artificial Sequence
  Oligonucleotide primer for the detection of SNP TSC0017954
gtatatagtttt

SEQ ID NO: 298178 - DNA, 12 bp, Artificial Sequence
  Oligonucleotide primer for the detection of SNP TSC0017955
ataaaacctacc

SEQ ID NO: 298179 - DNA, 12 bp, Artificial Sequence
  Oligonucleotide primer for the detection of SNP TSC0017955
gatagagggttg

SEQ ID NO: 298180 - DNA, 12 bp, Artificial Sequence
  Oligonucleotide primer for the detection of SNP TSC0017956
tatttattaaac

SEQ ID NO: 298181 - DNA, 12 bp, Artificial Sequence
  Oligonucleotide primer for the detection of SNP TSC0017956
attataatttga

SEQ ID NO: 298182 - DNA, 12 bp, Artificial Sequence
  Oligonucleotide primer for the detection of SNP TSC0017957
tttcacaatata

SEQ ID NO: 298183 - DNA, 12 bp, Artificial Sequence
  Oligonucleotide primer for the detection of SNP TSC0017957
aaatgtaggtgt

SEQ ID NO: 298184 - DNA, 12 bp, Artificial Sequence
  Oligonucleotide primer for the detection of SNP TSC0017957
aaatacaaatac

SEQ ID NO: 298185 - DNA, 12 bp, Artificial Sequence
  Oligonucleotide primer for the detection of SNP TSC0017957
ttttatagtatg

SEQ ID NO: 298186 - DNA, 12 bp, Artificial Sequence
  Oligonucleotide primer for the detection of SNP TSC0017958
tttaaataaaaa

SEQ ID NO: 298187 - DNA, 12 bp, Artificial Sequence
  Oligonucleotide primer for the detection of SNP TSC0017958
gtagttaggatt

SEQ ID NO: 298188 - DNA, 12 bp, Artificial Sequence
  Oligonucleotide primer for the detection of SNP TSC0017958
gtagttaggatc

SEQ ID NO: 298189 - DNA, 12 bp, Artificial Sequence
  Oligonucleotide primer for the detection of SNP TSC0017958
ataaccaaaatc

SEQ ID NO: 298190 - DNA, 12 bp, Artificial Sequence
  Oligonucleotide primer for the detection of SNP TSC0017958
tttgaataaaag

SEQ ID NO: 298191 - DNA, 12 bp, Artificial Sequence
  Oligonucleotide primer for the detection of SNP TSC0017960
atactacaaaaa

SEQ ID NO: 298192 - DNA, 12 bp, Artificial Sequence
  Oligonucleotide primer for the detection of SNP TSC0017960
tgatttaagtag

SEQ ID NO: 298193 - DNA, 12 bp, Artificial Sequence
  Oligonucleotide primer for the detection of SNP TSC0017960
taacctaaacaa

SEQ ID NO: 298194 - DNA, 12 bp, Artificial Sequence
  Oligonucleotide primer for the detection of SNP TSC0017960
atgttgtaggaa

SEQ ID NO: 298195 - DNA, 12 bp, Artificial Sequence
  Oligonucleotide primer for the detection of SNP TSC0017961
aaactacctata

SEQ ID NO: 298196 - DNA, 12 bp, Artificial Sequence
  Oligonucleotide primer for the detection of SNP TSC0017961
aggtttaggttt

SEQ ID NO: 298197 - DNA, 12 bp, Artificial Sequence
  Oligonucleotide primer for the detection of SNP TSC0017961
aaactcaaactt

SEQ ID NO: 298198 - DNA, 12 bp, Artificial Sequence
  Oligonucleotide primer for the detection of SNP TSC0017961
aagttgtttgtg

SEQ ID NO: 298199 - DNA, 12 bp, Artificial Sequence
  Oligonucleotide primer for the detection of SNP TSC0017964
aaaaactaaaat

SEQ ID NO: 298200 - DNA, 12 bp, Artificial Sequence
  Oligonucleotide primer for the detection of SNP TSC0017964
tgaaaataaaaa

SEQ ID NO: 298201 - DNA, 12 bp, Artificial Sequence
  Oligonucleotide primer for the detection of SNP TSC0017964
agaagttgagat

SEQ ID NO: 298202 - DNA, 12 bp, Artificial Sequence
  Oligonucleotide primer for the detection of SNP TSC0017966
acataccatctc

SEQ ID NO: 298203 - DNA, 12 bp, Artificial Sequence
  Oligonucleotide primer for the detection of SNP TSC0017966
ttgtaaaaattg

SEQ ID NO: 298204 - DNA, 12 bp, Artificial Sequence
  Oligonucleotide primer for the detection of SNP TSC0017966
ctacaaaaacta

SEQ ID NO: 298205 - DNA, 12 bp, Artificial Sequence
  Oligonucleotide primer for the detection of SNP TSC0017966
atatattatttt

SEQ ID NO: 298206 - DNA, 12 bp, Artificial Sequence
  Oligonucleotide primer for the detection of SNP TSC0017967
aaatacacctcc

SEQ ID NO: 298207 - DNA, 12 bp, Artificial Sequence
  Oligonucleotide primer for the detection of SNP TSC0017967
ggagttggtgga

SEQ ID NO: 298208 - DNA, 12 bp, Artificial Sequence
  Oligonucleotide primer for the detection of SNP TSC0017968
aaaaaataaccc

SEQ ID NO: 298209 - DNA, 12 bp, Artificial Sequence
  Oligonucleotide primer for the detection of SNP TSC0017968
ataaattgttag

SEQ ID NO: 298210 - DNA, 12 bp, Artificial Sequence
  Oligonucleotide primer for the detection of SNP TSC0017968
ataaactaccaa

SEQ ID NO: 298211 - DNA, 12 bp, Artificial Sequence
  Oligonucleotide primer for the detection of SNP TSC0017968
aaagaatggttt

SEQ ID NO: 298212 - DNA, 12 bp, Artificial Sequence
  Oligonucleotide primer for the detection of SNP TSC0017970
atcaaaaaatta

SEQ ID NO: 298213 - DNA, 12 bp, Artificial Sequence
  Oligonucleotide primer for the detection of SNP TSC0017970
atatagtatttt

SEQ ID NO: 298214 - DNA, 12 bp, Artificial Sequence
  Oligonucleotide primer for the detection of SNP TSC0017970
aacacaatatct

SEQ ID NO: 298215 - DNA, 12 bp, Artificial Sequence
  Oligonucleotide primer for the detection of SNP TSC0017970
ttaaagggttgt

SEQ ID NO: 298216 - DNA, 12 bp, Artificial Sequence
  Oligonucleotide primer for the detection of SNP TSC0017971
tcctaatactta

SEQ ID NO: 298217 - DNA, 12 bp, Artificial Sequence
  Oligonucleotide primer for the detection of SNP TSC0017971
gtgtttggtgtt

SEQ ID NO: 298218 - DNA, 12 bp, Artificial Sequence
  Oligonucleotide primer for the detection of SNP TSC0017971
gtgtttggcgtt

SEQ ID NO: 298219 - DNA, 12 bp, Artificial Sequence
  Oligonucleotide primer for the detection of SNP TSC0017971
atacctaacacc

SEQ ID NO: 298220 - DNA, 12 bp, Artificial Sequence
  Oligonucleotide primer for the detection of SNP TSC0017971
atacctaacgcc

SEQ ID NO: 298221 - DNA, 12 bp, Artificial Sequence
  Oligonucleotide primer for the detection of SNP TSC0017971
ttttggtgtttg

SEQ ID NO: 298222 - DNA, 12 bp, Artificial Sequence
  Oligonucleotide primer for the detection of SNP TSC0017973
tttaattttaat

SEQ ID NO: 298223 - DNA, 12 bp, Artificial Sequence
  Oligonucleotide primer for the detection of SNP TSC0017973
atttaattctaa

SEQ ID NO: 298224 - DNA, 12 bp, Artificial Sequence
  Oligonucleotide primer for the detection of SNP TSC0017973
aaaatgtttagt

SEQ ID NO: 298225 - DNA, 12 bp, Artificial Sequence
  Oligonucleotide primer for the detection of SNP TSC0017974
attattacattt

SEQ ID NO: 298226 - DNA, 12 bp, Artificial Sequence
  Oligonucleotide primer for the detection of SNP TSC0017974
catttttaaata

SEQ ID NO: 298227 - DNA, 12 bp, Artificial Sequence
  Oligonucleotide primer for the detection of SNP TSC0017974
gttattgtattt

SEQ ID NO: 298228 - DNA, 12 bp, Artificial Sequence
  Oligonucleotide primer for the detection of SNP TSC0017975
aaacataaattt

SEQ ID NO: 298229 - DNA, 12 bp, Artificial Sequence
  Oligonucleotide primer for the detection of SNP TSC0017976
taaatataatct

SEQ ID NO: 298230 - DNA, 12 bp, Artificial Sequence
  Oligonucleotide primer for the detection of SNP TSC0017976
tattatttatga

SEQ ID NO: 298231 - DNA, 12 bp, Artificial Sequence
  Oligonucleotide primer for the detection of SNP TSC0017976
tattatttataa

SEQ ID NO: 298232 - DNA, 12 bp, Artificial Sequence
  Oligonucleotide primer for the detection of SNP TSC0017976
tgagtgtaattt

SEQ ID NO: 298233 - DNA, 12 bp, Artificial Sequence
  Oligonucleotide primer for the detection of SNP TSC0017977
tattatcccaac

SEQ ID NO: 298234 - DNA, 12 bp, Artificial Sequence
  Oligonucleotide primer for the detection of SNP TSC0017977
tgttattttagt

SEQ ID NO: 298235 - DNA, 12 bp, Artificial Sequence
  Oligonucleotide primer for the detection of SNP TSC0017980
ataactaccact

SEQ ID NO: 298236 - DNA, 12 bp, Artificial Sequence
  Oligonucleotide primer for the detection of SNP TSC0017980
ataactaccgct

SEQ ID NO: 298237 - DNA, 12 bp, Artificial Sequence
  Oligonucleotide primer for the detection of SNP TSC0017980
tggtatttttga

SEQ ID NO: 298238 - DNA, 12 bp, Artificial Sequence
  Oligonucleotide primer for the detection of SNP TSC0017981
gaagaaggtata

SEQ ID NO: 298239 - DNA, 12 bp, Artificial Sequence
  Oligonucleotide primer for the detection of SNP TSC0017982
ataatttttaaa

SEQ ID NO: 298240 - DNA, 12 bp, Artificial Sequence
  Oligonucleotide primer for the detection of SNP TSC0017982
taagtattgttg

SEQ ID NO: 298241 - DNA, 12 bp, Artificial Sequence
  Oligonucleotide primer for the detection of SNP TSC0017982
caaatattacta

SEQ ID NO: 298242 - DNA, 12 bp, Artificial Sequence
  Oligonucleotide primer for the detection of SNP TSC0017982
atagtttttaaa

SEQ ID NO: 298243 - DNA, 12 bp, Artificial Sequence
  Oligonucleotide primer for the detection of SNP TSC0017986
caaactaaccct

SEQ ID NO: 298244 - DNA, 12 bp, Artificial Sequence
  Oligonucleotide primer for the detection of SNP TSC0017986
ttgagtttggaa

SEQ ID NO: 298245 - DNA, 12 bp, Artificial Sequence
  Oligonucleotide primer for the detection of SNP TSC0017986
ttgagttcggaa

SEQ ID NO: 298246 - DNA, 12 bp, Artificial Sequence
  Oligonucleotide primer for the detection of SNP TSC0017990
gtagagtttttt

SEQ ID NO: 298247 - DNA, 12 bp, Artificial Sequence
  Oligonukleotid-Primer
acaaaacttttc

SEQ ID NO: 298248 - DNA, 12 bp, Artificial Sequence
  Oligonucleotide primer for the detection of SNP TSC0017990
aaaagggtggaa

SEQ ID NO: 298249 - DNA, 12 bp, Artificial Sequence
  Oligonucleotide primer for the detection of SNP TSC0017993
aaaaacttctaa

SEQ ID NO: 298250 - DNA, 12 bp, Artificial Sequence
  Oligonucleotide primer for the detection of SNP TSC0017993
taggggtaggta

SEQ ID NO: 298251 - DNA, 12 bp, Artificial Sequence
  Oligonucleotide primer for the detection of SNP TSC0017993
caaaaacaaaca

SEQ ID NO: 298252 - DNA, 12 bp, Artificial Sequence
  Oligonucleotide primer for the detection of SNP TSC0017993
ggagtttttaat

SEQ ID NO: 298253 - DNA, 12 bp, Artificial Sequence
  Oligonucleotide primer for the detection of SNP TSC0017993
ggagtttttaac

SEQ ID NO: 298254 - DNA, 12 bp, Artificial Sequence
  Oligonucleotide primer for the detection of SNP TSC0017994
aaaaatcatact

SEQ ID NO: 298255 - DNA, 12 bp, Artificial Sequence
  Oligonucleotide primer for the detection of SNP TSC0017994
aaaaatcgtact

SEQ ID NO: 298256 - DNA, 12 bp, Artificial Sequence
  Oligonucleotide primer for the detection of SNP TSC0017994
taaaaaggtata

SEQ ID NO: 298257 - DNA, 12 bp, Artificial Sequence
  Oligonucleotide primer for the detection of SNP TSC0017994
caaaaaaataca

SEQ ID NO: 298258 - DNA, 12 bp, Artificial Sequence
  Oligonucleotide primer for the detection of SNP TSC0017994
gggagttgtatt

SEQ ID NO: 298259 - DNA, 12 bp, Artificial Sequence
  Oligonucleotide primer for the detection of SNP TSC0017994
gggagtcgtatt

SEQ ID NO: 298260 - DNA, 12 bp, Artificial Sequence
  Oligonucleotide primer for the detection of SNP TSC0017996
aacataatacca

SEQ ID NO: 298261 - DNA, 12 bp, Artificial Sequence
  Oligonucleotide primer for the detection of SNP TSC0017996
aaaattacaaat

SEQ ID NO: 298262 - DNA, 12 bp, Artificial Sequence
  Oligonucleotide primer for the detection of SNP TSC0017996
ggtatggtgtta

SEQ ID NO: 298263 - DNA, 12 bp, Artificial Sequence
  Oligonucleotide primer for the detection of SNP TSC0018001
aaatacaaattt

SEQ ID NO: 298264 - DNA, 12 bp, Artificial Sequence
  Oligonucleotide primer for the detection of SNP TSC0018001
ggtaaaaagatg

SEQ ID NO: 298265 - DNA, 12 bp, Artificial Sequence
  Oligonucleotide primer for the detection of SNP TSC0018002
ctaaactccttc

SEQ ID NO: 298266 - DNA, 12 bp, Artificial Sequence
  Oligonucleotide primer for the detection of SNP TSC0018002
gagtgtatagtt

SEQ ID NO: 298267 - DNA, 12 bp, Artificial Sequence
  Oligonucleotide primer for the detection of SNP TSC0018002
aaatacataact

SEQ ID NO: 298268 - DNA, 12 bp, Artificial Sequence
  Oligonucleotide primer for the detection of SNP TSC0018002
ttgaattttttt

SEQ ID NO: 298269 - DNA, 12 bp, Artificial Sequence
  Oligonucleotide primer for the detection of SNP TSC0018003
taaatattaata

SEQ ID NO: 298270 - DNA, 12 bp, Artificial Sequence
  Oligonucleotide primer for the detection of SNP TSC0018003
atataagtttaa

SEQ ID NO: 298271 - DNA, 12 bp, Artificial Sequence
  Oligonucleotide primer for the detection of SNP TSC0018003
atacaaatttaa

SEQ ID NO: 298272 - DNA, 12 bp, Artificial Sequence
  Oligonucleotide primer for the detection of SNP TSC0018003
taaatattagtg

SEQ ID NO: 298273 - DNA, 12 bp, Artificial Sequence
  Oligonucleotide primer for the detection of SNP TSC0018004
atactttataat

SEQ ID NO: 298274 - DNA, 12 bp, Artificial Sequence
  Oligonucleotide primer for the detection of SNP TSC0018004
aaaagaattata

SEQ ID NO: 298275 - DNA, 12 bp, Artificial Sequence
  Oligonucleotide primer for the detection of SNP TSC0018004
atgttttgtaat

SEQ ID NO: 298276 - DNA, 12 bp, Artificial Sequence
  Oligonucleotide primer for the detection of SNP TSC0018005
aataaactctat

SEQ ID NO: 298277 - DNA, 12 bp, Artificial Sequence
  Oligonucleotide primer for the detection of SNP TSC0018005
aagtattatttt

SEQ ID NO: 298278 - DNA, 12 bp, Artificial Sequence
  Oligonucleotide primer for the detection of SNP TSC0018005
aaaacattattc

SEQ ID NO: 298279 - DNA, 12 bp, Artificial Sequence
  Oligonucleotide primer for the detection of SNP TSC0018005
agtagattttat

SEQ ID NO: 298280 - DNA, 12 bp, Artificial Sequence
  Oligonucleotide primer for the detection of SNP TSC0018006
cctcccaataaa

SEQ ID NO: 298281 - DNA, 12 bp, Artificial Sequence
  Oligonucleotide primer for the detection of SNP TSC0018006
ttttatggggtt

SEQ ID NO: 298282 - DNA, 12 bp, Artificial Sequence
  Oligonucleotide primer for the detection of SNP TSC0018006
tccataaaacta

SEQ ID NO: 298283 - DNA, 12 bp, Artificial Sequence
  Oligonucleotide primer for the detection of SNP TSC0018006
ttttttagtggg

SEQ ID NO: 298284 - DNA, 12 bp, Artificial Sequence
  Oligonucleotide primer for the detection of SNP TSC0018009
aaacgaacaaat

SEQ ID NO: 298285 - DNA, 12 bp, Artificial Sequence
  Oligonucleotide primer for the detection of SNP TSC0018009
aaacgaacgaat

SEQ ID NO: 298286 - DNA, 12 bp, Artificial Sequence
  Oligonucleotide primer for the detection of SNP TSC0018009
ttttagattttg

SEQ ID NO: 298287 - DNA, 12 bp, Artificial Sequence
  Oligonucleotide primer for the detection of SNP TSC0018010
atattatgtttg

SEQ ID NO: 298288 - DNA, 12 bp, Artificial Sequence
  Oligonucleotide primer for the detection of SNP TSC0018010
atattacgtttg

SEQ ID NO: 298289 - DNA, 12 bp, Artificial Sequence
  Oligonucleotide primer for the detection of SNP TSC0018011
taacaccacacc

SEQ ID NO: 298290 - DNA, 12 bp, Artificial Sequence
  Oligonucleotide primer for the detection of SNP TSC0018011
taacaccacgcc

SEQ ID NO: 298291 - DNA, 12 bp, Artificial Sequence
  Oligonucleotide primer for the detection of SNP TSC0018011
aaaagaaatgag

SEQ ID NO: 298292 - DNA, 12 bp, Artificial Sequence
  Oligonucleotide primer for the detection of SNP TSC0018011
tgatattatgtt

SEQ ID NO: 298293 - DNA, 12 bp, Artificial Sequence
  Oligonucleotide primer for the detection of SNP TSC0018011
tgatattacgtt

SEQ ID NO: 298294 - DNA, 12 bp, Artificial Sequence
  Oligonucleotide primer for the detection of SNP TSC0018014
acaaccaaccaa

SEQ ID NO: 298295 - DNA, 12 bp, Artificial Sequence
  Oligonucleotide primer for the detection of SNP TSC0018014
gttgggtttttg

SEQ ID NO: 298296 - DNA, 12 bp, Artificial Sequence
  Oligonucleotide primer for the detection of SNP TSC0018014
ctaaactcctaa

SEQ ID NO: 298297 - DNA, 12 bp, Artificial Sequence
  Oligonucleotide primer for the detection of SNP TSC0018014
tagttagttaat

SEQ ID NO: 298298 - DNA, 12 bp, Artificial Sequence
  Oligonucleotide primer for the detection of SNP TSC0018015
tatccaatctaa

SEQ ID NO: 298299 - DNA, 12 bp, Artificial Sequence
  Oligonucleotide primer for the detection of SNP TSC0018015
tataatgtgggg

SEQ ID NO: 298300 - DNA, 12 bp, Artificial Sequence
  Oligonucleotide primer for the detection of SNP TSC0018015
gtgtttagtttg

SEQ ID NO: 298301 - DNA, 12 bp, Artificial Sequence
  Oligonucleotide primer for the detection of SNP TSC0018016
aattcttattcc

SEQ ID NO: 298302 - DNA, 12 bp, Artificial Sequence
  Oligonucleotide primer for the detection of SNP TSC0018016
tgggagtttatg

SEQ ID NO: 298303 - DNA, 12 bp, Artificial Sequence
  Oligonucleotide primer for the detection of SNP TSC0018016
taaaaattcata

SEQ ID NO: 298304 - DNA, 12 bp, Artificial Sequence
  Oligonucleotide primer for the detection of SNP TSC0018020
tacaacaattat

SEQ ID NO: 298305 - DNA, 12 bp, Artificial Sequence
  Oligonucleotide primer for the detection of SNP TSC0018020
tacaacgattat

SEQ ID NO: 298306 - DNA, 12 bp, Artificial Sequence
  Oligonucleotide primer for the detection of SNP TSC0018020
ttctacctaaaa

SEQ ID NO: 298307 - DNA, 12 bp, Artificial Sequence
  Oligonucleotide primer for the detection of SNP TSC0018020
tataatgattgt

SEQ ID NO: 298308 - DNA, 12 bp, Artificial Sequence
  Oligonucleotide primer for the detection of SNP TSC0018020
tataacgattgt

SEQ ID NO: 298309 - DNA, 12 bp, Artificial Sequence
  Oligonucleotide primer for the detection of SNP TSC0018021
acaaccaaattt

SEQ ID NO: 298310 - DNA, 12 bp, Artificial Sequence
  Oligonucleotide primer for the detection of SNP TSC0018021
tgataagttgtg

SEQ ID NO: 298311 - DNA, 12 bp, Artificial Sequence
  Oligonucleotide primer for the detection of SNP TSC0018022
acaaaatataat

SEQ ID NO: 298312 - DNA, 12 bp, Artificial Sequence
  Oligonucleotide primer for the detection of SNP TSC0018022
tatgaattttgt

SEQ ID NO: 298313 - DNA, 12 bp, Artificial Sequence
  Oligonucleotide primer for the detection of SNP TSC0018022
tataaattttac

SEQ ID NO: 298314 - DNA, 12 bp, Artificial Sequence
  Oligonucleotide primer for the detection of SNP TSC0018022
ataaaatatagt

SEQ ID NO: 298315 - DNA, 12 bp, Artificial Sequence
  Oligonucleotide primer for the detection of SNP TSC0018023
cttacaatcatt

SEQ ID NO: 298316 - DNA, 12 bp, Artificial Sequence
  Oligonucleotide primer for the detection of SNP TSC0018023
aggtagttttga

SEQ ID NO: 298317 - DNA, 12 bp, Artificial Sequence
  Oligonucleotide primer for the detection of SNP TSC0018024
ttacaataaata

SEQ ID NO: 298318 - DNA, 12 bp, Artificial Sequence
  Oligonucleotide primer for the detection of SNP TSC0018024
aagatagttatt

SEQ ID NO: 298319 - DNA, 12 bp, Artificial Sequence
  Oligonucleotide primer for the detection of SNP TSC0018024
aaacaatcacca

SEQ ID NO: 298320 - DNA, 12 bp, Artificial Sequence
  Oligonukleotid-Primer
tataatgaatgt

SEQ ID NO: 298321 - DNA, 12 bp, Artificial Sequence
  Oligonucleotide primer for the detection of SNP TSC0018029
aaacattaaaat

SEQ ID NO: 298322 - DNA, 12 bp, Artificial Sequence
  Oligonucleotide primer for the detection of SNP TSC0018029
gtaaggatttta

SEQ ID NO: 298323 - DNA, 12 bp, Artificial Sequence
  Oligonucleotide primer for the detection of SNP TSC0018029
ataaaaacccca

SEQ ID NO: 298324 - DNA, 12 bp, Artificial Sequence
  Oligonucleotide primer for the detection of SNP TSC0018029
gtaaaaacccca

SEQ ID NO: 298325 - DNA, 12 bp, Artificial Sequence
  Oligonucleotide primer for the detection of SNP TSC0018029
ggtattggaatt

SEQ ID NO: 298326 - DNA, 12 bp, Artificial Sequence
  Oligonucleotide primer for the detection of SNP TSC0018031
ataatttctctc

SEQ ID NO: 298327 - DNA, 12 bp, Artificial Sequence
  Oligonucleotide primer for the detection of SNP TSC0018032
acaacaaaataa

SEQ ID NO: 298328 - DNA, 12 bp, Artificial Sequence
  Oligonucleotide primer for the detection of SNP TSC0018032
acgacaaaataa

SEQ ID NO: 298329 - DNA, 12 bp, Artificial Sequence
  Oligonucleotide primer for the detection of SNP TSC0018032
ttgagttgtagt

SEQ ID NO: 298330 - DNA, 12 bp, Artificial Sequence
  Oligonucleotide primer for the detection of SNP TSC0018032
ttgagtcgtagt

SEQ ID NO: 298331 - DNA, 12 bp, Artificial Sequence
  Oligonucleotide primer for the detection of SNP TSC0018032
tttaaatcataa

SEQ ID NO: 298332 - DNA, 12 bp, Artificial Sequence
  Oligonucleotide primer for the detection of SNP TSC0018032
tttaaatcgtaa

SEQ ID NO: 298333 - DNA, 12 bp, Artificial Sequence
  Oligonucleotide primer for the detection of SNP TSC0018032
ggtgatagagtg

SEQ ID NO: 298334 - DNA, 12 bp, Artificial Sequence
  Oligonucleotide primer for the detection of SNP TSC0018032
ggcgatagagtg

SEQ ID NO: 298335 - DNA, 12 bp, Artificial Sequence
  Oligonucleotide primer for the detection of SNP TSC0018033
tctcaactcact

SEQ ID NO: 298336 - DNA, 12 bp, Artificial Sequence
  Oligonucleotide primer for the detection of SNP TSC0018033
gaggtggaggtt

SEQ ID NO: 298337 - DNA, 12 bp, Artificial Sequence
  Oligonucleotide primer for the detection of SNP TSC0018035
tttgtaaattag

SEQ ID NO: 298338 - DNA, 12 bp, Artificial Sequence
  Oligonucleotide primer for the detection of SNP TSC0018035
tttacaaattaa

SEQ ID NO: 298339 - DNA, 12 bp, Artificial Sequence
  Oligonucleotide primer for the detection of SNP TSC0018035
agaaaatgtttt

SEQ ID NO: 298340 - DNA, 12 bp, Artificial Sequence
  Oligonucleotide primer for the detection of SNP TSC0018036
aaaaaaatattc

SEQ ID NO: 298341 - DNA, 12 bp, Artificial Sequence
  Oligonucleotide primer for the detection of SNP TSC0018036
ttattttaagcg

SEQ ID NO: 298342 - DNA, 12 bp, Artificial Sequence
  Oligonucleotide primer for the detection of SNP TSC0018036
ccattttaaaca

SEQ ID NO: 298343 - DNA, 12 bp, Artificial Sequence
  Oligonucleotide primer for the detection of SNP TSC0018036
ccattttaaacg

SEQ ID NO: 298344 - DNA, 12 bp, Artificial Sequence
  Oligonucleotide primer for the detection of SNP TSC0018036
aagagaatattt

SEQ ID NO: 298345 - DNA, 12 bp, Artificial Sequence
  Oligonucleotide primer for the detection of SNP TSC0018037
taaataaaaaat

SEQ ID NO: 298346 - DNA, 12 bp, Artificial Sequence
  Oligonucleotide primer for the detection of SNP TSC0018038
aacaccaaacac

SEQ ID NO: 298347 - DNA, 12 bp, Artificial Sequence
  Oligonucleotide primer for the detection of SNP TSC0018041
caaaaccccttt

SEQ ID NO: 298348 - DNA, 12 bp, Artificial Sequence
  Oligonucleotide primer for the detection of SNP TSC0018042
ctcaaaacccct

SEQ ID NO: 298349 - DNA, 12 bp, Artificial Sequence
  Oligonucleotide primer for the detection of SNP TSC0018042
tgttattttaaa

SEQ ID NO: 298350 - DNA, 12 bp, Artificial Sequence
  Oligonucleotide primer for the detection of SNP TSC0018043
ttcttaaatcta

SEQ ID NO: 298351 - DNA, 12 bp, Artificial Sequence
  Oligonucleotide primer for the detection of SNP TSC0018043
agatattaattt

SEQ ID NO: 298352 - DNA, 12 bp, Artificial Sequence
  Oligonucleotide primer for the detection of SNP TSC0018044
tcgctacaacct

SEQ ID NO: 298353 - DNA, 12 bp, Artificial Sequence
  Oligonucleotide primer for the detection of SNP TSC0018044
atttaagaggta

SEQ ID NO: 298354 - DNA, 12 bp, Artificial Sequence
  Oligonucleotide primer for the detection of SNP TSC0018045
gtttgaatttaa

SEQ ID NO: 298355 - DNA, 12 bp, Artificial Sequence
  Oligonucleotide primer for the detection of SNP TSC0018049
acactatcaact

SEQ ID NO: 298356 - DNA, 12 bp, Artificial Sequence
  Oligonucleotide primer for the detection of SNP TSC0018049
ttagtgattaag

SEQ ID NO: 298357 - DNA, 12 bp, Artificial Sequence
  Oligonucleotide primer for the detection of SNP TSC0018049
ttagcgattaag

SEQ ID NO: 298358 - DNA, 12 bp, Artificial Sequence
  Oligonucleotide primer for the detection of SNP TSC0018050
acaattctataa

SEQ ID NO: 298359 - DNA, 12 bp, Artificial Sequence
  Oligonucleotide primer for the detection of SNP TSC0018050
gagtagggtgaa

SEQ ID NO: 298360 - DNA, 12 bp, Artificial Sequence
  Oligonucleotide primer for the detection of SNP TSC0018050
atagttttgtgg

SEQ ID NO: 298361 - DNA, 12 bp, Artificial Sequence
  Oligonucleotide primer for the detection of SNP TSC0018051
cactcaaattcc

SEQ ID NO: 298362 - DNA, 12 bp, Artificial Sequence
  Oligonucleotide primer for the detection of SNP TSC0018051
cgctcaaattcc

SEQ ID NO: 298363 - DNA, 12 bp, Artificial Sequence
  Oligonucleotide primer for the detection of SNP TSC0018051
gggatttgtagg

SEQ ID NO: 298364 - DNA, 12 bp, Artificial Sequence
  Oligonucleotide primer for the detection of SNP TSC0018051
tgtttagatttt

SEQ ID NO: 298365 - DNA, 12 bp, Artificial Sequence
  Oligonucleotide primer for the detection of SNP TSC0018051
cgtttagatttt

SEQ ID NO: 298366 - DNA, 12 bp, Artificial Sequence
  Oligonucleotide primer for the detection of SNP TSC0018055
cactttctatct

SEQ ID NO: 298367 - DNA, 12 bp, Artificial Sequence
  Oligonucleotide primer for the detection of SNP TSC0018055
ggtatggtagtg

SEQ ID NO: 298368 - DNA, 12 bp, Artificial Sequence
  Oligonucleotide primer for the detection of SNP TSC0018056
ccaccatacccc

SEQ ID NO: 298369 - DNA, 12 bp, Artificial Sequence
  Oligonucleotide primer for the detection of SNP TSC0018056
ccaccgtacccc

SEQ ID NO: 298370 - DNA, 12 bp, Artificial Sequence
  Oligonucleotide primer for the detection of SNP TSC0018056
tttaattaatag

SEQ ID NO: 298371 - DNA, 12 bp, Artificial Sequence
  Oligonucleotide primer for the detection of SNP TSC0018056
tctaattaacaa

SEQ ID NO: 298372 - DNA, 12 bp, Artificial Sequence
  Oligonucleotide primer for the detection of SNP TSC0018056
ttattgtgtttt

SEQ ID NO: 298373 - DNA, 12 bp, Artificial Sequence
  Oligonucleotide primer for the detection of SNP TSC0018056
ttatcgtgtttt

SEQ ID NO: 298374 - DNA, 12 bp, Artificial Sequence
  Oligonucleotide primer for the detection of SNP TSC0018056
ttattgtgtttc

SEQ ID NO: 298375 - DNA, 12 bp, Artificial Sequence
  Oligonucleotide primer for the detection of SNP TSC0018056
ttatcgtgtttc

SEQ ID NO: 298376 - DNA, 12 bp, Artificial Sequence
  Oligonucleotide primer for the detection of SNP TSC0018057
aaaacaatttat

SEQ ID NO: 298377 - DNA, 12 bp, Artificial Sequence
  Oligonucleotide primer for the detection of SNP TSC0018057
gagttttattta

SEQ ID NO: 298378 - DNA, 12 bp, Artificial Sequence
  Oligonucleotide primer for the detection of SNP TSC0018061
cttctacaattc

SEQ ID NO: 298379 - DNA, 12 bp, Artificial Sequence
  Oligonucleotide primer for the detection of SNP TSC0018061
gattttttgttg

SEQ ID NO: 298380 - DNA, 12 bp, Artificial Sequence
  Oligonucleotide primer for the detection of SNP TSC0018062
acatcaaaaaac

SEQ ID NO: 298381 - DNA, 12 bp, Artificial Sequence
  Oligonucleotide primer for the detection of SNP TSC0018062
gcatcaaaaaac

SEQ ID NO: 298382 - DNA, 12 bp, Artificial Sequence
  Oligonucleotide primer for the detection of SNP TSC0018069
atttatttatac

SEQ ID NO: 298383 - DNA, 12 bp, Artificial Sequence
  Oligonucleotide primer for the detection of SNP TSC0018069
gtaaattaatag

SEQ ID NO: 298384 - DNA, 12 bp, Artificial Sequence
  Oligonucleotide primer for the detection of SNP TSC0018069
acaaaccaacaa

SEQ ID NO: 298385 - DNA, 12 bp, Artificial Sequence
  Oligonucleotide primer for the detection of SNP TSC0018069
atttgtttgtgt

SEQ ID NO: 298386 - DNA, 12 bp, Artificial Sequence
  Oligonucleotide primer for the detection of SNP TSC0018069
atttgtttgtgc

SEQ ID NO: 298387 - DNA, 12 bp, Artificial Sequence
  Oligonucleotide primer for the detection of SNP TSC0018070
aaaattcatctc

SEQ ID NO: 298388 - DNA, 12 bp, Artificial Sequence
  Oligonucleotide primer for the detection of SNP TSC0018070
aagagaggaaga

SEQ ID NO: 298389 - DNA, 12 bp, Artificial Sequence
  Oligonucleotide primer for the detection of SNP TSC0018070
agaatttatttt

SEQ ID NO: 298390 - DNA, 12 bp, Artificial Sequence
  Oligonucleotide primer for the detection of SNP TSC0018071
attcatctatta

SEQ ID NO: 298391 - DNA, 12 bp, Artificial Sequence
  Oligonucleotide primer for the detection of SNP TSC0018071
tttgggaatttt

SEQ ID NO: 298392 - DNA, 12 bp, Artificial Sequence
  Oligonucleotide primer for the detection of SNP TSC0018073
ttaacaaaaaca

SEQ ID NO: 298393 - DNA, 12 bp, Artificial Sequence
  Oligonucleotide primer for the detection of SNP TSC0018073
agtgtgttattt

SEQ ID NO: 298394 - DNA, 12 bp, Artificial Sequence
  Oligonucleotide primer for the detection of SNP TSC0018073
cacaatatatta

SEQ ID NO: 298395 - DNA, 12 bp, Artificial Sequence
  Oligonucleotide primer for the detection of SNP TSC0018073
gttaataaagat

SEQ ID NO: 298396 - DNA, 12 bp, Artificial Sequence
  Oligonucleotide primer for the detection of SNP TSC0018075
catttttaataa

SEQ ID NO: 298397 - DNA, 12 bp, Artificial Sequence
  Oligonucleotide primer for the detection of SNP TSC0018075
attttggtggtt

SEQ ID NO: 298398 - DNA, 12 bp, Artificial Sequence
  Oligonucleotide primer for the detection of SNP TSC0018075
atttcggtggtt

SEQ ID NO: 298399 - DNA, 12 bp, Artificial Sequence
  Oligonucleotide primer for the detection of SNP TSC0018075
atttcaataatt

SEQ ID NO: 298400 - DNA, 12 bp, Artificial Sequence
  Oligonucleotide primer for the detection of SNP TSC0018075
atttcgataatt

SEQ ID NO: 298401 - DNA, 12 bp, Artificial Sequence
  Oligonucleotide primer for the detection of SNP TSC0018075
tatttttagtga

SEQ ID NO: 298402 - DNA, 12 bp, Artificial Sequence
  Oligonucleotide primer for the detection of SNP TSC0018079
cttttaataata

SEQ ID NO: 298403 - DNA, 12 bp, Artificial Sequence
  Oligonucleotide primer for the detection of SNP TSC0018079
agtttatgttaa

SEQ ID NO: 298404 - DNA, 12 bp, Artificial Sequence
  Oligonucleotide primer for the detection of SNP TSC0018079
acccatattaaa

SEQ ID NO: 298405 - DNA, 12 bp, Artificial Sequence
  Oligonucleotide primer for the detection of SNP TSC0018079
tttttggtgatg

SEQ ID NO: 298406 - DNA, 12 bp, Artificial Sequence
  Oligonucleotide primer for the detection of SNP TSC0018080
aacattcttttt

SEQ ID NO: 298407 - DNA, 12 bp, Artificial Sequence
  Oligonucleotide primer for the detection of SNP TSC0018080
aacgttcttttt

SEQ ID NO: 298408 - DNA, 12 bp, Artificial Sequence
  Oligonucleotide primer for the detection of SNP TSC0018080
ggaagattgtgg

SEQ ID NO: 298409 - DNA, 12 bp, Artificial Sequence
  Oligonucleotide primer for the detection of SNP TSC0018080
ggaagatcgtgg

SEQ ID NO: 298410 - DNA, 12 bp, Artificial Sequence
  Oligonucleotide primer for the detection of SNP TSC0018081
taaaacaaactc

SEQ ID NO: 298411 - DNA, 12 bp, Artificial Sequence
  Oligonucleotide primer for the detection of SNP TSC0018081
tatgggatttta

SEQ ID NO: 298412 - DNA, 12 bp, Artificial Sequence
  Oligonucleotide primer for the detection of SNP TSC0018084
aacactacttta

SEQ ID NO: 298413 - DNA, 12 bp, Artificial Sequence
  Oligonucleotide primer for the detection of SNP TSC0018084
aacgctacttta

SEQ ID NO: 298414 - DNA, 12 bp, Artificial Sequence
  Oligonucleotide primer for the detection of SNP TSC0018084
gggtgatgttat

SEQ ID NO: 298415 - DNA, 12 bp, Artificial Sequence
  Oligonucleotide primer for the detection of SNP TSC0018084
gggtgacgttat

SEQ ID NO: 298416 - DNA, 12 bp, Artificial Sequence
  Oligonucleotide primer for the detection of SNP TSC0018084
gggtgatgttac

SEQ ID NO: 298417 - DNA, 12 bp, Artificial Sequence
  Oligonucleotide primer for the detection of SNP TSC0018084
gggtgacgttac

SEQ ID NO: 298418 - DNA, 12 bp, Artificial Sequence
  Oligonucleotide primer for the detection of SNP TSC0018084
aaataacatcac

SEQ ID NO: 298419 - DNA, 12 bp, Artificial Sequence
  Oligonucleotide primer for the detection of SNP TSC0018084
aaataacgtcac

SEQ ID NO: 298420 - DNA, 12 bp, Artificial Sequence
  Oligonucleotide primer for the detection of SNP TSC0018084
ggtgttgtttta

SEQ ID NO: 298421 - DNA, 12 bp, Artificial Sequence
  Oligonucleotide primer for the detection of SNP TSC0018084
ggcgttgtttta

SEQ ID NO: 298422 - DNA, 12 bp, Artificial Sequence
  Oligonucleotide primer for the detection of SNP TSC0018092
ataaatttaact

SEQ ID NO: 298423 - DNA, 12 bp, Artificial Sequence
  Oligonucleotide primer for the detection of SNP TSC0018092
atgttttttgag

SEQ ID NO: 298424 - DNA, 12 bp, Artificial Sequence
  Oligonucleotide primer for the detection of SNP TSC0018092
atactctctaaa

SEQ ID NO: 298425 - DNA, 12 bp, Artificial Sequence
  Oligonucleotide primer for the detection of SNP TSC0018092
atgaatttaatt

SEQ ID NO: 298426 - DNA, 12 bp, Artificial Sequence
  Oligonucleotide primer for the detection of SNP TSC0018093
atatgagttttt

SEQ ID NO: 298427 - DNA, 12 bp, Artificial Sequence
  Oligonucleotide primer for the detection of SNP TSC0018093
atataaactttt

SEQ ID NO: 298428 - DNA, 12 bp, Artificial Sequence
  Oligonucleotide primer for the detection of SNP TSC0018094
tagtttgggttg

SEQ ID NO: 298429 - DNA, 12 bp, Artificial Sequence
  Oligonucleotide primer for the detection of SNP TSC0018094
caatctaaatta

SEQ ID NO: 298430 - DNA, 12 bp, Artificial Sequence
  Oligonucleotide primer for the detection of SNP TSC0018094
ggaggaagaatt

SEQ ID NO: 298431 - DNA, 12 bp, Artificial Sequence
  Oligonucleotide primer for the detection of SNP TSC0018095
acaactccccta

SEQ ID NO: 298432 - DNA, 12 bp, Artificial Sequence
  Oligonucleotide primer for the detection of SNP TSC0018095
gcaactccccta

SEQ ID NO: 298433 - DNA, 12 bp, Artificial Sequence
  Oligonucleotide primer for the detection of SNP TSC0018095
gatggttgtatt

SEQ ID NO: 298434 - DNA, 12 bp, Artificial Sequence
  Oligonucleotide primer for the detection of SNP TSC0018095
gacggttgtatt

SEQ ID NO: 298435 - DNA, 12 bp, Artificial Sequence
  Oligonucleotide primer for the detection of SNP TSC0018095
aacaactacacc

SEQ ID NO: 298436 - DNA, 12 bp, Artificial Sequence
  Oligonucleotide primer for the detection of SNP TSC0018095
aacgactacacc

SEQ ID NO: 298437 - DNA, 12 bp, Artificial Sequence
  Oligonucleotide primer for the detection of SNP TSC0018095
gtagttttttta

SEQ ID NO: 298438 - DNA, 12 bp, Artificial Sequence
  Oligonucleotide primer for the detection of SNP TSC0018098
aatcatttaaat

SEQ ID NO: 298439 - DNA, 12 bp, Artificial Sequence
  Oligonucleotide primer for the detection of SNP TSC0018098
aatcgtttaaat

SEQ ID NO: 298440 - DNA, 12 bp, Artificial Sequence
  Oligonucleotide primer for the detection of SNP TSC0018098
atagtagagaat

SEQ ID NO: 298441 - DNA, 12 bp, Artificial Sequence
  Oligonucleotide primer for the detection of SNP TSC0018098
aataataaaaaa

SEQ ID NO: 298442 - DNA, 12 bp, Artificial Sequence
  Oligonucleotide primer for the detection of SNP TSC0018098
ggttgtttaggt

SEQ ID NO: 298443 - DNA, 12 bp, Artificial Sequence
  Oligonucleotide primer for the detection of SNP TSC0018098
ggtcgtttaggt

SEQ ID NO: 298444 - DNA, 12 bp, Artificial Sequence
  Oligonucleotide primer for the detection of SNP TSC0018103
aaaatttcactc

SEQ ID NO: 298445 - DNA, 12 bp, Artificial Sequence
  Oligonucleotide primer for the detection of SNP TSC0018103
gaaatttcactc

SEQ ID NO: 298446 - DNA, 12 bp, Artificial Sequence
  Oligonucleotide primer for the detection of SNP TSC0018104
atcctcccaata

SEQ ID NO: 298447 - DNA, 12 bp, Artificial Sequence
  Oligonucleotide primer for the detection of SNP TSC0018104
atcctcccgata

SEQ ID NO: 298448 - DNA, 12 bp, Artificial Sequence
  Oligonucleotide primer for the detection of SNP TSC0018104
tttttaggttag

SEQ ID NO: 298449 - DNA, 12 bp, Artificial Sequence
  Oligonucleotide primer for the detection of SNP TSC0018104
ctctcaaattaa

SEQ ID NO: 298450 - DNA, 12 bp, Artificial Sequence
  Oligonucleotide primer for the detection of SNP TSC0018104
tatttttttgat

SEQ ID NO: 298451 - DNA, 12 bp, Artificial Sequence
  Oligonucleotide primer for the detection of SNP TSC0018104
tattttttcgat

SEQ ID NO: 298452 - DNA, 12 bp, Artificial Sequence
  Oligonucleotide primer for the detection of SNP TSC0018105
ttttataagtga

SEQ ID NO: 298453 - DNA, 12 bp, Artificial Sequence
  Oligonucleotide primer for the detection of SNP TSC0018105
ctttataaataa

SEQ ID NO: 298454 - DNA, 12 bp, Artificial Sequence
  Oligonucleotide primer for the detection of SNP TSC0018105
gaaaggtgaaaa

SEQ ID NO: 298455 - DNA, 12 bp, Artificial Sequence
  Oligonucleotide primer for the detection of SNP TSC0018108
aaaccacttaaa

SEQ ID NO: 298456 - DNA, 12 bp, Artificial Sequence
  Oligonucleotide primer for the detection of SNP TSC0018108
aaaccgcttaaa

SEQ ID NO: 298457 - DNA, 12 bp, Artificial Sequence
  Oligonucleotide primer for the detection of SNP TSC0018108
gttgtttttttt

SEQ ID NO: 298458 - DNA, 12 bp, Artificial Sequence
  Oligonucleotide primer for the detection of SNP TSC0018108
gtcgtttttttt

SEQ ID NO: 298459 - DNA, 12 bp, Artificial Sequence
  Oligonucleotide primer for the detection of SNP TSC0018108
ataatcactccc

SEQ ID NO: 298460 - DNA, 12 bp, Artificial Sequence
  Oligonucleotide primer for the detection of SNP TSC0018108
ataatcgctccc

SEQ ID NO: 298461 - DNA, 12 bp, Artificial Sequence
  Oligonucleotide primer for the detection of SNP TSC0018108
aggttgtttggg

SEQ ID NO: 298462 - DNA, 12 bp, Artificial Sequence
  Oligonucleotide primer for the detection of SNP TSC0018108
aggtcgtttggg

SEQ ID NO: 298463 - DNA, 12 bp, Artificial Sequence
  Oligonucleotide primer for the detection of SNP TSC0018109
catataaacata

SEQ ID NO: 298464 - DNA, 12 bp, Artificial Sequence
  Oligonucleotide primer for the detection of SNP TSC0018109
agataattatat

SEQ ID NO: 298465 - DNA, 12 bp, Artificial Sequence
  Oligonucleotide primer for the detection of SNP TSC0018109
agataattatac

SEQ ID NO: 298466 - DNA, 12 bp, Artificial Sequence
  Oligonucleotide primer for the detection of SNP TSC0018109
aaacaattacac

SEQ ID NO: 298467 - DNA, 12 bp, Artificial Sequence
  Oligonucleotide primer for the detection of SNP TSC0018109
ttatgtgagtat

SEQ ID NO: 298468 - DNA, 12 bp, Artificial Sequence
  Oligonucleotide primer for the detection of SNP TSC0018110
tttacaacttaa

SEQ ID NO: 298469 - DNA, 12 bp, Artificial Sequence
  Oligonucleotide primer for the detection of SNP TSC0018110
ttttaaatttag

SEQ ID NO: 298470 - DNA, 12 bp, Artificial Sequence
  Oligonukleotid-Primer
ctccaaatccaa

SEQ ID NO: 298471 - DNA, 12 bp, Artificial Sequence
  Oligonucleotide primer for the detection of SNP TSC0018110
tgtaatttaatt

SEQ ID NO: 298472 - DNA, 12 bp, Artificial Sequence
  Oligonucleotide primer for the detection of SNP TSC0018111
aaatacccaccc

SEQ ID NO: 298473 - DNA, 12 bp, Artificial Sequence
  Oligonucleotide primer for the detection of SNP TSC0018111
gtatgttaatga

SEQ ID NO: 298474 - DNA, 12 bp, Artificial Sequence
  Oligonucleotide primer for the detection of SNP TSC0018111
acataccaataa

SEQ ID NO: 298475 - DNA, 12 bp, Artificial Sequence
  Oligonucleotide primer for the detection of SNP TSC0018111
agatgtttattt

SEQ ID NO: 298476 - DNA, 12 bp, Artificial Sequence
  Oligonucleotide primer for the detection of SNP TSC0018114
cactaaaaacca

SEQ ID NO: 298477 - DNA, 12 bp, Artificial Sequence
  Oligonucleotide primer for the detection of SNP TSC0018114
cgctaaaaacca

SEQ ID NO: 298478 - DNA, 12 bp, Artificial Sequence
  Oligonucleotide primer for the detection of SNP TSC0018114
ggtggtggagtt

SEQ ID NO: 298479 - DNA, 12 bp, Artificial Sequence
  Oligonucleotide primer for the detection of SNP TSC0018114
ggcggtggagtt

SEQ ID NO: 298480 - DNA, 12 bp, Artificial Sequence
  Oligonucleotide primer for the detection of SNP TSC0018114
ggtggcggagtt

SEQ ID NO: 298481 - DNA, 12 bp, Artificial Sequence
  Oligonucleotide primer for the detection of SNP TSC0018114
ggtggtggagtc

SEQ ID NO: 298482 - DNA, 12 bp, Artificial Sequence
  Oligonucleotide primer for the detection of SNP TSC0018114
ggcggcggagtt

SEQ ID NO: 298483 - DNA, 12 bp, Artificial Sequence
  Oligonucleotide primer for the detection of SNP TSC0018114
ggcggtggagtc

SEQ ID NO: 298484 - DNA, 12 bp, Artificial Sequence
  Oligonucleotide primer for the detection of SNP TSC0018114
ggtggcggagtc

SEQ ID NO: 298485 - DNA, 12 bp, Artificial Sequence
  Oligonucleotide primer for the detection of SNP TSC0018114
ggcggcggagtc

SEQ ID NO: 298486 - DNA, 12 bp, Artificial Sequence
  Oligonucleotide primer for the detection of SNP TSC0018114
aaacaacaaaat

SEQ ID NO: 298487 - DNA, 12 bp, Artificial Sequence
  Oligonucleotide primer for the detection of SNP TSC0018114
aaacaacgaaat

SEQ ID NO: 298488 - DNA, 12 bp, Artificial Sequence
  Oligonucleotide primer for the detection of SNP TSC0018114
aaacgacaaaat

SEQ ID NO: 298489 - DNA, 12 bp, Artificial Sequence
  Oligonucleotide primer for the detection of SNP TSC0018114
aaacgacgaaat

SEQ ID NO: 298490 - DNA, 12 bp, Artificial Sequence
  Oligonucleotide primer for the detection of SNP TSC0018114
tgttggaaatta

SEQ ID NO: 298491 - DNA, 12 bp, Artificial Sequence
  Oligonucleotide primer for the detection of SNP TSC0018114
cgttggaaatta

SEQ ID NO: 298492 - DNA, 12 bp, Artificial Sequence
  Oligonucleotide primer for the detection of SNP TSC0018115
taccctaatttt

SEQ ID NO: 298493 - DNA, 12 bp, Artificial Sequence
  Oligonucleotide primer for the detection of SNP TSC0018115
tattgtttaaaa

SEQ ID NO: 298494 - DNA, 12 bp, Artificial Sequence
  Oligonucleotide primer for the detection of SNP TSC0018116
taatcacaaact

SEQ ID NO: 298495 - DNA, 12 bp, Artificial Sequence
  Oligonucleotide primer for the detection of SNP TSC0018116
tataattattta

SEQ ID NO: 298496 - DNA, 12 bp, Artificial Sequence
  Oligonucleotide primer for the detection of SNP TSC0018116
cataattattca

SEQ ID NO: 298497 - DNA, 12 bp, Artificial Sequence
  Oligonucleotide primer for the detection of SNP TSC0018116
taattataaatt

SEQ ID NO: 298498 - DNA, 12 bp, Artificial Sequence
  Oligonucleotide primer for the detection of SNP TSC0018117
taaatataattt

SEQ ID NO: 298499 - DNA, 12 bp, Artificial Sequence
  Oligonucleotide primer for the detection of SNP TSC0018117
ttagaattttaa

SEQ ID NO: 298500 - DNA, 12 bp, Artificial Sequence
  Oligonucleotide primer for the detection of SNP TSC0018118
tcaataacctcc

SEQ ID NO: 298501 - DNA, 12 bp, Artificial Sequence
  Oligonucleotide primer for the detection of SNP TSC0018118
attttaagtgaa

SEQ ID NO: 298502 - DNA, 12 bp, Artificial Sequence
  Oligonucleotide primer for the detection of SNP TSC0018121
cccaacttaact

SEQ ID NO: 298503 - DNA, 12 bp, Artificial Sequence
  Oligonucleotide primer for the detection of SNP TSC0018121
gtgagttaatta

SEQ ID NO: 298504 - DNA, 12 bp, Artificial Sequence
  Oligonucleotide primer for the detection of SNP TSC0018122
taataatacatt

SEQ ID NO: 298505 - DNA, 12 bp, Artificial Sequence
  Oligonucleotide primer for the detection of SNP TSC0018124
taaaacctacct

SEQ ID NO: 298506 - DNA, 12 bp, Artificial Sequence
  Oligonucleotide primer for the detection of SNP TSC0018124
ttttggtgggaa

SEQ ID NO: 298507 - DNA, 12 bp, Artificial Sequence
  Oligonucleotide primer for the detection of SNP TSC0018124
ttttggcgggaa

SEQ ID NO: 298508 - DNA, 12 bp, Artificial Sequence
  Oligonucleotide primer for the detection of SNP TSC0018125
aataacctaact

SEQ ID NO: 298509 - DNA, 12 bp, Artificial Sequence
  Oligonucleotide primer for the detection of SNP TSC0018125
ggtagtggttaa

SEQ ID NO: 298510 - DNA, 12 bp, Artificial Sequence
  Oligonucleotide primer for the detection of SNP TSC0018128
ctatcaacactt

SEQ ID NO: 298511 - DNA, 12 bp, Artificial Sequence
  Oligonucleotide primer for the detection of SNP TSC0018128
taggatagttta

SEQ ID NO: 298512 - DNA, 12 bp, Artificial Sequence
  Oligonucleotide primer for the detection of SNP TSC0018129
taaaactataaa

SEQ ID NO: 298513 - DNA, 12 bp, Artificial Sequence
  Oligonucleotide primer for the detection of SNP TSC0018129
agaaatgtattg

SEQ ID NO: 298514 - DNA, 12 bp, Artificial Sequence
  Oligonucleotide primer for the detection of SNP TSC0018129
aaaaatatatta

SEQ ID NO: 298515 - DNA, 12 bp, Artificial Sequence
  Oligonucleotide primer for the detection of SNP TSC0018129
ttagaattgtga

SEQ ID NO: 298516 - DNA, 12 bp, Artificial Sequence
  Oligonucleotide primer for the detection of SNP TSC0018133
atcaccttcccc

SEQ ID NO: 298517 - DNA, 12 bp, Artificial Sequence
  Oligonucleotide primer for the detection of SNP TSC0018133
attttgttgggg

SEQ ID NO: 298518 - DNA, 12 bp, Artificial Sequence
  Oligonucleotide primer for the detection of SNP TSC0018133
atttcgttgggg

SEQ ID NO: 298519 - DNA, 12 bp, Artificial Sequence
  Oligonucleotide primer for the detection of SNP TSC0018134
tcaaacattaat

SEQ ID NO: 298520 - DNA, 12 bp, Artificial Sequence
  Oligonucleotide primer for the detection of SNP TSC0018134
gggattttaggg

SEQ ID NO: 298521 - DNA, 12 bp, Artificial Sequence
  Oligonucleotide primer for the detection of SNP TSC0018142
catatctatttc

SEQ ID NO: 298522 - DNA, 12 bp, Artificial Sequence
  Oligonucleotide primer for the detection of SNP TSC0018142
aaatggtgattg

SEQ ID NO: 298523 - DNA, 12 bp, Artificial Sequence
  Oligonucleotide primer for the detection of SNP TSC0018142
aaacggtgattg

SEQ ID NO: 298524 - DNA, 12 bp, Artificial Sequence
  Oligonucleotide primer for the detection of SNP TSC0018142
aaatggtgatcg

SEQ ID NO: 298525 - DNA, 12 bp, Artificial Sequence
  Oligonucleotide primer for the detection of SNP TSC0018142
aaacggtgatcg

SEQ ID NO: 298526 - DNA, 12 bp, Artificial Sequence
  Oligonucleotide primer for the detection of SNP TSC0018142
aaacaataatca

SEQ ID NO: 298527 - DNA, 12 bp, Artificial Sequence
  Oligonucleotide primer for the detection of SNP TSC0018142
aaacaataatcg

SEQ ID NO: 298528 - DNA, 12 bp, Artificial Sequence
  Oligonucleotide primer for the detection of SNP TSC0018142
aaacgataatca

SEQ ID NO: 298529 - DNA, 12 bp, Artificial Sequence
  Oligonucleotide primer for the detection of SNP TSC0018142
aaacgataatcg

SEQ ID NO: 298530 - DNA, 12 bp, Artificial Sequence
  Oligonucleotide primer for the detection of SNP TSC0018142
tatgtttatttt

SEQ ID NO: 298531 - DNA, 12 bp, Artificial Sequence
  Oligonucleotide primer for the detection of SNP TSC0018143
actatttttctt

SEQ ID NO: 298532 - DNA, 12 bp, Artificial Sequence
  Oligonucleotide primer for the detection of SNP TSC0018143
gaggtagaggag

SEQ ID NO: 298533 - DNA, 12 bp, Artificial Sequence
  Oligonucleotide primer for the detection of SNP TSC0018150
cactaaaaaatt

SEQ ID NO: 298534 - DNA, 12 bp, Artificial Sequence
  Oligonucleotide primer for the detection of SNP TSC0018150
ttggggttttga

SEQ ID NO: 298535 - DNA, 12 bp, Artificial Sequence
  Oligonucleotide primer for the detection of SNP TSC0018150
tcggggttttga

SEQ ID NO: 298536 - DNA, 12 bp, Artificial Sequence
  Oligonucleotide primer for the detection of SNP TSC0018151
ccccttatcaaa

SEQ ID NO: 298537 - DNA, 12 bp, Artificial Sequence
  Oligonucleotide primer for the detection of SNP TSC0018151
tttatgagattt

SEQ ID NO: 298538 - DNA, 12 bp, Artificial Sequence
  Oligonucleotide primer for the detection of SNP TSC0018151
ctcataaaatct

SEQ ID NO: 298539 - DNA, 12 bp, Artificial Sequence
  Oligonucleotide primer for the detection of SNP TSC0018151
ttttttattaaa

SEQ ID NO: 298540 - DNA, 12 bp, Artificial Sequence
  Oligonucleotide primer for the detection of SNP TSC0018158
aaaacaacttac

SEQ ID NO: 298541 - DNA, 12 bp, Artificial Sequence
  Oligonucleotide primer for the detection of SNP TSC0018158
tgttattttttg

SEQ ID NO: 298542 - DNA, 12 bp, Artificial Sequence
  Oligonucleotide primer for the detection of SNP TSC0018159
tttatattggta

SEQ ID NO: 298543 - DNA, 12 bp, Artificial Sequence
  Oligonucleotide primer for the detection of SNP TSC0018159
tttatatcggta

SEQ ID NO: 298544 - DNA, 12 bp, Artificial Sequence
  Oligonucleotide primer for the detection of SNP TSC0018162
tgttaggttgga

SEQ ID NO: 298545 - DNA, 12 bp, Artificial Sequence
  Oligonucleotide primer for the detection of SNP TSC0018162
cgttaggttgga

SEQ ID NO: 298546 - DNA, 12 bp, Artificial Sequence
  Oligonucleotide primer for the detection of SNP TSC0018163
aaacatccccat

SEQ ID NO: 298547 - DNA, 12 bp, Artificial Sequence
  Oligonucleotide primer for the detection of SNP TSC0018163
tttggagattga

SEQ ID NO: 298548 - DNA, 12 bp, Artificial Sequence
  Oligonucleotide primer for the detection of SNP TSC0018163
ttcggagattga

SEQ ID NO: 298549 - DNA, 12 bp, Artificial Sequence
  Oligonucleotide primer for the detection of SNP TSC0018168
taaataatctct

SEQ ID NO: 298550 - DNA, 12 bp, Artificial Sequence
  Oligonucleotide primer for the detection of SNP TSC0018168
tttgtagagaag

SEQ ID NO: 298551 - DNA, 12 bp, Artificial Sequence
  Oligonucleotide primer for the detection of SNP TSC0018169
aatataactaac

SEQ ID NO: 298552 - DNA, 12 bp, Artificial Sequence
  Oligonucleotide primer for the detection of SNP TSC0018169
ttttaatatgaa

SEQ ID NO: 298553 - DNA, 12 bp, Artificial Sequence
  Oligonucleotide primer for the detection of SNP TSC0018170
caaaaccactaa

SEQ ID NO: 298554 - DNA, 12 bp, Artificial Sequence
  Oligonucleotide primer for the detection of SNP TSC0018170
gaggaagttggg

SEQ ID NO: 298555 - DNA, 12 bp, Artificial Sequence
  Oligonukleotid-Primer
taggattattgg

SEQ ID NO: 298556 - DNA, 12 bp, Artificial Sequence
  Oligonucleotide primer for the detection of SNP TSC0018171
taacctaaaatt

SEQ ID NO: 298557 - DNA, 12 bp, Artificial Sequence
  Oligonucleotide primer for the detection of SNP TSC0018171
gatttagtgaaa

SEQ ID NO: 298558 - DNA, 12 bp, Artificial Sequence
  Oligonucleotide primer for the detection of SNP TSC0018171
gatttagcgaaa

SEQ ID NO: 298559 - DNA, 12 bp, Artificial Sequence
  Oligonukleotid-Primer
tagtaggggagg

SEQ ID NO: 298560 - DNA, 12 bp, Artificial Sequence
  Oligonucleotide primer for the detection of SNP TSC0018173
atcttcatctat

SEQ ID NO: 298561 - DNA, 12 bp, Artificial Sequence
  Oligonucleotide primer for the detection of SNP TSC0018173
ccaccaccatta

SEQ ID NO: 298562 - DNA, 12 bp, Artificial Sequence
  Oligonucleotide primer for the detection of SNP TSC0018174
ataaataaccaa

SEQ ID NO: 298563 - DNA, 12 bp, Artificial Sequence
  Oligonukleotid-Primer
agaggtaaaaat

SEQ ID NO: 298564 - DNA, 12 bp, Artificial Sequence
  Oligonucleotide primer for the detection of SNP TSC0018174
aatagataatta

SEQ ID NO: 298565 - DNA, 12 bp, Artificial Sequence
  Oligonucleotide primer for the detection of SNP TSC0018175
cttccaaattta

SEQ ID NO: 298566 - DNA, 12 bp, Artificial Sequence
  Oligonucleotide primer for the detection of SNP TSC0018175
taggataattat

SEQ ID NO: 298567 - DNA, 12 bp, Artificial Sequence
  Oligonucleotide primer for the detection of SNP TSC0018175
taggataattac

SEQ ID NO: 298568 - DNA, 12 bp, Artificial Sequence
  Oligonucleotide primer for the detection of SNP TSC0018176
atgtaggggttg

SEQ ID NO: 298569 - DNA, 12 bp, Artificial Sequence
  Oligonucleotide primer for the detection of SNP TSC0018176
aaaagttaagat

SEQ ID NO: 298570 - DNA, 12 bp, Artificial Sequence
  Oligonucleotide primer for the detection of SNP TSC0018176
aaaagttaagac

SEQ ID NO: 298571 - DNA, 12 bp, Artificial Sequence
  Oligonucleotide primer for the detection of SNP TSC0018177
gttgtgttttag

SEQ ID NO: 298572 - DNA, 12 bp, Artificial Sequence
  Oligonucleotide primer for the detection of SNP TSC0018177
gttgcgttttag

SEQ ID NO: 298573 - DNA, 12 bp, Artificial Sequence
  Oligonucleotide primer for the detection of SNP TSC0018178
aacaaaacccac

SEQ ID NO: 298574 - DNA, 12 bp, Artificial Sequence
  Oligonucleotide primer for the detection of SNP TSC0018178
taaaaaaagtaa

SEQ ID NO: 298575 - DNA, 12 bp, Artificial Sequence
  Oligonucleotide primer for the detection of SNP TSC0018179
aaaaatactaat

SEQ ID NO: 298576 - DNA, 12 bp, Artificial Sequence
  Oligonucleotide primer for the detection of SNP TSC0018179
aaataaaatgta

SEQ ID NO: 298577 - DNA, 12 bp, Artificial Sequence
  Oligonucleotide primer for the detection of SNP TSC0018179
aaacaaaataca

SEQ ID NO: 298578 - DNA, 12 bp, Artificial Sequence
  Oligonucleotide primer for the detection of SNP TSC0018179
aaatattaattt

SEQ ID NO: 298579 - DNA, 12 bp, Artificial Sequence
  Oligonucleotide primer for the detection of SNP TSC0018180
aataaataataa

SEQ ID NO: 298580 - DNA, 12 bp, Artificial Sequence
  Oligonucleotide primer for the detection of SNP TSC0018180
tagaaattttat

SEQ ID NO: 298581 - DNA, 12 bp, Artificial Sequence
  Oligonucleotide primer for the detection of SNP TSC0018180
aaaaaccctata

SEQ ID NO: 298582 - DNA, 12 bp, Artificial Sequence
  Oligonucleotide primer for the detection of SNP TSC0018180
tagtaagtggta

SEQ ID NO: 298583 - DNA, 12 bp, Artificial Sequence
  Oligonucleotide primer for the detection of SNP TSC0018181
taattcacaaaa

SEQ ID NO: 298584 - DNA, 12 bp, Artificial Sequence
  Oligonucleotide primer for the detection of SNP TSC0018181
ggtagtattttg

SEQ ID NO: 298585 - DNA, 12 bp, Artificial Sequence
  Oligonucleotide primer for the detection of SNP TSC0018181
aacaatatctta

SEQ ID NO: 298586 - DNA, 12 bp, Artificial Sequence
  Oligonucleotide primer for the detection of SNP TSC0018181
aaagtgatttat

SEQ ID NO: 298587 - DNA, 12 bp, Artificial Sequence
  Oligonucleotide primer for the detection of SNP TSC0018182
acatccccaaaa

SEQ ID NO: 298588 - DNA, 12 bp, Artificial Sequence
  Oligonucleotide primer for the detection of SNP TSC0018182
acatccccgaaa

SEQ ID NO: 298589 - DNA, 12 bp, Artificial Sequence
  Oligonucleotide primer for the detection of SNP TSC0018182
agtaatgttttt

SEQ ID NO: 298590 - DNA, 12 bp, Artificial Sequence
  Oligonucleotide primer for the detection of SNP TSC0018182
aacaatacctcc

SEQ ID NO: 298591 - DNA, 12 bp, Artificial Sequence
  Oligonucleotide primer for the detection of SNP TSC0018182
ttgtatttttgg

SEQ ID NO: 298592 - DNA, 12 bp, Artificial Sequence
  Oligonucleotide primer for the detection of SNP TSC0018182
ttgtattttcgg

SEQ ID NO: 298593 - DNA, 12 bp, Artificial Sequence
  Oligonucleotide primer for the detection of SNP TSC0018184
ataaaaactacc

SEQ ID NO: 298594 - DNA, 12 bp, Artificial Sequence
  Oligonucleotide primer for the detection of SNP TSC0018184
ttgttggttggg

SEQ ID NO: 298595 - DNA, 12 bp, Artificial Sequence
  Oligonucleotide primer for the detection of SNP TSC0018184
ttattaactaaa

SEQ ID NO: 298596 - DNA, 12 bp, Artificial Sequence
  Oligonucleotide primer for the detection of SNP TSC0018184
gtgagagttatt

SEQ ID NO: 298597 - DNA, 12 bp, Artificial Sequence
  Oligonucleotide primer for the detection of SNP TSC0018185
ttgtgaggatgg

SEQ ID NO: 298598 - DNA, 12 bp, Artificial Sequence
  Oligonucleotide primer for the detection of SNP TSC0018185
ggttatagatat

SEQ ID NO: 298599 - DNA, 12 bp, Artificial Sequence
  Oligonucleotide primer for the detection of SNP TSC0018186
taacaaatttat

SEQ ID NO: 298600 - DNA, 12 bp, Artificial Sequence
  Oligonucleotide primer for the detection of SNP TSC0018186
aattggattggg

SEQ ID NO: 298601 - DNA, 12 bp, Artificial Sequence
  Oligonucleotide primer for the detection of SNP TSC0018187
atgtgaagttgt

SEQ ID NO: 298602 - DNA, 12 bp, Artificial Sequence
  Oligonucleotide primer for the detection of SNP TSC0018187
atgtgaagttgc

SEQ ID NO: 298603 - DNA, 12 bp, Artificial Sequence
  Oligonucleotide primer for the detection of SNP TSC0018187
atataaaattac

SEQ ID NO: 298604 - DNA, 12 bp, Artificial Sequence
  Oligonucleotide primer for the detection of SNP TSC0018187
taaagtagaatt

SEQ ID NO: 298605 - DNA, 12 bp, Artificial Sequence
  Oligonucleotide primer for the detection of SNP TSC0018188
ctcccttttcat

SEQ ID NO: 298606 - DNA, 12 bp, Artificial Sequence
  Oligonucleotide primer for the detection of SNP TSC0018188
taagatgtaagt

SEQ ID NO: 298607 - DNA, 12 bp, Artificial Sequence
  Oligonucleotide primer for the detection of SNP TSC0018189
aactcccttttc

SEQ ID NO: 298608 - DNA, 12 bp, Artificial Sequence
  Oligonucleotide primer for the detection of SNP TSC0018189
aagatgtaagta

SEQ ID NO: 298609 - DNA, 12 bp, Artificial Sequence
  Oligonucleotide primer for the detection of SNP TSC0018191
aaatacaacaat

SEQ ID NO: 298610 - DNA, 12 bp, Artificial Sequence
  Oligonucleotide primer for the detection of SNP TSC0018191
aaatacaacgat

SEQ ID NO: 298611 - DNA, 12 bp, Artificial Sequence
  Oligonucleotide primer for the detection of SNP TSC0018191
ggtgatttgaga

SEQ ID NO: 298612 - DNA, 12 bp, Artificial Sequence
  Oligonucleotide primer for the detection of SNP TSC0018191
gataacctaaaa

SEQ ID NO: 298613 - DNA, 12 bp, Artificial Sequence
  Oligonucleotide primer for the detection of SNP TSC0018191
gagtgtagcggt

SEQ ID NO: 298614 - DNA, 12 bp, Artificial Sequence
  Oligonucleotide primer for the detection of SNP TSC0018192
tcctactacata

SEQ ID NO: 298615 - DNA, 12 bp, Artificial Sequence
  Oligonucleotide primer for the detection of SNP TSC0018192
tcctactacgta

SEQ ID NO: 298616 - DNA, 12 bp, Artificial Sequence
  Oligonucleotide primer for the detection of SNP TSC0018192
agtaagatattt

SEQ ID NO: 298617 - DNA, 12 bp, Artificial Sequence
  Oligonucleotide primer for the detection of SNP TSC0018192
aacaaaatacct

SEQ ID NO: 298618 - DNA, 12 bp, Artificial Sequence
  Oligonucleotide primer for the detection of SNP TSC0018192
ttttattacgta

SEQ ID NO: 298619 - DNA, 12 bp, Artificial Sequence
  Oligonucleotide primer for the detection of SNP TSC0018193
atttaaaatatt

SEQ ID NO: 298620 - DNA, 12 bp, Artificial Sequence
  Oligonucleotide primer for the detection of SNP TSC0018193
ttatgtaatttg

SEQ ID NO: 298621 - DNA, 12 bp, Artificial Sequence
  Oligonucleotide primer for the detection of SNP TSC0018194
tttttgggttta

SEQ ID NO: 298622 - DNA, 12 bp, Artificial Sequence
  Oligonucleotide primer for the detection of SNP TSC0018194
ttttcgggttta

SEQ ID NO: 298623 - DNA, 12 bp, Artificial Sequence
  Oligonucleotide primer for the detection of SNP TSC0018195
ccctacctaaca

SEQ ID NO: 298624 - DNA, 12 bp, Artificial Sequence
  Oligonucleotide primer for the detection of SNP TSC0018195
ggatataggtat

SEQ ID NO: 298625 - DNA, 12 bp, Artificial Sequence
  Oligonucleotide primer for the detection of SNP TSC0018195
ttttgtttggta

SEQ ID NO: 298626 - DNA, 12 bp, Artificial Sequence
  Oligonucleotide primer for the detection of SNP TSC0018196
atataaatattt

SEQ ID NO: 298627 - DNA, 12 bp, Artificial Sequence
  Oligonucleotide primer for the detection of SNP TSC0018204
tatacaaacaaa

SEQ ID NO: 298628 - DNA, 12 bp, Artificial Sequence
  Oligonucleotide primer for the detection of SNP TSC0018204
tatacaaacgaa

SEQ ID NO: 298629 - DNA, 12 bp, Artificial Sequence
  Oligonucleotide primer for the detection of SNP TSC0018204
tttgggtgatat

SEQ ID NO: 298630 - DNA, 12 bp, Artificial Sequence
  Oligonucleotide primer for the detection of SNP TSC0018204
cctaaataacat

SEQ ID NO: 298631 - DNA, 12 bp, Artificial Sequence
  Oligonucleotide primer for the detection of SNP TSC0018204
tgtatagatggg

SEQ ID NO: 298632 - DNA, 12 bp, Artificial Sequence
  Oligonucleotide primer for the detection of SNP TSC0018204
tgtatagacggg

SEQ ID NO: 298633 - DNA, 12 bp, Artificial Sequence
  Oligonucleotide primer for the detection of SNP TSC0018205
ctataccccaac

SEQ ID NO: 298634 - DNA, 12 bp, Artificial Sequence
  Oligonucleotide primer for the detection of SNP TSC0018205
tatatagtttat

SEQ ID NO: 298635 - DNA, 12 bp, Artificial Sequence
  Oligonucleotide primer for the detection of SNP TSC0018205
tatatagtttac

SEQ ID NO: 298636 - DNA, 12 bp, Artificial Sequence
  Oligonucleotide primer for the detection of SNP TSC0018205
ccacataaccca

SEQ ID NO: 298637 - DNA, 12 bp, Artificial Sequence
  Oligonucleotide primer for the detection of SNP TSC0018205
ttgtgttttaat

SEQ ID NO: 298638 - DNA, 12 bp, Artificial Sequence
  Oligonucleotide primer for the detection of SNP TSC0018209
acttcactccat

SEQ ID NO: 298639 - DNA, 12 bp, Artificial Sequence
  Oligonucleotide primer for the detection of SNP TSC0018209
ttgattttttgg

SEQ ID NO: 298640 - DNA, 12 bp, Artificial Sequence
  Oligonucleotide primer for the detection of SNP TSC0018210
cgataataacaa

SEQ ID NO: 298641 - DNA, 12 bp, Artificial Sequence
  Oligonucleotide primer for the detection of SNP TSC0018210
ttagtttagatt

SEQ ID NO: 298642 - DNA, 12 bp, Artificial Sequence
  Oligonucleotide primer for the detection of SNP TSC0018210
atttaacccaaa

SEQ ID NO: 298643 - DNA, 12 bp, Artificial Sequence
  Oligonucleotide primer for the detection of SNP TSC0018210
atgatgatgata

SEQ ID NO: 298644 - DNA, 12 bp, Artificial Sequence
  Oligonukleotid-Primer
acgatgatgata

SEQ ID NO: 298645 - DNA, 12 bp, Artificial Sequence
  Oligonucleotide primer for the detection of SNP TSC0018214
ttgaaggtttta

SEQ ID NO: 298646 - DNA, 12 bp, Artificial Sequence
  Oligonucleotide primer for the detection of SNP TSC0018215
gggtatttaaat

SEQ ID NO: 298647 - DNA, 12 bp, Artificial Sequence
  Oligonucleotide primer for the detection of SNP TSC0018215
aaacacctaaat

SEQ ID NO: 298648 - DNA, 12 bp, Artificial Sequence
  Oligonukleotid-Primer
gaagggattaaa

SEQ ID NO: 298649 - DNA, 12 bp, Artificial Sequence
  Oligonucleotide primer for the detection of SNP TSC0018216
attttcttttaa

SEQ ID NO: 298650 - DNA, 12 bp, Artificial Sequence
  Oligonucleotide primer for the detection of SNP TSC0018216
ttaaatatttta

SEQ ID NO: 298651 - DNA, 12 bp, Artificial Sequence
  Oligonucleotide primer for the detection of SNP TSC0018218
taaaatccttaa

SEQ ID NO: 298652 - DNA, 12 bp, Artificial Sequence
  Oligonukleotid-Primer
atgatatttagg

SEQ ID NO: 298653 - DNA, 12 bp, Artificial Sequence
  Oligonucleotide primer for the detection of SNP TSC0018218
ataacattcaaa

SEQ ID NO: 298654 - DNA, 12 bp, Artificial Sequence
  Oligonucleotide primer for the detection of SNP TSC0018218
tgaggtttttaa

SEQ ID NO: 298655 - DNA, 12 bp, Artificial Sequence
  Oligonucleotide primer for the detection of SNP TSC0018219
atttttttggag

SEQ ID NO: 298656 - DNA, 12 bp, Artificial Sequence
  Oligonukleotid-Primer
gtggatggtggg

SEQ ID NO: 298657 - DNA, 12 bp, Artificial Sequence
  Oligonucleotide primer for the detection of SNP TSC0018222
tcccaattccaa

SEQ ID NO: 298658 - DNA, 12 bp, Artificial Sequence
  Oligonucleotide primer for the detection of SNP TSC0018222
tttgttaataaa

SEQ ID NO: 298659 - DNA, 12 bp, Artificial Sequence
  Oligonucleotide primer for the detection of SNP TSC0018222
tttaccaataaa

SEQ ID NO: 298660 - DNA, 12 bp, Artificial Sequence
  Oligonucleotide primer for the detection of SNP TSC0018222
ttttaattttaa

SEQ ID NO: 298661 - DNA, 12 bp, Artificial Sequence
  Oligonucleotide primer for the detection of SNP TSC0018223
cttaaaacctaa

SEQ ID NO: 298662 - DNA, 12 bp, Artificial Sequence
  Oligonucleotide primer for the detection of SNP TSC0018223
aatatcatttcc

SEQ ID NO: 298663 - DNA, 12 bp, Artificial Sequence
  Oligonucleotide primer for the detection of SNP TSC0018223
tttgaaatttaa

SEQ ID NO: 298664 - DNA, 12 bp, Artificial Sequence
  Oligonucleotide primer for the detection of SNP TSC0018225
cactcttttccc

SEQ ID NO: 298665 - DNA, 12 bp, Artificial Sequence
  Oligonucleotide primer for the detection of SNP TSC0018225
aatgtaatttag

SEQ ID NO: 298666 - DNA, 12 bp, Artificial Sequence
  Oligonucleotide primer for the detection of SNP TSC0018226
tattaaaccaaa

SEQ ID NO: 298667 - DNA, 12 bp, Artificial Sequence
  Oligonucleotide primer for the detection of SNP TSC0018226
ttttataaatag

SEQ ID NO: 298668 - DNA, 12 bp, Artificial Sequence
  Oligonucleotide primer for the detection of SNP TSC0018226
tttcataaataa

SEQ ID NO: 298669 - DNA, 12 bp, Artificial Sequence
  Oligonucleotide primer for the detection of SNP TSC0018226
tttgttaggtta

SEQ ID NO: 298670 - DNA, 12 bp, Artificial Sequence
  Oligonucleotide primer for the detection of SNP TSC0018231
tttaggtaggtt

SEQ ID NO: 298671 - DNA, 12 bp, Artificial Sequence
  Oligonucleotide primer for the detection of SNP TSC0018231
ccaaataaacta

SEQ ID NO: 298672 - DNA, 12 bp, Artificial Sequence
  Oligonucleotide primer for the detection of SNP TSC0018231
ggagaggtgtat

SEQ ID NO: 298673 - DNA, 12 bp, Artificial Sequence
  Oligonucleotide primer for the detection of SNP TSC0018232
ttatccctctct

SEQ ID NO: 298674 - DNA, 12 bp, Artificial Sequence
  Oligonucleotide primer for the detection of SNP TSC0018232
tggttttattag

SEQ ID NO: 298675 - DNA, 12 bp, Artificial Sequence
  Oligonucleotide primer for the detection of SNP TSC0018234
ctcaaaaacatc

SEQ ID NO: 298676 - DNA, 12 bp, Artificial Sequence
  Oligonucleotide primer for the detection of SNP TSC0018234
gattttgaattt

SEQ ID NO: 298677 - DNA, 12 bp, Artificial Sequence
  Oligonucleotide primer for the detection of SNP TSC0018234
gattttgaattc

SEQ ID NO: 298678 - DNA, 12 bp, Artificial Sequence
  Oligonucleotide primer for the detection of SNP TSC0018234
aatcctaaatcc

SEQ ID NO: 298679 - DNA, 12 bp, Artificial Sequence
  Oligonucleotide primer for the detection of SNP TSC0018234
tttaggaatatt

SEQ ID NO: 298680 - DNA, 12 bp, Artificial Sequence
  Oligonucleotide primer for the detection of SNP TSC0018234
tttaggaatatc

SEQ ID NO: 298681 - DNA, 12 bp, Artificial Sequence
  Oligonucleotide primer for the detection of SNP TSC0018235
acaacaaacccc

SEQ ID NO: 298682 - DNA, 12 bp, Artificial Sequence
  Oligonucleotide primer for the detection of SNP TSC0018235
taggtattttgt

SEQ ID NO: 298683 - DNA, 12 bp, Artificial Sequence
  Oligonucleotide primer for the detection of SNP TSC0018235
ccaaacatccta

SEQ ID NO: 298684 - DNA, 12 bp, Artificial Sequence
  Oligonucleotide primer for the detection of SNP TSC0018235
ataatagatttt

SEQ ID NO: 298685 - DNA, 12 bp, Artificial Sequence
  Oligonucleotide primer for the detection of SNP TSC0018235
ataatagatttc

SEQ ID NO: 298686 - DNA, 12 bp, Artificial Sequence
  Oligonucleotide primer for the detection of SNP TSC0018236
aatattataatt

SEQ ID NO: 298687 - DNA, 12 bp, Artificial Sequence
  Oligonucleotide primer for the detection of SNP TSC0018236
gtgttgttttta

SEQ ID NO: 298688 - DNA, 12 bp, Artificial Sequence
  Oligonucleotide primer for the detection of SNP TSC0018237
taaaattctaat

SEQ ID NO: 298689 - DNA, 12 bp, Artificial Sequence
  Oligonucleotide primer for the detection of SNP TSC0018237
acatcttcaaaa

SEQ ID NO: 298690 - DNA, 12 bp, Artificial Sequence
  Oligonucleotide primer for the detection of SNP TSC0018237
tggaattttgat

SEQ ID NO: 298691 - DNA, 12 bp, Artificial Sequence
  Oligonucleotide primer for the detection of SNP TSC0018238
cataatatttat

SEQ ID NO: 298692 - DNA, 12 bp, Artificial Sequence
  Oligonucleotide primer for the detection of SNP TSC0018238
gtagttatataa

SEQ ID NO: 298693 - DNA, 12 bp, Artificial Sequence
  Oligonucleotide primer for the detection of SNP TSC0018240
aaatttatacca

SEQ ID NO: 298694 - DNA, 12 bp, Artificial Sequence
  Oligonucleotide primer for the detection of SNP TSC0018240
tatcccctccct

SEQ ID NO: 298695 - DNA, 12 bp, Artificial Sequence
  Oligonucleotide primer for the detection of SNP TSC0018240
aggtttgtgtta

SEQ ID NO: 298696 - DNA, 12 bp, Artificial Sequence
  Oligonucleotide primer for the detection of SNP TSC0018241
taactataacac

SEQ ID NO: 298697 - DNA, 12 bp, Artificial Sequence
  Oligonucleotide primer for the detection of SNP TSC0018241
taactataacgc

SEQ ID NO: 298698 - DNA, 12 bp, Artificial Sequence
  Oligonucleotide primer for the detection of SNP TSC0018241
gtttgtgaaggg

SEQ ID NO: 298699 - DNA, 12 bp, Artificial Sequence
  Oligonucleotide primer for the detection of SNP TSC0018241
gttcgtgaaggg

SEQ ID NO: 298700 - DNA, 12 bp, Artificial Sequence
  Oligonucleotide primer for the detection of SNP TSC0018242
aatctctaacta

SEQ ID NO: 298701 - DNA, 12 bp, Artificial Sequence
  Oligonucleotide primer for the detection of SNP TSC0018242
tgtggttttgtg

SEQ ID NO: 298702 - DNA, 12 bp, Artificial Sequence
  Oligonucleotide primer for the detection of SNP TSC0018242
tataattctata

SEQ ID NO: 298703 - DNA, 12 bp, Artificial Sequence
  Oligonucleotide primer for the detection of SNP TSC0018242
gtttttgattgt

SEQ ID NO: 298704 - DNA, 12 bp, Artificial Sequence
  Oligonucleotide primer for the detection of SNP TSC0018243
aaaacccccaaa

SEQ ID NO: 298705 - DNA, 12 bp, Artificial Sequence
  Oligonucleotide primer for the detection of SNP TSC0018243
gttagtagttat

SEQ ID NO: 298706 - DNA, 12 bp, Artificial Sequence
  Oligonucleotide primer for the detection of SNP TSC0018243
accaacaaccac

SEQ ID NO: 298707 - DNA, 12 bp, Artificial Sequence
  Oligonucleotide primer for the detection of SNP TSC0018243
agaatttttagg

SEQ ID NO: 298708 - DNA, 12 bp, Artificial Sequence
  Oligonucleotide primer for the detection of SNP TSC0018244
aaaatcctacac

SEQ ID NO: 298709 - DNA, 12 bp, Artificial Sequence
  Oligonucleotide primer for the detection of SNP TSC0018244
ttataaagggga

SEQ ID NO: 298710 - DNA, 12 bp, Artificial Sequence
  Oligonucleotide primer for the detection of SNP TSC0018245
aaatttctacaa

SEQ ID NO: 298711 - DNA, 12 bp, Artificial Sequence
  Oligonucleotide primer for the detection of SNP TSC0018245
aaatttctacga

SEQ ID NO: 298712 - DNA, 12 bp, Artificial Sequence
  Oligonucleotide primer for the detection of SNP TSC0018245
cacacaattcac

SEQ ID NO: 298713 - DNA, 12 bp, Artificial Sequence
  Oligonucleotide primer for the detection of SNP TSC0018245
ggatttttatgg

SEQ ID NO: 298714 - DNA, 12 bp, Artificial Sequence
  Oligonucleotide primer for the detection of SNP TSC0018245
ggatttttacgg

SEQ ID NO: 298715 - DNA, 12 bp, Artificial Sequence
  Oligonucleotide primer for the detection of SNP TSC0018246
atttccattctt

SEQ ID NO: 298716 - DNA, 12 bp, Artificial Sequence
  Oligonucleotide primer for the detection of SNP TSC0018246
agtttatgagta

SEQ ID NO: 298717 - DNA, 12 bp, Artificial Sequence
  Oligonucleotide primer for the detection of SNP TSC0018247
aacctaaattct

SEQ ID NO: 298718 - DNA, 12 bp, Artificial Sequence
  Oligonucleotide primer for the detection of SNP TSC0018248
ctaccctttatt

SEQ ID NO: 298719 - DNA, 12 bp, Artificial Sequence
  Oligonucleotide primer for the detection of SNP TSC0018248
gattatttttta

SEQ ID NO: 298720 - DNA, 12 bp, Artificial Sequence
  Oligonucleotide primer for the detection of SNP TSC0018249
tatacaaaatat

SEQ ID NO: 298721 - DNA, 12 bp, Artificial Sequence
  Oligonucleotide primer for the detection of SNP TSC0018249
tgtattaaaagt

SEQ ID NO: 298722 - DNA, 12 bp, Artificial Sequence
  Oligonucleotide primer for the detection of SNP TSC0018249
atacattaaaaa

SEQ ID NO: 298723 - DNA, 12 bp, Artificial Sequence
  Oligonucleotide primer for the detection of SNP TSC0018250
tactcaaaaaat

SEQ ID NO: 298724 - DNA, 12 bp, Artificial Sequence
  Oligonucleotide primer for the detection of SNP TSC0018250
cccaccttccta

SEQ ID NO: 298725 - DNA, 12 bp, Artificial Sequence
  Oligonucleotide primer for the detection of SNP TSC0018250
tgtttaggaaat

SEQ ID NO: 298726 - DNA, 12 bp, Artificial Sequence
  Oligonucleotide primer for the detection of SNP TSC0018251
gtagattgtata

SEQ ID NO: 298727 - DNA, 12 bp, Artificial Sequence
  Oligonucleotide primer for the detection of SNP TSC0018251
ataaattacata

SEQ ID NO: 298728 - DNA, 12 bp, Artificial Sequence
  Oligonucleotide primer for the detection of SNP TSC0018251
ttaagtaatttt

SEQ ID NO: 298729 - DNA, 12 bp, Artificial Sequence
  Oligonucleotide primer for the detection of SNP TSC0018252
aattttacatat

SEQ ID NO: 298730 - DNA, 12 bp, Artificial Sequence
  Oligonucleotide primer for the detection of SNP TSC0018252
agtttttatgga

SEQ ID NO: 298731 - DNA, 12 bp, Artificial Sequence
  Oligonucleotide primer for the detection of SNP TSC0018255
accttattacct

SEQ ID NO: 298732 - DNA, 12 bp, Artificial Sequence
  Oligonucleotide primer for the detection of SNP TSC0018255
atggttttagtt

SEQ ID NO: 298733 - DNA, 12 bp, Artificial Sequence
  Oligonucleotide primer for the detection of SNP TSC0018255
ataacttcaatc

SEQ ID NO: 298734 - DNA, 12 bp, Artificial Sequence
  Oligonucleotide primer for the detection of SNP TSC0018255
gttttgttattt

SEQ ID NO: 298735 - DNA, 12 bp, Artificial Sequence
  Oligonucleotide primer for the detection of SNP TSC0018258
taactaaaaata

SEQ ID NO: 298736 - DNA, 12 bp, Artificial Sequence
  Oligonucleotide primer for the detection of SNP TSC0018258
aaaattttaggt

SEQ ID NO: 298737 - DNA, 12 bp, Artificial Sequence
  Oligonucleotide primer for the detection of SNP TSC0018258
tggttgagaata

SEQ ID NO: 298738 - DNA, 12 bp, Artificial Sequence
  Oligonucleotide primer for the detection of SNP TSC0018259
aacaaccaaaaa

SEQ ID NO: 298739 - DNA, 12 bp, Artificial Sequence
  Oligonucleotide primer for the detection of SNP TSC0018259
aacaaccgaaaa

SEQ ID NO: 298740 - DNA, 12 bp, Artificial Sequence
  Oligonucleotide primer for the detection of SNP TSC0018259
aaaggtatgggt

SEQ ID NO: 298741 - DNA, 12 bp, Artificial Sequence
  Oligonucleotide primer for the detection of SNP TSC0018259
agtagttgggag

SEQ ID NO: 298742 - DNA, 12 bp, Artificial Sequence
  Oligonucleotide primer for the detection of SNP TSC0018259
agtagtcgggag

SEQ ID NO: 298743 - DNA, 12 bp, Artificial Sequence
  Oligonucleotide primer for the detection of SNP TSC0018260
taaaacaaccaa

SEQ ID NO: 298744 - DNA, 12 bp, Artificial Sequence
  Oligonucleotide primer for the detection of SNP TSC0018260
taaaacaaccga

SEQ ID NO: 298745 - DNA, 12 bp, Artificial Sequence
  Oligonukleotid-Primer
tgggttgaagtt

SEQ ID NO: 298746 - DNA, 12 bp, Artificial Sequence
  Oligonucleotide primer for the detection of SNP TSC0018260
tgggtcgaagtt

SEQ ID NO: 298747 - DNA, 12 bp, Artificial Sequence
  Oligonucleotide primer for the detection of SNP TSC0018260
ataaaccaaaac

SEQ ID NO: 298748 - DNA, 12 bp, Artificial Sequence
  Oligonucleotide primer for the detection of SNP TSC0018260
ataaaccgaaac

SEQ ID NO: 298749 - DNA, 12 bp, Artificial Sequence
  Oligonucleotide primer for the detection of SNP TSC0018260
tggagtagttgg

SEQ ID NO: 298750 - DNA, 12 bp, Artificial Sequence
  Oligonucleotide primer for the detection of SNP TSC0018260
tggagtagtcgg

SEQ ID NO: 298751 - DNA, 12 bp, Artificial Sequence
  Oligonucleotide primer for the detection of SNP TSC0018261
atacttccaata

SEQ ID NO: 298752 - DNA, 12 bp, Artificial Sequence
  Oligonucleotide primer for the detection of SNP TSC0018261
tttattgatagg

SEQ ID NO: 298753 - DNA, 12 bp, Artificial Sequence
  Oligonucleotide primer for the detection of SNP TSC0018261
ttcactaacaaa

SEQ ID NO: 298754 - DNA, 12 bp, Artificial Sequence
  Oligonucleotide primer for the detection of SNP TSC0018261
aatatttttagt

SEQ ID NO: 298755 - DNA, 12 bp, Artificial Sequence
  Oligonucleotide primer for the detection of SNP TSC0018262
atccaaaccctc

SEQ ID NO: 298756 - DNA, 12 bp, Artificial Sequence
  Oligonucleotide primer for the detection of SNP TSC0018262
tagggtgtgggg

SEQ ID NO: 298757 - DNA, 12 bp, Artificial Sequence
  Oligonucleotide primer for the detection of SNP TSC0018263
ccactctcatat

SEQ ID NO: 298758 - DNA, 12 bp, Artificial Sequence
  Oligonucleotide primer for the detection of SNP TSC0018263
gtgaatgtttaa

SEQ ID NO: 298759 - DNA, 12 bp, Artificial Sequence
  Oligonucleotide primer for the detection of SNP TSC0018267
tacaaaaaaatt

SEQ ID NO: 298760 - DNA, 12 bp, Artificial Sequence
  Oligonucleotide primer for the detection of SNP TSC0018267
tctcaccctacc

SEQ ID NO: 298761 - DNA, 12 bp, Artificial Sequence
  Oligonucleotide primer for the detection of SNP TSC0018267
tgtagagagatt

SEQ ID NO: 298762 - DNA, 12 bp, Artificial Sequence
  Oligonucleotide primer for the detection of SNP TSC0018269
tcaattacattc

SEQ ID NO: 298763 - DNA, 12 bp, Artificial Sequence
  Oligonucleotide primer for the detection of SNP TSC0018269
gttgaaaattag

SEQ ID NO: 298764 - DNA, 12 bp, Artificial Sequence
  Oligonucleotide primer for the detection of SNP TSC0018269
attaaaaaccaa

SEQ ID NO: 298765 - DNA, 12 bp, Artificial Sequence
  Oligonucleotide primer for the detection of SNP TSC0018269
ttagttatattt

SEQ ID NO: 298766 - DNA, 12 bp, Artificial Sequence
  Oligonucleotide primer for the detection of SNP TSC0018270
ccccacacacat

SEQ ID NO: 298767 - DNA, 12 bp, Artificial Sequence
  Oligonucleotide primer for the detection of SNP TSC0018270
ccccgcacacat

SEQ ID NO: 298768 - DNA, 12 bp, Artificial Sequence
  Oligonucleotide primer for the detection of SNP TSC0018270
tagtatttttta

SEQ ID NO: 298769 - DNA, 12 bp, Artificial Sequence
  Oligonucleotide primer for the detection of SNP TSC0018272
aaaattcctcac

SEQ ID NO: 298770 - DNA, 12 bp, Artificial Sequence
  Oligonucleotide primer for the detection of SNP TSC0018272
agaatgtttttg

SEQ ID NO: 298771 - DNA, 12 bp, Artificial Sequence
  Oligonucleotide primer for the detection of SNP TSC0018272
aaaatatcctta

SEQ ID NO: 298772 - DNA, 12 bp, Artificial Sequence
  Oligonucleotide primer for the detection of SNP TSC0018272
agaattttttat

SEQ ID NO: 298773 - DNA, 12 bp, Artificial Sequence
  Oligonucleotide primer for the detection of SNP TSC0018273
aatacttcctat

SEQ ID NO: 298774 - DNA, 12 bp, Artificial Sequence
  Oligonucleotide primer for the detection of SNP TSC0018273
ggtttttataga

SEQ ID NO: 298775 - DNA, 12 bp, Artificial Sequence
  Oligonucleotide primer for the detection of SNP TSC0018274
agtttttattgg

SEQ ID NO: 298776 - DNA, 12 bp, Artificial Sequence
  Oligonucleotide primer for the detection of SNP TSC0018274
aatccctactaa

SEQ ID NO: 298777 - DNA, 12 bp, Artificial Sequence
  Oligonucleotide primer for the detection of SNP TSC0018274
taaagatggtgt

SEQ ID NO: 298778 - DNA, 12 bp, Artificial Sequence
  Oligonucleotide primer for the detection of SNP TSC0018278
tttccccaccac

SEQ ID NO: 298779 - DNA, 12 bp, Artificial Sequence
  Oligonucleotide primer for the detection of SNP TSC0018278
tttccccaccgc

SEQ ID NO: 298780 - DNA, 12 bp, Artificial Sequence
  Oligonucleotide primer for the detection of SNP TSC0018278
gtattttgaagg

SEQ ID NO: 298781 - DNA, 12 bp, Artificial Sequence
  Oligonucleotide primer for the detection of SNP TSC0018278
gtatttcgaagg

SEQ ID NO: 298782 - DNA, 12 bp, Artificial Sequence
  Oligonucleotide primer for the detection of SNP TSC0018280
cccctacttatt

SEQ ID NO: 298783 - DNA, 12 bp, Artificial Sequence
  Oligonucleotide primer for the detection of SNP TSC0018280
gatagaataaaa

SEQ ID NO: 298784 - DNA, 12 bp, Artificial Sequence
  Oligonucleotide primer for the detection of SNP TSC0018285
cccctaaatcaa

SEQ ID NO: 298785 - DNA, 12 bp, Artificial Sequence
  Oligonucleotide primer for the detection of SNP TSC0018285
atattcaacctt

SEQ ID NO: 298786 - DNA, 12 bp, Artificial Sequence
  Oligonucleotide primer for the detection of SNP TSC0018285
tttttgaattaa

SEQ ID NO: 298787 - DNA, 12 bp, Artificial Sequence
  Oligonucleotide primer for the detection of SNP TSC0018286
ataaaaaaaacg

SEQ ID NO: 298788 - DNA, 12 bp, Artificial Sequence
  Oligonucleotide primer for the detection of SNP TSC0018286
gtttgttgttga

SEQ ID NO: 298789 - DNA, 12 bp, Artificial Sequence
  Oligonucleotide primer for the detection of SNP TSC0018286
gtttgtcgttga

SEQ ID NO: 298790 - DNA, 12 bp, Artificial Sequence
  Oligonucleotide primer for the detection of SNP TSC0018286
atttaccattaa

SEQ ID NO: 298791 - DNA, 12 bp, Artificial Sequence
  Oligonucleotide primer for the detection of SNP TSC0018286
atttaccgttaa

SEQ ID NO: 298792 - DNA, 12 bp, Artificial Sequence
  Oligonucleotide primer for the detection of SNP TSC0018286
tgagaaaaatgt

SEQ ID NO: 298793 - DNA, 12 bp, Artificial Sequence
  Oligonucleotide primer for the detection of SNP TSC0018286
tgagaaaaacgt

SEQ ID NO: 298794 - DNA, 12 bp, Artificial Sequence
  Oligonucleotide primer for the detection of SNP TSC0018290
caaaaaccaact

SEQ ID NO: 298795 - DNA, 12 bp, Artificial Sequence
  Oligonucleotide primer for the detection of SNP TSC0018290
caaaaaccgact

SEQ ID NO: 298796 - DNA, 12 bp, Artificial Sequence
  Oligonucleotide primer for the detection of SNP TSC0018290
gaaaaaagggaa

SEQ ID NO: 298797 - DNA, 12 bp, Artificial Sequence
  Oligonucleotide primer for the detection of SNP TSC0018291
aactatcatatc

SEQ ID NO: 298798 - DNA, 12 bp, Artificial Sequence
  Oligonucleotide primer for the detection of SNP TSC0018291
aactatcgtatc

SEQ ID NO: 298799 - DNA, 12 bp, Artificial Sequence
  Oligonucleotide primer for the detection of SNP TSC0018291
agtgagggagtg

SEQ ID NO: 298800 - DNA, 12 bp, Artificial Sequence
  Oligonucleotide primer for the detection of SNP TSC0018292
tggttgttttgg

SEQ ID NO: 298801 - DNA, 12 bp, Artificial Sequence
  Oligonucleotide primer for the detection of SNP TSC0018292
agaaaggagttg

SEQ ID NO: 298802 - DNA, 12 bp, Artificial Sequence
  Oligonucleotide primer for the detection of SNP TSC0018295
acacctaatatc

SEQ ID NO: 298803 - DNA, 12 bp, Artificial Sequence
  Oligonucleotide primer for the detection of SNP TSC0018295
tatgtataagtg

SEQ ID NO: 298804 - DNA, 12 bp, Artificial Sequence
  Oligonucleotide primer for the detection of SNP TSC0018295
tacgtataagtg

SEQ ID NO: 298805 - DNA, 12 bp, Artificial Sequence
  Oligonucleotide primer for the detection of SNP TSC0018295
cacgcacaaata

SEQ ID NO: 298806 - DNA, 12 bp, Artificial Sequence
  Oligonucleotide primer for the detection of SNP TSC0018295
tatttagtgttt

SEQ ID NO: 298807 - DNA, 12 bp, Artificial Sequence
  Oligonucleotide primer for the detection of SNP TSC0018296
aatcctaaatac

SEQ ID NO: 298808 - DNA, 12 bp, Artificial Sequence
  Oligonucleotide primer for the detection of SNP TSC0018296
ttttttttatag

SEQ ID NO: 298809 - DNA, 12 bp, Artificial Sequence
  Oligonucleotide primer for the detection of SNP TSC0018296
tttttctcacaa

SEQ ID NO: 298810 - DNA, 12 bp, Artificial Sequence
  Oligonucleotide primer for the detection of SNP TSC0018297
ttatataattac

SEQ ID NO: 298811 - DNA, 12 bp, Artificial Sequence
  Oligonucleotide primer for the detection of SNP TSC0018297
tgaaagtaattg

SEQ ID NO: 298812 - DNA, 12 bp, Artificial Sequence
  Oligonucleotide primer for the detection of SNP TSC0018297
taaaaacaatta

SEQ ID NO: 298813 - DNA, 12 bp, Artificial Sequence
  Oligonucleotide primer for the detection of SNP TSC0018297
ttatataattgt

SEQ ID NO: 298814 - DNA, 12 bp, Artificial Sequence
  Oligonucleotide primer for the detection of SNP TSC0018298
taacatcttttt

SEQ ID NO: 298815 - DNA, 12 bp, Artificial Sequence
  Oligonucleotide primer for the detection of SNP TSC0018298
tagggtatttta

SEQ ID NO: 298816 - DNA, 12 bp, Artificial Sequence
  Oligonucleotide primer for the detection of SNP TSC0018299
aatatccatacc

SEQ ID NO: 298817 - DNA, 12 bp, Artificial Sequence
  Oligonucleotide primer for the detection of SNP TSC0018299
gatgagtttgtt

SEQ ID NO: 298818 - DNA, 12 bp, Artificial Sequence
  Oligonucleotide primer for the detection of SNP TSC0018299
aataaacttact

SEQ ID NO: 298819 - DNA, 12 bp, Artificial Sequence
  Oligonucleotide primer for the detection of SNP TSC0018299
gatgtttatgtt

SEQ ID NO: 298820 - DNA, 12 bp, Artificial Sequence
  Oligonucleotide primer for the detection of SNP TSC0018300
tatctataatat

SEQ ID NO: 298821 - DNA, 12 bp, Artificial Sequence
  Oligonucleotide primer for the detection of SNP TSC0018300
tatattagatag

SEQ ID NO: 298822 - DNA, 12 bp, Artificial Sequence
  Oligonukleotid-Primer
tacattaaacaa

SEQ ID NO: 298823 - DNA, 12 bp, Artificial Sequence
  Oligonucleotide primer for the detection of SNP TSC0018300
tatttgtaatat

SEQ ID NO: 298824 - DNA, 12 bp, Artificial Sequence
  Oligonucleotide primer for the detection of SNP TSC0018301
tatactacctct

SEQ ID NO: 298825 - DNA, 12 bp, Artificial Sequence
  Oligonucleotide primer for the detection of SNP TSC0018301
tatttttagggg

SEQ ID NO: 298826 - DNA, 12 bp, Artificial Sequence
  Oligonukleotid-Primer
aaaataatcaac

SEQ ID NO: 298827 - DNA, 12 bp, Artificial Sequence
  Oligonucleotide primer for the detection of SNP TSC0018303
ttttttgaatta

SEQ ID NO: 298828 - DNA, 12 bp, Artificial Sequence
  Oligonucleotide primer for the detection of SNP TSC0018303
ctctctaaatta

SEQ ID NO: 298829 - DNA, 12 bp, Artificial Sequence
  Oligonucleotide primer for the detection of SNP TSC0018303
aaagtaattaat

SEQ ID NO: 298830 - DNA, 12 bp, Artificial Sequence
  Oligonucleotide primer for the detection of SNP TSC0018306
ataacaaaaact

SEQ ID NO: 298831 - DNA, 12 bp, Artificial Sequence
  Oligonucleotide primer for the detection of SNP TSC0018306
aataaagtagaa

SEQ ID NO: 298832 - DNA, 12 bp, Artificial Sequence
  Oligonucleotide primer for the detection of SNP TSC0018306
gtggtaaggatt

SEQ ID NO: 298833 - DNA, 12 bp, Artificial Sequence
  Oligonucleotide primer for the detection of SNP TSC0018307
tacccaaaaata

SEQ ID NO: 298834 - DNA, 12 bp, Artificial Sequence
  Oligonucleotide primer for the detection of SNP TSC0018307
agtttttggttt

SEQ ID NO: 298835 - DNA, 12 bp, Artificial Sequence
  Oligonucleotide primer for the detection of SNP TSC0018307
aacccctaacct

SEQ ID NO: 298836 - DNA, 12 bp, Artificial Sequence
  Oligonucleotide primer for the detection of SNP TSC0018307
tgtttaaaaatg

SEQ ID NO: 298837 - DNA, 12 bp, Artificial Sequence
  Oligonucleotide primer for the detection of SNP TSC0018308
aaaaaaccaata

SEQ ID NO: 298838 - DNA, 12 bp, Artificial Sequence
  Oligonucleotide primer for the detection of SNP TSC0018308
tgttttggattt

SEQ ID NO: 298839 - DNA, 12 bp, Artificial Sequence
  Oligonucleotide primer for the detection of SNP TSC0018308
tactctaaaccc

SEQ ID NO: 298840 - DNA, 12 bp, Artificial Sequence
  Oligonucleotide primer for the detection of SNP TSC0018308
ggggagttagta

SEQ ID NO: 298841 - DNA, 12 bp, Artificial Sequence
  Oligonucleotide primer for the detection of SNP TSC0018309
aaagattaataa

SEQ ID NO: 298842 - DNA, 12 bp, Artificial Sequence
  Oligonucleotide primer for the detection of SNP TSC0018310
attcatctacct

SEQ ID NO: 298843 - DNA, 12 bp, Artificial Sequence
  Oligonucleotide primer for the detection of SNP TSC0018310
atgtgattaata

SEQ ID NO: 298844 - DNA, 12 bp, Artificial Sequence
  Oligonucleotide primer for the detection of SNP TSC0018311
atataatacaat

SEQ ID NO: 298845 - DNA, 12 bp, Artificial Sequence
  Oligonucleotide primer for the detection of SNP TSC0018311
atagaataaaaa

SEQ ID NO: 298846 - DNA, 12 bp, Artificial Sequence
  Oligonucleotide primer for the detection of SNP TSC0018312
tattttatatgg

SEQ ID NO: 298847 - DNA, 12 bp, Artificial Sequence
  Oligonucleotide primer for the detection of SNP TSC0018313
tataattatctt

SEQ ID NO: 298848 - DNA, 12 bp, Artificial Sequence
  Oligonucleotide primer for the detection of SNP TSC0018313
tattggttaggg

SEQ ID NO: 298849 - DNA, 12 bp, Artificial Sequence
  Oligonucleotide primer for the detection of SNP TSC0018314
attataattacc

SEQ ID NO: 298850 - DNA, 12 bp, Artificial Sequence
  Oligonucleotide primer for the detection of SNP TSC0018314
tatagttaggta

SEQ ID NO: 298851 - DNA, 12 bp, Artificial Sequence
  Oligonucleotide primer for the detection of SNP TSC0018317
ccaacttctata

SEQ ID NO: 298852 - DNA, 12 bp, Artificial Sequence
  Oligonucleotide primer for the detection of SNP TSC0018317
tagttatattta

SEQ ID NO: 298853 - DNA, 12 bp, Artificial Sequence
  Oligonucleotide primer for the detection of SNP TSC0018319
ccacatcttaaa

SEQ ID NO: 298854 - DNA, 12 bp, Artificial Sequence
  Oligonucleotide primer for the detection of SNP TSC0018319
ccacgtcttaaa

SEQ ID NO: 298855 - DNA, 12 bp, Artificial Sequence
  Oligonucleotide primer for the detection of SNP TSC0018319
ccgcatcttaaa

SEQ ID NO: 298856 - DNA, 12 bp, Artificial Sequence
  Oligonucleotide primer for the detection of SNP TSC0018319
ccgcgtcttaaa

SEQ ID NO: 298857 - DNA, 12 bp, Artificial Sequence
  Oligonucleotide primer for the detection of SNP TSC0018319
aatagaggattt

SEQ ID NO: 298858 - DNA, 12 bp, Artificial Sequence
  Oligonucleotide primer for the detection of SNP TSC0018319
ttgtgttttgga

SEQ ID NO: 298859 - DNA, 12 bp, Artificial Sequence
  Oligonucleotide primer for the detection of SNP TSC0018319
tcgtgttttgga

SEQ ID NO: 298860 - DNA, 12 bp, Artificial Sequence
  Oligonucleotide primer for the detection of SNP TSC0018319
ttgcgttttgga

SEQ ID NO: 298861 - DNA, 12 bp, Artificial Sequence
  Oligonucleotide primer for the detection of SNP TSC0018319
tcgcgttttgga

SEQ ID NO: 298862 - DNA, 12 bp, Artificial Sequence
  Oligonucleotide primer for the detection of SNP TSC0018320
tactatcctacc

SEQ ID NO: 298863 - DNA, 12 bp, Artificial Sequence
  Oligonucleotide primer for the detection of SNP TSC0018320
atgtttaagatg

SEQ ID NO: 298864 - DNA, 12 bp, Artificial Sequence
  Oligonucleotide primer for the detection of SNP TSC0018320
acgtttaagatg

SEQ ID NO: 298865 - DNA, 12 bp, Artificial Sequence
  Oligonucleotide primer for the detection of SNP TSC0018320
atgtttaagacg

SEQ ID NO: 298866 - DNA, 12 bp, Artificial Sequence
  Oligonucleotide primer for the detection of SNP TSC0018320
acgtttaagacg

SEQ ID NO: 298867 - DNA, 12 bp, Artificial Sequence
  Oligonucleotide primer for the detection of SNP TSC0018320
acatccaaaaca

SEQ ID NO: 298868 - DNA, 12 bp, Artificial Sequence
  Oligonucleotide primer for the detection of SNP TSC0018320
acatccaaaacg

SEQ ID NO: 298869 - DNA, 12 bp, Artificial Sequence
  Oligonucleotide primer for the detection of SNP TSC0018320
acgtccaaaaca

SEQ ID NO: 298870 - DNA, 12 bp, Artificial Sequence
  Oligonucleotide primer for the detection of SNP TSC0018320
acgtccaaaacg

SEQ ID NO: 298871 - DNA, 12 bp, Artificial Sequence
  Oligonucleotide primer for the detection of SNP TSC0018320
tgttgttttgtt

SEQ ID NO: 298872 - DNA, 12 bp, Artificial Sequence
  Oligonucleotide primer for the detection of SNP TSC0018320
tgttgttttgtc

SEQ ID NO: 298873 - DNA, 12 bp, Artificial Sequence
  Oligonucleotide primer for the detection of SNP TSC0018321
aaaatttaaatt

SEQ ID NO: 298874 - DNA, 12 bp, Artificial Sequence
  Oligonucleotide primer for the detection of SNP TSC0018321
taaggaatgata

SEQ ID NO: 298875 - DNA, 12 bp, Artificial Sequence
  Oligonucleotide primer for the detection of SNP TSC0018322
ttttaaggaata

SEQ ID NO: 298876 - DNA, 12 bp, Artificial Sequence
  Oligonucleotide primer for the detection of SNP TSC0018323
ttaatcataaca

SEQ ID NO: 298877 - DNA, 12 bp, Artificial Sequence
  Oligonucleotide primer for the detection of SNP TSC0018323
gttttggagggt

SEQ ID NO: 298878 - DNA, 12 bp, Artificial Sequence
  Oligonucleotide primer for the detection of SNP TSC0018323
gtttcggagggt

SEQ ID NO: 298879 - DNA, 12 bp, Artificial Sequence
  Oligonucleotide primer for the detection of SNP TSC0018323
atctcaaaaaat

SEQ ID NO: 298880 - DNA, 12 bp, Artificial Sequence
  Oligonucleotide primer for the detection of SNP TSC0018323
atctcgaaaaat

SEQ ID NO: 298881 - DNA, 12 bp, Artificial Sequence
  Oligonucleotide primer for the detection of SNP TSC0018323
ttaattatgata

SEQ ID NO: 298882 - DNA, 12 bp, Artificial Sequence
  Oligonucleotide primer for the detection of SNP TSC0018324
tgtaggtgttgg

SEQ ID NO: 298883 - DNA, 12 bp, Artificial Sequence
  Oligonucleotide primer for the detection of SNP TSC0018327
tctttctttttt

SEQ ID NO: 298884 - DNA, 12 bp, Artificial Sequence
  Oligonucleotide primer for the detection of SNP TSC0018328
tataccaaacat

SEQ ID NO: 298885 - DNA, 12 bp, Artificial Sequence
  Oligonucleotide primer for the detection of SNP TSC0018328
aggtatgtatta

SEQ ID NO: 298886 - DNA, 12 bp, Artificial Sequence
  Oligonucleotide primer for the detection of SNP TSC0018328
aggtacgtatta

SEQ ID NO: 298887 - DNA, 12 bp, Artificial Sequence
  Oligonucleotide primer for the detection of SNP TSC0018328
tgtgttaggtat

SEQ ID NO: 298888 - DNA, 12 bp, Artificial Sequence
  Oligonucleotide primer for the detection of SNP TSC0018329
ataatttaaaaa

SEQ ID NO: 298889 - DNA, 12 bp, Artificial Sequence
  Oligonucleotide primer for the detection of SNP TSC0018329
tacttctctaaa

SEQ ID NO: 298890 - DNA, 12 bp, Artificial Sequence
  Oligonucleotide primer for the detection of SNP TSC0018329
aataatttgggg

SEQ ID NO: 298891 - DNA, 12 bp, Artificial Sequence
  Oligonucleotide primer for the detection of SNP TSC0018331
tcattcacaccc

SEQ ID NO: 298892 - DNA, 12 bp, Artificial Sequence
  Oligonucleotide primer for the detection of SNP TSC0018331
gtggtgttgagg

SEQ ID NO: 298893 - DNA, 12 bp, Artificial Sequence
  Oligonucleotide primer for the detection of SNP TSC0018332
acaccacacaat

SEQ ID NO: 298894 - DNA, 12 bp, Artificial Sequence
  Oligonucleotide primer for the detection of SNP TSC0018332
ttattatttggg

SEQ ID NO: 298895 - DNA, 12 bp, Artificial Sequence
  Oligonucleotide primer for the detection of SNP TSC0018333
attatacctttc

SEQ ID NO: 298896 - DNA, 12 bp, Artificial Sequence
  Oligonucleotide primer for the detection of SNP TSC0018333
gttttaaattga

SEQ ID NO: 298897 - DNA, 12 bp, Artificial Sequence
  Oligonucleotide primer for the detection of SNP TSC0018334
ttattatactat

SEQ ID NO: 298898 - DNA, 12 bp, Artificial Sequence
  Oligonucleotide primer for the detection of SNP TSC0018334
ttattttaagaa

SEQ ID NO: 298899 - DNA, 12 bp, Artificial Sequence
  Oligonucleotide primer for the detection of SNP TSC0018338
cataaatcattc

SEQ ID NO: 298900 - DNA, 12 bp, Artificial Sequence
  Oligonucleotide primer for the detection of SNP TSC0018338
aattttagtttg

SEQ ID NO: 298901 - DNA, 12 bp, Artificial Sequence
  Oligonucleotide primer for the detection of SNP TSC0018338
aatttcaattta

SEQ ID NO: 298902 - DNA, 12 bp, Artificial Sequence
  Oligonucleotide primer for the detection of SNP TSC0018338
tataaattattt

SEQ ID NO: 298903 - DNA, 12 bp, Artificial Sequence
  Oligonucleotide primer for the detection of SNP TSC0018339
ttattaaaattt

SEQ ID NO: 298904 - DNA, 12 bp, Artificial Sequence
  Oligonucleotide primer for the detection of SNP TSC0018339
ccattaaaatct

SEQ ID NO: 298905 - DNA, 12 bp, Artificial Sequence
  Oligonucleotide primer for the detection of SNP TSC0018339
ttagttagataa

SEQ ID NO: 298906 - DNA, 12 bp, Artificial Sequence
  Oligonucleotide primer for the detection of SNP TSC0018340
aaataaaataat

SEQ ID NO: 298907 - DNA, 12 bp, Artificial Sequence
  Oligonucleotide primer for the detection of SNP TSC0018340
gaatattttttt

SEQ ID NO: 298908 - DNA, 12 bp, Artificial Sequence
  Oligonucleotide primer for the detection of SNP TSC0018340
aaaatatcccct

SEQ ID NO: 298909 - DNA, 12 bp, Artificial Sequence
  Oligonucleotide primer for the detection of SNP TSC0018340
gagtaaaataat

SEQ ID NO: 298910 - DNA, 12 bp, Artificial Sequence
  Oligonucleotide primer for the detection of SNP TSC0018343
ttataaaacctc

SEQ ID NO: 298911 - DNA, 12 bp, Artificial Sequence
  Oligonucleotide primer for the detection of SNP TSC0018343
aattagtattta

SEQ ID NO: 298912 - DNA, 12 bp, Artificial Sequence
  Oligonucleotide primer for the detection of SNP TSC0018343
aatcaatactta

SEQ ID NO: 298913 - DNA, 12 bp, Artificial Sequence
  Oligonucleotide primer for the detection of SNP TSC0018345
ttatctttactt

SEQ ID NO: 298914 - DNA, 12 bp, Artificial Sequence
  Oligonucleotide primer for the detection of SNP TSC0018345
gttgagtttagg

SEQ ID NO: 298915 - DNA, 12 bp, Artificial Sequence
  Oligonucleotide primer for the detection of SNP TSC0018346
taataacatacc

SEQ ID NO: 298916 - DNA, 12 bp, Artificial Sequence
  Oligonucleotide primer for the detection of SNP TSC0018346
taataacgtacc

SEQ ID NO: 298917 - DNA, 12 bp, Artificial Sequence
  Oligonucleotide primer for the detection of SNP TSC0018346
gttaggattgta

SEQ ID NO: 298918 - DNA, 12 bp, Artificial Sequence
  Oligonucleotide primer for the detection of SNP TSC0018346
actaaaactaca

SEQ ID NO: 298919 - DNA, 12 bp, Artificial Sequence
  Oligonucleotide primer for the detection of SNP TSC0018346
tggtggtgtgtt

SEQ ID NO: 298920 - DNA, 12 bp, Artificial Sequence
  Oligonucleotide primer for the detection of SNP TSC0018346
tggtggcgtgtt

SEQ ID NO: 298921 - DNA, 12 bp, Artificial Sequence
  Oligonucleotide primer for the detection of SNP TSC0018347
tcaactttcctc

SEQ ID NO: 298922 - DNA, 12 bp, Artificial Sequence
  Oligonucleotide primer for the detection of SNP TSC0018347
tcgactttcctc

SEQ ID NO: 298923 - DNA, 12 bp, Artificial Sequence
  Oligonucleotide primer for the detection of SNP TSC0018347
aataaagtaagg

SEQ ID NO: 298924 - DNA, 12 bp, Artificial Sequence
  Oligonucleotide primer for the detection of SNP TSC0018347
tcggtttttttt

SEQ ID NO: 298925 - DNA, 12 bp, Artificial Sequence
  Oligonucleotide primer for the detection of SNP TSC0018347
ttggtttttttc

SEQ ID NO: 298926 - DNA, 12 bp, Artificial Sequence
  Oligonucleotide primer for the detection of SNP TSC0018347
tcggtttttttc

SEQ ID NO: 298927 - DNA, 12 bp, Artificial Sequence
  Oligonucleotide primer for the detection of SNP TSC0018348
tatatactaaaa

SEQ ID NO: 298928 - DNA, 12 bp, Artificial Sequence
  Oligonucleotide primer for the detection of SNP TSC0018348
taaatgggtatg

SEQ ID NO: 298929 - DNA, 12 bp, Artificial Sequence
  Oligonucleotide primer for the detection of SNP TSC0018348
taaatgggtacg

SEQ ID NO: 298930 - DNA, 12 bp, Artificial Sequence
  Oligonucleotide primer for the detection of SNP TSC0018348
taaataaacaca

SEQ ID NO: 298931 - DNA, 12 bp, Artificial Sequence
  Oligonucleotide primer for the detection of SNP TSC0018348
taaataaacacg

SEQ ID NO: 298932 - DNA, 12 bp, Artificial Sequence
  Oligonucleotide primer for the detection of SNP TSC0018348
tatatattggag

SEQ ID NO: 298933 - DNA, 12 bp, Artificial Sequence
  Oligonucleotide primer for the detection of SNP TSC0018349
aactctcaaaaa

SEQ ID NO: 298934 - DNA, 12 bp, Artificial Sequence
  Oligonucleotide primer for the detection of SNP TSC0018349
aatttttactcc

SEQ ID NO: 298935 - DNA, 12 bp, Artificial Sequence
  Oligonucleotide primer for the detection of SNP TSC0018349
ggtttttagaaa

SEQ ID NO: 298936 - DNA, 12 bp, Artificial Sequence
  Oligonucleotide primer for the detection of SNP TSC0018353
ctaaaattctca

SEQ ID NO: 298937 - DNA, 12 bp, Artificial Sequence
  Oligonucleotide primer for the detection of SNP TSC0018353
tattttgagggt

SEQ ID NO: 298938 - DNA, 12 bp, Artificial Sequence
  Oligonucleotide primer for the detection of SNP TSC0018353
tatcttaaaaac

SEQ ID NO: 298939 - DNA, 12 bp, Artificial Sequence
  Oligonucleotide primer for the detection of SNP TSC0018353
ttaggattttta

SEQ ID NO: 298940 - DNA, 12 bp, Artificial Sequence
  Oligonucleotide primer for the detection of SNP TSC0018354
ggagtgggtgtt

SEQ ID NO: 298941 - DNA, 12 bp, Artificial Sequence
  Oligonucleotide primer for the detection of SNP TSC0018354
ataaatactaaa

SEQ ID NO: 298942 - DNA, 12 bp, Artificial Sequence
  Oligonucleotide primer for the detection of SNP TSC0018355
atctaaaaaaac

SEQ ID NO: 298943 - DNA, 12 bp, Artificial Sequence
  Oligonucleotide primer for the detection of SNP TSC0018357
tttaggttattg

SEQ ID NO: 298944 - DNA, 12 bp, Artificial Sequence
  Oligonucleotide primer for the detection of SNP TSC0018357
tccaaattacta

SEQ ID NO: 298945 - DNA, 12 bp, Artificial Sequence
  Oligonucleotide primer for the detection of SNP TSC0018357
tgaaattaagtt

SEQ ID NO: 298946 - DNA, 12 bp, Artificial Sequence
  Oligonucleotide primer for the detection of SNP TSC0018359
ccaaactcccaa

SEQ ID NO: 298947 - DNA, 12 bp, Artificial Sequence
  Oligonucleotide primer for the detection of SNP TSC0018359
agtggttggttg

SEQ ID NO: 298948 - DNA, 12 bp, Artificial Sequence
  Oligonucleotide primer for the detection of SNP TSC0018359
aataactaacta

SEQ ID NO: 298949 - DNA, 12 bp, Artificial Sequence
  Oligonucleotide primer for the detection of SNP TSC0018360
tataaaatcatt

SEQ ID NO: 298950 - DNA, 12 bp, Artificial Sequence
  Oligonucleotide primer for the detection of SNP TSC0018360
ttagagtttagg

SEQ ID NO: 298951 - DNA, 12 bp, Artificial Sequence
  Oligonucleotide primer for the detection of SNP TSC0018360
ccaaaatccaaa

SEQ ID NO: 298952 - DNA, 12 bp, Artificial Sequence
  Oligonucleotide primer for the detection of SNP TSC0018360
tgtgaagttatt

SEQ ID NO: 298953 - DNA, 12 bp, Artificial Sequence
  Oligonucleotide primer for the detection of SNP TSC0018361
caatccttccac

SEQ ID NO: 298954 - DNA, 12 bp, Artificial Sequence
  Oligonucleotide primer for the detection of SNP TSC0018361
aggaagaaagtt

SEQ ID NO: 298955 - DNA, 12 bp, Artificial Sequence
  Oligonucleotide primer for the detection of SNP TSC0018362
ataaactacacc

SEQ ID NO: 298956 - DNA, 12 bp, Artificial Sequence
  Oligonucleotide primer for the detection of SNP TSC0018362
tggttagatagt

SEQ ID NO: 298957 - DNA, 12 bp, Artificial Sequence
  Oligonucleotide primer for the detection of SNP TSC0018362
taattaaacaat

SEQ ID NO: 298958 - DNA, 12 bp, Artificial Sequence
  Oligonucleotide primer for the detection of SNP TSC0018362
ataggttgtatt

SEQ ID NO: 298959 - DNA, 12 bp, Artificial Sequence
  Oligonucleotide primer for the detection of SNP TSC0018363
aaacataaaacc

SEQ ID NO: 298960 - DNA, 12 bp, Artificial Sequence
  Oligonucleotide primer for the detection of SNP TSC0018363
tttttggtttgg

SEQ ID NO: 298961 - DNA, 12 bp, Artificial Sequence
  Oligonucleotide primer for the detection of SNP TSC0018363
ttcctaacttaa

SEQ ID NO: 298962 - DNA, 12 bp, Artificial Sequence
  Oligonucleotide primer for the detection of SNP TSC0018363
gggtatgggatt

SEQ ID NO: 298963 - DNA, 12 bp, Artificial Sequence
  Oligonucleotide primer for the detection of SNP TSC0018364
taaacaaacaaa

SEQ ID NO: 298964 - DNA, 12 bp, Artificial Sequence
  Oligonucleotide primer for the detection of SNP TSC0018364
tttttgtattag

SEQ ID NO: 298965 - DNA, 12 bp, Artificial Sequence
  Oligonucleotide primer for the detection of SNP TSC0018364
tttctatatcaa

SEQ ID NO: 298966 - DNA, 12 bp, Artificial Sequence
  Oligonucleotide primer for the detection of SNP TSC0018365
actttatctctt

SEQ ID NO: 298967 - DNA, 12 bp, Artificial Sequence
  Oligonucleotide primer for the detection of SNP TSC0018365
aggtattaaaga

SEQ ID NO: 298968 - DNA, 12 bp, Artificial Sequence
  Oligonucleotide primer for the detection of SNP TSC0018368
gaataccaaata

SEQ ID NO: 298969 - DNA, 12 bp, Artificial Sequence
  Oligonucleotide primer for the detection of SNP TSC0018368
ggttgtttgatt

SEQ ID NO: 298970 - DNA, 12 bp, Artificial Sequence
  Oligonucleotide primer for the detection of SNP TSC0018368
aactatttaact

SEQ ID NO: 298971 - DNA, 12 bp, Artificial Sequence
  Oligonucleotide primer for the detection of SNP TSC0018368
gactatttaact

SEQ ID NO: 298972 - DNA, 12 bp, Artificial Sequence
  Oligonucleotide primer for the detection of SNP TSC0018368
ggatattagata

SEQ ID NO: 298973 - DNA, 12 bp, Artificial Sequence
  Oligonucleotide primer for the detection of SNP TSC0018372
attcatacaata

SEQ ID NO: 298974 - DNA, 12 bp, Artificial Sequence
  Oligonucleotide primer for the detection of SNP TSC0018372
aaaaagttattt

SEQ ID NO: 298975 - DNA, 12 bp, Artificial Sequence
  Oligonucleotide primer for the detection of SNP TSC0018372
aaaatcactcaa

SEQ ID NO: 298976 - DNA, 12 bp, Artificial Sequence
  Oligonucleotide primer for the detection of SNP TSC0018378
tcaaaaactttt

SEQ ID NO: 298977 - DNA, 12 bp, Artificial Sequence
  Oligonucleotide primer for the detection of SNP TSC0018378
aagaaggtatgg

SEQ ID NO: 298978 - DNA, 12 bp, Artificial Sequence
  Oligonucleotide primer for the detection of SNP TSC0018381
tacaattcccca

SEQ ID NO: 298979 - DNA, 12 bp, Artificial Sequence
  Oligonucleotide primer for the detection of SNP TSC0018381
gaatagagttta

SEQ ID NO: 298980 - DNA, 12 bp, Artificial Sequence
  Oligonucleotide primer for the detection of SNP TSC0018381
aaacaaaactca

SEQ ID NO: 298981 - DNA, 12 bp, Artificial Sequence
  Oligonucleotide primer for the detection of SNP TSC0018381
ttgtagtttttt

SEQ ID NO: 298982 - DNA, 12 bp, Artificial Sequence
  Oligonucleotide primer for the detection of SNP TSC0018382
caaaaccacaaa

SEQ ID NO: 298983 - DNA, 12 bp, Artificial Sequence
  Oligonucleotide primer for the detection of SNP TSC0018382
gatgatttttgt

SEQ ID NO: 298984 - DNA, 12 bp, Artificial Sequence
  Oligonucleotide primer for the detection of SNP TSC0018382
aataactcctac

SEQ ID NO: 298985 - DNA, 12 bp, Artificial Sequence
  Oligonucleotide primer for the detection of SNP TSC0018382
tagagttataaa

SEQ ID NO: 298986 - DNA, 12 bp, Artificial Sequence
  Oligonucleotide primer for the detection of SNP TSC0018383
cttaatttataa

SEQ ID NO: 298987 - DNA, 12 bp, Artificial Sequence
  Oligonucleotide primer for the detection of SNP TSC0018383
gggtttttgtga

SEQ ID NO: 298988 - DNA, 12 bp, Artificial Sequence
  Oligonucleotide primer for the detection of SNP TSC0018384
cacactaaaata

SEQ ID NO: 298989 - DNA, 12 bp, Artificial Sequence
  Oligonucleotide primer for the detection of SNP TSC0018384
cgcactaaaata

SEQ ID NO: 298990 - DNA, 12 bp, Artificial Sequence
  Oligonucleotide primer for the detection of SNP TSC0018384
ttttatggagtt

SEQ ID NO: 298991 - DNA, 12 bp, Artificial Sequence
  Oligonucleotide primer for the detection of SNP TSC0018384
ccccataaaact

SEQ ID NO: 298992 - DNA, 12 bp, Artificial Sequence
  Oligonukleotid-Primer
gtattagaatgt

SEQ ID NO: 298993 - DNA, 12 bp, Artificial Sequence
  Oligonucleotide primer for the detection of SNP TSC0018385
ttaaaaaatcaa

SEQ ID NO: 298994 - DNA, 12 bp, Artificial Sequence
  Oligonucleotide primer for the detection of SNP TSC0018385
cgttattatgtt

SEQ ID NO: 298995 - DNA, 12 bp, Artificial Sequence
  Oligonucleotide primer for the detection of SNP TSC0018385
cgccaccatacc

SEQ ID NO: 298996 - DNA, 12 bp, Artificial Sequence
  Oligonucleotide primer for the detection of SNP TSC0018385
ttaaaaaattag

SEQ ID NO: 298997 - DNA, 12 bp, Artificial Sequence
  Oligonucleotide primer for the detection of SNP TSC0018388
aataattaaaat

SEQ ID NO: 298998 - DNA, 12 bp, Artificial Sequence
  Oligonucleotide primer for the detection of SNP TSC0018388
ccactaatctaa

SEQ ID NO: 298999 - DNA, 12 bp, Artificial Sequence
  Oligonucleotide primer for the detection of SNP TSC0018388
ggtgattaaggt

SEQ ID NO: 299000 - DNA, 12 bp, Artificial Sequence
  Oligonukleotid-Primer
taaacccaaaat

SEQ ID NO: 299001 - DNA, 12 bp, Artificial Sequence
  Oligonucleotide primer for the detection of SNP TSC0018390
tattatctaata

SEQ ID NO: 299002 - DNA, 12 bp, Artificial Sequence
  Oligonucleotide primer for the detection of SNP TSC0018390
ttgggtttattt

SEQ ID NO: 299003 - DNA, 12 bp, Artificial Sequence
  Oligonucleotide primer for the detection of SNP TSC0018390
ttgggtttattc

SEQ ID NO: 299004 - DNA, 12 bp, Artificial Sequence
  Oligonucleotide primer for the detection of SNP TSC0018390
ttaaacttaccc

SEQ ID NO: 299005 - DNA, 12 bp, Artificial Sequence
  Oligonucleotide primer for the detection of SNP TSC0018390
tgttgtttgatg

SEQ ID NO: 299006 - DNA, 12 bp, Artificial Sequence
  Oligonucleotide primer for the detection of SNP TSC0018391
acaatcaaatcc

SEQ ID NO: 299007 - DNA, 12 bp, Artificial Sequence
  Oligonucleotide primer for the detection of SNP TSC0018392
cacaacctactt

SEQ ID NO: 299008 - DNA, 12 bp, Artificial Sequence
  Oligonucleotide primer for the detection of SNP TSC0018392
tttatgtttata

SEQ ID NO: 299009 - DNA, 12 bp, Artificial Sequence
  Oligonucleotide primer for the detection of SNP TSC0018396
ccttaaaatcca

SEQ ID NO: 299010 - DNA, 12 bp, Artificial Sequence
  Oligonucleotide primer for the detection of SNP TSC0018397
ccccttccctaa

SEQ ID NO: 299011 - DNA, 12 bp, Artificial Sequence
  Oligonucleotide primer for the detection of SNP TSC0018397
aatgggttaggg

SEQ ID NO: 299012 - DNA, 12 bp, Artificial Sequence
  Oligonukleotid-Primer
aaaaactacacc

SEQ ID NO: 299013 - DNA, 12 bp, Artificial Sequence
  Oligonucleotide primer for the detection of SNP TSC0018398
tagtgggtaggg

SEQ ID NO: 299014 - DNA, 12 bp, Artificial Sequence
  Oligonucleotide primer for the detection of SNP TSC0018399
attcttactatt

SEQ ID NO: 299015 - DNA, 12 bp, Artificial Sequence
  Oligonucleotide primer for the detection of SNP TSC0018399
tttaagagtgtg

SEQ ID NO: 299016 - DNA, 12 bp, Artificial Sequence
  Oligonukleotid-Primer
ggaagtttgggg

SEQ ID NO: 299017 - DNA, 12 bp, Artificial Sequence
  Oligonucleotide primer for the detection of SNP TSC0018401
caactaaaaaac

SEQ ID NO: 299018 - DNA, 12 bp, Artificial Sequence
  Oligonucleotide primer for the detection of SNP TSC0018401
tatagttttttg

SEQ ID NO: 299019 - DNA, 12 bp, Artificial Sequence
  Oligonucleotide primer for the detection of SNP TSC0018402
aattaaacacca

SEQ ID NO: 299020 - DNA, 12 bp, Artificial Sequence
  Oligonukleotid-Primer
cctcttaatttt

SEQ ID NO: 299021 - DNA, 12 bp, Artificial Sequence
  Oligonucleotide primer for the detection of SNP TSC0018402
aattgggtatta

SEQ ID NO: 299022 - DNA, 12 bp, Artificial Sequence
  Oligonucleotide primer for the detection of SNP TSC0018403
aaaaaaaaacgc

SEQ ID NO: 299023 - DNA, 12 bp, Artificial Sequence
  Oligonucleotide primer for the detection of SNP TSC0018403
tcttccctccca

SEQ ID NO: 299024 - DNA, 12 bp, Artificial Sequence
  Oligonucleotide primer for the detection of SNP TSC0018403
tcttccctcccg

SEQ ID NO: 299025 - DNA, 12 bp, Artificial Sequence
  Oligonucleotide primer for the detection of SNP TSC0018403
agaggaggatgt

SEQ ID NO: 299026 - DNA, 12 bp, Artificial Sequence
  Oligonucleotide primer for the detection of SNP TSC0018403
agaggaggacgt

SEQ ID NO: 299027 - DNA, 12 bp, Artificial Sequence
  Oligonucleotide primer for the detection of SNP TSC0018404
atcatcctccta

SEQ ID NO: 299028 - DNA, 12 bp, Artificial Sequence
  Oligonucleotide primer for the detection of SNP TSC0018404
ttagttagttaa

SEQ ID NO: 299029 - DNA, 12 bp, Artificial Sequence
  Oligonucleotide primer for the detection of SNP TSC0018404
ttaaccaactaa

SEQ ID NO: 299030 - DNA, 12 bp, Artificial Sequence
  Oligonucleotide primer for the detection of SNP TSC0018405
taattctttcct

SEQ ID NO: 299031 - DNA, 12 bp, Artificial Sequence
  Oligonucleotide primer for the detection of SNP TSC0018405
aattaattataa

SEQ ID NO: 299032 - DNA, 12 bp, Artificial Sequence
  Oligonucleotide primer for the detection of SNP TSC0018406
cctaaaaaaaaa

SEQ ID NO: 299033 - DNA, 12 bp, Artificial Sequence
  Oligonucleotide primer for the detection of SNP TSC0018406
ataattaatgtt

SEQ ID NO: 299034 - DNA, 12 bp, Artificial Sequence
  Oligonucleotide primer for the detection of SNP TSC0018406
ataattaatgtc

SEQ ID NO: 299035 - DNA, 12 bp, Artificial Sequence
  Oligonucleotide primer for the detection of SNP TSC0018406
acataatcaata

SEQ ID NO: 299036 - DNA, 12 bp, Artificial Sequence
  Oligonucleotide primer for the detection of SNP TSC0018406
ttttttgagaga

SEQ ID NO: 299037 - DNA, 12 bp, Artificial Sequence
  Oligonucleotide primer for the detection of SNP TSC0018407
catacacacaca

SEQ ID NO: 299038 - DNA, 12 bp, Artificial Sequence
  Oligonucleotide primer for the detection of SNP TSC0018407
catacacacacg

SEQ ID NO: 299039 - DNA, 12 bp, Artificial Sequence
  Oligonucleotide primer for the detection of SNP TSC0018408
ataatatatact

SEQ ID NO: 299040 - DNA, 12 bp, Artificial Sequence
  Oligonucleotide primer for the detection of SNP TSC0018408
atagtaaatatt

SEQ ID NO: 299041 - DNA, 12 bp, Artificial Sequence
  Oligonucleotide primer for the detection of SNP TSC0018408
gtggtatgtgtt

SEQ ID NO: 299042 - DNA, 12 bp, Artificial Sequence
  Oligonucleotide primer for the detection of SNP TSC0018409
aactttatttcc

SEQ ID NO: 299043 - DNA, 12 bp, Artificial Sequence
  Oligonucleotide primer for the detection of SNP TSC0018409
ttatattagttg

SEQ ID NO: 299044 - DNA, 12 bp, Artificial Sequence
  Oligonucleotide primer for the detection of SNP TSC0018409
ccacactaatta

SEQ ID NO: 299045 - DNA, 12 bp, Artificial Sequence
  Oligonucleotide primer for the detection of SNP TSC0018409
gattttattttt

SEQ ID NO: 299046 - DNA, 12 bp, Artificial Sequence
  Oligonucleotide primer for the detection of SNP TSC0018411
taaactacatca

SEQ ID NO: 299047 - DNA, 12 bp, Artificial Sequence
  Oligonucleotide primer for the detection of SNP TSC0018411
taaactacatcg

SEQ ID NO: 299048 - DNA, 12 bp, Artificial Sequence
  Oligonucleotide primer for the detection of SNP TSC0018411
ttagcgtttttt

SEQ ID NO: 299049 - DNA, 12 bp, Artificial Sequence
  Oligonucleotide primer for the detection of SNP TSC0018411
ccaacattccct

SEQ ID NO: 299050 - DNA, 12 bp, Artificial Sequence
  Oligonucleotide primer for the detection of SNP TSC0018411
ccaacgttccct

SEQ ID NO: 299051 - DNA, 12 bp, Artificial Sequence
  Oligonucleotide primer for the detection of SNP TSC0018411
tgaattgtattg

SEQ ID NO: 299052 - DNA, 12 bp, Artificial Sequence
  Oligonucleotide primer for the detection of SNP TSC0018411
tgaattgtatcg

SEQ ID NO: 299053 - DNA, 12 bp, Artificial Sequence
  Oligonucleotide primer for the detection of SNP TSC0018412
atacaataccca

SEQ ID NO: 299054 - DNA, 12 bp, Artificial Sequence
  Oligonucleotide primer for the detection of SNP TSC0018412
tatatttttgat

SEQ ID NO: 299055 - DNA, 12 bp, Artificial Sequence
  Oligonucleotide primer for the detection of SNP TSC0018412
tatatttttgac

SEQ ID NO: 299056 - DNA, 12 bp, Artificial Sequence
  Oligonucleotide primer for the detection of SNP TSC0018412
acacacctttaa

SEQ ID NO: 299057 - DNA, 12 bp, Artificial Sequence
  Oligonucleotide primer for the detection of SNP TSC0018412
atgtagtgttta

SEQ ID NO: 299058 - DNA, 12 bp, Artificial Sequence
  Oligonucleotide primer for the detection of SNP TSC0018413
tcccctatatcc

SEQ ID NO: 299059 - DNA, 12 bp, Artificial Sequence
  Oligonucleotide primer for the detection of SNP TSC0018413
tattataaggaa

SEQ ID NO: 299060 - DNA, 12 bp, Artificial Sequence
  Oligonucleotide primer for the detection of SNP TSC0018413
cattacaaaaaa

SEQ ID NO: 299061 - DNA, 12 bp, Artificial Sequence
  Oligonucleotide primer for the detection of SNP TSC0018414
atactcaacctc

SEQ ID NO: 299062 - DNA, 12 bp, Artificial Sequence
  Oligonucleotide primer for the detection of SNP TSC0018414
ttttggatttaa

SEQ ID NO: 299063 - DNA, 12 bp, Artificial Sequence
  Oligonucleotide primer for the detection of SNP TSC0018415
aacttttcatat

SEQ ID NO: 299064 - DNA, 12 bp, Artificial Sequence
  Oligonucleotide primer for the detection of SNP TSC0018415
gtttttgaatta

SEQ ID NO: 299065 - DNA, 12 bp, Artificial Sequence
  Oligonucleotide primer for the detection of SNP TSC0018416
taatacaacaaa

SEQ ID NO: 299066 - DNA, 12 bp, Artificial Sequence
  Oligonucleotide primer for the detection of SNP TSC0018416
agttggtaggtt

SEQ ID NO: 299067 - DNA, 12 bp, Artificial Sequence
  Oligonucleotide primer for the detection of SNP TSC0018416
aactaacaaact

SEQ ID NO: 299068 - DNA, 12 bp, Artificial Sequence
  Oligonucleotide primer for the detection of SNP TSC0018416
tggtataataaa

SEQ ID NO: 299069 - DNA, 12 bp, Artificial Sequence
  Oligonucleotide primer for the detection of SNP TSC0018417
actaaacttaat

SEQ ID NO: 299070 - DNA, 12 bp, Artificial Sequence
  Oligonucleotide primer for the detection of SNP TSC0018417
taatttttatag

SEQ ID NO: 299071 - DNA, 12 bp, Artificial Sequence
  Oligonucleotide primer for the detection of SNP TSC0018418
aacacttatttc

SEQ ID NO: 299072 - DNA, 12 bp, Artificial Sequence
  Oligonucleotide primer for the detection of SNP TSC0018418
aacgcttatttc

SEQ ID NO: 299073 - DNA, 12 bp, Artificial Sequence
  Oligonucleotide primer for the detection of SNP TSC0018418
tttttaaaattg

SEQ ID NO: 299074 - DNA, 12 bp, Artificial Sequence
  Oligonucleotide primer for the detection of SNP TSC0018418
cttcaaaactaa

SEQ ID NO: 299075 - DNA, 12 bp, Artificial Sequence
  Oligonucleotide primer for the detection of SNP TSC0018418
atgtttattttt

SEQ ID NO: 299076 - DNA, 12 bp, Artificial Sequence
  Oligonucleotide primer for the detection of SNP TSC0018418
acgtttattttt

SEQ ID NO: 299077 - DNA, 12 bp, Artificial Sequence
  Oligonucleotide primer for the detection of SNP TSC0018420
caaaactcacta

SEQ ID NO: 299078 - DNA, 12 bp, Artificial Sequence
  Oligonucleotide primer for the detection of SNP TSC0018420
gagtttaaggtt

SEQ ID NO: 299079 - DNA, 12 bp, Artificial Sequence
  Oligonucleotide primer for the detection of SNP TSC0018420
ttagagtttatt

SEQ ID NO: 299080 - DNA, 12 bp, Artificial Sequence
  Oligonucleotide primer for the detection of SNP TSC0018425
acaatcatctca

SEQ ID NO: 299081 - DNA, 12 bp, Artificial Sequence
  Oligonucleotide primer for the detection of SNP TSC0018425
atttatattaat

SEQ ID NO: 299082 - DNA, 12 bp, Artificial Sequence
  Oligonucleotide primer for the detection of SNP TSC0018425
attcacaccaac

SEQ ID NO: 299083 - DNA, 12 bp, Artificial Sequence
  Oligonucleotide primer for the detection of SNP TSC0018426
taatctacacac

SEQ ID NO: 299084 - DNA, 12 bp, Artificial Sequence
  Oligonucleotide primer for the detection of SNP TSC0018426
ttgatatgttag

SEQ ID NO: 299085 - DNA, 12 bp, Artificial Sequence
  Oligonucleotide primer for the detection of SNP TSC0018427
aaaaccaccccc

SEQ ID NO: 299086 - DNA, 12 bp, Artificial Sequence
  Oligonucleotide primer for the detection of SNP TSC0018427
taaggatgagag

SEQ ID NO: 299087 - DNA, 12 bp, Artificial Sequence
  Oligonucleotide primer for the detection of SNP TSC0018427
aggattattttt

SEQ ID NO: 299088 - DNA, 12 bp, Artificial Sequence
  Oligonucleotide primer for the detection of SNP TSC0018427
aggattattttc

SEQ ID NO: 299089 - DNA, 12 bp, Artificial Sequence
  Oligonucleotide primer for the detection of SNP TSC0018428
attcaatcttca

SEQ ID NO: 299090 - DNA, 12 bp, Artificial Sequence
  Oligonucleotide primer for the detection of SNP TSC0018428
gagaggttgtga

SEQ ID NO: 299091 - DNA, 12 bp, Artificial Sequence
  Oligonucleotide primer for the detection of SNP TSC0018428
aaaaactataaa

SEQ ID NO: 299092 - DNA, 12 bp, Artificial Sequence
  Oligonucleotide primer for the detection of SNP TSC0018428
atttaattttta

SEQ ID NO: 299093 - DNA, 12 bp, Artificial Sequence
  Oligonucleotide primer for the detection of SNP TSC0018429
tcctaacaactc

SEQ ID NO: 299094 - DNA, 12 bp, Artificial Sequence
  Oligonucleotide primer for the detection of SNP TSC0018429
tcctaacgactc

SEQ ID NO: 299095 - DNA, 12 bp, Artificial Sequence
  Oligonucleotide primer for the detection of SNP TSC0018429
taaaagaatttg

SEQ ID NO: 299096 - DNA, 12 bp, Artificial Sequence
  Oligonucleotide primer for the detection of SNP TSC0018429
ttttggtggttt

SEQ ID NO: 299097 - DNA, 12 bp, Artificial Sequence
  Oligonucleotide primer for the detection of SNP TSC0018429
ttttggcggttt

SEQ ID NO: 299098 - DNA, 12 bp, Artificial Sequence
  Oligonucleotide primer for the detection of SNP TSC0018430
tcttaaaaatcc

SEQ ID NO: 299099 - DNA, 12 bp, Artificial Sequence
  Oligonucleotide primer for the detection of SNP TSC0018430
gtgttaaggggg

SEQ ID NO: 299100 - DNA, 12 bp, Artificial Sequence
  Oligonucleotide primer for the detection of SNP TSC0018431
aacactaaaaaa

SEQ ID NO: 299101 - DNA, 12 bp, Artificial Sequence
  Oligonucleotide primer for the detection of SNP TSC0018431
gggaattaagat

SEQ ID NO: 299102 - DNA, 12 bp, Artificial Sequence
  Oligonucleotide primer for the detection of SNP TSC0018431
aatattgaaagg

SEQ ID NO: 299103 - DNA, 12 bp, Artificial Sequence
  Oligonucleotide primer for the detection of SNP TSC0018432
acaatttcccta

SEQ ID NO: 299104 - DNA, 12 bp, Artificial Sequence
  Oligonucleotide primer for the detection of SNP TSC0018432
atgtttttaaga

SEQ ID NO: 299105 - DNA, 12 bp, Artificial Sequence
  Oligonucleotide primer for the detection of SNP TSC0018432
atatttctaaaa

SEQ ID NO: 299106 - DNA, 12 bp, Artificial Sequence
  Oligonucleotide primer for the detection of SNP TSC0018432
tataattttttt

SEQ ID NO: 299107 - DNA, 12 bp, Artificial Sequence
  Oligonucleotide primer for the detection of SNP TSC0018433
ggtttagagtaa

SEQ ID NO: 299108 - DNA, 12 bp, Artificial Sequence
  Oligonucleotide primer for the detection of SNP TSC0018434
aaacattaaatc

SEQ ID NO: 299109 - DNA, 12 bp, Artificial Sequence
  Oligonucleotide primer for the detection of SNP TSC0018434
aaacgttaaatc

SEQ ID NO: 299110 - DNA, 12 bp, Artificial Sequence
  Oligonucleotide primer for the detection of SNP TSC0018434
gattttagttaa

SEQ ID NO: 299111 - DNA, 12 bp, Artificial Sequence
  Oligonucleotide primer for the detection of SNP TSC0018437
caaccacaacac

SEQ ID NO: 299112 - DNA, 12 bp, Artificial Sequence
  Oligonucleotide primer for the detection of SNP TSC0018437
caaccacaacgc

SEQ ID NO: 299113 - DNA, 12 bp, Artificial Sequence
  Oligonucleotide primer for the detection of SNP TSC0018437
caaccacgacac

SEQ ID NO: 299114 - DNA, 12 bp, Artificial Sequence
  Oligonucleotide primer for the detection of SNP TSC0018437
caaccacgacgc

SEQ ID NO: 299115 - DNA, 12 bp, Artificial Sequence
  Oligonucleotide primer for the detection of SNP TSC0018437
aagggtagtagg

SEQ ID NO: 299116 - DNA, 12 bp, Artificial Sequence
  Oligonucleotide primer for the detection of SNP TSC0018438
atatatgaaatt

SEQ ID NO: 299117 - DNA, 12 bp, Artificial Sequence
  Oligonucleotide primer for the detection of SNP TSC0018438
tacataaaatta

SEQ ID NO: 299118 - DNA, 12 bp, Artificial Sequence
  Oligonucleotide primer for the detection of SNP TSC0018438
aggatagagaag

SEQ ID NO: 299119 - DNA, 12 bp, Artificial Sequence
  Oligonucleotide primer for the detection of SNP TSC0018440
acaaacactcta

SEQ ID NO: 299120 - DNA, 12 bp, Artificial Sequence
  Oligonucleotide primer for the detection of SNP TSC0018440
aaggttgggaat

SEQ ID NO: 299121 - DNA, 12 bp, Artificial Sequence
  Oligonucleotide primer for the detection of SNP TSC0018440
aaaactaaaaac

SEQ ID NO: 299122 - DNA, 12 bp, Artificial Sequence
  Oligonucleotide primer for the detection of SNP TSC0018440
ataggtatttta

SEQ ID NO: 299123 - DNA, 12 bp, Artificial Sequence
  Oligonucleotide primer for the detection of SNP TSC0018441
atagtggtgtga

SEQ ID NO: 299124 - DNA, 12 bp, Artificial Sequence
  Oligonucleotide primer for the detection of SNP TSC0018441
atagcggtgtga

SEQ ID NO: 299125 - DNA, 12 bp, Artificial Sequence
  Oligonucleotide primer for the detection of SNP TSC0018441
atagtggcgtga

SEQ ID NO: 299126 - DNA, 12 bp, Artificial Sequence
  Oligonucleotide primer for the detection of SNP TSC0018441
atagtggtgcga

SEQ ID NO: 299127 - DNA, 12 bp, Artificial Sequence
  Oligonucleotide primer for the detection of SNP TSC0018441
atagcggcgtga

SEQ ID NO: 299128 - DNA, 12 bp, Artificial Sequence
  Oligonucleotide primer for the detection of SNP TSC0018441
atagcggtgcga

SEQ ID NO: 299129 - DNA, 12 bp, Artificial Sequence
  Oligonucleotide primer for the detection of SNP TSC0018441
atagtggcgcga

SEQ ID NO: 299130 - DNA, 12 bp, Artificial Sequence
  Oligonucleotide primer for the detection of SNP TSC0018441
atagcggcgcga

SEQ ID NO: 299131 - DNA, 12 bp, Artificial Sequence
  Oligonucleotide primer for the detection of SNP TSC0018442
aaaccaccaaac

SEQ ID NO: 299132 - DNA, 12 bp, Artificial Sequence
  Oligonucleotide primer for the detection of SNP TSC0018443
tatttaccattt

SEQ ID NO: 299133 - DNA, 12 bp, Artificial Sequence
  Oligonucleotide primer for the detection of SNP TSC0018444
accaaaactaat

SEQ ID NO: 299134 - DNA, 12 bp, Artificial Sequence
  Oligonucleotide primer for the detection of SNP TSC0018444
agtgtaaatgga

SEQ ID NO: 299135 - DNA, 12 bp, Artificial Sequence
  Oligonucleotide primer for the detection of SNP TSC0018445
attttaagtaag

SEQ ID NO: 299136 - DNA, 12 bp, Artificial Sequence
  Oligonucleotide primer for the detection of SNP TSC0018445
attttaaataaa

SEQ ID NO: 299137 - DNA, 12 bp, Artificial Sequence
  Oligonucleotide primer for the detection of SNP TSC0018448
actcaaccccca

SEQ ID NO: 299138 - DNA, 12 bp, Artificial Sequence
  Oligonucleotide primer for the detection of SNP TSC0018448
gctcaaccccca

SEQ ID NO: 299139 - DNA, 12 bp, Artificial Sequence
  Oligonucleotide primer for the detection of SNP TSC0018448
ggttgtgggggt

SEQ ID NO: 299140 - DNA, 12 bp, Artificial Sequence
  Oligonucleotide primer for the detection of SNP TSC0018448
aactataaaaac

SEQ ID NO: 299141 - DNA, 12 bp, Artificial Sequence
  Oligonucleotide primer for the detection of SNP TSC0018451
caaactaaaata

SEQ ID NO: 299142 - DNA, 12 bp, Artificial Sequence
  Oligonucleotide primer for the detection of SNP TSC0018451
agattgtgttat

SEQ ID NO: 299143 - DNA, 12 bp, Artificial Sequence
  Oligonucleotide primer for the detection of SNP TSC0018451
agatcgtgttat

SEQ ID NO: 299144 - DNA, 12 bp, Artificial Sequence
  Oligonucleotide primer for the detection of SNP TSC0018451
agattgcgttat

SEQ ID NO: 299145 - DNA, 12 bp, Artificial Sequence
  Oligonucleotide primer for the detection of SNP TSC0018451
agatcgcgttat

SEQ ID NO: 299146 - DNA, 12 bp, Artificial Sequence
  Oligonucleotide primer for the detection of SNP TSC0018451
aaatcacaccac

SEQ ID NO: 299147 - DNA, 12 bp, Artificial Sequence
  Oligonucleotide primer for the detection of SNP TSC0018451
aaatcacgccac

SEQ ID NO: 299148 - DNA, 12 bp, Artificial Sequence
  Oligonucleotide primer for the detection of SNP TSC0018451
aaatcgcaccac

SEQ ID NO: 299149 - DNA, 12 bp, Artificial Sequence
  Oligonucleotide primer for the detection of SNP TSC0018451
aaatcgcgccac

SEQ ID NO: 299150 - DNA, 12 bp, Artificial Sequence
  Oligonucleotide primer for the detection of SNP TSC0018451
tagattagggtg

SEQ ID NO: 299151 - DNA, 12 bp, Artificial Sequence
  Oligonucleotide primer for the detection of SNP TSC0018452
ttttaaaacaat

SEQ ID NO: 299152 - DNA, 12 bp, Artificial Sequence
  Oligonucleotide primer for the detection of SNP TSC0018452
ggtgatagagta

SEQ ID NO: 299153 - DNA, 12 bp, Artificial Sequence
  Oligonucleotide primer for the detection of SNP TSC0018452
ggcgatagagta

SEQ ID NO: 299154 - DNA, 12 bp, Artificial Sequence
  Oligonucleotide primer for the detection of SNP TSC0018452
aacaacaaaaca

SEQ ID NO: 299155 - DNA, 12 bp, Artificial Sequence
  Oligonucleotide primer for the detection of SNP TSC0018452
aacgacaaaaca

SEQ ID NO: 299156 - DNA, 12 bp, Artificial Sequence
  Oligonucleotide primer for the detection of SNP TSC0018452
tttgagatagtt

SEQ ID NO: 299157 - DNA, 12 bp, Artificial Sequence
  Oligonucleotide primer for the detection of SNP TSC0018452
tttgagatagtc

SEQ ID NO: 299158 - DNA, 12 bp, Artificial Sequence
  Oligonucleotide primer for the detection of SNP TSC0018453
aatacgataaca

SEQ ID NO: 299159 - DNA, 12 bp, Artificial Sequence
  Oligonucleotide primer for the detection of SNP TSC0018453
aatacgataacg

SEQ ID NO: 299160 - DNA, 12 bp, Artificial Sequence
  Oligonucleotide primer for the detection of SNP TSC0018453
gtgagttaagat

SEQ ID NO: 299161 - DNA, 12 bp, Artificial Sequence
  Oligonucleotide primer for the detection of SNP TSC0018453
gcgagttaagat

SEQ ID NO: 299162 - DNA, 12 bp, Artificial Sequence
  Oligonukleotid-Primer
acaaaccaaaat

SEQ ID NO: 299163 - DNA, 12 bp, Artificial Sequence
  Oligonucleotide primer for the detection of SNP TSC0018453
acgaaccaaaat

SEQ ID NO: 299164 - DNA, 12 bp, Artificial Sequence
  Oligonucleotide primer for the detection of SNP TSC0018453
ggtgtggtggtg

SEQ ID NO: 299165 - DNA, 12 bp, Artificial Sequence
  Oligonucleotide primer for the detection of SNP TSC0018453
ggtgcggtggtg

SEQ ID NO: 299166 - DNA, 12 bp, Artificial Sequence
  Oligonucleotide primer for the detection of SNP TSC0018453
ggtgtggtggcg

SEQ ID NO: 299167 - DNA, 12 bp, Artificial Sequence
  Oligonucleotide primer for the detection of SNP TSC0018453
ggtgcggtggcg

SEQ ID NO: 299168 - DNA, 12 bp, Artificial Sequence
  Oligonucleotide primer for the detection of SNP TSC0018454
taccaatactat

SEQ ID NO: 299169 - DNA, 12 bp, Artificial Sequence
  Oligonucleotide primer for the detection of SNP TSC0018454
taccgatactat

SEQ ID NO: 299170 - DNA, 12 bp, Artificial Sequence
  Oligonucleotide primer for the detection of SNP TSC0018454
ttttatttaata

SEQ ID NO: 299171 - DNA, 12 bp, Artificial Sequence
  Oligonucleotide primer for the detection of SNP TSC0018455
tttatgttttga

SEQ ID NO: 299172 - DNA, 12 bp, Artificial Sequence
  Oligonucleotide primer for the detection of SNP TSC0018456
cttaaaaaacaa

SEQ ID NO: 299173 - DNA, 12 bp, Artificial Sequence
  Oligonucleotide primer for the detection of SNP TSC0018456
tcattcccatct

SEQ ID NO: 299174 - DNA, 12 bp, Artificial Sequence
  Oligonucleotide primer for the detection of SNP TSC0018456
tttgaggggtag

SEQ ID NO: 299175 - DNA, 12 bp, Artificial Sequence
  Oligonucleotide primer for the detection of SNP TSC0018458
aataaatattat

SEQ ID NO: 299176 - DNA, 12 bp, Artificial Sequence
  Oligonucleotide primer for the detection of SNP TSC0018458
aaataagtggtt

SEQ ID NO: 299177 - DNA, 12 bp, Artificial Sequence
  Oligonucleotide primer for the detection of SNP TSC0018458
aaataaataatt

SEQ ID NO: 299178 - DNA, 12 bp, Artificial Sequence
  Oligonucleotide primer for the detection of SNP TSC0018458
gatgaatattat

SEQ ID NO: 299179 - DNA, 12 bp, Artificial Sequence
  Oligonucleotide primer for the detection of SNP TSC0018461
taaaacaccctc

SEQ ID NO: 299180 - DNA, 12 bp, Artificial Sequence
  Oligonucleotide primer for the detection of SNP TSC0018461
ttagtttttagg

SEQ ID NO: 299181 - DNA, 12 bp, Artificial Sequence
  Oligonucleotide primer for the detection of SNP TSC0018462
acacattaaaaa

SEQ ID NO: 299182 - DNA, 12 bp, Artificial Sequence
  Oligonucleotide primer for the detection of SNP TSC0018462
acgcattaaaaa

SEQ ID NO: 299183 - DNA, 12 bp, Artificial Sequence
  Oligonucleotide primer for the detection of SNP TSC0018462
tttttgtttatt

SEQ ID NO: 299184 - DNA, 12 bp, Artificial Sequence
  Oligonucleotide primer for the detection of SNP TSC0018462
tctttatccatt

SEQ ID NO: 299185 - DNA, 12 bp, Artificial Sequence
  Oligonucleotide primer for the detection of SNP TSC0018462
tgtattagagat

SEQ ID NO: 299186 - DNA, 12 bp, Artificial Sequence
  Oligonucleotide primer for the detection of SNP TSC0018462
cgtattagagat

SEQ ID NO: 299187 - DNA, 12 bp, Artificial Sequence
  Oligonucleotide primer for the detection of SNP TSC0018463
ttatatttttta

SEQ ID NO: 299188 - DNA, 12 bp, Artificial Sequence
  Oligonucleotide primer for the detection of SNP TSC0018463
atatttcccaaa

SEQ ID NO: 299189 - DNA, 12 bp, Artificial Sequence
  Oligonucleotide primer for the detection of SNP TSC0018463
agagttgggagt

SEQ ID NO: 299190 - DNA, 12 bp, Artificial Sequence
  Oligonucleotide primer for the detection of SNP TSC0018464
aattcctccctc

SEQ ID NO: 299191 - DNA, 12 bp, Artificial Sequence
  Oligonucleotide primer for the detection of SNP TSC0018464
aatttaattaga

SEQ ID NO: 299192 - DNA, 12 bp, Artificial Sequence
  Oligonucleotide primer for the detection of SNP TSC0018467
ctttctttaaat

SEQ ID NO: 299193 - DNA, 12 bp, Artificial Sequence
  Oligonucleotide primer for the detection of SNP TSC0018467
tttatatgaata

SEQ ID NO: 299194 - DNA, 12 bp, Artificial Sequence
  Oligonucleotide primer for the detection of SNP TSC0018468
ataataaaaata

SEQ ID NO: 299195 - DNA, 12 bp, Artificial Sequence
  Oligonucleotide primer for the detection of SNP TSC0018468
aaagaggagata

SEQ ID NO: 299196 - DNA, 12 bp, Artificial Sequence
  Oligonucleotide primer for the detection of SNP TSC0018468
aatgatgaaaat

SEQ ID NO: 299197 - DNA, 12 bp, Artificial Sequence
  Oligonucleotide primer for the detection of SNP TSC0018469
tcatactaaaaa

SEQ ID NO: 299198 - DNA, 12 bp, Artificial Sequence
  Oligonucleotide primer for the detection of SNP TSC0018469
tggttttatttt

SEQ ID NO: 299199 - DNA, 12 bp, Artificial Sequence
  Oligonucleotide primer for the detection of SNP TSC0018469
taatttcactcc

SEQ ID NO: 299200 - DNA, 12 bp, Artificial Sequence
  Oligonucleotide primer for the detection of SNP TSC0018469
ttatgttgaagg

SEQ ID NO: 299201 - DNA, 12 bp, Artificial Sequence
  Oligonucleotide primer for the detection of SNP TSC0018470
aaaaaccaatac

SEQ ID NO: 299202 - DNA, 12 bp, Artificial Sequence
  Oligonucleotide primer for the detection of SNP TSC0018470
aaaaaccgatac

SEQ ID NO: 299203 - DNA, 12 bp, Artificial Sequence
  Oligonucleotide primer for the detection of SNP TSC0018470
agatttgggagg

SEQ ID NO: 299204 - DNA, 12 bp, Artificial Sequence
  Oligonucleotide primer for the detection of SNP TSC0018470
aaacttaaaaaa

SEQ ID NO: 299205 - DNA, 12 bp, Artificial Sequence
  Oligonucleotide primer for the detection of SNP TSC0018470
gggagttggtgt

SEQ ID NO: 299206 - DNA, 12 bp, Artificial Sequence
  Oligonucleotide primer for the detection of SNP TSC0018470
gggagtcggtgt

SEQ ID NO: 299207 - DNA, 12 bp, Artificial Sequence
  Oligonucleotide primer for the detection of SNP TSC0018471
ataaggttagga

SEQ ID NO: 299208 - DNA, 12 bp, Artificial Sequence
  Oligonucleotide primer for the detection of SNP TSC0018472
ctaacaaacccc

SEQ ID NO: 299209 - DNA, 12 bp, Artificial Sequence
  Oligonucleotide primer for the detection of SNP TSC0018472
taaggggtgggg

SEQ ID NO: 299210 - DNA, 12 bp, Artificial Sequence
  Oligonucleotide primer for the detection of SNP TSC0018473
acaaaatcaaca

SEQ ID NO: 299211 - DNA, 12 bp, Artificial Sequence
  Oligonucleotide primer for the detection of SNP TSC0018473
agggaagtgagt

SEQ ID NO: 299212 - DNA, 12 bp, Artificial Sequence
  Oligonucleotide primer for the detection of SNP TSC0018473
ataaagttaata

SEQ ID NO: 299213 - DNA, 12 bp, Artificial Sequence
  Oligonucleotide primer for the detection of SNP TSC0018474
ttatacctaacc

SEQ ID NO: 299214 - DNA, 12 bp, Artificial Sequence
  Oligonucleotide primer for the detection of SNP TSC0018474
tattggttttgt

SEQ ID NO: 299215 - DNA, 12 bp, Artificial Sequence
  Oligonucleotide primer for the detection of SNP TSC0018474
actaactttata

SEQ ID NO: 299216 - DNA, 12 bp, Artificial Sequence
  Oligonucleotide primer for the detection of SNP TSC0018474
ttgtatttggtc

SEQ ID NO: 299217 - DNA, 12 bp, Artificial Sequence
  Oligonucleotide primer for the detection of SNP TSC0018475
caaaatataaaa

SEQ ID NO: 299218 - DNA, 12 bp, Artificial Sequence
  Oligonucleotide primer for the detection of SNP TSC0018475
tgtttggagatt

SEQ ID NO: 299219 - DNA, 12 bp, Artificial Sequence
  Oligonucleotide primer for the detection of SNP TSC0018475
tatttaaaaacc

SEQ ID NO: 299220 - DNA, 12 bp, Artificial Sequence
  Oligonucleotide primer for the detection of SNP TSC0018475
tagagtatgaaa

SEQ ID NO: 299221 - DNA, 12 bp, Artificial Sequence
  Oligonucleotide primer for the detection of SNP TSC0018481
ttggtagggtag

SEQ ID NO: 299222 - DNA, 12 bp, Artificial Sequence
  Oligonucleotide primer for the detection of SNP TSC0018482
caaataactaat

SEQ ID NO: 299223 - DNA, 12 bp, Artificial Sequence
  Oligonucleotide primer for the detection of SNP TSC0018482
ttggtgtataga

SEQ ID NO: 299224 - DNA, 12 bp, Artificial Sequence
  Oligonucleotide primer for the detection of SNP TSC0018482
ttggcgtataga

SEQ ID NO: 299225 - DNA, 12 bp, Artificial Sequence
  Oligonucleotide primer for the detection of SNP TSC0018483
ataaataaatca

SEQ ID NO: 299226 - DNA, 12 bp, Artificial Sequence
  Oligonucleotide primer for the detection of SNP TSC0018483
atttgttgattt

SEQ ID NO: 299227 - DNA, 12 bp, Artificial Sequence
  Oligonucleotide primer for the detection of SNP TSC0018483
acttactaacct

SEQ ID NO: 299228 - DNA, 12 bp, Artificial Sequence
  Oligonucleotide primer for the detection of SNP TSC0018484
attaaccaaaca

SEQ ID NO: 299229 - DNA, 12 bp, Artificial Sequence
  Oligonucleotide primer for the detection of SNP TSC0018484
ggtatttgttat

SEQ ID NO: 299230 - DNA, 12 bp, Artificial Sequence
  Oligonucleotide primer for the detection of SNP TSC0018484
aacacctaccac

SEQ ID NO: 299231 - DNA, 12 bp, Artificial Sequence
  Oligonucleotide primer for the detection of SNP TSC0018486
aggtatatatat

SEQ ID NO: 299232 - DNA, 12 bp, Artificial Sequence
  Oligonucleotide primer for the detection of SNP TSC0018487
gtatatatatag

SEQ ID NO: 299233 - DNA, 12 bp, Artificial Sequence
  Oligonucleotide primer for the detection of SNP TSC0018488
ataatgtattgt

SEQ ID NO: 299234 - DNA, 12 bp, Artificial Sequence
  Oligonucleotide primer for the detection of SNP TSC0018488
acaatatattac

SEQ ID NO: 299235 - DNA, 12 bp, Artificial Sequence
  Oligonucleotide primer for the detection of SNP TSC0018488
tagtttgggtaa

SEQ ID NO: 299236 - DNA, 12 bp, Artificial Sequence
  Oligonucleotide primer for the detection of SNP TSC0018492
ttacttaaaact

SEQ ID NO: 299237 - DNA, 12 bp, Artificial Sequence
  Oligonucleotide primer for the detection of SNP TSC0018492
taaaattttata

SEQ ID NO: 299238 - DNA, 12 bp, Artificial Sequence
  Oligonucleotide primer for the detection of SNP TSC0018492
aaaattccacaa

SEQ ID NO: 299239 - DNA, 12 bp, Artificial Sequence
  Oligonucleotide primer for the detection of SNP TSC0018492
ttatttgaagtt

SEQ ID NO: 299240 - DNA, 12 bp, Artificial Sequence
  Oligonucleotide primer for the detection of SNP TSC0018493
atttacacaata

SEQ ID NO: 299241 - DNA, 12 bp, Artificial Sequence
  Oligonucleotide primer for the detection of SNP TSC0018493
atttacgcaata

SEQ ID NO: 299242 - DNA, 12 bp, Artificial Sequence
  Oligonucleotide primer for the detection of SNP TSC0018493
tctcctcctacc

SEQ ID NO: 299243 - DNA, 12 bp, Artificial Sequence
  Oligonucleotide primer for the detection of SNP TSC0018493
atttgtgtagtg

SEQ ID NO: 299244 - DNA, 12 bp, Artificial Sequence
  Oligonucleotide primer for the detection of SNP TSC0018493
atttgcgtagtg

SEQ ID NO: 299245 - DNA, 12 bp, Artificial Sequence
  Oligonucleotide primer for the detection of SNP TSC0018495
aaaataattttt

SEQ ID NO: 299246 - DNA, 12 bp, Artificial Sequence
  Oligonucleotide primer for the detection of SNP TSC0018495
tataagatataa

SEQ ID NO: 299247 - DNA, 12 bp, Artificial Sequence
  Oligonucleotide primer for the detection of SNP TSC0018496
caataaacacca

SEQ ID NO: 299248 - DNA, 12 bp, Artificial Sequence
  Oligonucleotide primer for the detection of SNP TSC0018496
caataaacgcca

SEQ ID NO: 299249 - DNA, 12 bp, Artificial Sequence
  Oligonucleotide primer for the detection of SNP TSC0018496
gtggataagttt

SEQ ID NO: 299250 - DNA, 12 bp, Artificial Sequence
  Oligonucleotide primer for the detection of SNP TSC0018496
ataaataaactc

SEQ ID NO: 299251 - DNA, 12 bp, Artificial Sequence
  Oligonucleotide primer for the detection of SNP TSC0018496
tagtgggtgtta

SEQ ID NO: 299252 - DNA, 12 bp, Artificial Sequence
  Oligonucleotide primer for the detection of SNP TSC0018496
tagtgggcgtta

SEQ ID NO: 299253 - DNA, 12 bp, Artificial Sequence
  Oligonucleotide primer for the detection of SNP TSC0018497
ccttactactat

SEQ ID NO: 299254 - DNA, 12 bp, Artificial Sequence
  Oligonucleotide primer for the detection of SNP TSC0018497
ttaggtttttta

SEQ ID NO: 299255 - DNA, 12 bp, Artificial Sequence
  Oligonucleotide primer for the detection of SNP TSC0018498
aatcaaaaaatc

SEQ ID NO: 299256 - DNA, 12 bp, Artificial Sequence
  Oligonucleotide primer for the detection of SNP TSC0018498
tttggttggttt

SEQ ID NO: 299257 - DNA, 12 bp, Artificial Sequence
  Oligonucleotide primer for the detection of SNP TSC0018498
acctaactaatc

SEQ ID NO: 299258 - DNA, 12 bp, Artificial Sequence
  Oligonucleotide primer for the detection of SNP TSC0018498
ggttaggagatt

SEQ ID NO: 299259 - DNA, 12 bp, Artificial Sequence
  Oligonucleotide primer for the detection of SNP TSC0018498
ggttaggagatc

SEQ ID NO: 299260 - DNA, 12 bp, Artificial Sequence
  Oligonucleotide primer for the detection of SNP TSC0018499
cccctcttctac

SEQ ID NO: 299261 - DNA, 12 bp, Artificial Sequence
  Oligonucleotide primer for the detection of SNP TSC0018499
ttatggagttat

SEQ ID NO: 299262 - DNA, 12 bp, Artificial Sequence
  Oligonucleotide primer for the detection of SNP TSC0018499
tataaaactata

SEQ ID NO: 299263 - DNA, 12 bp, Artificial Sequence
  Oligonucleotide primer for the detection of SNP TSC0018500
taacccaaattt

SEQ ID NO: 299264 - DNA, 12 bp, Artificial Sequence
  Oligonucleotide primer for the detection of SNP TSC0018500
ttattgaaaggg

SEQ ID NO: 299265 - DNA, 12 bp, Artificial Sequence
  Oligonucleotide primer for the detection of SNP TSC0018501
accaaaaaaccc

SEQ ID NO: 299266 - DNA, 12 bp, Artificial Sequence
  Oligonucleotide primer for the detection of SNP TSC0018501
accgaaaaaccc

SEQ ID NO: 299267 - DNA, 12 bp, Artificial Sequence
  Oligonucleotide primer for the detection of SNP TSC0018501
gtttttttaagt

SEQ ID NO: 299268 - DNA, 12 bp, Artificial Sequence
  Oligonucleotide primer for the detection of SNP TSC0018501
taccccctcaaa

SEQ ID NO: 299269 - DNA, 12 bp, Artificial Sequence
  Oligonucleotide primer for the detection of SNP TSC0018501
gttgagaagttt

SEQ ID NO: 299270 - DNA, 12 bp, Artificial Sequence
  Oligonucleotide primer for the detection of SNP TSC0018501
gtcgagaagttt

SEQ ID NO: 299271 - DNA, 12 bp, Artificial Sequence
  Oligonucleotide primer for the detection of SNP TSC0018501
gttgagaagttc

SEQ ID NO: 299272 - DNA, 12 bp, Artificial Sequence
  Oligonucleotide primer for the detection of SNP TSC0018501
gtcgagaagttc

SEQ ID NO: 299273 - DNA, 12 bp, Artificial Sequence
  Oligonucleotide primer for the detection of SNP TSC0018502
cttaatacaaaa

SEQ ID NO: 299274 - DNA, 12 bp, Artificial Sequence
  Oligonucleotide primer for the detection of SNP TSC0018502
tattcttctctc

SEQ ID NO: 299275 - DNA, 12 bp, Artificial Sequence
  Oligonucleotide primer for the detection of SNP TSC0018502
tttagtgtaaga

SEQ ID NO: 299276 - DNA, 12 bp, Artificial Sequence
  Oligonucleotide primer for the detection of SNP TSC0018503
atacctatatcc

SEQ ID NO: 299277 - DNA, 12 bp, Artificial Sequence
  Oligonucleotide primer for the detection of SNP TSC0018503
tttataatttag

SEQ ID NO: 299278 - DNA, 12 bp, Artificial Sequence
  Oligonucleotide primer for the detection of SNP TSC0018503
cccacaactcaa

SEQ ID NO: 299279 - DNA, 12 bp, Artificial Sequence
  Oligonucleotide primer for the detection of SNP TSC0018503
gtgtttgtgttt

SEQ ID NO: 299280 - DNA, 12 bp, Artificial Sequence
  Oligonucleotide primer for the detection of SNP TSC0018507
aatatttttaac

SEQ ID NO: 299281 - DNA, 12 bp, Artificial Sequence
  Oligonucleotide primer for the detection of SNP TSC0018507
tgtgattagagg

SEQ ID NO: 299282 - DNA, 12 bp, Artificial Sequence
  Oligonucleotide primer for the detection of SNP TSC0018507
cgtgattagagg

SEQ ID NO: 299283 - DNA, 12 bp, Artificial Sequence
  Oligonucleotide primer for the detection of SNP TSC0018508
ctccaatataat

SEQ ID NO: 299284 - DNA, 12 bp, Artificial Sequence
  Oligonucleotide primer for the detection of SNP TSC0018508
gtagtgaaggtg

SEQ ID NO: 299285 - DNA, 12 bp, Artificial Sequence
  Oligonucleotide primer for the detection of SNP TSC0018508
gtagtgaaggcg

SEQ ID NO: 299286 - DNA, 12 bp, Artificial Sequence
  Oligonucleotide primer for the detection of SNP TSC0018508
ataataaaaaca

SEQ ID NO: 299287 - DNA, 12 bp, Artificial Sequence
  Oligonucleotide primer for the detection of SNP TSC0018508
ataataaaaacg

SEQ ID NO: 299288 - DNA, 12 bp, Artificial Sequence
  Oligonucleotide primer for the detection of SNP TSC0018508
ttttagtgtaat

SEQ ID NO: 299289 - DNA, 12 bp, Artificial Sequence
  Oligonucleotide primer for the detection of SNP TSC0018509
ataagaagaata

SEQ ID NO: 299290 - DNA, 12 bp, Artificial Sequence
  Oligonucleotide primer for the detection of SNP TSC0018510
atcaccataaaa

SEQ ID NO: 299291 - DNA, 12 bp, Artificial Sequence
  Oligonucleotide primer for the detection of SNP TSC0018510
atcaccgtaaaa

SEQ ID NO: 299292 - DNA, 12 bp, Artificial Sequence
  Oligonucleotide primer for the detection of SNP TSC0018510
ggggtaggtttt

SEQ ID NO: 299293 - DNA, 12 bp, Artificial Sequence
  Oligonucleotide primer for the detection of SNP TSC0018510
aaaacaaacttc

SEQ ID NO: 299294 - DNA, 12 bp, Artificial Sequence
  Oligonucleotide primer for the detection of SNP TSC0018510
tattattgtggg

SEQ ID NO: 299295 - DNA, 12 bp, Artificial Sequence
  Oligonucleotide primer for the detection of SNP TSC0018510
tattatcgtggg

SEQ ID NO: 299296 - DNA, 12 bp, Artificial Sequence
  Oligonucleotide primer for the detection of SNP TSC0018511
aatcttcaatat

SEQ ID NO: 299297 - DNA, 12 bp, Artificial Sequence
  Oligonucleotide primer for the detection of SNP TSC0018511
agttagtttaga

SEQ ID NO: 299298 - DNA, 12 bp, Artificial Sequence
  Oligonucleotide primer for the detection of SNP TSC0018512
taactacacttc

SEQ ID NO: 299299 - DNA, 12 bp, Artificial Sequence
  Oligonucleotide primer for the detection of SNP TSC0018512
agtgaagtatga

SEQ ID NO: 299300 - DNA, 12 bp, Artificial Sequence
  Oligonucleotide primer for the detection of SNP TSC0018512
agcgaagtatga

SEQ ID NO: 299301 - DNA, 12 bp, Artificial Sequence
  Oligonucleotide primer for the detection of SNP TSC0018513
aaaaataaccac

SEQ ID NO: 299302 - DNA, 12 bp, Artificial Sequence
  Oligonucleotide primer for the detection of SNP TSC0018513
attgttaatgta

SEQ ID NO: 299303 - DNA, 12 bp, Artificial Sequence
  Oligonucleotide primer for the detection of SNP TSC0018514
acataaaaaaat

SEQ ID NO: 299304 - DNA, 12 bp, Artificial Sequence
  Oligonucleotide primer for the detection of SNP TSC0018514
ttagttttttgg

SEQ ID NO: 299305 - DNA, 12 bp, Artificial Sequence
  Oligonucleotide primer for the detection of SNP TSC0018515
aataacaaacat

SEQ ID NO: 299306 - DNA, 12 bp, Artificial Sequence
  Oligonucleotide primer for the detection of SNP TSC0018515
taagagagaata

SEQ ID NO: 299307 - DNA, 12 bp, Artificial Sequence
  Oligonucleotide primer for the detection of SNP TSC0018517
aataattttcac

SEQ ID NO: 299308 - DNA, 12 bp, Artificial Sequence
  Oligonucleotide primer for the detection of SNP TSC0018517
ttttgtgttgtg

SEQ ID NO: 299309 - DNA, 12 bp, Artificial Sequence
  Oligonucleotide primer for the detection of SNP TSC0018517
ttttgcgttgtg

SEQ ID NO: 299310 - DNA, 12 bp, Artificial Sequence
  Oligonucleotide primer for the detection of SNP TSC0018517
ttttgtgtcgtg

SEQ ID NO: 299311 - DNA, 12 bp, Artificial Sequence
  Oligonucleotide primer for the detection of SNP TSC0018517
ttttgcgtcgtg

SEQ ID NO: 299312 - DNA, 12 bp, Artificial Sequence
  Oligonucleotide primer for the detection of SNP TSC0018517
ttttacatcata

SEQ ID NO: 299313 - DNA, 12 bp, Artificial Sequence
  Oligonucleotide primer for the detection of SNP TSC0018517
ttttacatcgta

SEQ ID NO: 299314 - DNA, 12 bp, Artificial Sequence
  Oligonucleotide primer for the detection of SNP TSC0018517
ttttacgtcata

SEQ ID NO: 299315 - DNA, 12 bp, Artificial Sequence
  Oligonucleotide primer for the detection of SNP TSC0018517
ttttacgtcgta

SEQ ID NO: 299316 - DNA, 12 bp, Artificial Sequence
  Oligonucleotide primer for the detection of SNP TSC0018517
agtggtttttat

SEQ ID NO: 299317 - DNA, 12 bp, Artificial Sequence
  Oligonucleotide primer for the detection of SNP TSC0018518
caatccatcatt

SEQ ID NO: 299318 - DNA, 12 bp, Artificial Sequence
  Oligonucleotide primer for the detection of SNP TSC0018518
ataaatttatta

SEQ ID NO: 299319 - DNA, 12 bp, Artificial Sequence
  Oligonucleotide primer for the detection of SNP TSC0018519
aaacataatttt

SEQ ID NO: 299320 - DNA, 12 bp, Artificial Sequence
  Oligonucleotide primer for the detection of SNP TSC0018519
agagatttgaat

SEQ ID NO: 299321 - DNA, 12 bp, Artificial Sequence
  Oligonucleotide primer for the detection of SNP TSC0018520
tttttttgagat

SEQ ID NO: 299322 - DNA, 12 bp, Artificial Sequence
  Oligonucleotide primer for the detection of SNP TSC0018520
ttttttaaaaca

SEQ ID NO: 299323 - DNA, 12 bp, Artificial Sequence
  Oligonucleotide primer for the detection of SNP TSC0018520
gagagtaagatt

SEQ ID NO: 299324 - DNA, 12 bp, Artificial Sequence
  Oligonucleotide primer for the detection of SNP TSC0018521
atcaaccaacac

SEQ ID NO: 299325 - DNA, 12 bp, Artificial Sequence
  Oligonucleotide primer for the detection of SNP TSC0018521
atcaaccaacgc

SEQ ID NO: 299326 - DNA, 12 bp, Artificial Sequence
  Oligonucleotide primer for the detection of SNP TSC0018521
ggttgatgtttg

SEQ ID NO: 299327 - DNA, 12 bp, Artificial Sequence
  Oligonucleotide primer for the detection of SNP TSC0018522
caccatatacca

SEQ ID NO: 299328 - DNA, 12 bp, Artificial Sequence
  Oligonucleotide primer for the detection of SNP TSC0018522
caccatataccg

SEQ ID NO: 299329 - DNA, 12 bp, Artificial Sequence
  Oligonucleotide primer for the detection of SNP TSC0018522
caccgtatacca

SEQ ID NO: 299330 - DNA, 12 bp, Artificial Sequence
  Oligonucleotide primer for the detection of SNP TSC0018522
caccgtataccg

SEQ ID NO: 299331 - DNA, 12 bp, Artificial Sequence
  Oligonucleotide primer for the detection of SNP TSC0018522
gggtattttttt

SEQ ID NO: 299332 - DNA, 12 bp, Artificial Sequence
  Oligonucleotide primer for the detection of SNP TSC0018522
gggtattttttc

SEQ ID NO: 299333 - DNA, 12 bp, Artificial Sequence
  Oligonucleotide primer for the detection of SNP TSC0018522
aaacaccttttc

SEQ ID NO: 299334 - DNA, 12 bp, Artificial Sequence
  Oligonucleotide primer for the detection of SNP TSC0018522
tattgtgtgttg

SEQ ID NO: 299335 - DNA, 12 bp, Artificial Sequence
  Oligonucleotide primer for the detection of SNP TSC0018522
tatcgtgtgttg

SEQ ID NO: 299336 - DNA, 12 bp, Artificial Sequence
  Oligonucleotide primer for the detection of SNP TSC0018522
tattgtgtgtcg

SEQ ID NO: 299337 - DNA, 12 bp, Artificial Sequence
  Oligonucleotide primer for the detection of SNP TSC0018522
tatcgtgtgtcg

SEQ ID NO: 299338 - DNA, 12 bp, Artificial Sequence
  Oligonucleotide primer for the detection of SNP TSC0018523
aattattatacc

SEQ ID NO: 299339 - DNA, 12 bp, Artificial Sequence
  Oligonucleotide primer for the detection of SNP TSC0018523
agaattaattga

SEQ ID NO: 299340 - DNA, 12 bp, Artificial Sequence
  Oligonucleotide primer for the detection of SNP TSC0018523
agaattaatcga

SEQ ID NO: 299341 - DNA, 12 bp, Artificial Sequence
  Oligonucleotide primer for the detection of SNP TSC0018524
gatttataaaat

SEQ ID NO: 299342 - DNA, 12 bp, Artificial Sequence
  Oligonucleotide primer for the detection of SNP TSC0018530
cccacttacaaa

SEQ ID NO: 299343 - DNA, 12 bp, Artificial Sequence
  Oligonucleotide primer for the detection of SNP TSC0018530
tttttttaagtt

SEQ ID NO: 299344 - DNA, 12 bp, Artificial Sequence
  Oligonucleotide primer for the detection of SNP TSC0018530
cctcctcccaaa

SEQ ID NO: 299345 - DNA, 12 bp, Artificial Sequence
  Oligonucleotide primer for the detection of SNP TSC0018530
ttatttgtaaat

SEQ ID NO: 299346 - DNA, 12 bp, Artificial Sequence
  Oligonucleotide primer for the detection of SNP TSC0018531
attttaattatc

SEQ ID NO: 299347 - DNA, 12 bp, Artificial Sequence
  Oligonucleotide primer for the detection of SNP TSC0018532
atctctatttaa

SEQ ID NO: 299348 - DNA, 12 bp, Artificial Sequence
  Oligonucleotide primer for the detection of SNP TSC0018532
aataatttattg

SEQ ID NO: 299349 - DNA, 12 bp, Artificial Sequence
  Oligonucleotide primer for the detection of SNP TSC0018532
gagtttttgttt

SEQ ID NO: 299350 - DNA, 12 bp, Artificial Sequence
  Oligonucleotide primer for the detection of SNP TSC0018533
tttaatgtatgt

SEQ ID NO: 299351 - DNA, 12 bp, Artificial Sequence
  Oligonucleotide primer for the detection of SNP TSC0018533
ttcaatatatac

SEQ ID NO: 299352 - DNA, 12 bp, Artificial Sequence
  Oligonucleotide primer for the detection of SNP TSC0018533
tttaattgtatg

SEQ ID NO: 299353 - DNA, 12 bp, Artificial Sequence
  Oligonucleotide primer for the detection of SNP TSC0018534
aaaaaactactc

SEQ ID NO: 299354 - DNA, 12 bp, Artificial Sequence
  Oligonucleotide primer for the detection of SNP TSC0018534
gtaaaggagtag

SEQ ID NO: 299355 - DNA, 12 bp, Artificial Sequence
  Oligonucleotide primer for the detection of SNP TSC0018535
tcaaatattaat

SEQ ID NO: 299356 - DNA, 12 bp, Artificial Sequence
  Oligonucleotide primer for the detection of SNP TSC0018535
ttatttttattg

SEQ ID NO: 299357 - DNA, 12 bp, Artificial Sequence
  Oligonucleotide primer for the detection of SNP TSC0018536
ttcttattattt

SEQ ID NO: 299358 - DNA, 12 bp, Artificial Sequence
  Oligonucleotide primer for the detection of SNP TSC0018536
gtgaggttaata

SEQ ID NO: 299359 - DNA, 12 bp, Artificial Sequence
  Oligonucleotide primer for the detection of SNP TSC0018537
taacacaacaat

SEQ ID NO: 299360 - DNA, 12 bp, Artificial Sequence
  Oligonucleotide primer for the detection of SNP TSC0018537
gttttttgttta

SEQ ID NO: 299361 - DNA, 12 bp, Artificial Sequence
  Oligonucleotide primer for the detection of SNP TSC0018538
tttaaaattatt

SEQ ID NO: 299362 - DNA, 12 bp, Artificial Sequence
  Oligonucleotide primer for the detection of SNP TSC0018539
tattaaacttta

SEQ ID NO: 299363 - DNA, 12 bp, Artificial Sequence
  Oligonucleotide primer for the detection of SNP TSC0018539
attaaatggttg

SEQ ID NO: 299364 - DNA, 12 bp, Artificial Sequence
  Oligonucleotide primer for the detection of SNP TSC0018540
ttaaaaccaaat

SEQ ID NO: 299365 - DNA, 12 bp, Artificial Sequence
  Oligonucleotide primer for the detection of SNP TSC0018541
ttctctaatcac

SEQ ID NO: 299366 - DNA, 12 bp, Artificial Sequence
  Oligonucleotide primer for the detection of SNP TSC0018541
ataaaggtagaa

SEQ ID NO: 299367 - DNA, 12 bp, Artificial Sequence
  Oligonucleotide primer for the detection of SNP TSC0018541
ttttttggttat

SEQ ID NO: 299368 - DNA, 12 bp, Artificial Sequence
  Oligonucleotide primer for the detection of SNP TSC0018542
ctaaactacttt

SEQ ID NO: 299369 - DNA, 12 bp, Artificial Sequence
  Oligonucleotide primer for the detection of SNP TSC0018542
ttaggaatagaa

SEQ ID NO: 299370 - DNA, 12 bp, Artificial Sequence
  Oligonucleotide primer for the detection of SNP TSC0018543
aaacctaatcat

SEQ ID NO: 299371 - DNA, 12 bp, Artificial Sequence
  Oligonucleotide primer for the detection of SNP TSC0018543
agagttttttag

SEQ ID NO: 299372 - DNA, 12 bp, Artificial Sequence
  Oligonucleotide primer for the detection of SNP TSC0018544
aacattaaaaac

SEQ ID NO: 299373 - DNA, 12 bp, Artificial Sequence
  Oligonucleotide primer for the detection of SNP TSC0018544
aacgttaaaaac

SEQ ID NO: 299374 - DNA, 12 bp, Artificial Sequence
  Oligonucleotide primer for the detection of SNP TSC0018544
gtaatggtggtt

SEQ ID NO: 299375 - DNA, 12 bp, Artificial Sequence
  Oligonucleotide primer for the detection of SNP TSC0018544
gtaatggtggtc

SEQ ID NO: 299376 - DNA, 12 bp, Artificial Sequence
  Oligonucleotide primer for the detection of SNP TSC0018544
acaataataatc

SEQ ID NO: 299377 - DNA, 12 bp, Artificial Sequence
  Oligonucleotide primer for the detection of SNP TSC0018544
agtgttgagagt

SEQ ID NO: 299378 - DNA, 12 bp, Artificial Sequence
  Oligonucleotide primer for the detection of SNP TSC0018544
agcgttgagagt

SEQ ID NO: 299379 - DNA, 12 bp, Artificial Sequence
  Oligonucleotide primer for the detection of SNP TSC0018544
agtgttgagagc

SEQ ID NO: 299380 - DNA, 12 bp, Artificial Sequence
  Oligonucleotide primer for the detection of SNP TSC0018544
agcgttgagagc

SEQ ID NO: 299381 - DNA, 12 bp, Artificial Sequence
  Oligonucleotide primer for the detection of SNP TSC0018547
actcaaaccttt

SEQ ID NO: 299382 - DNA, 12 bp, Artificial Sequence
  Oligonucleotide primer for the detection of SNP TSC0018547
gttttaggttta

SEQ ID NO: 299383 - DNA, 12 bp, Artificial Sequence
  Oligonucleotide primer for the detection of SNP TSC0018548
actctaacctct

SEQ ID NO: 299384 - DNA, 12 bp, Artificial Sequence
  Oligonucleotide primer for the detection of SNP TSC0018548
aaagtattttag

SEQ ID NO: 299385 - DNA, 12 bp, Artificial Sequence
  Oligonucleotide primer for the detection of SNP TSC0018549
taatttactcac

SEQ ID NO: 299386 - DNA, 12 bp, Artificial Sequence
  Oligonucleotide primer for the detection of SNP TSC0018549
ttttagtgaata

SEQ ID NO: 299387 - DNA, 12 bp, Artificial Sequence
  Oligonucleotide primer for the detection of SNP TSC0018552
actaaaaaaata

SEQ ID NO: 299388 - DNA, 12 bp, Artificial Sequence
  Oligonucleotide primer for the detection of SNP TSC0018552
tggtatttagat

SEQ ID NO: 299389 - DNA, 12 bp, Artificial Sequence
  Oligonucleotide primer for the detection of SNP TSC0018552
cggtatttagat

SEQ ID NO: 299390 - DNA, 12 bp, Artificial Sequence
  Oligonucleotide primer for the detection of SNP TSC0018552
caacacccaaat

SEQ ID NO: 299391 - DNA, 12 bp, Artificial Sequence
  Oligonucleotide primer for the detection of SNP TSC0018552
cgacacccaaat

SEQ ID NO: 299392 - DNA, 12 bp, Artificial Sequence
  Oligonucleotide primer for the detection of SNP TSC0018552
gttaagaagatg

SEQ ID NO: 299393 - DNA, 12 bp, Artificial Sequence
  Oligonucleotide primer for the detection of SNP TSC0018553
ctaaaatttaat

SEQ ID NO: 299394 - DNA, 12 bp, Artificial Sequence
  Oligonucleotide primer for the detection of SNP TSC0018553
aatttagaagag

SEQ ID NO: 299395 - DNA, 12 bp, Artificial Sequence
  Oligonucleotide primer for the detection of SNP TSC0018554
atataccttatt

SEQ ID NO: 299396 - DNA, 12 bp, Artificial Sequence
  Oligonucleotide primer for the detection of SNP TSC0018554
atgatgtatgta

SEQ ID NO: 299397 - DNA, 12 bp, Artificial Sequence
  Oligonucleotide primer for the detection of SNP TSC0018555
atattatatata

SEQ ID NO: 299398 - DNA, 12 bp, Artificial Sequence
  Oligonucleotide primer for the detection of SNP TSC0018556
aaacaatatacc

SEQ ID NO: 299399 - DNA, 12 bp, Artificial Sequence
  Oligonucleotide primer for the detection of SNP TSC0018556
aagtaatatgtt

SEQ ID NO: 299400 - DNA, 12 bp, Artificial Sequence
  Oligonucleotide primer for the detection of SNP TSC0018557
ggttttattatg

SEQ ID NO: 299401 - DNA, 12 bp, Artificial Sequence
  Oligonucleotide primer for the detection of SNP TSC0018558
taatccaaattt

SEQ ID NO: 299402 - DNA, 12 bp, Artificial Sequence
  Oligonucleotide primer for the detection of SNP TSC0018558
tgttattgtaaa

SEQ ID NO: 299403 - DNA, 12 bp, Artificial Sequence
  Oligonucleotide primer for the detection of SNP TSC0018559
ttaatactccac

SEQ ID NO: 299404 - DNA, 12 bp, Artificial Sequence
  Oligonucleotide primer for the detection of SNP TSC0018559
tgagattataag

SEQ ID NO: 299405 - DNA, 12 bp, Artificial Sequence
  Oligonucleotide primer for the detection of SNP TSC0018559
cgagattataag

SEQ ID NO: 299406 - DNA, 12 bp, Artificial Sequence
  Oligonucleotide primer for the detection of SNP TSC0018559
caaaattataaa

SEQ ID NO: 299407 - DNA, 12 bp, Artificial Sequence
  Oligonucleotide primer for the detection of SNP TSC0018559
cgaaattataaa

SEQ ID NO: 299408 - DNA, 12 bp, Artificial Sequence
  Oligonucleotide primer for the detection of SNP TSC0018559
ttagtattttat

SEQ ID NO: 299409 - DNA, 12 bp, Artificial Sequence
  Oligonucleotide primer for the detection of SNP TSC0018560
tctatcataata

SEQ ID NO: 299410 - DNA, 12 bp, Artificial Sequence
  Oligonucleotide primer for the detection of SNP TSC0018560
acgaataaaatt

SEQ ID NO: 299411 - DNA, 12 bp, Artificial Sequence
  Oligonucleotide primer for the detection of SNP TSC0018560
acaaacaaaatt

SEQ ID NO: 299412 - DNA, 12 bp, Artificial Sequence
  Oligonucleotide primer for the detection of SNP TSC0018560
acgaacaaaatt

SEQ ID NO: 299413 - DNA, 12 bp, Artificial Sequence
  Oligonucleotide primer for the detection of SNP TSC0018560
tttattataata

SEQ ID NO: 299414 - DNA, 12 bp, Artificial Sequence
  Oligonucleotide primer for the detection of SNP TSC0018562
gaaaattgttag

SEQ ID NO: 299415 - DNA, 12 bp, Artificial Sequence
  Oligonucleotide primer for the detection of SNP TSC0018564
cttaactatcta

SEQ ID NO: 299416 - DNA, 12 bp, Artificial Sequence
  Oligonucleotide primer for the detection of SNP TSC0018564
aaagttttgtta

SEQ ID NO: 299417 - DNA, 12 bp, Artificial Sequence
  Oligonucleotide primer for the detection of SNP TSC0018564
aaaactttatca

SEQ ID NO: 299418 - DNA, 12 bp, Artificial Sequence
  Oligonucleotide primer for the detection of SNP TSC0018564
tttaattattta

SEQ ID NO: 299419 - DNA, 12 bp, Artificial Sequence
  Oligonucleotide primer for the detection of SNP TSC0018565
aatcaattataa

SEQ ID NO: 299420 - DNA, 12 bp, Artificial Sequence
  Oligonucleotide primer for the detection of SNP TSC0018565
tgttgtgtaaat

SEQ ID NO: 299421 - DNA, 12 bp, Artificial Sequence
  Oligonucleotide primer for the detection of SNP TSC0018565
tactatacaaac

SEQ ID NO: 299422 - DNA, 12 bp, Artificial Sequence
  Oligonucleotide primer for the detection of SNP TSC0018565
aattaattgtag

SEQ ID NO: 299423 - DNA, 12 bp, Artificial Sequence
  Oligonucleotide primer for the detection of SNP TSC0018566
gtggggttttgg

SEQ ID NO: 299424 - DNA, 12 bp, Artificial Sequence
  Oligonucleotide primer for the detection of SNP TSC0018566
gtggggtttcgg

SEQ ID NO: 299425 - DNA, 12 bp, Artificial Sequence
  Oligonucleotide primer for the detection of SNP TSC0018570
aatcataaattc

SEQ ID NO: 299426 - DNA, 12 bp, Artificial Sequence
  Oligonucleotide primer for the detection of SNP TSC0018570
tttagatgggtt

SEQ ID NO: 299427 - DNA, 12 bp, Artificial Sequence
  Oligonucleotide primer for the detection of SNP TSC0018570
tttagacgggtt

SEQ ID NO: 299428 - DNA, 12 bp, Artificial Sequence
  Oligonucleotide primer for the detection of SNP TSC0018570
tccaaacaaatt

SEQ ID NO: 299429 - DNA, 12 bp, Artificial Sequence
  Oligonucleotide primer for the detection of SNP TSC0018570
tccaaacgaatt

SEQ ID NO: 299430 - DNA, 12 bp, Artificial Sequence
  Oligonucleotide primer for the detection of SNP TSC0018570
ggttatgggttt

SEQ ID NO: 299431 - DNA, 12 bp, Artificial Sequence
  Oligonucleotide primer for the detection of SNP TSC0018571
aaaacccatcta

SEQ ID NO: 299432 - DNA, 12 bp, Artificial Sequence
  Oligonucleotide primer for the detection of SNP TSC0018571
aaaacccgtcta

SEQ ID NO: 299433 - DNA, 12 bp, Artificial Sequence
  Oligonukleotid-Primer
ataccttctata

SEQ ID NO: 299434 - DNA, 12 bp, Artificial Sequence
  Oligonucleotide primer for the detection of SNP TSC0018571
agaatttgtttg

SEQ ID NO: 299435 - DNA, 12 bp, Artificial Sequence
  Oligonucleotide primer for the detection of SNP TSC0018571
agaattcgtttg

SEQ ID NO: 299436 - DNA, 12 bp, Artificial Sequence
  Oligonucleotide primer for the detection of SNP TSC0018572
ccttctatatcc

SEQ ID NO: 299437 - DNA, 12 bp, Artificial Sequence
  Oligonucleotide primer for the detection of SNP TSC0018572
tttatgggagaa

SEQ ID NO: 299438 - DNA, 12 bp, Artificial Sequence
  Oligonucleotide primer for the detection of SNP TSC0018574
atcataaaaaac

SEQ ID NO: 299439 - DNA, 12 bp, Artificial Sequence
  Oligonucleotide primer for the detection of SNP TSC0018574
attttctaattc

SEQ ID NO: 299440 - DNA, 12 bp, Artificial Sequence
  Oligonucleotide primer for the detection of SNP TSC0018574
attatgagagat

SEQ ID NO: 299441 - DNA, 12 bp, Artificial Sequence
  Oligonucleotide primer for the detection of SNP TSC0018574
attatgagagac

SEQ ID NO: 299442 - DNA, 12 bp, Artificial Sequence
  Oligonucleotide primer for the detection of SNP TSC0018576
atttaaaaatca

SEQ ID NO: 299443 - DNA, 12 bp, Artificial Sequence
  Oligonucleotide primer for the detection of SNP TSC0018576
ttatataagggt

SEQ ID NO: 299444 - DNA, 12 bp, Artificial Sequence
  Oligonucleotide primer for the detection of SNP TSC0018576
ctcacataaaaa

SEQ ID NO: 299445 - DNA, 12 bp, Artificial Sequence
  Oligonucleotide primer for the detection of SNP TSC0018576
tatttaggagtt

SEQ ID NO: 299446 - DNA, 12 bp, Artificial Sequence
  Oligonucleotide primer for the detection of SNP TSC0018580
ccaacccctcac

SEQ ID NO: 299447 - DNA, 12 bp, Artificial Sequence
  Oligonucleotide primer for the detection of SNP TSC0018580
ccaacccctcgc

SEQ ID NO: 299448 - DNA, 12 bp, Artificial Sequence
  Oligonucleotide primer for the detection of SNP TSC0018580
tagtttttagga

SEQ ID NO: 299449 - DNA, 12 bp, Artificial Sequence
  Oligonucleotide primer for the detection of SNP TSC0018580
caacccccaaaa

SEQ ID NO: 299450 - DNA, 12 bp, Artificial Sequence
  Oligonucleotide primer for the detection of SNP TSC0018580
ttagttttttgt

SEQ ID NO: 299451 - DNA, 12 bp, Artificial Sequence
  Oligonucleotide primer for the detection of SNP TSC0018580
ttagtttttcgt

SEQ ID NO: 299452 - DNA, 12 bp, Artificial Sequence
  Oligonucleotide primer for the detection of SNP TSC0018584
aaacacatctac

SEQ ID NO: 299453 - DNA, 12 bp, Artificial Sequence
  Oligonucleotide primer for the detection of SNP TSC0018584
aaacgcatctac

SEQ ID NO: 299454 - DNA, 12 bp, Artificial Sequence
  Oligonucleotide primer for the detection of SNP TSC0018584
ttaaggtagttt

SEQ ID NO: 299455 - DNA, 12 bp, Artificial Sequence
  Oligonucleotide primer for the detection of SNP TSC0018584
tcaaaacaatcc

SEQ ID NO: 299456 - DNA, 12 bp, Artificial Sequence
  Oligonucleotide primer for the detection of SNP TSC0018584
agatgtatttgt

SEQ ID NO: 299457 - DNA, 12 bp, Artificial Sequence
  Oligonucleotide primer for the detection of SNP TSC0018584
agacgtatttgt

SEQ ID NO: 299458 - DNA, 12 bp, Artificial Sequence
  Oligonucleotide primer for the detection of SNP TSC0018589
aataatactact

SEQ ID NO: 299459 - DNA, 12 bp, Artificial Sequence
  Oligonucleotide primer for the detection of SNP TSC0018589
ggtgatgagtta

SEQ ID NO: 299460 - DNA, 12 bp, Artificial Sequence
  Oligonucleotide primer for the detection of SNP TSC0018590
atatccctaata

SEQ ID NO: 299461 - DNA, 12 bp, Artificial Sequence
  Oligonucleotide primer for the detection of SNP TSC0018590
gatattagtaat

SEQ ID NO: 299462 - DNA, 12 bp, Artificial Sequence
  Oligonucleotide primer for the detection of SNP TSC0018590
aaacatcaataa

SEQ ID NO: 299463 - DNA, 12 bp, Artificial Sequence
  Oligonucleotide primer for the detection of SNP TSC0018591
atctaccacaac

SEQ ID NO: 299464 - DNA, 12 bp, Artificial Sequence
  Oligonucleotide primer for the detection of SNP TSC0018591
gtgaagggtgtg

SEQ ID NO: 299465 - DNA, 12 bp, Artificial Sequence
  Oligonucleotide primer for the detection of SNP TSC0018591
gtgaagggtgcg

SEQ ID NO: 299466 - DNA, 12 bp, Artificial Sequence
  Oligonucleotide primer for the detection of SNP TSC0018592
ctaaccaacaca

SEQ ID NO: 299467 - DNA, 12 bp, Artificial Sequence
  Oligonucleotide primer for the detection of SNP TSC0018592
attagggtgatt

SEQ ID NO: 299468 - DNA, 12 bp, Artificial Sequence
  Oligonucleotide primer for the detection of SNP TSC0018592
atcaaaataatt

SEQ ID NO: 299469 - DNA, 12 bp, Artificial Sequence
  Oligonucleotide primer for the detection of SNP TSC0018592
ttggttaatata

SEQ ID NO: 299470 - DNA, 12 bp, Artificial Sequence
  Oligonucleotide primer for the detection of SNP TSC0018594
ttaacaaaatat

SEQ ID NO: 299471 - DNA, 12 bp, Artificial Sequence
  Oligonucleotide primer for the detection of SNP TSC0018594
ttaacgaaatat

SEQ ID NO: 299472 - DNA, 12 bp, Artificial Sequence
  Oligonucleotide primer for the detection of SNP TSC0018594
gagttgtttttg

SEQ ID NO: 299473 - DNA, 12 bp, Artificial Sequence
  Oligonucleotide primer for the detection of SNP TSC0018594
gagtcgtttttg

SEQ ID NO: 299474 - DNA, 12 bp, Artificial Sequence
  Oligonucleotide primer for the detection of SNP TSC0018594
gagttgttttcg

SEQ ID NO: 299475 - DNA, 12 bp, Artificial Sequence
  Oligonucleotide primer for the detection of SNP TSC0018594
gagtcgttttcg

SEQ ID NO: 299476 - DNA, 12 bp, Artificial Sequence
  Oligonucleotide primer for the detection of SNP TSC0018595
taatttatttct

SEQ ID NO: 299477 - DNA, 12 bp, Artificial Sequence
  Oligonucleotide primer for the detection of SNP TSC0018595
ttttgttttgtg

SEQ ID NO: 299478 - DNA, 12 bp, Artificial Sequence
  Oligonucleotide primer for the detection of SNP TSC0018596
tcctttaaaaac

SEQ ID NO: 299479 - DNA, 12 bp, Artificial Sequence
  Oligonucleotide primer for the detection of SNP TSC0018596
gagttggtggtt

SEQ ID NO: 299480 - DNA, 12 bp, Artificial Sequence
  Oligonucleotide primer for the detection of SNP TSC0018596
gagtcggtggtt

SEQ ID NO: 299481 - DNA, 12 bp, Artificial Sequence
  Oligonucleotide primer for the detection of SNP TSC0018596
gagttggcggtt

SEQ ID NO: 299482 - DNA, 12 bp, Artificial Sequence
  Oligonucleotide primer for the detection of SNP TSC0018596
gagtcggcggtt

SEQ ID NO: 299483 - DNA, 12 bp, Artificial Sequence
  Oligonucleotide primer for the detection of SNP TSC0018596
aaaaccaacaac

SEQ ID NO: 299484 - DNA, 12 bp, Artificial Sequence
  Oligonucleotide primer for the detection of SNP TSC0018596
aaaaccaacgac

SEQ ID NO: 299485 - DNA, 12 bp, Artificial Sequence
  Oligonucleotide primer for the detection of SNP TSC0018596
aaaaccgacaac

SEQ ID NO: 299486 - DNA, 12 bp, Artificial Sequence
  Oligonucleotide primer for the detection of SNP TSC0018596
aaaaccgacgac

SEQ ID NO: 299487 - DNA, 12 bp, Artificial Sequence
  Oligonucleotide primer for the detection of SNP TSC0018596
tttttggggatt

SEQ ID NO: 299488 - DNA, 12 bp, Artificial Sequence
  Oligonucleotide primer for the detection of SNP TSC0018597
aaaccccgtaac

SEQ ID NO: 299489 - DNA, 12 bp, Artificial Sequence
  Oligonucleotide primer for the detection of SNP TSC0018597
gtttggttttag

SEQ ID NO: 299490 - DNA, 12 bp, Artificial Sequence
  Oligonucleotide primer for the detection of SNP TSC0018598
tcccatacaata

SEQ ID NO: 299491 - DNA, 12 bp, Artificial Sequence
  Oligonucleotide primer for the detection of SNP TSC0018598
tcccgtacaata

SEQ ID NO: 299492 - DNA, 12 bp, Artificial Sequence
  Oligonucleotide primer for the detection of SNP TSC0018598
tgagaggaaatt

SEQ ID NO: 299493 - DNA, 12 bp, Artificial Sequence
  Oligonucleotide primer for the detection of SNP TSC0018598
ttttgtatagtg

SEQ ID NO: 299494 - DNA, 12 bp, Artificial Sequence
  Oligonukleotid-Primer
tttcgtatagtg

SEQ ID NO: 299495 - DNA, 12 bp, Artificial Sequence
  Oligonucleotide primer for the detection of SNP TSC0018604
aaatcccactta

SEQ ID NO: 299496 - DNA, 12 bp, Artificial Sequence
  Oligonucleotide primer for the detection of SNP TSC0018604
atctcctctacc

SEQ ID NO: 299497 - DNA, 12 bp, Artificial Sequence
  Oligonucleotide primer for the detection of SNP TSC0018604
aaattttatttg

SEQ ID NO: 299498 - DNA, 12 bp, Artificial Sequence
  Oligonukleotid-Primer
cacacactcaca

SEQ ID NO: 299499 - DNA, 12 bp, Artificial Sequence
  Oligonucleotide primer for the detection of SNP TSC0018605
cacacactcacg

SEQ ID NO: 299500 - DNA, 12 bp, Artificial Sequence
  Oligonucleotide primer for the detection of SNP TSC0018605
cacacgctcaca

SEQ ID NO: 299501 - DNA, 12 bp, Artificial Sequence
  Oligonucleotide primer for the detection of SNP TSC0018605
cacacgctcacg

SEQ ID NO: 299502 - DNA, 12 bp, Artificial Sequence
  Oligonucleotide primer for the detection of SNP TSC0018605
gttttagtttta

SEQ ID NO: 299503 - DNA, 12 bp, Artificial Sequence
  Oligonucleotide primer for the detection of SNP TSC0018605
attttaatctca

SEQ ID NO: 299504 - DNA, 12 bp, Artificial Sequence
  Oligonucleotide primer for the detection of SNP TSC0018605
atatgtttatgt

SEQ ID NO: 299505 - DNA, 12 bp, Artificial Sequence
  Oligonucleotide primer for the detection of SNP TSC0018605
atacgtttatgt

SEQ ID NO: 299506 - DNA, 12 bp, Artificial Sequence
  Oligonucleotide primer for the detection of SNP TSC0018605
atatgtttacgt

SEQ ID NO: 299507 - DNA, 12 bp, Artificial Sequence
  Oligonucleotide primer for the detection of SNP TSC0018605
atacgtttacgt

SEQ ID NO: 299508 - DNA, 12 bp, Artificial Sequence
  Oligonucleotide primer for the detection of SNP TSC0018606
ttcacaaaataa

SEQ ID NO: 299509 - DNA, 12 bp, Artificial Sequence
  Oligonucleotide primer for the detection of SNP TSC0018606
ttttttgttggt

SEQ ID NO: 299510 - DNA, 12 bp, Artificial Sequence
  Oligonucleotide primer for the detection of SNP TSC0018606
ctctctattaat

SEQ ID NO: 299511 - DNA, 12 bp, Artificial Sequence
  Oligonucleotide primer for the detection of SNP TSC0018607
catcttcatctc

SEQ ID NO: 299512 - DNA, 12 bp, Artificial Sequence
  Oligonucleotide primer for the detection of SNP TSC0018608
cacttcaataaa

SEQ ID NO: 299513 - DNA, 12 bp, Artificial Sequence
  Oligonucleotide primer for the detection of SNP TSC0018608
cacttcgataaa

SEQ ID NO: 299514 - DNA, 12 bp, Artificial Sequence
  Oligonucleotide primer for the detection of SNP TSC0018608
cgcttcaataaa

SEQ ID NO: 299515 - DNA, 12 bp, Artificial Sequence
  Oligonucleotide primer for the detection of SNP TSC0018608
cgcttcgataaa

SEQ ID NO: 299516 - DNA, 12 bp, Artificial Sequence
  Oligonucleotide primer for the detection of SNP TSC0018608
atatgtttaagt

SEQ ID NO: 299517 - DNA, 12 bp, Artificial Sequence
  Oligonucleotide primer for the detection of SNP TSC0018608
acatatccaaat

SEQ ID NO: 299518 - DNA, 12 bp, Artificial Sequence
  Oligonucleotide primer for the detection of SNP TSC0018608
tgttttggtgga

SEQ ID NO: 299519 - DNA, 12 bp, Artificial Sequence
  Oligonucleotide primer for the detection of SNP TSC0018608
cgttttggtgga

SEQ ID NO: 299520 - DNA, 12 bp, Artificial Sequence
  Oligonucleotide primer for the detection of SNP TSC0018608
tgtttcggtgga

SEQ ID NO: 299521 - DNA, 12 bp, Artificial Sequence
  Oligonucleotide primer for the detection of SNP TSC0018608
cgtttcggtgga

SEQ ID NO: 299522 - DNA, 12 bp, Artificial Sequence
  Oligonucleotide primer for the detection of SNP TSC0018611
caaaattaacac

SEQ ID NO: 299523 - DNA, 12 bp, Artificial Sequence
  Oligonucleotide primer for the detection of SNP TSC0018611
ggaagtttgtgt

SEQ ID NO: 299524 - DNA, 12 bp, Artificial Sequence
  Oligonucleotide primer for the detection of SNP TSC0018611
aaaaacctatac

SEQ ID NO: 299525 - DNA, 12 bp, Artificial Sequence
  Oligonucleotide primer for the detection of SNP TSC0018611
tagagttggtat

SEQ ID NO: 299526 - DNA, 12 bp, Artificial Sequence
  Oligonucleotide primer for the detection of SNP TSC0018613
tccttcatcaca

SEQ ID NO: 299527 - DNA, 12 bp, Artificial Sequence
  Oligonucleotide primer for the detection of SNP TSC0018613
tataaagggaag

SEQ ID NO: 299528 - DNA, 12 bp, Artificial Sequence
  Oligonucleotide primer for the detection of SNP TSC0018615
attcttcttaaa

SEQ ID NO: 299529 - DNA, 12 bp, Artificial Sequence
  Oligonucleotide primer for the detection of SNP TSC0018615
agaattaagaaa

SEQ ID NO: 299530 - DNA, 12 bp, Artificial Sequence
  Oligonucleotide primer for the detection of SNP TSC0018616
ccaaaaatttaa

SEQ ID NO: 299531 - DNA, 12 bp, Artificial Sequence
  Oligonucleotide primer for the detection of SNP TSC0018616
gtaataggattt

SEQ ID NO: 299532 - DNA, 12 bp, Artificial Sequence
  Oligonucleotide primer for the detection of SNP TSC0018616
caacaaaaccta

SEQ ID NO: 299533 - DNA, 12 bp, Artificial Sequence
  Oligonucleotide primer for the detection of SNP TSC0018616
tagggatttggt

SEQ ID NO: 299534 - DNA, 12 bp, Artificial Sequence
  Oligonucleotide primer for the detection of SNP TSC0018617
ggtttaggtaat

SEQ ID NO: 299535 - DNA, 12 bp, Artificial Sequence
  Oligonucleotide primer for the detection of SNP TSC0018617
aaacccaaacaa

SEQ ID NO: 299536 - DNA, 12 bp, Artificial Sequence
  Oligonucleotide primer for the detection of SNP TSC0018617
ttatttatagga

SEQ ID NO: 299537 - DNA, 12 bp, Artificial Sequence
  Oligonucleotide primer for the detection of SNP TSC0018618
tagggtgggtta

SEQ ID NO: 299538 - DNA, 12 bp, Artificial Sequence
  Oligonucleotide primer for the detection of SNP TSC0018618
caaaataaacca

SEQ ID NO: 299539 - DNA, 12 bp, Artificial Sequence
  Oligonucleotide primer for the detection of SNP TSC0018618
gggaaggtaggt

SEQ ID NO: 299540 - DNA, 12 bp, Artificial Sequence
  Oligonucleotide primer for the detection of SNP TSC0018619
ttaaaatactac

SEQ ID NO: 299541 - DNA, 12 bp, Artificial Sequence
  Oligonucleotide primer for the detection of SNP TSC0018619
ggaggaaagtgg

SEQ ID NO: 299542 - DNA, 12 bp, Artificial Sequence
  Oligonucleotide primer for the detection of SNP TSC0018620
ttacctaaatat

SEQ ID NO: 299543 - DNA, 12 bp, Artificial Sequence
  Oligonucleotide primer for the detection of SNP TSC0018620
tatttatagtaa

SEQ ID NO: 299544 - DNA, 12 bp, Artificial Sequence
  Oligonucleotide primer for the detection of SNP TSC0018625
aatatcaaaaat

SEQ ID NO: 299545 - DNA, 12 bp, Artificial Sequence
  Oligonucleotide primer for the detection of SNP TSC0018625
tggtttaaggag

SEQ ID NO: 299546 - DNA, 12 bp, Artificial Sequence
  Oligonucleotide primer for the detection of SNP TSC0018626
taaaataaaata

SEQ ID NO: 299547 - DNA, 12 bp, Artificial Sequence
  Oligonucleotide primer for the detection of SNP TSC0018626
attggttgtttt

SEQ ID NO: 299548 - DNA, 12 bp, Artificial Sequence
  Oligonucleotide primer for the detection of SNP TSC0018626
actaactacctc

SEQ ID NO: 299549 - DNA, 12 bp, Artificial Sequence
  Oligonucleotide primer for the detection of SNP TSC0018626
tggagtggggtg

SEQ ID NO: 299550 - DNA, 12 bp, Artificial Sequence
  Oligonucleotide primer for the detection of SNP TSC0018627
cttcaacaaatc

SEQ ID NO: 299551 - DNA, 12 bp, Artificial Sequence
  Oligonucleotide primer for the detection of SNP TSC0018627
cttcaacgaatc

SEQ ID NO: 299552 - DNA, 12 bp, Artificial Sequence
  Oligonucleotide primer for the detection of SNP TSC0018627
gatggatattta

SEQ ID NO: 299553 - DNA, 12 bp, Artificial Sequence
  Oligonucleotide primer for the detection of SNP TSC0018628
aatacaatttac

SEQ ID NO: 299554 - DNA, 12 bp, Artificial Sequence
  Oligonucleotide primer for the detection of SNP TSC0018628
ttgagtagtaag

SEQ ID NO: 299555 - DNA, 12 bp, Artificial Sequence
  Oligonucleotide primer for the detection of SNP TSC0018628
atgtagtttgtt

SEQ ID NO: 299556 - DNA, 12 bp, Artificial Sequence
  Oligonucleotide primer for the detection of SNP TSC0018629
atacaaacaaat

SEQ ID NO: 299557 - DNA, 12 bp, Artificial Sequence
  Oligonucleotide primer for the detection of SNP TSC0018629
taggttttagaa

SEQ ID NO: 299558 - DNA, 12 bp, Artificial Sequence
  Oligonucleotide primer for the detection of SNP TSC0018632
ctcatataccta

SEQ ID NO: 299559 - DNA, 12 bp, Artificial Sequence
  Oligonucleotide primer for the detection of SNP TSC0018632
ctcgtataccta

SEQ ID NO: 299560 - DNA, 12 bp, Artificial Sequence
  Oligonucleotide primer for the detection of SNP TSC0018632
agtaataataat

SEQ ID NO: 299561 - DNA, 12 bp, Artificial Sequence
  Oligonucleotide primer for the detection of SNP TSC0018632
ataacaacaata

SEQ ID NO: 299562 - DNA, 12 bp, Artificial Sequence
  Oligonucleotide primer for the detection of SNP TSC0018632
tttgtgtgttta

SEQ ID NO: 299563 - DNA, 12 bp, Artificial Sequence
  Oligonucleotide primer for the detection of SNP TSC0018632
ttcgtgtgttta

SEQ ID NO: 299564 - DNA, 12 bp, Artificial Sequence
  Oligonucleotide primer for the detection of SNP TSC0018633
aaaaaaacccaa

SEQ ID NO: 299565 - DNA, 12 bp, Artificial Sequence
  Oligonucleotide primer for the detection of SNP TSC0018633
gttgagattagt

SEQ ID NO: 299566 - DNA, 12 bp, Artificial Sequence
  Oligonucleotide primer for the detection of SNP TSC0018633
aactaaaaccaa

SEQ ID NO: 299567 - DNA, 12 bp, Artificial Sequence
  Oligonukleotid-Primer
aagggagattta

SEQ ID NO: 299568 - DNA, 12 bp, Artificial Sequence
  Oligonucleotide primer for the detection of SNP TSC0018634
ttttcaaatcct

SEQ ID NO: 299569 - DNA, 12 bp, Artificial Sequence
  Oligonucleotide primer for the detection of SNP TSC0018634
aagtggagggtg

SEQ ID NO: 299570 - DNA, 12 bp, Artificial Sequence
  Oligonucleotide primer for the detection of SNP TSC0018634
aagtggagggcg

SEQ ID NO: 299571 - DNA, 12 bp, Artificial Sequence
  Oligonukleotid-Primer
aaattatataaa

SEQ ID NO: 299572 - DNA, 12 bp, Artificial Sequence
  Oligonucleotide primer for the detection of SNP TSC0018635
ataatttcggtt

SEQ ID NO: 299573 - DNA, 12 bp, Artificial Sequence
  Oligonucleotide primer for the detection of SNP TSC0018635
acaatcccaact

SEQ ID NO: 299574 - DNA, 12 bp, Artificial Sequence
  Oligonucleotide primer for the detection of SNP TSC0018635
acaatcccgact

SEQ ID NO: 299575 - DNA, 12 bp, Artificial Sequence
  Oligonucleotide primer for the detection of SNP TSC0018635
gggttgtgtgga

SEQ ID NO: 299576 - DNA, 12 bp, Artificial Sequence
  Oligonucleotide primer for the detection of SNP TSC0018638
taaaacaaatat

SEQ ID NO: 299577 - DNA, 12 bp, Artificial Sequence
  Oligonucleotide primer for the detection of SNP TSC0018638
agtattgatggg

SEQ ID NO: 299578 - DNA, 12 bp, Artificial Sequence
  Oligonucleotide primer for the detection of SNP TSC0018638
agtatcgatggg

SEQ ID NO: 299579 - DNA, 12 bp, Artificial Sequence
  Oligonucleotide primer for the detection of SNP TSC0018638
aacatcaataaa

SEQ ID NO: 299580 - DNA, 12 bp, Artificial Sequence
  Oligonucleotide primer for the detection of SNP TSC0018638
aacatcgataaa

SEQ ID NO: 299581 - DNA, 12 bp, Artificial Sequence
  Oligonucleotide primer for the detection of SNP TSC0018638
tgggataaatgt

SEQ ID NO: 299582 - DNA, 12 bp, Artificial Sequence
  Oligonucleotide primer for the detection of SNP TSC0018639
actctcaaaaat

SEQ ID NO: 299583 - DNA, 12 bp, Artificial Sequence
  Oligonucleotide primer for the detection of SNP TSC0018639
gttttatattta

SEQ ID NO: 299584 - DNA, 12 bp, Artificial Sequence
  Oligonucleotide primer for the detection of SNP TSC0018642
tcataccaatcc

SEQ ID NO: 299585 - DNA, 12 bp, Artificial Sequence
  Oligonucleotide primer for the detection of SNP TSC0018642
tgtgtgggaggg

SEQ ID NO: 299586 - DNA, 12 bp, Artificial Sequence
  Oligonucleotide primer for the detection of SNP TSC0018643
taaaaaaactaa

SEQ ID NO: 299587 - DNA, 12 bp, Artificial Sequence
  Oligonucleotide primer for the detection of SNP TSC0018643
atttttttatat

SEQ ID NO: 299588 - DNA, 12 bp, Artificial Sequence
  Oligonucleotide primer for the detection of SNP TSC0018643
caccctcccaca

SEQ ID NO: 299589 - DNA, 12 bp, Artificial Sequence
  Oligonucleotide primer for the detection of SNP TSC0018643
ggtaggggagtt

SEQ ID NO: 299590 - DNA, 12 bp, Artificial Sequence
  Oligonucleotide primer for the detection of SNP TSC0018644
cacacaccaact

SEQ ID NO: 299591 - DNA, 12 bp, Artificial Sequence
  Oligonucleotide primer for the detection of SNP TSC0018644
agtatggtaggg

SEQ ID NO: 299592 - DNA, 12 bp, Artificial Sequence
  Oligonucleotide primer for the detection of SNP TSC0018645
cccattaaatcc

SEQ ID NO: 299593 - DNA, 12 bp, Artificial Sequence
  Oligonucleotide primer for the detection of SNP TSC0018645
aggagaaagagg

SEQ ID NO: 299594 - DNA, 12 bp, Artificial Sequence
  Oligonucleotide primer for the detection of SNP TSC0018645
tttattgaattt

SEQ ID NO: 299595 - DNA, 12 bp, Artificial Sequence
  Oligonucleotide primer for the detection of SNP TSC0018646
ctctaatcaaaa

SEQ ID NO: 299596 - DNA, 12 bp, Artificial Sequence
  Oligonucleotide primer for the detection of SNP TSC0018646
tttatatgtaga

SEQ ID NO: 299597 - DNA, 12 bp, Artificial Sequence
  Oligonucleotide primer for the detection of SNP TSC0018646
ccacatacaaaa

SEQ ID NO: 299598 - DNA, 12 bp, Artificial Sequence
  Oligonucleotide primer for the detection of SNP TSC0018646
ttttaattaaga

SEQ ID NO: 299599 - DNA, 12 bp, Artificial Sequence
  Oligonucleotide primer for the detection of SNP TSC0018647
aacaactcctcc

SEQ ID NO: 299600 - DNA, 12 bp, Artificial Sequence
  Oligonucleotide primer for the detection of SNP TSC0018647
agattgagtttg

SEQ ID NO: 299601 - DNA, 12 bp, Artificial Sequence
  Oligonucleotide primer for the detection of SNP TSC0018647
aactaaatctaa

SEQ ID NO: 299602 - DNA, 12 bp, Artificial Sequence
  Oligonucleotide primer for the detection of SNP TSC0018647
aatagttttttt

SEQ ID NO: 299603 - DNA, 12 bp, Artificial Sequence
  Oligonucleotide primer for the detection of SNP TSC0018648
aaaaataactac

SEQ ID NO: 299604 - DNA, 12 bp, Artificial Sequence
  Oligonucleotide primer for the detection of SNP TSC0018649
tacttaaccctc

SEQ ID NO: 299605 - DNA, 12 bp, Artificial Sequence
  Oligonucleotide primer for the detection of SNP TSC0018649
gaagaagtttta

SEQ ID NO: 299606 - DNA, 12 bp, Artificial Sequence
  Oligonucleotide primer for the detection of SNP TSC0018650
ggtttttttttt

SEQ ID NO: 299607 - DNA, 12 bp, Artificial Sequence
  Oligonucleotide primer for the detection of SNP TSC0018650
aaaccttttctc

SEQ ID NO: 299608 - DNA, 12 bp, Artificial Sequence
  Oligonucleotide primer for the detection of SNP TSC0018650
ggttggagagag

SEQ ID NO: 299609 - DNA, 12 bp, Artificial Sequence
  Oligonucleotide primer for the detection of SNP TSC0018652
atttttatataa

SEQ ID NO: 299610 - DNA, 12 bp, Artificial Sequence
  Oligonucleotide primer for the detection of SNP TSC0018652
atccctacacaa

SEQ ID NO: 299611 - DNA, 12 bp, Artificial Sequence
  Oligonucleotide primer for the detection of SNP TSC0018652
taaaataaaatt

SEQ ID NO: 299612 - DNA, 12 bp, Artificial Sequence
  Oligonucleotide primer for the detection of SNP TSC0018653
tctcccatctat

SEQ ID NO: 299613 - DNA, 12 bp, Artificial Sequence
  Oligonucleotide primer for the detection of SNP TSC0018653
ggtttttaggag

SEQ ID NO: 299614 - DNA, 12 bp, Artificial Sequence
  Oligonucleotide primer for the detection of SNP TSC0018655
tatctataaact

SEQ ID NO: 299615 - DNA, 12 bp, Artificial Sequence
  Oligonucleotide primer for the detection of SNP TSC0018655
gagaagggagga

SEQ ID NO: 299616 - DNA, 12 bp, Artificial Sequence
  Oligonucleotide primer for the detection of SNP TSC0018655
tgtttgtaagtt

SEQ ID NO: 299617 - DNA, 12 bp, Artificial Sequence
  Oligonucleotide primer for the detection of SNP TSC0018656
tcctcaccctcc

SEQ ID NO: 299618 - DNA, 12 bp, Artificial Sequence
  Oligonucleotide primer for the detection of SNP TSC0018656
ttaagagtagag

SEQ ID NO: 299619 - DNA, 12 bp, Artificial Sequence
  Oligonucleotide primer for the detection of SNP TSC0018657
ttaaaaccccta

SEQ ID NO: 299620 - DNA, 12 bp, Artificial Sequence
  Oligonucleotide primer for the detection of SNP TSC0018657
attaatttaagt

SEQ ID NO: 299621 - DNA, 12 bp, Artificial Sequence
  Oligonucleotide primer for the detection of SNP TSC0018657
atcaacccaaat

SEQ ID NO: 299622 - DNA, 12 bp, Artificial Sequence
  Oligonucleotide primer for the detection of SNP TSC0018657
tttgaagttttt

SEQ ID NO: 299623 - DNA, 12 bp, Artificial Sequence
  Oligonucleotide primer for the detection of SNP TSC0018658
taaaacctaaaa

SEQ ID NO: 299624 - DNA, 12 bp, Artificial Sequence
  Oligonucleotide primer for the detection of SNP TSC0018658
gtgggtttagtt

SEQ ID NO: 299625 - DNA, 12 bp, Artificial Sequence
  Oligonucleotide primer for the detection of SNP TSC0018658
aaataaattcaa

SEQ ID NO: 299626 - DNA, 12 bp, Artificial Sequence
  Oligonucleotide primer for the detection of SNP TSC0018658
ggaatttgggat

SEQ ID NO: 299627 - DNA, 12 bp, Artificial Sequence
  Oligonucleotide primer for the detection of SNP TSC0018658
ggaatttgggac

SEQ ID NO: 299628 - DNA, 12 bp, Artificial Sequence
  Oligonucleotide primer for the detection of SNP TSC0018659
cacaaatatccc

SEQ ID NO: 299629 - DNA, 12 bp, Artificial Sequence
  Oligonucleotide primer for the detection of SNP TSC0018659
tatggaaatttg

SEQ ID NO: 299630 - DNA, 12 bp, Artificial Sequence
  Oligonucleotide primer for the detection of SNP TSC0018659
tacggaaatttg

SEQ ID NO: 299631 - DNA, 12 bp, Artificial Sequence
  Oligonucleotide primer for the detection of SNP TSC0018659
tacaaaaaccta

SEQ ID NO: 299632 - DNA, 12 bp, Artificial Sequence
  Oligonucleotide primer for the detection of SNP TSC0018659
tacgaaaaccta

SEQ ID NO: 299633 - DNA, 12 bp, Artificial Sequence
  Oligonucleotide primer for the detection of SNP TSC0018659
tataggtatttt

SEQ ID NO: 299634 - DNA, 12 bp, Artificial Sequence
  Oligonucleotide primer for the detection of SNP TSC0018660
ttataataacac

SEQ ID NO: 299635 - DNA, 12 bp, Artificial Sequence
  Oligonucleotide primer for the detection of SNP TSC0018660
atttgtatggga

SEQ ID NO: 299636 - DNA, 12 bp, Artificial Sequence
  Oligonucleotide primer for the detection of SNP TSC0018661
aacatacttttt

SEQ ID NO: 299637 - DNA, 12 bp, Artificial Sequence
  Oligonucleotide primer for the detection of SNP TSC0018661
aacgtacttttt

SEQ ID NO: 299638 - DNA, 12 bp, Artificial Sequence
  Oligonucleotide primer for the detection of SNP TSC0018661
tatgaatatata

SEQ ID NO: 299639 - DNA, 12 bp, Artificial Sequence
  Oligonucleotide primer for the detection of SNP TSC0018661
cataaacacaca

SEQ ID NO: 299640 - DNA, 12 bp, Artificial Sequence
  Oligonucleotide primer for the detection of SNP TSC0018661
aatgtgtttttt

SEQ ID NO: 299641 - DNA, 12 bp, Artificial Sequence
  Oligonucleotide primer for the detection of SNP TSC0018661
aacgtgtttttt

SEQ ID NO: 299642 - DNA, 12 bp, Artificial Sequence
  Oligonucleotide primer for the detection of SNP TSC0018662
aaaatttcgaaa

SEQ ID NO: 299643 - DNA, 12 bp, Artificial Sequence
  Oligonucleotide primer for the detection of SNP TSC0018662
gttaaggaaaat

SEQ ID NO: 299644 - DNA, 12 bp, Artificial Sequence
  Oligonucleotide primer for the detection of SNP TSC0018662
actaaaaaaaac

SEQ ID NO: 299645 - DNA, 12 bp, Artificial Sequence
  Oligonucleotide primer for the detection of SNP TSC0018662
gaaattttggaa

SEQ ID NO: 299646 - DNA, 12 bp, Artificial Sequence
  Oligonucleotide primer for the detection of SNP TSC0018662
gaaatttcggaa

SEQ ID NO: 299647 - DNA, 12 bp, Artificial Sequence
  Oligonucleotide primer for the detection of SNP TSC0018663
aaaatttcttct

SEQ ID NO: 299648 - DNA, 12 bp, Artificial Sequence
  Oligonukleotid-Primer
gaaatttcttct

SEQ ID NO: 299649 - DNA, 12 bp, Artificial Sequence
  Oligonucleotide primer for the detection of SNP TSC0018664
ttattttgtttt

SEQ ID NO: 299650 - DNA, 12 bp, Artificial Sequence
  Oligonucleotide primer for the detection of SNP TSC0018664
ctaccctatctt

SEQ ID NO: 299651 - DNA, 12 bp, Artificial Sequence
  Oligonucleotide primer for the detection of SNP TSC0018664
ggttgggagtta

SEQ ID NO: 299652 - DNA, 12 bp, Artificial Sequence
  Oligonukleotid-Primer
acaaaacccaaa

SEQ ID NO: 299653 - DNA, 12 bp, Artificial Sequence
  Oligonucleotide primer for the detection of SNP TSC0018665
tagagaagtttt

SEQ ID NO: 299654 - DNA, 12 bp, Artificial Sequence
  Oligonucleotide primer for the detection of SNP TSC0018665
ccaaaaaaaccc

SEQ ID NO: 299655 - DNA, 12 bp, Artificial Sequence
  Oligonucleotide primer for the detection of SNP TSC0018665
taaataaggttt

SEQ ID NO: 299656 - DNA, 12 bp, Artificial Sequence
  Oligonucleotide primer for the detection of SNP TSC0018668
tttctaacaaat

SEQ ID NO: 299657 - DNA, 12 bp, Artificial Sequence
  Oligonucleotide primer for the detection of SNP TSC0018668
tgtagtagataa

SEQ ID NO: 299658 - DNA, 12 bp, Artificial Sequence
  Oligonucleotide primer for the detection of SNP TSC0018669
aatattttttta

SEQ ID NO: 299659 - DNA, 12 bp, Artificial Sequence
  Oligonucleotide primer for the detection of SNP TSC0018669
ttttatattgtt

SEQ ID NO: 299660 - DNA, 12 bp, Artificial Sequence
  Oligonucleotide primer for the detection of SNP TSC0018669
ttttcacattac

SEQ ID NO: 299661 - DNA, 12 bp, Artificial Sequence
  Oligonucleotide primer for the detection of SNP TSC0018669
aggtattttttt

SEQ ID NO: 299662 - DNA, 12 bp, Artificial Sequence
  Oligonucleotide primer for the detection of SNP TSC0018670
taaaatatacct

SEQ ID NO: 299663 - DNA, 12 bp, Artificial Sequence
  Oligonucleotide primer for the detection of SNP TSC0018670
gtaaaggggaag

SEQ ID NO: 299664 - DNA, 12 bp, Artificial Sequence
  Oligonucleotide primer for the detection of SNP TSC0018670
taagatgtgttt

SEQ ID NO: 299665 - DNA, 12 bp, Artificial Sequence
  Oligonucleotide primer for the detection of SNP TSC0018671
caatctttctaa

SEQ ID NO: 299666 - DNA, 12 bp, Artificial Sequence
  Oligonucleotide primer for the detection of SNP TSC0018671
attttgggttat

SEQ ID NO: 299667 - DNA, 12 bp, Artificial Sequence
  Oligonucleotide primer for the detection of SNP TSC0018671
attttgggttac

SEQ ID NO: 299668 - DNA, 12 bp, Artificial Sequence
  Oligonucleotide primer for the detection of SNP TSC0018671
aaccttaaacta

SEQ ID NO: 299669 - DNA, 12 bp, Artificial Sequence
  Oligonucleotide primer for the detection of SNP TSC0018671
tgtaattttttt

SEQ ID NO: 299670 - DNA, 12 bp, Artificial Sequence
  Oligonucleotide primer for the detection of SNP TSC0018674
cttctctacccc

SEQ ID NO: 299671 - DNA, 12 bp, Artificial Sequence
  Oligonucleotide primer for the detection of SNP TSC0018674
aatttattgttg

SEQ ID NO: 299672 - DNA, 12 bp, Artificial Sequence
  Oligonucleotide primer for the detection of SNP TSC0018676
acaatcaaaaat

SEQ ID NO: 299673 - DNA, 12 bp, Artificial Sequence
  Oligonucleotide primer for the detection of SNP TSC0018676
gtgggtgtgttg

SEQ ID NO: 299674 - DNA, 12 bp, Artificial Sequence
  Oligonucleotide primer for the detection of SNP TSC0018676
gtgggcgtgttg

SEQ ID NO: 299675 - DNA, 12 bp, Artificial Sequence
  Oligonucleotide primer for the detection of SNP TSC0018677
cccataaaaaac

SEQ ID NO: 299676 - DNA, 12 bp, Artificial Sequence
  Oligonucleotide primer for the detection of SNP TSC0018677
atatttagttta

SEQ ID NO: 299677 - DNA, 12 bp, Artificial Sequence
  Oligonucleotide primer for the detection of SNP TSC0018678
atccctaccaac

SEQ ID NO: 299678 - DNA, 12 bp, Artificial Sequence
  Oligonucleotide primer for the detection of SNP TSC0018678
gtggaggttgaa

SEQ ID NO: 299679 - DNA, 12 bp, Artificial Sequence
  Oligonucleotide primer for the detection of SNP TSC0018681
aaccacatttac

SEQ ID NO: 299680 - DNA, 12 bp, Artificial Sequence
  Oligonucleotide primer for the detection of SNP TSC0018681
aagtaaatggga

SEQ ID NO: 299681 - DNA, 12 bp, Artificial Sequence
  Oligonucleotide primer for the detection of SNP TSC0018682
taaataacaatt

SEQ ID NO: 299682 - DNA, 12 bp, Artificial Sequence
  Oligonucleotide primer for the detection of SNP TSC0018682
gttgagatttta

SEQ ID NO: 299683 - DNA, 12 bp, Artificial Sequence
  Oligonucleotide primer for the detection of SNP TSC0018682
attaaaactcca

SEQ ID NO: 299684 - DNA, 12 bp, Artificial Sequence
  Oligonucleotide primer for the detection of SNP TSC0018682
agatgatagttt

SEQ ID NO: 299685 - DNA, 12 bp, Artificial Sequence
  Oligonucleotide primer for the detection of SNP TSC0018683
cacaaatacata

SEQ ID NO: 299686 - DNA, 12 bp, Artificial Sequence
  Oligonucleotide primer for the detection of SNP TSC0018683
atgttagtgtgg

SEQ ID NO: 299687 - DNA, 12 bp, Artificial Sequence
  Oligonucleotide primer for the detection of SNP TSC0018683
atatcaatataa

SEQ ID NO: 299688 - DNA, 12 bp, Artificial Sequence
  Oligonucleotide primer for the detection of SNP TSC0018683
taagtgtatgtt

SEQ ID NO: 299689 - DNA, 12 bp, Artificial Sequence
  Oligonucleotide primer for the detection of SNP TSC0018685
aaaaatcattac

SEQ ID NO: 299690 - DNA, 12 bp, Artificial Sequence
  Oligonucleotide primer for the detection of SNP TSC0018685
ctctttaatcca

SEQ ID NO: 299691 - DNA, 12 bp, Artificial Sequence
  Oligonucleotide primer for the detection of SNP TSC0018685
aggagttattat

SEQ ID NO: 299692 - DNA, 12 bp, Artificial Sequence
  Oligonucleotide primer for the detection of SNP TSC0018685
aggagttattac

SEQ ID NO: 299693 - DNA, 12 bp, Artificial Sequence
  Oligonucleotide primer for the detection of SNP TSC0018686
actactaaacct

SEQ ID NO: 299694 - DNA, 12 bp, Artificial Sequence
  Oligonucleotide primer for the detection of SNP TSC0018686
tttgtgatgtgt

SEQ ID NO: 299695 - DNA, 12 bp, Artificial Sequence
  Oligonucleotide primer for the detection of SNP TSC0018686
tttgtgatgcgt

SEQ ID NO: 299696 - DNA, 12 bp, Artificial Sequence
  Oligonucleotide primer for the detection of SNP TSC0018689
accatcccaccc

SEQ ID NO: 299697 - DNA, 12 bp, Artificial Sequence
  Oligonucleotide primer for the detection of SNP TSC0018689
accatcccgccc

SEQ ID NO: 299698 - DNA, 12 bp, Artificial Sequence
  Oligonucleotide primer for the detection of SNP TSC0018689
accgtcccaccc

SEQ ID NO: 299699 - DNA, 12 bp, Artificial Sequence
  Oligonucleotide primer for the detection of SNP TSC0018689
gccatcccaccc

SEQ ID NO: 299700 - DNA, 12 bp, Artificial Sequence
  Oligonucleotide primer for the detection of SNP TSC0018689
accgtcccgccc

SEQ ID NO: 299701 - DNA, 12 bp, Artificial Sequence
  Oligonucleotide primer for the detection of SNP TSC0018689
gccatcccgccc

SEQ ID NO: 299702 - DNA, 12 bp, Artificial Sequence
  Oligonucleotide primer for the detection of SNP TSC0018689
gccgtcccaccc

SEQ ID NO: 299703 - DNA, 12 bp, Artificial Sequence
  Oligonucleotide primer for the detection of SNP TSC0018689
gccgtcccgccc

SEQ ID NO: 299704 - DNA, 12 bp, Artificial Sequence
  Oligonucleotide primer for the detection of SNP TSC0018690
taactatcacac

SEQ ID NO: 299705 - DNA, 12 bp, Artificial Sequence
  Oligonucleotide primer for the detection of SNP TSC0018690
taactatcacgc

SEQ ID NO: 299706 - DNA, 12 bp, Artificial Sequence
  Oligonucleotide primer for the detection of SNP TSC0018690
tggttttggtta

SEQ ID NO: 299707 - DNA, 12 bp, Artificial Sequence
  Oligonucleotide primer for the detection of SNP TSC0018690
cggttttggtta

SEQ ID NO: 299708 - DNA, 12 bp, Artificial Sequence
  Oligonucleotide primer for the detection of SNP TSC0018692
aaaccctttaat

SEQ ID NO: 299709 - DNA, 12 bp, Artificial Sequence
  Oligonucleotide primer for the detection of SNP TSC0018692
agtttgatgggg

SEQ ID NO: 299710 - DNA, 12 bp, Artificial Sequence
  Oligonucleotide primer for the detection of SNP TSC0018693
tattattcctct

SEQ ID NO: 299711 - DNA, 12 bp, Artificial Sequence
  Oligonucleotide primer for the detection of SNP TSC0018693
tttatggtaata

SEQ ID NO: 299712 - DNA, 12 bp, Artificial Sequence
  Oligonucleotide primer for the detection of SNP TSC0018694
taacaaaaaaac

SEQ ID NO: 299713 - DNA, 12 bp, Artificial Sequence
  Oligonucleotide primer for the detection of SNP TSC0018695
taccctccatcc

SEQ ID NO: 299714 - DNA, 12 bp, Artificial Sequence
  Oligonucleotide primer for the detection of SNP TSC0018696
ggttaggggagg

SEQ ID NO: 299715 - DNA, 12 bp, Artificial Sequence
  Oligonucleotide primer for the detection of SNP TSC0018696
gtggaatagaat

SEQ ID NO: 299716 - DNA, 12 bp, Artificial Sequence
  Oligonucleotide primer for the detection of SNP TSC0018702
cccaaatctccc

SEQ ID NO: 299717 - DNA, 12 bp, Artificial Sequence
  Oligonucleotide primer for the detection of SNP TSC0018702
atatgggaggtg

SEQ ID NO: 299718 - DNA, 12 bp, Artificial Sequence
  Oligonucleotide primer for the detection of SNP TSC0018702
atacgggaggtg

SEQ ID NO: 299719 - DNA, 12 bp, Artificial Sequence
  Oligonucleotide primer for the detection of SNP TSC0018703
aaacaccaccaa

SEQ ID NO: 299720 - DNA, 12 bp, Artificial Sequence
  Oligonucleotide primer for the detection of SNP TSC0018703
aaacaccgccaa

SEQ ID NO: 299721 - DNA, 12 bp, Artificial Sequence
  Oligonucleotide primer for the detection of SNP TSC0018703
tacactttctac

SEQ ID NO: 299722 - DNA, 12 bp, Artificial Sequence
  Oligonucleotide primer for the detection of SNP TSC0018703
gagtattgttaa

SEQ ID NO: 299723 - DNA, 12 bp, Artificial Sequence
  Oligonucleotide primer for the detection of SNP TSC0018703
gagtatcgttaa

SEQ ID NO: 299724 - DNA, 12 bp, Artificial Sequence
  Oligonucleotide primer for the detection of SNP TSC0018704
aacaaactaaaa

SEQ ID NO: 299725 - DNA, 12 bp, Artificial Sequence
  Oligonucleotide primer for the detection of SNP TSC0018704
aacgaactaaaa

SEQ ID NO: 299726 - DNA, 12 bp, Artificial Sequence
  Oligonucleotide primer for the detection of SNP TSC0018704
aaggtagaaagg

SEQ ID NO: 299727 - DNA, 12 bp, Artificial Sequence
  Oligonucleotide primer for the detection of SNP TSC0018704
gtgagttggggt

SEQ ID NO: 299728 - DNA, 12 bp, Artificial Sequence
  Oligonucleotide primer for the detection of SNP TSC0018704
gcgagttggggt

SEQ ID NO: 299729 - DNA, 12 bp, Artificial Sequence
  Oligonucleotide primer for the detection of SNP TSC0018705
ctctttccccct

SEQ ID NO: 299730 - DNA, 12 bp, Artificial Sequence
  Oligonucleotide primer for the detection of SNP TSC0018705
ggaggaaggagg

SEQ ID NO: 299731 - DNA, 12 bp, Artificial Sequence
  Oligonucleotide primer for the detection of SNP TSC0018709
tatatcaaaaac

SEQ ID NO: 299732 - DNA, 12 bp, Artificial Sequence
  Oligonucleotide primer for the detection of SNP TSC0018709
aattagatgaaa

SEQ ID NO: 299733 - DNA, 12 bp, Artificial Sequence
  Oligonucleotide primer for the detection of SNP TSC0018712
aaatcccgaaat

SEQ ID NO: 299734 - DNA, 12 bp, Artificial Sequence
  Oligonucleotide primer for the detection of SNP TSC0018712
agagggtatgag

SEQ ID NO: 299735 - DNA, 12 bp, Artificial Sequence
  Oligonucleotide primer for the detection of SNP TSC0018712
aggttttgaaat

SEQ ID NO: 299736 - DNA, 12 bp, Artificial Sequence
  Oligonucleotide primer for the detection of SNP TSC0018712
aggtttcgaaat

SEQ ID NO: 299737 - DNA, 12 bp, Artificial Sequence
  Oligonucleotide primer for the detection of SNP TSC0018713
ctcaaatcatct

SEQ ID NO: 299738 - DNA, 12 bp, Artificial Sequence
  Oligonucleotide primer for the detection of SNP TSC0018713
gagatgatttga

SEQ ID NO: 299739 - DNA, 12 bp, Artificial Sequence
  Oligonucleotide primer for the detection of SNP TSC0018714
ttaacatttttc

SEQ ID NO: 299740 - DNA, 12 bp, Artificial Sequence
  Oligonucleotide primer for the detection of SNP TSC0018714
gataaatgttgg

SEQ ID NO: 299741 - DNA, 12 bp, Artificial Sequence
  Oligonucleotide primer for the detection of SNP TSC0018715
caacttaatttt

SEQ ID NO: 299742 - DNA, 12 bp, Artificial Sequence
  Oligonucleotide primer for the detection of SNP TSC0018715
ttttttaaaatg

SEQ ID NO: 299743 - DNA, 12 bp, Artificial Sequence
  Oligonucleotide primer for the detection of SNP TSC0018717
tcttatttatct

SEQ ID NO: 299744 - DNA, 12 bp, Artificial Sequence
  Oligonucleotide primer for the detection of SNP TSC0018717
ttgagtaaaata

SEQ ID NO: 299745 - DNA, 12 bp, Artificial Sequence
  Oligonucleotide primer for the detection of SNP TSC0018717
ctaaataaaata

SEQ ID NO: 299746 - DNA, 12 bp, Artificial Sequence
  Oligonucleotide primer for the detection of SNP TSC0018718
actccatttata

SEQ ID NO: 299747 - DNA, 12 bp, Artificial Sequence
  Oligonucleotide primer for the detection of SNP TSC0018718
ttaaaagaaatt

SEQ ID NO: 299748 - DNA, 12 bp, Artificial Sequence
  Oligonucleotide primer for the detection of SNP TSC0018719
attttttggata

SEQ ID NO: 299749 - DNA, 12 bp, Artificial Sequence
  Oligonucleotide primer for the detection of SNP TSC0018720
tattcttctata

SEQ ID NO: 299750 - DNA, 12 bp, Artificial Sequence
  Oligonucleotide primer for the detection of SNP TSC0018720
aaaggaggaaat

SEQ ID NO: 299751 - DNA, 12 bp, Artificial Sequence
  Oligonucleotide primer for the detection of SNP TSC0018721
ataaacaaaaat

SEQ ID NO: 299752 - DNA, 12 bp, Artificial Sequence
  Oligonucleotide primer for the detection of SNP TSC0018721
ttttattatttg

SEQ ID NO: 299753 - DNA, 12 bp, Artificial Sequence
  Oligonucleotide primer for the detection of SNP TSC0018722
tactaacatctt

SEQ ID NO: 299754 - DNA, 12 bp, Artificial Sequence
  Oligonucleotide primer for the detection of SNP TSC0018722
ttagaggggtga

SEQ ID NO: 299755 - DNA, 12 bp, Artificial Sequence
  Oligonucleotide primer for the detection of SNP TSC0018723
acctcttccaac

SEQ ID NO: 299756 - DNA, 12 bp, Artificial Sequence
  Oligonucleotide primer for the detection of SNP TSC0018723
tagtgtttgtgg

SEQ ID NO: 299757 - DNA, 12 bp, Artificial Sequence
  Oligonucleotide primer for the detection of SNP TSC0018724
ataaattaaatt

SEQ ID NO: 299758 - DNA, 12 bp, Artificial Sequence
  Oligonucleotide primer for the detection of SNP TSC0018724
taagttagattg

SEQ ID NO: 299759 - DNA, 12 bp, Artificial Sequence
  Oligonucleotide primer for the detection of SNP TSC0018725
gtttgtagttgt

SEQ ID NO: 299760 - DNA, 12 bp, Artificial Sequence
  Oligonucleotide primer for the detection of SNP TSC0018725
tttataactaca

SEQ ID NO: 299761 - DNA, 12 bp, Artificial Sequence
  Oligonucleotide primer for the detection of SNP TSC0018725
aaatgtgggagt

SEQ ID NO: 299762 - DNA, 12 bp, Artificial Sequence
  Oligonucleotide primer for the detection of SNP TSC0018726
cccctttatcct

SEQ ID NO: 299763 - DNA, 12 bp, Artificial Sequence
  Oligonucleotide primer for the detection of SNP TSC0018726
ttagttgaggaa

SEQ ID NO: 299764 - DNA, 12 bp, Artificial Sequence
  Oligonucleotide primer for the detection of SNP TSC0018726
ctaactaaaaaa

SEQ ID NO: 299765 - DNA, 12 bp, Artificial Sequence
  Oligonucleotide primer for the detection of SNP TSC0018727
aataatatacct

SEQ ID NO: 299766 - DNA, 12 bp, Artificial Sequence
  Oligonucleotide primer for the detection of SNP TSC0018727
aaatatattaaa

SEQ ID NO: 299767 - DNA, 12 bp, Artificial Sequence
  Oligonucleotide primer for the detection of SNP TSC0018735
caaaaaataata

SEQ ID NO: 299768 - DNA, 12 bp, Artificial Sequence
  Oligonucleotide primer for the detection of SNP TSC0018735
taaaaaataata

SEQ ID NO: 299769 - DNA, 12 bp, Artificial Sequence
  Oligonucleotide primer for the detection of SNP TSC0018736
tactactaaaaa

SEQ ID NO: 299770 - DNA, 12 bp, Artificial Sequence
  Oligonucleotide primer for the detection of SNP TSC0018736
tatatttgttgg

SEQ ID NO: 299771 - DNA, 12 bp, Artificial Sequence
  Oligonucleotide primer for the detection of SNP TSC0018736
tatatttgtcgg

SEQ ID NO: 299772 - DNA, 12 bp, Artificial Sequence
  Oligonucleotide primer for the detection of SNP TSC0018736
catatttatcaa

SEQ ID NO: 299773 - DNA, 12 bp, Artificial Sequence
  Oligonucleotide primer for the detection of SNP TSC0018736
catatttatcga

SEQ ID NO: 299774 - DNA, 12 bp, Artificial Sequence
  Oligonucleotide primer for the detection of SNP TSC0018736
tgttattaaaaa

SEQ ID NO: 299775 - DNA, 12 bp, Artificial Sequence
  Oligonucleotide primer for the detection of SNP TSC0018737
tacaaattttat

SEQ ID NO: 299776 - DNA, 12 bp, Artificial Sequence
  Oligonucleotide primer for the detection of SNP TSC0018737
gaaatatgtata

SEQ ID NO: 299777 - DNA, 12 bp, Artificial Sequence
  Oligonucleotide primer for the detection of SNP TSC0018738
taactttaaacc

SEQ ID NO: 299778 - DNA, 12 bp, Artificial Sequence
  Oligonucleotide primer for the detection of SNP TSC0018738
ttaggatttaaa

SEQ ID NO: 299779 - DNA, 12 bp, Artificial Sequence
  Oligonucleotide primer for the detection of SNP TSC0018740
caaatccaaccc

SEQ ID NO: 299780 - DNA, 12 bp, Artificial Sequence
  Oligonucleotide primer for the detection of SNP TSC0018740
ggtgaggttagg

SEQ ID NO: 299781 - DNA, 12 bp, Artificial Sequence
  Oligonucleotide primer for the detection of SNP TSC0018741
tataaaaaacat

SEQ ID NO: 299782 - DNA, 12 bp, Artificial Sequence
  Oligonucleotide primer for the detection of SNP TSC0018741
tataaaaaacgt

SEQ ID NO: 299783 - DNA, 12 bp, Artificial Sequence
  Oligonucleotide primer for the detection of SNP TSC0018741
agagatataaaa

SEQ ID NO: 299784 - DNA, 12 bp, Artificial Sequence
  Oligonucleotide primer for the detection of SNP TSC0018743
ccccaacaaaat

SEQ ID NO: 299785 - DNA, 12 bp, Artificial Sequence
  Oligonucleotide primer for the detection of SNP TSC0018743
gtttgtttttaa

SEQ ID NO: 299786 - DNA, 12 bp, Artificial Sequence
  Oligonucleotide primer for the detection of SNP TSC0018744
taaactctactt

SEQ ID NO: 299787 - DNA, 12 bp, Artificial Sequence
  Oligonucleotide primer for the detection of SNP TSC0018744
gagtagagggag

SEQ ID NO: 299788 - DNA, 12 bp, Artificial Sequence
  Oligonucleotide primer for the detection of SNP TSC0018745
aaactctacttc

SEQ ID NO: 299789 - DNA, 12 bp, Artificial Sequence
  Oligonucleotide primer for the detection of SNP TSC0018745
ggagtagaggga

SEQ ID NO: 299790 - DNA, 12 bp, Artificial Sequence
  Oligonucleotide primer for the detection of SNP TSC0018746
cttaaaatctaa

SEQ ID NO: 299791 - DNA, 12 bp, Artificial Sequence
  Oligonucleotide primer for the detection of SNP TSC0018746
tttttaaagtta

SEQ ID NO: 299792 - DNA, 12 bp, Artificial Sequence
  Oligonucleotide primer for the detection of SNP TSC0018746
ttcccaaaatca

SEQ ID NO: 299793 - DNA, 12 bp, Artificial Sequence
  Oligonucleotide primer for the detection of SNP TSC0018746
tttgagatttgg

SEQ ID NO: 299794 - DNA, 12 bp, Artificial Sequence
  Oligonucleotide primer for the detection of SNP TSC0018747
tctatcaaccac

SEQ ID NO: 299795 - DNA, 12 bp, Artificial Sequence
  Oligonucleotide primer for the detection of SNP TSC0018747
gatttatagaag

SEQ ID NO: 299796 - DNA, 12 bp, Artificial Sequence
  Oligonucleotide primer for the detection of SNP TSC0018749
ctcctaaaaaaa

SEQ ID NO: 299797 - DNA, 12 bp, Artificial Sequence
  Oligonucleotide primer for the detection of SNP TSC0018749
gattatttgagt

SEQ ID NO: 299798 - DNA, 12 bp, Artificial Sequence
  Oligonucleotide primer for the detection of SNP TSC0018749
aaccatttaaac

SEQ ID NO: 299799 - DNA, 12 bp, Artificial Sequence
  Oligonucleotide primer for the detection of SNP TSC0018749
ttttttaggggg

SEQ ID NO: 299800 - DNA, 12 bp, Artificial Sequence
  Oligonucleotide primer for the detection of SNP TSC0018751
aaaatatattaa

SEQ ID NO: 299801 - DNA, 12 bp, Artificial Sequence
  Oligonucleotide primer for the detection of SNP TSC0018751
gaaatatattaa

SEQ ID NO: 299802 - DNA, 12 bp, Artificial Sequence
  Oligonucleotide primer for the detection of SNP TSC0018751
aatatcccacct

SEQ ID NO: 299803 - DNA, 12 bp, Artificial Sequence
  Oligonucleotide primer for the detection of SNP TSC0018751
gagatatattag

SEQ ID NO: 299804 - DNA, 12 bp, Artificial Sequence
  Oligonucleotide primer for the detection of SNP TSC0018752
attttacctata

SEQ ID NO: 299805 - DNA, 12 bp, Artificial Sequence
  Oligonucleotide primer for the detection of SNP TSC0018752
acctcacactca

SEQ ID NO: 299806 - DNA, 12 bp, Artificial Sequence
  Oligonucleotide primer for the detection of SNP TSC0018752
agttttatttat

SEQ ID NO: 299807 - DNA, 12 bp, Artificial Sequence
  Oligonucleotide primer for the detection of SNP TSC0018753
aatacattatcc

SEQ ID NO: 299808 - DNA, 12 bp, Artificial Sequence
  Oligonucleotide primer for the detection of SNP TSC0018753
gggtaagatata

SEQ ID NO: 299809 - DNA, 12 bp, Artificial Sequence
  Oligonucleotide primer for the detection of SNP TSC0018756
ttgtatagttgg

SEQ ID NO: 299810 - DNA, 12 bp, Artificial Sequence
  Oligonucleotide primer for the detection of SNP TSC0018756
ttatacaattaa

SEQ ID NO: 299811 - DNA, 12 bp, Artificial Sequence
  Oligonucleotide primer for the detection of SNP TSC0018756
aagtttaggtgt

SEQ ID NO: 299812 - DNA, 12 bp, Artificial Sequence
  Oligonucleotide primer for the detection of SNP TSC0018757
aaaaaaacccta

SEQ ID NO: 299813 - DNA, 12 bp, Artificial Sequence
  Oligonucleotide primer for the detection of SNP TSC0018757
attagtagattt

SEQ ID NO: 299814 - DNA, 12 bp, Artificial Sequence
  Oligonucleotide primer for the detection of SNP TSC0018757
atcaataaacct

SEQ ID NO: 299815 - DNA, 12 bp, Artificial Sequence
  Oligonucleotide primer for the detection of SNP TSC0018757
aggggaatttta

SEQ ID NO: 299816 - DNA, 12 bp, Artificial Sequence
  Oligonucleotide primer for the detection of SNP TSC0018758
aacctatcctca

SEQ ID NO: 299817 - DNA, 12 bp, Artificial Sequence
  Oligonucleotide primer for the detection of SNP TSC0018758
atttttttagtt

SEQ ID NO: 299818 - DNA, 12 bp, Artificial Sequence
  Oligonucleotide primer for the detection of SNP TSC0018758
actcttctaact

SEQ ID NO: 299819 - DNA, 12 bp, Artificial Sequence
  Oligonucleotide primer for the detection of SNP TSC0018765
atttactttttt

SEQ ID NO: 299820 - DNA, 12 bp, Artificial Sequence
  Oligonucleotide primer for the detection of SNP TSC0018766
ctaaaaaacaac

SEQ ID NO: 299821 - DNA, 12 bp, Artificial Sequence
  Oligonucleotide primer for the detection of SNP TSC0018766
ttttatttgagg

SEQ ID NO: 299822 - DNA, 12 bp, Artificial Sequence
  Oligonucleotide primer for the detection of SNP TSC0018768
cctcacttacaa

SEQ ID NO: 299823 - DNA, 12 bp, Artificial Sequence
  Oligonucleotide primer for the detection of SNP TSC0018768
tggttttggttt

SEQ ID NO: 299824 - DNA, 12 bp, Artificial Sequence
  Oligonucleotide primer for the detection of SNP TSC0018768
cggttttggttt

SEQ ID NO: 299825 - DNA, 12 bp, Artificial Sequence
  Oligonucleotide primer for the detection of SNP TSC0018768
tggtttcggttt

SEQ ID NO: 299826 - DNA, 12 bp, Artificial Sequence
  Oligonucleotide primer for the detection of SNP TSC0018768
cggtttcggttt

SEQ ID NO: 299827 - DNA, 12 bp, Artificial Sequence
  Oligonucleotide primer for the detection of SNP TSC0018768
caaccccaacct

SEQ ID NO: 299828 - DNA, 12 bp, Artificial Sequence
  Oligonucleotide primer for the detection of SNP TSC0018768
caaccccgacct

SEQ ID NO: 299829 - DNA, 12 bp, Artificial Sequence
  Oligonucleotide primer for the detection of SNP TSC0018768
cgaccccaacct

SEQ ID NO: 299830 - DNA, 12 bp, Artificial Sequence
  Oligonucleotide primer for the detection of SNP TSC0018768
cgaccccgacct

SEQ ID NO: 299831 - DNA, 12 bp, Artificial Sequence
  Oligonucleotide primer for the detection of SNP TSC0018768
ttttatttgtag

SEQ ID NO: 299832 - DNA, 12 bp, Artificial Sequence
  Oligonucleotide primer for the detection of SNP TSC0018771
ataactactacc

SEQ ID NO: 299833 - DNA, 12 bp, Artificial Sequence
  Oligonucleotide primer for the detection of SNP TSC0018771
agttgtgttttg

SEQ ID NO: 299834 - DNA, 12 bp, Artificial Sequence
  Oligonucleotide primer for the detection of SNP TSC0018772
ttcaaaaacata

SEQ ID NO: 299835 - DNA, 12 bp, Artificial Sequence
  Oligonucleotide primer for the detection of SNP TSC0018772
ttaaaaggttat

SEQ ID NO: 299836 - DNA, 12 bp, Artificial Sequence
  Oligonucleotide primer for the detection of SNP TSC0018772
ctaaaaaactat

SEQ ID NO: 299837 - DNA, 12 bp, Artificial Sequence
  Oligonucleotide primer for the detection of SNP TSC0018772
tttaggagtatg

SEQ ID NO: 299838 - DNA, 12 bp, Artificial Sequence
  Oligonucleotide primer for the detection of SNP TSC0018773
aaacacacatcc

SEQ ID NO: 299839 - DNA, 12 bp, Artificial Sequence
  Oligonucleotide primer for the detection of SNP TSC0018773
aaacacgcatcc

SEQ ID NO: 299840 - DNA, 12 bp, Artificial Sequence
  Oligonucleotide primer for the detection of SNP TSC0018773
aaacgcacatcc

SEQ ID NO: 299841 - DNA, 12 bp, Artificial Sequence
  Oligonucleotide primer for the detection of SNP TSC0018773
aaacgcgcatcc

SEQ ID NO: 299842 - DNA, 12 bp, Artificial Sequence
  Oligonucleotide primer for the detection of SNP TSC0018773
tttgggatgttg

SEQ ID NO: 299843 - DNA, 12 bp, Artificial Sequence
  Oligonucleotide primer for the detection of SNP TSC0018773
tttgggatgtcg

SEQ ID NO: 299844 - DNA, 12 bp, Artificial Sequence
  Oligonucleotide primer for the detection of SNP TSC0018775
ctaaaacaaacc

SEQ ID NO: 299845 - DNA, 12 bp, Artificial Sequence
  Oligonucleotide primer for the detection of SNP TSC0018775
cccccatcccta

SEQ ID NO: 299846 - DNA, 12 bp, Artificial Sequence
  Oligonucleotide primer for the detection of SNP TSC0018775
ttggagtaagtt

SEQ ID NO: 299847 - DNA, 12 bp, Artificial Sequence
  Oligonucleotide primer for the detection of SNP TSC0018777
aacactcccact

SEQ ID NO: 299848 - DNA, 12 bp, Artificial Sequence
  Oligonucleotide primer for the detection of SNP TSC0018777
aacgctcccact

SEQ ID NO: 299849 - DNA, 12 bp, Artificial Sequence
  Oligonucleotide primer for the detection of SNP TSC0018777
ttgaatgggtta

SEQ ID NO: 299850 - DNA, 12 bp, Artificial Sequence
  Oligonucleotide primer for the detection of SNP TSC0018777
tcgaatgggtta

SEQ ID NO: 299851 - DNA, 12 bp, Artificial Sequence
  Oligonucleotide primer for the detection of SNP TSC0018778
tctttactctat

SEQ ID NO: 299852 - DNA, 12 bp, Artificial Sequence
  Oligonucleotide primer for the detection of SNP TSC0018778
atttaggagtat

SEQ ID NO: 299853 - DNA, 12 bp, Artificial Sequence
  Oligonucleotide primer for the detection of SNP TSC0018779
aaccttctaaat

SEQ ID NO: 299854 - DNA, 12 bp, Artificial Sequence
  Oligonucleotide primer for the detection of SNP TSC0018779
aggataaattga

SEQ ID NO: 299855 - DNA, 12 bp, Artificial Sequence
  Oligonucleotide primer for the detection of SNP TSC0018779
aaaacaaactaa

SEQ ID NO: 299856 - DNA, 12 bp, Artificial Sequence
  Oligonucleotide primer for the detection of SNP TSC0018779
gattttttgagt

SEQ ID NO: 299857 - DNA, 12 bp, Artificial Sequence
  Oligonucleotide primer for the detection of SNP TSC0018780
aatatattattc

SEQ ID NO: 299858 - DNA, 12 bp, Artificial Sequence
  Oligonucleotide primer for the detection of SNP TSC0018780
tttaatttatag

SEQ ID NO: 299859 - DNA, 12 bp, Artificial Sequence
  Oligonucleotide primer for the detection of SNP TSC0018780
ttcaatttacaa

SEQ ID NO: 299860 - DNA, 12 bp, Artificial Sequence
  Oligonucleotide primer for the detection of SNP TSC0018781
ttataatatttc

SEQ ID NO: 299861 - DNA, 12 bp, Artificial Sequence
  Oligonucleotide primer for the detection of SNP TSC0018781
tttttttttgta

SEQ ID NO: 299862 - DNA, 12 bp, Artificial Sequence
  Oligonukleotid-Primer
ttttttttcgta

SEQ ID NO: 299863 - DNA, 12 bp, Artificial Sequence
  Oligonucleotide primer for the detection of SNP TSC0018786
tttggagggtgt

SEQ ID NO: 299864 - DNA, 12 bp, Artificial Sequence
  Oligonucleotide primer for the detection of SNP TSC0018786
cctaaaaaatac

SEQ ID NO: 299865 - DNA, 12 bp, Artificial Sequence
  Oligonucleotide primer for the detection of SNP TSC0018786
tgggaaggggag

SEQ ID NO: 299866 - DNA, 12 bp, Artificial Sequence
  Oligonukleotid-Primer
atataaactatc

SEQ ID NO: 299867 - DNA, 12 bp, Artificial Sequence
  Oligonucleotide primer for the detection of SNP TSC0018787
gatagaataatg

SEQ ID NO: 299868 - DNA, 12 bp, Artificial Sequence
  Oligonucleotide primer for the detection of SNP TSC0018788
aaaaccacttac

SEQ ID NO: 299869 - DNA, 12 bp, Artificial Sequence
  Oligonucleotide primer for the detection of SNP TSC0018788
tttttgttttcg

SEQ ID NO: 299870 - DNA, 12 bp, Artificial Sequence
  Oligonukleotid-Primer
taatacacaatc

SEQ ID NO: 299871 - DNA, 12 bp, Artificial Sequence
  Oligonucleotide primer for the detection of SNP TSC0018789
ttttgattggtg

SEQ ID NO: 299872 - DNA, 12 bp, Artificial Sequence
  Oligonucleotide primer for the detection of SNP TSC0018790
caactactaact

SEQ ID NO: 299873 - DNA, 12 bp, Artificial Sequence
  Oligonucleotide primer for the detection of SNP TSC0018790
atgtgttagata

SEQ ID NO: 299874 - DNA, 12 bp, Artificial Sequence
  Oligonucleotide primer for the detection of SNP TSC0018790
acgtgttagata

SEQ ID NO: 299875 - DNA, 12 bp, Artificial Sequence
  Oligonucleotide primer for the detection of SNP TSC0018791
aaaaatttaaaa

SEQ ID NO: 299876 - DNA, 12 bp, Artificial Sequence
  Oligonucleotide primer for the detection of SNP TSC0018791
atattatatttt

SEQ ID NO: 299877 - DNA, 12 bp, Artificial Sequence
  Oligonucleotide primer for the detection of SNP TSC0018791
atattatattct

SEQ ID NO: 299878 - DNA, 12 bp, Artificial Sequence
  Oligonucleotide primer for the detection of SNP TSC0018791
gggagtttgaga

SEQ ID NO: 299879 - DNA, 12 bp, Artificial Sequence
  Oligonucleotide primer for the detection of SNP TSC0018792
catctcaaactc

SEQ ID NO: 299880 - DNA, 12 bp, Artificial Sequence
  Oligonucleotide primer for the detection of SNP TSC0018792
cgtctcaaactc

SEQ ID NO: 299881 - DNA, 12 bp, Artificial Sequence
  Oligonucleotide primer for the detection of SNP TSC0018792
ttaaatttggtg

SEQ ID NO: 299882 - DNA, 12 bp, Artificial Sequence
  Oligonucleotide primer for the detection of SNP TSC0018793
acaacaacataa

SEQ ID NO: 299883 - DNA, 12 bp, Artificial Sequence
  Oligonucleotide primer for the detection of SNP TSC0018793
aggtttaagagg

SEQ ID NO: 299884 - DNA, 12 bp, Artificial Sequence
  Oligonucleotide primer for the detection of SNP TSC0018793
aaatctaaaaaa

SEQ ID NO: 299885 - DNA, 12 bp, Artificial Sequence
  Oligonucleotide primer for the detection of SNP TSC0018793
atagtagtatga

SEQ ID NO: 299886 - DNA, 12 bp, Artificial Sequence
  Oligonucleotide primer for the detection of SNP TSC0018794
tctaatacaatc

SEQ ID NO: 299887 - DNA, 12 bp, Artificial Sequence
  Oligonucleotide primer for the detection of SNP TSC0018794
gtgtggatatat

SEQ ID NO: 299888 - DNA, 12 bp, Artificial Sequence
  Oligonucleotide primer for the detection of SNP TSC0018794
atataaatacat

SEQ ID NO: 299889 - DNA, 12 bp, Artificial Sequence
  Oligonucleotide primer for the detection of SNP TSC0018794
tttagtatagtt

SEQ ID NO: 299890 - DNA, 12 bp, Artificial Sequence
  Oligonucleotide primer for the detection of SNP TSC0018796
aatatcaccctc

SEQ ID NO: 299891 - DNA, 12 bp, Artificial Sequence
  Oligonucleotide primer for the detection of SNP TSC0018796
atagaggaggga

SEQ ID NO: 299892 - DNA, 12 bp, Artificial Sequence
  Oligonucleotide primer for the detection of SNP TSC0018797
acaaactcaata

SEQ ID NO: 299893 - DNA, 12 bp, Artificial Sequence
  Oligonucleotide primer for the detection of SNP TSC0018797
acgaactcaata

SEQ ID NO: 299894 - DNA, 12 bp, Artificial Sequence
  Oligonucleotide primer for the detection of SNP TSC0018797
cctcctccctcc

SEQ ID NO: 299895 - DNA, 12 bp, Artificial Sequence
  Oligonucleotide primer for the detection of SNP TSC0018797
ggtgaatttaat

SEQ ID NO: 299896 - DNA, 12 bp, Artificial Sequence
  Oligonucleotide primer for the detection of SNP TSC0018797
ggcgaatttaat

SEQ ID NO: 299897 - DNA, 12 bp, Artificial Sequence
  Oligonucleotide primer for the detection of SNP TSC0018798
catacaaaacat

SEQ ID NO: 299898 - DNA, 12 bp, Artificial Sequence
  Oligonucleotide primer for the detection of SNP TSC0018798
cgtacaaaacat

SEQ ID NO: 299899 - DNA, 12 bp, Artificial Sequence
  Oligonucleotide primer for the detection of SNP TSC0018798
tcccacacccca

SEQ ID NO: 299900 - DNA, 12 bp, Artificial Sequence
  Oligonucleotide primer for the detection of SNP TSC0018798
tgtgtagggtat

SEQ ID NO: 299901 - DNA, 12 bp, Artificial Sequence
  Oligonucleotide primer for the detection of SNP TSC0018798
cgtgtagggtat

SEQ ID NO: 299902 - DNA, 12 bp, Artificial Sequence
  Oligonucleotide primer for the detection of SNP TSC0018799
tttattaaaata

SEQ ID NO: 299903 - DNA, 12 bp, Artificial Sequence
  Oligonucleotide primer for the detection of SNP TSC0018799
cctactaacctc

SEQ ID NO: 299904 - DNA, 12 bp, Artificial Sequence
  Oligonucleotide primer for the detection of SNP TSC0018799
tttgttggggtg

SEQ ID NO: 299905 - DNA, 12 bp, Artificial Sequence
  Oligonucleotide primer for the detection of SNP TSC0018803
ccaaaccacaac

SEQ ID NO: 299906 - DNA, 12 bp, Artificial Sequence
  Oligonucleotide primer for the detection of SNP TSC0018803
aatagatttgag

SEQ ID NO: 299907 - DNA, 12 bp, Artificial Sequence
  Oligonucleotide primer for the detection of SNP TSC0018804
tacttctcccct

SEQ ID NO: 299908 - DNA, 12 bp, Artificial Sequence
  Oligonucleotide primer for the detection of SNP TSC0018804
ggggagtagtgg

SEQ ID NO: 299909 - DNA, 12 bp, Artificial Sequence
  Oligonucleotide primer for the detection of SNP TSC0018807
ctcacaaaaaaa

SEQ ID NO: 299910 - DNA, 12 bp, Artificial Sequence
  Oligonucleotide primer for the detection of SNP TSC0018807
tacaatctccta

SEQ ID NO: 299911 - DNA, 12 bp, Artificial Sequence
  Oligonucleotide primer for the detection of SNP TSC0018807
tatagaaaagtt

SEQ ID NO: 299912 - DNA, 12 bp, Artificial Sequence
  Oligonucleotide primer for the detection of SNP TSC0018808
taaaacacgaat

SEQ ID NO: 299913 - DNA, 12 bp, Artificial Sequence
  Oligonucleotide primer for the detection of SNP TSC0018808
tgattttgttga

SEQ ID NO: 299914 - DNA, 12 bp, Artificial Sequence
  Oligonucleotide primer for the detection of SNP TSC0018809
aaataactttta

SEQ ID NO: 299915 - DNA, 12 bp, Artificial Sequence
  Oligonucleotide primer for the detection of SNP TSC0018809
tgttgttggagt

SEQ ID NO: 299916 - DNA, 12 bp, Artificial Sequence
  Oligonucleotide primer for the detection of SNP TSC0018809
cgttgttggagt

SEQ ID NO: 299917 - DNA, 12 bp, Artificial Sequence
  Oligonucleotide primer for the detection of SNP TSC0018809
cattactaaaac

SEQ ID NO: 299918 - DNA, 12 bp, Artificial Sequence
  Oligonucleotide primer for the detection of SNP TSC0018809
cgttactaaaac

SEQ ID NO: 299919 - DNA, 12 bp, Artificial Sequence
  Oligonucleotide primer for the detection of SNP TSC0018809
aggtaatttttg

SEQ ID NO: 299920 - DNA, 12 bp, Artificial Sequence
  Oligonucleotide primer for the detection of SNP TSC0018810
acctaaaaacta

SEQ ID NO: 299921 - DNA, 12 bp, Artificial Sequence
  Oligonucleotide primer for the detection of SNP TSC0018810
ttttaaccaaaa

SEQ ID NO: 299922 - DNA, 12 bp, Artificial Sequence
  Oligonucleotide primer for the detection of SNP TSC0018810
atttgggaattg

SEQ ID NO: 299923 - DNA, 12 bp, Artificial Sequence
  Oligonucleotide primer for the detection of SNP TSC0018811
ataaaacttctt

SEQ ID NO: 299924 - DNA, 12 bp, Artificial Sequence
  Oligonucleotide primer for the detection of SNP TSC0018811
tattgtagtaaa

SEQ ID NO: 299925 - DNA, 12 bp, Artificial Sequence
  Oligonucleotide primer for the detection of SNP TSC0018812
catatttttacc

SEQ ID NO: 299926 - DNA, 12 bp, Artificial Sequence
  Oligonucleotide primer for the detection of SNP TSC0018812
gttagttatata

SEQ ID NO: 299927 - DNA, 12 bp, Artificial Sequence
  Oligonucleotide primer for the detection of SNP TSC0018813
ctaaaattatta

SEQ ID NO: 299928 - DNA, 12 bp, Artificial Sequence
  Oligonucleotide primer for the detection of SNP TSC0018813
tttttaagaggt

SEQ ID NO: 299929 - DNA, 12 bp, Artificial Sequence
  Oligonucleotide primer for the detection of SNP TSC0018813
tttttaagaggc

SEQ ID NO: 299930 - DNA, 12 bp, Artificial Sequence
  Oligonucleotide primer for the detection of SNP TSC0018813
tttccaaaaaac

SEQ ID NO: 299931 - DNA, 12 bp, Artificial Sequence
  Oligonucleotide primer for the detection of SNP TSC0018813
attgaagttgtt

SEQ ID NO: 299932 - DNA, 12 bp, Artificial Sequence
  Oligonucleotide primer for the detection of SNP TSC0018814
aacactactaac

SEQ ID NO: 299933 - DNA, 12 bp, Artificial Sequence
  Oligonucleotide primer for the detection of SNP TSC0018814
gtaggttataaa

SEQ ID NO: 299934 - DNA, 12 bp, Artificial Sequence
  Oligonucleotide primer for the detection of SNP TSC0018815
caacccctaaaa

SEQ ID NO: 299935 - DNA, 12 bp, Artificial Sequence
  Oligonucleotide primer for the detection of SNP TSC0018815
gtgtgttttttt

SEQ ID NO: 299936 - DNA, 12 bp, Artificial Sequence
  Oligonucleotide primer for the detection of SNP TSC0018815
gtgcgttttttt

SEQ ID NO: 299937 - DNA, 12 bp, Artificial Sequence
  Oligonucleotide primer for the detection of SNP TSC0018815
atacattctccc

SEQ ID NO: 299938 - DNA, 12 bp, Artificial Sequence
  Oligonucleotide primer for the detection of SNP TSC0018815
atacgttctccc

SEQ ID NO: 299939 - DNA, 12 bp, Artificial Sequence
  Oligonucleotide primer for the detection of SNP TSC0018815
taatttttaggg

SEQ ID NO: 299940 - DNA, 12 bp, Artificial Sequence
  Oligonucleotide primer for the detection of SNP TSC0018816
aactctaaaacc

SEQ ID NO: 299941 - DNA, 12 bp, Artificial Sequence
  Oligonucleotide primer for the detection of SNP TSC0018816
gtagggaatgta

SEQ ID NO: 299942 - DNA, 12 bp, Artificial Sequence
  Oligonucleotide primer for the detection of SNP TSC0018817
ttaaaaaaacac

SEQ ID NO: 299943 - DNA, 12 bp, Artificial Sequence
  Oligonucleotide primer for the detection of SNP TSC0018817
atgagtgaaagg

SEQ ID NO: 299944 - DNA, 12 bp, Artificial Sequence
  Oligonucleotide primer for the detection of SNP TSC0018818
aatatctcccta

SEQ ID NO: 299945 - DNA, 12 bp, Artificial Sequence
  Oligonucleotide primer for the detection of SNP TSC0018818
tttattttgagt

SEQ ID NO: 299946 - DNA, 12 bp, Artificial Sequence
  Oligonucleotide primer for the detection of SNP TSC0018818
tttatttcgagt

SEQ ID NO: 299947 - DNA, 12 bp, Artificial Sequence
  Oligonucleotide primer for the detection of SNP TSC0018818
ccttacctcaaa

SEQ ID NO: 299948 - DNA, 12 bp, Artificial Sequence
  Oligonucleotide primer for the detection of SNP TSC0018818
ccttacctcgaa

SEQ ID NO: 299949 - DNA, 12 bp, Artificial Sequence
  Oligonucleotide primer for the detection of SNP TSC0018818
aatatttttttg

SEQ ID NO: 299950 - DNA, 12 bp, Artificial Sequence
  Oligonucleotide primer for the detection of SNP TSC0018819
tactatccaaaa

SEQ ID NO: 299951 - DNA, 12 bp, Artificial Sequence
  Oligonukleotid-Primer
tattagtagaaa

SEQ ID NO: 299952 - DNA, 12 bp, Artificial Sequence
  Oligonucleotide primer for the detection of SNP TSC0018819
caccaacaaaaa

SEQ ID NO: 299953 - DNA, 12 bp, Artificial Sequence
  Oligonucleotide primer for the detection of SNP TSC0018819
tgttatttagaa

SEQ ID NO: 299954 - DNA, 12 bp, Artificial Sequence
  Oligonucleotide primer for the detection of SNP TSC0018820
tccatttttctt

SEQ ID NO: 299955 - DNA, 12 bp, Artificial Sequence
  Oligonucleotide primer for the detection of SNP TSC0018820
tccgtttttctt

SEQ ID NO: 299956 - DNA, 12 bp, Artificial Sequence
  Oligonucleotide primer for the detection of SNP TSC0018820
ggatgtgttaaa

SEQ ID NO: 299957 - DNA, 12 bp, Artificial Sequence
  Oligonucleotide primer for the detection of SNP TSC0018820
ggacgtgttaaa

SEQ ID NO: 299958 - DNA, 12 bp, Artificial Sequence
  Oligonucleotide primer for the detection of SNP TSC0018820
ggatgcgttaaa

SEQ ID NO: 299959 - DNA, 12 bp, Artificial Sequence
  Oligonucleotide primer for the detection of SNP TSC0018820
ggacgcgttaaa

SEQ ID NO: 299960 - DNA, 12 bp, Artificial Sequence
  Oligonucleotide primer for the detection of SNP TSC0018821
ctattactaaaa

SEQ ID NO: 299961 - DNA, 12 bp, Artificial Sequence
  Oligonucleotide primer for the detection of SNP TSC0018821
ggttaatttgta

SEQ ID NO: 299962 - DNA, 12 bp, Artificial Sequence
  Oligonucleotide primer for the detection of SNP TSC0018821
aattaatttaca

SEQ ID NO: 299963 - DNA, 12 bp, Artificial Sequence
  Oligonucleotide primer for the detection of SNP TSC0018821
ttgttgttgggg

SEQ ID NO: 299964 - DNA, 12 bp, Artificial Sequence
  Oligonucleotide primer for the detection of SNP TSC0018822
atataaaacttt

SEQ ID NO: 299965 - DNA, 12 bp, Artificial Sequence
  Oligonucleotide primer for the detection of SNP TSC0018822
gagtaattttag

SEQ ID NO: 299966 - DNA, 12 bp, Artificial Sequence
  Oligonucleotide primer for the detection of SNP TSC0018823
acaacatctaac

SEQ ID NO: 299967 - DNA, 12 bp, Artificial Sequence
  Oligonucleotide primer for the detection of SNP TSC0018823
acgacatctaac

SEQ ID NO: 299968 - DNA, 12 bp, Artificial Sequence
  Oligonucleotide primer for the detection of SNP TSC0018823
gcaacatctaac

SEQ ID NO: 299969 - DNA, 12 bp, Artificial Sequence
  Oligonucleotide primer for the detection of SNP TSC0018823
gcgacatctaac

SEQ ID NO: 299970 - DNA, 12 bp, Artificial Sequence
  Oligonucleotide primer for the detection of SNP TSC0018823
tattttgtgttg

SEQ ID NO: 299971 - DNA, 12 bp, Artificial Sequence
  Oligonucleotide primer for the detection of SNP TSC0018823
tattttgcgttg

SEQ ID NO: 299972 - DNA, 12 bp, Artificial Sequence
  Oligonucleotide primer for the detection of SNP TSC0018823
caccttacatta

SEQ ID NO: 299973 - DNA, 12 bp, Artificial Sequence
  Oligonucleotide primer for the detection of SNP TSC0018823
caccttacgtta

SEQ ID NO: 299974 - DNA, 12 bp, Artificial Sequence
  Oligonucleotide primer for the detection of SNP TSC0018823
gtgatatttggt

SEQ ID NO: 299975 - DNA, 12 bp, Artificial Sequence
  Oligonucleotide primer for the detection of SNP TSC0018823
gcgatatttggt

SEQ ID NO: 299976 - DNA, 12 bp, Artificial Sequence
  Oligonucleotide primer for the detection of SNP TSC0018824
ttcaaccccaca

SEQ ID NO: 299977 - DNA, 12 bp, Artificial Sequence
  Oligonucleotide primer for the detection of SNP TSC0018824
ttcaaccccacg

SEQ ID NO: 299978 - DNA, 12 bp, Artificial Sequence
  Oligonucleotide primer for the detection of SNP TSC0018824
ttcgaccccaca

SEQ ID NO: 299979 - DNA, 12 bp, Artificial Sequence
  Oligonucleotide primer for the detection of SNP TSC0018824
ttcgaccccacg

SEQ ID NO: 299980 - DNA, 12 bp, Artificial Sequence
  Oligonucleotide primer for the detection of SNP TSC0018824
ttggggttgtga

SEQ ID NO: 299981 - DNA, 12 bp, Artificial Sequence
  Oligonucleotide primer for the detection of SNP TSC0018824
ctaaaactataa

SEQ ID NO: 299982 - DNA, 12 bp, Artificial Sequence
  Oligonucleotide primer for the detection of SNP TSC0018824
tttgattttatg

SEQ ID NO: 299983 - DNA, 12 bp, Artificial Sequence
  Oligonucleotide primer for the detection of SNP TSC0018824
ttcgattttatg

SEQ ID NO: 299984 - DNA, 12 bp, Artificial Sequence
  Oligonucleotide primer for the detection of SNP TSC0018824
tttgattttacg

SEQ ID NO: 299985 - DNA, 12 bp, Artificial Sequence
  Oligonucleotide primer for the detection of SNP TSC0018824
ttcgattttacg

SEQ ID NO: 299986 - DNA, 12 bp, Artificial Sequence
  Oligonucleotide primer for the detection of SNP TSC0018825
aaaaattaaaat

SEQ ID NO: 299987 - DNA, 12 bp, Artificial Sequence
  Oligonucleotide primer for the detection of SNP TSC0018825
gtaatagataaa

SEQ ID NO: 299988 - DNA, 12 bp, Artificial Sequence
  Oligonucleotide primer for the detection of SNP TSC0018825
ataacaaataaa

SEQ ID NO: 299989 - DNA, 12 bp, Artificial Sequence
  Oligonucleotide primer for the detection of SNP TSC0018825
gaggattgagat

SEQ ID NO: 299990 - DNA, 12 bp, Artificial Sequence
  Oligonucleotide primer for the detection of SNP TSC0018826
acacatactaac

SEQ ID NO: 299991 - DNA, 12 bp, Artificial Sequence
  Oligonucleotide primer for the detection of SNP TSC0018826
tgatggtgtggg

SEQ ID NO: 299992 - DNA, 12 bp, Artificial Sequence
  Oligonucleotide primer for the detection of SNP TSC0018826
tgacggtgtggg

SEQ ID NO: 299993 - DNA, 12 bp, Artificial Sequence
  Oligonucleotide primer for the detection of SNP TSC0018827
aactaaaactcc

SEQ ID NO: 299994 - DNA, 12 bp, Artificial Sequence
  Oligonucleotide primer for the detection of SNP TSC0018827
gagattagataa

SEQ ID NO: 299995 - DNA, 12 bp, Artificial Sequence
  Oligonucleotide primer for the detection of SNP TSC0018828
tccctacctttc

SEQ ID NO: 299996 - DNA, 12 bp, Artificial Sequence
  Oligonucleotide primer for the detection of SNP TSC0018828
ataggggagagg

SEQ ID NO: 299997 - DNA, 12 bp, Artificial Sequence
  Oligonucleotide primer for the detection of SNP TSC0018829
cccactatatca

SEQ ID NO: 299998 - DNA, 12 bp, Artificial Sequence
  Oligonucleotide primer for the detection of SNP TSC0018829
agaataattagt

SEQ ID NO: 299999 - DNA, 12 bp, Artificial Sequence
  Oligonucleotide primer for the detection of SNP TSC0018829
aaaacaactaac

SEQ ID NO: 300000 - DNA, 12 bp, Artificial Sequence
  Oligonucleotide primer for the detection of SNP TSC0018829
tttattgtatta

SEQ ID NO: 300001 - DNA, 12 bp, Artificial Sequence
  Oligonucleotide primer for the detection of SNP TSC0018830
tgtttgtaaata

SEQ ID NO: 300002 - DNA, 12 bp, Artificial Sequence
  Oligonucleotide primer for the detection of SNP TSC0018830
tacctataaata

SEQ ID NO: 300003 - DNA, 12 bp, Artificial Sequence
  Oligonucleotide primer for the detection of SNP TSC0018830
agtaatgtaggt

SEQ ID NO: 300004 - DNA, 12 bp, Artificial Sequence
  Oligonucleotide primer for the detection of SNP TSC0018831
ttaaactcttca

SEQ ID NO: 300005 - DNA, 12 bp, Artificial Sequence
  Oligonucleotide primer for the detection of SNP TSC0018831
gagggagaatat

SEQ ID NO: 300006 - DNA, 12 bp, Artificial Sequence
  Oligonucleotide primer for the detection of SNP TSC0018832
ctctcaatcttt

SEQ ID NO: 300007 - DNA, 12 bp, Artificial Sequence
  Oligonucleotide primer for the detection of SNP TSC0018832
ataatatatttg

SEQ ID NO: 300008 - DNA, 12 bp, Artificial Sequence
  Oligonucleotide primer for the detection of SNP TSC0018833
caatttttaaac

SEQ ID NO: 300009 - DNA, 12 bp, Artificial Sequence
  Oligonucleotide primer for the detection of SNP TSC0018833
ttggttgtaata

SEQ ID NO: 300010 - DNA, 12 bp, Artificial Sequence
  Oligonucleotide primer for the detection of SNP TSC0018833
tcggttgtaata

SEQ ID NO: 300011 - DNA, 12 bp, Artificial Sequence
  Oligonucleotide primer for the detection of SNP TSC0018833
tcaactataaca

SEQ ID NO: 300012 - DNA, 12 bp, Artificial Sequence
  Oligonukleotid-Primer
tcgactataaca

SEQ ID NO: 300013 - DNA, 12 bp, Artificial Sequence
  Oligonucleotide primer for the detection of SNP TSC0018833
taatttttgagt

SEQ ID NO: 300014 - DNA, 12 bp, Artificial Sequence
  Oligonucleotide primer for the detection of SNP TSC0018836
caaactcttatt

SEQ ID NO: 300015 - DNA, 12 bp, Artificial Sequence
  Oligonucleotide primer for the detection of SNP TSC0018836
agagaatattta

SEQ ID NO: 300016 - DNA, 12 bp, Artificial Sequence
  Oligonukleotid-Primer
taattagaaaat

SEQ ID NO: 300017 - DNA, 12 bp, Artificial Sequence
  Oligonucleotide primer for the detection of SNP TSC0018837
caattaaaaaac

SEQ ID NO: 300018 - DNA, 12 bp, Artificial Sequence
  Oligonucleotide primer for the detection of SNP TSC0018837
aagtgatgataa

SEQ ID NO: 300019 - DNA, 12 bp, Artificial Sequence
  Oligonucleotide primer for the detection of SNP TSC0018841
aatataaatatc

SEQ ID NO: 300020 - DNA, 12 bp, Artificial Sequence
  Oligonucleotide primer for the detection of SNP TSC0018841
aataaatttata

SEQ ID NO: 300021 - DNA, 12 bp, Artificial Sequence
  Oligonucleotide primer for the detection of SNP TSC0018842
tgaagaagttgg

SEQ ID NO: 300022 - DNA, 12 bp, Artificial Sequence
  Oligonucleotide primer for the detection of SNP TSC0018843
tacaaaaattaa

SEQ ID NO: 300023 - DNA, 12 bp, Artificial Sequence
  Oligonucleotide primer for the detection of SNP TSC0018843
ggttattatgtt

SEQ ID NO: 300024 - DNA, 12 bp, Artificial Sequence
  Oligonucleotide primer for the detection of SNP TSC0018843
ggttattacgtt

SEQ ID NO: 300025 - DNA, 12 bp, Artificial Sequence
  Oligonucleotide primer for the detection of SNP TSC0018843
tataaaaattag

SEQ ID NO: 300026 - DNA, 12 bp, Artificial Sequence
  Oligonucleotide primer for the detection of SNP TSC0018844
tcaaaacattat

SEQ ID NO: 300027 - DNA, 12 bp, Artificial Sequence
  Oligonucleotide primer for the detection of SNP TSC0018844
atatgttatgtg

SEQ ID NO: 300028 - DNA, 12 bp, Artificial Sequence
  Oligonucleotide primer for the detection of SNP TSC0018844
acatatcatata

SEQ ID NO: 300029 - DNA, 12 bp, Artificial Sequence
  Oligonucleotide primer for the detection of SNP TSC0018844
ttagaatattat

SEQ ID NO: 300030 - DNA, 12 bp, Artificial Sequence
  Oligonucleotide primer for the detection of SNP TSC0018845
aacaaataacta

SEQ ID NO: 300031 - DNA, 12 bp, Artificial Sequence
  Oligonucleotide primer for the detection of SNP TSC0018845
atataatgtttt

SEQ ID NO: 300032 - DNA, 12 bp, Artificial Sequence
  Oligonucleotide primer for the detection of SNP TSC0018845
cataatattcta

SEQ ID NO: 300033 - DNA, 12 bp, Artificial Sequence
  Oligonucleotide primer for the detection of SNP TSC0018845
agtaggtggtta

SEQ ID NO: 300034 - DNA, 12 bp, Artificial Sequence
  Oligonucleotide primer for the detection of SNP TSC0018846
tctatccaatcc

SEQ ID NO: 300035 - DNA, 12 bp, Artificial Sequence
  Oligonucleotide primer for the detection of SNP TSC0018846
tttgtttaaatt

SEQ ID NO: 300036 - DNA, 12 bp, Artificial Sequence
  Oligonucleotide primer for the detection of SNP TSC0018846
tatctattcaaa

SEQ ID NO: 300037 - DNA, 12 bp, Artificial Sequence
  Oligonucleotide primer for the detection of SNP TSC0018846
tttatttaattc

SEQ ID NO: 300038 - DNA, 12 bp, Artificial Sequence
  Oligonucleotide primer for the detection of SNP TSC0018848
actaattaaatt

SEQ ID NO: 300039 - DNA, 12 bp, Artificial Sequence
  Oligonucleotide primer for the detection of SNP TSC0018848
gaaatgagttat

SEQ ID NO: 300040 - DNA, 12 bp, Artificial Sequence
  Oligonucleotide primer for the detection of SNP TSC0018848
attaattggatt

SEQ ID NO: 300041 - DNA, 12 bp, Artificial Sequence
  Oligonucleotide primer for the detection of SNP TSC0018849
aaacaattaatt

SEQ ID NO: 300042 - DNA, 12 bp, Artificial Sequence
  Oligonucleotide primer for the detection of SNP TSC0018849
taggaaaattta

SEQ ID NO: 300043 - DNA, 12 bp, Artificial Sequence
  Oligonucleotide primer for the detection of SNP TSC0018850
tccatctaactt

SEQ ID NO: 300044 - DNA, 12 bp, Artificial Sequence
  Oligonucleotide primer for the detection of SNP TSC0018850
tccgtctaactt

SEQ ID NO: 300045 - DNA, 12 bp, Artificial Sequence
  Oligonucleotide primer for the detection of SNP TSC0018850
gtttatgatata

SEQ ID NO: 300046 - DNA, 12 bp, Artificial Sequence
  Oligonucleotide primer for the detection of SNP TSC0018850
acccataacaca

SEQ ID NO: 300047 - DNA, 12 bp, Artificial Sequence
  Oligonucleotide primer for the detection of SNP TSC0018850
tttgtttgattt

SEQ ID NO: 300048 - DNA, 12 bp, Artificial Sequence
  Oligonucleotide primer for the detection of SNP TSC0018850
ttcgtttgattt

SEQ ID NO: 300049 - DNA, 12 bp, Artificial Sequence
  Oligonucleotide primer for the detection of SNP TSC0018851
catacaacaaaa

SEQ ID NO: 300050 - DNA, 12 bp, Artificial Sequence
  Oligonucleotide primer for the detection of SNP TSC0018851
catacaacgaaa

SEQ ID NO: 300051 - DNA, 12 bp, Artificial Sequence
  Oligonucleotide primer for the detection of SNP TSC0018851
cgtacaacaaaa

SEQ ID NO: 300052 - DNA, 12 bp, Artificial Sequence
  Oligonucleotide primer for the detection of SNP TSC0018851
cgtacaacgaaa

SEQ ID NO: 300053 - DNA, 12 bp, Artificial Sequence
  Oligonucleotide primer for the detection of SNP TSC0018851
ttgtgggttttt

SEQ ID NO: 300054 - DNA, 12 bp, Artificial Sequence
  Oligonucleotide primer for the detection of SNP TSC0018851
tcgtgggttttt

SEQ ID NO: 300055 - DNA, 12 bp, Artificial Sequence
  Oligonucleotide primer for the detection of SNP TSC0018851
ttgcgggttttt

SEQ ID NO: 300056 - DNA, 12 bp, Artificial Sequence
  Oligonucleotide primer for the detection of SNP TSC0018851
ttgtgggttttc

SEQ ID NO: 300057 - DNA, 12 bp, Artificial Sequence
  Oligonucleotide primer for the detection of SNP TSC0018851
tcgcgggttttt

SEQ ID NO: 300058 - DNA, 12 bp, Artificial Sequence
  Oligonucleotide primer for the detection of SNP TSC0018851
tcgtgggttttc

SEQ ID NO: 300059 - DNA, 12 bp, Artificial Sequence
  Oligonucleotide primer for the detection of SNP TSC0018851
ttgcgggttttc

SEQ ID NO: 300060 - DNA, 12 bp, Artificial Sequence
  Oligonucleotide primer for the detection of SNP TSC0018851
tcgcgggttttc

SEQ ID NO: 300061 - DNA, 12 bp, Artificial Sequence
  Oligonucleotide primer for the detection of SNP TSC0018851
ccacaaaccccc

SEQ ID NO: 300062 - DNA, 12 bp, Artificial Sequence
  Oligonucleotide primer for the detection of SNP TSC0018851
ccacgaaccccc

SEQ ID NO: 300063 - DNA, 12 bp, Artificial Sequence
  Oligonucleotide primer for the detection of SNP TSC0018851
ccgcaaaccccc

SEQ ID NO: 300064 - DNA, 12 bp, Artificial Sequence
  Oligonucleotide primer for the detection of SNP TSC0018851
ccgcgaaccccc

SEQ ID NO: 300065 - DNA, 12 bp, Artificial Sequence
  Oligonucleotide primer for the detection of SNP TSC0018851
tgtgtagtggga

SEQ ID NO: 300066 - DNA, 12 bp, Artificial Sequence
  Oligonucleotide primer for the detection of SNP TSC0018851
cgtgtagtggga

SEQ ID NO: 300067 - DNA, 12 bp, Artificial Sequence
  Oligonucleotide primer for the detection of SNP TSC0018851
tgtgtagcggga

SEQ ID NO: 300068 - DNA, 12 bp, Artificial Sequence
  Oligonucleotide primer for the detection of SNP TSC0018851
cgtgtagcggga

SEQ ID NO: 300069 - DNA, 12 bp, Artificial Sequence
  Oligonucleotide primer for the detection of SNP TSC0018852
caaaaaaacata

SEQ ID NO: 300070 - DNA, 12 bp, Artificial Sequence
  Oligonucleotide primer for the detection of SNP TSC0018852
caaaaaaacgta

SEQ ID NO: 300071 - DNA, 12 bp, Artificial Sequence
  Oligonucleotide primer for the detection of SNP TSC0018852
ttgtgttttgtt

SEQ ID NO: 300072 - DNA, 12 bp, Artificial Sequence
  Oligonucleotide primer for the detection of SNP TSC0018852
tcgtgttttgtt

SEQ ID NO: 300073 - DNA, 12 bp, Artificial Sequence
  Oligonucleotide primer for the detection of SNP TSC0018852
ttgcgttttgtt

SEQ ID NO: 300074 - DNA, 12 bp, Artificial Sequence
  Oligonucleotide primer for the detection of SNP TSC0018852
ttgtgtttcgtt

SEQ ID NO: 300075 - DNA, 12 bp, Artificial Sequence
  Oligonucleotide primer for the detection of SNP TSC0018852
tcgcgttttgtt

SEQ ID NO: 300076 - DNA, 12 bp, Artificial Sequence
  Oligonucleotide primer for the detection of SNP TSC0018852
tcgtgtttcgtt

SEQ ID NO: 300077 - DNA, 12 bp, Artificial Sequence
  Oligonucleotide primer for the detection of SNP TSC0018852
ttgcgtttcgtt

SEQ ID NO: 300078 - DNA, 12 bp, Artificial Sequence
  Oligonucleotide primer for the detection of SNP TSC0018852
tcgcgtttcgtt

SEQ ID NO: 300079 - DNA, 12 bp, Artificial Sequence
  Oligonucleotide primer for the detection of SNP TSC0018852
ccacatcccact

SEQ ID NO: 300080 - DNA, 12 bp, Artificial Sequence
  Oligonucleotide primer for the detection of SNP TSC0018852
ccacatcccgct

SEQ ID NO: 300081 - DNA, 12 bp, Artificial Sequence
  Oligonucleotide primer for the detection of SNP TSC0018852
ccacgtcccact

SEQ ID NO: 300082 - DNA, 12 bp, Artificial Sequence
  Oligonucleotide primer for the detection of SNP TSC0018852
ccgcatcccact

SEQ ID NO: 300083 - DNA, 12 bp, Artificial Sequence
  Oligonucleotide primer for the detection of SNP TSC0018852
ccacgtcccgct

SEQ ID NO: 300084 - DNA, 12 bp, Artificial Sequence
  Oligonucleotide primer for the detection of SNP TSC0018852
ccgcatcccgct

SEQ ID NO: 300085 - DNA, 12 bp, Artificial Sequence
  Oligonucleotide primer for the detection of SNP TSC0018852
ccgcgtcccact

SEQ ID NO: 300086 - DNA, 12 bp, Artificial Sequence
  Oligonucleotide primer for the detection of SNP TSC0018852
ccgcgtcccgct

SEQ ID NO: 300087 - DNA, 12 bp, Artificial Sequence
  Oligonucleotide primer for the detection of SNP TSC0018852
gtaggagagtgt

SEQ ID NO: 300088 - DNA, 12 bp, Artificial Sequence
  Oligonucleotide primer for the detection of SNP TSC0018852
gtaggagagcgt

SEQ ID NO: 300089 - DNA, 12 bp, Artificial Sequence
  Oligonucleotide primer for the detection of SNP TSC0018853
tttgtgttgttg

SEQ ID NO: 300090 - DNA, 12 bp, Artificial Sequence
  Oligonucleotide primer for the detection of SNP TSC0018860
aaacgaacaaaa

SEQ ID NO: 300091 - DNA, 12 bp, Artificial Sequence
  Oligonucleotide primer for the detection of SNP TSC0018860
tttttaaatttg

SEQ ID NO: 300092 - DNA, 12 bp, Artificial Sequence
  Oligonucleotide primer for the detection of SNP TSC0018860
cccccaaaccta

SEQ ID NO: 300093 - DNA, 12 bp, Artificial Sequence
  Oligonucleotide primer for the detection of SNP TSC0018860
gagtgggtaggg

SEQ ID NO: 300094 - DNA, 12 bp, Artificial Sequence
  Oligonucleotide primer for the detection of SNP TSC0018860
gagcgggtaggg

SEQ ID NO: 300095 - DNA, 12 bp, Artificial Sequence
  Oligonucleotide primer for the detection of SNP TSC0018861
aacacaaaacaa

SEQ ID NO: 300096 - DNA, 12 bp, Artificial Sequence
  Oligonucleotide primer for the detection of SNP TSC0018861
gggagttttttg

SEQ ID NO: 300097 - DNA, 12 bp, Artificial Sequence
  Oligonucleotide primer for the detection of SNP TSC0018861
aaaaacttttta

SEQ ID NO: 300098 - DNA, 12 bp, Artificial Sequence
  Oligonucleotide primer for the detection of SNP TSC0018861
gatataaaataa

SEQ ID NO: 300099 - DNA, 12 bp, Artificial Sequence
  Oligonucleotide primer for the detection of SNP TSC0018862
ccaattacaaaa

SEQ ID NO: 300100 - DNA, 12 bp, Artificial Sequence
  Oligonucleotide primer for the detection of SNP TSC0018862
tctaaataacca

SEQ ID NO: 300101 - DNA, 12 bp, Artificial Sequence
  Oligonucleotide primer for the detection of SNP TSC0018862
ttagttgtaggg

SEQ ID NO: 300102 - DNA, 12 bp, Artificial Sequence
  Oligonucleotide primer for the detection of SNP TSC0018863
tacaacccaaat

SEQ ID NO: 300103 - DNA, 12 bp, Artificial Sequence
  Oligonucleotide primer for the detection of SNP TSC0018863
atttattaagat

SEQ ID NO: 300104 - DNA, 12 bp, Artificial Sequence
  Oligonucleotide primer for the detection of SNP TSC0018863
catttattaaaa

SEQ ID NO: 300105 - DNA, 12 bp, Artificial Sequence
  Oligonucleotide primer for the detection of SNP TSC0018863
tgtaatttagat

SEQ ID NO: 300106 - DNA, 12 bp, Artificial Sequence
  Oligonucleotide primer for the detection of SNP TSC0018864
caataaaaaact

SEQ ID NO: 300107 - DNA, 12 bp, Artificial Sequence
  Oligonucleotide primer for the detection of SNP TSC0018864
ttgtggatttta

SEQ ID NO: 300108 - DNA, 12 bp, Artificial Sequence
  Oligonucleotide primer for the detection of SNP TSC0018868
attactactcta

SEQ ID NO: 300109 - DNA, 12 bp, Artificial Sequence
  Oligonucleotide primer for the detection of SNP TSC0018868
ttaatgtagata

SEQ ID NO: 300110 - DNA, 12 bp, Artificial Sequence
  Oligonucleotide primer for the detection of SNP TSC0018869
ctattttcaaaa

SEQ ID NO: 300111 - DNA, 12 bp, Artificial Sequence
  Oligonucleotide primer for the detection of SNP TSC0018869
gatgaaattaag

SEQ ID NO: 300112 - DNA, 12 bp, Artificial Sequence
  Oligonucleotide primer for the detection of SNP TSC0018869
gacgaaattaag

SEQ ID NO: 300113 - DNA, 12 bp, Artificial Sequence
  Oligonucleotide primer for the detection of SNP TSC0018869
aacaaaaccaaa

SEQ ID NO: 300114 - DNA, 12 bp, Artificial Sequence
  Oligonucleotide primer for the detection of SNP TSC0018869
aacgaaaccaaa

SEQ ID NO: 300115 - DNA, 12 bp, Artificial Sequence
  Oligonucleotide primer for the detection of SNP TSC0018872
taaaacatcact

SEQ ID NO: 300116 - DNA, 12 bp, Artificial Sequence
  Oligonucleotide primer for the detection of SNP TSC0018872
ttattagttaaa

SEQ ID NO: 300117 - DNA, 12 bp, Artificial Sequence
  Oligonucleotide primer for the detection of SNP TSC0018873
aaaaccacaaat

SEQ ID NO: 300118 - DNA, 12 bp, Artificial Sequence
  Oligonucleotide primer for the detection of SNP TSC0018873
aaaaccgcaaat

SEQ ID NO: 300119 - DNA, 12 bp, Artificial Sequence
  Oligonucleotide primer for the detection of SNP TSC0018873
atgttgttttgg

SEQ ID NO: 300120 - DNA, 12 bp, Artificial Sequence
  Oligonucleotide primer for the detection of SNP TSC0018873
atgtcgttttgg

SEQ ID NO: 300121 - DNA, 12 bp, Artificial Sequence
  Oligonucleotide primer for the detection of SNP TSC0018873
ataccaccctaa

SEQ ID NO: 300122 - DNA, 12 bp, Artificial Sequence
  Oligonucleotide primer for the detection of SNP TSC0018873
ataccgccctaa

SEQ ID NO: 300123 - DNA, 12 bp, Artificial Sequence
  Oligonucleotide primer for the detection of SNP TSC0018873
ggagttgtaggt

SEQ ID NO: 300124 - DNA, 12 bp, Artificial Sequence
  Oligonucleotide primer for the detection of SNP TSC0018873
ggagtcgtaggt

SEQ ID NO: 300125 - DNA, 12 bp, Artificial Sequence
  Oligonucleotide primer for the detection of SNP TSC0018874
aaaactaaaacc

SEQ ID NO: 300126 - DNA, 12 bp, Artificial Sequence
  Oligonukleotid-Primer
tttggtaatttg

SEQ ID NO: 300127 - DNA, 12 bp, Artificial Sequence
  Oligonucleotide primer for the detection of SNP TSC0018874
cctaacaaccta

SEQ ID NO: 300128 - DNA, 12 bp, Artificial Sequence
  Oligonucleotide primer for the detection of SNP TSC0018874
ggggttggagtt

SEQ ID NO: 300129 - DNA, 12 bp, Artificial Sequence
  Oligonucleotide primer for the detection of SNP TSC0018874
ggggttggagtc

SEQ ID NO: 300130 - DNA, 12 bp, Artificial Sequence
  Oligonucleotide primer for the detection of SNP TSC0018875
atccataataaa

SEQ ID NO: 300131 - DNA, 12 bp, Artificial Sequence
  Oligonucleotide primer for the detection of SNP TSC0018875
atccgtaataaa

SEQ ID NO: 300132 - DNA, 12 bp, Artificial Sequence
  Oligonucleotide primer for the detection of SNP TSC0018875
ttgtggttttag

SEQ ID NO: 300133 - DNA, 12 bp, Artificial Sequence
  Oligonucleotide primer for the detection of SNP TSC0018875
ttgcggttttag

SEQ ID NO: 300134 - DNA, 12 bp, Artificial Sequence
  Oligonucleotide primer for the detection of SNP TSC0018875
ctacaactccaa

SEQ ID NO: 300135 - DNA, 12 bp, Artificial Sequence
  Oligonucleotide primer for the detection of SNP TSC0018875
ctacgactccaa

SEQ ID NO: 300136 - DNA, 12 bp, Artificial Sequence
  Oligonucleotide primer for the detection of SNP TSC0018875
gtttgtggtggg

SEQ ID NO: 300137 - DNA, 12 bp, Artificial Sequence
  Oligonucleotide primer for the detection of SNP TSC0018875
gttcgtggtggg

SEQ ID NO: 300138 - DNA, 12 bp, Artificial Sequence
  Oligonucleotide primer for the detection of SNP TSC0018876
cctcaaaacctt

SEQ ID NO: 300139 - DNA, 12 bp, Artificial Sequence
  Oligonucleotide primer for the detection of SNP TSC0018876
gggatagtgtga

SEQ ID NO: 300140 - DNA, 12 bp, Artificial Sequence
  Oligonucleotide primer for the detection of SNP TSC0018877
catccccactcc

SEQ ID NO: 300141 - DNA, 12 bp, Artificial Sequence
  Oligonucleotide primer for the detection of SNP TSC0018877
gttatagtatgg

SEQ ID NO: 300142 - DNA, 12 bp, Artificial Sequence
  Oligonucleotide primer for the detection of SNP TSC0018877
gttatagtacgg

SEQ ID NO: 300143 - DNA, 12 bp, Artificial Sequence
  Oligonucleotide primer for the detection of SNP TSC0018878
aaaaccataaca

SEQ ID NO: 300144 - DNA, 12 bp, Artificial Sequence
  Oligonucleotide primer for the detection of SNP TSC0018878
ccccactccacc

SEQ ID NO: 300145 - DNA, 12 bp, Artificial Sequence
  Oligonucleotide primer for the detection of SNP TSC0018878
aaggttatagta

SEQ ID NO: 300146 - DNA, 12 bp, Artificial Sequence
  Oligonucleotide primer for the detection of SNP TSC0018879
tttacctatttc

SEQ ID NO: 300147 - DNA, 12 bp, Artificial Sequence
  Oligonucleotide primer for the detection of SNP TSC0018879
ttgaatgaaaaa

SEQ ID NO: 300148 - DNA, 12 bp, Artificial Sequence
  Oligonucleotide primer for the detection of SNP TSC0018880
cccccccacccc

SEQ ID NO: 300149 - DNA, 12 bp, Artificial Sequence
  Oligonucleotide primer for the detection of SNP TSC0018880
gatattgggtgg

SEQ ID NO: 300150 - DNA, 12 bp, Artificial Sequence
  Oligonucleotide primer for the detection of SNP TSC0018880
gatatcgggtgg

SEQ ID NO: 300151 - DNA, 12 bp, Artificial Sequence
  Oligonucleotide primer for the detection of SNP TSC0018880
gatattgggcgg

SEQ ID NO: 300152 - DNA, 12 bp, Artificial Sequence
  Oligonucleotide primer for the detection of SNP TSC0018880
gatatcgggcgg

SEQ ID NO: 300153 - DNA, 12 bp, Artificial Sequence
  Oligonucleotide primer for the detection of SNP TSC0018880
aacatcaaacaa

SEQ ID NO: 300154 - DNA, 12 bp, Artificial Sequence
  Oligonucleotide primer for the detection of SNP TSC0018880
aacatcaaacga

SEQ ID NO: 300155 - DNA, 12 bp, Artificial Sequence
  Oligonucleotide primer for the detection of SNP TSC0018880
aacatcgaacaa

SEQ ID NO: 300156 - DNA, 12 bp, Artificial Sequence
  Oligonucleotide primer for the detection of SNP TSC0018880
aacatcgaacga

SEQ ID NO: 300157 - DNA, 12 bp, Artificial Sequence
  Oligonucleotide primer for the detection of SNP TSC0018881
tataatcctaac

SEQ ID NO: 300158 - DNA, 12 bp, Artificial Sequence
  Oligonucleotide primer for the detection of SNP TSC0018881
agttttttaaag

SEQ ID NO: 300159 - DNA, 12 bp, Artificial Sequence
  Oligonucleotide primer for the detection of SNP TSC0018881
aacctctcaaaa

SEQ ID NO: 300160 - DNA, 12 bp, Artificial Sequence
  Oligonucleotide primer for the detection of SNP TSC0018881
tgtaattttagt

SEQ ID NO: 300161 - DNA, 12 bp, Artificial Sequence
  Oligonucleotide primer for the detection of SNP TSC0018882
ccccctttataa

SEQ ID NO: 300162 - DNA, 12 bp, Artificial Sequence
  Oligonucleotide primer for the detection of SNP TSC0018882
tatatttttatt

SEQ ID NO: 300163 - DNA, 12 bp, Artificial Sequence
  Oligonucleotide primer for the detection of SNP TSC0018882
cacatccccatc

SEQ ID NO: 300164 - DNA, 12 bp, Artificial Sequence
  Oligonucleotide primer for the detection of SNP TSC0018883
tatcactatccc

SEQ ID NO: 300165 - DNA, 12 bp, Artificial Sequence
  Oligonucleotide primer for the detection of SNP TSC0018883
tatgatagaaaa

SEQ ID NO: 300166 - DNA, 12 bp, Artificial Sequence
  Oligonucleotide primer for the detection of SNP TSC0018884
atcaatatcact

SEQ ID NO: 300167 - DNA, 12 bp, Artificial Sequence
  Oligonucleotide primer for the detection of SNP TSC0018884
atagaaaaaggg

SEQ ID NO: 300168 - DNA, 12 bp, Artificial Sequence
  Oligonucleotide primer for the detection of SNP TSC0018885
acacaacaacac

SEQ ID NO: 300169 - DNA, 12 bp, Artificial Sequence
  Oligonucleotide primer for the detection of SNP TSC0018885
tttggattttaa

SEQ ID NO: 300170 - DNA, 12 bp, Artificial Sequence
  Oligonucleotide primer for the detection of SNP TSC0018886
tttaaaaaccaa

SEQ ID NO: 300171 - DNA, 12 bp, Artificial Sequence
  Oligonucleotide primer for the detection of SNP TSC0018886
tttatttatatt

SEQ ID NO: 300172 - DNA, 12 bp, Artificial Sequence
  Oligonucleotide primer for the detection of SNP TSC0018886
tctcacctacac

SEQ ID NO: 300173 - DNA, 12 bp, Artificial Sequence
  Oligonucleotide primer for the detection of SNP TSC0018886
tatttggaggtt

SEQ ID NO: 300174 - DNA, 12 bp, Artificial Sequence
  Oligonucleotide primer for the detection of SNP TSC0018887
atcctaactccc

SEQ ID NO: 300175 - DNA, 12 bp, Artificial Sequence
  Oligonucleotide primer for the detection of SNP TSC0018887
gaatttagttag

SEQ ID NO: 300176 - DNA, 12 bp, Artificial Sequence
  Oligonucleotide primer for the detection of SNP TSC0018888
tcccattaaata

SEQ ID NO: 300177 - DNA, 12 bp, Artificial Sequence
  Oligonucleotide primer for the detection of SNP TSC0018888
ttgattaaagtt

SEQ ID NO: 300178 - DNA, 12 bp, Artificial Sequence
  Oligonucleotide primer for the detection of SNP TSC0018888
ctaactaaaacc

SEQ ID NO: 300179 - DNA, 12 bp, Artificial Sequence
  Oligonucleotide primer for the detection of SNP TSC0018889
aacctcacaatc

SEQ ID NO: 300180 - DNA, 12 bp, Artificial Sequence
  Oligonucleotide primer for the detection of SNP TSC0018889
ggtatttgtgta

SEQ ID NO: 300181 - DNA, 12 bp, Artificial Sequence
  Oligonucleotide primer for the detection of SNP TSC0018890
atgagggtatga

SEQ ID NO: 300182 - DNA, 12 bp, Artificial Sequence
  Oligonucleotide primer for the detection of SNP TSC0018890
acgagggtatga

SEQ ID NO: 300183 - DNA, 12 bp, Artificial Sequence
  Oligonucleotide primer for the detection of SNP TSC0018893
taaagggtttta

SEQ ID NO: 300184 - DNA, 12 bp, Artificial Sequence
  Oligonucleotide primer for the detection of SNP TSC0018894
aactcctaaaac

SEQ ID NO: 300185 - DNA, 12 bp, Artificial Sequence
  Oligonucleotide primer for the detection of SNP TSC0018895
acatttaaaaaa

SEQ ID NO: 300186 - DNA, 12 bp, Artificial Sequence
  Oligonucleotide primer for the detection of SNP TSC0018895
ttttagaggtag

SEQ ID NO: 300187 - DNA, 12 bp, Artificial Sequence
  Oligonucleotide primer for the detection of SNP TSC0018895
tcttaaaaacaa

SEQ ID NO: 300188 - DNA, 12 bp, Artificial Sequence
  Oligonucleotide primer for the detection of SNP TSC0018895
gtatttaagaag

SEQ ID NO: 300189 - DNA, 12 bp, Artificial Sequence
  Oligonucleotide primer for the detection of SNP TSC0018896
catcatccctcc

SEQ ID NO: 300190 - DNA, 12 bp, Artificial Sequence
  Oligonucleotide primer for the detection of SNP TSC0018896
ttaggtttgaaa

SEQ ID NO: 300191 - DNA, 12 bp, Artificial Sequence
  Oligonucleotide primer for the detection of SNP TSC0018899
acccaaaaaact

SEQ ID NO: 300192 - DNA, 12 bp, Artificial Sequence
  Oligonucleotide primer for the detection of SNP TSC0018899
acccgaaaaact

SEQ ID NO: 300193 - DNA, 12 bp, Artificial Sequence
  Oligonucleotide primer for the detection of SNP TSC0018899
gataagtgattg

SEQ ID NO: 300194 - DNA, 12 bp, Artificial Sequence
  Oligonucleotide primer for the detection of SNP TSC0018900
attcttatacaa

SEQ ID NO: 300195 - DNA, 12 bp, Artificial Sequence
  Oligonucleotide primer for the detection of SNP TSC0018900
atttttttgatt

SEQ ID NO: 300196 - DNA, 12 bp, Artificial Sequence
  Oligonucleotide primer for the detection of SNP TSC0018900
atccccttaact

SEQ ID NO: 300197 - DNA, 12 bp, Artificial Sequence
  Oligonucleotide primer for the detection of SNP TSC0018900
tatttttgtgta

SEQ ID NO: 300198 - DNA, 12 bp, Artificial Sequence
  Oligonucleotide primer for the detection of SNP TSC0018901
aaacgaaaaaaa

SEQ ID NO: 300199 - DNA, 12 bp, Artificial Sequence
  Oligonucleotide primer for the detection of SNP TSC0018901
tgattttattaa

SEQ ID NO: 300200 - DNA, 12 bp, Artificial Sequence
  Oligonucleotide primer for the detection of SNP TSC0018903
aactaaataata

SEQ ID NO: 300201 - DNA, 12 bp, Artificial Sequence
  Oligonucleotide primer for the detection of SNP TSC0018903
tatatgtaatgg

SEQ ID NO: 300202 - DNA, 12 bp, Artificial Sequence
  Oligonucleotide primer for the detection of SNP TSC0018903
tacatacaataa

SEQ ID NO: 300203 - DNA, 12 bp, Artificial Sequence
  Oligonucleotide primer for the detection of SNP TSC0018903
gttgaataatat

SEQ ID NO: 300204 - DNA, 12 bp, Artificial Sequence
  Oligonucleotide primer for the detection of SNP TSC0018904
tataccctaaac

SEQ ID NO: 300205 - DNA, 12 bp, Artificial Sequence
  Oligonucleotide primer for the detection of SNP TSC0018904
cacccctcatca

SEQ ID NO: 300206 - DNA, 12 bp, Artificial Sequence
  Oligonucleotide primer for the detection of SNP TSC0018904
tatgttttgggt

SEQ ID NO: 300207 - DNA, 12 bp, Artificial Sequence
  Oligonucleotide primer for the detection of SNP TSC0018905
cctcctctatta

SEQ ID NO: 300208 - DNA, 12 bp, Artificial Sequence
  Oligonucleotide primer for the detection of SNP TSC0018905
atgggtatgatt

SEQ ID NO: 300209 - DNA, 12 bp, Artificial Sequence
  Oligonucleotide primer for the detection of SNP TSC0018905
atgggtacgatt

SEQ ID NO: 300210 - DNA, 12 bp, Artificial Sequence
  Oligonucleotide primer for the detection of SNP TSC0018905
ataaacacaacc

SEQ ID NO: 300211 - DNA, 12 bp, Artificial Sequence
  Oligonukleotid-Primer
ataaacacgacc

SEQ ID NO: 300212 - DNA, 12 bp, Artificial Sequence
  Oligonucleotide primer for the detection of SNP TSC0018906
tcaataaacatc

SEQ ID NO: 300213 - DNA, 12 bp, Artificial Sequence
  Oligonucleotide primer for the detection of SNP TSC0018906
tatccctaaaaa

SEQ ID NO: 300214 - DNA, 12 bp, Artificial Sequence
  Oligonucleotide primer for the detection of SNP TSC0018906
ttaataggtatt

SEQ ID NO: 300215 - DNA, 12 bp, Artificial Sequence
  Oligonukleotid-Primer
aaatagtggttt

SEQ ID NO: 300216 - DNA, 12 bp, Artificial Sequence
  Oligonucleotide primer for the detection of SNP TSC0018909
aaacaataattt

SEQ ID NO: 300217 - DNA, 12 bp, Artificial Sequence
  Oligonucleotide primer for the detection of SNP TSC0018910
tatatatcaccc

SEQ ID NO: 300218 - DNA, 12 bp, Artificial Sequence
  Oligonucleotide primer for the detection of SNP TSC0018910
aagagaagaaag

SEQ ID NO: 300219 - DNA, 12 bp, Artificial Sequence
  Oligonukleotid-Primer
aatcaaaatccc

SEQ ID NO: 300220 - DNA, 12 bp, Artificial Sequence
  Oligonucleotide primer for the detection of SNP TSC0018913
aatcgaaatccc

SEQ ID NO: 300221 - DNA, 12 bp, Artificial Sequence
  Oligonucleotide primer for the detection of SNP TSC0018913
aggggagggttg

SEQ ID NO: 300222 - DNA, 12 bp, Artificial Sequence
  Oligonucleotide primer for the detection of SNP TSC0018914
tatctaaaccaa

SEQ ID NO: 300223 - DNA, 12 bp, Artificial Sequence
  Oligonucleotide primer for the detection of SNP TSC0018914
tatctaaaccga

SEQ ID NO: 300224 - DNA, 12 bp, Artificial Sequence
  Oligonucleotide primer for the detection of SNP TSC0018914
aaggagaaagtt

SEQ ID NO: 300225 - DNA, 12 bp, Artificial Sequence
  Oligonucleotide primer for the detection of SNP TSC0018914
tatttgggttgg

SEQ ID NO: 300226 - DNA, 12 bp, Artificial Sequence
  Oligonucleotide primer for the detection of SNP TSC0018914
tatttgggtcgg

SEQ ID NO: 300227 - DNA, 12 bp, Artificial Sequence
  Oligonucleotide primer for the detection of SNP TSC0018915
actaattaactc

SEQ ID NO: 300228 - DNA, 12 bp, Artificial Sequence
  Oligonucleotide primer for the detection of SNP TSC0018915
gtataatttaga

SEQ ID NO: 300229 - DNA, 12 bp, Artificial Sequence
  Oligonucleotide primer for the detection of SNP TSC0018915
atataacttaaa

SEQ ID NO: 300230 - DNA, 12 bp, Artificial Sequence
  Oligonucleotide primer for the detection of SNP TSC0018915
gttgattagttt

SEQ ID NO: 300231 - DNA, 12 bp, Artificial Sequence
  Oligonucleotide primer for the detection of SNP TSC0018916
ttattgtttagg

SEQ ID NO: 300232 - DNA, 12 bp, Artificial Sequence
  Oligonucleotide primer for the detection of SNP TSC0018916
ccactactcaaa

SEQ ID NO: 300233 - DNA, 12 bp, Artificial Sequence
  Oligonucleotide primer for the detection of SNP TSC0018917
aaatacaataat

SEQ ID NO: 300234 - DNA, 12 bp, Artificial Sequence
  Oligonucleotide primer for the detection of SNP TSC0018917
agtgagttgaga

SEQ ID NO: 300235 - DNA, 12 bp, Artificial Sequence
  Oligonucleotide primer for the detection of SNP TSC0018918
accttctcttta

SEQ ID NO: 300236 - DNA, 12 bp, Artificial Sequence
  Oligonucleotide primer for the detection of SNP TSC0018918
gttgttttggat

SEQ ID NO: 300237 - DNA, 12 bp, Artificial Sequence
  Oligonucleotide primer for the detection of SNP TSC0018918
gttgttttggac

SEQ ID NO: 300238 - DNA, 12 bp, Artificial Sequence
  Oligonucleotide primer for the detection of SNP TSC0018918
actattctaaac

SEQ ID NO: 300239 - DNA, 12 bp, Artificial Sequence
  Oligonucleotide primer for the detection of SNP TSC0018919
ttatattttggg

SEQ ID NO: 300240 - DNA, 12 bp, Artificial Sequence
  Oligonucleotide primer for the detection of SNP TSC0018920
ttcctcacaaaa

SEQ ID NO: 300241 - DNA, 12 bp, Artificial Sequence
  Oligonucleotide primer for the detection of SNP TSC0018920
atataatttaaa

SEQ ID NO: 300242 - DNA, 12 bp, Artificial Sequence
  Oligonucleotide primer for the detection of SNP TSC0018920
cacaattcaaaa

SEQ ID NO: 300243 - DNA, 12 bp, Artificial Sequence
  Oligonucleotide primer for the detection of SNP TSC0018921
actatatacaaa

SEQ ID NO: 300244 - DNA, 12 bp, Artificial Sequence
  Oligonucleotide primer for the detection of SNP TSC0018921
taagggtgatgg

SEQ ID NO: 300245 - DNA, 12 bp, Artificial Sequence
  Oligonucleotide primer for the detection of SNP TSC0018921
caaaaataataa

SEQ ID NO: 300246 - DNA, 12 bp, Artificial Sequence
  Oligonucleotide primer for the detection of SNP TSC0018921
gttgtgtgtagg

SEQ ID NO: 300247 - DNA, 12 bp, Artificial Sequence
  Oligonucleotide primer for the detection of SNP TSC0018922
taatatatttac

SEQ ID NO: 300248 - DNA, 12 bp, Artificial Sequence
  Oligonucleotide primer for the detection of SNP TSC0018922
ttacctacttta

SEQ ID NO: 300249 - DNA, 12 bp, Artificial Sequence
  Oligonucleotide primer for the detection of SNP TSC0018922
tggtgtgtttat

SEQ ID NO: 300250 - DNA, 12 bp, Artificial Sequence
  Oligonucleotide primer for the detection of SNP TSC0018923
taagttaaagta

SEQ ID NO: 300251 - DNA, 12 bp, Artificial Sequence
  Oligonucleotide primer for the detection of SNP TSC0018924
ctaacaaatttt

SEQ ID NO: 300252 - DNA, 12 bp, Artificial Sequence
  Oligonucleotide primer for the detection of SNP TSC0018924
gggtgaattgtg

SEQ ID NO: 300253 - DNA, 12 bp, Artificial Sequence
  Oligonucleotide primer for the detection of SNP TSC0018924
gggtgaatcgtg

SEQ ID NO: 300254 - DNA, 12 bp, Artificial Sequence
  Oligonucleotide primer for the detection of SNP TSC0018925
atcaaatataat

SEQ ID NO: 300255 - DNA, 12 bp, Artificial Sequence
  Oligonucleotide primer for the detection of SNP TSC0018925
atagatgtttat

SEQ ID NO: 300256 - DNA, 12 bp, Artificial Sequence
  Oligonucleotide primer for the detection of SNP TSC0018927
ctttaaaaaaac

SEQ ID NO: 300257 - DNA, 12 bp, Artificial Sequence
  Oligonucleotide primer for the detection of SNP TSC0018927
ttaggtaatttg

SEQ ID NO: 300258 - DNA, 12 bp, Artificial Sequence
  Oligonucleotide primer for the detection of SNP TSC0018934
aaaaccctatac

SEQ ID NO: 300259 - DNA, 12 bp, Artificial Sequence
  Oligonucleotide primer for the detection of SNP TSC0018934
gtgggtattagg

SEQ ID NO: 300260 - DNA, 12 bp, Artificial Sequence
  Oligonucleotide primer for the detection of SNP TSC0018934
ataaacaccaaa

SEQ ID NO: 300261 - DNA, 12 bp, Artificial Sequence
  Oligonucleotide primer for the detection of SNP TSC0018934
aagttttgtatt

SEQ ID NO: 300262 - DNA, 12 bp, Artificial Sequence
  Oligonucleotide primer for the detection of SNP TSC0018941
tcctaaccccta

SEQ ID NO: 300263 - DNA, 12 bp, Artificial Sequence
  Oligonucleotide primer for the detection of SNP TSC0018941
attgtttgaagt

SEQ ID NO: 300264 - DNA, 12 bp, Artificial Sequence
  Oligonucleotide primer for the detection of SNP TSC0018941
tttttgattttt

SEQ ID NO: 300265 - DNA, 12 bp, Artificial Sequence
  Oligonucleotide primer for the detection of SNP TSC0018942
aatcaaaaatcc

SEQ ID NO: 300266 - DNA, 12 bp, Artificial Sequence
  Oligonucleotide primer for the detection of SNP TSC0018942
gaggtgggtatg

SEQ ID NO: 300267 - DNA, 12 bp, Artificial Sequence
  Oligonucleotide primer for the detection of SNP TSC0018942
aaataaacataa

SEQ ID NO: 300268 - DNA, 12 bp, Artificial Sequence
  Oligonucleotide primer for the detection of SNP TSC0018942
ggttagagattt

SEQ ID NO: 300269 - DNA, 12 bp, Artificial Sequence
  Oligonucleotide primer for the detection of SNP TSC0018943
ctcaacactaac

SEQ ID NO: 300270 - DNA, 12 bp, Artificial Sequence
  Oligonucleotide primer for the detection of SNP TSC0018944
taagattttttt

SEQ ID NO: 300271 - DNA, 12 bp, Artificial Sequence
  Oligonucleotide primer for the detection of SNP TSC0018945
aatattccattt

SEQ ID NO: 300272 - DNA, 12 bp, Artificial Sequence
  Oligonucleotide primer for the detection of SNP TSC0018945
taaaagtaatta

SEQ ID NO: 300273 - DNA, 12 bp, Artificial Sequence
  Oligonucleotide primer for the detection of SNP TSC0018945
aaacaaccaaaa

SEQ ID NO: 300274 - DNA, 12 bp, Artificial Sequence
  Oligonucleotide primer for the detection of SNP TSC0018946
taaaaaaatttt

SEQ ID NO: 300275 - DNA, 12 bp, Artificial Sequence
  Oligonucleotide primer for the detection of SNP TSC0018946
ttaaaattaata

SEQ ID NO: 300276 - DNA, 12 bp, Artificial Sequence
  Oligonucleotide primer for the detection of SNP TSC0018946
aaaagaattttt

SEQ ID NO: 300277 - DNA, 12 bp, Artificial Sequence
  Oligonucleotide primer for the detection of SNP TSC0018946
aaaagaattttc

SEQ ID NO: 300278 - DNA, 12 bp, Artificial Sequence
  Oligonucleotide primer for the detection of SNP TSC0018947
ttctaacataat

SEQ ID NO: 300279 - DNA, 12 bp, Artificial Sequence
  Oligonucleotide primer for the detection of SNP TSC0018947
tataagagagga

SEQ ID NO: 300280 - DNA, 12 bp, Artificial Sequence
  Oligonucleotide primer for the detection of SNP TSC0018950
caaattcattca

SEQ ID NO: 300281 - DNA, 12 bp, Artificial Sequence
  Oligonucleotide primer for the detection of SNP TSC0018950
caaattcattcg

SEQ ID NO: 300282 - DNA, 12 bp, Artificial Sequence
  Oligonucleotide primer for the detection of SNP TSC0018950
attaaataattg

SEQ ID NO: 300283 - DNA, 12 bp, Artificial Sequence
  Oligonucleotide primer for the detection of SNP TSC0018950
attaaataatcg

SEQ ID NO: 300284 - DNA, 12 bp, Artificial Sequence
  Oligonucleotide primer for the detection of SNP TSC0018950
actaaataatca

SEQ ID NO: 300285 - DNA, 12 bp, Artificial Sequence
  Oligonucleotide primer for the detection of SNP TSC0018950
actaaataatcg

SEQ ID NO: 300286 - DNA, 12 bp, Artificial Sequence
  Oligonucleotide primer for the detection of SNP TSC0018950
ttagatttattt

SEQ ID NO: 300287 - DNA, 12 bp, Artificial Sequence
  Oligonucleotide primer for the detection of SNP TSC0018950
ttagatttattc

SEQ ID NO: 300288 - DNA, 12 bp, Artificial Sequence
  Oligonucleotide primer for the detection of SNP TSC0018958
cacctaaccaca

SEQ ID NO: 300289 - DNA, 12 bp, Artificial Sequence
  Oligonucleotide primer for the detection of SNP TSC0018958
tataacacaaat

SEQ ID NO: 300290 - DNA, 12 bp, Artificial Sequence
  Oligonucleotide primer for the detection of SNP TSC0018959
aaccccaactcc

SEQ ID NO: 300291 - DNA, 12 bp, Artificial Sequence
  Oligonucleotide primer for the detection of SNP TSC0018959
ggttattggtgg

SEQ ID NO: 300292 - DNA, 12 bp, Artificial Sequence
  Oligonucleotide primer for the detection of SNP TSC0018959
ggttatcggtgg

SEQ ID NO: 300293 - DNA, 12 bp, Artificial Sequence
  Oligonucleotide primer for the detection of SNP TSC0018959
aactatcaataa

SEQ ID NO: 300294 - DNA, 12 bp, Artificial Sequence
  Oligonucleotide primer for the detection of SNP TSC0018959
aactatcgataa

SEQ ID NO: 300295 - DNA, 12 bp, Artificial Sequence
  Oligonucleotide primer for the detection of SNP TSC0018959
aattttagtttc

SEQ ID NO: 300296 - DNA, 12 bp, Artificial Sequence
  Oligonucleotide primer for the detection of SNP TSC0018961
tttttggattta

SEQ ID NO: 300297 - DNA, 12 bp, Artificial Sequence
  Oligonucleotide primer for the detection of SNP TSC0018962
tgtttttaattt

SEQ ID NO: 300298 - DNA, 12 bp, Artificial Sequence
  Oligonucleotide primer for the detection of SNP TSC0018962
ttattcctaatc

SEQ ID NO: 300299 - DNA, 12 bp, Artificial Sequence
  Oligonucleotide primer for the detection of SNP TSC0018962
taggatatggtg

SEQ ID NO: 300300 - DNA, 12 bp, Artificial Sequence
  Oligonucleotide primer for the detection of SNP TSC0018963
tgaaaatttttt

SEQ ID NO: 300301 - DNA, 12 bp, Artificial Sequence
  Oligonucleotide primer for the detection of SNP TSC0018963
taaaaatcccct

SEQ ID NO: 300302 - DNA, 12 bp, Artificial Sequence
  Oligonucleotide primer for the detection of SNP TSC0018963
gggatgaggttg

SEQ ID NO: 300303 - DNA, 12 bp, Artificial Sequence
  Oligonucleotide primer for the detection of SNP TSC0018969
taaactaaaaat

SEQ ID NO: 300304 - DNA, 12 bp, Artificial Sequence
  Oligonucleotide primer for the detection of SNP TSC0018969
ttttagatttag

SEQ ID NO: 300305 - DNA, 12 bp, Artificial Sequence
  Oligonucleotide primer for the detection of SNP TSC0018971
atttataattcc

SEQ ID NO: 300306 - DNA, 12 bp, Artificial Sequence
  Oligonucleotide primer for the detection of SNP TSC0018971
tggtaaatttaa

SEQ ID NO: 300307 - DNA, 12 bp, Artificial Sequence
  Oligonucleotide primer for the detection of SNP TSC0018971
cggtaaatttaa

SEQ ID NO: 300308 - DNA, 12 bp, Artificial Sequence
  Oligonucleotide primer for the detection of SNP TSC0018978
tatcactctcct

SEQ ID NO: 300309 - DNA, 12 bp, Artificial Sequence
  Oligonucleotide primer for the detection of SNP TSC0018978
ggatgtaattta

SEQ ID NO: 300310 - DNA, 12 bp, Artificial Sequence
  Oligonucleotide primer for the detection of SNP TSC0018979
cctcaaactcct

SEQ ID NO: 300311 - DNA, 12 bp, Artificial Sequence
  Oligonucleotide primer for the detection of SNP TSC0018979
cctcgaactcct

SEQ ID NO: 300312 - DNA, 12 bp, Artificial Sequence
  Oligonucleotide primer for the detection of SNP TSC0018980
actaaaacaacc

SEQ ID NO: 300313 - DNA, 12 bp, Artificial Sequence
  Oligonucleotide primer for the detection of SNP TSC0018980
gttgtatgggta

SEQ ID NO: 300314 - DNA, 12 bp, Artificial Sequence
  Oligonucleotide primer for the detection of SNP TSC0018980
gtcgtatgggta

SEQ ID NO: 300315 - DNA, 12 bp, Artificial Sequence
  Oligonucleotide primer for the detection of SNP TSC0018980
accatataaaca

SEQ ID NO: 300316 - DNA, 12 bp, Artificial Sequence
  Oligonukleotid-Primer
accgtataaaca

SEQ ID NO: 300317 - DNA, 12 bp, Artificial Sequence
  Oligonucleotide primer for the detection of SNP TSC0018980
gccatataaaca

SEQ ID NO: 300318 - DNA, 12 bp, Artificial Sequence
  Oligonucleotide primer for the detection of SNP TSC0018980
gccgtataaaca

SEQ ID NO: 300319 - DNA, 12 bp, Artificial Sequence
  Oligonucleotide primer for the detection of SNP TSC0018980
gttgggataatt

SEQ ID NO: 300320 - DNA, 12 bp, Artificial Sequence
  Oligonucleotide primer for the detection of SNP TSC0018982
tatacatttatc

SEQ ID NO: 300321 - DNA, 12 bp, Artificial Sequence
  Oligonucleotide primer for the detection of SNP TSC0018982
tatacgtttatc

SEQ ID NO: 300322 - DNA, 12 bp, Artificial Sequence
  Oligonucleotide primer for the detection of SNP TSC0018982
atggtgaataaa

SEQ ID NO: 300323 - DNA, 12 bp, Artificial Sequence
  Oligonucleotide primer for the detection of SNP TSC0018983
aacaaaaacaca

SEQ ID NO: 300324 - DNA, 12 bp, Artificial Sequence
  Oligonucleotide primer for the detection of SNP TSC0018983
ttagataaatgt

SEQ ID NO: 300325 - DNA, 12 bp, Artificial Sequence
  Oligonucleotide primer for the detection of SNP TSC0018983
ttagataaacgt

SEQ ID NO: 300326 - DNA, 12 bp, Artificial Sequence
  Oligonucleotide primer for the detection of SNP TSC0018983
taaacaaacata

SEQ ID NO: 300327 - DNA, 12 bp, Artificial Sequence
  Oligonucleotide primer for the detection of SNP TSC0018983
taaacaaacgta

SEQ ID NO: 300328 - DNA, 12 bp, Artificial Sequence
  Oligonucleotide primer for the detection of SNP TSC0018983
taaaaatatatt

SEQ ID NO: 300329 - DNA, 12 bp, Artificial Sequence
  Oligonucleotide primer for the detection of SNP TSC0018984
aatcacatctct

SEQ ID NO: 300330 - DNA, 12 bp, Artificial Sequence
  Oligonucleotide primer for the detection of SNP TSC0018984
gtttttaaggtg

SEQ ID NO: 300331 - DNA, 12 bp, Artificial Sequence
  Oligonucleotide primer for the detection of SNP TSC0018985
caaatacacccc

SEQ ID NO: 300332 - DNA, 12 bp, Artificial Sequence
  Oligonucleotide primer for the detection of SNP TSC0018985
aggtagttatat

SEQ ID NO: 300333 - DNA, 12 bp, Artificial Sequence
  Oligonucleotide primer for the detection of SNP TSC0018985
aaacaaccacat

SEQ ID NO: 300334 - DNA, 12 bp, Artificial Sequence
  Oligonucleotide primer for the detection of SNP TSC0018985
taaatgtatttt

SEQ ID NO: 300335 - DNA, 12 bp, Artificial Sequence
  Oligonucleotide primer for the detection of SNP TSC0018986
cccctaataaat

SEQ ID NO: 300336 - DNA, 12 bp, Artificial Sequence
  Oligonucleotide primer for the detection of SNP TSC0018986
ttaagaattggg

SEQ ID NO: 300337 - DNA, 12 bp, Artificial Sequence
  Oligonucleotide primer for the detection of SNP TSC0018987
acctttactaca

SEQ ID NO: 300338 - DNA, 12 bp, Artificial Sequence
  Oligonucleotide primer for the detection of SNP TSC0018987
tgagagtaaagt

SEQ ID NO: 300339 - DNA, 12 bp, Artificial Sequence
  Oligonucleotide primer for the detection of SNP TSC0018987
tgagagtaaagc

SEQ ID NO: 300340 - DNA, 12 bp, Artificial Sequence
  Oligonucleotide primer for the detection of SNP TSC0018987
atttttgttata

SEQ ID NO: 300341 - DNA, 12 bp, Artificial Sequence
  Oligonucleotide primer for the detection of SNP TSC0018988
tgttttttattg

SEQ ID NO: 300342 - DNA, 12 bp, Artificial Sequence
  Oligonucleotide primer for the detection of SNP TSC0018988
tacctttcacta

SEQ ID NO: 300343 - DNA, 12 bp, Artificial Sequence
  Oligonucleotide primer for the detection of SNP TSC0018988
ggttttataatt

SEQ ID NO: 300344 - DNA, 12 bp, Artificial Sequence
  Oligonucleotide primer for the detection of SNP TSC0018991
ttttgtattgta

SEQ ID NO: 300345 - DNA, 12 bp, Artificial Sequence
  Oligonucleotide primer for the detection of SNP TSC0018991
ttttgtatcgta

SEQ ID NO: 300346 - DNA, 12 bp, Artificial Sequence
  Oligonucleotide primer for the detection of SNP TSC0018993
tacaataattac

SEQ ID NO: 300347 - DNA, 12 bp, Artificial Sequence
  Oligonucleotide primer for the detection of SNP TSC0018993
gttggagtgtag

SEQ ID NO: 300348 - DNA, 12 bp, Artificial Sequence
  Oligonucleotide primer for the detection of SNP TSC0018994
taatcctcccca

SEQ ID NO: 300349 - DNA, 12 bp, Artificial Sequence
  Oligonucleotide primer for the detection of SNP TSC0018994
tatttaggaggt

SEQ ID NO: 300350 - DNA, 12 bp, Artificial Sequence
  Oligonucleotide primer for the detection of SNP TSC0018995
caaccaacacac

SEQ ID NO: 300351 - DNA, 12 bp, Artificial Sequence
  Oligonucleotide primer for the detection of SNP TSC0018996
atttttaggatt

SEQ ID NO: 300352 - DNA, 12 bp, Artificial Sequence
  Oligonucleotide primer for the detection of SNP TSC0018996
atttttaggatc

SEQ ID NO: 300353 - DNA, 12 bp, Artificial Sequence
  Oligonucleotide primer for the detection of SNP TSC0018996
aatctccaaaat

SEQ ID NO: 300354 - DNA, 12 bp, Artificial Sequence
  Oligonucleotide primer for the detection of SNP TSC0018996
gatctccaaaat

SEQ ID NO: 300355 - DNA, 12 bp, Artificial Sequence
  Oligonucleotide primer for the detection of SNP TSC0018996
tttgaggaggaa

SEQ ID NO: 300356 - DNA, 12 bp, Artificial Sequence
  Oligonucleotide primer for the detection of SNP TSC0018997
cataaacaacaa

SEQ ID NO: 300357 - DNA, 12 bp, Artificial Sequence
  Oligonucleotide primer for the detection of SNP TSC0018997
tttttgttaaat

SEQ ID NO: 300358 - DNA, 12 bp, Artificial Sequence
  Oligonucleotide primer for the detection of SNP TSC0018997
tttctattaaac

SEQ ID NO: 300359 - DNA, 12 bp, Artificial Sequence
  Oligonucleotide primer for the detection of SNP TSC0018997
tataaatagtaa

SEQ ID NO: 300360 - DNA, 12 bp, Artificial Sequence
  Oligonucleotide primer for the detection of SNP TSC0019000
ccaatttaaaac

SEQ ID NO: 300361 - DNA, 12 bp, Artificial Sequence
  Oligonucleotide primer for the detection of SNP TSC0019000
aataatgataaa

SEQ ID NO: 300362 - DNA, 12 bp, Artificial Sequence
  Oligonucleotide primer for the detection of SNP TSC0019001
atcctaaaacca

SEQ ID NO: 300363 - DNA, 12 bp, Artificial Sequence
  Oligonucleotide primer for the detection of SNP TSC0019001
agtatattttat

SEQ ID NO: 300364 - DNA, 12 bp, Artificial Sequence
  Oligonucleotide primer for the detection of SNP TSC0019001
aacatatcttac

SEQ ID NO: 300365 - DNA, 12 bp, Artificial Sequence
  Oligonucleotide primer for the detection of SNP TSC0019001
attttgaggtta

SEQ ID NO: 300366 - DNA, 12 bp, Artificial Sequence
  Oligonucleotide primer for the detection of SNP TSC0019002
aaaaaacccttt

SEQ ID NO: 300367 - DNA, 12 bp, Artificial Sequence
  Oligonucleotide primer for the detection of SNP TSC0019002
gaggtttgggga

SEQ ID NO: 300368 - DNA, 12 bp, Artificial Sequence
  Oligonucleotide primer for the detection of SNP TSC0019004
tctcacaaaatt

SEQ ID NO: 300369 - DNA, 12 bp, Artificial Sequence
  Oligonucleotide primer for the detection of SNP TSC0019004
gaatttttgtaa

SEQ ID NO: 300370 - DNA, 12 bp, Artificial Sequence
  Oligonucleotide primer for the detection of SNP TSC0019004
aaatccttacaa

SEQ ID NO: 300371 - DNA, 12 bp, Artificial Sequence
  Oligonucleotide primer for the detection of SNP TSC0019005
aaatattaaaaa

SEQ ID NO: 300372 - DNA, 12 bp, Artificial Sequence
  Oligonucleotide primer for the detection of SNP TSC0019005
tatgataaagtt

SEQ ID NO: 300373 - DNA, 12 bp, Artificial Sequence
  Oligonucleotide primer for the detection of SNP TSC0019005
cataataaaatt

SEQ ID NO: 300374 - DNA, 12 bp, Artificial Sequence
  Oligonucleotide primer for the detection of SNP TSC0019005
ggaatattggaa

SEQ ID NO: 300375 - DNA, 12 bp, Artificial Sequence
  Oligonucleotide primer for the detection of SNP TSC0019008
aacttatataaa

SEQ ID NO: 300376 - DNA, 12 bp, Artificial Sequence
  Oligonucleotide primer for the detection of SNP TSC0019008
gggttattttga

SEQ ID NO: 300377 - DNA, 12 bp, Artificial Sequence
  Oligonucleotide primer for the detection of SNP TSC0019008
gggttatttcga

SEQ ID NO: 300378 - DNA, 12 bp, Artificial Sequence
  Oligonucleotide primer for the detection of SNP TSC0019008
aaattattccaa

SEQ ID NO: 300379 - DNA, 12 bp, Artificial Sequence
  Oligonucleotide primer for the detection of SNP TSC0019008
aaattattccga

SEQ ID NO: 300380 - DNA, 12 bp, Artificial Sequence
  Oligonucleotide primer for the detection of SNP TSC0019008
aagtttatataa

SEQ ID NO: 300381 - DNA, 12 bp, Artificial Sequence
  Oligonucleotide primer for the detection of SNP TSC0019009
ttaatttctacc

SEQ ID NO: 300382 - DNA, 12 bp, Artificial Sequence
  Oligonucleotide primer for the detection of SNP TSC0019009
ataaatattgtt

SEQ ID NO: 300383 - DNA, 12 bp, Artificial Sequence
  Oligonucleotide primer for the detection of SNP TSC0019010
tctccatctact

SEQ ID NO: 300384 - DNA, 12 bp, Artificial Sequence
  Oligonucleotide primer for the detection of SNP TSC0019010
gaagggggtaag

SEQ ID NO: 300385 - DNA, 12 bp, Artificial Sequence
  Oligonucleotide primer for the detection of SNP TSC0019011
ctcctcttatcc

SEQ ID NO: 300386 - DNA, 12 bp, Artificial Sequence
  Oligonucleotide primer for the detection of SNP TSC0019011
attgttttgtag

SEQ ID NO: 300387 - DNA, 12 bp, Artificial Sequence
  Oligonucleotide primer for the detection of SNP TSC0019012
cttccctcaatt

SEQ ID NO: 300388 - DNA, 12 bp, Artificial Sequence
  Oligonucleotide primer for the detection of SNP TSC0019012
gagatttaaaaa

SEQ ID NO: 300389 - DNA, 12 bp, Artificial Sequence
  Oligonucleotide primer for the detection of SNP TSC0019013
tcatttatatta

SEQ ID NO: 300390 - DNA, 12 bp, Artificial Sequence
  Oligonucleotide primer for the detection of SNP TSC0019013
ttgttttagaat

SEQ ID NO: 300391 - DNA, 12 bp, Artificial Sequence
  Oligonucleotide primer for the detection of SNP TSC0019013
ttatttgtatta

SEQ ID NO: 300392 - DNA, 12 bp, Artificial Sequence
  Oligonucleotide primer for the detection of SNP TSC0019014
taacctcccaaa

SEQ ID NO: 300393 - DNA, 12 bp, Artificial Sequence
  Oligonucleotide primer for the detection of SNP TSC0019015
aaatatacccac

SEQ ID NO: 300394 - DNA, 12 bp, Artificial Sequence
  Oligonucleotide primer for the detection of SNP TSC0019015
atatttgtggag

SEQ ID NO: 300395 - DNA, 12 bp, Artificial Sequence
  Oligonucleotide primer for the detection of SNP TSC0019016
aaccctactcta

SEQ ID NO: 300396 - DNA, 12 bp, Artificial Sequence
  Oligonucleotide primer for the detection of SNP TSC0019016
tttgttatagtt

SEQ ID NO: 300397 - DNA, 12 bp, Artificial Sequence
  Oligonucleotide primer for the detection of SNP TSC0019016
ttcgttatagtt

SEQ ID NO: 300398 - DNA, 12 bp, Artificial Sequence
  Oligonucleotide primer for the detection of SNP TSC0019016
ctcaccacaatt

SEQ ID NO: 300399 - DNA, 12 bp, Artificial Sequence
  Oligonucleotide primer for the detection of SNP TSC0019016
ctcgccacaatt

SEQ ID NO: 300400 - DNA, 12 bp, Artificial Sequence
  Oligonucleotide primer for the detection of SNP TSC0019016
gattttgttttg

SEQ ID NO: 300401 - DNA, 12 bp, Artificial Sequence
  Oligonucleotide primer for the detection of SNP TSC0019017
ccatcctaaatt

SEQ ID NO: 300402 - DNA, 12 bp, Artificial Sequence
  Oligonucleotide primer for the detection of SNP TSC0019017
ccgtcctaaatt

SEQ ID NO: 300403 - DNA, 12 bp, Artificial Sequence
  Oligonucleotide primer for the detection of SNP TSC0019017
gagtgggtgata

SEQ ID NO: 300404 - DNA, 12 bp, Artificial Sequence
  Oligonucleotide primer for the detection of SNP TSC0019017
gagtgggcgata

SEQ ID NO: 300405 - DNA, 12 bp, Artificial Sequence
  Oligonucleotide primer for the detection of SNP TSC0019018
atctaatctata

SEQ ID NO: 300406 - DNA, 12 bp, Artificial Sequence
  Oligonucleotide primer for the detection of SNP TSC0019018
ttagtttagtgt

SEQ ID NO: 300407 - DNA, 12 bp, Artificial Sequence
  Oligonucleotide primer for the detection of SNP TSC0019018
ctaattcaatat

SEQ ID NO: 300408 - DNA, 12 bp, Artificial Sequence
  Oligonucleotide primer for the detection of SNP TSC0019018
atttagtttgtg

SEQ ID NO: 300409 - DNA, 12 bp, Artificial Sequence
  Oligonukleotid-Primer
atctacaacaac

SEQ ID NO: 300410 - DNA, 12 bp, Artificial Sequence
  Oligonucleotide primer for the detection of SNP TSC0019020
aaataaaaacct

SEQ ID NO: 300411 - DNA, 12 bp, Artificial Sequence
  Oligonucleotide primer for the detection of SNP TSC0019020
gatttttggagg

SEQ ID NO: 300412 - DNA, 12 bp, Artificial Sequence
  Oligonucleotide primer for the detection of SNP TSC0019021
taaaatacaaaa

SEQ ID NO: 300413 - DNA, 12 bp, Artificial Sequence
  Oligonukleotid-Primer
atccccttcccc

SEQ ID NO: 300414 - DNA, 12 bp, Artificial Sequence
  Oligonucleotide primer for the detection of SNP TSC0019021
taggatgtaggg

SEQ ID NO: 300415 - DNA, 12 bp, Artificial Sequence
  Oligonucleotide primer for the detection of SNP TSC0019022
catccccatcac

SEQ ID NO: 300416 - DNA, 12 bp, Artificial Sequence
  Oligonucleotide primer for the detection of SNP TSC0019022
aggatttgaatg

SEQ ID NO: 300417 - DNA, 12 bp, Artificial Sequence
  Oligonukleotid-Primer
ccctttcctctc

SEQ ID NO: 300418 - DNA, 12 bp, Artificial Sequence
  Oligonucleotide primer for the detection of SNP TSC0019023
ggttttgtaaag

SEQ ID NO: 300419 - DNA, 12 bp, Artificial Sequence
  Oligonucleotide primer for the detection of SNP TSC0019023
aactttacaaaa

SEQ ID NO: 300420 - DNA, 12 bp, Artificial Sequence
  Oligonucleotide primer for the detection of SNP TSC0019024
cctataacctct

SEQ ID NO: 300421 - DNA, 12 bp, Artificial Sequence
  Oligonucleotide primer for the detection of SNP TSC0019024
ggaggttgtgaa

SEQ ID NO: 300422 - DNA, 12 bp, Artificial Sequence
  Oligonucleotide primer for the detection of SNP TSC0019024
ggaggttgcgaa

SEQ ID NO: 300423 - DNA, 12 bp, Artificial Sequence
  Oligonucleotide primer for the detection of SNP TSC0019025
cccccactctcc

SEQ ID NO: 300424 - DNA, 12 bp, Artificial Sequence
  Oligonucleotide primer for the detection of SNP TSC0019025
tagggttttttg

SEQ ID NO: 300425 - DNA, 12 bp, Artificial Sequence
  Oligonucleotide primer for the detection of SNP TSC0019025
tttttatttttc

SEQ ID NO: 300426 - DNA, 12 bp, Artificial Sequence
  Oligonucleotide primer for the detection of SNP TSC0019026
acatccttcttt

SEQ ID NO: 300427 - DNA, 12 bp, Artificial Sequence
  Oligonucleotide primer for the detection of SNP TSC0019026
tgggaagtggag

SEQ ID NO: 300428 - DNA, 12 bp, Artificial Sequence
  Oligonucleotide primer for the detection of SNP TSC0019030
cctatactttat

SEQ ID NO: 300429 - DNA, 12 bp, Artificial Sequence
  Oligonucleotide primer for the detection of SNP TSC0019030
agttttggtggg

SEQ ID NO: 300430 - DNA, 12 bp, Artificial Sequence
  Oligonucleotide primer for the detection of SNP TSC0019031
cccaaaatcact

SEQ ID NO: 300431 - DNA, 12 bp, Artificial Sequence
  Oligonucleotide primer for the detection of SNP TSC0019031
ttaagtttagat

SEQ ID NO: 300432 - DNA, 12 bp, Artificial Sequence
  Oligonucleotide primer for the detection of SNP TSC0019032
cctttaccctta

SEQ ID NO: 300433 - DNA, 12 bp, Artificial Sequence
  Oligonucleotide primer for the detection of SNP TSC0019032
tattaggatgta

SEQ ID NO: 300434 - DNA, 12 bp, Artificial Sequence
  Oligonucleotide primer for the detection of SNP TSC0019032
cactaaaatata

SEQ ID NO: 300435 - DNA, 12 bp, Artificial Sequence
  Oligonucleotide primer for the detection of SNP TSC0019034
ataactattcac

SEQ ID NO: 300436 - DNA, 12 bp, Artificial Sequence
  Oligonucleotide primer for the detection of SNP TSC0019034
tataggagaggg

SEQ ID NO: 300437 - DNA, 12 bp, Artificial Sequence
  Oligonucleotide primer for the detection of SNP TSC0019035
aaaaataaactt

SEQ ID NO: 300438 - DNA, 12 bp, Artificial Sequence
  Oligonucleotide primer for the detection of SNP TSC0019035
atgttaaagttg

SEQ ID NO: 300439 - DNA, 12 bp, Artificial Sequence
  Oligonucleotide primer for the detection of SNP TSC0019035
atactaaaatta

SEQ ID NO: 300440 - DNA, 12 bp, Artificial Sequence
  Oligonucleotide primer for the detection of SNP TSC0019035
gaaagtgagttt

SEQ ID NO: 300441 - DNA, 12 bp, Artificial Sequence
  Oligonucleotide primer for the detection of SNP TSC0019036
aatattttctaa

SEQ ID NO: 300442 - DNA, 12 bp, Artificial Sequence
  Oligonucleotide primer for the detection of SNP TSC0019036
gataatattttt

SEQ ID NO: 300443 - DNA, 12 bp, Artificial Sequence
  Oligonucleotide primer for the detection of SNP TSC0019036
aataacattctc

SEQ ID NO: 300444 - DNA, 12 bp, Artificial Sequence
  Oligonucleotide primer for the detection of SNP TSC0019036
aatgttttttaa

SEQ ID NO: 300445 - DNA, 12 bp, Artificial Sequence
  Oligonucleotide primer for the detection of SNP TSC0019037
ctatttttcaac

SEQ ID NO: 300446 - DNA, 12 bp, Artificial Sequence
  Oligonucleotide primer for the detection of SNP TSC0019037
ttttattagaaa

SEQ ID NO: 300447 - DNA, 12 bp, Artificial Sequence
  Oligonucleotide primer for the detection of SNP TSC0019038
aaaaactaaccc

SEQ ID NO: 300448 - DNA, 12 bp, Artificial Sequence
  Oligonucleotide primer for the detection of SNP TSC0019039
tttctacaaaaa

SEQ ID NO: 300449 - DNA, 12 bp, Artificial Sequence
  Oligonucleotide primer for the detection of SNP TSC0019039
gggatatattgt

SEQ ID NO: 300450 - DNA, 12 bp, Artificial Sequence
  Oligonucleotide primer for the detection of SNP TSC0019039
gggatatatcgt

SEQ ID NO: 300451 - DNA, 12 bp, Artificial Sequence
  Oligonucleotide primer for the detection of SNP TSC0019039
aaaatacatcac

SEQ ID NO: 300452 - DNA, 12 bp, Artificial Sequence
  Oligonucleotide primer for the detection of SNP TSC0019039
aaaatacatcgc

SEQ ID NO: 300453 - DNA, 12 bp, Artificial Sequence
  Oligonucleotide primer for the detection of SNP TSC0019039
tatttttgtaag

SEQ ID NO: 300454 - DNA, 12 bp, Artificial Sequence
  Oligonucleotide primer for the detection of SNP TSC0019040
tgttattatatt

SEQ ID NO: 300455 - DNA, 12 bp, Artificial Sequence
  Oligonucleotide primer for the detection of SNP TSC0019040
tgttattatatc

SEQ ID NO: 300456 - DNA, 12 bp, Artificial Sequence
  Oligonucleotide primer for the detection of SNP TSC0019040
aaaaaattagtt

SEQ ID NO: 300457 - DNA, 12 bp, Artificial Sequence
  Oligonucleotide primer for the detection of SNP TSC0019042
ccacaacaacct

SEQ ID NO: 300458 - DNA, 12 bp, Artificial Sequence
  Oligonucleotide primer for the detection of SNP TSC0019042
ccgcaacaacct

SEQ ID NO: 300459 - DNA, 12 bp, Artificial Sequence
  Oligonucleotide primer for the detection of SNP TSC0019042
ttatattgtgtg

SEQ ID NO: 300460 - DNA, 12 bp, Artificial Sequence
  Oligonucleotide primer for the detection of SNP TSC0019042
ttatatcgtgtg

SEQ ID NO: 300461 - DNA, 12 bp, Artificial Sequence
  Oligonucleotide primer for the detection of SNP TSC0019042
ttatattgtgcg

SEQ ID NO: 300462 - DNA, 12 bp, Artificial Sequence
  Oligonucleotide primer for the detection of SNP TSC0019042
ttatatcgtgcg

SEQ ID NO: 300463 - DNA, 12 bp, Artificial Sequence
  Oligonucleotide primer for the detection of SNP TSC0019042
ccatacaaaaaa

SEQ ID NO: 300464 - DNA, 12 bp, Artificial Sequence
  Oligonucleotide primer for the detection of SNP TSC0019042
ccatacgaaaaa

SEQ ID NO: 300465 - DNA, 12 bp, Artificial Sequence
  Oligonucleotide primer for the detection of SNP TSC0019042
ccgtacaaaaaa

SEQ ID NO: 300466 - DNA, 12 bp, Artificial Sequence
  Oligonucleotide primer for the detection of SNP TSC0019042
ccgtacgaaaaa

SEQ ID NO: 300467 - DNA, 12 bp, Artificial Sequence
  Oligonucleotide primer for the detection of SNP TSC0019042
gtagtagttttt

SEQ ID NO: 300468 - DNA, 12 bp, Artificial Sequence
  Oligonucleotide primer for the detection of SNP TSC0019042
gtagtagttttc

SEQ ID NO: 300469 - DNA, 12 bp, Artificial Sequence
  Oligonucleotide primer for the detection of SNP TSC0019045
cacaataaaaat

SEQ ID NO: 300470 - DNA, 12 bp, Artificial Sequence
  Oligonucleotide primer for the detection of SNP TSC0019045
ttttattagtag

SEQ ID NO: 300471 - DNA, 12 bp, Artificial Sequence
  Oligonucleotide primer for the detection of SNP TSC0019050
aatacaaatata

SEQ ID NO: 300472 - DNA, 12 bp, Artificial Sequence
  Oligonucleotide primer for the detection of SNP TSC0019050
tagaatatattt

SEQ ID NO: 300473 - DNA, 12 bp, Artificial Sequence
  Oligonucleotide primer for the detection of SNP TSC0019050
caaaatacattt

SEQ ID NO: 300474 - DNA, 12 bp, Artificial Sequence
  Oligonucleotide primer for the detection of SNP TSC0019050
tgtaagtatatt

SEQ ID NO: 300475 - DNA, 12 bp, Artificial Sequence
  Oligonucleotide primer for the detection of SNP TSC0019051
taatttctttat

SEQ ID NO: 300476 - DNA, 12 bp, Artificial Sequence
  Oligonucleotide primer for the detection of SNP TSC0019051
aatgaaaaatat

SEQ ID NO: 300477 - DNA, 12 bp, Artificial Sequence
  Oligonucleotide primer for the detection of SNP TSC0019052
atattcaaattt

SEQ ID NO: 300478 - DNA, 12 bp, Artificial Sequence
  Oligonucleotide primer for the detection of SNP TSC0019052
taaaataataga

SEQ ID NO: 300479 - DNA, 12 bp, Artificial Sequence
  Oligonucleotide primer for the detection of SNP TSC0019052
atgtttaggttt

SEQ ID NO: 300480 - DNA, 12 bp, Artificial Sequence
  Oligonucleotide primer for the detection of SNP TSC0019054
gttttagggaag

SEQ ID NO: 300481 - DNA, 12 bp, Artificial Sequence
  Oligonucleotide primer for the detection of SNP TSC0019054
acctcaaaaaaa

SEQ ID NO: 300482 - DNA, 12 bp, Artificial Sequence
  Oligonucleotide primer for the detection of SNP TSC0019054
gtaaggtgaggg

SEQ ID NO: 300483 - DNA, 12 bp, Artificial Sequence
  Oligonucleotide primer for the detection of SNP TSC0019054
gtaaggcgaggg

SEQ ID NO: 300484 - DNA, 12 bp, Artificial Sequence
  Oligonucleotide primer for the detection of SNP TSC0019055
acaccaaccctc

SEQ ID NO: 300485 - DNA, 12 bp, Artificial Sequence
  Oligonucleotide primer for the detection of SNP TSC0019055
aggttgtatttg

SEQ ID NO: 300486 - DNA, 12 bp, Artificial Sequence
  Oligonucleotide primer for the detection of SNP TSC0019055
aaattacactta

SEQ ID NO: 300487 - DNA, 12 bp, Artificial Sequence
  Oligonucleotide primer for the detection of SNP TSC0019055
atattaattttt

SEQ ID NO: 300488 - DNA, 12 bp, Artificial Sequence
  Oligonucleotide primer for the detection of SNP TSC0019056
caataaacaaaa

SEQ ID NO: 300489 - DNA, 12 bp, Artificial Sequence
  Oligonucleotide primer for the detection of SNP TSC0019056
acttcctccccc

SEQ ID NO: 300490 - DNA, 12 bp, Artificial Sequence
  Oligonucleotide primer for the detection of SNP TSC0019056
agtggatagaat

SEQ ID NO: 300491 - DNA, 12 bp, Artificial Sequence
  Oligonucleotide primer for the detection of SNP TSC0019057
cttaactcaaac

SEQ ID NO: 300492 - DNA, 12 bp, Artificial Sequence
  Oligonucleotide primer for the detection of SNP TSC0019057
tttggtttaggt

SEQ ID NO: 300493 - DNA, 12 bp, Artificial Sequence
  Oligonucleotide primer for the detection of SNP TSC0019058
ttattcctcaat

SEQ ID NO: 300494 - DNA, 12 bp, Artificial Sequence
  Oligonucleotide primer for the detection of SNP TSC0019058
aatatgtatatt

SEQ ID NO: 300495 - DNA, 12 bp, Artificial Sequence
  Oligonucleotide primer for the detection of SNP TSC0019059
attattagttaa

SEQ ID NO: 300496 - DNA, 12 bp, Artificial Sequence
  Oligonucleotide primer for the detection of SNP TSC0019060
acccttaatcat

SEQ ID NO: 300497 - DNA, 12 bp, Artificial Sequence
  Oligonucleotide primer for the detection of SNP TSC0019060
tttagatagtgg

SEQ ID NO: 300498 - DNA, 12 bp, Artificial Sequence
  Oligonucleotide primer for the detection of SNP TSC0019060
cccaaacaataa

SEQ ID NO: 300499 - DNA, 12 bp, Artificial Sequence
  Oligonucleotide primer for the detection of SNP TSC0019060
gtttttggttat

SEQ ID NO: 300500 - DNA, 12 bp, Artificial Sequence
  Oligonucleotide primer for the detection of SNP TSC0019064
catcaaaaaaat

SEQ ID NO: 300501 - DNA, 12 bp, Artificial Sequence
  Oligonucleotide primer for the detection of SNP TSC0019064
catcgaaaaaat

SEQ ID NO: 300502 - DNA, 12 bp, Artificial Sequence
  Oligonucleotide primer for the detection of SNP TSC0019064
tggattattgta

SEQ ID NO: 300503 - DNA, 12 bp, Artificial Sequence
  Oligonucleotide primer for the detection of SNP TSC0019067
cctcaataacat

SEQ ID NO: 300504 - DNA, 12 bp, Artificial Sequence
  Oligonucleotide primer for the detection of SNP TSC0019067
cctcgataacat

SEQ ID NO: 300505 - DNA, 12 bp, Artificial Sequence
  Oligonucleotide primer for the detection of SNP TSC0019067
tttggataggga

SEQ ID NO: 300506 - DNA, 12 bp, Artificial Sequence
  Oligonukleotid-Primer
ttttggtaatat

SEQ ID NO: 300507 - DNA, 12 bp, Artificial Sequence
  Oligonucleotide primer for the detection of SNP TSC0019067
tttcggtaatat

SEQ ID NO: 300508 - DNA, 12 bp, Artificial Sequence
  Oligonucleotide primer for the detection of SNP TSC0019070
ttattattaatt

SEQ ID NO: 300509 - DNA, 12 bp, Artificial Sequence
  Oligonucleotide primer for the detection of SNP TSC0019070
tatttactttaa

SEQ ID NO: 300510 - DNA, 12 bp, Artificial Sequence
  Oligonukleotid-Primer
ataccaaaacta

SEQ ID NO: 300511 - DNA, 12 bp, Artificial Sequence
  Oligonucleotide primer for the detection of SNP TSC0019071
ttaggaatttat

SEQ ID NO: 300512 - DNA, 12 bp, Artificial Sequence
  Oligonucleotide primer for the detection of SNP TSC0019071
tcaaaaatccac

SEQ ID NO: 300513 - DNA, 12 bp, Artificial Sequence
  Oligonucleotide primer for the detection of SNP TSC0019071
gtgttaagattg

SEQ ID NO: 300514 - DNA, 12 bp, Artificial Sequence
  Oligonucleotide primer for the detection of SNP TSC0019072
aaaaaaacttct

SEQ ID NO: 300515 - DNA, 12 bp, Artificial Sequence
  Oligonucleotide primer for the detection of SNP TSC0019072
tttaaatatgag

SEQ ID NO: 300516 - DNA, 12 bp, Artificial Sequence
  Oligonucleotide primer for the detection of SNP TSC0019073
ccacacaataaa

SEQ ID NO: 300517 - DNA, 12 bp, Artificial Sequence
  Oligonucleotide primer for the detection of SNP TSC0019073
taaaatatgtgt

SEQ ID NO: 300518 - DNA, 12 bp, Artificial Sequence
  Oligonucleotide primer for the detection of SNP TSC0019073
taaaatatgcgt

SEQ ID NO: 300519 - DNA, 12 bp, Artificial Sequence
  Oligonucleotide primer for the detection of SNP TSC0019073
caaaacatacat

SEQ ID NO: 300520 - DNA, 12 bp, Artificial Sequence
  Oligonucleotide primer for the detection of SNP TSC0019073
caaaacatacgt

SEQ ID NO: 300521 - DNA, 12 bp, Artificial Sequence
  Oligonucleotide primer for the detection of SNP TSC0019073
ttatatagtggg

SEQ ID NO: 300522 - DNA, 12 bp, Artificial Sequence
  Oligonucleotide primer for the detection of SNP TSC0019074
cttctatacctc

SEQ ID NO: 300523 - DNA, 12 bp, Artificial Sequence
  Oligonucleotide primer for the detection of SNP TSC0019074
atggatgatatt

SEQ ID NO: 300524 - DNA, 12 bp, Artificial Sequence
  Oligonucleotide primer for the detection of SNP TSC0019074
ataaataacatt

SEQ ID NO: 300525 - DNA, 12 bp, Artificial Sequence
  Oligonucleotide primer for the detection of SNP TSC0019075
aaccatctctta

SEQ ID NO: 300526 - DNA, 12 bp, Artificial Sequence
  Oligonucleotide primer for the detection of SNP TSC0019075
gatatttattgt

SEQ ID NO: 300527 - DNA, 12 bp, Artificial Sequence
  Oligonucleotide primer for the detection of SNP TSC0019075
gatatttatcgt

SEQ ID NO: 300528 - DNA, 12 bp, Artificial Sequence
  Oligonucleotide primer for the detection of SNP TSC0019075
aacactcaccat

SEQ ID NO: 300529 - DNA, 12 bp, Artificial Sequence
  Oligonucleotide primer for the detection of SNP TSC0019075
aacactcaccgt

SEQ ID NO: 300530 - DNA, 12 bp, Artificial Sequence
  Oligonucleotide primer for the detection of SNP TSC0019076
taaaaacctaaa

SEQ ID NO: 300531 - DNA, 12 bp, Artificial Sequence
  Oligonucleotide primer for the detection of SNP TSC0019076
ttaatgaaagat

SEQ ID NO: 300532 - DNA, 12 bp, Artificial Sequence
  Oligonucleotide primer for the detection of SNP TSC0019076
tgaagatttggg

SEQ ID NO: 300533 - DNA, 12 bp, Artificial Sequence
  Oligonucleotide primer for the detection of SNP TSC0019077
accaactccatt

SEQ ID NO: 300534 - DNA, 12 bp, Artificial Sequence
  Oligonucleotide primer for the detection of SNP TSC0019077
tagaatatggta

SEQ ID NO: 300535 - DNA, 12 bp, Artificial Sequence
  Oligonucleotide primer for the detection of SNP TSC0019080
aattaactatat

SEQ ID NO: 300536 - DNA, 12 bp, Artificial Sequence
  Oligonucleotide primer for the detection of SNP TSC0019080
atatattatgta

SEQ ID NO: 300537 - DNA, 12 bp, Artificial Sequence
  Oligonucleotide primer for the detection of SNP TSC0019080
atacactatata

SEQ ID NO: 300538 - DNA, 12 bp, Artificial Sequence
  Oligonucleotide primer for the detection of SNP TSC0019080
aattaattatat

SEQ ID NO: 300539 - DNA, 12 bp, Artificial Sequence
  Oligonucleotide primer for the detection of SNP TSC0019082
ataacccaaacc

SEQ ID NO: 300540 - DNA, 12 bp, Artificial Sequence
  Oligonucleotide primer for the detection of SNP TSC0019082
taaggtttttaa

SEQ ID NO: 300541 - DNA, 12 bp, Artificial Sequence
  Oligonucleotide primer for the detection of SNP TSC0019082
taaaatttctaa

SEQ ID NO: 300542 - DNA, 12 bp, Artificial Sequence
  Oligonucleotide primer for the detection of SNP TSC0019082
gtgatttagatt

SEQ ID NO: 300543 - DNA, 12 bp, Artificial Sequence
  Oligonucleotide primer for the detection of SNP TSC0019083
atcaaaacccta

SEQ ID NO: 300544 - DNA, 12 bp, Artificial Sequence
  Oligonucleotide primer for the detection of SNP TSC0019083
tgttttaatttt

SEQ ID NO: 300545 - DNA, 12 bp, Artificial Sequence
  Oligonucleotide primer for the detection of SNP TSC0019083
tatcccaacccc

SEQ ID NO: 300546 - DNA, 12 bp, Artificial Sequence
  Oligonucleotide primer for the detection of SNP TSC0019083
attaaggttttg

SEQ ID NO: 300547 - DNA, 12 bp, Artificial Sequence
  Oligonucleotide primer for the detection of SNP TSC0019085
atttctaatcct

SEQ ID NO: 300548 - DNA, 12 bp, Artificial Sequence
  Oligonucleotide primer for the detection of SNP TSC0019085
atagggttgtta

SEQ ID NO: 300549 - DNA, 12 bp, Artificial Sequence
  Oligonucleotide primer for the detection of SNP TSC0019086
cctctatacctc

SEQ ID NO: 300550 - DNA, 12 bp, Artificial Sequence
  Oligonucleotide primer for the detection of SNP TSC0019086
agaaatataatg

SEQ ID NO: 300551 - DNA, 12 bp, Artificial Sequence
  Oligonucleotide primer for the detection of SNP TSC0019086
agaaatataacg

SEQ ID NO: 300552 - DNA, 12 bp, Artificial Sequence
  Oligonucleotide primer for the detection of SNP TSC0019086
aaaaatacaaca

SEQ ID NO: 300553 - DNA, 12 bp, Artificial Sequence
  Oligonucleotide primer for the detection of SNP TSC0019086
aaaaatacaacg

SEQ ID NO: 300554 - DNA, 12 bp, Artificial Sequence
  Oligonucleotide primer for the detection of SNP TSC0019088
aaaaaatccctt

SEQ ID NO: 300555 - DNA, 12 bp, Artificial Sequence
  Oligonucleotide primer for the detection of SNP TSC0019088
tgttgaggatag

SEQ ID NO: 300556 - DNA, 12 bp, Artificial Sequence
  Oligonucleotide primer for the detection of SNP TSC0019088
tgtcgaggatag

SEQ ID NO: 300557 - DNA, 12 bp, Artificial Sequence
  Oligonucleotide primer for the detection of SNP TSC0019090
ttattacacacc

SEQ ID NO: 300558 - DNA, 12 bp, Artificial Sequence
  Oligonucleotide primer for the detection of SNP TSC0019090
aggtataatagt

SEQ ID NO: 300559 - DNA, 12 bp, Artificial Sequence
  Oligonucleotide primer for the detection of SNP TSC0019090
tacaacaacaaa

SEQ ID NO: 300560 - DNA, 12 bp, Artificial Sequence
  Oligonucleotide primer for the detection of SNP TSC0019090
tgttatatattt

SEQ ID NO: 300561 - DNA, 12 bp, Artificial Sequence
  Oligonucleotide primer for the detection of SNP TSC0019094
cattttttaaaa

SEQ ID NO: 300562 - DNA, 12 bp, Artificial Sequence
  Oligonucleotide primer for the detection of SNP TSC0019095
atatttcccaat

SEQ ID NO: 300563 - DNA, 12 bp, Artificial Sequence
  Oligonucleotide primer for the detection of SNP TSC0019095
ttgttaattgga

SEQ ID NO: 300564 - DNA, 12 bp, Artificial Sequence
  Oligonucleotide primer for the detection of SNP TSC0019095
tcgttaattgga

SEQ ID NO: 300565 - DNA, 12 bp, Artificial Sequence
  Oligonucleotide primer for the detection of SNP TSC0019095
ccatcaattaaa

SEQ ID NO: 300566 - DNA, 12 bp, Artificial Sequence
  Oligonucleotide primer for the detection of SNP TSC0019095
ccgtcaattaaa

SEQ ID NO: 300567 - DNA, 12 bp, Artificial Sequence
  Oligonucleotide primer for the detection of SNP TSC0019095
gtgttttttagt

SEQ ID NO: 300568 - DNA, 12 bp, Artificial Sequence
  Oligonucleotide primer for the detection of SNP TSC0019096
acatatctaaca

SEQ ID NO: 300569 - DNA, 12 bp, Artificial Sequence
  Oligonucleotide primer for the detection of SNP TSC0019096
acatatctaacg

SEQ ID NO: 300570 - DNA, 12 bp, Artificial Sequence
  Oligonucleotide primer for the detection of SNP TSC0019096
ttgaagaataga

SEQ ID NO: 300571 - DNA, 12 bp, Artificial Sequence
  Oligonucleotide primer for the detection of SNP TSC0019097
ccaatattacat

SEQ ID NO: 300572 - DNA, 12 bp, Artificial Sequence
  Oligonucleotide primer for the detection of SNP TSC0019097
attttttgttag

SEQ ID NO: 300573 - DNA, 12 bp, Artificial Sequence
  Oligonucleotide primer for the detection of SNP TSC0019097
atttttcgttag

SEQ ID NO: 300574 - DNA, 12 bp, Artificial Sequence
  Oligonucleotide primer for the detection of SNP TSC0019098
atcctcaaaaac

SEQ ID NO: 300575 - DNA, 12 bp, Artificial Sequence
  Oligonucleotide primer for the detection of SNP TSC0019098
ttaaagagttta

SEQ ID NO: 300576 - DNA, 12 bp, Artificial Sequence
  Oligonucleotide primer for the detection of SNP TSC0019099
accctacaacta

SEQ ID NO: 300577 - DNA, 12 bp, Artificial Sequence
  Oligonucleotide primer for the detection of SNP TSC0019099
atagtaggagtt

SEQ ID NO: 300578 - DNA, 12 bp, Artificial Sequence
  Oligonucleotide primer for the detection of SNP TSC0019099
acaacaaaaatt

SEQ ID NO: 300579 - DNA, 12 bp, Artificial Sequence
  Oligonucleotide primer for the detection of SNP TSC0019099
gttttgtaatta

SEQ ID NO: 300580 - DNA, 12 bp, Artificial Sequence
  Oligonucleotide primer for the detection of SNP TSC0019103
acaaaaaataat

SEQ ID NO: 300581 - DNA, 12 bp, Artificial Sequence
  Oligonucleotide primer for the detection of SNP TSC0019103
gaagggtattag

SEQ ID NO: 300582 - DNA, 12 bp, Artificial Sequence
  Oligonucleotide primer for the detection of SNP TSC0019104
ctttctataaat

SEQ ID NO: 300583 - DNA, 12 bp, Artificial Sequence
  Oligonucleotide primer for the detection of SNP TSC0019104
tggattttatgg

SEQ ID NO: 300584 - DNA, 12 bp, Artificial Sequence
  Oligonucleotide primer for the detection of SNP TSC0019105
ataatattatta

SEQ ID NO: 300585 - DNA, 12 bp, Artificial Sequence
  Oligonucleotide primer for the detection of SNP TSC0019105
catactatacat

SEQ ID NO: 300586 - DNA, 12 bp, Artificial Sequence
  Oligonucleotide primer for the detection of SNP TSC0019105
ataatgttattg

SEQ ID NO: 300587 - DNA, 12 bp, Artificial Sequence
  Oligonucleotide primer for the detection of SNP TSC0019106
ctccaaaaaact

SEQ ID NO: 300588 - DNA, 12 bp, Artificial Sequence
  Oligonucleotide primer for the detection of SNP TSC0019107
aaaccaaacctt

SEQ ID NO: 300589 - DNA, 12 bp, Artificial Sequence
  Oligonucleotide primer for the detection of SNP TSC0019107
agttgttttttg

SEQ ID NO: 300590 - DNA, 12 bp, Artificial Sequence
  Oligonucleotide primer for the detection of SNP TSC0019108
ataaatcatacc

SEQ ID NO: 300591 - DNA, 12 bp, Artificial Sequence
  Oligonucleotide primer for the detection of SNP TSC0019108
ataaatcgtacc

SEQ ID NO: 300592 - DNA, 12 bp, Artificial Sequence
  Oligonucleotide primer for the detection of SNP TSC0019108
ggttttgttaat

SEQ ID NO: 300593 - DNA, 12 bp, Artificial Sequence
  Oligonucleotide primer for the detection of SNP TSC0019108
aaccttactaat

SEQ ID NO: 300594 - DNA, 12 bp, Artificial Sequence
  Oligonucleotide primer for the detection of SNP TSC0019108
tggattgtgttt

SEQ ID NO: 300595 - DNA, 12 bp, Artificial Sequence
  Oligonucleotide primer for the detection of SNP TSC0019108
tggatcgtgttt

SEQ ID NO: 300596 - DNA, 12 bp, Artificial Sequence
  Oligonucleotide primer for the detection of SNP TSC0019110
ttttccattaat

SEQ ID NO: 300597 - DNA, 12 bp, Artificial Sequence
  Oligonucleotide primer for the detection of SNP TSC0019110
ttgaaaataata

SEQ ID NO: 300598 - DNA, 12 bp, Artificial Sequence
  Oligonucleotide primer for the detection of SNP TSC0019110
ttttttattaat

SEQ ID NO: 300599 - DNA, 12 bp, Artificial Sequence
  Oligonukleotid-Primer
atacaaataaac

SEQ ID NO: 300600 - DNA, 12 bp, Artificial Sequence
  Oligonucleotide primer for the detection of SNP TSC0019111
taggtgttggtg

SEQ ID NO: 300601 - DNA, 12 bp, Artificial Sequence
  Oligonucleotide primer for the detection of SNP TSC0019111
taggcgttggtg

SEQ ID NO: 300602 - DNA, 12 bp, Artificial Sequence
  Oligonucleotide primer for the detection of SNP TSC0019111
caaacattaata

SEQ ID NO: 300603 - DNA, 12 bp, Artificial Sequence
  Oligonucleotide primer for the detection of SNP TSC0019111
caaacgttaata

SEQ ID NO: 300604 - DNA, 12 bp, Artificial Sequence
  Oligonucleotide primer for the detection of SNP TSC0019111
gtatagatgggt

SEQ ID NO: 300605 - DNA, 12 bp, Artificial Sequence
  Oligonucleotide primer for the detection of SNP TSC0019112
gagttgagatta

SEQ ID NO: 300606 - DNA, 12 bp, Artificial Sequence
  Oligonucleotide primer for the detection of SNP TSC0019112
gagtatagtggt

SEQ ID NO: 300607 - DNA, 12 bp, Artificial Sequence
  Oligonucleotide primer for the detection of SNP TSC0019112
gagtatagtggc

SEQ ID NO: 300608 - DNA, 12 bp, Artificial Sequence
  Oligonucleotide primer for the detection of SNP TSC0019113
aaaaaacatacc

SEQ ID NO: 300609 - DNA, 12 bp, Artificial Sequence
  Oligonucleotide primer for the detection of SNP TSC0019113
gagtataaagag

SEQ ID NO: 300610 - DNA, 12 bp, Artificial Sequence
  Oligonucleotide primer for the detection of SNP TSC0019114
caaactaatctt

SEQ ID NO: 300611 - DNA, 12 bp, Artificial Sequence
  Oligonucleotide primer for the detection of SNP TSC0019114
ttttgaatttag

SEQ ID NO: 300612 - DNA, 12 bp, Artificial Sequence
  Oligonucleotide primer for the detection of SNP TSC0019115
ttagtttgagtt

SEQ ID NO: 300613 - DNA, 12 bp, Artificial Sequence
  Oligonucleotide primer for the detection of SNP TSC0019115
ttttggaagttg

SEQ ID NO: 300614 - DNA, 12 bp, Artificial Sequence
  Oligonucleotide primer for the detection of SNP TSC0019116
aacaaaaattac

SEQ ID NO: 300615 - DNA, 12 bp, Artificial Sequence
  Oligonucleotide primer for the detection of SNP TSC0019116
gtgtagttttaa

SEQ ID NO: 300616 - DNA, 12 bp, Artificial Sequence
  Oligonucleotide primer for the detection of SNP TSC0019116
atacaatctcaa

SEQ ID NO: 300617 - DNA, 12 bp, Artificial Sequence
  Oligonucleotide primer for the detection of SNP TSC0019117
ttatttatttat

SEQ ID NO: 300618 - DNA, 12 bp, Artificial Sequence
  Oligonucleotide primer for the detection of SNP TSC0019118
actatacttaaa

SEQ ID NO: 300619 - DNA, 12 bp, Artificial Sequence
  Oligonucleotide primer for the detection of SNP TSC0019118
aataataatttg

SEQ ID NO: 300620 - DNA, 12 bp, Artificial Sequence
  Oligonucleotide primer for the detection of SNP TSC0019118
aataacaattta

SEQ ID NO: 300621 - DNA, 12 bp, Artificial Sequence
  Oligonucleotide primer for the detection of SNP TSC0019118
tatattgtattt

SEQ ID NO: 300622 - DNA, 12 bp, Artificial Sequence
  Oligonucleotide primer for the detection of SNP TSC0019119
ttttgaggggtt

SEQ ID NO: 300623 - DNA, 12 bp, Artificial Sequence
  Oligonucleotide primer for the detection of SNP TSC0019119
ttttgaggggtc

SEQ ID NO: 300624 - DNA, 12 bp, Artificial Sequence
  Oligonucleotide primer for the detection of SNP TSC0019119
tcctaaaaaatc

SEQ ID NO: 300625 - DNA, 12 bp, Artificial Sequence
  Oligonucleotide primer for the detection of SNP TSC0019119
tttgagaagttt

SEQ ID NO: 300626 - DNA, 12 bp, Artificial Sequence
  Oligonucleotide primer for the detection of SNP TSC0019120
tgatagttattt

SEQ ID NO: 300627 - DNA, 12 bp, Artificial Sequence
  Oligonucleotide primer for the detection of SNP TSC0019120
cgatagttattt

SEQ ID NO: 300628 - DNA, 12 bp, Artificial Sequence
  Oligonucleotide primer for the detection of SNP TSC0019120
tcaacaattacc

SEQ ID NO: 300629 - DNA, 12 bp, Artificial Sequence
  Oligonucleotide primer for the detection of SNP TSC0019120
tcgacaattacc

SEQ ID NO: 300630 - DNA, 12 bp, Artificial Sequence
  Oligonucleotide primer for the detection of SNP TSC0019120
gagttggagttg

SEQ ID NO: 300631 - DNA, 12 bp, Artificial Sequence
  Oligonucleotide primer for the detection of SNP TSC0019121
ccttaacacacc

SEQ ID NO: 300632 - DNA, 12 bp, Artificial Sequence
  Oligonucleotide primer for the detection of SNP TSC0019121
tctcaactccaa

SEQ ID NO: 300633 - DNA, 12 bp, Artificial Sequence
  Oligonucleotide primer for the detection of SNP TSC0019121
ttttggtatatt

SEQ ID NO: 300634 - DNA, 12 bp, Artificial Sequence
  Oligonucleotide primer for the detection of SNP TSC0019122
aaaaaaacgaac

SEQ ID NO: 300635 - DNA, 12 bp, Artificial Sequence
  Oligonucleotide primer for the detection of SNP TSC0019122
attttgaaaaat

SEQ ID NO: 300636 - DNA, 12 bp, Artificial Sequence
  Oligonucleotide primer for the detection of SNP TSC0019122
ctctaaaaaaca

SEQ ID NO: 300637 - DNA, 12 bp, Artificial Sequence
  Oligonucleotide primer for the detection of SNP TSC0019122
ggaagtgggttt

SEQ ID NO: 300638 - DNA, 12 bp, Artificial Sequence
  Oligonucleotide primer for the detection of SNP TSC0019122
ggaagcgggttt

SEQ ID NO: 300639 - DNA, 12 bp, Artificial Sequence
  Oligonucleotide primer for the detection of SNP TSC0019123
ccattaaatcat

SEQ ID NO: 300640 - DNA, 12 bp, Artificial Sequence
  Oligonucleotide primer for the detection of SNP TSC0019123
ccattaaatcgt

SEQ ID NO: 300641 - DNA, 12 bp, Artificial Sequence
  Oligonucleotide primer for the detection of SNP TSC0019123
tatttatttaag

SEQ ID NO: 300642 - DNA, 12 bp, Artificial Sequence
  Oligonucleotide primer for the detection of SNP TSC0019123
tacccatttaaa

SEQ ID NO: 300643 - DNA, 12 bp, Artificial Sequence
  Oligonucleotide primer for the detection of SNP TSC0019123
ttattgaattgt

SEQ ID NO: 300644 - DNA, 12 bp, Artificial Sequence
  Oligonucleotide primer for the detection of SNP TSC0019123
ttattgaatcgt

SEQ ID NO: 300645 - DNA, 12 bp, Artificial Sequence
  Oligonucleotide primer for the detection of SNP TSC0019124
aacaaaaactat

SEQ ID NO: 300646 - DNA, 12 bp, Artificial Sequence
  Oligonucleotide primer for the detection of SNP TSC0019124
aacgaaaactat

SEQ ID NO: 300647 - DNA, 12 bp, Artificial Sequence
  Oligonucleotide primer for the detection of SNP TSC0019125
actactactctt

SEQ ID NO: 300648 - DNA, 12 bp, Artificial Sequence
  Oligonucleotide primer for the detection of SNP TSC0019125
ttttaaaaggta

SEQ ID NO: 300649 - DNA, 12 bp, Artificial Sequence
  Oligonucleotide primer for the detection of SNP TSC0019126
atttaagagggg

SEQ ID NO: 300650 - DNA, 12 bp, Artificial Sequence
  Oligonucleotide primer for the detection of SNP TSC0019126
tttgattttggg

SEQ ID NO: 300651 - DNA, 12 bp, Artificial Sequence
  Oligonucleotide primer for the detection of SNP TSC0019127
caaacaaatcat

SEQ ID NO: 300652 - DNA, 12 bp, Artificial Sequence
  Oligonucleotide primer for the detection of SNP TSC0019127
gagttagggtga

SEQ ID NO: 300653 - DNA, 12 bp, Artificial Sequence
  Oligonucleotide primer for the detection of SNP TSC0019133
cataaatataaa

SEQ ID NO: 300654 - DNA, 12 bp, Artificial Sequence
  Oligonucleotide primer for the detection of SNP TSC0019133
ttgattattgaa

SEQ ID NO: 300655 - DNA, 12 bp, Artificial Sequence
  Oligonucleotide primer for the detection of SNP TSC0019133
ttaatcactaaa

SEQ ID NO: 300656 - DNA, 12 bp, Artificial Sequence
  Oligonucleotide primer for the detection of SNP TSC0019133
atatgaatgtgg

SEQ ID NO: 300657 - DNA, 12 bp, Artificial Sequence
  Oligonucleotide primer for the detection of SNP TSC0019134
tactaaaataac

SEQ ID NO: 300658 - DNA, 12 bp, Artificial Sequence
  Oligonucleotide primer for the detection of SNP TSC0019134
ttaatggatata

SEQ ID NO: 300659 - DNA, 12 bp, Artificial Sequence
  Oligonucleotide primer for the detection of SNP TSC0019134
ttaacggatata

SEQ ID NO: 300660 - DNA, 12 bp, Artificial Sequence
  Oligonucleotide primer for the detection of SNP TSC0019134
ttaacgaacaca

SEQ ID NO: 300661 - DNA, 12 bp, Artificial Sequence
  Oligonucleotide primer for the detection of SNP TSC0019134
tgttaagatagt

SEQ ID NO: 300662 - DNA, 12 bp, Artificial Sequence
  Oligonucleotide primer for the detection of SNP TSC0019135
actactttttct

SEQ ID NO: 300663 - DNA, 12 bp, Artificial Sequence
  Oligonucleotide primer for the detection of SNP TSC0019135
taattatgaaaa

SEQ ID NO: 300664 - DNA, 12 bp, Artificial Sequence
  Oligonucleotide primer for the detection of SNP TSC0019135
caaccataaaaa

SEQ ID NO: 300665 - DNA, 12 bp, Artificial Sequence
  Oligonucleotide primer for the detection of SNP TSC0019135
gttatttttttt

SEQ ID NO: 300666 - DNA, 12 bp, Artificial Sequence
  Oligonucleotide primer for the detection of SNP TSC0019136
aaatactatcat

SEQ ID NO: 300667 - DNA, 12 bp, Artificial Sequence
  Oligonucleotide primer for the detection of SNP TSC0019136
tttaagtttagg

SEQ ID NO: 300668 - DNA, 12 bp, Artificial Sequence
  Oligonucleotide primer for the detection of SNP TSC0019137
ttattatacacc

SEQ ID NO: 300669 - DNA, 12 bp, Artificial Sequence
  Oligonucleotide primer for the detection of SNP TSC0019137
ttgtttttggtt

SEQ ID NO: 300670 - DNA, 12 bp, Artificial Sequence
  Oligonucleotide primer for the detection of SNP TSC0019137
ctatccttaact

SEQ ID NO: 300671 - DNA, 12 bp, Artificial Sequence
  Oligonucleotide primer for the detection of SNP TSC0019137
ttattgtatatt

SEQ ID NO: 300672 - DNA, 12 bp, Artificial Sequence
  Oligonucleotide primer for the detection of SNP TSC0019138
cacaaacctata

SEQ ID NO: 300673 - DNA, 12 bp, Artificial Sequence
  Oligonucleotide primer for the detection of SNP TSC0019138
aggtaaatagat

SEQ ID NO: 300674 - DNA, 12 bp, Artificial Sequence
  Oligonucleotide primer for the detection of SNP TSC0019138
aaataaacaaac

SEQ ID NO: 300675 - DNA, 12 bp, Artificial Sequence
  Oligonucleotide primer for the detection of SNP TSC0019138
tataagtttgtg

SEQ ID NO: 300676 - DNA, 12 bp, Artificial Sequence
  Oligonucleotide primer for the detection of SNP TSC0019139
tattacatttct

SEQ ID NO: 300677 - DNA, 12 bp, Artificial Sequence
  Oligonucleotide primer for the detection of SNP TSC0019139
tatatagtaaga

SEQ ID NO: 300678 - DNA, 12 bp, Artificial Sequence
  Oligonucleotide primer for the detection of SNP TSC0019140
cataaacctcca

SEQ ID NO: 300679 - DNA, 12 bp, Artificial Sequence
  Oligonucleotide primer for the detection of SNP TSC0019140
cgtaaacctcca

SEQ ID NO: 300680 - DNA, 12 bp, Artificial Sequence
  Oligonukleotid-Primer
ttgattgaggtt

SEQ ID NO: 300681 - DNA, 12 bp, Artificial Sequence
  Oligonucleotide primer for the detection of SNP TSC0019140
ttaattaaaacc

SEQ ID NO: 300682 - DNA, 12 bp, Artificial Sequence
  Oligonucleotide primer for the detection of SNP TSC0019140
cgtgagttttta

SEQ ID NO: 300683 - DNA, 12 bp, Artificial Sequence
  Oligonucleotide primer for the detection of SNP TSC0019141
taatcccaacac

SEQ ID NO: 300684 - DNA, 12 bp, Artificial Sequence
  Oligonucleotide primer for the detection of SNP TSC0019141
tttggtttttta

SEQ ID NO: 300685 - DNA, 12 bp, Artificial Sequence
  Oligonucleotide primer for the detection of SNP TSC0019141
ttcggtttttta

SEQ ID NO: 300686 - DNA, 12 bp, Artificial Sequence
  Oligonucleotide primer for the detection of SNP TSC0019142
taaatttaaacc

SEQ ID NO: 300687 - DNA, 12 bp, Artificial Sequence
  Oligonucleotide primer for the detection of SNP TSC0019142
atttgaataagt

SEQ ID NO: 300688 - DNA, 12 bp, Artificial Sequence
  Oligonucleotide primer for the detection of SNP TSC0019144
aaaaataaatat

SEQ ID NO: 300689 - DNA, 12 bp, Artificial Sequence
  Oligonucleotide primer for the detection of SNP TSC0019144
agtgggtggggt

SEQ ID NO: 300690 - DNA, 12 bp, Artificial Sequence
  Oligonucleotide primer for the detection of SNP TSC0019144
aataaataaaat

SEQ ID NO: 300691 - DNA, 12 bp, Artificial Sequence
  Oligonucleotide primer for the detection of SNP TSC0019144
gggaatgaatgt

SEQ ID NO: 300692 - DNA, 12 bp, Artificial Sequence
  Oligonucleotide primer for the detection of SNP TSC0019145
tagtgatttaag

SEQ ID NO: 300693 - DNA, 12 bp, Artificial Sequence
  Oligonucleotide primer for the detection of SNP TSC0019145
tagcgatttaag

SEQ ID NO: 300694 - DNA, 12 bp, Artificial Sequence
  Oligonucleotide primer for the detection of SNP TSC0019146
tatggttgaagg

SEQ ID NO: 300695 - DNA, 12 bp, Artificial Sequence
  Oligonucleotide primer for the detection of SNP TSC0019146
tacggttgaagg

SEQ ID NO: 300696 - DNA, 12 bp, Artificial Sequence
  Oligonucleotide primer for the detection of SNP TSC0019146
cacaactaaaaa

SEQ ID NO: 300697 - DNA, 12 bp, Artificial Sequence
  Oligonucleotide primer for the detection of SNP TSC0019146
cacgactaaaaa

SEQ ID NO: 300698 - DNA, 12 bp, Artificial Sequence
  Oligonucleotide primer for the detection of SNP TSC0019146
aaaggggggttt

SEQ ID NO: 300699 - DNA, 12 bp, Artificial Sequence
  Oligonucleotide primer for the detection of SNP TSC0019147
aaaattaataaa

SEQ ID NO: 300700 - DNA, 12 bp, Artificial Sequence
  Oligonucleotide primer for the detection of SNP TSC0019147
actcccaacctt

SEQ ID NO: 300701 - DNA, 12 bp, Artificial Sequence
  Oligonucleotide primer for the detection of SNP TSC0019147
gaggttggtgga

SEQ ID NO: 300702 - DNA, 12 bp, Artificial Sequence
  Oligonucleotide primer for the detection of SNP TSC0019148
ggtatggaaaag

SEQ ID NO: 300703 - DNA, 12 bp, Artificial Sequence
  Oligonucleotide primer for the detection of SNP TSC0019153
ataaaactcctc

SEQ ID NO: 300704 - DNA, 12 bp, Artificial Sequence
  Oligonucleotide primer for the detection of SNP TSC0019153
ttatagagggaa

SEQ ID NO: 300705 - DNA, 12 bp, Artificial Sequence
  Oligonucleotide primer for the detection of SNP TSC0019154
cctacctatacc

SEQ ID NO: 300706 - DNA, 12 bp, Artificial Sequence
  Oligonucleotide primer for the detection of SNP TSC0019154
agaggagtttta

SEQ ID NO: 300707 - DNA, 12 bp, Artificial Sequence
  Oligonucleotide primer for the detection of SNP TSC0019154
tttgtttgtatt

SEQ ID NO: 300708 - DNA, 12 bp, Artificial Sequence
  Oligonucleotide primer for the detection of SNP TSC0019155
attttagtgtgt

SEQ ID NO: 300709 - DNA, 12 bp, Artificial Sequence
  Oligonucleotide primer for the detection of SNP TSC0019155
aatctcaatata

SEQ ID NO: 300710 - DNA, 12 bp, Artificial Sequence
  Oligonucleotide primer for the detection of SNP TSC0019155
tatttgggtagt

SEQ ID NO: 300711 - DNA, 12 bp, Artificial Sequence
  Oligonucleotide primer for the detection of SNP TSC0019156
taacatacaaat

SEQ ID NO: 300712 - DNA, 12 bp, Artificial Sequence
  Oligonucleotide primer for the detection of SNP TSC0019156
tttgtagtttga

SEQ ID NO: 300713 - DNA, 12 bp, Artificial Sequence
  Oligonucleotide primer for the detection of SNP TSC0019157
ataaatatataa

SEQ ID NO: 300714 - DNA, 12 bp, Artificial Sequence
  Oligonucleotide primer for the detection of SNP TSC0019157
taaaagtgattt

SEQ ID NO: 300715 - DNA, 12 bp, Artificial Sequence
  Oligonucleotide primer for the detection of SNP TSC0019157
gatgtgtgattt

SEQ ID NO: 300716 - DNA, 12 bp, Artificial Sequence
  Oligonucleotide primer for the detection of SNP TSC0019158
ttcctccccata

SEQ ID NO: 300717 - DNA, 12 bp, Artificial Sequence
  Oligonucleotide primer for the detection of SNP TSC0019158
ggttatatgatt

SEQ ID NO: 300718 - DNA, 12 bp, Artificial Sequence
  Oligonucleotide primer for the detection of SNP TSC0019163
acaaatatttac

SEQ ID NO: 300719 - DNA, 12 bp, Artificial Sequence
  Oligonucleotide primer for the detection of SNP TSC0019163
aaaatatagagg

SEQ ID NO: 300720 - DNA, 12 bp, Artificial Sequence
  Oligonucleotide primer for the detection of SNP TSC0019163
ataagtatttgt

SEQ ID NO: 300721 - DNA, 12 bp, Artificial Sequence
  Oligonucleotide primer for the detection of SNP TSC0019165
ataaaacctaaa

SEQ ID NO: 300722 - DNA, 12 bp, Artificial Sequence
  Oligonucleotide primer for the detection of SNP TSC0019174
aatctaaatttc

SEQ ID NO: 300723 - DNA, 12 bp, Artificial Sequence
  Oligonucleotide primer for the detection of SNP TSC0019174
gttaagttagta

SEQ ID NO: 300724 - DNA, 12 bp, Artificial Sequence
  Oligonucleotide primer for the detection of SNP TSC0019175
aatcctaaataa

SEQ ID NO: 300725 - DNA, 12 bp, Artificial Sequence
  Oligonucleotide primer for the detection of SNP TSC0019175
gatcctaaataa

SEQ ID NO: 300726 - DNA, 12 bp, Artificial Sequence
  Oligonucleotide primer for the detection of SNP TSC0019175
tgttgtgttgat

SEQ ID NO: 300727 - DNA, 12 bp, Artificial Sequence
  Oligonucleotide primer for the detection of SNP TSC0019175
cgttgtgttgat

SEQ ID NO: 300728 - DNA, 12 bp, Artificial Sequence
  Oligonucleotide primer for the detection of SNP TSC0019175
tgtcgtgttgat

SEQ ID NO: 300729 - DNA, 12 bp, Artificial Sequence
  Oligonucleotide primer for the detection of SNP TSC0019175
tgttgcgttgat

SEQ ID NO: 300730 - DNA, 12 bp, Artificial Sequence
  Oligonucleotide primer for the detection of SNP TSC0019175
cgtcgtgttgat

SEQ ID NO: 300731 - DNA, 12 bp, Artificial Sequence
  Oligonucleotide primer for the detection of SNP TSC0019175
cgttgcgttgat

SEQ ID NO: 300732 - DNA, 12 bp, Artificial Sequence
  Oligonucleotide primer for the detection of SNP TSC0019175
tgtcgcgttgat

SEQ ID NO: 300733 - DNA, 12 bp, Artificial Sequence
  Oligonucleotide primer for the detection of SNP TSC0019175
cgtcgcgttgat

SEQ ID NO: 300734 - DNA, 12 bp, Artificial Sequence
  Oligonucleotide primer for the detection of SNP TSC0019175
caccacactaat

SEQ ID NO: 300735 - DNA, 12 bp, Artificial Sequence
  Oligonucleotide primer for the detection of SNP TSC0019175
caccacgctaat

SEQ ID NO: 300736 - DNA, 12 bp, Artificial Sequence
  Oligonucleotide primer for the detection of SNP TSC0019175
caccgcactaat

SEQ ID NO: 300737 - DNA, 12 bp, Artificial Sequence
  Oligonucleotide primer for the detection of SNP TSC0019175
cgccacactaat

SEQ ID NO: 300738 - DNA, 12 bp, Artificial Sequence
  Oligonucleotide primer for the detection of SNP TSC0019175
caccgcgctaat

SEQ ID NO: 300739 - DNA, 12 bp, Artificial Sequence
  Oligonucleotide primer for the detection of SNP TSC0019175
cgccacgctaat

SEQ ID NO: 300740 - DNA, 12 bp, Artificial Sequence
  Oligonucleotide primer for the detection of SNP TSC0019175
cgccgcactaat

SEQ ID NO: 300741 - DNA, 12 bp, Artificial Sequence
  Oligonucleotide primer for the detection of SNP TSC0019175
cgccgcgctaat

SEQ ID NO: 300742 - DNA, 12 bp, Artificial Sequence
  Oligonucleotide primer for the detection of SNP TSC0019175
ggttttggatgg

SEQ ID NO: 300743 - DNA, 12 bp, Artificial Sequence
  Oligonucleotide primer for the detection of SNP TSC0019176
caatcaacctta

SEQ ID NO: 300744 - DNA, 12 bp, Artificial Sequence
  Oligonucleotide primer for the detection of SNP TSC0019176
caatcgacctta

SEQ ID NO: 300745 - DNA, 12 bp, Artificial Sequence
  Oligonucleotide primer for the detection of SNP TSC0019176
gttgtgtgtggt

SEQ ID NO: 300746 - DNA, 12 bp, Artificial Sequence
  Oligonucleotide primer for the detection of SNP TSC0019176
gtcgtgtgtggt

SEQ ID NO: 300747 - DNA, 12 bp, Artificial Sequence
  Oligonucleotide primer for the detection of SNP TSC0019176
gttgtgcgtggt

SEQ ID NO: 300748 - DNA, 12 bp, Artificial Sequence
  Oligonucleotide primer for the detection of SNP TSC0019176
gttgtgtgcggt

SEQ ID NO: 300749 - DNA, 12 bp, Artificial Sequence
  Oligonukleotid-Primer
gtcgtgcgtggt

SEQ ID NO: 300750 - DNA, 12 bp, Artificial Sequence
  Oligonucleotide primer for the detection of SNP TSC0019176
gtcgtgtgcggt

SEQ ID NO: 300751 - DNA, 12 bp, Artificial Sequence
  Oligonucleotide primer for the detection of SNP TSC0019176
gttgtgcgcggt

SEQ ID NO: 300752 - DNA, 12 bp, Artificial Sequence
  Oligonucleotide primer for the detection of SNP TSC0019176
gtcgtgcgcggt

SEQ ID NO: 300753 - DNA, 12 bp, Artificial Sequence
  Oligonucleotide primer for the detection of SNP TSC0019176
ccatacacaaca

SEQ ID NO: 300754 - DNA, 12 bp, Artificial Sequence
  Oligonucleotide primer for the detection of SNP TSC0019176
ccatacacgaca

SEQ ID NO: 300755 - DNA, 12 bp, Artificial Sequence
  Oligonucleotide primer for the detection of SNP TSC0019176
ccatacgcaaca

SEQ ID NO: 300756 - DNA, 12 bp, Artificial Sequence
  Oligonucleotide primer for the detection of SNP TSC0019176
ccgtacacaaca

SEQ ID NO: 300757 - DNA, 12 bp, Artificial Sequence
  Oligonucleotide primer for the detection of SNP TSC0019176
ccatacgcgaca

SEQ ID NO: 300758 - DNA, 12 bp, Artificial Sequence
  Oligonucleotide primer for the detection of SNP TSC0019176
ccgtacacgaca

SEQ ID NO: 300759 - DNA, 12 bp, Artificial Sequence
  Oligonucleotide primer for the detection of SNP TSC0019176
ccgtacgcaaca

SEQ ID NO: 300760 - DNA, 12 bp, Artificial Sequence
  Oligonucleotide primer for the detection of SNP TSC0019176
ccgtacgcgaca

SEQ ID NO: 300761 - DNA, 12 bp, Artificial Sequence
  Oligonucleotide primer for the detection of SNP TSC0019176
agttggttttgt

SEQ ID NO: 300762 - DNA, 12 bp, Artificial Sequence
  Oligonucleotide primer for the detection of SNP TSC0019176
agtcggttttgt

SEQ ID NO: 300763 - DNA, 12 bp, Artificial Sequence
  Oligonucleotide primer for the detection of SNP TSC0019177
actcttatttta

SEQ ID NO: 300764 - DNA, 12 bp, Artificial Sequence
  Oligonucleotide primer for the detection of SNP TSC0019177
gggaaatagatt

SEQ ID NO: 300765 - DNA, 12 bp, Artificial Sequence
  Oligonucleotide primer for the detection of SNP TSC0019178
ttactatattaa

SEQ ID NO: 300766 - DNA, 12 bp, Artificial Sequence
  Oligonucleotide primer for the detection of SNP TSC0019178
gaataaaaaaaa

SEQ ID NO: 300767 - DNA, 12 bp, Artificial Sequence
  Oligonucleotide primer for the detection of SNP TSC0019179
atacattcaaaa

SEQ ID NO: 300768 - DNA, 12 bp, Artificial Sequence
  Oligonucleotide primer for the detection of SNP TSC0019179
ggaagagtatgt

SEQ ID NO: 300769 - DNA, 12 bp, Artificial Sequence
  Oligonucleotide primer for the detection of SNP TSC0019179
aaaaaacatata

SEQ ID NO: 300770 - DNA, 12 bp, Artificial Sequence
  Oligonucleotide primer for the detection of SNP TSC0019179
gtatatttaaaa

SEQ ID NO: 300771 - DNA, 12 bp, Artificial Sequence
  Oligonucleotide primer for the detection of SNP TSC0019180
tttaactaccct

SEQ ID NO: 300772 - DNA, 12 bp, Artificial Sequence
  Oligonucleotide primer for the detection of SNP TSC0019180
tttaggttaggg

SEQ ID NO: 300773 - DNA, 12 bp, Artificial Sequence
  Oligonucleotide primer for the detection of SNP TSC0019181
aatacattctat

SEQ ID NO: 300774 - DNA, 12 bp, Artificial Sequence
  Oligonucleotide primer for the detection of SNP TSC0019181
ttgtgtaagtat

SEQ ID NO: 300775 - DNA, 12 bp, Artificial Sequence
  Oligonucleotide primer for the detection of SNP TSC0019181
attatacaaaca

SEQ ID NO: 300776 - DNA, 12 bp, Artificial Sequence
  Oligonucleotide primer for the detection of SNP TSC0019181
agtatattttgt

SEQ ID NO: 300777 - DNA, 12 bp, Artificial Sequence
  Oligonucleotide primer for the detection of SNP TSC0019182
tctaaatataaa

SEQ ID NO: 300778 - DNA, 12 bp, Artificial Sequence
  Oligonucleotide primer for the detection of SNP TSC0019182
gtatttttattg

SEQ ID NO: 300779 - DNA, 12 bp, Artificial Sequence
  Oligonucleotide primer for the detection of SNP TSC0019184
aaataacaaaca

SEQ ID NO: 300780 - DNA, 12 bp, Artificial Sequence
  Oligonucleotide primer for the detection of SNP TSC0019184
ttttttattgtt

SEQ ID NO: 300781 - DNA, 12 bp, Artificial Sequence
  Oligonucleotide primer for the detection of SNP TSC0019184
cccctcactacc

SEQ ID NO: 300782 - DNA, 12 bp, Artificial Sequence
  Oligonucleotide primer for the detection of SNP TSC0019184
agggtggtaggt

SEQ ID NO: 300783 - DNA, 12 bp, Artificial Sequence
  Oligonucleotide primer for the detection of SNP TSC0019185
aacacccaccca

SEQ ID NO: 300784 - DNA, 12 bp, Artificial Sequence
  Oligonucleotide primer for the detection of SNP TSC0019185
gagatttagtta

SEQ ID NO: 300785 - DNA, 12 bp, Artificial Sequence
  Oligonucleotide primer for the detection of SNP TSC0019187
atataatataaa

SEQ ID NO: 300786 - DNA, 12 bp, Artificial Sequence
  Oligonucleotide primer for the detection of SNP TSC0019187
acacaccacaca

SEQ ID NO: 300787 - DNA, 12 bp, Artificial Sequence
  Oligonucleotide primer for the detection of SNP TSC0019187
gtgtggtgtggg

SEQ ID NO: 300788 - DNA, 12 bp, Artificial Sequence
  Oligonucleotide primer for the detection of SNP TSC0019191
cctccccaaacc

SEQ ID NO: 300789 - DNA, 12 bp, Artificial Sequence
  Oligonucleotide primer for the detection of SNP TSC0019191
aggaggggtgtg

SEQ ID NO: 300790 - DNA, 12 bp, Artificial Sequence
  Oligonucleotide primer for the detection of SNP TSC0019192
ccccaaacccct

SEQ ID NO: 300791 - DNA, 12 bp, Artificial Sequence
  Oligonucleotide primer for the detection of SNP TSC0019194
catatcaataaa

SEQ ID NO: 300792 - DNA, 12 bp, Artificial Sequence
  Oligonucleotide primer for the detection of SNP TSC0019194
ttttttattttc

SEQ ID NO: 300793 - DNA, 12 bp, Artificial Sequence
  Oligonucleotide primer for the detection of SNP TSC0019194
catctcccacct

SEQ ID NO: 300794 - DNA, 12 bp, Artificial Sequence
  Oligonucleotide primer for the detection of SNP TSC0019194
cgtctcccacct

SEQ ID NO: 300795 - DNA, 12 bp, Artificial Sequence
  Oligonucleotide primer for the detection of SNP TSC0019194
tggtatgttagt

SEQ ID NO: 300796 - DNA, 12 bp, Artificial Sequence
  Oligonucleotide primer for the detection of SNP TSC0019195
tcttcaccatcc

SEQ ID NO: 300797 - DNA, 12 bp, Artificial Sequence
  Oligonucleotide primer for the detection of SNP TSC0019195
tatattgttttg

SEQ ID NO: 300798 - DNA, 12 bp, Artificial Sequence
  Oligonucleotide primer for the detection of SNP TSC0019195
catattattcta

SEQ ID NO: 300799 - DNA, 12 bp, Artificial Sequence
  Oligonucleotide primer for the detection of SNP TSC0019196
ttaacacataac

SEQ ID NO: 300800 - DNA, 12 bp, Artificial Sequence
  Oligonucleotide primer for the detection of SNP TSC0019196
tttagtttgtta

SEQ ID NO: 300801 - DNA, 12 bp, Artificial Sequence
  Oligonucleotide primer for the detection of SNP TSC0019196
tccaacttacca

SEQ ID NO: 300802 - DNA, 12 bp, Artificial Sequence
  Oligonucleotide primer for the detection of SNP TSC0019196
ttaatatataat

SEQ ID NO: 300803 - DNA, 12 bp, Artificial Sequence
  Oligonucleotide primer for the detection of SNP TSC0019197
cttaaaactcta

SEQ ID NO: 300804 - DNA, 12 bp, Artificial Sequence
  Oligonucleotide primer for the detection of SNP TSC0019197
ggttaagagttt

SEQ ID NO: 300805 - DNA, 12 bp, Artificial Sequence
  Oligonucleotide primer for the detection of SNP TSC0019197
aaccaaaaaccc

SEQ ID NO: 300806 - DNA, 12 bp, Artificial Sequence
  Oligonucleotide primer for the detection of SNP TSC0019197
gaccaaaaaccc

SEQ ID NO: 300807 - DNA, 12 bp, Artificial Sequence
  Oligonucleotide primer for the detection of SNP TSC0019197
tttgagattttg

SEQ ID NO: 300808 - DNA, 12 bp, Artificial Sequence
  Oligonucleotide primer for the detection of SNP TSC0019198
aaactaaaataa

SEQ ID NO: 300809 - DNA, 12 bp, Artificial Sequence
  Oligonucleotide primer for the detection of SNP TSC0019198
cctcttaccaat

SEQ ID NO: 300810 - DNA, 12 bp, Artificial Sequence
  Oligonucleotide primer for the detection of SNP TSC0019198
gagttgagatga

SEQ ID NO: 300811 - DNA, 12 bp, Artificial Sequence
  Oligonucleotide primer for the detection of SNP TSC0019199
gtttttttatgt

SEQ ID NO: 300812 - DNA, 12 bp, Artificial Sequence
  Oligonucleotide primer for the detection of SNP TSC0019199
atttctccatat

SEQ ID NO: 300813 - DNA, 12 bp, Artificial Sequence
  Oligonucleotide primer for the detection of SNP TSC0019199
attagtttggtt

SEQ ID NO: 300814 - DNA, 12 bp, Artificial Sequence
  Oligonucleotide primer for the detection of SNP TSC0019200
acattaattttt

SEQ ID NO: 300815 - DNA, 12 bp, Artificial Sequence
  Oligonucleotide primer for the detection of SNP TSC0019200
aatatataggtt

SEQ ID NO: 300816 - DNA, 12 bp, Artificial Sequence
  Oligonucleotide primer for the detection of SNP TSC0019200
atattagttttt

SEQ ID NO: 300817 - DNA, 12 bp, Artificial Sequence
  Oligonucleotide primer for the detection of SNP TSC0019201
acaaatctactt

SEQ ID NO: 300818 - DNA, 12 bp, Artificial Sequence
  Oligonucleotide primer for the detection of SNP TSC0019201
gattagggtaga

SEQ ID NO: 300819 - DNA, 12 bp, Artificial Sequence
  Oligonucleotide primer for the detection of SNP TSC0019201
atcaaaataaaa

SEQ ID NO: 300820 - DNA, 12 bp, Artificial Sequence
  Oligonucleotide primer for the detection of SNP TSC0019203
caatccctaatc

SEQ ID NO: 300821 - DNA, 12 bp, Artificial Sequence
  Oligonucleotide primer for the detection of SNP TSC0019203
cgatccctaatc

SEQ ID NO: 300822 - DNA, 12 bp, Artificial Sequence
  Oligonucleotide primer for the detection of SNP TSC0019203
ttttggagtatg

SEQ ID NO: 300823 - DNA, 12 bp, Artificial Sequence
  Oligonucleotide primer for the detection of SNP TSC0019203
tttcggagtatg

SEQ ID NO: 300824 - DNA, 12 bp, Artificial Sequence
  Oligonucleotide primer for the detection of SNP TSC0019203
ctccaaaacata

SEQ ID NO: 300825 - DNA, 12 bp, Artificial Sequence
  Oligonucleotide primer for the detection of SNP TSC0019203
ctccgaaacata

SEQ ID NO: 300826 - DNA, 12 bp, Artificial Sequence
  Oligonucleotide primer for the detection of SNP TSC0019203
tggtttttggtt

SEQ ID NO: 300827 - DNA, 12 bp, Artificial Sequence
  Oligonucleotide primer for the detection of SNP TSC0019203
cggtttttggtt

SEQ ID NO: 300828 - DNA, 12 bp, Artificial Sequence
  Oligonucleotide primer for the detection of SNP TSC0019205
tggtgggtgtgg

SEQ ID NO: 300829 - DNA, 12 bp, Artificial Sequence
  Oligonucleotide primer for the detection of SNP TSC0019205
cggtgggtgtgg

SEQ ID NO: 300830 - DNA, 12 bp, Artificial Sequence
  Oligonucleotide primer for the detection of SNP TSC0019205
tggtgggtgcgg

SEQ ID NO: 300831 - DNA, 12 bp, Artificial Sequence
  Oligonucleotide primer for the detection of SNP TSC0019205
cggtgggtgcgg

SEQ ID NO: 300832 - DNA, 12 bp, Artificial Sequence
  Oligonucleotide primer for the detection of SNP TSC0019206
aatacaaaactc

SEQ ID NO: 300833 - DNA, 12 bp, Artificial Sequence
  Oligonucleotide primer for the detection of SNP TSC0019206
aatacgaaactc

SEQ ID NO: 300834 - DNA, 12 bp, Artificial Sequence
  Oligonucleotide primer for the detection of SNP TSC0019206
tgaatatagaag

SEQ ID NO: 300835 - DNA, 12 bp, Artificial Sequence
  Oligonucleotide primer for the detection of SNP TSC0019206
cgaatatagaag

SEQ ID NO: 300836 - DNA, 12 bp, Artificial Sequence
  Oligonucleotide primer for the detection of SNP TSC0019208
aaattatatctc

SEQ ID NO: 300837 - DNA, 12 bp, Artificial Sequence
  Oligonucleotide primer for the detection of SNP TSC0019208
gtaaaatttgta

SEQ ID NO: 300838 - DNA, 12 bp, Artificial Sequence
  Oligonucleotide primer for the detection of SNP TSC0019209
ctaaaaacatca

SEQ ID NO: 300839 - DNA, 12 bp, Artificial Sequence
  Oligonucleotide primer for the detection of SNP TSC0019209
ttagtgattaat

SEQ ID NO: 300840 - DNA, 12 bp, Artificial Sequence
  Oligonucleotide primer for the detection of SNP TSC0019209
ctaataatcaac

SEQ ID NO: 300841 - DNA, 12 bp, Artificial Sequence
  Oligonucleotide primer for the detection of SNP TSC0019209
ttgggaatatta

SEQ ID NO: 300842 - DNA, 12 bp, Artificial Sequence
  Oligonucleotide primer for the detection of SNP TSC0019210
taaacaacccct

SEQ ID NO: 300843 - DNA, 12 bp, Artificial Sequence
  Oligonucleotide primer for the detection of SNP TSC0019210
atggaagggtgg

SEQ ID NO: 300844 - DNA, 12 bp, Artificial Sequence
  Oligonucleotide primer for the detection of SNP TSC0019215
taataataactc

SEQ ID NO: 300845 - DNA, 12 bp, Artificial Sequence
  Oligonucleotide primer for the detection of SNP TSC0019215
tggtggtggttt

SEQ ID NO: 300846 - DNA, 12 bp, Artificial Sequence
  Oligonucleotide primer for the detection of SNP TSC0019217
tgataaatgtat

SEQ ID NO: 300847 - DNA, 12 bp, Artificial Sequence
  Oligonucleotide primer for the detection of SNP TSC0019217
tatattgttaat

SEQ ID NO: 300848 - DNA, 12 bp, Artificial Sequence
  Oligonucleotide primer for the detection of SNP TSC0019218
atttaggttgga

SEQ ID NO: 300849 - DNA, 12 bp, Artificial Sequence
  Oligonucleotide primer for the detection of SNP TSC0019220
actatacctcaa

SEQ ID NO: 300850 - DNA, 12 bp, Artificial Sequence
  Oligonucleotide primer for the detection of SNP TSC0019220
ttcaataaatct

SEQ ID NO: 300851 - DNA, 12 bp, Artificial Sequence
  Oligonucleotide primer for the detection of SNP TSC0019220
attgtgttttaa

SEQ ID NO: 300852 - DNA, 12 bp, Artificial Sequence
  Oligonucleotide primer for the detection of SNP TSC0019221
tctaaaaacaaa

SEQ ID NO: 300853 - DNA, 12 bp, Artificial Sequence
  Oligonucleotide primer for the detection of SNP TSC0019221
tctaaaaacgaa

SEQ ID NO: 300854 - DNA, 12 bp, Artificial Sequence
  Oligonucleotide primer for the detection of SNP TSC0019221
tttgaggatgga

SEQ ID NO: 300855 - DNA, 12 bp, Artificial Sequence
  Oligonucleotide primer for the detection of SNP TSC0019221
tttgaggacgga

SEQ ID NO: 300856 - DNA, 12 bp, Artificial Sequence
  Oligonucleotide primer for the detection of SNP TSC0019223
tatctccccaac

SEQ ID NO: 300857 - DNA, 12 bp, Artificial Sequence
  Oligonucleotide primer for the detection of SNP TSC0019223
ggtagtttagaa

SEQ ID NO: 300858 - DNA, 12 bp, Artificial Sequence
  Oligonucleotide primer for the detection of SNP TSC0019224
ccctaaatactt

SEQ ID NO: 300859 - DNA, 12 bp, Artificial Sequence
  Oligonucleotide primer for the detection of SNP TSC0019224
ttattttaatta

SEQ ID NO: 300860 - DNA, 12 bp, Artificial Sequence
  Oligonucleotide primer for the detection of SNP TSC0019226
aaaatccataaa

SEQ ID NO: 300861 - DNA, 12 bp, Artificial Sequence
  Oligonucleotide primer for the detection of SNP TSC0019226
aaaatccgtaaa

SEQ ID NO: 300862 - DNA, 12 bp, Artificial Sequence
  Oligonucleotide primer for the detection of SNP TSC0019226
tgagtaagtgtt

SEQ ID NO: 300863 - DNA, 12 bp, Artificial Sequence
  Oligonucleotide primer for the detection of SNP TSC0019226
tgagtaagcgtt

SEQ ID NO: 300864 - DNA, 12 bp, Artificial Sequence
  Oligonucleotide primer for the detection of SNP TSC0019226
taaacaaacatt

SEQ ID NO: 300865 - DNA, 12 bp, Artificial Sequence
  Oligonucleotide primer for the detection of SNP TSC0019226
taaacaaacgtt

SEQ ID NO: 300866 - DNA, 12 bp, Artificial Sequence
  Oligonucleotide primer for the detection of SNP TSC0019226
tttggggtttgt

SEQ ID NO: 300867 - DNA, 12 bp, Artificial Sequence
  Oligonucleotide primer for the detection of SNP TSC0019226
tttggggttcgt

SEQ ID NO: 300868 - DNA, 12 bp, Artificial Sequence
  Oligonucleotide primer for the detection of SNP TSC0019227
aaccacaaacaa

SEQ ID NO: 300869 - DNA, 12 bp, Artificial Sequence
  Oligonucleotide primer for the detection of SNP TSC0019227
aaccacgaacaa

SEQ ID NO: 300870 - DNA, 12 bp, Artificial Sequence
  Oligonucleotide primer for the detection of SNP TSC0019227
ttatccccaaaa

SEQ ID NO: 300871 - DNA, 12 bp, Artificial Sequence
  Oligonucleotide primer for the detection of SNP TSC0019227
agattatgggta

SEQ ID NO: 300872 - DNA, 12 bp, Artificial Sequence
  Oligonucleotide primer for the detection of SNP TSC0019227
agattacgggta

SEQ ID NO: 300873 - DNA, 12 bp, Artificial Sequence
  Oligonucleotide primer for the detection of SNP TSC0019228
tacaaataaact

SEQ ID NO: 300874 - DNA, 12 bp, Artificial Sequence
  Oligonucleotide primer for the detection of SNP TSC0019228
gagggtttggaa

SEQ ID NO: 300875 - DNA, 12 bp, Artificial Sequence
  Oligonucleotide primer for the detection of SNP TSC0019229
caaccaaccctc

SEQ ID NO: 300876 - DNA, 12 bp, Artificial Sequence
  Oligonucleotide primer for the detection of SNP TSC0019229
gatttggtattg

SEQ ID NO: 300877 - DNA, 12 bp, Artificial Sequence
  Oligonucleotide primer for the detection of SNP TSC0019229
aacctaacacta

SEQ ID NO: 300878 - DNA, 12 bp, Artificial Sequence
  Oligonucleotide primer for the detection of SNP TSC0019229
taattagttttt

SEQ ID NO: 300879 - DNA, 12 bp, Artificial Sequence
  Oligonucleotide primer for the detection of SNP TSC0019230
aaaacaaaaaat

SEQ ID NO: 300880 - DNA, 12 bp, Artificial Sequence
  Oligonucleotide primer for the detection of SNP TSC0019230
ttagtatagaga

SEQ ID NO: 300881 - DNA, 12 bp, Artificial Sequence
  Oligonucleotide primer for the detection of SNP TSC0019231
actccctctaca

SEQ ID NO: 300882 - DNA, 12 bp, Artificial Sequence
  Oligonucleotide primer for the detection of SNP TSC0019231
ttgtaggggttt

SEQ ID NO: 300883 - DNA, 12 bp, Artificial Sequence
  Oligonucleotide primer for the detection of SNP TSC0019231
tcgtaggggttt

SEQ ID NO: 300884 - DNA, 12 bp, Artificial Sequence
  Oligonucleotide primer for the detection of SNP TSC0019231
ccacaaaaacct

SEQ ID NO: 300885 - DNA, 12 bp, Artificial Sequence
  Oligonucleotide primer for the detection of SNP TSC0019231
ccgcaaaaacct

SEQ ID NO: 300886 - DNA, 12 bp, Artificial Sequence
  Oligonucleotide primer for the detection of SNP TSC0019232
aaaacaataaac

SEQ ID NO: 300887 - DNA, 12 bp, Artificial Sequence
  Oligonucleotide primer for the detection of SNP TSC0019232
atgttagagagg

SEQ ID NO: 300888 - DNA, 12 bp, Artificial Sequence
  Oligonucleotide primer for the detection of SNP TSC0019233
cccttcaactct

SEQ ID NO: 300889 - DNA, 12 bp, Artificial Sequence
  Oligonucleotide primer for the detection of SNP TSC0019233
aaaaatagaata

SEQ ID NO: 300890 - DNA, 12 bp, Artificial Sequence
  Oligonucleotide primer for the detection of SNP TSC0019234
aattaatataaa

SEQ ID NO: 300891 - DNA, 12 bp, Artificial Sequence
  Oligonucleotide primer for the detection of SNP TSC0019234
ggttggggaatt

SEQ ID NO: 300892 - DNA, 12 bp, Artificial Sequence
  Oligonucleotide primer for the detection of SNP TSC0019234
aattaaaaaatt

SEQ ID NO: 300893 - DNA, 12 bp, Artificial Sequence
  Oligonucleotide primer for the detection of SNP TSC0019234
ggttagtgtaaa

SEQ ID NO: 300894 - DNA, 12 bp, Artificial Sequence
  Oligonucleotide primer for the detection of SNP TSC0019235
atacttttacta

SEQ ID NO: 300895 - DNA, 12 bp, Artificial Sequence
  Oligonucleotide primer for the detection of SNP TSC0019235
aggatattaatg

SEQ ID NO: 300896 - DNA, 12 bp, Artificial Sequence
  Oligonucleotide primer for the detection of SNP TSC0019235
aaaacaccaata

SEQ ID NO: 300897 - DNA, 12 bp, Artificial Sequence
  Oligonucleotide primer for the detection of SNP TSC0019235
atgtttttgttg

SEQ ID NO: 300898 - DNA, 12 bp, Artificial Sequence
  Oligonucleotide primer for the detection of SNP TSC0019236
aaaaccaaaacc

SEQ ID NO: 300899 - DNA, 12 bp, Artificial Sequence
  Oligonucleotide primer for the detection of SNP TSC0019236
tatttttgggag

SEQ ID NO: 300900 - DNA, 12 bp, Artificial Sequence
  Oligonucleotide primer for the detection of SNP TSC0019237
actctatactaa

SEQ ID NO: 300901 - DNA, 12 bp, Artificial Sequence
  Oligonucleotide primer for the detection of SNP TSC0019237
taacccttcctt

SEQ ID NO: 300902 - DNA, 12 bp, Artificial Sequence
  Oligonucleotide primer for the detection of SNP TSC0019237
ttgttttgtgtt

SEQ ID NO: 300903 - DNA, 12 bp, Artificial Sequence
  Oligonucleotide primer for the detection of SNP TSC0019239
ctacctaaacaa

SEQ ID NO: 300904 - DNA, 12 bp, Artificial Sequence
  Oligonucleotide primer for the detection of SNP TSC0019239
aaatttccctct

SEQ ID NO: 300905 - DNA, 12 bp, Artificial Sequence
  Oligonucleotide primer for the detection of SNP TSC0019239
ttgtttgggtaa

SEQ ID NO: 300906 - DNA, 12 bp, Artificial Sequence
  Oligonucleotide primer for the detection of SNP TSC0019242
taaatatccaat

SEQ ID NO: 300907 - DNA, 12 bp, Artificial Sequence
  Oligonucleotide primer for the detection of SNP TSC0019242
tttgtttagttg

SEQ ID NO: 300908 - DNA, 12 bp, Artificial Sequence
  Oligonucleotide primer for the detection of SNP TSC0019242
tttgtttagtcg

SEQ ID NO: 300909 - DNA, 12 bp, Artificial Sequence
  Oligonucleotide primer for the detection of SNP TSC0019243
ttcaaaccccat

SEQ ID NO: 300910 - DNA, 12 bp, Artificial Sequence
  Oligonucleotide primer for the detection of SNP TSC0019243
atttattaatta

SEQ ID NO: 300911 - DNA, 12 bp, Artificial Sequence
  Oligonukleotid-Primer
acccattaacca

SEQ ID NO: 300912 - DNA, 12 bp, Artificial Sequence
  Oligonucleotide primer for the detection of SNP TSC0019244
cttaaatccaaa

SEQ ID NO: 300913 - DNA, 12 bp, Artificial Sequence
  Oligonucleotide primer for the detection of SNP TSC0019244
cctaattccacc

SEQ ID NO: 300914 - DNA, 12 bp, Artificial Sequence
  Oligonucleotide primer for the detection of SNP TSC0019244
tttgaatttaag

SEQ ID NO: 300915 - DNA, 12 bp, Artificial Sequence
  Oligonukleotid-Primer
aaatataaaatc

SEQ ID NO: 300916 - DNA, 12 bp, Artificial Sequence
  Oligonucleotide primer for the detection of SNP TSC0019245
tagtttaaaggg

SEQ ID NO: 300917 - DNA, 12 bp, Artificial Sequence
  Oligonucleotide primer for the detection of SNP TSC0019246
aataaacaaact

SEQ ID NO: 300918 - DNA, 12 bp, Artificial Sequence
  Oligonucleotide primer for the detection of SNP TSC0019246
ataaatttgagg

SEQ ID NO: 300919 - DNA, 12 bp, Artificial Sequence
  Oligonukleotid-Primer
ttcattaaactc

SEQ ID NO: 300920 - DNA, 12 bp, Artificial Sequence
  Oligonucleotide primer for the detection of SNP TSC0019247
attaattagatg

SEQ ID NO: 300921 - DNA, 12 bp, Artificial Sequence
  Oligonucleotide primer for the detection of SNP TSC0019248
catacatctata

SEQ ID NO: 300922 - DNA, 12 bp, Artificial Sequence
  Oligonucleotide primer for the detection of SNP TSC0019248
tgtgttttagtt

SEQ ID NO: 300923 - DNA, 12 bp, Artificial Sequence
  Oligonucleotide primer for the detection of SNP TSC0019248
tatacttcaacc

SEQ ID NO: 300924 - DNA, 12 bp, Artificial Sequence
  Oligonucleotide primer for the detection of SNP TSC0019248
tatatatttgtg

SEQ ID NO: 300925 - DNA, 12 bp, Artificial Sequence
  Oligonucleotide primer for the detection of SNP TSC0019249
aacacaaaaacc

SEQ ID NO: 300926 - DNA, 12 bp, Artificial Sequence
  Oligonucleotide primer for the detection of SNP TSC0019249
gtagggatatgg

SEQ ID NO: 300927 - DNA, 12 bp, Artificial Sequence
  Oligonucleotide primer for the detection of SNP TSC0019250
aaaaacaatcct

SEQ ID NO: 300928 - DNA, 12 bp, Artificial Sequence
  Oligonucleotide primer for the detection of SNP TSC0019250
gagattaggaga

SEQ ID NO: 300929 - DNA, 12 bp, Artificial Sequence
  Oligonucleotide primer for the detection of SNP TSC0019251
atacataaaaaa

SEQ ID NO: 300930 - DNA, 12 bp, Artificial Sequence
  Oligonucleotide primer for the detection of SNP TSC0019251
ttcgtatttttt

SEQ ID NO: 300931 - DNA, 12 bp, Artificial Sequence
  Oligonucleotide primer for the detection of SNP TSC0019251
attcacatttcc

SEQ ID NO: 300932 - DNA, 12 bp, Artificial Sequence
  Oligonucleotide primer for the detection of SNP TSC0019251
attcgcatttcc

SEQ ID NO: 300933 - DNA, 12 bp, Artificial Sequence
  Oligonucleotide primer for the detection of SNP TSC0019251
atatatgtatgg

SEQ ID NO: 300934 - DNA, 12 bp, Artificial Sequence
  Oligonucleotide primer for the detection of SNP TSC0019252
aaaaaaaatccc

SEQ ID NO: 300935 - DNA, 12 bp, Artificial Sequence
  Oligonucleotide primer for the detection of SNP TSC0019260
caattcctactc

SEQ ID NO: 300936 - DNA, 12 bp, Artificial Sequence
  Oligonucleotide primer for the detection of SNP TSC0019260
ggttttagttta

SEQ ID NO: 300937 - DNA, 12 bp, Artificial Sequence
  Oligonucleotide primer for the detection of SNP TSC0019266
aaaaacactctc

SEQ ID NO: 300938 - DNA, 12 bp, Artificial Sequence
  Oligonucleotide primer for the detection of SNP TSC0019266
atatagaggatt

SEQ ID NO: 300939 - DNA, 12 bp, Artificial Sequence
  Oligonucleotide primer for the detection of SNP TSC0019266
acacaaaaaatt

SEQ ID NO: 300940 - DNA, 12 bp, Artificial Sequence
  Oligonucleotide primer for the detection of SNP TSC0019266
gaaaatattttt

SEQ ID NO: 300941 - DNA, 12 bp, Artificial Sequence
  Oligonucleotide primer for the detection of SNP TSC0019267
aaaaatattttt

SEQ ID NO: 300942 - DNA, 12 bp, Artificial Sequence
  Oligonucleotide primer for the detection of SNP TSC0019267
tttagatagaaa

SEQ ID NO: 300943 - DNA, 12 bp, Artificial Sequence
  Oligonucleotide primer for the detection of SNP TSC0019268
aattaccacctc

SEQ ID NO: 300944 - DNA, 12 bp, Artificial Sequence
  Oligonucleotide primer for the detection of SNP TSC0019269
caacccatactt

SEQ ID NO: 300945 - DNA, 12 bp, Artificial Sequence
  Oligonucleotide primer for the detection of SNP TSC0019269
gtaaaggtgttg

SEQ ID NO: 300946 - DNA, 12 bp, Artificial Sequence
  Oligonucleotide primer for the detection of SNP TSC0019271
caaccaccaaaa

SEQ ID NO: 300947 - DNA, 12 bp, Artificial Sequence
  Oligonucleotide primer for the detection of SNP TSC0019271
ttatttggaatt

SEQ ID NO: 300948 - DNA, 12 bp, Artificial Sequence
  Oligonucleotide primer for the detection of SNP TSC0019271
acttaaaattaa

SEQ ID NO: 300949 - DNA, 12 bp, Artificial Sequence
  Oligonucleotide primer for the detection of SNP TSC0019271
ttggtaattatt

SEQ ID NO: 300950 - DNA, 12 bp, Artificial Sequence
  Oligonucleotide primer for the detection of SNP TSC0019272
actatatcctaa

SEQ ID NO: 300951 - DNA, 12 bp, Artificial Sequence
  Oligonucleotide primer for the detection of SNP TSC0019272
tttttggtggtt

SEQ ID NO: 300952 - DNA, 12 bp, Artificial Sequence
  Oligonucleotide primer for the detection of SNP TSC0019272
cttttaataatt

SEQ ID NO: 300953 - DNA, 12 bp, Artificial Sequence
  Oligonucleotide primer for the detection of SNP TSC0019272
tggttgtatttt

SEQ ID NO: 300954 - DNA, 12 bp, Artificial Sequence
  Oligonucleotide primer for the detection of SNP TSC0019274
cactccccaaaa

SEQ ID NO: 300955 - DNA, 12 bp, Artificial Sequence
  Oligonucleotide primer for the detection of SNP TSC0019274
taggtagggtat

SEQ ID NO: 300956 - DNA, 12 bp, Artificial Sequence
  Oligonucleotide primer for the detection of SNP TSC0019274
caaacaaaacac

SEQ ID NO: 300957 - DNA, 12 bp, Artificial Sequence
  Oligonucleotide primer for the detection of SNP TSC0019279
ctccatcccaac

SEQ ID NO: 300958 - DNA, 12 bp, Artificial Sequence
  Oligonucleotide primer for the detection of SNP TSC0019280
aaacattaaata

SEQ ID NO: 300959 - DNA, 12 bp, Artificial Sequence
  Oligonucleotide primer for the detection of SNP TSC0019280
gatagaagtagt

SEQ ID NO: 300960 - DNA, 12 bp, Artificial Sequence
  Oligonucleotide primer for the detection of SNP TSC0019280
gatattaggtgt

SEQ ID NO: 300961 - DNA, 12 bp, Artificial Sequence
  Oligonucleotide primer for the detection of SNP TSC0019280
gatattaggtgc

SEQ ID NO: 300962 - DNA, 12 bp, Artificial Sequence
  Oligonucleotide primer for the detection of SNP TSC0019281
caaaaaacaatt

SEQ ID NO: 300963 - DNA, 12 bp, Artificial Sequence
  Oligonucleotide primer for the detection of SNP TSC0019281
gggtgtagttta

SEQ ID NO: 300964 - DNA, 12 bp, Artificial Sequence
  Oligonucleotide primer for the detection of SNP TSC0019282
cttcctccccaa

SEQ ID NO: 300965 - DNA, 12 bp, Artificial Sequence
  Oligonucleotide primer for the detection of SNP TSC0019282
ttgggttgtatt

SEQ ID NO: 300966 - DNA, 12 bp, Artificial Sequence
  Oligonucleotide primer for the detection of SNP TSC0019282
ctaaactacacc

SEQ ID NO: 300967 - DNA, 12 bp, Artificial Sequence
  Oligonucleotide primer for the detection of SNP TSC0019283
actactaaacac

SEQ ID NO: 300968 - DNA, 12 bp, Artificial Sequence
  Oligonucleotide primer for the detection of SNP TSC0019283
gattagttaggg

SEQ ID NO: 300969 - DNA, 12 bp, Artificial Sequence
  Oligonucleotide primer for the detection of SNP TSC0019283
aaccaaccaaaa

SEQ ID NO: 300970 - DNA, 12 bp, Artificial Sequence
  Oligonucleotide primer for the detection of SNP TSC0019283
gttgttgggtat

SEQ ID NO: 300971 - DNA, 12 bp, Artificial Sequence
  Oligonucleotide primer for the detection of SNP TSC0019283
gttgttgggtac

SEQ ID NO: 300972 - DNA, 12 bp, Artificial Sequence
  Oligonucleotide primer for the detection of SNP TSC0019284
cccatcaaaatc

SEQ ID NO: 300973 - DNA, 12 bp, Artificial Sequence
  Oligonucleotide primer for the detection of SNP TSC0019284
cccccttcctta

SEQ ID NO: 300974 - DNA, 12 bp, Artificial Sequence
  Oligonucleotide primer for the detection of SNP TSC0019284
tttattagggtt

SEQ ID NO: 300975 - DNA, 12 bp, Artificial Sequence
  Oligonucleotide primer for the detection of SNP TSC0019285
cttcaaaaaccc

SEQ ID NO: 300976 - DNA, 12 bp, Artificial Sequence
  Oligonucleotide primer for the detection of SNP TSC0019285
tgtttttttata

SEQ ID NO: 300977 - DNA, 12 bp, Artificial Sequence
  Oligonucleotide primer for the detection of SNP TSC0019286
ttacaatatcaa

SEQ ID NO: 300978 - DNA, 12 bp, Artificial Sequence
  Oligonucleotide primer for the detection of SNP TSC0019286
aataggttaatt

SEQ ID NO: 300979 - DNA, 12 bp, Artificial Sequence
  Oligonucleotide primer for the detection of SNP TSC0019286
aataaattaact

SEQ ID NO: 300980 - DNA, 12 bp, Artificial Sequence
  Oligonucleotide primer for the detection of SNP TSC0019286
ttgtaatattaa

SEQ ID NO: 300981 - DNA, 12 bp, Artificial Sequence
  Oligonucleotide primer for the detection of SNP TSC0019287
cttaaacctaaa

SEQ ID NO: 300982 - DNA, 12 bp, Artificial Sequence
  Oligonucleotide primer for the detection of SNP TSC0019287
ttagggttgagg

SEQ ID NO: 300983 - DNA, 12 bp, Artificial Sequence
  Oligonucleotide primer for the detection of SNP TSC0019287
ttagggtcgagg

SEQ ID NO: 300984 - DNA, 12 bp, Artificial Sequence
  Oligonucleotide primer for the detection of SNP TSC0019287
ttaaaaccgaaa

SEQ ID NO: 300985 - DNA, 12 bp, Artificial Sequence
  Oligonucleotide primer for the detection of SNP TSC0019287
tttaagtttgga

SEQ ID NO: 300986 - DNA, 12 bp, Artificial Sequence
  Oligonucleotide primer for the detection of SNP TSC0019288
aacaataaaaac

SEQ ID NO: 300987 - DNA, 12 bp, Artificial Sequence
  Oligonucleotide primer for the detection of SNP TSC0019288
tggtttttattg

SEQ ID NO: 300988 - DNA, 12 bp, Artificial Sequence
  Oligonucleotide primer for the detection of SNP TSC0019289
ttaaataatcat

SEQ ID NO: 300989 - DNA, 12 bp, Artificial Sequence
  Oligonucleotide primer for the detection of SNP TSC0019289
aatgattaaaaa

SEQ ID NO: 300990 - DNA, 12 bp, Artificial Sequence
  Oligonucleotide primer for the detection of SNP TSC0019290
taatttatcatt

SEQ ID NO: 300991 - DNA, 12 bp, Artificial Sequence
  Oligonucleotide primer for the detection of SNP TSC0019290
tttttaataatt

SEQ ID NO: 300992 - DNA, 12 bp, Artificial Sequence
  Oligonucleotide primer for the detection of SNP TSC0019290
ttttcaataacc

SEQ ID NO: 300993 - DNA, 12 bp, Artificial Sequence
  Oligonucleotide primer for the detection of SNP TSC0019290
taatttgttatt

SEQ ID NO: 300994 - DNA, 12 bp, Artificial Sequence
  Oligonucleotide primer for the detection of SNP TSC0019294
aaaatactctct

SEQ ID NO: 300995 - DNA, 12 bp, Artificial Sequence
  Oligonucleotide primer for the detection of SNP TSC0019294
aattagaattag

SEQ ID NO: 300996 - DNA, 12 bp, Artificial Sequence
  Oligonucleotide primer for the detection of SNP TSC0019298
aaaaaataccac

SEQ ID NO: 300997 - DNA, 12 bp, Artificial Sequence
  Oligonucleotide primer for the detection of SNP TSC0019298
aaagaggtattg

SEQ ID NO: 300998 - DNA, 12 bp, Artificial Sequence
  Oligonucleotide primer for the detection of SNP TSC0019299
tcaataatcaaa

SEQ ID NO: 300999 - DNA, 12 bp, Artificial Sequence
  Oligonucleotide primer for the detection of SNP TSC0019299
ggatatattttt

SEQ ID NO: 301000 - DNA, 12 bp, Artificial Sequence
  Oligonucleotide primer for the detection of SNP TSC0019299
aaatacatttct

SEQ ID NO: 301001 - DNA, 12 bp, Artificial Sequence
  Oligonucleotide primer for the detection of SNP TSC0019299
ttagtaattaaa

SEQ ID NO: 301002 - DNA, 12 bp, Artificial Sequence
  Oligonucleotide primer for the detection of SNP TSC0019300
aacgaaatttca

SEQ ID NO: 301003 - DNA, 12 bp, Artificial Sequence
  Oligonucleotide primer for the detection of SNP TSC0019300
tttggttaatat

SEQ ID NO: 301004 - DNA, 12 bp, Artificial Sequence
  Oligonucleotide primer for the detection of SNP TSC0019300
cctaactaacat

SEQ ID NO: 301005 - DNA, 12 bp, Artificial Sequence
  Oligonucleotide primer for the detection of SNP TSC0019300
gatggggtttta

SEQ ID NO: 301006 - DNA, 12 bp, Artificial Sequence
  Oligonucleotide primer for the detection of SNP TSC0019300
gacggggtttta

SEQ ID NO: 301007 - DNA, 12 bp, Artificial Sequence
  Oligonucleotide primer for the detection of SNP TSC0019303
aaaataaactaa

SEQ ID NO: 301008 - DNA, 12 bp, Artificial Sequence
  Oligonucleotide primer for the detection of SNP TSC0019303
aaccccaaaaaa

SEQ ID NO: 301009 - DNA, 12 bp, Artificial Sequence
  Oligonucleotide primer for the detection of SNP TSC0019303
aggataggttga

SEQ ID NO: 301010 - DNA, 12 bp, Artificial Sequence
  Oligonucleotide primer for the detection of SNP TSC0019304
aacccaaaaaac

SEQ ID NO: 301011 - DNA, 12 bp, Artificial Sequence
  Oligonucleotide primer for the detection of SNP TSC0019305
aaaacctacttt

SEQ ID NO: 301012 - DNA, 12 bp, Artificial Sequence
  Oligonucleotide primer for the detection of SNP TSC0019305
taataaagggaa

SEQ ID NO: 301013 - DNA, 12 bp, Artificial Sequence
  Oligonucleotide primer for the detection of SNP TSC0019306
ccaaaaactatt

SEQ ID NO: 301014 - DNA, 12 bp, Artificial Sequence
  Oligonucleotide primer for the detection of SNP TSC0019306
ccgaaaactatt

SEQ ID NO: 301015 - DNA, 12 bp, Artificial Sequence
  Oligonucleotide primer for the detection of SNP TSC0019306
ttacctcctaaa

SEQ ID NO: 301016 - DNA, 12 bp, Artificial Sequence
  Oligonucleotide primer for the detection of SNP TSC0019306
ttggagattgtt

SEQ ID NO: 301017 - DNA, 12 bp, Artificial Sequence
  Oligonucleotide primer for the detection of SNP TSC0019306
tcggagattgtt

SEQ ID NO: 301018 - DNA, 12 bp, Artificial Sequence
  Oligonucleotide primer for the detection of SNP TSC0019307
ccttaactttcc

SEQ ID NO: 301019 - DNA, 12 bp, Artificial Sequence
  Oligonucleotide primer for the detection of SNP TSC0019307
aaattgaattta

SEQ ID NO: 301020 - DNA, 12 bp, Artificial Sequence
  Oligonucleotide primer for the detection of SNP TSC0019311
ttaacactcata

SEQ ID NO: 301021 - DNA, 12 bp, Artificial Sequence
  Oligonucleotide primer for the detection of SNP TSC0019311
aaaattgttata

SEQ ID NO: 301022 - DNA, 12 bp, Artificial Sequence
  Oligonucleotide primer for the detection of SNP TSC0019311
aaaactatcata

SEQ ID NO: 301023 - DNA, 12 bp, Artificial Sequence
  Oligonucleotide primer for the detection of SNP TSC0019311
ttagtatttatg

SEQ ID NO: 301024 - DNA, 12 bp, Artificial Sequence
  Oligonukleotid-Primer
aaaataaatata

SEQ ID NO: 301025 - DNA, 12 bp, Artificial Sequence
  Oligonucleotide primer for the detection of SNP TSC0019315
aaaaaagtattt

SEQ ID NO: 301026 - DNA, 12 bp, Artificial Sequence
  Oligonucleotide primer for the detection of SNP TSC0019317
ctaattcttctt

SEQ ID NO: 301027 - DNA, 12 bp, Artificial Sequence
  Oligonucleotide primer for the detection of SNP TSC0019317
aattaagttgag

SEQ ID NO: 301028 - DNA, 12 bp, Artificial Sequence
  Oligonukleotid-Primer
acaacaaataaa

SEQ ID NO: 301029 - DNA, 12 bp, Artificial Sequence
  Oligonucleotide primer for the detection of SNP TSC0019318
atttgattatgg

SEQ ID NO: 301030 - DNA, 12 bp, Artificial Sequence
  Oligonucleotide primer for the detection of SNP TSC0019318
atttgattacgg

SEQ ID NO: 301031 - DNA, 12 bp, Artificial Sequence
  Oligonucleotide primer for the detection of SNP TSC0019318
acctaatcacaa

SEQ ID NO: 301032 - DNA, 12 bp, Artificial Sequence
  Oligonucleotide primer for the detection of SNP TSC0019318
acctaatcacga

SEQ ID NO: 301033 - DNA, 12 bp, Artificial Sequence
  Oligonucleotide primer for the detection of SNP TSC0019318
atagtagataaa

SEQ ID NO: 301034 - DNA, 12 bp, Artificial Sequence
  Oligonucleotide primer for the detection of SNP TSC0019319
aatctaaaccaa

SEQ ID NO: 301035 - DNA, 12 bp, Artificial Sequence
  Oligonucleotide primer for the detection of SNP TSC0019319
tattttgagaat

SEQ ID NO: 301036 - DNA, 12 bp, Artificial Sequence
  Oligonucleotide primer for the detection of SNP TSC0019319
agtttaaattag

SEQ ID NO: 301037 - DNA, 12 bp, Artificial Sequence
  Oligonucleotide primer for the detection of SNP TSC0019320
tataattttccc

SEQ ID NO: 301038 - DNA, 12 bp, Artificial Sequence
  Oligonucleotide primer for the detection of SNP TSC0019320
agaatgttttta

SEQ ID NO: 301039 - DNA, 12 bp, Artificial Sequence
  Oligonucleotide primer for the detection of SNP TSC0019321
attttaattttc

SEQ ID NO: 301040 - DNA, 12 bp, Artificial Sequence
  Oligonucleotide primer for the detection of SNP TSC0019321
tatttatttgaa

SEQ ID NO: 301041 - DNA, 12 bp, Artificial Sequence
  Oligonucleotide primer for the detection of SNP TSC0019321
tatttacctaaa

SEQ ID NO: 301042 - DNA, 12 bp, Artificial Sequence
  Oligonucleotide primer for the detection of SNP TSC0019321
attttggttttt

SEQ ID NO: 301043 - DNA, 12 bp, Artificial Sequence
  Oligonucleotide primer for the detection of SNP TSC0019322
aaaataaataac

SEQ ID NO: 301044 - DNA, 12 bp, Artificial Sequence
  Oligonucleotide primer for the detection of SNP TSC0019324
atccttctttat

SEQ ID NO: 301045 - DNA, 12 bp, Artificial Sequence
  Oligonucleotide primer for the detection of SNP TSC0019324
gaatagaaagga

SEQ ID NO: 301046 - DNA, 12 bp, Artificial Sequence
  Oligonucleotide primer for the detection of SNP TSC0019325
ttccccttctaa

SEQ ID NO: 301047 - DNA, 12 bp, Artificial Sequence
  Oligonucleotide primer for the detection of SNP TSC0019325
aggaagatgggg

SEQ ID NO: 301048 - DNA, 12 bp, Artificial Sequence
  Oligonucleotide primer for the detection of SNP TSC0019326
cctataaactcc

SEQ ID NO: 301049 - DNA, 12 bp, Artificial Sequence
  Oligonucleotide primer for the detection of SNP TSC0019326
attggtgtttag

SEQ ID NO: 301050 - DNA, 12 bp, Artificial Sequence
  Oligonucleotide primer for the detection of SNP TSC0019326
atcggtgtttag

SEQ ID NO: 301051 - DNA, 12 bp, Artificial Sequence
  Oligonucleotide primer for the detection of SNP TSC0019326
accaatacccaa

SEQ ID NO: 301052 - DNA, 12 bp, Artificial Sequence
  Oligonucleotide primer for the detection of SNP TSC0019326
accgatacccaa

SEQ ID NO: 301053 - DNA, 12 bp, Artificial Sequence
  Oligonucleotide primer for the detection of SNP TSC0019326
tttatgagtttt

SEQ ID NO: 301054 - DNA, 12 bp, Artificial Sequence
  Oligonucleotide primer for the detection of SNP TSC0019327
aattaaaacatc

SEQ ID NO: 301055 - DNA, 12 bp, Artificial Sequence
  Oligonucleotide primer for the detection of SNP TSC0019327
tgttgtatttgg

SEQ ID NO: 301056 - DNA, 12 bp, Artificial Sequence
  Oligonucleotide primer for the detection of SNP TSC0019327
tattatacttaa

SEQ ID NO: 301057 - DNA, 12 bp, Artificial Sequence
  Oligonucleotide primer for the detection of SNP TSC0019327
aattaaaatatt

SEQ ID NO: 301058 - DNA, 12 bp, Artificial Sequence
  Oligonucleotide primer for the detection of SNP TSC0019329
ttattgttttag

SEQ ID NO: 301059 - DNA, 12 bp, Artificial Sequence
  Oligonucleotide primer for the detection of SNP TSC0019330
atcctaataaac

SEQ ID NO: 301060 - DNA, 12 bp, Artificial Sequence
  Oligonucleotide primer for the detection of SNP TSC0019330
tgatatttttaa

SEQ ID NO: 301061 - DNA, 12 bp, Artificial Sequence
  Oligonucleotide primer for the detection of SNP TSC0019331
aaaatctaaaat

SEQ ID NO: 301062 - DNA, 12 bp, Artificial Sequence
  Oligonucleotide primer for the detection of SNP TSC0019331
ggataaagtata

SEQ ID NO: 301063 - DNA, 12 bp, Artificial Sequence
  Oligonucleotide primer for the detection of SNP TSC0019332
tacacccttcac

SEQ ID NO: 301064 - DNA, 12 bp, Artificial Sequence
  Oligonucleotide primer for the detection of SNP TSC0019332
ttattattttgg

SEQ ID NO: 301065 - DNA, 12 bp, Artificial Sequence
  Oligonucleotide primer for the detection of SNP TSC0019332
ttattatttcgg

SEQ ID NO: 301066 - DNA, 12 bp, Artificial Sequence
  Oligonucleotide primer for the detection of SNP TSC0019334
aatttatcgttg

SEQ ID NO: 301067 - DNA, 12 bp, Artificial Sequence
  Oligonucleotide primer for the detection of SNP TSC0019334
aatttaccgcta

SEQ ID NO: 301068 - DNA, 12 bp, Artificial Sequence
  Oligonucleotide primer for the detection of SNP TSC0019334
aggtttagagtt

SEQ ID NO: 301069 - DNA, 12 bp, Artificial Sequence
  Oligonucleotide primer for the detection of SNP TSC0019334
aggtttagagtc

SEQ ID NO: 301070 - DNA, 12 bp, Artificial Sequence
  Oligonucleotide primer for the detection of SNP TSC0019335
tacacataacac

SEQ ID NO: 301071 - DNA, 12 bp, Artificial Sequence
  Oligonucleotide primer for the detection of SNP TSC0019335
ttgattatttaa

SEQ ID NO: 301072 - DNA, 12 bp, Artificial Sequence
  Oligonucleotide primer for the detection of SNP TSC0019336
ttataaactttt

SEQ ID NO: 301073 - DNA, 12 bp, Artificial Sequence
  Oligonucleotide primer for the detection of SNP TSC0019339
ttcatcaatatt

SEQ ID NO: 301074 - DNA, 12 bp, Artificial Sequence
  Oligonucleotide primer for the detection of SNP TSC0019339
gtgggttggttg

SEQ ID NO: 301075 - DNA, 12 bp, Artificial Sequence
  Oligonucleotide primer for the detection of SNP TSC0019339
gcgggttggttg

SEQ ID NO: 301076 - DNA, 12 bp, Artificial Sequence
  Oligonucleotide primer for the detection of SNP TSC0019340
ataaccaaacct

SEQ ID NO: 301077 - DNA, 12 bp, Artificial Sequence
  Oligonucleotide primer for the detection of SNP TSC0019340
gtaaccaaacct

SEQ ID NO: 301078 - DNA, 12 bp, Artificial Sequence
  Oligonucleotide primer for the detection of SNP TSC0019340
gaagagagatag

SEQ ID NO: 301079 - DNA, 12 bp, Artificial Sequence
  Oligonucleotide primer for the detection of SNP TSC0019341
tctataactatt

SEQ ID NO: 301080 - DNA, 12 bp, Artificial Sequence
  Oligonucleotide primer for the detection of SNP TSC0019341
attaattattga

SEQ ID NO: 301081 - DNA, 12 bp, Artificial Sequence
  Oligonucleotide primer for the detection of SNP TSC0019342
aaatttatacct

SEQ ID NO: 301082 - DNA, 12 bp, Artificial Sequence
  Oligonucleotide primer for the detection of SNP TSC0019342
gttatttatgtg

SEQ ID NO: 301083 - DNA, 12 bp, Artificial Sequence
  Oligonucleotide primer for the detection of SNP TSC0019344
atctctaaaaaa

SEQ ID NO: 301084 - DNA, 12 bp, Artificial Sequence
  Oligonucleotide primer for the detection of SNP TSC0019344
tctctctttttt

SEQ ID NO: 301085 - DNA, 12 bp, Artificial Sequence
  Oligonucleotide primer for the detection of SNP TSC0019344
gtttttaaaaaa

SEQ ID NO: 301086 - DNA, 12 bp, Artificial Sequence
  Oligonucleotide primer for the detection of SNP TSC0019345
atcccaactcct

SEQ ID NO: 301087 - DNA, 12 bp, Artificial Sequence
  Oligonucleotide primer for the detection of SNP TSC0019345
tgttatagtttg

SEQ ID NO: 301088 - DNA, 12 bp, Artificial Sequence
  Oligonucleotide primer for the detection of SNP TSC0019345
taccacaaccta

SEQ ID NO: 301089 - DNA, 12 bp, Artificial Sequence
  Oligonucleotide primer for the detection of SNP TSC0019346
acaaacatatca

SEQ ID NO: 301090 - DNA, 12 bp, Artificial Sequence
  Oligonucleotide primer for the detection of SNP TSC0019346
acaaacgtatca

SEQ ID NO: 301091 - DNA, 12 bp, Artificial Sequence
  Oligonucleotide primer for the detection of SNP TSC0019346
gtaggtgtatta

SEQ ID NO: 301092 - DNA, 12 bp, Artificial Sequence
  Oligonucleotide primer for the detection of SNP TSC0019346
gtaggcgtatta

SEQ ID NO: 301093 - DNA, 12 bp, Artificial Sequence
  Oligonucleotide primer for the detection of SNP TSC0019347
ccttcccaaaac

SEQ ID NO: 301094 - DNA, 12 bp, Artificial Sequence
  Oligonucleotide primer for the detection of SNP TSC0019347
ttgtaaggtagg

SEQ ID NO: 301095 - DNA, 12 bp, Artificial Sequence
  Oligonucleotide primer for the detection of SNP TSC0019347
tcgtaaggtagg

SEQ ID NO: 301096 - DNA, 12 bp, Artificial Sequence
  Oligonucleotide primer for the detection of SNP TSC0019349
tcccaaacccta

SEQ ID NO: 301097 - DNA, 12 bp, Artificial Sequence
  Oligonucleotide primer for the detection of SNP TSC0019349
gtttttttttgt

SEQ ID NO: 301098 - DNA, 12 bp, Artificial Sequence
  Oligonucleotide primer for the detection of SNP TSC0019349
tatcttcctcta

SEQ ID NO: 301099 - DNA, 12 bp, Artificial Sequence
  Oligonucleotide primer for the detection of SNP TSC0019351
ttccaaattcca

SEQ ID NO: 301100 - DNA, 12 bp, Artificial Sequence
  Oligonucleotide primer for the detection of SNP TSC0019351
agtagaaaatgt

SEQ ID NO: 301101 - DNA, 12 bp, Artificial Sequence
  Oligonucleotide primer for the detection of SNP TSC0019351
ataaaaaataca

SEQ ID NO: 301102 - DNA, 12 bp, Artificial Sequence
  Oligonucleotide primer for the detection of SNP TSC0019352
aggatttagtag

SEQ ID NO: 301103 - DNA, 12 bp, Artificial Sequence
  Oligonucleotide primer for the detection of SNP TSC0019353
caataccttctt

SEQ ID NO: 301104 - DNA, 12 bp, Artificial Sequence
  Oligonucleotide primer for the detection of SNP TSC0019353
tattgaatttgg

SEQ ID NO: 301105 - DNA, 12 bp, Artificial Sequence
  Oligonucleotide primer for the detection of SNP TSC0019357
acatttattatc

SEQ ID NO: 301106 - DNA, 12 bp, Artificial Sequence
  Oligonucleotide primer for the detection of SNP TSC0019358
atcttttatttt

SEQ ID NO: 301107 - DNA, 12 bp, Artificial Sequence
  Oligonucleotide primer for the detection of SNP TSC0019358
tgataagatgtt

SEQ ID NO: 301108 - DNA, 12 bp, Artificial Sequence
  Oligonucleotide primer for the detection of SNP TSC0019359
tacctatacata

SEQ ID NO: 301109 - DNA, 12 bp, Artificial Sequence
  Oligonucleotide primer for the detection of SNP TSC0019359
tattatagatgt

SEQ ID NO: 301110 - DNA, 12 bp, Artificial Sequence
  Oligonucleotide primer for the detection of SNP TSC0019359
taccataaatac

SEQ ID NO: 301111 - DNA, 12 bp, Artificial Sequence
  Oligonucleotide primer for the detection of SNP TSC0019359
tgtttgtgtatg

SEQ ID NO: 301112 - DNA, 12 bp, Artificial Sequence
  Oligonucleotide primer for the detection of SNP TSC0019360
ataacaaaattc

SEQ ID NO: 301113 - DNA, 12 bp, Artificial Sequence
  Oligonucleotide primer for the detection of SNP TSC0019360
ttaggaataggg

SEQ ID NO: 301114 - DNA, 12 bp, Artificial Sequence
  Oligonucleotide primer for the detection of SNP TSC0019360
atgataagattt

SEQ ID NO: 301115 - DNA, 12 bp, Artificial Sequence
  Oligonucleotide primer for the detection of SNP TSC0019361
tcaaattaaacc

SEQ ID NO: 301116 - DNA, 12 bp, Artificial Sequence
  Oligonucleotide primer for the detection of SNP TSC0019361
tttagagttgaa

SEQ ID NO: 301117 - DNA, 12 bp, Artificial Sequence
  Oligonucleotide primer for the detection of SNP TSC0019362
tttttattgtgt

SEQ ID NO: 301118 - DNA, 12 bp, Artificial Sequence
  Oligonucleotide primer for the detection of SNP TSC0019362
ttttcattatat

SEQ ID NO: 301119 - DNA, 12 bp, Artificial Sequence
  Oligonucleotide primer for the detection of SNP TSC0019362
aatttataagaa

SEQ ID NO: 301120 - DNA, 12 bp, Artificial Sequence
  Oligonucleotide primer for the detection of SNP TSC0019363
attttatactta

SEQ ID NO: 301121 - DNA, 12 bp, Artificial Sequence
  Oligonucleotide primer for the detection of SNP TSC0019363
ttagaaaatatg

SEQ ID NO: 301122 - DNA, 12 bp, Artificial Sequence
  Oligonucleotide primer for the detection of SNP TSC0019363
caaaaaatataa

SEQ ID NO: 301123 - DNA, 12 bp, Artificial Sequence
  Oligonucleotide primer for the detection of SNP TSC0019364
ctataatcctac

SEQ ID NO: 301124 - DNA, 12 bp, Artificial Sequence
  Oligonucleotide primer for the detection of SNP TSC0019364
gagatagaaaag

SEQ ID NO: 301125 - DNA, 12 bp, Artificial Sequence
  Oligonucleotide primer for the detection of SNP TSC0019364
ttgtaattttgt

SEQ ID NO: 301126 - DNA, 12 bp, Artificial Sequence
  Oligonucleotide primer for the detection of SNP TSC0019365
caatctataacc

SEQ ID NO: 301127 - DNA, 12 bp, Artificial Sequence
  Oligonucleotide primer for the detection of SNP TSC0019365
tatagtaatttg

SEQ ID NO: 301128 - DNA, 12 bp, Artificial Sequence
  Oligonucleotide primer for the detection of SNP TSC0019366
cctaaaaaaaat

SEQ ID NO: 301129 - DNA, 12 bp, Artificial Sequence
  Oligonucleotide primer for the detection of SNP TSC0019366
ggaatttattgg

SEQ ID NO: 301130 - DNA, 12 bp, Artificial Sequence
  Oligonucleotide primer for the detection of SNP TSC0019366
ggaatttatcgg

SEQ ID NO: 301131 - DNA, 12 bp, Artificial Sequence
  Oligonucleotide primer for the detection of SNP TSC0019367
aaacacatccat

SEQ ID NO: 301132 - DNA, 12 bp, Artificial Sequence
  Oligonucleotide primer for the detection of SNP TSC0019367
agtatttgtgtg

SEQ ID NO: 301133 - DNA, 12 bp, Artificial Sequence
  Oligonucleotide primer for the detection of SNP TSC0019367
agtatttgtgcg

SEQ ID NO: 301134 - DNA, 12 bp, Artificial Sequence
  Oligonucleotide primer for the detection of SNP TSC0019368
acaaataattct

SEQ ID NO: 301135 - DNA, 12 bp, Artificial Sequence
  Oligonucleotide primer for the detection of SNP TSC0019368
aaattaaaaaaa

SEQ ID NO: 301136 - DNA, 12 bp, Artificial Sequence
  Oligonucleotide primer for the detection of SNP TSC0019369
aacattctaaat

SEQ ID NO: 301137 - DNA, 12 bp, Artificial Sequence
  Oligonucleotide primer for the detection of SNP TSC0019369
ttaggttaaaaa

SEQ ID NO: 301138 - DNA, 12 bp, Artificial Sequence
  Oligonucleotide primer for the detection of SNP TSC0019369
ttaaaccaaaaa

SEQ ID NO: 301139 - DNA, 12 bp, Artificial Sequence
  Oligonucleotide primer for the detection of SNP TSC0019373
cacatacacaaa

SEQ ID NO: 301140 - DNA, 12 bp, Artificial Sequence
  Oligonucleotide primer for the detection of SNP TSC0019373
cacatacgcaaa

SEQ ID NO: 301141 - DNA, 12 bp, Artificial Sequence
  Oligonucleotide primer for the detection of SNP TSC0019373
cgcatacacaaa

SEQ ID NO: 301142 - DNA, 12 bp, Artificial Sequence
  Oligonucleotide primer for the detection of SNP TSC0019373
cgcatacgcaaa

SEQ ID NO: 301143 - DNA, 12 bp, Artificial Sequence
  Oligonucleotide primer for the detection of SNP TSC0019373
attgttattgtg

SEQ ID NO: 301144 - DNA, 12 bp, Artificial Sequence
  Oligonucleotide primer for the detection of SNP TSC0019373
atcgttattgtg

SEQ ID NO: 301145 - DNA, 12 bp, Artificial Sequence
  Oligonukleotid-Primer
attgttattgcg

SEQ ID NO: 301146 - DNA, 12 bp, Artificial Sequence
  Oligonucleotide primer for the detection of SNP TSC0019373
atcgttattgcg

SEQ ID NO: 301147 - DNA, 12 bp, Artificial Sequence
  Oligonucleotide primer for the detection of SNP TSC0019373
accaccactaca

SEQ ID NO: 301148 - DNA, 12 bp, Artificial Sequence
  Oligonucleotide primer for the detection of SNP TSC0019373
accaccactacg

SEQ ID NO: 301149 - DNA, 12 bp, Artificial Sequence
  Oligonucleotide primer for the detection of SNP TSC0019373
accgccactaca

SEQ ID NO: 301150 - DNA, 12 bp, Artificial Sequence
  Oligonucleotide primer for the detection of SNP TSC0019373
accgccactacg

SEQ ID NO: 301151 - DNA, 12 bp, Artificial Sequence
  Oligonucleotide primer for the detection of SNP TSC0019373
gagtgtatgtgt

SEQ ID NO: 301152 - DNA, 12 bp, Artificial Sequence
  Oligonucleotide primer for the detection of SNP TSC0019373
gagcgtatgtgt

SEQ ID NO: 301153 - DNA, 12 bp, Artificial Sequence
  Oligonucleotide primer for the detection of SNP TSC0019373
gagtgtatgcgt

SEQ ID NO: 301154 - DNA, 12 bp, Artificial Sequence
  Oligonucleotide primer for the detection of SNP TSC0019373
gagcgtatgcgt

SEQ ID NO: 301155 - DNA, 12 bp, Artificial Sequence
  Oligonucleotide primer for the detection of SNP TSC0019377
atccccaatccc

SEQ ID NO: 301156 - DNA, 12 bp, Artificial Sequence
  Oligonucleotide primer for the detection of SNP TSC0019377
tggtttgtggtt

SEQ ID NO: 301157 - DNA, 12 bp, Artificial Sequence
  Oligonucleotide primer for the detection of SNP TSC0019377
tggtttgtggtc

SEQ ID NO: 301158 - DNA, 12 bp, Artificial Sequence
  Oligonucleotide primer for the detection of SNP TSC0019377
taatctataacc

SEQ ID NO: 301159 - DNA, 12 bp, Artificial Sequence
  Oligonucleotide primer for the detection of SNP TSC0019378
tatctcccaaat

SEQ ID NO: 301160 - DNA, 12 bp, Artificial Sequence
  Oligonucleotide primer for the detection of SNP TSC0019378
tataataattta

SEQ ID NO: 301161 - DNA, 12 bp, Artificial Sequence
  Oligonucleotide primer for the detection of SNP TSC0019379
ctatcacccaaa

SEQ ID NO: 301162 - DNA, 12 bp, Artificial Sequence
  Oligonucleotide primer for the detection of SNP TSC0019379
ttttttggaatt

SEQ ID NO: 301163 - DNA, 12 bp, Artificial Sequence
  Oligonucleotide primer for the detection of SNP TSC0019379
tctcctaaaatt

SEQ ID NO: 301164 - DNA, 12 bp, Artificial Sequence
  Oligonucleotide primer for the detection of SNP TSC0019380
ctaactcaaaaa

SEQ ID NO: 301165 - DNA, 12 bp, Artificial Sequence
  Oligonucleotide primer for the detection of SNP TSC0019380
aattatggaatt

SEQ ID NO: 301166 - DNA, 12 bp, Artificial Sequence
  Oligonucleotide primer for the detection of SNP TSC0019380
aactataaaatt

SEQ ID NO: 301167 - DNA, 12 bp, Artificial Sequence
  Oligonucleotide primer for the detection of SNP TSC0019380
ttagtttagaag

SEQ ID NO: 301168 - DNA, 12 bp, Artificial Sequence
  Oligonucleotide primer for the detection of SNP TSC0019381
taaaaaaaacaa

SEQ ID NO: 301169 - DNA, 12 bp, Artificial Sequence
  Oligonucleotide primer for the detection of SNP TSC0019381
taaaaaaaacga

SEQ ID NO: 301170 - DNA, 12 bp, Artificial Sequence
  Oligonucleotide primer for the detection of SNP TSC0019381
gggggtattagg

SEQ ID NO: 301171 - DNA, 12 bp, Artificial Sequence
  Oligonucleotide primer for the detection of SNP TSC0019381
aaaaacaccaaa

SEQ ID NO: 301172 - DNA, 12 bp, Artificial Sequence
  Oligonucleotide primer for the detection of SNP TSC0019381
tgagaagggtgg

SEQ ID NO: 301173 - DNA, 12 bp, Artificial Sequence
  Oligonucleotide primer for the detection of SNP TSC0019381
tgagaagggcgg

SEQ ID NO: 301174 - DNA, 12 bp, Artificial Sequence
  Oligonucleotide primer for the detection of SNP TSC0019382
ctatctcgaaaa

SEQ ID NO: 301175 - DNA, 12 bp, Artificial Sequence
  Oligonucleotide primer for the detection of SNP TSC0019382
ttaggtgggtag

SEQ ID NO: 301176 - DNA, 12 bp, Artificial Sequence
  Oligonucleotide primer for the detection of SNP TSC0019382
ctaaataaacaa

SEQ ID NO: 301177 - DNA, 12 bp, Artificial Sequence
  Oligonucleotide primer for the detection of SNP TSC0019382
attattttggag

SEQ ID NO: 301178 - DNA, 12 bp, Artificial Sequence
  Oligonucleotide primer for the detection of SNP TSC0019382
attatttcggag

SEQ ID NO: 301179 - DNA, 12 bp, Artificial Sequence
  Oligonucleotide primer for the detection of SNP TSC0019384
ctttcttaaaat

SEQ ID NO: 301180 - DNA, 12 bp, Artificial Sequence
  Oligonucleotide primer for the detection of SNP TSC0019384
tagaaaataata

SEQ ID NO: 301181 - DNA, 12 bp, Artificial Sequence
  Oligonucleotide primer for the detection of SNP TSC0019384
tttttttaaaat

SEQ ID NO: 301182 - DNA, 12 bp, Artificial Sequence
  Oligonucleotide primer for the detection of SNP TSC0019385
attataatttat

SEQ ID NO: 301183 - DNA, 12 bp, Artificial Sequence
  Oligonucleotide primer for the detection of SNP TSC0019385
tctaactcttaa

SEQ ID NO: 301184 - DNA, 12 bp, Artificial Sequence
  Oligonucleotide primer for the detection of SNP TSC0019385
attgtggtttgt

SEQ ID NO: 301185 - DNA, 12 bp, Artificial Sequence
  Oligonucleotide primer for the detection of SNP TSC0019386
cccatatcacct

SEQ ID NO: 301186 - DNA, 12 bp, Artificial Sequence
  Oligonucleotide primer for the detection of SNP TSC0019386
tagtgtgaaata

SEQ ID NO: 301187 - DNA, 12 bp, Artificial Sequence
  Oligonucleotide primer for the detection of SNP TSC0019386
taatataaaata

SEQ ID NO: 301188 - DNA, 12 bp, Artificial Sequence
  Oligonucleotide primer for the detection of SNP TSC0019387
cttaatctacat

SEQ ID NO: 301189 - DNA, 12 bp, Artificial Sequence
  Oligonucleotide primer for the detection of SNP TSC0019387
attagtaaagta

SEQ ID NO: 301190 - DNA, 12 bp, Artificial Sequence
  Oligonucleotide primer for the detection of SNP TSC0019390
cccataatttcc

SEQ ID NO: 301191 - DNA, 12 bp, Artificial Sequence
  Oligonucleotide primer for the detection of SNP TSC0019390
ttgagtttattt

SEQ ID NO: 301192 - DNA, 12 bp, Artificial Sequence
  Oligonucleotide primer for the detection of SNP TSC0019390
cattaaacctac

SEQ ID NO: 301193 - DNA, 12 bp, Artificial Sequence
  Oligonucleotide primer for the detection of SNP TSC0019390
tttatgattttt

SEQ ID NO: 301194 - DNA, 12 bp, Artificial Sequence
  Oligonucleotide primer for the detection of SNP TSC0019390
tttatgattttc

SEQ ID NO: 301195 - DNA, 12 bp, Artificial Sequence
  Oligonucleotide primer for the detection of SNP TSC0019391
ttaactccaaac

SEQ ID NO: 301196 - DNA, 12 bp, Artificial Sequence
  Oligonucleotide primer for the detection of SNP TSC0019391
tgttgtttgtag

SEQ ID NO: 301197 - DNA, 12 bp, Artificial Sequence
  Oligonucleotide primer for the detection of SNP TSC0019392
ttaataataata

SEQ ID NO: 301198 - DNA, 12 bp, Artificial Sequence
  Oligonucleotide primer for the detection of SNP TSC0019392
tttattattatt

SEQ ID NO: 301199 - DNA, 12 bp, Artificial Sequence
  Oligonucleotide primer for the detection of SNP TSC0019392
ttactattacta

SEQ ID NO: 301200 - DNA, 12 bp, Artificial Sequence
  Oligonucleotide primer for the detection of SNP TSC0019393
ataactactcta

SEQ ID NO: 301201 - DNA, 12 bp, Artificial Sequence
  Oligonucleotide primer for the detection of SNP TSC0019393
gattttattaat

SEQ ID NO: 301202 - DNA, 12 bp, Artificial Sequence
  Oligonucleotide primer for the detection of SNP TSC0019393
actttatcaata

SEQ ID NO: 301203 - DNA, 12 bp, Artificial Sequence
  Oligonucleotide primer for the detection of SNP TSC0019393
tgattattttgt

SEQ ID NO: 301204 - DNA, 12 bp, Artificial Sequence
  Oligonucleotide primer for the detection of SNP TSC0019393
tgattattttgc

SEQ ID NO: 301205 - DNA, 12 bp, Artificial Sequence
  Oligonucleotide primer for the detection of SNP TSC0019400
aaatcactaaaa

SEQ ID NO: 301206 - DNA, 12 bp, Artificial Sequence
  Oligonucleotide primer for the detection of SNP TSC0019401
ctaaactccatc

SEQ ID NO: 301207 - DNA, 12 bp, Artificial Sequence
  Oligonucleotide primer for the detection of SNP TSC0019401
tttgtttggaga

SEQ ID NO: 301208 - DNA, 12 bp, Artificial Sequence
  Oligonucleotide primer for the detection of SNP TSC0019402
aaatatttttgt

SEQ ID NO: 301209 - DNA, 12 bp, Artificial Sequence
  Oligonucleotide primer for the detection of SNP TSC0019402
aaatacttctac

SEQ ID NO: 301210 - DNA, 12 bp, Artificial Sequence
  Oligonucleotide primer for the detection of SNP TSC0019402
aggaaatgtggg

SEQ ID NO: 301211 - DNA, 12 bp, Artificial Sequence
  Oligonucleotide primer for the detection of SNP TSC0019403
tacaccaataat

SEQ ID NO: 301212 - DNA, 12 bp, Artificial Sequence
  Oligonucleotide primer for the detection of SNP TSC0019403
ttttttgtgaaa

SEQ ID NO: 301213 - DNA, 12 bp, Artificial Sequence
  Oligonucleotide primer for the detection of SNP TSC0019403
ttccttataaaa

SEQ ID NO: 301214 - DNA, 12 bp, Artificial Sequence
  Oligonukleotid-Primer
tgtattaatgat

SEQ ID NO: 301215 - DNA, 12 bp, Artificial Sequence
  Oligonucleotide primer for the detection of SNP TSC0019404
ccctttaatttt

SEQ ID NO: 301216 - DNA, 12 bp, Artificial Sequence
  Oligonucleotide primer for the detection of SNP TSC0019404
tgatagaatgga

SEQ ID NO: 301217 - DNA, 12 bp, Artificial Sequence
  Oligonucleotide primer for the detection of SNP TSC0019405
cattatatatac

SEQ ID NO: 301218 - DNA, 12 bp, Artificial Sequence
  Oligonukleotid-Primer
cgttatatatac

SEQ ID NO: 301219 - DNA, 12 bp, Artificial Sequence
  Oligonucleotide primer for the detection of SNP TSC0019405
ttattttggagt

SEQ ID NO: 301220 - DNA, 12 bp, Artificial Sequence
  Oligonucleotide primer for the detection of SNP TSC0019405
ttattctaaaat

SEQ ID NO: 301221 - DNA, 12 bp, Artificial Sequence
  Oligonucleotide primer for the detection of SNP TSC0019406
tttgtttttatg

SEQ ID NO: 301222 - DNA, 12 bp, Artificial Sequence
  Oligonucleotide primer for the detection of SNP TSC0019406
tttacccctata

SEQ ID NO: 301223 - DNA, 12 bp, Artificial Sequence
  Oligonucleotide primer for the detection of SNP TSC0019406
aaggattaaaag

SEQ ID NO: 301224 - DNA, 12 bp, Artificial Sequence
  Oligonucleotide primer for the detection of SNP TSC0019407
tctaaaaccaca

SEQ ID NO: 301225 - DNA, 12 bp, Artificial Sequence
  Oligonucleotide primer for the detection of SNP TSC0019407
ggtttattgttt

SEQ ID NO: 301226 - DNA, 12 bp, Artificial Sequence
  Oligonucleotide primer for the detection of SNP TSC0019407
aatttactatct

SEQ ID NO: 301227 - DNA, 12 bp, Artificial Sequence
  Oligonucleotide primer for the detection of SNP TSC0019407
tttagagttata

SEQ ID NO: 301228 - DNA, 12 bp, Artificial Sequence
  Oligonucleotide primer for the detection of SNP TSC0019408
acataaacaaaa

SEQ ID NO: 301229 - DNA, 12 bp, Artificial Sequence
  Oligonucleotide primer for the detection of SNP TSC0019408
ataataaaagta

SEQ ID NO: 301230 - DNA, 12 bp, Artificial Sequence
  Oligonucleotide primer for the detection of SNP TSC0019409
actcaaaaaact

SEQ ID NO: 301231 - DNA, 12 bp, Artificial Sequence
  Oligonucleotide primer for the detection of SNP TSC0019409
gtttaagtgatt

SEQ ID NO: 301232 - DNA, 12 bp, Artificial Sequence
  Oligonucleotide primer for the detection of SNP TSC0019410
acactattttct

SEQ ID NO: 301233 - DNA, 12 bp, Artificial Sequence
  Oligonucleotide primer for the detection of SNP TSC0019410
ttgtaagaatag

SEQ ID NO: 301234 - DNA, 12 bp, Artificial Sequence
  Oligonucleotide primer for the detection of SNP TSC0019411
tctaattcctat

SEQ ID NO: 301235 - DNA, 12 bp, Artificial Sequence
  Oligonucleotide primer for the detection of SNP TSC0019411
ggtgaggattta

SEQ ID NO: 301236 - DNA, 12 bp, Artificial Sequence
  Oligonucleotide primer for the detection of SNP TSC0019412
atttactcttat

SEQ ID NO: 301237 - DNA, 12 bp, Artificial Sequence
  Oligonucleotide primer for the detection of SNP TSC0019412
tatattttttag

SEQ ID NO: 301238 - DNA, 12 bp, Artificial Sequence
  Oligonucleotide primer for the detection of SNP TSC0019414
aatcaccccacc

SEQ ID NO: 301239 - DNA, 12 bp, Artificial Sequence
  Oligonucleotide primer for the detection of SNP TSC0019414
tatgtttgtgga

SEQ ID NO: 301240 - DNA, 12 bp, Artificial Sequence
  Oligonucleotide primer for the detection of SNP TSC0019415
atgtttagttta

SEQ ID NO: 301241 - DNA, 12 bp, Artificial Sequence
  Oligonucleotide primer for the detection of SNP TSC0019415
atactcaatcca

SEQ ID NO: 301242 - DNA, 12 bp, Artificial Sequence
  Oligonucleotide primer for the detection of SNP TSC0019415
agaaggtagggt

SEQ ID NO: 301243 - DNA, 12 bp, Artificial Sequence
  Oligonucleotide primer for the detection of SNP TSC0019419
tacactacactc

SEQ ID NO: 301244 - DNA, 12 bp, Artificial Sequence
  Oligonucleotide primer for the detection of SNP TSC0019419
ttgttgtttagg

SEQ ID NO: 301245 - DNA, 12 bp, Artificial Sequence
  Oligonucleotide primer for the detection of SNP TSC0019422
aatattattctt

SEQ ID NO: 301246 - DNA, 12 bp, Artificial Sequence
  Oligonucleotide primer for the detection of SNP TSC0019422
aaaatttatatg

SEQ ID NO: 301247 - DNA, 12 bp, Artificial Sequence
  Oligonucleotide primer for the detection of SNP TSC0019423
tttaatacacac

SEQ ID NO: 301248 - DNA, 12 bp, Artificial Sequence
  Oligonucleotide primer for the detection of SNP TSC0019424
tagtagtgattt

SEQ ID NO: 301249 - DNA, 12 bp, Artificial Sequence
  Oligonucleotide primer for the detection of SNP TSC0019424
taacaataacct

SEQ ID NO: 301250 - DNA, 12 bp, Artificial Sequence
  Oligonucleotide primer for the detection of SNP TSC0019424
ttgttttaggag

SEQ ID NO: 301251 - DNA, 12 bp, Artificial Sequence
  Oligonucleotide primer for the detection of SNP TSC0019425
cactaacattac

SEQ ID NO: 301252 - DNA, 12 bp, Artificial Sequence
  Oligonucleotide primer for the detection of SNP TSC0019425
cactaacgttac

SEQ ID NO: 301253 - DNA, 12 bp, Artificial Sequence
  Oligonucleotide primer for the detection of SNP TSC0019425
tggtttttgagg

SEQ ID NO: 301254 - DNA, 12 bp, Artificial Sequence
  Oligonucleotide primer for the detection of SNP TSC0019425
cggtttttgagg

SEQ ID NO: 301255 - DNA, 12 bp, Artificial Sequence
  Oligonucleotide primer for the detection of SNP TSC0019425
caactcctaaaa

SEQ ID NO: 301256 - DNA, 12 bp, Artificial Sequence
  Oligonucleotide primer for the detection of SNP TSC0019425
cgactcctaaaa

SEQ ID NO: 301257 - DNA, 12 bp, Artificial Sequence
  Oligonucleotide primer for the detection of SNP TSC0019425
tattgatgttgt

SEQ ID NO: 301258 - DNA, 12 bp, Artificial Sequence
  Oligonucleotide primer for the detection of SNP TSC0019425
tattgacgttgt

SEQ ID NO: 301259 - DNA, 12 bp, Artificial Sequence
  Oligonucleotide primer for the detection of SNP TSC0019426
ttggatttttga

SEQ ID NO: 301260 - DNA, 12 bp, Artificial Sequence
  Oligonucleotide primer for the detection of SNP TSC0019426
ttaaattcttaa

SEQ ID NO: 301261 - DNA, 12 bp, Artificial Sequence
  Oligonucleotide primer for the detection of SNP TSC0019426
aaaaggaagtta

SEQ ID NO: 301262 - DNA, 12 bp, Artificial Sequence
  Oligonucleotide primer for the detection of SNP TSC0019428
tctaaaattacc

SEQ ID NO: 301263 - DNA, 12 bp, Artificial Sequence
  Oligonucleotide primer for the detection of SNP TSC0019428
taactcacctat

SEQ ID NO: 301264 - DNA, 12 bp, Artificial Sequence
  Oligonucleotide primer for the detection of SNP TSC0019428
tttggagttgtt

SEQ ID NO: 301265 - DNA, 12 bp, Artificial Sequence
  Oligonucleotide primer for the detection of SNP TSC0019429
aattactaataa

SEQ ID NO: 301266 - DNA, 12 bp, Artificial Sequence
  Oligonucleotide primer for the detection of SNP TSC0019429
tcaatcctcaaa

SEQ ID NO: 301267 - DNA, 12 bp, Artificial Sequence
  Oligonucleotide primer for the detection of SNP TSC0019429
gattgttaatag

SEQ ID NO: 301268 - DNA, 12 bp, Artificial Sequence
  Oligonucleotide primer for the detection of SNP TSC0019430
ataacccctaaa

SEQ ID NO: 301269 - DNA, 12 bp, Artificial Sequence
  Oligonucleotide primer for the detection of SNP TSC0019430
tgtgaatgattt

SEQ ID NO: 301270 - DNA, 12 bp, Artificial Sequence
  Oligonucleotide primer for the detection of SNP TSC0019430
ataaataactta

SEQ ID NO: 301271 - DNA, 12 bp, Artificial Sequence
  Oligonucleotide primer for the detection of SNP TSC0019430
tagtttttagat

SEQ ID NO: 301272 - DNA, 12 bp, Artificial Sequence
  Oligonucleotide primer for the detection of SNP TSC0019431
acaaaaaaatat

SEQ ID NO: 301273 - DNA, 12 bp, Artificial Sequence
  Oligonucleotide primer for the detection of SNP TSC0019431
ttagtttataga

SEQ ID NO: 301274 - DNA, 12 bp, Artificial Sequence
  Oligonucleotide primer for the detection of SNP TSC0019432
aacaataactcc

SEQ ID NO: 301275 - DNA, 12 bp, Artificial Sequence
  Oligonucleotide primer for the detection of SNP TSC0019432
tatattatattt

SEQ ID NO: 301276 - DNA, 12 bp, Artificial Sequence
  Oligonucleotide primer for the detection of SNP TSC0019432
tacactacattt

SEQ ID NO: 301277 - DNA, 12 bp, Artificial Sequence
  Oligonucleotide primer for the detection of SNP TSC0019432
gataatgatttt

SEQ ID NO: 301278 - DNA, 12 bp, Artificial Sequence
  Oligonucleotide primer for the detection of SNP TSC0019433
ataactaatcaa

SEQ ID NO: 301279 - DNA, 12 bp, Artificial Sequence
  Oligonucleotide primer for the detection of SNP TSC0019433
tatagatttttt

SEQ ID NO: 301280 - DNA, 12 bp, Artificial Sequence
  Oligonucleotide primer for the detection of SNP TSC0019433
ctacaaatctcc

SEQ ID NO: 301281 - DNA, 12 bp, Artificial Sequence
  Oligonucleotide primer for the detection of SNP TSC0019433
gtgattgattag

SEQ ID NO: 301282 - DNA, 12 bp, Artificial Sequence
  Oligonucleotide primer for the detection of SNP TSC0019434
acctattcattt

SEQ ID NO: 301283 - DNA, 12 bp, Artificial Sequence
  Oligonucleotide primer for the detection of SNP TSC0019434
aagagtgatttt

SEQ ID NO: 301284 - DNA, 12 bp, Artificial Sequence
  Oligonucleotide primer for the detection of SNP TSC0019434
aaaaataatccc

SEQ ID NO: 301285 - DNA, 12 bp, Artificial Sequence
  Oligonucleotide primer for the detection of SNP TSC0019434
atttgtttattt

SEQ ID NO: 301286 - DNA, 12 bp, Artificial Sequence
  Oligonucleotide primer for the detection of SNP TSC0019435
caccttaaaata

SEQ ID NO: 301287 - DNA, 12 bp, Artificial Sequence
  Oligonucleotide primer for the detection of SNP TSC0019435
cgccttaaaata

SEQ ID NO: 301288 - DNA, 12 bp, Artificial Sequence
  Oligonucleotide primer for the detection of SNP TSC0019435
gaaaatgaagat

SEQ ID NO: 301289 - DNA, 12 bp, Artificial Sequence
  Oligonucleotide primer for the detection of SNP TSC0019435
tgttttgagatg

SEQ ID NO: 301290 - DNA, 12 bp, Artificial Sequence
  Oligonucleotide primer for the detection of SNP TSC0019435
cgttttgagatg

SEQ ID NO: 301291 - DNA, 12 bp, Artificial Sequence
  Oligonucleotide primer for the detection of SNP TSC0019436
tcttcccctcca

SEQ ID NO: 301292 - DNA, 12 bp, Artificial Sequence
  Oligonucleotide primer for the detection of SNP TSC0019436
tattcccctaaa

SEQ ID NO: 301293 - DNA, 12 bp, Artificial Sequence
  Oligonucleotide primer for the detection of SNP TSC0019437
tactccattacc

SEQ ID NO: 301294 - DNA, 12 bp, Artificial Sequence
  Oligonucleotide primer for the detection of SNP TSC0019437
aaggggagttta

SEQ ID NO: 301295 - DNA, 12 bp, Artificial Sequence
  Oligonucleotide primer for the detection of SNP TSC0019438
cactactactac

SEQ ID NO: 301296 - DNA, 12 bp, Artificial Sequence
  Oligonucleotide primer for the detection of SNP TSC0019438
cgctactactac

SEQ ID NO: 301297 - DNA, 12 bp, Artificial Sequence
  Oligonucleotide primer for the detection of SNP TSC0019438
gttttatgttta

SEQ ID NO: 301298 - DNA, 12 bp, Artificial Sequence
  Oligonucleotide primer for the detection of SNP TSC0019438
gttttacgttta

SEQ ID NO: 301299 - DNA, 12 bp, Artificial Sequence
  Oligonucleotide primer for the detection of SNP TSC0019439
aaaaacaaccta

SEQ ID NO: 301300 - DNA, 12 bp, Artificial Sequence
  Oligonucleotide primer for the detection of SNP TSC0019439
gaaatagtttat

SEQ ID NO: 301301 - DNA, 12 bp, Artificial Sequence
  Oligonucleotide primer for the detection of SNP TSC0019443
aaaacccgacct

SEQ ID NO: 301302 - DNA, 12 bp, Artificial Sequence
  Oligonucleotide primer for the detection of SNP TSC0019443
ggtggagggtta

SEQ ID NO: 301303 - DNA, 12 bp, Artificial Sequence
  Oligonucleotide primer for the detection of SNP TSC0019444
atataaaactaa

SEQ ID NO: 301304 - DNA, 12 bp, Artificial Sequence
  Oligonucleotide primer for the detection of SNP TSC0019444
ttattaattgat

SEQ ID NO: 301305 - DNA, 12 bp, Artificial Sequence
  Oligonucleotide primer for the detection of SNP TSC0019445
tcaattctacac

SEQ ID NO: 301306 - DNA, 12 bp, Artificial Sequence
  Oligonucleotide primer for the detection of SNP TSC0019445
aattttgttttg

SEQ ID NO: 301307 - DNA, 12 bp, Artificial Sequence
  Oligonucleotide primer for the detection of SNP TSC0019446
catctatctatc

SEQ ID NO: 301308 - DNA, 12 bp, Artificial Sequence
  Oligonucleotide primer for the detection of SNP TSC0019446
tggatggatgga

SEQ ID NO: 301309 - DNA, 12 bp, Artificial Sequence
  Oligonucleotide primer for the detection of SNP TSC0019447
ctatcatctatc

SEQ ID NO: 301310 - DNA, 12 bp, Artificial Sequence
  Oligonucleotide primer for the detection of SNP TSC0019447
tggatggataga

SEQ ID NO: 301311 - DNA, 12 bp, Artificial Sequence
  Oligonucleotide primer for the detection of SNP TSC0019448
ccctaataactt

SEQ ID NO: 301312 - DNA, 12 bp, Artificial Sequence
  Oligonucleotide primer for the detection of SNP TSC0019448
attgaattaaaa

SEQ ID NO: 301313 - DNA, 12 bp, Artificial Sequence
  Oligonucleotide primer for the detection of SNP TSC0019448
ttttagtgattt

SEQ ID NO: 301314 - DNA, 12 bp, Artificial Sequence
  Oligonucleotide primer for the detection of SNP TSC0019449
aatcttcatact

SEQ ID NO: 301315 - DNA, 12 bp, Artificial Sequence
  Oligonucleotide primer for the detection of SNP TSC0019449
agtgattgttaa

SEQ ID NO: 301316 - DNA, 12 bp, Artificial Sequence
  Oligonucleotide primer for the detection of SNP TSC0019452
atacaacctcaa

SEQ ID NO: 301317 - DNA, 12 bp, Artificial Sequence
  Oligonucleotide primer for the detection of SNP TSC0019452
atacgacctcaa

SEQ ID NO: 301318 - DNA, 12 bp, Artificial Sequence
  Oligonucleotide primer for the detection of SNP TSC0019452
gtatgaagattg

SEQ ID NO: 301319 - DNA, 12 bp, Artificial Sequence
  Oligonucleotide primer for the detection of SNP TSC0019452
atatgattttaa

SEQ ID NO: 301320 - DNA, 12 bp, Artificial Sequence
  Oligonucleotide primer for the detection of SNP TSC0019452
atacgattttaa

SEQ ID NO: 301321 - DNA, 12 bp, Artificial Sequence
  Oligonucleotide primer for the detection of SNP TSC0019453
cacacaaaaaat

SEQ ID NO: 301322 - DNA, 12 bp, Artificial Sequence
  Oligonucleotide primer for the detection of SNP TSC0019453
cgcacaaaaaat

SEQ ID NO: 301323 - DNA, 12 bp, Artificial Sequence
  Oligonukleotid-Primer
ttgagttatatg

SEQ ID NO: 301324 - DNA, 12 bp, Artificial Sequence
  Oligonucleotide primer for the detection of SNP TSC0019453
tcgagttatatg

SEQ ID NO: 301325 - DNA, 12 bp, Artificial Sequence
  Oligonucleotide primer for the detection of SNP TSC0019453
ccaaaccatata

SEQ ID NO: 301326 - DNA, 12 bp, Artificial Sequence
  Oligonucleotide primer for the detection of SNP TSC0019453
ccgaaccatata

SEQ ID NO: 301327 - DNA, 12 bp, Artificial Sequence
  Oligonucleotide primer for the detection of SNP TSC0019453
tgtataggaggt

SEQ ID NO: 301328 - DNA, 12 bp, Artificial Sequence
  Oligonucleotide primer for the detection of SNP TSC0019453
cgtataggaggt

SEQ ID NO: 301329 - DNA, 12 bp, Artificial Sequence
  Oligonucleotide primer for the detection of SNP TSC0019454
aaatttttaatc

SEQ ID NO: 301330 - DNA, 12 bp, Artificial Sequence
  Oligonucleotide primer for the detection of SNP TSC0019455
ttaactaaacta

SEQ ID NO: 301331 - DNA, 12 bp, Artificial Sequence
  Oligonucleotide primer for the detection of SNP TSC0019455
gttaggttagta

SEQ ID NO: 301332 - DNA, 12 bp, Artificial Sequence
  Oligonucleotide primer for the detection of SNP TSC0019455
atcaaattaaca

SEQ ID NO: 301333 - DNA, 12 bp, Artificial Sequence
  Oligonucleotide primer for the detection of SNP TSC0019455
taattgggttgt

SEQ ID NO: 301334 - DNA, 12 bp, Artificial Sequence
  Oligonucleotide primer for the detection of SNP TSC0019455
taattgggttgc

SEQ ID NO: 301335 - DNA, 12 bp, Artificial Sequence
  Oligonucleotide primer for the detection of SNP TSC0019456
taggagaaatgt

SEQ ID NO: 301336 - DNA, 12 bp, Artificial Sequence
  Oligonucleotide primer for the detection of SNP TSC0019456
taaaaaaaatat

SEQ ID NO: 301337 - DNA, 12 bp, Artificial Sequence
  Oligonucleotide primer for the detection of SNP TSC0019456
aatgagatgaag

SEQ ID NO: 301338 - DNA, 12 bp, Artificial Sequence
  Oligonucleotide primer for the detection of SNP TSC0019457
aacaaaactcaa

SEQ ID NO: 301339 - DNA, 12 bp, Artificial Sequence
  Oligonucleotide primer for the detection of SNP TSC0019457
aattatttttga

SEQ ID NO: 301340 - DNA, 12 bp, Artificial Sequence
  Oligonucleotide primer for the detection of SNP TSC0019457
aatcatccctaa

SEQ ID NO: 301341 - DNA, 12 bp, Artificial Sequence
  Oligonucleotide primer for the detection of SNP TSC0019457
ggtagggtttag

SEQ ID NO: 301342 - DNA, 12 bp, Artificial Sequence
  Oligonucleotide primer for the detection of SNP TSC0019458
ataatcaaaaaa

SEQ ID NO: 301343 - DNA, 12 bp, Artificial Sequence
  Oligonucleotide primer for the detection of SNP TSC0019458
ttagttttttga

SEQ ID NO: 301344 - DNA, 12 bp, Artificial Sequence
  Oligonucleotide primer for the detection of SNP TSC0019458
ttagtttttcga

SEQ ID NO: 301345 - DNA, 12 bp, Artificial Sequence
  Oligonucleotide primer for the detection of SNP TSC0019458
caacctcccgaa

SEQ ID NO: 301346 - DNA, 12 bp, Artificial Sequence
  Oligonucleotide primer for the detection of SNP TSC0019458
gtaattaaagga

SEQ ID NO: 301347 - DNA, 12 bp, Artificial Sequence
  Oligonucleotide primer for the detection of SNP TSC0019459
acaaaaattata

SEQ ID NO: 301348 - DNA, 12 bp, Artificial Sequence
  Oligonucleotide primer for the detection of SNP TSC0019459
accaccataccc

SEQ ID NO: 301349 - DNA, 12 bp, Artificial Sequence
  Oligonucleotide primer for the detection of SNP TSC0019459
ataaaaattatg

SEQ ID NO: 301350 - DNA, 12 bp, Artificial Sequence
  Oligonucleotide primer for the detection of SNP TSC0019460
atctaaaatacc

SEQ ID NO: 301351 - DNA, 12 bp, Artificial Sequence
  Oligonucleotide primer for the detection of SNP TSC0019460
attgtatttaat

SEQ ID NO: 301352 - DNA, 12 bp, Artificial Sequence
  Oligonucleotide primer for the detection of SNP TSC0019460
atcgtatttaat

SEQ ID NO: 301353 - DNA, 12 bp, Artificial Sequence
  Oligonucleotide primer for the detection of SNP TSC0019460
attgtatttaac

SEQ ID NO: 301354 - DNA, 12 bp, Artificial Sequence
  Oligonucleotide primer for the detection of SNP TSC0019460
atcgtatttaac

SEQ ID NO: 301355 - DNA, 12 bp, Artificial Sequence
  Oligonucleotide primer for the detection of SNP TSC0019460
accacatctaac

SEQ ID NO: 301356 - DNA, 12 bp, Artificial Sequence
  Oligonucleotide primer for the detection of SNP TSC0019460
accgcatctaac

SEQ ID NO: 301357 - DNA, 12 bp, Artificial Sequence
  Oligonucleotide primer for the detection of SNP TSC0019460
gtttgagatgtt

SEQ ID NO: 301358 - DNA, 12 bp, Artificial Sequence
  Oligonucleotide primer for the detection of SNP TSC0019460
gtttgagatgtc

SEQ ID NO: 301359 - DNA, 12 bp, Artificial Sequence
  Oligonucleotide primer for the detection of SNP TSC0019461
taatacacacat

SEQ ID NO: 301360 - DNA, 12 bp, Artificial Sequence
  Oligonucleotide primer for the detection of SNP TSC0019461
taatacacacgt

SEQ ID NO: 301361 - DNA, 12 bp, Artificial Sequence
  Oligonucleotide primer for the detection of SNP TSC0019461
aattaaagtata

SEQ ID NO: 301362 - DNA, 12 bp, Artificial Sequence
  Oligonucleotide primer for the detection of SNP TSC0019461
aattaaaataca

SEQ ID NO: 301363 - DNA, 12 bp, Artificial Sequence
  Oligonucleotide primer for the detection of SNP TSC0019461
tggtgtatatgt

SEQ ID NO: 301364 - DNA, 12 bp, Artificial Sequence
  Oligonucleotide primer for the detection of SNP TSC0019461
tggtgtatacgt

SEQ ID NO: 301365 - DNA, 12 bp, Artificial Sequence
  Oligonucleotide primer for the detection of SNP TSC0019462
taaaccactatt

SEQ ID NO: 301366 - DNA, 12 bp, Artificial Sequence
  Oligonucleotide primer for the detection of SNP TSC0019462
aaagtttagggt

SEQ ID NO: 301367 - DNA, 12 bp, Artificial Sequence
  Oligonucleotide primer for the detection of SNP TSC0019462
aaaattcaaaac

SEQ ID NO: 301368 - DNA, 12 bp, Artificial Sequence
  Oligonucleotide primer for the detection of SNP TSC0019462
gttattgttttt

SEQ ID NO: 301369 - DNA, 12 bp, Artificial Sequence
  Oligonucleotide primer for the detection of SNP TSC0019462
gttattgttttc

SEQ ID NO: 301370 - DNA, 12 bp, Artificial Sequence
  Oligonucleotide primer for the detection of SNP TSC0019466
ccaccaactatc

SEQ ID NO: 301371 - DNA, 12 bp, Artificial Sequence
  Oligonucleotide primer for the detection of SNP TSC0019466
agaaagatagag

SEQ ID NO: 301372 - DNA, 12 bp, Artificial Sequence
  Oligonucleotide primer for the detection of SNP TSC0019467
gatattgttgag

SEQ ID NO: 301373 - DNA, 12 bp, Artificial Sequence
  Oligonucleotide primer for the detection of SNP TSC0019467
aacattactaaa

SEQ ID NO: 301374 - DNA, 12 bp, Artificial Sequence
  Oligonucleotide primer for the detection of SNP TSC0019467
gggagataaaat

SEQ ID NO: 301375 - DNA, 12 bp, Artificial Sequence
  Oligonucleotide primer for the detection of SNP TSC0019469
tttctaatatat

SEQ ID NO: 301376 - DNA, 12 bp, Artificial Sequence
  Oligonucleotide primer for the detection of SNP TSC0019473
cattccctcttt

SEQ ID NO: 301377 - DNA, 12 bp, Artificial Sequence
  Oligonucleotide primer for the detection of SNP TSC0019473
gagtaggaaaga

SEQ ID NO: 301378 - DNA, 12 bp, Artificial Sequence
  Oligonucleotide primer for the detection of SNP TSC0019474
tttgtggaatta

SEQ ID NO: 301379 - DNA, 12 bp, Artificial Sequence
  Oligonucleotide primer for the detection of SNP TSC0019475
acattttacata

SEQ ID NO: 301380 - DNA, 12 bp, Artificial Sequence
  Oligonucleotide primer for the detection of SNP TSC0019475
atggattaatat

SEQ ID NO: 301381 - DNA, 12 bp, Artificial Sequence
  Oligonucleotide primer for the detection of SNP TSC0019475
ataaactaatac

SEQ ID NO: 301382 - DNA, 12 bp, Artificial Sequence
  Oligonucleotide primer for the detection of SNP TSC0019475
ggtattttatat

SEQ ID NO: 301383 - DNA, 12 bp, Artificial Sequence
  Oligonucleotide primer for the detection of SNP TSC0019476
tttttttgggtt

SEQ ID NO: 301384 - DNA, 12 bp, Artificial Sequence
  Oligonucleotide primer for the detection of SNP TSC0019476
ctctcttaaatc

SEQ ID NO: 301385 - DNA, 12 bp, Artificial Sequence
  Oligonucleotide primer for the detection of SNP TSC0019476
gggaaaagggga

SEQ ID NO: 301386 - DNA, 12 bp, Artificial Sequence
  Oligonucleotide primer for the detection of SNP TSC0019477
ttttttgggttc

SEQ ID NO: 301387 - DNA, 12 bp, Artificial Sequence
  Oligonucleotide primer for the detection of SNP TSC0019477
actctcttaaat

SEQ ID NO: 301388 - DNA, 12 bp, Artificial Sequence
  Oligonucleotide primer for the detection of SNP TSC0019478
cccaaattaata

SEQ ID NO: 301389 - DNA, 12 bp, Artificial Sequence
  Oligonucleotide primer for the detection of SNP TSC0019478
tgttaatgggtt

SEQ ID NO: 301390 - DNA, 12 bp, Artificial Sequence
  Oligonucleotide primer for the detection of SNP TSC0019478
tattaataaacc

SEQ ID NO: 301391 - DNA, 12 bp, Artificial Sequence
  Oligonucleotide primer for the detection of SNP TSC0019478
tttaggttggtg

SEQ ID NO: 301392 - DNA, 12 bp, Artificial Sequence
  Oligonucleotide primer for the detection of SNP TSC0019479
gacctcaaaaaa

SEQ ID NO: 301393 - DNA, 12 bp, Artificial Sequence
  Oligonucleotide primer for the detection of SNP TSC0019479
gttggttattat

SEQ ID NO: 301394 - DNA, 12 bp, Artificial Sequence
  Oligonucleotide primer for the detection of SNP TSC0019479
actaactactat

SEQ ID NO: 301395 - DNA, 12 bp, Artificial Sequence
  Oligonucleotide primer for the detection of SNP TSC0019479
gattttaggagg

SEQ ID NO: 301396 - DNA, 12 bp, Artificial Sequence
  Oligonukleotid-Primer
cctcataccact

SEQ ID NO: 301397 - DNA, 12 bp, Artificial Sequence
  Oligonucleotide primer for the detection of SNP TSC0019480
tgttgttaggtg

SEQ ID NO: 301398 - DNA, 12 bp, Artificial Sequence
  Oligonucleotide primer for the detection of SNP TSC0019482
attacctaaatc

SEQ ID NO: 301399 - DNA, 12 bp, Artificial Sequence
  Oligonucleotide primer for the detection of SNP TSC0019482
gggataaaatag

SEQ ID NO: 301400 - DNA, 12 bp, Artificial Sequence
  Oligonukleotid-Primer
taagagttattt

SEQ ID NO: 301401 - DNA, 12 bp, Artificial Sequence
  Oligonucleotide primer for the detection of SNP TSC0019483
taagagttattc

SEQ ID NO: 301402 - DNA, 12 bp, Artificial Sequence
  Oligonucleotide primer for the detection of SNP TSC0019483
caaaaaccaccc

SEQ ID NO: 301403 - DNA, 12 bp, Artificial Sequence
  Oligonucleotide primer for the detection of SNP TSC0019483
aggggagtattt

SEQ ID NO: 301404 - DNA, 12 bp, Artificial Sequence
  Oligonucleotide primer for the detection of SNP TSC0019484
gtttgtgatttg

SEQ ID NO: 301405 - DNA, 12 bp, Artificial Sequence
  Oligonucleotide primer for the detection of SNP TSC0019485
ttttattagttg

SEQ ID NO: 301406 - DNA, 12 bp, Artificial Sequence
  Oligonucleotide primer for the detection of SNP TSC0019486
ttattttttggt

SEQ ID NO: 301407 - DNA, 12 bp, Artificial Sequence
  Oligonucleotide primer for the detection of SNP TSC0019487
acatttatctat

SEQ ID NO: 301408 - DNA, 12 bp, Artificial Sequence
  Oligonukleotid-Primer
acgtttatctat

SEQ ID NO: 301409 - DNA, 12 bp, Artificial Sequence
  Oligonucleotide primer for the detection of SNP TSC0019487
attatttataaa

SEQ ID NO: 301410 - DNA, 12 bp, Artificial Sequence
  Oligonucleotide primer for the detection of SNP TSC0019489
tcaaattactac

SEQ ID NO: 301411 - DNA, 12 bp, Artificial Sequence
  Oligonucleotide primer for the detection of SNP TSC0019490
caaatctccaat

SEQ ID NO: 301412 - DNA, 12 bp, Artificial Sequence
  Oligonukleotid-Primer
attatgaaagaa

SEQ ID NO: 301413 - DNA, 12 bp, Artificial Sequence
  Oligonucleotide primer for the detection of SNP TSC0019491
aacaaaattact

SEQ ID NO: 301414 - DNA, 12 bp, Artificial Sequence
  Oligonucleotide primer for the detection of SNP TSC0019491
aacgaaattact

SEQ ID NO: 301415 - DNA, 12 bp, Artificial Sequence
  Oligonucleotide primer for the detection of SNP TSC0019491
ttttagaatggg

SEQ ID NO: 301416 - DNA, 12 bp, Artificial Sequence
  Oligonukleotid-Primer
actcctctcacc

SEQ ID NO: 301417 - DNA, 12 bp, Artificial Sequence
  Oligonucleotide primer for the detection of SNP TSC0019492
gagatttaagtg

SEQ ID NO: 301418 - DNA, 12 bp, Artificial Sequence
  Oligonucleotide primer for the detection of SNP TSC0019493
aaaaaatctaaa

SEQ ID NO: 301419 - DNA, 12 bp, Artificial Sequence
  Oligonucleotide primer for the detection of SNP TSC0019493
ttttttttattc

SEQ ID NO: 301420 - DNA, 12 bp, Artificial Sequence
  Oligonucleotide primer for the detection of SNP TSC0019493
ctcctctcaccc

SEQ ID NO: 301421 - DNA, 12 bp, Artificial Sequence
  Oligonucleotide primer for the detection of SNP TSC0019493
agagatttaagt

SEQ ID NO: 301422 - DNA, 12 bp, Artificial Sequence
  Oligonucleotide primer for the detection of SNP TSC0019494
ctaactaaaata

SEQ ID NO: 301423 - DNA, 12 bp, Artificial Sequence
  Oligonucleotide primer for the detection of SNP TSC0019494
aggaatttattg

SEQ ID NO: 301424 - DNA, 12 bp, Artificial Sequence
  Oligonucleotide primer for the detection of SNP TSC0019495
aataactataca

SEQ ID NO: 301425 - DNA, 12 bp, Artificial Sequence
  Oligonucleotide primer for the detection of SNP TSC0019495
aataactatacg

SEQ ID NO: 301426 - DNA, 12 bp, Artificial Sequence
  Oligonucleotide primer for the detection of SNP TSC0019495
tctcaatccttt

SEQ ID NO: 301427 - DNA, 12 bp, Artificial Sequence
  Oligonucleotide primer for the detection of SNP TSC0019495
agtgattgtgtg

SEQ ID NO: 301428 - DNA, 12 bp, Artificial Sequence
  Oligonucleotide primer for the detection of SNP TSC0019495
agtgattgtgcg

SEQ ID NO: 301429 - DNA, 12 bp, Artificial Sequence
  Oligonucleotide primer for the detection of SNP TSC0019497
tgttattattat

SEQ ID NO: 301430 - DNA, 12 bp, Artificial Sequence
  Oligonucleotide primer for the detection of SNP TSC0019497
tatcatcaccat

SEQ ID NO: 301431 - DNA, 12 bp, Artificial Sequence
  Oligonucleotide primer for the detection of SNP TSC0019497
gaggggttttgg

SEQ ID NO: 301432 - DNA, 12 bp, Artificial Sequence
  Oligonucleotide primer for the detection of SNP TSC0019503
ctatctctataa

SEQ ID NO: 301433 - DNA, 12 bp, Artificial Sequence
  Oligonucleotide primer for the detection of SNP TSC0019503
tgttttataaat

SEQ ID NO: 301434 - DNA, 12 bp, Artificial Sequence
  Oligonucleotide primer for the detection of SNP TSC0019503
tattccataaac

SEQ ID NO: 301435 - DNA, 12 bp, Artificial Sequence
  Oligonucleotide primer for the detection of SNP TSC0019503
ttgtttttgtag

SEQ ID NO: 301436 - DNA, 12 bp, Artificial Sequence
  Oligonucleotide primer for the detection of SNP TSC0019504
aaaattattttc

SEQ ID NO: 301437 - DNA, 12 bp, Artificial Sequence
  Oligonucleotide primer for the detection of SNP TSC0019504
tattaaatataa

SEQ ID NO: 301438 - DNA, 12 bp, Artificial Sequence
  Oligonucleotide primer for the detection of SNP TSC0019505
ctcaacctccaa

SEQ ID NO: 301439 - DNA, 12 bp, Artificial Sequence
  Oligonucleotide primer for the detection of SNP TSC0019505
gtaattttagtt

SEQ ID NO: 301440 - DNA, 12 bp, Artificial Sequence
  Oligonucleotide primer for the detection of SNP TSC0019505
ataatcccaatt

SEQ ID NO: 301441 - DNA, 12 bp, Artificial Sequence
  Oligonucleotide primer for the detection of SNP TSC0019505
tttagtttttag

SEQ ID NO: 301442 - DNA, 12 bp, Artificial Sequence
  Oligonucleotide primer for the detection of SNP TSC0019507
tttttattacaa

SEQ ID NO: 301443 - DNA, 12 bp, Artificial Sequence
  Oligonucleotide primer for the detection of SNP TSC0019507
ttagataaggaa

SEQ ID NO: 301444 - DNA, 12 bp, Artificial Sequence
  Oligonucleotide primer for the detection of SNP TSC0019507
tcaaacaaaaaa

SEQ ID NO: 301445 - DNA, 12 bp, Artificial Sequence
  Oligonucleotide primer for the detection of SNP TSC0019507
tttttgttgtag

SEQ ID NO: 301446 - DNA, 12 bp, Artificial Sequence
  Oligonucleotide primer for the detection of SNP TSC0019508
aactcaacaata

SEQ ID NO: 301447 - DNA, 12 bp, Artificial Sequence
  Oligonucleotide primer for the detection of SNP TSC0019508
attgtgatttta

SEQ ID NO: 301448 - DNA, 12 bp, Artificial Sequence
  Oligonucleotide primer for the detection of SNP TSC0019508
actataatctca

SEQ ID NO: 301449 - DNA, 12 bp, Artificial Sequence
  Oligonucleotide primer for the detection of SNP TSC0019508
gagtttagtagt

SEQ ID NO: 301450 - DNA, 12 bp, Artificial Sequence
  Oligonucleotide primer for the detection of SNP TSC0019510
tattaaaaacat

SEQ ID NO: 301451 - DNA, 12 bp, Artificial Sequence
  Oligonucleotide primer for the detection of SNP TSC0019510
atatttgatttg

SEQ ID NO: 301452 - DNA, 12 bp, Artificial Sequence
  Oligonucleotide primer for the detection of SNP TSC0019510
atacttaactta

SEQ ID NO: 301453 - DNA, 12 bp, Artificial Sequence
  Oligonucleotide primer for the detection of SNP TSC0019511
aaccacaaatta

SEQ ID NO: 301454 - DNA, 12 bp, Artificial Sequence
  Oligonucleotide primer for the detection of SNP TSC0019511
tatcacttctaa

SEQ ID NO: 301455 - DNA, 12 bp, Artificial Sequence
  Oligonucleotide primer for the detection of SNP TSC0019511
aattataaattg

SEQ ID NO: 301456 - DNA, 12 bp, Artificial Sequence
  Oligonucleotide primer for the detection of SNP TSC0019512
tttactaaaaca

SEQ ID NO: 301457 - DNA, 12 bp, Artificial Sequence
  Oligonucleotide primer for the detection of SNP TSC0019512
ggtttgaatgtt

SEQ ID NO: 301458 - DNA, 12 bp, Artificial Sequence
  Oligonucleotide primer for the detection of SNP TSC0019512
aatctaaatatt

SEQ ID NO: 301459 - DNA, 12 bp, Artificial Sequence
  Oligonucleotide primer for the detection of SNP TSC0019512
tttgttgggata

SEQ ID NO: 301460 - DNA, 12 bp, Artificial Sequence
  Oligonucleotide primer for the detection of SNP TSC0019513
aataccaacaaa

SEQ ID NO: 301461 - DNA, 12 bp, Artificial Sequence
  Oligonucleotide primer for the detection of SNP TSC0019513
ttttattagatt

SEQ ID NO: 301462 - DNA, 12 bp, Artificial Sequence
  Oligonucleotide primer for the detection of SNP TSC0019513
cctcaccaaact

SEQ ID NO: 301463 - DNA, 12 bp, Artificial Sequence
  Oligonucleotide primer for the detection of SNP TSC0019514
acctaatactca

SEQ ID NO: 301464 - DNA, 12 bp, Artificial Sequence
  Oligonucleotide primer for the detection of SNP TSC0019514
agtttaggtagt

SEQ ID NO: 301465 - DNA, 12 bp, Artificial Sequence
  Oligonucleotide primer for the detection of SNP TSC0019514
aacttaaacaat

SEQ ID NO: 301466 - DNA, 12 bp, Artificial Sequence
  Oligonucleotide primer for the detection of SNP TSC0019514
gtttggtgttta

SEQ ID NO: 301467 - DNA, 12 bp, Artificial Sequence
  Oligonucleotide primer for the detection of SNP TSC0019515
atttttagtaga

SEQ ID NO: 301468 - DNA, 12 bp, Artificial Sequence
  Oligonucleotide primer for the detection of SNP TSC0019515
ggtgaaatttta

SEQ ID NO: 301469 - DNA, 12 bp, Artificial Sequence
  Oligonucleotide primer for the detection of SNP TSC0019516
tttactaaaacc

SEQ ID NO: 301470 - DNA, 12 bp, Artificial Sequence
  Oligonucleotide primer for the detection of SNP TSC0019516
gattttggtggg

SEQ ID NO: 301471 - DNA, 12 bp, Artificial Sequence
  Oligonucleotide primer for the detection of SNP TSC0019516
gattttggcggg

SEQ ID NO: 301472 - DNA, 12 bp, Artificial Sequence
  Oligonucleotide primer for the detection of SNP TSC0019516
aaccttaacaaa

SEQ ID NO: 301473 - DNA, 12 bp, Artificial Sequence
  Oligonucleotide primer for the detection of SNP TSC0019516
aaccttaacgaa

SEQ ID NO: 301474 - DNA, 12 bp, Artificial Sequence
  Oligonucleotide primer for the detection of SNP TSC0019516
gaccttaacaaa

SEQ ID NO: 301475 - DNA, 12 bp, Artificial Sequence
  Oligonucleotide primer for the detection of SNP TSC0019516
gaccttaacgaa

SEQ ID NO: 301476 - DNA, 12 bp, Artificial Sequence
  Oligonucleotide primer for the detection of SNP TSC0019516
ttgttgagattt

SEQ ID NO: 301477 - DNA, 12 bp, Artificial Sequence
  Oligonucleotide primer for the detection of SNP TSC0019517
tcaatctaaaaa

SEQ ID NO: 301478 - DNA, 12 bp, Artificial Sequence
  Oligonucleotide primer for the detection of SNP TSC0019517
tttttttagtgt

SEQ ID NO: 301479 - DNA, 12 bp, Artificial Sequence
  Oligonucleotide primer for the detection of SNP TSC0019517
tccttttaatat

SEQ ID NO: 301480 - DNA, 12 bp, Artificial Sequence
  Oligonucleotide primer for the detection of SNP TSC0019517
ttaatttggaaa

SEQ ID NO: 301481 - DNA, 12 bp, Artificial Sequence
  Oligonucleotide primer for the detection of SNP TSC0019518
tatattataatg

SEQ ID NO: 301482 - DNA, 12 bp, Artificial Sequence
  Oligonucleotide primer for the detection of SNP TSC0019519
aacatttatccc

SEQ ID NO: 301483 - DNA, 12 bp, Artificial Sequence
  Oligonucleotide primer for the detection of SNP TSC0019519
ataggttggtta

SEQ ID NO: 301484 - DNA, 12 bp, Artificial Sequence
  Oligonucleotide primer for the detection of SNP TSC0019520
tcaaaacattta

SEQ ID NO: 301485 - DNA, 12 bp, Artificial Sequence
  Oligonucleotide primer for the detection of SNP TSC0019520
tcgaaacattta

SEQ ID NO: 301486 - DNA, 12 bp, Artificial Sequence
  Oligonucleotide primer for the detection of SNP TSC0019520
aggttggttata

SEQ ID NO: 301487 - DNA, 12 bp, Artificial Sequence
  Oligonucleotide primer for the detection of SNP TSC0019520
ctaactataaaa

SEQ ID NO: 301488 - DNA, 12 bp, Artificial Sequence
  Oligonucleotide primer for the detection of SNP TSC0019520
ttggagtatttg

SEQ ID NO: 301489 - DNA, 12 bp, Artificial Sequence
  Oligonukleotid-Primer
tcggagtatttg

SEQ ID NO: 301490 - DNA, 12 bp, Artificial Sequence
  Oligonucleotide primer for the detection of SNP TSC0019521
acaaaacattta

SEQ ID NO: 301491 - DNA, 12 bp, Artificial Sequence
  Oligonucleotide primer for the detection of SNP TSC0019521
agtaagttagat

SEQ ID NO: 301492 - DNA, 12 bp, Artificial Sequence
  Oligonucleotide primer for the detection of SNP TSC0019521
aacaaaccaaat

SEQ ID NO: 301493 - DNA, 12 bp, Artificial Sequence
  Oligonucleotide primer for the detection of SNP TSC0019521
agggtatttatt

SEQ ID NO: 301494 - DNA, 12 bp, Artificial Sequence
  Oligonucleotide primer for the detection of SNP TSC0019522
aatcctaaaaaa

SEQ ID NO: 301495 - DNA, 12 bp, Artificial Sequence
  Oligonucleotide primer for the detection of SNP TSC0019522
atgggatgtttt

SEQ ID NO: 301496 - DNA, 12 bp, Artificial Sequence
  Oligonucleotide primer for the detection of SNP TSC0019522
atgggacgtttt

SEQ ID NO: 301497 - DNA, 12 bp, Artificial Sequence
  Oligonucleotide primer for the detection of SNP TSC0019522
ataaaacatttt

SEQ ID NO: 301498 - DNA, 12 bp, Artificial Sequence
  Oligonucleotide primer for the detection of SNP TSC0019522
ataaaacgtttt

SEQ ID NO: 301499 - DNA, 12 bp, Artificial Sequence
  Oligonucleotide primer for the detection of SNP TSC0019522
aattttggaaaa

SEQ ID NO: 301500 - DNA, 12 bp, Artificial Sequence
  Oligonucleotide primer for the detection of SNP TSC0019523
aaaccttctacc

SEQ ID NO: 301501 - DNA, 12 bp, Artificial Sequence
  Oligonucleotide primer for the detection of SNP TSC0019523
ttaaggtattag

SEQ ID NO: 301502 - DNA, 12 bp, Artificial Sequence
  Oligonucleotide primer for the detection of SNP TSC0019530
tttttttaagga

SEQ ID NO: 301503 - DNA, 12 bp, Artificial Sequence
  Oligonucleotide primer for the detection of SNP TSC0019531
aggttaaggaga

SEQ ID NO: 301504 - DNA, 12 bp, Artificial Sequence
  Oligonucleotide primer for the detection of SNP TSC0019531
tgatattttaat

SEQ ID NO: 301505 - DNA, 12 bp, Artificial Sequence
  Oligonucleotide primer for the detection of SNP TSC0019531
tgatattttaac

SEQ ID NO: 301506 - DNA, 12 bp, Artificial Sequence
  Oligonucleotide primer for the detection of SNP TSC0019532
actctaaaaata

SEQ ID NO: 301507 - DNA, 12 bp, Artificial Sequence
  Oligonucleotide primer for the detection of SNP TSC0019532
tgtttgatgtgt

SEQ ID NO: 301508 - DNA, 12 bp, Artificial Sequence
  Oligonucleotide primer for the detection of SNP TSC0019532
cgtttgatgtgt

SEQ ID NO: 301509 - DNA, 12 bp, Artificial Sequence
  Oligonucleotide primer for the detection of SNP TSC0019532
catctaatatac

SEQ ID NO: 301510 - DNA, 12 bp, Artificial Sequence
  Oligonucleotide primer for the detection of SNP TSC0019532
cgtctaatatac

SEQ ID NO: 301511 - DNA, 12 bp, Artificial Sequence
  Oligonucleotide primer for the detection of SNP TSC0019532
attttgaggatg

SEQ ID NO: 301512 - DNA, 12 bp, Artificial Sequence
  Oligonucleotide primer for the detection of SNP TSC0019533
aataaacaaaat

SEQ ID NO: 301513 - DNA, 12 bp, Artificial Sequence
  Oligonucleotide primer for the detection of SNP TSC0019533
tgtttggagggg

SEQ ID NO: 301514 - DNA, 12 bp, Artificial Sequence
  Oligonucleotide primer for the detection of SNP TSC0019533
cgtttggagggg

SEQ ID NO: 301515 - DNA, 12 bp, Artificial Sequence
  Oligonucleotide primer for the detection of SNP TSC0019533
cgcttaaaaaaa

SEQ ID NO: 301516 - DNA, 12 bp, Artificial Sequence
  Oligonucleotide primer for the detection of SNP TSC0019533
gataaatagggt

SEQ ID NO: 301517 - DNA, 12 bp, Artificial Sequence
  Oligonucleotide primer for the detection of SNP TSC0019534
taaaaattacca

SEQ ID NO: 301518 - DNA, 12 bp, Artificial Sequence
  Oligonucleotide primer for the detection of SNP TSC0019534
tttgtttaggtt

SEQ ID NO: 301519 - DNA, 12 bp, Artificial Sequence
  Oligonucleotide primer for the detection of SNP TSC0019534
tactcaaactaa

SEQ ID NO: 301520 - DNA, 12 bp, Artificial Sequence
  Oligonucleotide primer for the detection of SNP TSC0019534
ttgaagattgtt

SEQ ID NO: 301521 - DNA, 12 bp, Artificial Sequence
  Oligonucleotide primer for the detection of SNP TSC0019536
tattaatttggt

SEQ ID NO: 301522 - DNA, 12 bp, Artificial Sequence
  Oligonucleotide primer for the detection of SNP TSC0019536
tattaattcggt

SEQ ID NO: 301523 - DNA, 12 bp, Artificial Sequence
  Oligonucleotide primer for the detection of SNP TSC0019536
ccactaactcaa

SEQ ID NO: 301524 - DNA, 12 bp, Artificial Sequence
  Oligonucleotide primer for the detection of SNP TSC0019536
ccactaactcga

SEQ ID NO: 301525 - DNA, 12 bp, Artificial Sequence
  Oligonucleotide primer for the detection of SNP TSC0019536
aggtttagggaa

SEQ ID NO: 301526 - DNA, 12 bp, Artificial Sequence
  Oligonucleotide primer for the detection of SNP TSC0019537
aacacaaccccc

SEQ ID NO: 301527 - DNA, 12 bp, Artificial Sequence
  Oligonucleotide primer for the detection of SNP TSC0019537
ttgtgttatttg

SEQ ID NO: 301528 - DNA, 12 bp, Artificial Sequence
  Oligonucleotide primer for the detection of SNP TSC0019537
tcgtgttatttg

SEQ ID NO: 301529 - DNA, 12 bp, Artificial Sequence
  Oligonucleotide primer for the detection of SNP TSC0019537
tcataccattta

SEQ ID NO: 301530 - DNA, 12 bp, Artificial Sequence
  Oligonucleotide primer for the detection of SNP TSC0019537
tcgtaccattta

SEQ ID NO: 301531 - DNA, 12 bp, Artificial Sequence
  Oligonucleotide primer for the detection of SNP TSC0019537
gatataattttt

SEQ ID NO: 301532 - DNA, 12 bp, Artificial Sequence
  Oligonucleotide primer for the detection of SNP TSC0019537
gatataattttc

SEQ ID NO: 301533 - DNA, 12 bp, Artificial Sequence
  Oligonucleotide primer for the detection of SNP TSC0019538
tcactaccaaca

SEQ ID NO: 301534 - DNA, 12 bp, Artificial Sequence
  Oligonucleotide primer for the detection of SNP TSC0019538
tgggaggtggtt

SEQ ID NO: 301535 - DNA, 12 bp, Artificial Sequence
  Oligonucleotide primer for the detection of SNP TSC0019538
cgggaggtggtt

SEQ ID NO: 301536 - DNA, 12 bp, Artificial Sequence
  Oligonucleotide primer for the detection of SNP TSC0019538
caaaaaataacc

SEQ ID NO: 301537 - DNA, 12 bp, Artificial Sequence
  Oligonucleotide primer for the detection of SNP TSC0019538
cgaaaaataacc

SEQ ID NO: 301538 - DNA, 12 bp, Artificial Sequence
  Oligonucleotide primer for the detection of SNP TSC0019538
tttattgttagt

SEQ ID NO: 301539 - DNA, 12 bp, Artificial Sequence
  Oligonucleotide primer for the detection of SNP TSC0019540
atctaaatttcc

SEQ ID NO: 301540 - DNA, 12 bp, Artificial Sequence
  Oligonucleotide primer for the detection of SNP TSC0019540
tttgttgaggaa

SEQ ID NO: 301541 - DNA, 12 bp, Artificial Sequence
  Oligonucleotide primer for the detection of SNP TSC0019540
ttcgttgaggaa

SEQ ID NO: 301542 - DNA, 12 bp, Artificial Sequence
  Oligonucleotide primer for the detection of SNP TSC0019541
aatattccaaac

SEQ ID NO: 301543 - DNA, 12 bp, Artificial Sequence
  Oligonucleotide primer for the detection of SNP TSC0019541
ttagaatagttt

SEQ ID NO: 301544 - DNA, 12 bp, Artificial Sequence
  Oligonucleotide primer for the detection of SNP TSC0019541
caaaacaaccca

SEQ ID NO: 301545 - DNA, 12 bp, Artificial Sequence
  Oligonucleotide primer for the detection of SNP TSC0019542
caattccaacac

SEQ ID NO: 301546 - DNA, 12 bp, Artificial Sequence
  Oligonucleotide primer for the detection of SNP TSC0019542
gagttgggattg

SEQ ID NO: 301547 - DNA, 12 bp, Artificial Sequence
  Oligonucleotide primer for the detection of SNP TSC0019542
aaactaaaacta

SEQ ID NO: 301548 - DNA, 12 bp, Artificial Sequence
  Oligonucleotide primer for the detection of SNP TSC0019542
tagttttagtat

SEQ ID NO: 301549 - DNA, 12 bp, Artificial Sequence
  Oligonucleotide primer for the detection of SNP TSC0019543
gtatgtttggtt

SEQ ID NO: 301550 - DNA, 12 bp, Artificial Sequence
  Oligonucleotide primer for the detection of SNP TSC0019543
caacatatttaa

SEQ ID NO: 301551 - DNA, 12 bp, Artificial Sequence
  Oligonucleotide primer for the detection of SNP TSC0019544
tttaaaatctaa

SEQ ID NO: 301552 - DNA, 12 bp, Artificial Sequence
  Oligonucleotide primer for the detection of SNP TSC0019544
agtttgtttatt

SEQ ID NO: 301553 - DNA, 12 bp, Artificial Sequence
  Oligonucleotide primer for the detection of SNP TSC0019544
acaatctatcca

SEQ ID NO: 301554 - DNA, 12 bp, Artificial Sequence
  Oligonukleotid-Primer
ttttgagatttg

SEQ ID NO: 301555 - DNA, 12 bp, Artificial Sequence
  Oligonucleotide primer for the detection of SNP TSC0019545
atatccaaaaac

SEQ ID NO: 301556 - DNA, 12 bp, Artificial Sequence
  Oligonucleotide primer for the detection of SNP TSC0019545
gttattttggaa

SEQ ID NO: 301557 - DNA, 12 bp, Artificial Sequence
  Oligonucleotide primer for the detection of SNP TSC0019545
accatcttaaaa

SEQ ID NO: 301558 - DNA, 12 bp, Artificial Sequence
  Oligonucleotide primer for the detection of SNP TSC0019545
gtatttagaggt

SEQ ID NO: 301559 - DNA, 12 bp, Artificial Sequence
  Oligonucleotide primer for the detection of SNP TSC0019545
gtatttagaggc

SEQ ID NO: 301560 - DNA, 12 bp, Artificial Sequence
  Oligonucleotide primer for the detection of SNP TSC0019548
aactaatttatt

SEQ ID NO: 301561 - DNA, 12 bp, Artificial Sequence
  Oligonucleotide primer for the detection of SNP TSC0019548
attgggaaaaga

SEQ ID NO: 301562 - DNA, 12 bp, Artificial Sequence
  Oligonucleotide primer for the detection of SNP TSC0019550
taccaatcctac

SEQ ID NO: 301563 - DNA, 12 bp, Artificial Sequence
  Oligonucleotide primer for the detection of SNP TSC0019550
taccgatcctac

SEQ ID NO: 301564 - DNA, 12 bp, Artificial Sequence
  Oligonucleotide primer for the detection of SNP TSC0019550
gtagggttttag

SEQ ID NO: 301565 - DNA, 12 bp, Artificial Sequence
  Oligonucleotide primer for the detection of SNP TSC0019551
ataaaaacttta

SEQ ID NO: 301566 - DNA, 12 bp, Artificial Sequence
  Oligonucleotide primer for the detection of SNP TSC0019551
tgagtgtttggg

SEQ ID NO: 301567 - DNA, 12 bp, Artificial Sequence
  Oligonucleotide primer for the detection of SNP TSC0019551
tatgagggtttt

SEQ ID NO: 301568 - DNA, 12 bp, Artificial Sequence
  Oligonucleotide primer for the detection of SNP TSC0019552
tattctttttaa

SEQ ID NO: 301569 - DNA, 12 bp, Artificial Sequence
  Oligonucleotide primer for the detection of SNP TSC0019552
agtgaaaatatt

SEQ ID NO: 301570 - DNA, 12 bp, Artificial Sequence
  Oligonucleotide primer for the detection of SNP TSC0019552
aataaaaacatt

SEQ ID NO: 301571 - DNA, 12 bp, Artificial Sequence
  Oligonucleotide primer for the detection of SNP TSC0019552
tattttttttga

SEQ ID NO: 301572 - DNA, 12 bp, Artificial Sequence
  Oligonucleotide primer for the detection of SNP TSC0019553
attaacataaac

SEQ ID NO: 301573 - DNA, 12 bp, Artificial Sequence
  Oligonucleotide primer for the detection of SNP TSC0019553
aatttgttgttt

SEQ ID NO: 301574 - DNA, 12 bp, Artificial Sequence
  Oligonucleotide primer for the detection of SNP TSC0019553
aatttactattt

SEQ ID NO: 301575 - DNA, 12 bp, Artificial Sequence
  Oligonucleotide primer for the detection of SNP TSC0019553
aatatgaatttt

SEQ ID NO: 301576 - DNA, 12 bp, Artificial Sequence
  Oligonucleotide primer for the detection of SNP TSC0019554
tattattcaaat

SEQ ID NO: 301577 - DNA, 12 bp, Artificial Sequence
  Oligonucleotide primer for the detection of SNP TSC0019554
aataatgtgtta

SEQ ID NO: 301578 - DNA, 12 bp, Artificial Sequence
  Oligonucleotide primer for the detection of SNP TSC0019555
caaattctacaa

SEQ ID NO: 301579 - DNA, 12 bp, Artificial Sequence
  Oligonucleotide primer for the detection of SNP TSC0019555
ttggttttttgt

SEQ ID NO: 301580 - DNA, 12 bp, Artificial Sequence
  Oligonucleotide primer for the detection of SNP TSC0019555
ctaatcctctat

SEQ ID NO: 301581 - DNA, 12 bp, Artificial Sequence
  Oligonucleotide primer for the detection of SNP TSC0019555
taaattttgtag

SEQ ID NO: 301582 - DNA, 12 bp, Artificial Sequence
  Oligonucleotide primer for the detection of SNP TSC0019561
ttaatttcctcc

SEQ ID NO: 301583 - DNA, 12 bp, Artificial Sequence
  Oligonucleotide primer for the detection of SNP TSC0019561
gtttagaaagtt

SEQ ID NO: 301584 - DNA, 12 bp, Artificial Sequence
  Oligonucleotide primer for the detection of SNP TSC0019561
atttaaaaaacc

SEQ ID NO: 301585 - DNA, 12 bp, Artificial Sequence
  Oligonucleotide primer for the detection of SNP TSC0019564
ttaaattaatat

SEQ ID NO: 301586 - DNA, 12 bp, Artificial Sequence
  Oligonucleotide primer for the detection of SNP TSC0019564
ttaaattaatac

SEQ ID NO: 301587 - DNA, 12 bp, Artificial Sequence
  Oligonucleotide primer for the detection of SNP TSC0019564
actaaatcaata

SEQ ID NO: 301588 - DNA, 12 bp, Artificial Sequence
  Oligonucleotide primer for the detection of SNP TSC0019564
gagaaaagttgt

SEQ ID NO: 301589 - DNA, 12 bp, Artificial Sequence
  Oligonucleotide primer for the detection of SNP TSC0019565
tcttaaataaca

SEQ ID NO: 301590 - DNA, 12 bp, Artificial Sequence
  Oligonucleotide primer for the detection of SNP TSC0019565
atgatattggaa

SEQ ID NO: 301591 - DNA, 12 bp, Artificial Sequence
  Oligonucleotide primer for the detection of SNP TSC0019565
taacattaaaaa

SEQ ID NO: 301592 - DNA, 12 bp, Artificial Sequence
  Oligonucleotide primer for the detection of SNP TSC0019565
tttttaagtagt

SEQ ID NO: 301593 - DNA, 12 bp, Artificial Sequence
  Oligonucleotide primer for the detection of SNP TSC0019566
taacaaacataa

SEQ ID NO: 301594 - DNA, 12 bp, Artificial Sequence
  Oligonucleotide primer for the detection of SNP TSC0019566
taacgaacataa

SEQ ID NO: 301595 - DNA, 12 bp, Artificial Sequence
  Oligonucleotide primer for the detection of SNP TSC0019566
gagatggggttt

SEQ ID NO: 301596 - DNA, 12 bp, Artificial Sequence
  Oligonucleotide primer for the detection of SNP TSC0019566
tgatgaatatgg

SEQ ID NO: 301597 - DNA, 12 bp, Artificial Sequence
  Oligonucleotide primer for the detection of SNP TSC0019566
tgacgaatatgg

SEQ ID NO: 301598 - DNA, 12 bp, Artificial Sequence
  Oligonucleotide primer for the detection of SNP TSC0019567
tccataacttcc

SEQ ID NO: 301599 - DNA, 12 bp, Artificial Sequence
  Oligonucleotide primer for the detection of SNP TSC0019567
tattttgtagag

SEQ ID NO: 301600 - DNA, 12 bp, Artificial Sequence
  Oligonucleotide primer for the detection of SNP TSC0019568
actcaaaactcc

SEQ ID NO: 301601 - DNA, 12 bp, Artificial Sequence
  Oligonucleotide primer for the detection of SNP TSC0019568
tagagtaggaag

SEQ ID NO: 301602 - DNA, 12 bp, Artificial Sequence
  Oligonucleotide primer for the detection of SNP TSC0019569
taatactaccac

SEQ ID NO: 301603 - DNA, 12 bp, Artificial Sequence
  Oligonucleotide primer for the detection of SNP TSC0019569
tattggttatta

SEQ ID NO: 301604 - DNA, 12 bp, Artificial Sequence
  Oligonucleotide primer for the detection of SNP TSC0019570
tacataatttct

SEQ ID NO: 301605 - DNA, 12 bp, Artificial Sequence
  Oligonucleotide primer for the detection of SNP TSC0019570
atttggtggtta

SEQ ID NO: 301606 - DNA, 12 bp, Artificial Sequence
  Oligonucleotide primer for the detection of SNP TSC0019571
gatttgttgttt

SEQ ID NO: 301607 - DNA, 12 bp, Artificial Sequence
  Oligonucleotide primer for the detection of SNP TSC0019571
gattcgttgttt

SEQ ID NO: 301608 - DNA, 12 bp, Artificial Sequence
  Oligonucleotide primer for the detection of SNP TSC0019571
caaaacccacta

SEQ ID NO: 301609 - DNA, 12 bp, Artificial Sequence
  Oligonucleotide primer for the detection of SNP TSC0019571
caaaacccgcta

SEQ ID NO: 301610 - DNA, 12 bp, Artificial Sequence
  Oligonucleotide primer for the detection of SNP TSC0019571
agaagaaagggt

SEQ ID NO: 301611 - DNA, 12 bp, Artificial Sequence
  Oligonucleotide primer for the detection of SNP TSC0019571
agaagaaagggc

SEQ ID NO: 301612 - DNA, 12 bp, Artificial Sequence
  Oligonucleotide primer for the detection of SNP TSC0019572
tcaaatatactt

SEQ ID NO: 301613 - DNA, 12 bp, Artificial Sequence
  Oligonucleotide primer for the detection of SNP TSC0019572
tcgaatatactt

SEQ ID NO: 301614 - DNA, 12 bp, Artificial Sequence
  Oligonucleotide primer for the detection of SNP TSC0019574
taaccaataatt

SEQ ID NO: 301615 - DNA, 12 bp, Artificial Sequence
  Oligonucleotide primer for the detection of SNP TSC0019574
aataaatatggg

SEQ ID NO: 301616 - DNA, 12 bp, Artificial Sequence
  Oligonucleotide primer for the detection of SNP TSC0019574
aataaacataaa

SEQ ID NO: 301617 - DNA, 12 bp, Artificial Sequence
  Oligonucleotide primer for the detection of SNP TSC0019574
taattaataatt

SEQ ID NO: 301618 - DNA, 12 bp, Artificial Sequence
  Oligonucleotide primer for the detection of SNP TSC0019576
cacaaaacccaa

SEQ ID NO: 301619 - DNA, 12 bp, Artificial Sequence
  Oligonucleotide primer for the detection of SNP TSC0019576
aattctatctct

SEQ ID NO: 301620 - DNA, 12 bp, Artificial Sequence
  Oligonucleotide primer for the detection of SNP TSC0019576
tatagaatttag

SEQ ID NO: 301621 - DNA, 12 bp, Artificial Sequence
  Oligonucleotide primer for the detection of SNP TSC0019577
aaaaacataacc

SEQ ID NO: 301622 - DNA, 12 bp, Artificial Sequence
  Oligonucleotide primer for the detection of SNP TSC0019577
ggtagggagagg

SEQ ID NO: 301623 - DNA, 12 bp, Artificial Sequence
  Oligonucleotide primer for the detection of SNP TSC0019577
agagatataatt

SEQ ID NO: 301624 - DNA, 12 bp, Artificial Sequence
  Oligonucleotide primer for the detection of SNP TSC0019580
tactattttaat

SEQ ID NO: 301625 - DNA, 12 bp, Artificial Sequence
  Oligonucleotide primer for the detection of SNP TSC0019580
atatatattttg

SEQ ID NO: 301626 - DNA, 12 bp, Artificial Sequence
  Oligonucleotide primer for the detection of SNP TSC0019586
cttcatacacct

SEQ ID NO: 301627 - DNA, 12 bp, Artificial Sequence
  Oligonucleotide primer for the detection of SNP TSC0019586
ggatagagatag

SEQ ID NO: 301628 - DNA, 12 bp, Artificial Sequence
  Oligonucleotide primer for the detection of SNP TSC0019586
ttttatgtattt

SEQ ID NO: 301629 - DNA, 12 bp, Artificial Sequence
  Oligonucleotide primer for the detection of SNP TSC0019587
caataaacctaa

SEQ ID NO: 301630 - DNA, 12 bp, Artificial Sequence
  Oligonucleotide primer for the detection of SNP TSC0019587
gtggagagtgtt

SEQ ID NO: 301631 - DNA, 12 bp, Artificial Sequence
  Oligonucleotide primer for the detection of SNP TSC0019587
ataaaaaatatc

SEQ ID NO: 301632 - DNA, 12 bp, Artificial Sequence
  Oligonucleotide primer for the detection of SNP TSC0019587
taataggtttgg

SEQ ID NO: 301633 - DNA, 12 bp, Artificial Sequence
  Oligonucleotide primer for the detection of SNP TSC0019588
tttttgtattat

SEQ ID NO: 301634 - DNA, 12 bp, Artificial Sequence
  Oligonucleotide primer for the detection of SNP TSC0019588
cctttacattat

SEQ ID NO: 301635 - DNA, 12 bp, Artificial Sequence
  Oligonucleotide primer for the detection of SNP TSC0019588
gtttgagaataa

SEQ ID NO: 301636 - DNA, 12 bp, Artificial Sequence
  Oligonucleotide primer for the detection of SNP TSC0019589
acttttcattcc

SEQ ID NO: 301637 - DNA, 12 bp, Artificial Sequence
  Oligonucleotide primer for the detection of SNP TSC0019589
gtttggtggttg

SEQ ID NO: 301638 - DNA, 12 bp, Artificial Sequence
  Oligonucleotide primer for the detection of SNP TSC0019589
acttaataacta

SEQ ID NO: 301639 - DNA, 12 bp, Artificial Sequence
  Oligonucleotide primer for the detection of SNP TSC0019590
cttcatactacc

SEQ ID NO: 301640 - DNA, 12 bp, Artificial Sequence
  Oligonucleotide primer for the detection of SNP TSC0019590
tttttagatttt

SEQ ID NO: 301641 - DNA, 12 bp, Artificial Sequence
  Oligonucleotide primer for the detection of SNP TSC0019590
caaattccaaaa

SEQ ID NO: 301642 - DNA, 12 bp, Artificial Sequence
  Oligonucleotide primer for the detection of SNP TSC0019590
tttatgttattt

SEQ ID NO: 301643 - DNA, 12 bp, Artificial Sequence
  Oligonukleotid-Primer
tactttctcttc

SEQ ID NO: 301644 - DNA, 12 bp, Artificial Sequence
  Oligonucleotide primer for the detection of SNP TSC0019591
tgggttttttag

SEQ ID NO: 301645 - DNA, 12 bp, Artificial Sequence
  Oligonucleotide primer for the detection of SNP TSC0019592
aacttatttata

SEQ ID NO: 301646 - DNA, 12 bp, Artificial Sequence
  Oligonucleotide primer for the detection of SNP TSC0019592
ataaaataacat

SEQ ID NO: 301647 - DNA, 12 bp, Artificial Sequence
  Oligonucleotide primer for the detection of SNP TSC0019592
agtttatttata

SEQ ID NO: 301648 - DNA, 12 bp, Artificial Sequence
  Oligonucleotide primer for the detection of SNP TSC0019593
catctaaaaaat

SEQ ID NO: 301649 - DNA, 12 bp, Artificial Sequence
  Oligonucleotide primer for the detection of SNP TSC0019593
tttttagtttaa

SEQ ID NO: 301650 - DNA, 12 bp, Artificial Sequence
  Oligonucleotide primer for the detection of SNP TSC0019593
cttccaacctaa

SEQ ID NO: 301651 - DNA, 12 bp, Artificial Sequence
  Oligonucleotide primer for the detection of SNP TSC0019593
tatttgaaaaat

SEQ ID NO: 301652 - DNA, 12 bp, Artificial Sequence
  Oligonucleotide primer for the detection of SNP TSC0019596
taacacttatct

SEQ ID NO: 301653 - DNA, 12 bp, Artificial Sequence
  Oligonucleotide primer for the detection of SNP TSC0019596
ttaggaatgtga

SEQ ID NO: 301654 - DNA, 12 bp, Artificial Sequence
  Oligonucleotide primer for the detection of SNP TSC0019596
ttaaaaatataa

SEQ ID NO: 301655 - DNA, 12 bp, Artificial Sequence
  Oligonucleotide primer for the detection of SNP TSC0019596
tggtatttattt

SEQ ID NO: 301656 - DNA, 12 bp, Artificial Sequence
  Oligonucleotide primer for the detection of SNP TSC0019597
tcctcaatcata

SEQ ID NO: 301657 - DNA, 12 bp, Artificial Sequence
  Oligonucleotide primer for the detection of SNP TSC0019597
aagtttaatgtt

SEQ ID NO: 301658 - DNA, 12 bp, Artificial Sequence
  Oligonucleotide primer for the detection of SNP TSC0019597
aaatccaatacc

SEQ ID NO: 301659 - DNA, 12 bp, Artificial Sequence
  Oligonucleotide primer for the detection of SNP TSC0019597
atttttaattat

SEQ ID NO: 301660 - DNA, 12 bp, Artificial Sequence
  Oligonucleotide primer for the detection of SNP TSC0019598
taaaatcttcac

SEQ ID NO: 301661 - DNA, 12 bp, Artificial Sequence
  Oligonucleotide primer for the detection of SNP TSC0019599
acaaaaaaaacc

SEQ ID NO: 301662 - DNA, 12 bp, Artificial Sequence
  Oligonucleotide primer for the detection of SNP TSC0019599
tgaggttttagg

SEQ ID NO: 301663 - DNA, 12 bp, Artificial Sequence
  Oligonucleotide primer for the detection of SNP TSC0019599
taaaacttcaaa

SEQ ID NO: 301664 - DNA, 12 bp, Artificial Sequence
  Oligonucleotide primer for the detection of SNP TSC0019599
gtagaagagatt

SEQ ID NO: 301665 - DNA, 12 bp, Artificial Sequence
  Oligonucleotide primer for the detection of SNP TSC0019599
gtagaagagatc

SEQ ID NO: 301666 - DNA, 12 bp, Artificial Sequence
  Oligonucleotide primer for the detection of SNP TSC0019600
ggtgtggtggta

SEQ ID NO: 301667 - DNA, 12 bp, Artificial Sequence
  Oligonucleotide primer for the detection of SNP TSC0019601
aaaacccaataa

SEQ ID NO: 301668 - DNA, 12 bp, Artificial Sequence
  Oligonucleotide primer for the detection of SNP TSC0019601
atttaaatattt

SEQ ID NO: 301669 - DNA, 12 bp, Artificial Sequence
  Oligonucleotide primer for the detection of SNP TSC0019601
aacccaaacacc

SEQ ID NO: 301670 - DNA, 12 bp, Artificial Sequence
  Oligonucleotide primer for the detection of SNP TSC0019601
ggggtttagtgg

SEQ ID NO: 301671 - DNA, 12 bp, Artificial Sequence
  Oligonucleotide primer for the detection of SNP TSC0019604
actacaaatacc

SEQ ID NO: 301672 - DNA, 12 bp, Artificial Sequence
  Oligonucleotide primer for the detection of SNP TSC0019604
tgggtatggtgg

SEQ ID NO: 301673 - DNA, 12 bp, Artificial Sequence
  Oligonucleotide primer for the detection of SNP TSC0019604
cgggtatggtgg

SEQ ID NO: 301674 - DNA, 12 bp, Artificial Sequence
  Oligonucleotide primer for the detection of SNP TSC0019604
caaatataataa

SEQ ID NO: 301675 - DNA, 12 bp, Artificial Sequence
  Oligonucleotide primer for the detection of SNP TSC0019604
cgaatataataa

SEQ ID NO: 301676 - DNA, 12 bp, Artificial Sequence
  Oligonucleotide primer for the detection of SNP TSC0019606
attatttttaga

SEQ ID NO: 301677 - DNA, 12 bp, Artificial Sequence
  Oligonucleotide primer for the detection of SNP TSC0019606
accatttctaaa

SEQ ID NO: 301678 - DNA, 12 bp, Artificial Sequence
  Oligonucleotide primer for the detection of SNP TSC0019606
tttataaagaat

SEQ ID NO: 301679 - DNA, 12 bp, Artificial Sequence
  Oligonucleotide primer for the detection of SNP TSC0019608
acacctttatca

SEQ ID NO: 301680 - DNA, 12 bp, Artificial Sequence
  Oligonucleotide primer for the detection of SNP TSC0019608
ttgttgtgggtt

SEQ ID NO: 301681 - DNA, 12 bp, Artificial Sequence
  Oligonucleotide primer for the detection of SNP TSC0019608
ttactataaact

SEQ ID NO: 301682 - DNA, 12 bp, Artificial Sequence
  Oligonucleotide primer for the detection of SNP TSC0019608
atatttttgtta

SEQ ID NO: 301683 - DNA, 12 bp, Artificial Sequence
  Oligonucleotide primer for the detection of SNP TSC0019609
tttttttctcct

SEQ ID NO: 301684 - DNA, 12 bp, Artificial Sequence
  Oligonucleotide primer for the detection of SNP TSC0019609
atagatgaagga

SEQ ID NO: 301685 - DNA, 12 bp, Artificial Sequence
  Oligonucleotide primer for the detection of SNP TSC0019610
acacccactaat

SEQ ID NO: 301686 - DNA, 12 bp, Artificial Sequence
  Oligonucleotide primer for the detection of SNP TSC0019610
tgtgtttaggga

SEQ ID NO: 301687 - DNA, 12 bp, Artificial Sequence
  Oligonucleotide primer for the detection of SNP TSC0019610
cgtgtttaggga

SEQ ID NO: 301688 - DNA, 12 bp, Artificial Sequence
  Oligonucleotide primer for the detection of SNP TSC0019611
aaataaaaatat

SEQ ID NO: 301689 - DNA, 12 bp, Artificial Sequence
  Oligonucleotide primer for the detection of SNP TSC0019612
aaaaaacgattt

SEQ ID NO: 301690 - DNA, 12 bp, Artificial Sequence
  Oligonucleotide primer for the detection of SNP TSC0019612
agatagtgtaaa

SEQ ID NO: 301691 - DNA, 12 bp, Artificial Sequence
  Oligonucleotide primer for the detection of SNP TSC0019612
agatagcgtaaa

SEQ ID NO: 301692 - DNA, 12 bp, Artificial Sequence
  Oligonucleotide primer for the detection of SNP TSC0019613
tttattataaca

SEQ ID NO: 301693 - DNA, 12 bp, Artificial Sequence
  Oligonucleotide primer for the detection of SNP TSC0019613
agtttgttagag

SEQ ID NO: 301694 - DNA, 12 bp, Artificial Sequence
  Oligonucleotide primer for the detection of SNP TSC0019613
aatttactaaaa

SEQ ID NO: 301695 - DNA, 12 bp, Artificial Sequence
  Oligonucleotide primer for the detection of SNP TSC0019613
ttttattgtggt

SEQ ID NO: 301696 - DNA, 12 bp, Artificial Sequence
  Oligonucleotide primer for the detection of SNP TSC0019614
gaaaaataaaaa

SEQ ID NO: 301697 - DNA, 12 bp, Artificial Sequence
  Oligonucleotide primer for the detection of SNP TSC0019614
aagtttattgta

SEQ ID NO: 301698 - DNA, 12 bp, Artificial Sequence
  Oligonucleotide primer for the detection of SNP TSC0019615
cataaaataaat

SEQ ID NO: 301699 - DNA, 12 bp, Artificial Sequence
  Oligonucleotide primer for the detection of SNP TSC0019615
cgtaaaataaat

SEQ ID NO: 301700 - DNA, 12 bp, Artificial Sequence
  Oligonucleotide primer for the detection of SNP TSC0019615
gtgtttttatag

SEQ ID NO: 301701 - DNA, 12 bp, Artificial Sequence
  Oligonucleotide primer for the detection of SNP TSC0019615
gcgtttttatag

SEQ ID NO: 301702 - DNA, 12 bp, Artificial Sequence
  Oligonucleotide primer for the detection of SNP TSC0019616
cctctacaatac

SEQ ID NO: 301703 - DNA, 12 bp, Artificial Sequence
  Oligonucleotide primer for the detection of SNP TSC0019616
agggttggattt

SEQ ID NO: 301704 - DNA, 12 bp, Artificial Sequence
  Oligonucleotide primer for the detection of SNP TSC0019616
tcaaaactaaac

SEQ ID NO: 301705 - DNA, 12 bp, Artificial Sequence
  Oligonucleotide primer for the detection of SNP TSC0019616
tttttgtagtgt

SEQ ID NO: 301706 - DNA, 12 bp, Artificial Sequence
  Oligonucleotide primer for the detection of SNP TSC0019616
tttttgtagtgc

SEQ ID NO: 301707 - DNA, 12 bp, Artificial Sequence
  Oligonucleotide primer for the detection of SNP TSC0019617
accctaccttcc

SEQ ID NO: 301708 - DNA, 12 bp, Artificial Sequence
  Oligonucleotide primer for the detection of SNP TSC0019617
tagagaaggtgt

SEQ ID NO: 301709 - DNA, 12 bp, Artificial Sequence
  Oligonucleotide primer for the detection of SNP TSC0019617
attttgtttttt

SEQ ID NO: 301710 - DNA, 12 bp, Artificial Sequence
  Oligonucleotide primer for the detection of SNP TSC0019617
attttgtttttc

SEQ ID NO: 301711 - DNA, 12 bp, Artificial Sequence
  Oligonucleotide primer for the detection of SNP TSC0019618
taataaaactat

SEQ ID NO: 301712 - DNA, 12 bp, Artificial Sequence
  Oligonucleotide primer for the detection of SNP TSC0019618
ataatttttttg

SEQ ID NO: 301713 - DNA, 12 bp, Artificial Sequence
  Oligonucleotide primer for the detection of SNP TSC0019619
taaattattatt

SEQ ID NO: 301714 - DNA, 12 bp, Artificial Sequence
  Oligonucleotide primer for the detection of SNP TSC0019619
taatttaattga

SEQ ID NO: 301715 - DNA, 12 bp, Artificial Sequence
  Oligonucleotide primer for the detection of SNP TSC0019622
ctatcctccatt

SEQ ID NO: 301716 - DNA, 12 bp, Artificial Sequence
  Oligonucleotide primer for the detection of SNP TSC0019622
tgtagtgttttg

SEQ ID NO: 301717 - DNA, 12 bp, Artificial Sequence
  Oligonucleotide primer for the detection of SNP TSC0019623
aaatcatctctc

SEQ ID NO: 301718 - DNA, 12 bp, Artificial Sequence
  Oligonucleotide primer for the detection of SNP TSC0019623
atatggggtagg

SEQ ID NO: 301719 - DNA, 12 bp, Artificial Sequence
  Oligonucleotide primer for the detection of SNP TSC0019623
atacggggtagg

SEQ ID NO: 301720 - DNA, 12 bp, Artificial Sequence
  Oligonucleotide primer for the detection of SNP TSC0019624
caataaacaaac

SEQ ID NO: 301721 - DNA, 12 bp, Artificial Sequence
  Oligonucleotide primer for the detection of SNP TSC0019624
tttattagaata

SEQ ID NO: 301722 - DNA, 12 bp, Artificial Sequence
  Oligonucleotide primer for the detection of SNP TSC0019625
gaaaaaaaaact

SEQ ID NO: 301723 - DNA, 12 bp, Artificial Sequence
  Oligonucleotide primer for the detection of SNP TSC0019625
gggtttagggta

SEQ ID NO: 301724 - DNA, 12 bp, Artificial Sequence
  Oligonucleotide primer for the detection of SNP TSC0019627
acattctcacaa

SEQ ID NO: 301725 - DNA, 12 bp, Artificial Sequence
  Oligonucleotide primer for the detection of SNP TSC0019627
acgttctcacaa

SEQ ID NO: 301726 - DNA, 12 bp, Artificial Sequence
  Oligonucleotide primer for the detection of SNP TSC0019627
ttttattaggtt

SEQ ID NO: 301727 - DNA, 12 bp, Artificial Sequence
  Oligonucleotide primer for the detection of SNP TSC0019627
ccctattaaatt

SEQ ID NO: 301728 - DNA, 12 bp, Artificial Sequence
  Oligonucleotide primer for the detection of SNP TSC0019627
atgtttttataa

SEQ ID NO: 301729 - DNA, 12 bp, Artificial Sequence
  Oligonucleotide primer for the detection of SNP TSC0019627
acgtttttataa

SEQ ID NO: 301730 - DNA, 12 bp, Artificial Sequence
  Oligonucleotide primer for the detection of SNP TSC0019628
ttatccacaaaa

SEQ ID NO: 301731 - DNA, 12 bp, Artificial Sequence
  Oligonucleotide primer for the detection of SNP TSC0019628
agtgttgggttt

SEQ ID NO: 301732 - DNA, 12 bp, Artificial Sequence
  Oligonukleotid-Primer
agcgttgggttt

SEQ ID NO: 301733 - DNA, 12 bp, Artificial Sequence
  Oligonucleotide primer for the detection of SNP TSC0019628
aacactaaacct

SEQ ID NO: 301734 - DNA, 12 bp, Artificial Sequence
  Oligonucleotide primer for the detection of SNP TSC0019628
aacgctaaacct

SEQ ID NO: 301735 - DNA, 12 bp, Artificial Sequence
  Oligonucleotide primer for the detection of SNP TSC0019628
gttttgtttata

SEQ ID NO: 301736 - DNA, 12 bp, Artificial Sequence
  Oligonucleotide primer for the detection of SNP TSC0019629
caacaaaaaact

SEQ ID NO: 301737 - DNA, 12 bp, Artificial Sequence
  Oligonucleotide primer for the detection of SNP TSC0019629
tgagagaaaggg

SEQ ID NO: 301738 - DNA, 12 bp, Artificial Sequence
  Oligonucleotide primer for the detection of SNP TSC0019632
aaccaatcccaa

SEQ ID NO: 301739 - DNA, 12 bp, Artificial Sequence
  Oligonucleotide primer for the detection of SNP TSC0019632
aaccaatcccga

SEQ ID NO: 301740 - DNA, 12 bp, Artificial Sequence
  Oligonucleotide primer for the detection of SNP TSC0019632
aatattattttt

SEQ ID NO: 301741 - DNA, 12 bp, Artificial Sequence
  Oligonucleotide primer for the detection of SNP TSC0019632
aatattattttc

SEQ ID NO: 301742 - DNA, 12 bp, Artificial Sequence
  Oligonucleotide primer for the detection of SNP TSC0019632
taacattatcct

SEQ ID NO: 301743 - DNA, 12 bp, Artificial Sequence
  Oligonucleotide primer for the detection of SNP TSC0019632
aattaattttga

SEQ ID NO: 301744 - DNA, 12 bp, Artificial Sequence
  Oligonucleotide primer for the detection of SNP TSC0019632
aattaatttcga

SEQ ID NO: 301745 - DNA, 12 bp, Artificial Sequence
  Oligonucleotide primer for the detection of SNP TSC0019633
atatctataccc

SEQ ID NO: 301746 - DNA, 12 bp, Artificial Sequence
  Oligonucleotide primer for the detection of SNP TSC0019633
gatttggggtat

SEQ ID NO: 301747 - DNA, 12 bp, Artificial Sequence
  Oligonucleotide primer for the detection of SNP TSC0019633
aatttaaaacat

SEQ ID NO: 301748 - DNA, 12 bp, Artificial Sequence
  Oligonucleotide primer for the detection of SNP TSC0019634
aaaatcaaacca

SEQ ID NO: 301749 - DNA, 12 bp, Artificial Sequence
  Oligonucleotide primer for the detection of SNP TSC0019634
tgaagttttaat

SEQ ID NO: 301750 - DNA, 12 bp, Artificial Sequence
  Oligonucleotide primer for the detection of SNP TSC0019634
ttaaaactctaa

SEQ ID NO: 301751 - DNA, 12 bp, Artificial Sequence
  Oligonucleotide primer for the detection of SNP TSC0019634
agaattaagtta

SEQ ID NO: 301752 - DNA, 12 bp, Artificial Sequence
  Oligonucleotide primer for the detection of SNP TSC0019635
atacttattccc

SEQ ID NO: 301753 - DNA, 12 bp, Artificial Sequence
  Oligonucleotide primer for the detection of SNP TSC0019635
aaaaaaaaaagg

SEQ ID NO: 301754 - DNA, 12 bp, Artificial Sequence
  Oligonucleotide primer for the detection of SNP TSC0019636
aatattaaaacc

SEQ ID NO: 301755 - DNA, 12 bp, Artificial Sequence
  Oligonucleotide primer for the detection of SNP TSC0019636
ttttgggtttta

SEQ ID NO: 301756 - DNA, 12 bp, Artificial Sequence
  Oligonucleotide primer for the detection of SNP TSC0019638
ttgagtttgtga

SEQ ID NO: 301757 - DNA, 12 bp, Artificial Sequence
  Oligonucleotide primer for the detection of SNP TSC0019639
tgtaaatatggt

SEQ ID NO: 301758 - DNA, 12 bp, Artificial Sequence
  Oligonucleotide primer for the detection of SNP TSC0019640
caactttcaaac

SEQ ID NO: 301759 - DNA, 12 bp, Artificial Sequence
  Oligonucleotide primer for the detection of SNP TSC0019640
aatgtaaatagg

SEQ ID NO: 301760 - DNA, 12 bp, Artificial Sequence
  Oligonucleotide primer for the detection of SNP TSC0019641
tattccttatac

SEQ ID NO: 301761 - DNA, 12 bp, Artificial Sequence
  Oligonucleotide primer for the detection of SNP TSC0019641
tctcaaaataaa

SEQ ID NO: 301762 - DNA, 12 bp, Artificial Sequence
  Oligonucleotide primer for the detection of SNP TSC0019641
tattttttatgt

SEQ ID NO: 301763 - DNA, 12 bp, Artificial Sequence
  Oligonucleotide primer for the detection of SNP TSC0019642
taatttgtaaaa

SEQ ID NO: 301764 - DNA, 12 bp, Artificial Sequence
  Oligonucleotide primer for the detection of SNP TSC0019643
cccttctcaata

SEQ ID NO: 301765 - DNA, 12 bp, Artificial Sequence
  Oligonucleotide primer for the detection of SNP TSC0019643
taaaaataaaga

SEQ ID NO: 301766 - DNA, 12 bp, Artificial Sequence
  Oligonucleotide primer for the detection of SNP TSC0019644
tataaatataca

SEQ ID NO: 301767 - DNA, 12 bp, Artificial Sequence
  Oligonucleotide primer for the detection of SNP TSC0019644
tttggttgggtt

SEQ ID NO: 301768 - DNA, 12 bp, Artificial Sequence
  Oligonucleotide primer for the detection of SNP TSC0019644
tttggtcgggtt

SEQ ID NO: 301769 - DNA, 12 bp, Artificial Sequence
  Oligonucleotide primer for the detection of SNP TSC0019644
tctaatcaaacc

SEQ ID NO: 301770 - DNA, 12 bp, Artificial Sequence
  Oligonucleotide primer for the detection of SNP TSC0019644
tctaatcgaacc

SEQ ID NO: 301771 - DNA, 12 bp, Artificial Sequence
  Oligonucleotide primer for the detection of SNP TSC0019644
tatgggtgtgta

SEQ ID NO: 301772 - DNA, 12 bp, Artificial Sequence
  Oligonucleotide primer for the detection of SNP TSC0019645
atactaaataaa

SEQ ID NO: 301773 - DNA, 12 bp, Artificial Sequence
  Oligonucleotide primer for the detection of SNP TSC0019645
tatgttttggtt

SEQ ID NO: 301774 - DNA, 12 bp, Artificial Sequence
  Oligonucleotide primer for the detection of SNP TSC0019645
cataccctaacc

SEQ ID NO: 301775 - DNA, 12 bp, Artificial Sequence
  Oligonucleotide primer for the detection of SNP TSC0019645
gtgttgagtgga

SEQ ID NO: 301776 - DNA, 12 bp, Artificial Sequence
  Oligonucleotide primer for the detection of SNP TSC0019646
attttatatgta

SEQ ID NO: 301777 - DNA, 12 bp, Artificial Sequence
  Oligonucleotide primer for the detection of SNP TSC0019646
attttatacgta

SEQ ID NO: 301778 - DNA, 12 bp, Artificial Sequence
  Oligonucleotide primer for the detection of SNP TSC0019651
ctacttaatctt

SEQ ID NO: 301779 - DNA, 12 bp, Artificial Sequence
  Oligonucleotide primer for the detection of SNP TSC0019651
agtttttttgga

SEQ ID NO: 301780 - DNA, 12 bp, Artificial Sequence
  Oligonucleotide primer for the detection of SNP TSC0019653
atcatttcaatt

SEQ ID NO: 301781 - DNA, 12 bp, Artificial Sequence
  Oligonucleotide primer for the detection of SNP TSC0019653
gattttgaataa

SEQ ID NO: 301782 - DNA, 12 bp, Artificial Sequence
  Oligonucleotide primer for the detection of SNP TSC0019654
tccaaatcaatc

SEQ ID NO: 301783 - DNA, 12 bp, Artificial Sequence
  Oligonucleotide primer for the detection of SNP TSC0019654
tccgaatcaatc

SEQ ID NO: 301784 - DNA, 12 bp, Artificial Sequence
  Oligonucleotide primer for the detection of SNP TSC0019654
tttaaatttcgg

SEQ ID NO: 301785 - DNA, 12 bp, Artificial Sequence
  Oligonucleotide primer for the detection of SNP TSC0019654
cccaaatctcaa

SEQ ID NO: 301786 - DNA, 12 bp, Artificial Sequence
  Oligonucleotide primer for the detection of SNP TSC0019654
cccaaatctcga

SEQ ID NO: 301787 - DNA, 12 bp, Artificial Sequence
  Oligonucleotide primer for the detection of SNP TSC0019654
tttgggttagtt

SEQ ID NO: 301788 - DNA, 12 bp, Artificial Sequence
  Oligonucleotide primer for the detection of SNP TSC0019654
ttcgggttagtt

SEQ ID NO: 301789 - DNA, 12 bp, Artificial Sequence
  Oligonucleotide primer for the detection of SNP TSC0019654
tttgggttagtc

SEQ ID NO: 301790 - DNA, 12 bp, Artificial Sequence
  Oligonucleotide primer for the detection of SNP TSC0019654
ttcgggttagtc

SEQ ID NO: 301791 - DNA, 12 bp, Artificial Sequence
  Oligonucleotide primer for the detection of SNP TSC0019655
atacacaaacac

SEQ ID NO: 301792 - DNA, 12 bp, Artificial Sequence
  Oligonucleotide primer for the detection of SNP TSC0019655
atacacaaacgc

SEQ ID NO: 301793 - DNA, 12 bp, Artificial Sequence
  Oligonucleotide primer for the detection of SNP TSC0019655
atacgcaaacac

SEQ ID NO: 301794 - DNA, 12 bp, Artificial Sequence
  Oligonucleotide primer for the detection of SNP TSC0019655
atacgcaaacgc

SEQ ID NO: 301795 - DNA, 12 bp, Artificial Sequence
  Oligonucleotide primer for the detection of SNP TSC0019655
ttttgggagttg

SEQ ID NO: 301796 - DNA, 12 bp, Artificial Sequence
  Oligonucleotide primer for the detection of SNP TSC0019655
tttcgggagttg

SEQ ID NO: 301797 - DNA, 12 bp, Artificial Sequence
  Oligonucleotide primer for the detection of SNP TSC0019655
ttttgggagtcg

SEQ ID NO: 301798 - DNA, 12 bp, Artificial Sequence
  Oligonucleotide primer for the detection of SNP TSC0019655
tttcgggagtcg

SEQ ID NO: 301799 - DNA, 12 bp, Artificial Sequence
  Oligonucleotide primer for the detection of SNP TSC0019655
cctcaaaaatca

SEQ ID NO: 301800 - DNA, 12 bp, Artificial Sequence
  Oligonucleotide primer for the detection of SNP TSC0019655
cctcaaaaatcg

SEQ ID NO: 301801 - DNA, 12 bp, Artificial Sequence
  Oligonucleotide primer for the detection of SNP TSC0019655
cctcgaaaatca

SEQ ID NO: 301802 - DNA, 12 bp, Artificial Sequence
  Oligonucleotide primer for the detection of SNP TSC0019655
cctcgaaaatcg

SEQ ID NO: 301803 - DNA, 12 bp, Artificial Sequence
  Oligonucleotide primer for the detection of SNP TSC0019655
gtgtgtaggtgt

SEQ ID NO: 301804 - DNA, 12 bp, Artificial Sequence
  Oligonucleotide primer for the detection of SNP TSC0019655
gtgcgtaggtgt

SEQ ID NO: 301805 - DNA, 12 bp, Artificial Sequence
  Oligonucleotide primer for the detection of SNP TSC0019655
gtgtgtaggcgt

SEQ ID NO: 301806 - DNA, 12 bp, Artificial Sequence
  Oligonucleotide primer for the detection of SNP TSC0019655
gtgcgtaggcgt

SEQ ID NO: 301807 - DNA, 12 bp, Artificial Sequence
  Oligonucleotide primer for the detection of SNP TSC0019656
ctataaaaacaa

SEQ ID NO: 301808 - DNA, 12 bp, Artificial Sequence
  Oligonucleotide primer for the detection of SNP TSC0019656
ataaatgtagtt

SEQ ID NO: 301809 - DNA, 12 bp, Artificial Sequence
  Oligonucleotide primer for the detection of SNP TSC0019656
ataaatgtagtc

SEQ ID NO: 301810 - DNA, 12 bp, Artificial Sequence
  Oligonucleotide primer for the detection of SNP TSC0019656
acaaatataacc

SEQ ID NO: 301811 - DNA, 12 bp, Artificial Sequence
  Oligonucleotide primer for the detection of SNP TSC0019656
ttgtgaggatag

SEQ ID NO: 301812 - DNA, 12 bp, Artificial Sequence
  Oligonucleotide primer for the detection of SNP TSC0019657
ctccttaataaa

SEQ ID NO: 301813 - DNA, 12 bp, Artificial Sequence
  Oligonucleotide primer for the detection of SNP TSC0019657
ttttttatgttg

SEQ ID NO: 301814 - DNA, 12 bp, Artificial Sequence
  Oligonucleotide primer for the detection of SNP TSC0019657
tccttcatatta

SEQ ID NO: 301815 - DNA, 12 bp, Artificial Sequence
  Oligonucleotide primer for the detection of SNP TSC0019657
ttttttgatgag

SEQ ID NO: 301816 - DNA, 12 bp, Artificial Sequence
  Oligonucleotide primer for the detection of SNP TSC0019658
tatacaatatac

SEQ ID NO: 301817 - DNA, 12 bp, Artificial Sequence
  Oligonucleotide primer for the detection of SNP TSC0019658
tataattaataa

SEQ ID NO: 301818 - DNA, 12 bp, Artificial Sequence
  Oligonucleotide primer for the detection of SNP TSC0019659
taacaaacaaat

SEQ ID NO: 301819 - DNA, 12 bp, Artificial Sequence
  Oligonucleotide primer for the detection of SNP TSC0019659
taatgattatta

SEQ ID NO: 301820 - DNA, 12 bp, Artificial Sequence
  Oligonucleotide primer for the detection of SNP TSC0019660
ccatttatcacc

SEQ ID NO: 301821 - DNA, 12 bp, Artificial Sequence
  Oligonucleotide primer for the detection of SNP TSC0019660
tatttggattta

SEQ ID NO: 301822 - DNA, 12 bp, Artificial Sequence
  Oligonucleotide primer for the detection of SNP TSC0019661
aacatacaactc

SEQ ID NO: 301823 - DNA, 12 bp, Artificial Sequence
  Oligonucleotide primer for the detection of SNP TSC0019661
gtagatgtttta

SEQ ID NO: 301824 - DNA, 12 bp, Artificial Sequence
  Oligonucleotide primer for the detection of SNP TSC0019662
ccacaaacacat

SEQ ID NO: 301825 - DNA, 12 bp, Artificial Sequence
  Oligonucleotide primer for the detection of SNP TSC0019662
tgtataggtgtg

SEQ ID NO: 301826 - DNA, 12 bp, Artificial Sequence
  Oligonucleotide primer for the detection of SNP TSC0019663
agaattgtgttg

SEQ ID NO: 301827 - DNA, 12 bp, Artificial Sequence
  Oligonucleotide primer for the detection of SNP TSC0019663
agaattgcgttg

SEQ ID NO: 301828 - DNA, 12 bp, Artificial Sequence
  Oligonucleotide primer for the detection of SNP TSC0019663
agaattgtgtcg

SEQ ID NO: 301829 - DNA, 12 bp, Artificial Sequence
  Oligonucleotide primer for the detection of SNP TSC0019663
agaattgcgtcg

SEQ ID NO: 301830 - DNA, 12 bp, Artificial Sequence
  Oligonucleotide primer for the detection of SNP TSC0019663
aaaactacacca

SEQ ID NO: 301831 - DNA, 12 bp, Artificial Sequence
  Oligonucleotide primer for the detection of SNP TSC0019663
aaaactacaccg

SEQ ID NO: 301832 - DNA, 12 bp, Artificial Sequence
  Oligonucleotide primer for the detection of SNP TSC0019663
aaaactacgcca

SEQ ID NO: 301833 - DNA, 12 bp, Artificial Sequence
  Oligonucleotide primer for the detection of SNP TSC0019663
aaaactacgccg

SEQ ID NO: 301834 - DNA, 12 bp, Artificial Sequence
  Oligonucleotide primer for the detection of SNP TSC0019663
gttgtagtagat

SEQ ID NO: 301835 - DNA, 12 bp, Artificial Sequence
  Oligonucleotide primer for the detection of SNP TSC0019664
aggaaagtgaat

SEQ ID NO: 301836 - DNA, 12 bp, Artificial Sequence
  Oligonucleotide primer for the detection of SNP TSC0019664
aggaaagtgaac

SEQ ID NO: 301837 - DNA, 12 bp, Artificial Sequence
  Oligonucleotide primer for the detection of SNP TSC0019664
ggaaatagtgtt

SEQ ID NO: 301838 - DNA, 12 bp, Artificial Sequence
  Oligonucleotide primer for the detection of SNP TSC0019665
ataataataccc

SEQ ID NO: 301839 - DNA, 12 bp, Artificial Sequence
  Oligonucleotide primer for the detection of SNP TSC0019665
taagagagtatt

SEQ ID NO: 301840 - DNA, 12 bp, Artificial Sequence
  Oligonucleotide primer for the detection of SNP TSC0019665
caaaaaaatact

SEQ ID NO: 301841 - DNA, 12 bp, Artificial Sequence
  Oligonucleotide primer for the detection of SNP TSC0019665
ataatgatattt

SEQ ID NO: 301842 - DNA, 12 bp, Artificial Sequence
  Oligonucleotide primer for the detection of SNP TSC0019667
caacccaaaaac

SEQ ID NO: 301843 - DNA, 12 bp, Artificial Sequence
  Oligonucleotide primer for the detection of SNP TSC0019667
ggtaaaaaggtg

SEQ ID NO: 301844 - DNA, 12 bp, Artificial Sequence
  Oligonucleotide primer for the detection of SNP TSC0019667
ggtaaaaaggcg

SEQ ID NO: 301845 - DNA, 12 bp, Artificial Sequence
  Oligonucleotide primer for the detection of SNP TSC0019673
ttcctacaaaac

SEQ ID NO: 301846 - DNA, 12 bp, Artificial Sequence
  Oligonucleotide primer for the detection of SNP TSC0019673
ttttggaagtga

SEQ ID NO: 301847 - DNA, 12 bp, Artificial Sequence
  Oligonucleotide primer for the detection of SNP TSC0019673
ctctaaaaataa

SEQ ID NO: 301848 - DNA, 12 bp, Artificial Sequence
  Oligonucleotide primer for the detection of SNP TSC0019673
tttttatagagt

SEQ ID NO: 301849 - DNA, 12 bp, Artificial Sequence
  Oligonucleotide primer for the detection of SNP TSC0019673
tttttatagagc

SEQ ID NO: 301850 - DNA, 12 bp, Artificial Sequence
  Oligonucleotide primer for the detection of SNP TSC0019674
aacctttcaaaa

SEQ ID NO: 301851 - DNA, 12 bp, Artificial Sequence
  Oligonucleotide primer for the detection of SNP TSC0019674
aacctttcgaaa

SEQ ID NO: 301852 - DNA, 12 bp, Artificial Sequence
  Oligonucleotide primer for the detection of SNP TSC0019674
attatagtatgt

SEQ ID NO: 301853 - DNA, 12 bp, Artificial Sequence
  Oligonucleotide primer for the detection of SNP TSC0019674
attatagtacgt

SEQ ID NO: 301854 - DNA, 12 bp, Artificial Sequence
  Oligonucleotide primer for the detection of SNP TSC0019674
atcacaacacac

SEQ ID NO: 301855 - DNA, 12 bp, Artificial Sequence
  Oligonucleotide primer for the detection of SNP TSC0019674
atcacaacacgc

SEQ ID NO: 301856 - DNA, 12 bp, Artificial Sequence
  Oligonucleotide primer for the detection of SNP TSC0019674
ggttttttgagg

SEQ ID NO: 301857 - DNA, 12 bp, Artificial Sequence
  Oligonucleotide primer for the detection of SNP TSC0019674
ggtttttcgagg

SEQ ID NO: 301858 - DNA, 12 bp, Artificial Sequence
  Oligonucleotide primer for the detection of SNP TSC0019675
ccacaacataac

SEQ ID NO: 301859 - DNA, 12 bp, Artificial Sequence
  Oligonucleotide primer for the detection of SNP TSC0019675
ccacaacgtaac

SEQ ID NO: 301860 - DNA, 12 bp, Artificial Sequence
  Oligonucleotide primer for the detection of SNP TSC0019675
ccacgacataac

SEQ ID NO: 301861 - DNA, 12 bp, Artificial Sequence
  Oligonucleotide primer for the detection of SNP TSC0019675
ccacgacgtaac

SEQ ID NO: 301862 - DNA, 12 bp, Artificial Sequence
  Oligonucleotide primer for the detection of SNP TSC0019675
agagtagtttag

SEQ ID NO: 301863 - DNA, 12 bp, Artificial Sequence
  Oligonucleotide primer for the detection of SNP TSC0019677
ctaatataacaa

SEQ ID NO: 301864 - DNA, 12 bp, Artificial Sequence
  Oligonucleotide primer for the detection of SNP TSC0019677
cccaaaaaataa

SEQ ID NO: 301865 - DNA, 12 bp, Artificial Sequence
  Oligonucleotide primer for the detection of SNP TSC0019677
tgtgatagtttt

SEQ ID NO: 301866 - DNA, 12 bp, Artificial Sequence
  Oligonucleotide primer for the detection of SNP TSC0019677
tgtgatagtttc

SEQ ID NO: 301867 - DNA, 12 bp, Artificial Sequence
  Oligonucleotide primer for the detection of SNP TSC0019678
aaaccacctcta

SEQ ID NO: 301868 - DNA, 12 bp, Artificial Sequence
  Oligonucleotide primer for the detection of SNP TSC0019678
aaaccgcctcta

SEQ ID NO: 301869 - DNA, 12 bp, Artificial Sequence
  Oligonucleotide primer for the detection of SNP TSC0019678
tctccctattac

SEQ ID NO: 301870 - DNA, 12 bp, Artificial Sequence
  Oligonucleotide primer for the detection of SNP TSC0019679
aaaataataccc

SEQ ID NO: 301871 - DNA, 12 bp, Artificial Sequence
  Oligonucleotide primer for the detection of SNP TSC0019679
ggttaattttag

SEQ ID NO: 301872 - DNA, 12 bp, Artificial Sequence
  Oligonucleotide primer for the detection of SNP TSC0019680
aaaacatttctc

SEQ ID NO: 301873 - DNA, 12 bp, Artificial Sequence
  Oligonucleotide primer for the detection of SNP TSC0019680
ttcgggtttttt

SEQ ID NO: 301874 - DNA, 12 bp, Artificial Sequence
  Oligonucleotide primer for the detection of SNP TSC0019681
acctaaatacac

SEQ ID NO: 301875 - DNA, 12 bp, Artificial Sequence
  Oligonucleotide primer for the detection of SNP TSC0019681
acctaaatacgc

SEQ ID NO: 301876 - DNA, 12 bp, Artificial Sequence
  Oligonucleotide primer for the detection of SNP TSC0019681
gaggtttagaga

SEQ ID NO: 301877 - DNA, 12 bp, Artificial Sequence
  Oligonucleotide primer for the detection of SNP TSC0019681
atttgaatatgt

SEQ ID NO: 301878 - DNA, 12 bp, Artificial Sequence
  Oligonucleotide primer for the detection of SNP TSC0019681
atttgaatacgt

SEQ ID NO: 301879 - DNA, 12 bp, Artificial Sequence
  Oligonucleotide primer for the detection of SNP TSC0019682
acctttcaatct

SEQ ID NO: 301880 - DNA, 12 bp, Artificial Sequence
  Oligonucleotide primer for the detection of SNP TSC0019683
acttacaccaat

SEQ ID NO: 301881 - DNA, 12 bp, Artificial Sequence
  Oligonucleotide primer for the detection of SNP TSC0019683
agtgtttagggg

SEQ ID NO: 301882 - DNA, 12 bp, Artificial Sequence
  Oligonucleotide primer for the detection of SNP TSC0019683
aatacccaaaaa

SEQ ID NO: 301883 - DNA, 12 bp, Artificial Sequence
  Oligonucleotide primer for the detection of SNP TSC0019683
atttatattagt

SEQ ID NO: 301884 - DNA, 12 bp, Artificial Sequence
  Oligonucleotide primer for the detection of SNP TSC0019685
ctttactaattc

SEQ ID NO: 301885 - DNA, 12 bp, Artificial Sequence
  Oligonucleotide primer for the detection of SNP TSC0019685
aggaatatttag

SEQ ID NO: 301886 - DNA, 12 bp, Artificial Sequence
  Oligonukleotid-Primer
ccaacttaacta

SEQ ID NO: 301887 - DNA, 12 bp, Artificial Sequence
  Oligonucleotide primer for the detection of SNP TSC0019686
gtattttttaat

SEQ ID NO: 301888 - DNA, 12 bp, Artificial Sequence
  Oligonucleotide primer for the detection of SNP TSC0019686
aatattccttaa

SEQ ID NO: 301889 - DNA, 12 bp, Artificial Sequence
  Oligonucleotide primer for the detection of SNP TSC0019686
ttaatttgattg

SEQ ID NO: 301890 - DNA, 12 bp, Artificial Sequence
  Oligonucleotide primer for the detection of SNP TSC0019687
tcatattaataa

SEQ ID NO: 301891 - DNA, 12 bp, Artificial Sequence
  Oligonucleotide primer for the detection of SNP TSC0019687
taagtttttatg

SEQ ID NO: 301892 - DNA, 12 bp, Artificial Sequence
  Oligonucleotide primer for the detection of SNP TSC0019687
caaacttttata

SEQ ID NO: 301893 - DNA, 12 bp, Artificial Sequence
  Oligonucleotide primer for the detection of SNP TSC0019687
ttatattagtaa

SEQ ID NO: 301894 - DNA, 12 bp, Artificial Sequence
  Oligonucleotide primer for the detection of SNP TSC0019688
aaatttaaacac

SEQ ID NO: 301895 - DNA, 12 bp, Artificial Sequence
  Oligonucleotide primer for the detection of SNP TSC0019688
aaagtatgtaag

SEQ ID NO: 301896 - DNA, 12 bp, Artificial Sequence
  Oligonucleotide primer for the detection of SNP TSC0019689
tccttccaacct

SEQ ID NO: 301897 - DNA, 12 bp, Artificial Sequence
  Oligonucleotide primer for the detection of SNP TSC0019689
aatggtggagtg

SEQ ID NO: 301898 - DNA, 12 bp, Artificial Sequence
  Oligonucleotide primer for the detection of SNP TSC0019689
aatggtggagcg

SEQ ID NO: 301899 - DNA, 12 bp, Artificial Sequence
  Oligonucleotide primer for the detection of SNP TSC0019691
tcattaaacatt

SEQ ID NO: 301900 - DNA, 12 bp, Artificial Sequence
  Oligonucleotide primer for the detection of SNP TSC0019691
atatggaagagg

SEQ ID NO: 301901 - DNA, 12 bp, Artificial Sequence
  Oligonucleotide primer for the detection of SNP TSC0019692
aattctcaatat

SEQ ID NO: 301902 - DNA, 12 bp, Artificial Sequence
  Oligonucleotide primer for the detection of SNP TSC0019692
aatattgaaata

SEQ ID NO: 301903 - DNA, 12 bp, Artificial Sequence
  Oligonucleotide primer for the detection of SNP TSC0019692
aacactaaaaca

SEQ ID NO: 301904 - DNA, 12 bp, Artificial Sequence
  Oligonucleotide primer for the detection of SNP TSC0019692
ggtttttaatat

SEQ ID NO: 301905 - DNA, 12 bp, Artificial Sequence
  Oligonucleotide primer for the detection of SNP TSC0019693
atcactatatat

SEQ ID NO: 301906 - DNA, 12 bp, Artificial Sequence
  Oligonucleotide primer for the detection of SNP TSC0019693
atttatattgga

SEQ ID NO: 301907 - DNA, 12 bp, Artificial Sequence
  Oligonucleotide primer for the detection of SNP TSC0019695
catttaaaaact

SEQ ID NO: 301908 - DNA, 12 bp, Artificial Sequence
  Oligonucleotide primer for the detection of SNP TSC0019695
agttttgttatg

SEQ ID NO: 301909 - DNA, 12 bp, Artificial Sequence
  Oligonucleotide primer for the detection of SNP TSC0019695
aactttaccata

SEQ ID NO: 301910 - DNA, 12 bp, Artificial Sequence
  Oligonucleotide primer for the detection of SNP TSC0019695
tatttgaagatt

SEQ ID NO: 301911 - DNA, 12 bp, Artificial Sequence
  Oligonucleotide primer for the detection of SNP TSC0019696
tattataaaaaa

SEQ ID NO: 301912 - DNA, 12 bp, Artificial Sequence
  Oligonucleotide primer for the detection of SNP TSC0019696
gtttgaaaataa

SEQ ID NO: 301913 - DNA, 12 bp, Artificial Sequence
  Oligonucleotide primer for the detection of SNP TSC0019696
acctaaaaacaa

SEQ ID NO: 301914 - DNA, 12 bp, Artificial Sequence
  Oligonucleotide primer for the detection of SNP TSC0019696
tattatgggggg

SEQ ID NO: 301915 - DNA, 12 bp, Artificial Sequence
  Oligonucleotide primer for the detection of SNP TSC0019701
aaaccccaaaac

SEQ ID NO: 301916 - DNA, 12 bp, Artificial Sequence
  Oligonucleotide primer for the detection of SNP TSC0019701
aaaccccgaaac

SEQ ID NO: 301917 - DNA, 12 bp, Artificial Sequence
  Oligonucleotide primer for the detection of SNP TSC0019701
gttggttagtaa

SEQ ID NO: 301918 - DNA, 12 bp, Artificial Sequence
  Oligonucleotide primer for the detection of SNP TSC0019706
tttatataggtg

SEQ ID NO: 301919 - DNA, 12 bp, Artificial Sequence
  Oligonucleotide primer for the detection of SNP TSC0019707
ctattaatataa

SEQ ID NO: 301920 - DNA, 12 bp, Artificial Sequence
  Oligonucleotide primer for the detection of SNP TSC0019707
attttatagaga

SEQ ID NO: 301921 - DNA, 12 bp, Artificial Sequence
  Oligonucleotide primer for the detection of SNP TSC0019707
atcccacaaaaa

SEQ ID NO: 301922 - DNA, 12 bp, Artificial Sequence
  Oligonucleotide primer for the detection of SNP TSC0019707
tattagtgtggt

SEQ ID NO: 301923 - DNA, 12 bp, Artificial Sequence
  Oligonucleotide primer for the detection of SNP TSC0019707
tattagtgtggc

SEQ ID NO: 301924 - DNA, 12 bp, Artificial Sequence
  Oligonucleotide primer for the detection of SNP TSC0019708
tacttactcatt

SEQ ID NO: 301925 - DNA, 12 bp, Artificial Sequence
  Oligonucleotide primer for the detection of SNP TSC0019708
aatactccccca

SEQ ID NO: 301926 - DNA, 12 bp, Artificial Sequence
  Oligonucleotide primer for the detection of SNP TSC0019709
ataacttctcta

SEQ ID NO: 301927 - DNA, 12 bp, Artificial Sequence
  Oligonucleotide primer for the detection of SNP TSC0019709
ttggtagatttt

SEQ ID NO: 301928 - DNA, 12 bp, Artificial Sequence
  Oligonucleotide primer for the detection of SNP TSC0019709
ttaacaaatccc

SEQ ID NO: 301929 - DNA, 12 bp, Artificial Sequence
  Oligonucleotide primer for the detection of SNP TSC0019709
gtggtttttttg

SEQ ID NO: 301930 - DNA, 12 bp, Artificial Sequence
  Oligonucleotide primer for the detection of SNP TSC0019710
tggttttgattt

SEQ ID NO: 301931 - DNA, 12 bp, Artificial Sequence
  Oligonucleotide primer for the detection of SNP TSC0019710
taatcttaactt

SEQ ID NO: 301932 - DNA, 12 bp, Artificial Sequence
  Oligonucleotide primer for the detection of SNP TSC0019710
gaagaagaggta

SEQ ID NO: 301933 - DNA, 12 bp, Artificial Sequence
  Oligonucleotide primer for the detection of SNP TSC0019711
accttacctaaa

SEQ ID NO: 301934 - DNA, 12 bp, Artificial Sequence
  Oligonucleotide primer for the detection of SNP TSC0019711
aatgattatatt

SEQ ID NO: 301935 - DNA, 12 bp, Artificial Sequence
  Oligonucleotide primer for the detection of SNP TSC0019711
ataatcatacca

SEQ ID NO: 301936 - DNA, 12 bp, Artificial Sequence
  Oligonucleotide primer for the detection of SNP TSC0019711
ttttgtttgagt

SEQ ID NO: 301937 - DNA, 12 bp, Artificial Sequence
  Oligonucleotide primer for the detection of SNP TSC0019712
tgtttgtattat

SEQ ID NO: 301938 - DNA, 12 bp, Artificial Sequence
  Oligonucleotide primer for the detection of SNP TSC0019712
atacttacacta

SEQ ID NO: 301939 - DNA, 12 bp, Artificial Sequence
  Oligonucleotide primer for the detection of SNP TSC0019712
ttgtaaagaaat

SEQ ID NO: 301940 - DNA, 12 bp, Artificial Sequence
  Oligonucleotide primer for the detection of SNP TSC0019712
ttgtaaagaaac

SEQ ID NO: 301941 - DNA, 12 bp, Artificial Sequence
  Oligonucleotide primer for the detection of SNP TSC0019713
ttaccataacaa

SEQ ID NO: 301942 - DNA, 12 bp, Artificial Sequence
  Oligonucleotide primer for the detection of SNP TSC0019713
attaaggtttag

SEQ ID NO: 301943 - DNA, 12 bp, Artificial Sequence
  Oligonucleotide primer for the detection of SNP TSC0019713
atcaaaattcaa

SEQ ID NO: 301944 - DNA, 12 bp, Artificial Sequence
  Oligonucleotide primer for the detection of SNP TSC0019713
ttattatgataa

SEQ ID NO: 301945 - DNA, 12 bp, Artificial Sequence
  Oligonucleotide primer for the detection of SNP TSC0019714
tcctctcttcac

SEQ ID NO: 301946 - DNA, 12 bp, Artificial Sequence
  Oligonucleotide primer for the detection of SNP TSC0019714
agaagagaaatg

SEQ ID NO: 301947 - DNA, 12 bp, Artificial Sequence
  Oligonucleotide primer for the detection of SNP TSC0019715
ctcaaaacaaaa

SEQ ID NO: 301948 - DNA, 12 bp, Artificial Sequence
  Oligonucleotide primer for the detection of SNP TSC0019715
ctcgaaacaaaa

SEQ ID NO: 301949 - DNA, 12 bp, Artificial Sequence
  Oligonucleotide primer for the detection of SNP TSC0019715
tcccactatctc

SEQ ID NO: 301950 - DNA, 12 bp, Artificial Sequence
  Oligonucleotide primer for the detection of SNP TSC0019715
ttcggggtaggg

SEQ ID NO: 301951 - DNA, 12 bp, Artificial Sequence
  Oligonucleotide primer for the detection of SNP TSC0019719
acatccaaactc

SEQ ID NO: 301952 - DNA, 12 bp, Artificial Sequence
  Oligonucleotide primer for the detection of SNP TSC0019719
tatataatttga

SEQ ID NO: 301953 - DNA, 12 bp, Artificial Sequence
  Oligonucleotide primer for the detection of SNP TSC0019720
ctacacacaacc

SEQ ID NO: 301954 - DNA, 12 bp, Artificial Sequence
  Oligonucleotide primer for the detection of SNP TSC0019720
tttaagtttatt

SEQ ID NO: 301955 - DNA, 12 bp, Artificial Sequence
  Oligonucleotide primer for the detection of SNP TSC0019720
atccaaactcac

SEQ ID NO: 301956 - DNA, 12 bp, Artificial Sequence
  Oligonucleotide primer for the detection of SNP TSC0019720
tgtatataattt

SEQ ID NO: 301957 - DNA, 12 bp, Artificial Sequence
  Oligonucleotide primer for the detection of SNP TSC0019723
tatcccccccct

SEQ ID NO: 301958 - DNA, 12 bp, Artificial Sequence
  Oligonucleotide primer for the detection of SNP TSC0019723
tgtttttgttgg

SEQ ID NO: 301959 - DNA, 12 bp, Artificial Sequence
  Oligonucleotide primer for the detection of SNP TSC0019723
tgttttcgttgg

SEQ ID NO: 301960 - DNA, 12 bp, Artificial Sequence
  Oligonucleotide primer for the detection of SNP TSC0019724
tacctactccca

SEQ ID NO: 301961 - DNA, 12 bp, Artificial Sequence
  Oligonucleotide primer for the detection of SNP TSC0019724
tacctactcccg

SEQ ID NO: 301962 - DNA, 12 bp, Artificial Sequence
  Oligonucleotide primer for the detection of SNP TSC0019724
ccccccctccca

SEQ ID NO: 301963 - DNA, 12 bp, Artificial Sequence
  Oligonucleotide primer for the detection of SNP TSC0019724
tatttgtttttg

SEQ ID NO: 301964 - DNA, 12 bp, Artificial Sequence
  Oligonucleotide primer for the detection of SNP TSC0019724
tatttgttttcg

SEQ ID NO: 301965 - DNA, 12 bp, Artificial Sequence
  Oligonucleotide primer for the detection of SNP TSC0019725
tgagttatgatt

SEQ ID NO: 301966 - DNA, 12 bp, Artificial Sequence
  Oligonucleotide primer for the detection of SNP TSC0019725
taaactataatt

SEQ ID NO: 301967 - DNA, 12 bp, Artificial Sequence
  Oligonukleotid-Primer
ggagtgtagaag

SEQ ID NO: 301968 - DNA, 12 bp, Artificial Sequence
  Oligonucleotide primer for the detection of SNP TSC0019726
tttaattatgta

SEQ ID NO: 301969 - DNA, 12 bp, Artificial Sequence
  Oligonucleotide primer for the detection of SNP TSC0019727
ctctaaaatcaa

SEQ ID NO: 301970 - DNA, 12 bp, Artificial Sequence
  Oligonucleotide primer for the detection of SNP TSC0019727
gtgataatgata

SEQ ID NO: 301971 - DNA, 12 bp, Artificial Sequence
  Oligonukleotid-Primer
taacaataataa

SEQ ID NO: 301972 - DNA, 12 bp, Artificial Sequence
  Oligonucleotide primer for the detection of SNP TSC0019727
ttttgaggttag

SEQ ID NO: 301973 - DNA, 12 bp, Artificial Sequence
  Oligonucleotide primer for the detection of SNP TSC0019730
attataccaaac

SEQ ID NO: 301974 - DNA, 12 bp, Artificial Sequence
  Oligonucleotide primer for the detection of SNP TSC0019730
ttagtttgattg

SEQ ID NO: 301975 - DNA, 12 bp, Artificial Sequence
  Oligonucleotide primer for the detection of SNP TSC0019730
ccaatctaacta

SEQ ID NO: 301976 - DNA, 12 bp, Artificial Sequence
  Oligonucleotide primer for the detection of SNP TSC0019730
attgtattagat

SEQ ID NO: 301977 - DNA, 12 bp, Artificial Sequence
  Oligonucleotide primer for the detection of SNP TSC0019732
aaacatatatac

SEQ ID NO: 301978 - DNA, 12 bp, Artificial Sequence
  Oligonucleotide primer for the detection of SNP TSC0019732
ttagttttatgg

SEQ ID NO: 301979 - DNA, 12 bp, Artificial Sequence
  Oligonucleotide primer for the detection of SNP TSC0019732
ttagttttacgg

SEQ ID NO: 301980 - DNA, 12 bp, Artificial Sequence
  Oligonucleotide primer for the detection of SNP TSC0019733
caattcaaaaac

SEQ ID NO: 301981 - DNA, 12 bp, Artificial Sequence
  Oligonucleotide primer for the detection of SNP TSC0019733
atggtatgtata

SEQ ID NO: 301982 - DNA, 12 bp, Artificial Sequence
  Oligonucleotide primer for the detection of SNP TSC0019733
acggtatgtata

SEQ ID NO: 301983 - DNA, 12 bp, Artificial Sequence
  Oligonucleotide primer for the detection of SNP TSC0019733
acaatatacaca

SEQ ID NO: 301984 - DNA, 12 bp, Artificial Sequence
  Oligonucleotide primer for the detection of SNP TSC0019733
acgatatacaca

SEQ ID NO: 301985 - DNA, 12 bp, Artificial Sequence
  Oligonucleotide primer for the detection of SNP TSC0019733
tagtttaggggt

SEQ ID NO: 301986 - DNA, 12 bp, Artificial Sequence
  Oligonucleotide primer for the detection of SNP TSC0019734
tataatcatttt

SEQ ID NO: 301987 - DNA, 12 bp, Artificial Sequence
  Oligonucleotide primer for the detection of SNP TSC0019734
ttatagggagag

SEQ ID NO: 301988 - DNA, 12 bp, Artificial Sequence
  Oligonucleotide primer for the detection of SNP TSC0019736
taagtgtttatg

SEQ ID NO: 301989 - DNA, 12 bp, Artificial Sequence
  Oligonucleotide primer for the detection of SNP TSC0019737
actcaaacacca

SEQ ID NO: 301990 - DNA, 12 bp, Artificial Sequence
  Oligonucleotide primer for the detection of SNP TSC0019737
actcaaacgcca

SEQ ID NO: 301991 - DNA, 12 bp, Artificial Sequence
  Oligonucleotide primer for the detection of SNP TSC0019737
actcgaacacca

SEQ ID NO: 301992 - DNA, 12 bp, Artificial Sequence
  Oligonucleotide primer for the detection of SNP TSC0019737
actcgaacgcca

SEQ ID NO: 301993 - DNA, 12 bp, Artificial Sequence
  Oligonucleotide primer for the detection of SNP TSC0019737
gtatttttagtt

SEQ ID NO: 301994 - DNA, 12 bp, Artificial Sequence
  Oligonucleotide primer for the detection of SNP TSC0019737
gtatttttagtc

SEQ ID NO: 301995 - DNA, 12 bp, Artificial Sequence
  Oligonucleotide primer for the detection of SNP TSC0019737
caacaccctcaa

SEQ ID NO: 301996 - DNA, 12 bp, Artificial Sequence
  Oligonucleotide primer for the detection of SNP TSC0019737
atttgagtgtta

SEQ ID NO: 301997 - DNA, 12 bp, Artificial Sequence
  Oligonucleotide primer for the detection of SNP TSC0019737
attcgagtgtta

SEQ ID NO: 301998 - DNA, 12 bp, Artificial Sequence
  Oligonucleotide primer for the detection of SNP TSC0019737
atttgagcgtta

SEQ ID NO: 301999 - DNA, 12 bp, Artificial Sequence
  Oligonucleotide primer for the detection of SNP TSC0019737
attcgagcgtta

SEQ ID NO: 302000 - DNA, 12 bp, Artificial Sequence
  Oligonucleotide primer for the detection of SNP TSC0019738
ttaacttccatt

SEQ ID NO: 302001 - DNA, 12 bp, Artificial Sequence
  Oligonucleotide primer for the detection of SNP TSC0019738
tttttttagtag

SEQ ID NO: 302002 - DNA, 12 bp, Artificial Sequence
  Oligonucleotide primer for the detection of SNP TSC0019739
tatggtggtata

SEQ ID NO: 302003 - DNA, 12 bp, Artificial Sequence
  Oligonucleotide primer for the detection of SNP TSC0019740
cctaacatttct

SEQ ID NO: 302004 - DNA, 12 bp, Artificial Sequence
  Oligonucleotide primer for the detection of SNP TSC0019740
ttagtgggtatg

SEQ ID NO: 302005 - DNA, 12 bp, Artificial Sequence
  Oligonucleotide primer for the detection of SNP TSC0019741
cctaaaaccccc

SEQ ID NO: 302006 - DNA, 12 bp, Artificial Sequence
  Oligonucleotide primer for the detection of SNP TSC0019741
ggttggtagatg

SEQ ID NO: 302007 - DNA, 12 bp, Artificial Sequence
  Oligonucleotide primer for the detection of SNP TSC0019743
aacacccactat

SEQ ID NO: 302008 - DNA, 12 bp, Artificial Sequence
  Oligonucleotide primer for the detection of SNP TSC0019743
gttgaggtaggg

SEQ ID NO: 302009 - DNA, 12 bp, Artificial Sequence
  Oligonucleotide primer for the detection of SNP TSC0019744
aatacaaatctt

SEQ ID NO: 302010 - DNA, 12 bp, Artificial Sequence
  Oligonucleotide primer for the detection of SNP TSC0019744
ttgggtgatata

SEQ ID NO: 302011 - DNA, 12 bp, Artificial Sequence
  Oligonucleotide primer for the detection of SNP TSC0019744
gatgtaggtttt

SEQ ID NO: 302012 - DNA, 12 bp, Artificial Sequence
  Oligonucleotide primer for the detection of SNP TSC0019745
aaaaatcctcta

SEQ ID NO: 302013 - DNA, 12 bp, Artificial Sequence
  Oligonucleotide primer for the detection of SNP TSC0019745
gggtagttttgg

SEQ ID NO: 302014 - DNA, 12 bp, Artificial Sequence
  Oligonucleotide primer for the detection of SNP TSC0019748
actttaatttta

SEQ ID NO: 302015 - DNA, 12 bp, Artificial Sequence
  Oligonucleotide primer for the detection of SNP TSC0019748
atgagaataggg

SEQ ID NO: 302016 - DNA, 12 bp, Artificial Sequence
  Oligonucleotide primer for the detection of SNP TSC0019748
agttttgatttt

SEQ ID NO: 302017 - DNA, 12 bp, Artificial Sequence
  Oligonucleotide primer for the detection of SNP TSC0019749
atactttaacat

SEQ ID NO: 302018 - DNA, 12 bp, Artificial Sequence
  Oligonucleotide primer for the detection of SNP TSC0019749
aaatgttttttg

SEQ ID NO: 302019 - DNA, 12 bp, Artificial Sequence
  Oligonucleotide primer for the detection of SNP TSC0019751
aaaataacgata

SEQ ID NO: 302020 - DNA, 12 bp, Artificial Sequence
  Oligonucleotide primer for the detection of SNP TSC0019751
ttgggttgagtt

SEQ ID NO: 302021 - DNA, 12 bp, Artificial Sequence
  Oligonucleotide primer for the detection of SNP TSC0019751
tcgggttgagtt

SEQ ID NO: 302022 - DNA, 12 bp, Artificial Sequence
  Oligonucleotide primer for the detection of SNP TSC0019751
ccgaactaaact

SEQ ID NO: 302023 - DNA, 12 bp, Artificial Sequence
  Oligonucleotide primer for the detection of SNP TSC0019751
aggatggtggtg

SEQ ID NO: 302024 - DNA, 12 bp, Artificial Sequence
  Oligonucleotide primer for the detection of SNP TSC0019751
aggatggcggtg

SEQ ID NO: 302025 - DNA, 12 bp, Artificial Sequence
  Oligonucleotide primer for the detection of SNP TSC0019752
ctaaataaatct

SEQ ID NO: 302026 - DNA, 12 bp, Artificial Sequence
  Oligonucleotide primer for the detection of SNP TSC0019752
tttggattgtaa

SEQ ID NO: 302027 - DNA, 12 bp, Artificial Sequence
  Oligonucleotide primer for the detection of SNP TSC0019752
taaataagtttt

SEQ ID NO: 302028 - DNA, 12 bp, Artificial Sequence
  Oligonucleotide primer for the detection of SNP TSC0019753
aaacaaacctaa

SEQ ID NO: 302029 - DNA, 12 bp, Artificial Sequence
  Oligonucleotide primer for the detection of SNP TSC0019754
ttatcataacat

SEQ ID NO: 302030 - DNA, 12 bp, Artificial Sequence
  Oligonucleotide primer for the detection of SNP TSC0019754
ggagtaggggta

SEQ ID NO: 302031 - DNA, 12 bp, Artificial Sequence
  Oligonucleotide primer for the detection of SNP TSC0019755
cacctacctaaa

SEQ ID NO: 302032 - DNA, 12 bp, Artificial Sequence
  Oligonucleotide primer for the detection of SNP TSC0019755
ttaatttaggtg

SEQ ID NO: 302033 - DNA, 12 bp, Artificial Sequence
  Oligonucleotide primer for the detection of SNP TSC0019755
ccaatctaaata

SEQ ID NO: 302034 - DNA, 12 bp, Artificial Sequence
  Oligonucleotide primer for the detection of SNP TSC0019755
tatttgtttgaa

SEQ ID NO: 302035 - DNA, 12 bp, Artificial Sequence
  Oligonucleotide primer for the detection of SNP TSC0019758
aatttccttaac

SEQ ID NO: 302036 - DNA, 12 bp, Artificial Sequence
  Oligonucleotide primer for the detection of SNP TSC0019759
aaatatttaaat

SEQ ID NO: 302037 - DNA, 12 bp, Artificial Sequence
  Oligonucleotide primer for the detection of SNP TSC0019760
ttatcaattcat

SEQ ID NO: 302038 - DNA, 12 bp, Artificial Sequence
  Oligonucleotide primer for the detection of SNP TSC0019760
tatttatttaaa

SEQ ID NO: 302039 - DNA, 12 bp, Artificial Sequence
  Oligonucleotide primer for the detection of SNP TSC0019760
tattcatccaaa

SEQ ID NO: 302040 - DNA, 12 bp, Artificial Sequence
  Oligonucleotide primer for the detection of SNP TSC0019760
ttattaatttat

SEQ ID NO: 302041 - DNA, 12 bp, Artificial Sequence
  Oligonucleotide primer for the detection of SNP TSC0019761
attatcaattca

SEQ ID NO: 302042 - DNA, 12 bp, Artificial Sequence
  Oligonucleotide primer for the detection of SNP TSC0019761
ccaaacatctcc

SEQ ID NO: 302043 - DNA, 12 bp, Artificial Sequence
  Oligonucleotide primer for the detection of SNP TSC0019761
tgttattaattt

SEQ ID NO: 302044 - DNA, 12 bp, Artificial Sequence
  Oligonucleotide primer for the detection of SNP TSC0019762
taaattatatta

SEQ ID NO: 302045 - DNA, 12 bp, Artificial Sequence
  Oligonucleotide primer for the detection of SNP TSC0019763
aattataaaatt

SEQ ID NO: 302046 - DNA, 12 bp, Artificial Sequence
  Oligonucleotide primer for the detection of SNP TSC0019763
caaatcaataaa

SEQ ID NO: 302047 - DNA, 12 bp, Artificial Sequence
  Oligonucleotide primer for the detection of SNP TSC0019763
ggttgtagagtt

SEQ ID NO: 302048 - DNA, 12 bp, Artificial Sequence
  Oligonucleotide primer for the detection of SNP TSC0019767
tcacctaatatt

SEQ ID NO: 302049 - DNA, 12 bp, Artificial Sequence
  Oligonucleotide primer for the detection of SNP TSC0019767
tcgcctaatatt

SEQ ID NO: 302050 - DNA, 12 bp, Artificial Sequence
  Oligonucleotide primer for the detection of SNP TSC0019771
ctcccaaattca

SEQ ID NO: 302051 - DNA, 12 bp, Artificial Sequence
  Oligonucleotide primer for the detection of SNP TSC0019771
ctcccgaattca

SEQ ID NO: 302052 - DNA, 12 bp, Artificial Sequence
  Oligonucleotide primer for the detection of SNP TSC0019772
attaaaaacaac

SEQ ID NO: 302053 - DNA, 12 bp, Artificial Sequence
  Oligonucleotide primer for the detection of SNP TSC0019772
tattaggggagg

SEQ ID NO: 302054 - DNA, 12 bp, Artificial Sequence
  Oligonucleotide primer for the detection of SNP TSC0019772
attgggaataat

SEQ ID NO: 302055 - DNA, 12 bp, Artificial Sequence
  Oligonucleotide primer for the detection of SNP TSC0019773
accaatatattt

SEQ ID NO: 302056 - DNA, 12 bp, Artificial Sequence
  Oligonucleotide primer for the detection of SNP TSC0019773
ttaatatatttt

SEQ ID NO: 302057 - DNA, 12 bp, Artificial Sequence
  Oligonucleotide primer for the detection of SNP TSC0019773
ttaatatatttc

SEQ ID NO: 302058 - DNA, 12 bp, Artificial Sequence
  Oligonucleotide primer for the detection of SNP TSC0019774
tttgttggtcgt

SEQ ID NO: 302059 - DNA, 12 bp, Artificial Sequence
  Oligonucleotide primer for the detection of SNP TSC0019774
ctctactaatca

SEQ ID NO: 302060 - DNA, 12 bp, Artificial Sequence
  Oligonucleotide primer for the detection of SNP TSC0019774
ctctactaatcg

SEQ ID NO: 302061 - DNA, 12 bp, Artificial Sequence
  Oligonucleotide primer for the detection of SNP TSC0019774
gtgataagtgtt

SEQ ID NO: 302062 - DNA, 12 bp, Artificial Sequence
  Oligonucleotide primer for the detection of SNP TSC0019777
aattctctctac

SEQ ID NO: 302063 - DNA, 12 bp, Artificial Sequence
  Oligonucleotide primer for the detection of SNP TSC0019777
agtgattttaga

SEQ ID NO: 302064 - DNA, 12 bp, Artificial Sequence
  Oligonucleotide primer for the detection of SNP TSC0019778
atttaataaaaa

SEQ ID NO: 302065 - DNA, 12 bp, Artificial Sequence
  Oligonucleotide primer for the detection of SNP TSC0019778
taataaaatccc

SEQ ID NO: 302066 - DNA, 12 bp, Artificial Sequence
  Oligonucleotide primer for the detection of SNP TSC0019778
atttagtagaga

SEQ ID NO: 302067 - DNA, 12 bp, Artificial Sequence
  Oligonucleotide primer for the detection of SNP TSC0019779
cctaactaattt

SEQ ID NO: 302068 - DNA, 12 bp, Artificial Sequence
  Oligonucleotide primer for the detection of SNP TSC0019779
ttaaatatgtaa

SEQ ID NO: 302069 - DNA, 12 bp, Artificial Sequence
  Oligonucleotide primer for the detection of SNP TSC0019779
ctaaatatacaa

SEQ ID NO: 302070 - DNA, 12 bp, Artificial Sequence
  Oligonucleotide primer for the detection of SNP TSC0019779
tttggttaattt

SEQ ID NO: 302071 - DNA, 12 bp, Artificial Sequence
  Oligonucleotide primer for the detection of SNP TSC0019782
acataatttaat

SEQ ID NO: 302072 - DNA, 12 bp, Artificial Sequence
  Oligonucleotide primer for the detection of SNP TSC0019782
tatgtttaatta

SEQ ID NO: 302073 - DNA, 12 bp, Artificial Sequence
  Oligonucleotide primer for the detection of SNP TSC0019783
atcattctactc

SEQ ID NO: 302074 - DNA, 12 bp, Artificial Sequence
  Oligonucleotide primer for the detection of SNP TSC0019783
ttttaggtaatg

SEQ ID NO: 302075 - DNA, 12 bp, Artificial Sequence
  Oligonucleotide primer for the detection of SNP TSC0019784
aatacatcaata

SEQ ID NO: 302076 - DNA, 12 bp, Artificial Sequence
  Oligonucleotide primer for the detection of SNP TSC0019784
gtgttattaaat

SEQ ID NO: 302077 - DNA, 12 bp, Artificial Sequence
  Oligonucleotide primer for the detection of SNP TSC0019784
tatcattaaata

SEQ ID NO: 302078 - DNA, 12 bp, Artificial Sequence
  Oligonucleotide primer for the detection of SNP TSC0019784
agtgtattaatg

SEQ ID NO: 302079 - DNA, 12 bp, Artificial Sequence
  Oligonucleotide primer for the detection of SNP TSC0019785
aaaaaactatca

SEQ ID NO: 302080 - DNA, 12 bp, Artificial Sequence
  Oligonucleotide primer for the detection of SNP TSC0019785
aattttttataa

SEQ ID NO: 302081 - DNA, 12 bp, Artificial Sequence
  Oligonucleotide primer for the detection of SNP TSC0019785
aattccttacaa

SEQ ID NO: 302082 - DNA, 12 bp, Artificial Sequence
  Oligonucleotide primer for the detection of SNP TSC0019785
tagaaagttatt

SEQ ID NO: 302083 - DNA, 12 bp, Artificial Sequence
  Oligonucleotide primer for the detection of SNP TSC0019786
acaaataaatat

SEQ ID NO: 302084 - DNA, 12 bp, Artificial Sequence
  Oligonucleotide primer for the detection of SNP TSC0019787
ttactcactaac

SEQ ID NO: 302085 - DNA, 12 bp, Artificial Sequence
  Oligonucleotide primer for the detection of SNP TSC0019787
gtgttgtttttg

SEQ ID NO: 302086 - DNA, 12 bp, Artificial Sequence
  Oligonucleotide primer for the detection of SNP TSC0019787
atactattctta

SEQ ID NO: 302087 - DNA, 12 bp, Artificial Sequence
  Oligonucleotide primer for the detection of SNP TSC0019787
ttatttattaat

SEQ ID NO: 302088 - DNA, 12 bp, Artificial Sequence
  Oligonukleotid-Primer
caaaatataaca

SEQ ID NO: 302089 - DNA, 12 bp, Artificial Sequence
  Oligonucleotide primer for the detection of SNP TSC0019788
aagttatgaagt

SEQ ID NO: 302090 - DNA, 12 bp, Artificial Sequence
  Oligonucleotide primer for the detection of SNP TSC0019788
aattataaaata

SEQ ID NO: 302091 - DNA, 12 bp, Artificial Sequence
  Oligonucleotide primer for the detection of SNP TSC0019788
gtaggatgtaat

SEQ ID NO: 302092 - DNA, 12 bp, Artificial Sequence
  Oligonucleotide primer for the detection of SNP TSC0019789
taatataaattt

SEQ ID NO: 302093 - DNA, 12 bp, Artificial Sequence
  Oligonucleotide primer for the detection of SNP TSC0019789
tatgtggttatt

SEQ ID NO: 302094 - DNA, 12 bp, Artificial Sequence
  Oligonucleotide primer for the detection of SNP TSC0019789
catataactact

SEQ ID NO: 302095 - DNA, 12 bp, Artificial Sequence
  Oligonucleotide primer for the detection of SNP TSC0019789
taatgtaaattt

SEQ ID NO: 302096 - DNA, 12 bp, Artificial Sequence
  Oligonucleotide primer for the detection of SNP TSC0019793
ccaatcttaaac

SEQ ID NO: 302097 - DNA, 12 bp, Artificial Sequence
  Oligonucleotide primer for the detection of SNP TSC0019793
gtgtgtttataa

SEQ ID NO: 302098 - DNA, 12 bp, Artificial Sequence
  Oligonucleotide primer for the detection of SNP TSC0019794
attataaaatca

SEQ ID NO: 302099 - DNA, 12 bp, Artificial Sequence
  Oligonucleotide primer for the detection of SNP TSC0019794
gaaatagattat

SEQ ID NO: 302100 - DNA, 12 bp, Artificial Sequence
  Oligonucleotide primer for the detection of SNP TSC0019794
gaaatagattac

SEQ ID NO: 302101 - DNA, 12 bp, Artificial Sequence
  Oligonucleotide primer for the detection of SNP TSC0019794
tgtggaattatt

SEQ ID NO: 302102 - DNA, 12 bp, Artificial Sequence
  Oligonucleotide primer for the detection of SNP TSC0019795
taaaaattactt

SEQ ID NO: 302103 - DNA, 12 bp, Artificial Sequence
  Oligonucleotide primer for the detection of SNP TSC0019796
acctcactactc

SEQ ID NO: 302104 - DNA, 12 bp, Artificial Sequence
  Oligonucleotide primer for the detection of SNP TSC0019796
gtttaggatggg

SEQ ID NO: 302105 - DNA, 12 bp, Artificial Sequence
  Oligonucleotide primer for the detection of SNP TSC0019797
tataaaaaataa

SEQ ID NO: 302106 - DNA, 12 bp, Artificial Sequence
  Oligonucleotide primer for the detection of SNP TSC0019797
gtttattttgag

SEQ ID NO: 302107 - DNA, 12 bp, Artificial Sequence
  Oligonucleotide primer for the detection of SNP TSC0019797
acccatcctaaa

SEQ ID NO: 302108 - DNA, 12 bp, Artificial Sequence
  Oligonucleotide primer for the detection of SNP TSC0019797
tgtgggggatgg

SEQ ID NO: 302109 - DNA, 12 bp, Artificial Sequence
  Oligonucleotide primer for the detection of SNP TSC0019798
ccacctctacac

SEQ ID NO: 302110 - DNA, 12 bp, Artificial Sequence
  Oligonucleotide primer for the detection of SNP TSC0019798
ttgttttgggta

SEQ ID NO: 302111 - DNA, 12 bp, Artificial Sequence
  Oligonucleotide primer for the detection of SNP TSC0019802
actctactacac

SEQ ID NO: 302112 - DNA, 12 bp, Artificial Sequence
  Oligonucleotide primer for the detection of SNP TSC0019802
atgtagtttgga

SEQ ID NO: 302113 - DNA, 12 bp, Artificial Sequence
  Oligonucleotide primer for the detection of SNP TSC0019808
ttttaggtattt

SEQ ID NO: 302114 - DNA, 12 bp, Artificial Sequence
  Oligonucleotide primer for the detection of SNP TSC0019808
tcttaaacaccc

SEQ ID NO: 302115 - DNA, 12 bp, Artificial Sequence
  Oligonucleotide primer for the detection of SNP TSC0019808
atggaggagtta

SEQ ID NO: 302116 - DNA, 12 bp, Artificial Sequence
  Oligonucleotide primer for the detection of SNP TSC0019809
tctaaaatacac

SEQ ID NO: 302117 - DNA, 12 bp, Artificial Sequence
  Oligonucleotide primer for the detection of SNP TSC0019809
gggttgtttgtt

SEQ ID NO: 302118 - DNA, 12 bp, Artificial Sequence
  Oligonucleotide primer for the detection of SNP TSC0019809
aaactacctatt

SEQ ID NO: 302119 - DNA, 12 bp, Artificial Sequence
  Oligonucleotide primer for the detection of SNP TSC0019809
tttgagatgtat

SEQ ID NO: 302120 - DNA, 12 bp, Artificial Sequence
  Oligonucleotide primer for the detection of SNP TSC0019810
gtatatattggg

SEQ ID NO: 302121 - DNA, 12 bp, Artificial Sequence
  Oligonucleotide primer for the detection of SNP TSC0019811
tgggtagttttt

SEQ ID NO: 302122 - DNA, 12 bp, Artificial Sequence
  Oligonucleotide primer for the detection of SNP TSC0019811
taaacaacttct

SEQ ID NO: 302123 - DNA, 12 bp, Artificial Sequence
  Oligonucleotide primer for the detection of SNP TSC0019811
gattttggaaag

SEQ ID NO: 302124 - DNA, 12 bp, Artificial Sequence
  Oligonucleotide primer for the detection of SNP TSC0019813
atttctaaattt

SEQ ID NO: 302125 - DNA, 12 bp, Artificial Sequence
  Oligonucleotide primer for the detection of SNP TSC0019813
aaaatatttagg

SEQ ID NO: 302126 - DNA, 12 bp, Artificial Sequence
  Oligonucleotide primer for the detection of SNP TSC0019814
ttactcccattc

SEQ ID NO: 302127 - DNA, 12 bp, Artificial Sequence
  Oligonucleotide primer for the detection of SNP TSC0019814
attaagagaaat

SEQ ID NO: 302128 - DNA, 12 bp, Artificial Sequence
  Oligonucleotide primer for the detection of SNP TSC0019815
aaaaatctaaat

SEQ ID NO: 302129 - DNA, 12 bp, Artificial Sequence
  Oligonucleotide primer for the detection of SNP TSC0019815
gtgttaggtttt

SEQ ID NO: 302130 - DNA, 12 bp, Artificial Sequence
  Oligonucleotide primer for the detection of SNP TSC0019815
tataccaaaccc

SEQ ID NO: 302131 - DNA, 12 bp, Artificial Sequence
  Oligonucleotide primer for the detection of SNP TSC0019815
aagaatttagat

SEQ ID NO: 302132 - DNA, 12 bp, Artificial Sequence
  Oligonucleotide primer for the detection of SNP TSC0019816
gtgaagtttatg

SEQ ID NO: 302133 - DNA, 12 bp, Artificial Sequence
  Oligonucleotide primer for the detection of SNP TSC0019817
aatctcctccaa

SEQ ID NO: 302134 - DNA, 12 bp, Artificial Sequence
  Oligonucleotide primer for the detection of SNP TSC0019817
aggttaaggttt

SEQ ID NO: 302135 - DNA, 12 bp, Artificial Sequence
  Oligonucleotide primer for the detection of SNP TSC0019817
aattaaaatcca

SEQ ID NO: 302136 - DNA, 12 bp, Artificial Sequence
  Oligonucleotide primer for the detection of SNP TSC0019817
agttttttttaa

SEQ ID NO: 302137 - DNA, 12 bp, Artificial Sequence
  Oligonucleotide primer for the detection of SNP TSC0019819
aaatcttacttt

SEQ ID NO: 302138 - DNA, 12 bp, Artificial Sequence
  Oligonucleotide primer for the detection of SNP TSC0019820
ctaaaattctat

SEQ ID NO: 302139 - DNA, 12 bp, Artificial Sequence
  Oligonucleotide primer for the detection of SNP TSC0019820
tggatgttaaaa

SEQ ID NO: 302140 - DNA, 12 bp, Artificial Sequence
  Oligonucleotide primer for the detection of SNP TSC0019821
gttaattttgta

SEQ ID NO: 302141 - DNA, 12 bp, Artificial Sequence
  Oligonucleotide primer for the detection of SNP TSC0019822
taattataatat

SEQ ID NO: 302142 - DNA, 12 bp, Artificial Sequence
  Oligonucleotide primer for the detection of SNP TSC0019822
ttaaattaatta

SEQ ID NO: 302143 - DNA, 12 bp, Artificial Sequence
  Oligonucleotide primer for the detection of SNP TSC0019824
tattattggagt

SEQ ID NO: 302144 - DNA, 12 bp, Artificial Sequence
  Oligonucleotide primer for the detection of SNP TSC0019825
aaattacacaaa

SEQ ID NO: 302145 - DNA, 12 bp, Artificial Sequence
  Oligonucleotide primer for the detection of SNP TSC0019825
aaattacgcaaa

SEQ ID NO: 302146 - DNA, 12 bp, Artificial Sequence
  Oligonucleotide primer for the detection of SNP TSC0019825
agtttgatggtg

SEQ ID NO: 302147 - DNA, 12 bp, Artificial Sequence
  Oligonucleotide primer for the detection of SNP TSC0019825
agtttgacggtg

SEQ ID NO: 302148 - DNA, 12 bp, Artificial Sequence
  Oligonucleotide primer for the detection of SNP TSC0019825
aatctaacaata

SEQ ID NO: 302149 - DNA, 12 bp, Artificial Sequence
  Oligonucleotide primer for the detection of SNP TSC0019825
aatctaacgata

SEQ ID NO: 302150 - DNA, 12 bp, Artificial Sequence
  Oligonucleotide primer for the detection of SNP TSC0019825
ggtggattatgt

SEQ ID NO: 302151 - DNA, 12 bp, Artificial Sequence
  Oligonucleotide primer for the detection of SNP TSC0019825
ggtggattacgt

SEQ ID NO: 302152 - DNA, 12 bp, Artificial Sequence
  Oligonucleotide primer for the detection of SNP TSC0019826
tcaacaaaaaca

SEQ ID NO: 302153 - DNA, 12 bp, Artificial Sequence
  Oligonucleotide primer for the detection of SNP TSC0019826
tcaacaaaaacg

SEQ ID NO: 302154 - DNA, 12 bp, Artificial Sequence
  Oligonucleotide primer for the detection of SNP TSC0019826
gttttttggttt

SEQ ID NO: 302155 - DNA, 12 bp, Artificial Sequence
  Oligonucleotide primer for the detection of SNP TSC0019826
actttctaactc

SEQ ID NO: 302156 - DNA, 12 bp, Artificial Sequence
  Oligonucleotide primer for the detection of SNP TSC0019826
ttagtaaaaatg

SEQ ID NO: 302157 - DNA, 12 bp, Artificial Sequence
  Oligonucleotide primer for the detection of SNP TSC0019826
ttagtaaaaacg

SEQ ID NO: 302158 - DNA, 12 bp, Artificial Sequence
  Oligonucleotide primer for the detection of SNP TSC0019827
atattcctcttt

SEQ ID NO: 302159 - DNA, 12 bp, Artificial Sequence
  Oligonucleotide primer for the detection of SNP TSC0019827
ttaagggtaaga

SEQ ID NO: 302160 - DNA, 12 bp, Artificial Sequence
  Oligonucleotide primer for the detection of SNP TSC0019828
actctaaactca

SEQ ID NO: 302161 - DNA, 12 bp, Artificial Sequence
  Oligonucleotide primer for the detection of SNP TSC0019828
ggagtatttttt

SEQ ID NO: 302162 - DNA, 12 bp, Artificial Sequence
  Oligonucleotide primer for the detection of SNP TSC0019828
aaaatacctctt

SEQ ID NO: 302163 - DNA, 12 bp, Artificial Sequence
  Oligonucleotide primer for the detection of SNP TSC0019828
gttttgggttta

SEQ ID NO: 302164 - DNA, 12 bp, Artificial Sequence
  Oligonucleotide primer for the detection of SNP TSC0019829
aaatacaaaaca

SEQ ID NO: 302165 - DNA, 12 bp, Artificial Sequence
  Oligonucleotide primer for the detection of SNP TSC0019829
gttttggaagtt

SEQ ID NO: 302166 - DNA, 12 bp, Artificial Sequence
  Oligonucleotide primer for the detection of SNP TSC0019829
accctaaaaatt

SEQ ID NO: 302167 - DNA, 12 bp, Artificial Sequence
  Oligonucleotide primer for the detection of SNP TSC0019829
aagtgtaggata

SEQ ID NO: 302168 - DNA, 12 bp, Artificial Sequence
  Oligonucleotide primer for the detection of SNP TSC0019830
cttcaattcact

SEQ ID NO: 302169 - DNA, 12 bp, Artificial Sequence
  Oligonucleotide primer for the detection of SNP TSC0019830
cttcgattcact

SEQ ID NO: 302170 - DNA, 12 bp, Artificial Sequence
  Oligonucleotide primer for the detection of SNP TSC0019832
aggagtgggttt

SEQ ID NO: 302171 - DNA, 12 bp, Artificial Sequence
  Oligonucleotide primer for the detection of SNP TSC0019832
aaaataaattca

SEQ ID NO: 302172 - DNA, 12 bp, Artificial Sequence
  Oligonucleotide primer for the detection of SNP TSC0019832
gagaggggaagg

SEQ ID NO: 302173 - DNA, 12 bp, Artificial Sequence
  Oligonucleotide primer for the detection of SNP TSC0019833
aaccatttttaa

SEQ ID NO: 302174 - DNA, 12 bp, Artificial Sequence
  Oligonucleotide primer for the detection of SNP TSC0019833
tgttgattttgt

SEQ ID NO: 302175 - DNA, 12 bp, Artificial Sequence
  Oligonucleotide primer for the detection of SNP TSC0019833
tattaaccttat

SEQ ID NO: 302176 - DNA, 12 bp, Artificial Sequence
  Oligonucleotide primer for the detection of SNP TSC0019833
aattatttttgg

SEQ ID NO: 302177 - DNA, 12 bp, Artificial Sequence
  Oligonucleotide primer for the detection of SNP TSC0019834
actcccctcccc

SEQ ID NO: 302178 - DNA, 12 bp, Artificial Sequence
  Oligonucleotide primer for the detection of SNP TSC0019834
ggttattgtttt

SEQ ID NO: 302179 - DNA, 12 bp, Artificial Sequence
  Oligonucleotide primer for the detection of SNP TSC0019834
ggttattgtttc

SEQ ID NO: 302180 - DNA, 12 bp, Artificial Sequence
  Oligonucleotide primer for the detection of SNP TSC0019834
aaataaccacta

SEQ ID NO: 302181 - DNA, 12 bp, Artificial Sequence
  Oligonucleotide primer for the detection of SNP TSC0019835
taaatccaaata

SEQ ID NO: 302182 - DNA, 12 bp, Artificial Sequence
  Oligonucleotide primer for the detection of SNP TSC0019835
taaatccgaata

SEQ ID NO: 302183 - DNA, 12 bp, Artificial Sequence
  Oligonucleotide primer for the detection of SNP TSC0019835
ggggatatagtt

SEQ ID NO: 302184 - DNA, 12 bp, Artificial Sequence
  Oligonucleotide primer for the detection of SNP TSC0019835
aacacaaccaaa

SEQ ID NO: 302185 - DNA, 12 bp, Artificial Sequence
  Oligonukleotid-Primer
aatttggatatt

SEQ ID NO: 302186 - DNA, 12 bp, Artificial Sequence
  Oligonucleotide primer for the detection of SNP TSC0019835
aattcggatatt

SEQ ID NO: 302187 - DNA, 12 bp, Artificial Sequence
  Oligonucleotide primer for the detection of SNP TSC0019836
actatttacttc

SEQ ID NO: 302188 - DNA, 12 bp, Artificial Sequence
  Oligonucleotide primer for the detection of SNP TSC0019837
caaaattttaaa

SEQ ID NO: 302189 - DNA, 12 bp, Artificial Sequence
  Oligonukleotid-Primer
tttgtttatatt

SEQ ID NO: 302190 - DNA, 12 bp, Artificial Sequence
  Oligonucleotide primer for the detection of SNP TSC0019837
tttgtttatatc

SEQ ID NO: 302191 - DNA, 12 bp, Artificial Sequence
  Oligonucleotide primer for the detection of SNP TSC0019837
ttttattcacat

SEQ ID NO: 302192 - DNA, 12 bp, Artificial Sequence
  Oligonucleotide primer for the detection of SNP TSC0019837
taaaattttaaa

SEQ ID NO: 302193 - DNA, 12 bp, Artificial Sequence
  Oligonucleotide primer for the detection of SNP TSC0019845
caccaccccccc

SEQ ID NO: 302194 - DNA, 12 bp, Artificial Sequence
  Oligonucleotide primer for the detection of SNP TSC0019845
aaaattagtcgg

SEQ ID NO: 302195 - DNA, 12 bp, Artificial Sequence
  Oligonucleotide primer for the detection of SNP TSC0019845
aaaattaaccga

SEQ ID NO: 302196 - DNA, 12 bp, Artificial Sequence
  Oligonucleotide primer for the detection of SNP TSC0019848
tcaaatccaatt

SEQ ID NO: 302197 - DNA, 12 bp, Artificial Sequence
  Oligonucleotide primer for the detection of SNP TSC0019848
acacacaataat

SEQ ID NO: 302198 - DNA, 12 bp, Artificial Sequence
  Oligonucleotide primer for the detection of SNP TSC0019850
tacaataactca

SEQ ID NO: 302199 - DNA, 12 bp, Artificial Sequence
  Oligonucleotide primer for the detection of SNP TSC0019850
tacgataactca

SEQ ID NO: 302200 - DNA, 12 bp, Artificial Sequence
  Oligonucleotide primer for the detection of SNP TSC0019850
tgtggtggttta

SEQ ID NO: 302201 - DNA, 12 bp, Artificial Sequence
  Oligonucleotide primer for the detection of SNP TSC0019850
tgcggtggttta

SEQ ID NO: 302202 - DNA, 12 bp, Artificial Sequence
  Oligonucleotide primer for the detection of SNP TSC0019851
actatatcccct

SEQ ID NO: 302203 - DNA, 12 bp, Artificial Sequence
  Oligonucleotide primer for the detection of SNP TSC0019851
taatttatgtta

SEQ ID NO: 302204 - DNA, 12 bp, Artificial Sequence
  Oligonucleotide primer for the detection of SNP TSC0019853
tatatatattat

SEQ ID NO: 302205 - DNA, 12 bp, Artificial Sequence
  Oligonucleotide primer for the detection of SNP TSC0019853
cacacatatcat

SEQ ID NO: 302206 - DNA, 12 bp, Artificial Sequence
  Oligonucleotide primer for the detection of SNP TSC0019853
ggaagtaaatat

SEQ ID NO: 302207 - DNA, 12 bp, Artificial Sequence
  Oligonucleotide primer for the detection of SNP TSC0019862
ttaggtgattta

SEQ ID NO: 302208 - DNA, 12 bp, Artificial Sequence
  Oligonucleotide primer for the detection of SNP TSC0019863
taccattcaaac

SEQ ID NO: 302209 - DNA, 12 bp, Artificial Sequence
  Oligonucleotide primer for the detection of SNP TSC0019863
ttaagtaatatg

SEQ ID NO: 302210 - DNA, 12 bp, Artificial Sequence
  Oligonucleotide primer for the detection of SNP TSC0019864
aaccccaaatta

SEQ ID NO: 302211 - DNA, 12 bp, Artificial Sequence
  Oligonucleotide primer for the detection of SNP TSC0019864
ttatttgatttt

SEQ ID NO: 302212 - DNA, 12 bp, Artificial Sequence
  Oligonucleotide primer for the detection of SNP TSC0019864
tcatttaattct

SEQ ID NO: 302213 - DNA, 12 bp, Artificial Sequence
  Oligonucleotide primer for the detection of SNP TSC0019864
ggttttaaattg

SEQ ID NO: 302214 - DNA, 12 bp, Artificial Sequence
  Oligonucleotide primer for the detection of SNP TSC0019865
aacttttatatc

SEQ ID NO: 302215 - DNA, 12 bp, Artificial Sequence
  Oligonucleotide primer for the detection of SNP TSC0019865
tggaaggggaag

SEQ ID NO: 302216 - DNA, 12 bp, Artificial Sequence
  Oligonucleotide primer for the detection of SNP TSC0019866
taattctaccta

SEQ ID NO: 302217 - DNA, 12 bp, Artificial Sequence
  Oligonucleotide primer for the detection of SNP TSC0019866
taatcatttctt

SEQ ID NO: 302218 - DNA, 12 bp, Artificial Sequence
  Oligonucleotide primer for the detection of SNP TSC0019867
taaaaaaaccaa

SEQ ID NO: 302219 - DNA, 12 bp, Artificial Sequence
  Oligonucleotide primer for the detection of SNP TSC0019867
tcctaatttcca

SEQ ID NO: 302220 - DNA, 12 bp, Artificial Sequence
  Oligonucleotide primer for the detection of SNP TSC0019867
tagagaagttaa

SEQ ID NO: 302221 - DNA, 12 bp, Artificial Sequence
  Oligonucleotide primer for the detection of SNP TSC0019868
atctcaactact

SEQ ID NO: 302222 - DNA, 12 bp, Artificial Sequence
  Oligonucleotide primer for the detection of SNP TSC0019868
ttatgttttagt

SEQ ID NO: 302223 - DNA, 12 bp, Artificial Sequence
  Oligonucleotide primer for the detection of SNP TSC0019868
tcatacctcaac

SEQ ID NO: 302224 - DNA, 12 bp, Artificial Sequence
  Oligonucleotide primer for the detection of SNP TSC0019870
ttatatctttca

SEQ ID NO: 302225 - DNA, 12 bp, Artificial Sequence
  Oligonucleotide primer for the detection of SNP TSC0019871
aggataagttat

SEQ ID NO: 302226 - DNA, 12 bp, Artificial Sequence
  Oligonucleotide primer for the detection of SNP TSC0019871
aaaataaattat

SEQ ID NO: 302227 - DNA, 12 bp, Artificial Sequence
  Oligonucleotide primer for the detection of SNP TSC0019871
ggtaaatatgaa

SEQ ID NO: 302228 - DNA, 12 bp, Artificial Sequence
  Oligonucleotide primer for the detection of SNP TSC0019875
caaaaaatacac

SEQ ID NO: 302229 - DNA, 12 bp, Artificial Sequence
  Oligonucleotide primer for the detection of SNP TSC0019875
attatgaaaata

SEQ ID NO: 302230 - DNA, 12 bp, Artificial Sequence
  Oligonucleotide primer for the detection of SNP TSC0019876
taacaaataata

SEQ ID NO: 302231 - DNA, 12 bp, Artificial Sequence
  Oligonucleotide primer for the detection of SNP TSC0019876
gtaaatataata

SEQ ID NO: 302232 - DNA, 12 bp, Artificial Sequence
  Oligonucleotide primer for the detection of SNP TSC0019876
taaacacaataa

SEQ ID NO: 302233 - DNA, 12 bp, Artificial Sequence
  Oligonucleotide primer for the detection of SNP TSC0019876
tagtagatggtg

SEQ ID NO: 302234 - DNA, 12 bp, Artificial Sequence
  Oligonucleotide primer for the detection of SNP TSC0019877
tatcaatatcat

SEQ ID NO: 302235 - DNA, 12 bp, Artificial Sequence
  Oligonucleotide primer for the detection of SNP TSC0019877
ttaaatttatta

SEQ ID NO: 302236 - DNA, 12 bp, Artificial Sequence
  Oligonucleotide primer for the detection of SNP TSC0019877
tcaaatctatta

SEQ ID NO: 302237 - DNA, 12 bp, Artificial Sequence
  Oligonucleotide primer for the detection of SNP TSC0019877
tgttaatattat

SEQ ID NO: 302238 - DNA, 12 bp, Artificial Sequence
  Oligonucleotide primer for the detection of SNP TSC0019878
aattagaggtag

SEQ ID NO: 302239 - DNA, 12 bp, Artificial Sequence
  Oligonucleotide primer for the detection of SNP TSC0019879
aaaacaaaaata

SEQ ID NO: 302240 - DNA, 12 bp, Artificial Sequence
  Oligonucleotide primer for the detection of SNP TSC0019879
ttttgagttagt

SEQ ID NO: 302241 - DNA, 12 bp, Artificial Sequence
  Oligonucleotide primer for the detection of SNP TSC0019879
ttaaactaataa

SEQ ID NO: 302242 - DNA, 12 bp, Artificial Sequence
  Oligonucleotide primer for the detection of SNP TSC0019879
gaagtagggata

SEQ ID NO: 302243 - DNA, 12 bp, Artificial Sequence
  Oligonucleotide primer for the detection of SNP TSC0019880
ctaaaaacactt

SEQ ID NO: 302244 - DNA, 12 bp, Artificial Sequence
  Oligonucleotide primer for the detection of SNP TSC0019880
tttttagtaaag

SEQ ID NO: 302245 - DNA, 12 bp, Artificial Sequence
  Oligonucleotide primer for the detection of SNP TSC0019886
tccacccaccta

SEQ ID NO: 302246 - DNA, 12 bp, Artificial Sequence
  Oligonucleotide primer for the detection of SNP TSC0019886
attttgggaagt

SEQ ID NO: 302247 - DNA, 12 bp, Artificial Sequence
  Oligonucleotide primer for the detection of SNP TSC0019886
attttgggaagc

SEQ ID NO: 302248 - DNA, 12 bp, Artificial Sequence
  Oligonucleotide primer for the detection of SNP TSC0019887
acctaaaacaaa

SEQ ID NO: 302249 - DNA, 12 bp, Artificial Sequence
  Oligonucleotide primer for the detection of SNP TSC0019887
ggggtgatgttg

SEQ ID NO: 302250 - DNA, 12 bp, Artificial Sequence
  Oligonucleotide primer for the detection of SNP TSC0019887
ggggcgatgttg

SEQ ID NO: 302251 - DNA, 12 bp, Artificial Sequence
  Oligonucleotide primer for the detection of SNP TSC0019887
aaaacaatacta

SEQ ID NO: 302252 - DNA, 12 bp, Artificial Sequence
  Oligonucleotide primer for the detection of SNP TSC0019887
aaaacgatacta

SEQ ID NO: 302253 - DNA, 12 bp, Artificial Sequence
  Oligonucleotide primer for the detection of SNP TSC0019887
gtttggggtagg

SEQ ID NO: 302254 - DNA, 12 bp, Artificial Sequence
  Oligonucleotide primer for the detection of SNP TSC0019889
aaaatccctcaa

SEQ ID NO: 302255 - DNA, 12 bp, Artificial Sequence
  Oligonucleotide primer for the detection of SNP TSC0019889
tagatgagggaa

SEQ ID NO: 302256 - DNA, 12 bp, Artificial Sequence
  Oligonucleotide primer for the detection of SNP TSC0019893
aacccctctaaa

SEQ ID NO: 302257 - DNA, 12 bp, Artificial Sequence
  Oligonucleotide primer for the detection of SNP TSC0019893
gatagatattgt

SEQ ID NO: 302258 - DNA, 12 bp, Artificial Sequence
  Oligonucleotide primer for the detection of SNP TSC0019893
aataaacattac

SEQ ID NO: 302259 - DNA, 12 bp, Artificial Sequence
  Oligonucleotide primer for the detection of SNP TSC0019893
ggtttttttgag

SEQ ID NO: 302260 - DNA, 12 bp, Artificial Sequence
  Oligonucleotide primer for the detection of SNP TSC0019894
atcataaacatt

SEQ ID NO: 302261 - DNA, 12 bp, Artificial Sequence
  Oligonucleotide primer for the detection of SNP TSC0019894
atcgtaaacatt

SEQ ID NO: 302262 - DNA, 12 bp, Artificial Sequence
  Oligonucleotide primer for the detection of SNP TSC0019894
atttaggagaag

SEQ ID NO: 302263 - DNA, 12 bp, Artificial Sequence
  Oligonucleotide primer for the detection of SNP TSC0019895
taaagggtttgt

SEQ ID NO: 302264 - DNA, 12 bp, Artificial Sequence
  Oligonucleotide primer for the detection of SNP TSC0019895
aaaaaacttaca

SEQ ID NO: 302265 - DNA, 12 bp, Artificial Sequence
  Oligonucleotide primer for the detection of SNP TSC0019895
atggatggtggt

SEQ ID NO: 302266 - DNA, 12 bp, Artificial Sequence
  Oligonucleotide primer for the detection of SNP TSC0019898
caataacctaca

SEQ ID NO: 302267 - DNA, 12 bp, Artificial Sequence
  Oligonucleotide primer for the detection of SNP TSC0019898
ttttgatttagt

SEQ ID NO: 302268 - DNA, 12 bp, Artificial Sequence
  Oligonucleotide primer for the detection of SNP TSC0019898
ctctaacttaat

SEQ ID NO: 302269 - DNA, 12 bp, Artificial Sequence
  Oligonucleotide primer for the detection of SNP TSC0019898
tagtgatttata

SEQ ID NO: 302270 - DNA, 12 bp, Artificial Sequence
  Oligonucleotide primer for the detection of SNP TSC0019899
taatatttatat

SEQ ID NO: 302271 - DNA, 12 bp, Artificial Sequence
  Oligonucleotide primer for the detection of SNP TSC0019899
ataaatagagaa

SEQ ID NO: 302272 - DNA, 12 bp, Artificial Sequence
  Oligonucleotide primer for the detection of SNP TSC0019899
tggtgtttgtgt

SEQ ID NO: 302273 - DNA, 12 bp, Artificial Sequence
  Oligonucleotide primer for the detection of SNP TSC0019902
ggttgtatgtta

SEQ ID NO: 302274 - DNA, 12 bp, Artificial Sequence
  Oligonucleotide primer for the detection of SNP TSC0019903
cacctaactatt

SEQ ID NO: 302275 - DNA, 12 bp, Artificial Sequence
  Oligonucleotide primer for the detection of SNP TSC0019903
attaaaaatatg

SEQ ID NO: 302276 - DNA, 12 bp, Artificial Sequence
  Oligonucleotide primer for the detection of SNP TSC0019903
attaaaaatacg

SEQ ID NO: 302277 - DNA, 12 bp, Artificial Sequence
  Oligonucleotide primer for the detection of SNP TSC0019904
aaacttttttat

SEQ ID NO: 302278 - DNA, 12 bp, Artificial Sequence
  Oligonucleotide primer for the detection of SNP TSC0019904
aacataacaaaa

SEQ ID NO: 302279 - DNA, 12 bp, Artificial Sequence
  Oligonucleotide primer for the detection of SNP TSC0019904
aaatttttttgt

SEQ ID NO: 302280 - DNA, 12 bp, Artificial Sequence
  Oligonucleotide primer for the detection of SNP TSC0019905
gttttgagatag

SEQ ID NO: 302281 - DNA, 12 bp, Artificial Sequence
  Oligonucleotide primer for the detection of SNP TSC0019906
accacttcctat

SEQ ID NO: 302282 - DNA, 12 bp, Artificial Sequence
  Oligonucleotide primer for the detection of SNP TSC0019906
accgcttcctat

SEQ ID NO: 302283 - DNA, 12 bp, Artificial Sequence
  Oligonucleotide primer for the detection of SNP TSC0019906
tttaaggtaaag

SEQ ID NO: 302284 - DNA, 12 bp, Artificial Sequence
  Oligonucleotide primer for the detection of SNP TSC0019909
ttccaaataaat

SEQ ID NO: 302285 - DNA, 12 bp, Artificial Sequence
  Oligonucleotide primer for the detection of SNP TSC0019909
ttccgaataaat

SEQ ID NO: 302286 - DNA, 12 bp, Artificial Sequence
  Oligonucleotide primer for the detection of SNP TSC0019909
ttatagggtata

SEQ ID NO: 302287 - DNA, 12 bp, Artificial Sequence
  Oligonucleotide primer for the detection of SNP TSC0019911
cacaaaaattaa

SEQ ID NO: 302288 - DNA, 12 bp, Artificial Sequence
  Oligonucleotide primer for the detection of SNP TSC0019911
attattaggttt

SEQ ID NO: 302289 - DNA, 12 bp, Artificial Sequence
  Oligonucleotide primer for the detection of SNP TSC0019911
accaccaaaccc

SEQ ID NO: 302290 - DNA, 12 bp, Artificial Sequence
  Oligonucleotide primer for the detection of SNP TSC0019912
ttttggagaata

SEQ ID NO: 302291 - DNA, 12 bp, Artificial Sequence
  Oligonucleotide primer for the detection of SNP TSC0019912
ttctaaaaaaca

SEQ ID NO: 302292 - DNA, 12 bp, Artificial Sequence
  Oligonucleotide primer for the detection of SNP TSC0019912
tttggaaatttt

SEQ ID NO: 302293 - DNA, 12 bp, Artificial Sequence
  Oligonucleotide primer for the detection of SNP TSC0019913
aaaacaaacccc

SEQ ID NO: 302294 - DNA, 12 bp, Artificial Sequence
  Oligonucleotide primer for the detection of SNP TSC0019913
ttattttttgag

SEQ ID NO: 302295 - DNA, 12 bp, Artificial Sequence
  Oligonucleotide primer for the detection of SNP TSC0019916
cacttcttacct

SEQ ID NO: 302296 - DNA, 12 bp, Artificial Sequence
  Oligonucleotide primer for the detection of SNP TSC0019916
cgcttcttacct

SEQ ID NO: 302297 - DNA, 12 bp, Artificial Sequence
  Oligonucleotide primer for the detection of SNP TSC0019916
gaaggtagggaa

SEQ ID NO: 302298 - DNA, 12 bp, Artificial Sequence
  Oligonucleotide primer for the detection of SNP TSC0019917
tcctcccacctt

SEQ ID NO: 302299 - DNA, 12 bp, Artificial Sequence
  Oligonucleotide primer for the detection of SNP TSC0019917
tcctcccgcctt

SEQ ID NO: 302300 - DNA, 12 bp, Artificial Sequence
  Oligonucleotide primer for the detection of SNP TSC0019917
tgggaggtggag

SEQ ID NO: 302301 - DNA, 12 bp, Artificial Sequence
  Oligonucleotide primer for the detection of SNP TSC0019918
attacccaaact

SEQ ID NO: 302302 - DNA, 12 bp, Artificial Sequence
  Oligonucleotide primer for the detection of SNP TSC0019918
attttgttattg

SEQ ID NO: 302303 - DNA, 12 bp, Artificial Sequence
  Oligonucleotide primer for the detection of SNP TSC0019918
atcctatcacta

SEQ ID NO: 302304 - DNA, 12 bp, Artificial Sequence
  Oligonucleotide primer for the detection of SNP TSC0019924
aaaaattataac

SEQ ID NO: 302305 - DNA, 12 bp, Artificial Sequence
  Oligonucleotide primer for the detection of SNP TSC0019924
atatatattagt

SEQ ID NO: 302306 - DNA, 12 bp, Artificial Sequence
  Oligonucleotide primer for the detection of SNP TSC0019924
tacacacatcaa

SEQ ID NO: 302307 - DNA, 12 bp, Artificial Sequence
  Oligonucleotide primer for the detection of SNP TSC0019924
gaaagttgtagt

SEQ ID NO: 302308 - DNA, 12 bp, Artificial Sequence
  Oligonucleotide primer for the detection of SNP TSC0019924
gaaagttgtagc

SEQ ID NO: 302309 - DNA, 12 bp, Artificial Sequence
  Oligonucleotide primer for the detection of SNP TSC0019928
taactaaatcct

SEQ ID NO: 302310 - DNA, 12 bp, Artificial Sequence
  Oligonucleotide primer for the detection of SNP TSC0019928
tgaatggtgtta

SEQ ID NO: 302311 - DNA, 12 bp, Artificial Sequence
  Oligonucleotide primer for the detection of SNP TSC0019928
taaataatatca

SEQ ID NO: 302312 - DNA, 12 bp, Artificial Sequence
  Oligonucleotide primer for the detection of SNP TSC0019928
tagttgaatttt

SEQ ID NO: 302313 - DNA, 12 bp, Artificial Sequence
  Oligonucleotide primer for the detection of SNP TSC0019929
taaaatactaaa

SEQ ID NO: 302314 - DNA, 12 bp, Artificial Sequence
  Oligonukleotid-Primer
tttttaattagg

SEQ ID NO: 302315 - DNA, 12 bp, Artificial Sequence
  Oligonucleotide primer for the detection of SNP TSC0019929
tagaatgttaga

SEQ ID NO: 302316 - DNA, 12 bp, Artificial Sequence
  Oligonucleotide primer for the detection of SNP TSC0019930
ccccattttcca

SEQ ID NO: 302317 - DNA, 12 bp, Artificial Sequence
  Oligonucleotide primer for the detection of SNP TSC0019930
tctatcaaccca

SEQ ID NO: 302318 - DNA, 12 bp, Artificial Sequence
  Oligonukleotid-Primer
attctaataaat

SEQ ID NO: 302319 - DNA, 12 bp, Artificial Sequence
  Oligonucleotide primer for the detection of SNP TSC0019932
agagataaatta

SEQ ID NO: 302320 - DNA, 12 bp, Artificial Sequence
  Oligonucleotide primer for the detection of SNP TSC0019933
ataatcataaat

SEQ ID NO: 302321 - DNA, 12 bp, Artificial Sequence
  Oligonucleotide primer for the detection of SNP TSC0019936
accaaattaaac

SEQ ID NO: 302322 - DNA, 12 bp, Artificial Sequence
  Oligonukleotid-Primer
ttttgacgatag

SEQ ID NO: 302323 - DNA, 12 bp, Artificial Sequence
  Oligonucleotide primer for the detection of SNP TSC0019937
aaaacccacccc

SEQ ID NO: 302324 - DNA, 12 bp, Artificial Sequence
  Oligonucleotide primer for the detection of SNP TSC0019937
gagttattagtg

SEQ ID NO: 302325 - DNA, 12 bp, Artificial Sequence
  Oligonucleotide primer for the detection of SNP TSC0019940
ttttctctaaaa

SEQ ID NO: 302326 - DNA, 12 bp, Artificial Sequence
  Oligonukleotid-Primer
ttttttttgaga

SEQ ID NO: 302327 - DNA, 12 bp, Artificial Sequence
  Oligonucleotide primer for the detection of SNP TSC0019941
taacacaaccat

SEQ ID NO: 302328 - DNA, 12 bp, Artificial Sequence
  Oligonucleotide primer for the detection of SNP TSC0019941
taacacaaccgt

SEQ ID NO: 302329 - DNA, 12 bp, Artificial Sequence
  Oligonucleotide primer for the detection of SNP TSC0019941
taacacgaccat

SEQ ID NO: 302330 - DNA, 12 bp, Artificial Sequence
  Oligonucleotide primer for the detection of SNP TSC0019941
taacacgaccgt

SEQ ID NO: 302331 - DNA, 12 bp, Artificial Sequence
  Oligonucleotide primer for the detection of SNP TSC0019941
tgtttgttttag

SEQ ID NO: 302332 - DNA, 12 bp, Artificial Sequence
  Oligonucleotide primer for the detection of SNP TSC0019944
tttcctctctaa

SEQ ID NO: 302333 - DNA, 12 bp, Artificial Sequence
  Oligonucleotide primer for the detection of SNP TSC0019944
agaaggaagagg

SEQ ID NO: 302334 - DNA, 12 bp, Artificial Sequence
  Oligonucleotide primer for the detection of SNP TSC0019945
atataaaataat

SEQ ID NO: 302335 - DNA, 12 bp, Artificial Sequence
  Oligonucleotide primer for the detection of SNP TSC0019945
aaatgaaagtga

SEQ ID NO: 302336 - DNA, 12 bp, Artificial Sequence
  Oligonucleotide primer for the detection of SNP TSC0019945
aaatgaaagcga

SEQ ID NO: 302337 - DNA, 12 bp, Artificial Sequence
  Oligonucleotide primer for the detection of SNP TSC0019946
ttactcaaaaac

SEQ ID NO: 302338 - DNA, 12 bp, Artificial Sequence
  Oligonucleotide primer for the detection of SNP TSC0019946
aaatcctttaaa

SEQ ID NO: 302339 - DNA, 12 bp, Artificial Sequence
  Oligonucleotide primer for the detection of SNP TSC0019946
ttgtttaggggt

SEQ ID NO: 302340 - DNA, 12 bp, Artificial Sequence
  Oligonucleotide primer for the detection of SNP TSC0019947
attttctttttc

SEQ ID NO: 302341 - DNA, 12 bp, Artificial Sequence
  Oligonucleotide primer for the detection of SNP TSC0019948
accaaaaaccac

SEQ ID NO: 302342 - DNA, 12 bp, Artificial Sequence
  Oligonucleotide primer for the detection of SNP TSC0019948
agggttatttag

SEQ ID NO: 302343 - DNA, 12 bp, Artificial Sequence
  Oligonucleotide primer for the detection of SNP TSC0019948
aaaatcatctaa

SEQ ID NO: 302344 - DNA, 12 bp, Artificial Sequence
  Oligonucleotide primer for the detection of SNP TSC0019948
gttagggattat

SEQ ID NO: 302345 - DNA, 12 bp, Artificial Sequence
  Oligonucleotide primer for the detection of SNP TSC0019956
cattcacctaca

SEQ ID NO: 302346 - DNA, 12 bp, Artificial Sequence
  Oligonucleotide primer for the detection of SNP TSC0019956
atatttatttgt

SEQ ID NO: 302347 - DNA, 12 bp, Artificial Sequence
  Oligonucleotide primer for the detection of SNP TSC0019957
aaaaatccttat

SEQ ID NO: 302348 - DNA, 12 bp, Artificial Sequence
  Oligonucleotide primer for the detection of SNP TSC0019957
agatttttgtta

SEQ ID NO: 302349 - DNA, 12 bp, Artificial Sequence
  Oligonucleotide primer for the detection of SNP TSC0019959
ctaaaaccaaac

SEQ ID NO: 302350 - DNA, 12 bp, Artificial Sequence
  Oligonucleotide primer for the detection of SNP TSC0019959
gtggtagggtag

SEQ ID NO: 302351 - DNA, 12 bp, Artificial Sequence
  Oligonucleotide primer for the detection of SNP TSC0019959
gcggtagggtag

SEQ ID NO: 302352 - DNA, 12 bp, Artificial Sequence
  Oligonucleotide primer for the detection of SNP TSC0019960
ccaaactaatct

SEQ ID NO: 302353 - DNA, 12 bp, Artificial Sequence
  Oligonucleotide primer for the detection of SNP TSC0019960
tgagtttatgaa

SEQ ID NO: 302354 - DNA, 12 bp, Artificial Sequence
  Oligonucleotide primer for the detection of SNP TSC0019960
taaattcataaa

SEQ ID NO: 302355 - DNA, 12 bp, Artificial Sequence
  Oligonucleotide primer for the detection of SNP TSC0019961
cttcactttatc

SEQ ID NO: 302356 - DNA, 12 bp, Artificial Sequence
  Oligonucleotide primer for the detection of SNP TSC0019961
attaaaaaggta

SEQ ID NO: 302357 - DNA, 12 bp, Artificial Sequence
  Oligonucleotide primer for the detection of SNP TSC0019962
aactcccattta

SEQ ID NO: 302358 - DNA, 12 bp, Artificial Sequence
  Oligonucleotide primer for the detection of SNP TSC0019962
tgatttagatat

SEQ ID NO: 302359 - DNA, 12 bp, Artificial Sequence
  Oligonucleotide primer for the detection of SNP TSC0019962
cgatttagatat

SEQ ID NO: 302360 - DNA, 12 bp, Artificial Sequence
  Oligonucleotide primer for the detection of SNP TSC0019962
tgatttagatac

SEQ ID NO: 302361 - DNA, 12 bp, Artificial Sequence
  Oligonucleotide primer for the detection of SNP TSC0019962
cgatttagatac

SEQ ID NO: 302362 - DNA, 12 bp, Artificial Sequence
  Oligonucleotide primer for the detection of SNP TSC0019962
tcaattcaaaca

SEQ ID NO: 302363 - DNA, 12 bp, Artificial Sequence
  Oligonucleotide primer for the detection of SNP TSC0019962
tcgattcaaaca

SEQ ID NO: 302364 - DNA, 12 bp, Artificial Sequence
  Oligonucleotide primer for the detection of SNP TSC0019963
tcaaaaaactct

SEQ ID NO: 302365 - DNA, 12 bp, Artificial Sequence
  Oligonucleotide primer for the detection of SNP TSC0019963
atttttgttgag

SEQ ID NO: 302366 - DNA, 12 bp, Artificial Sequence
  Oligonucleotide primer for the detection of SNP TSC0019965
tgttttaaaaat

SEQ ID NO: 302367 - DNA, 12 bp, Artificial Sequence
  Oligonucleotide primer for the detection of SNP TSC0019966
caaatcctccct

SEQ ID NO: 302368 - DNA, 12 bp, Artificial Sequence
  Oligonucleotide primer for the detection of SNP TSC0019966
taggagtgttga

SEQ ID NO: 302369 - DNA, 12 bp, Artificial Sequence
  Oligonucleotide primer for the detection of SNP TSC0019967
cctcaatttcct

SEQ ID NO: 302370 - DNA, 12 bp, Artificial Sequence
  Oligonucleotide primer for the detection of SNP TSC0019967
ggttttgttttg

SEQ ID NO: 302371 - DNA, 12 bp, Artificial Sequence
  Oligonucleotide primer for the detection of SNP TSC0019967
ggtttcgttttg

SEQ ID NO: 302372 - DNA, 12 bp, Artificial Sequence
  Oligonucleotide primer for the detection of SNP TSC0019967
aactccatttta

SEQ ID NO: 302373 - DNA, 12 bp, Artificial Sequence
  Oligonucleotide primer for the detection of SNP TSC0019967
aactccgtttta

SEQ ID NO: 302374 - DNA, 12 bp, Artificial Sequence
  Oligonucleotide primer for the detection of SNP TSC0019971
aatttaaaaact

SEQ ID NO: 302375 - DNA, 12 bp, Artificial Sequence
  Oligonucleotide primer for the detection of SNP TSC0019971
tttatgattata

SEQ ID NO: 302376 - DNA, 12 bp, Artificial Sequence
  Oligonucleotide primer for the detection of SNP TSC0019971
ataattataaaa

SEQ ID NO: 302377 - DNA, 12 bp, Artificial Sequence
  Oligonucleotide primer for the detection of SNP TSC0019971
aatttgagggtt

SEQ ID NO: 302378 - DNA, 12 bp, Artificial Sequence
  Oligonucleotide primer for the detection of SNP TSC0019972
tacaaataaaat

SEQ ID NO: 302379 - DNA, 12 bp, Artificial Sequence
  Oligonucleotide primer for the detection of SNP TSC0019972
attccttttcca

SEQ ID NO: 302380 - DNA, 12 bp, Artificial Sequence
  Oligonucleotide primer for the detection of SNP TSC0019972
tgtaaatagggt

SEQ ID NO: 302381 - DNA, 12 bp, Artificial Sequence
  Oligonucleotide primer for the detection of SNP TSC0019973
tccaaaaaaaac

SEQ ID NO: 302382 - DNA, 12 bp, Artificial Sequence
  Oligonucleotide primer for the detection of SNP TSC0019973
tttgatgtaata

SEQ ID NO: 302383 - DNA, 12 bp, Artificial Sequence
  Oligonucleotide primer for the detection of SNP TSC0019973
tctaatacaaca

SEQ ID NO: 302384 - DNA, 12 bp, Artificial Sequence
  Oligonucleotide primer for the detection of SNP TSC0019973
tttagggagggt

SEQ ID NO: 302385 - DNA, 12 bp, Artificial Sequence
  Oligonucleotide primer for the detection of SNP TSC0019974
aaataaccccca

SEQ ID NO: 302386 - DNA, 12 bp, Artificial Sequence
  Oligonucleotide primer for the detection of SNP TSC0019974
aaataacccccg

SEQ ID NO: 302387 - DNA, 12 bp, Artificial Sequence
  Oligonucleotide primer for the detection of SNP TSC0019974
cccttactatat

SEQ ID NO: 302388 - DNA, 12 bp, Artificial Sequence
  Oligonucleotide primer for the detection of SNP TSC0019974
ggagtgattttt

SEQ ID NO: 302389 - DNA, 12 bp, Artificial Sequence
  Oligonucleotide primer for the detection of SNP TSC0019974
ggagtgattttc

SEQ ID NO: 302390 - DNA, 12 bp, Artificial Sequence
  Oligonucleotide primer for the detection of SNP TSC0019975
taaactttttct

SEQ ID NO: 302391 - DNA, 12 bp, Artificial Sequence
  Oligonucleotide primer for the detection of SNP TSC0019975
tttagtgattta

SEQ ID NO: 302392 - DNA, 12 bp, Artificial Sequence
  Oligonucleotide primer for the detection of SNP TSC0019979
cacaactccaaa

SEQ ID NO: 302393 - DNA, 12 bp, Artificial Sequence
  Oligonucleotide primer for the detection of SNP TSC0019979
ccaaactcctct

SEQ ID NO: 302394 - DNA, 12 bp, Artificial Sequence
  Oligonucleotide primer for the detection of SNP TSC0019979
tatagttttagg

SEQ ID NO: 302395 - DNA, 12 bp, Artificial Sequence
  Oligonucleotide primer for the detection of SNP TSC0019980
gttttttaatac

SEQ ID NO: 302396 - DNA, 12 bp, Artificial Sequence
  Oligonucleotide primer for the detection of SNP TSC0019980
actctctaatac

SEQ ID NO: 302397 - DNA, 12 bp, Artificial Sequence
  Oligonucleotide primer for the detection of SNP TSC0019980
tgaagttaggtg

SEQ ID NO: 302398 - DNA, 12 bp, Artificial Sequence
  Oligonucleotide primer for the detection of SNP TSC0019981
ataacataaaac

SEQ ID NO: 302399 - DNA, 12 bp, Artificial Sequence
  Oligonucleotide primer for the detection of SNP TSC0019981
attgaataattt

SEQ ID NO: 302400 - DNA, 12 bp, Artificial Sequence
  Oligonucleotide primer for the detection of SNP TSC0019981
ttaaacaactta

SEQ ID NO: 302401 - DNA, 12 bp, Artificial Sequence
  Oligonucleotide primer for the detection of SNP TSC0019981
taatatgggatt

SEQ ID NO: 302402 - DNA, 12 bp, Artificial Sequence
  Oligonucleotide primer for the detection of SNP TSC0019982
cattattttctt

SEQ ID NO: 302403 - DNA, 12 bp, Artificial Sequence
  Oligonucleotide primer for the detection of SNP TSC0019982
tttagtttttgg

SEQ ID NO: 302404 - DNA, 12 bp, Artificial Sequence
  Oligonucleotide primer for the detection of SNP TSC0019983
tcccctttcctc

SEQ ID NO: 302405 - DNA, 12 bp, Artificial Sequence
  Oligonucleotide primer for the detection of SNP TSC0019983
tggttggagggg

SEQ ID NO: 302406 - DNA, 12 bp, Artificial Sequence
  Oligonucleotide primer for the detection of SNP TSC0019983
cggttggagggg

SEQ ID NO: 302407 - DNA, 12 bp, Artificial Sequence
  Oligonucleotide primer for the detection of SNP TSC0019985
aaacaatatatc

SEQ ID NO: 302408 - DNA, 12 bp, Artificial Sequence
  Oligonucleotide primer for the detection of SNP TSC0019985
aaacgatatatc

SEQ ID NO: 302409 - DNA, 12 bp, Artificial Sequence
  Oligonucleotide primer for the detection of SNP TSC0019986
aatcacaaaaaa

SEQ ID NO: 302410 - DNA, 12 bp, Artificial Sequence
  Oligonucleotide primer for the detection of SNP TSC0019986
gtttagatatat

SEQ ID NO: 302411 - DNA, 12 bp, Artificial Sequence
  Oligonucleotide primer for the detection of SNP TSC0019986
atttaaacacac

SEQ ID NO: 302412 - DNA, 12 bp, Artificial Sequence
  Oligonucleotide primer for the detection of SNP TSC0019987
cttattaacctt

SEQ ID NO: 302413 - DNA, 12 bp, Artificial Sequence
  Oligonucleotide primer for the detection of SNP TSC0019988
attataattaaa

SEQ ID NO: 302414 - DNA, 12 bp, Artificial Sequence
  Oligonucleotide primer for the detection of SNP TSC0019988
agtattatgatt

SEQ ID NO: 302415 - DNA, 12 bp, Artificial Sequence
  Oligonucleotide primer for the detection of SNP TSC0019989
acccataaccac

SEQ ID NO: 302416 - DNA, 12 bp, Artificial Sequence
  Oligonucleotide primer for the detection of SNP TSC0019990
aaaaacacaact

SEQ ID NO: 302417 - DNA, 12 bp, Artificial Sequence
  Oligonucleotide primer for the detection of SNP TSC0019990
aaaaacacgact

SEQ ID NO: 302418 - DNA, 12 bp, Artificial Sequence
  Oligonucleotide primer for the detection of SNP TSC0019990
aaaaacgcaact

SEQ ID NO: 302419 - DNA, 12 bp, Artificial Sequence
  Oligonucleotide primer for the detection of SNP TSC0019990
aaaaacgcgact

SEQ ID NO: 302420 - DNA, 12 bp, Artificial Sequence
  Oligonucleotide primer for the detection of SNP TSC0019990
gtttttggtgag

SEQ ID NO: 302421 - DNA, 12 bp, Artificial Sequence
  Oligonucleotide primer for the detection of SNP TSC0019991
aatcataaaata

SEQ ID NO: 302422 - DNA, 12 bp, Artificial Sequence
  Oligonucleotide primer for the detection of SNP TSC0019991
gatcataaaata

SEQ ID NO: 302423 - DNA, 12 bp, Artificial Sequence
  Oligonucleotide primer for the detection of SNP TSC0019991
ttttaaagaggt

SEQ ID NO: 302424 - DNA, 12 bp, Artificial Sequence
  Oligonucleotide primer for the detection of SNP TSC0019991
tcccaaaaaaac

SEQ ID NO: 302425 - DNA, 12 bp, Artificial Sequence
  Oligonucleotide primer for the detection of SNP TSC0019991
tgattatgaagt

SEQ ID NO: 302426 - DNA, 12 bp, Artificial Sequence
  Oligonucleotide primer for the detection of SNP TSC0019991
cgattatgaagt

SEQ ID NO: 302427 - DNA, 12 bp, Artificial Sequence
  Oligonukleotid-Primer
aaacaaaaccga

SEQ ID NO: 302428 - DNA, 12 bp, Artificial Sequence
  Oligonucleotide primer for the detection of SNP TSC0019992
aaacgaaaccaa

SEQ ID NO: 302429 - DNA, 12 bp, Artificial Sequence
  Oligonucleotide primer for the detection of SNP TSC0019992
aaacgaaaccga

SEQ ID NO: 302430 - DNA, 12 bp, Artificial Sequence
  Oligonucleotide primer for the detection of SNP TSC0019992
tgttaggttgta

SEQ ID NO: 302431 - DNA, 12 bp, Artificial Sequence
  Oligonucleotide primer for the detection of SNP TSC0019992
cgttaggttgta

SEQ ID NO: 302432 - DNA, 12 bp, Artificial Sequence
  Oligonucleotide primer for the detection of SNP TSC0019992
tgttaggtcgta

SEQ ID NO: 302433 - DNA, 12 bp, Artificial Sequence
  Oligonucleotide primer for the detection of SNP TSC0019992
cgttaggtcgta

SEQ ID NO: 302434 - DNA, 12 bp, Artificial Sequence
  Oligonucleotide primer for the detection of SNP TSC0019992
accaaaccacaa

SEQ ID NO: 302435 - DNA, 12 bp, Artificial Sequence
  Oligonucleotide primer for the detection of SNP TSC0019992
accaaaccgcaa

SEQ ID NO: 302436 - DNA, 12 bp, Artificial Sequence
  Oligonucleotide primer for the detection of SNP TSC0019992
gccaaaccacaa

SEQ ID NO: 302437 - DNA, 12 bp, Artificial Sequence
  Oligonucleotide primer for the detection of SNP TSC0019992
gccaaaccgcaa

SEQ ID NO: 302438 - DNA, 12 bp, Artificial Sequence
  Oligonucleotide primer for the detection of SNP TSC0019992
aatgaggttggt

SEQ ID NO: 302439 - DNA, 12 bp, Artificial Sequence
  Oligonucleotide primer for the detection of SNP TSC0019992
aacgaggttggt

SEQ ID NO: 302440 - DNA, 12 bp, Artificial Sequence
  Oligonucleotide primer for the detection of SNP TSC0019992
aatgaggtcggt

SEQ ID NO: 302441 - DNA, 12 bp, Artificial Sequence
  Oligonucleotide primer for the detection of SNP TSC0019992
aacgaggtcggt

SEQ ID NO: 302442 - DNA, 12 bp, Artificial Sequence
  Oligonucleotide primer for the detection of SNP TSC0019992
aatgaggttggc

SEQ ID NO: 302443 - DNA, 12 bp, Artificial Sequence
  Oligonucleotide primer for the detection of SNP TSC0019992
aacgaggttggc

SEQ ID NO: 302444 - DNA, 12 bp, Artificial Sequence
  Oligonucleotide primer for the detection of SNP TSC0019992
aatgaggtcggc

SEQ ID NO: 302445 - DNA, 12 bp, Artificial Sequence
  Oligonucleotide primer for the detection of SNP TSC0019992
aacgaggtcggc

SEQ ID NO: 302446 - DNA, 12 bp, Artificial Sequence
  Oligonucleotide primer for the detection of SNP TSC0019994
aaaattaacctt

SEQ ID NO: 302447 - DNA, 12 bp, Artificial Sequence
  Oligonucleotide primer for the detection of SNP TSC0019994
tactctctaccc

SEQ ID NO: 302448 - DNA, 12 bp, Artificial Sequence
  Oligonucleotide primer for the detection of SNP TSC0019994
gaagttggtttt

SEQ ID NO: 302449 - DNA, 12 bp, Artificial Sequence
  Oligonucleotide primer for the detection of SNP TSC0019995
aaaaaatatctt

SEQ ID NO: 302450 - DNA, 12 bp, Artificial Sequence
  Oligonucleotide primer for the detection of SNP TSC0019995
aaaaaggtttgt

SEQ ID NO: 302451 - DNA, 12 bp, Artificial Sequence
  Oligonucleotide primer for the detection of SNP TSC0019995
aaaaaatgtttt

SEQ ID NO: 302452 - DNA, 12 bp, Artificial Sequence
  Oligonucleotide primer for the detection of SNP TSC0019997
tttgtttggttt

SEQ ID NO: 302453 - DNA, 12 bp, Artificial Sequence
  Oligonucleotide primer for the detection of SNP TSC0019997
tttacctaaccc

SEQ ID NO: 302454 - DNA, 12 bp, Artificial Sequence
  Oligonucleotide primer for the detection of SNP TSC0019997
tagatgggaagg

SEQ ID NO: 302455 - DNA, 12 bp, Artificial Sequence
  Oligonucleotide primer for the detection of SNP TSC0019999
atggttatttat

SEQ ID NO: 302456 - DNA, 12 bp, Artificial Sequence
  Oligonucleotide primer for the detection of SNP TSC0019999
acggttatttat

SEQ ID NO: 302457 - DNA, 12 bp, Artificial Sequence
  Oligonucleotide primer for the detection of SNP TSC0019999
atggttatttac

SEQ ID NO: 302458 - DNA, 12 bp, Artificial Sequence
  Oligonucleotide primer for the detection of SNP TSC0019999
acggttatttac

SEQ ID NO: 302459 - DNA, 12 bp, Artificial Sequence
  Oligonucleotide primer for the detection of SNP TSC0019999
cacaaccaccta

SEQ ID NO: 302460 - DNA, 12 bp, Artificial Sequence
  Oligonucleotide primer for the detection of SNP TSC0019999
cacgaccaccta

SEQ ID NO: 302461 - DNA, 12 bp, Artificial Sequence
  Oligonucleotide primer for the detection of SNP TSC0019999
aggggatataat

SEQ ID NO: 302462 - DNA, 12 bp, Artificial Sequence
  Oligonucleotide primer for the detection of SNP TSC0020004
atcccttcaaca

SEQ ID NO: 302463 - DNA, 12 bp, Artificial Sequence
  Oligonucleotide primer for the detection of SNP TSC0020004
atcccttcaacg

SEQ ID NO: 302464 - DNA, 12 bp, Artificial Sequence
  Oligonucleotide primer for the detection of SNP TSC0020004
tttgggagtagt

SEQ ID NO: 302465 - DNA, 12 bp, Artificial Sequence
  Oligonucleotide primer for the detection of SNP TSC0020004
tttgggagtagc

SEQ ID NO: 302466 - DNA, 12 bp, Artificial Sequence
  Oligonucleotide primer for the detection of SNP TSC0020004
gtttttttagtg

SEQ ID NO: 302467 - DNA, 12 bp, Artificial Sequence
  Oligonucleotide primer for the detection of SNP TSC0020004
gtttttttagcg

SEQ ID NO: 302468 - DNA, 12 bp, Artificial Sequence
  Oligonucleotide primer for the detection of SNP TSC0020005
tccctctatacc

SEQ ID NO: 302469 - DNA, 12 bp, Artificial Sequence
  Oligonucleotide primer for the detection of SNP TSC0020005
tggggttttgag

SEQ ID NO: 302470 - DNA, 12 bp, Artificial Sequence
  Oligonucleotide primer for the detection of SNP TSC0020006
cctaacaaaact

SEQ ID NO: 302471 - DNA, 12 bp, Artificial Sequence
  Oligonucleotide primer for the detection of SNP TSC0020006
gatttattttgg

SEQ ID NO: 302472 - DNA, 12 bp, Artificial Sequence
  Oligonucleotide primer for the detection of SNP TSC0020009
ttactaaaacca

SEQ ID NO: 302473 - DNA, 12 bp, Artificial Sequence
  Oligonucleotide primer for the detection of SNP TSC0020009
tggtttgtaaat

SEQ ID NO: 302474 - DNA, 12 bp, Artificial Sequence
  Oligonucleotide primer for the detection of SNP TSC0020009
taatttacaaac

SEQ ID NO: 302475 - DNA, 12 bp, Artificial Sequence
  Oligonucleotide primer for the detection of SNP TSC0020009
ttgttagagtta

SEQ ID NO: 302476 - DNA, 12 bp, Artificial Sequence
  Oligonucleotide primer for the detection of SNP TSC0020010
caacaaatattc

SEQ ID NO: 302477 - DNA, 12 bp, Artificial Sequence
  Oligonucleotide primer for the detection of SNP TSC0020010
caacgaatattc

SEQ ID NO: 302478 - DNA, 12 bp, Artificial Sequence
  Oligonucleotide primer for the detection of SNP TSC0020010
tttaagataatt

SEQ ID NO: 302479 - DNA, 12 bp, Artificial Sequence
  Oligonucleotide primer for the detection of SNP TSC0020010
ccaaaacaatca

SEQ ID NO: 302480 - DNA, 12 bp, Artificial Sequence
  Oligonucleotide primer for the detection of SNP TSC0020010
aatgaatgtttt

SEQ ID NO: 302481 - DNA, 12 bp, Artificial Sequence
  Oligonucleotide primer for the detection of SNP TSC0020010
aacgaatgtttt

SEQ ID NO: 302482 - DNA, 12 bp, Artificial Sequence
  Oligonucleotide primer for the detection of SNP TSC0020019
actctctaatcc

SEQ ID NO: 302483 - DNA, 12 bp, Artificial Sequence
  Oligonucleotide primer for the detection of SNP TSC0020019
aaataggatgaa

SEQ ID NO: 302484 - DNA, 12 bp, Artificial Sequence
  Oligonucleotide primer for the detection of SNP TSC0020021
ttcttattaatc

SEQ ID NO: 302485 - DNA, 12 bp, Artificial Sequence
  Oligonucleotide primer for the detection of SNP TSC0020021
tgttatagatat

SEQ ID NO: 302486 - DNA, 12 bp, Artificial Sequence
  Oligonucleotide primer for the detection of SNP TSC0020021
attataaataca

SEQ ID NO: 302487 - DNA, 12 bp, Artificial Sequence
  Oligonucleotide primer for the detection of SNP TSC0020021
ttttattaattt

SEQ ID NO: 302488 - DNA, 12 bp, Artificial Sequence
  Oligonucleotide primer for the detection of SNP TSC0020022
ttataattatat

SEQ ID NO: 302489 - DNA, 12 bp, Artificial Sequence
  Oligonucleotide primer for the detection of SNP TSC0020022
ccataaccatat

SEQ ID NO: 302490 - DNA, 12 bp, Artificial Sequence
  Oligonucleotide primer for the detection of SNP TSC0020022
taattagggaaa

SEQ ID NO: 302491 - DNA, 12 bp, Artificial Sequence
  Oligonucleotide primer for the detection of SNP TSC0020023
acatttctaaaa

SEQ ID NO: 302492 - DNA, 12 bp, Artificial Sequence
  Oligonucleotide primer for the detection of SNP TSC0020023
aagaggattttt

SEQ ID NO: 302493 - DNA, 12 bp, Artificial Sequence
  Oligonucleotide primer for the detection of SNP TSC0020023
aaaaaaactttt

SEQ ID NO: 302494 - DNA, 12 bp, Artificial Sequence
  Oligonucleotide primer for the detection of SNP TSC0020023
gtatttttaaga

SEQ ID NO: 302495 - DNA, 12 bp, Artificial Sequence
  Oligonucleotide primer for the detection of SNP TSC0020027
ataaataaaatt

SEQ ID NO: 302496 - DNA, 12 bp, Artificial Sequence
  Oligonucleotide primer for the detection of SNP TSC0020027
tgtttgttttaa

SEQ ID NO: 302497 - DNA, 12 bp, Artificial Sequence
  Oligonucleotide primer for the detection of SNP TSC0020028
attatcttataa

SEQ ID NO: 302498 - DNA, 12 bp, Artificial Sequence
  Oligonucleotide primer for the detection of SNP TSC0020028
ataaattgagtt

SEQ ID NO: 302499 - DNA, 12 bp, Artificial Sequence
  Oligonucleotide primer for the detection of SNP TSC0020028
acaaactaaatt

SEQ ID NO: 302500 - DNA, 12 bp, Artificial Sequence
  Oligonucleotide primer for the detection of SNP TSC0020035
ataacaaacaat

SEQ ID NO: 302501 - DNA, 12 bp, Artificial Sequence
  Oligonucleotide primer for the detection of SNP TSC0020035
ttgtgagtagag

SEQ ID NO: 302502 - DNA, 12 bp, Artificial Sequence
  Oligonucleotide primer for the detection of SNP TSC0020035
ttgcgagtagag

SEQ ID NO: 302503 - DNA, 12 bp, Artificial Sequence
  Oligonucleotide primer for the detection of SNP TSC0020038
tttttatcacta

SEQ ID NO: 302504 - DNA, 12 bp, Artificial Sequence
  Oligonucleotide primer for the detection of SNP TSC0020038
agggaggtggtt

SEQ ID NO: 302505 - DNA, 12 bp, Artificial Sequence
  Oligonucleotide primer for the detection of SNP TSC0020038
ttttttattatt

SEQ ID NO: 302506 - DNA, 12 bp, Artificial Sequence
  Oligonucleotide primer for the detection of SNP TSC0020039
ccatatctataa

SEQ ID NO: 302507 - DNA, 12 bp, Artificial Sequence
  Oligonucleotide primer for the detection of SNP TSC0020039
aatcacttccat

SEQ ID NO: 302508 - DNA, 12 bp, Artificial Sequence
  Oligonucleotide primer for the detection of SNP TSC0020039
ttatgtttataa

SEQ ID NO: 302509 - DNA, 12 bp, Artificial Sequence
  Oligonucleotide primer for the detection of SNP TSC0020040
cacaatttactc

SEQ ID NO: 302510 - DNA, 12 bp, Artificial Sequence
  Oligonucleotide primer for the detection of SNP TSC0020041
acaaaacaaaca

SEQ ID NO: 302511 - DNA, 12 bp, Artificial Sequence
  Oligonucleotide primer for the detection of SNP TSC0020041
ggattaaggatt

SEQ ID NO: 302512 - DNA, 12 bp, Artificial Sequence
  Oligonucleotide primer for the detection of SNP TSC0020041
ggattaaggatc

SEQ ID NO: 302513 - DNA, 12 bp, Artificial Sequence
  Oligonucleotide primer for the detection of SNP TSC0020041
aaaccaaaaatc

SEQ ID NO: 302514 - DNA, 12 bp, Artificial Sequence
  Oligonucleotide primer for the detection of SNP TSC0020041
ggtaaagtaggt

SEQ ID NO: 302515 - DNA, 12 bp, Artificial Sequence
  Oligonucleotide primer for the detection of SNP TSC0020042
ggattttgtttg

SEQ ID NO: 302516 - DNA, 12 bp, Artificial Sequence
  Oligonucleotide primer for the detection of SNP TSC0020042
aaatcctaccta

SEQ ID NO: 302517 - DNA, 12 bp, Artificial Sequence
  Oligonucleotide primer for the detection of SNP TSC0020042
taattgaggggt

SEQ ID NO: 302518 - DNA, 12 bp, Artificial Sequence
  Oligonucleotide primer for the detection of SNP TSC0020043
cctccaaaaaat

SEQ ID NO: 302519 - DNA, 12 bp, Artificial Sequence
  Oligonucleotide primer for the detection of SNP TSC0020043
ttggagttttta

SEQ ID NO: 302520 - DNA, 12 bp, Artificial Sequence
  Oligonucleotide primer for the detection of SNP TSC0020046
aaaaccatttca

SEQ ID NO: 302521 - DNA, 12 bp, Artificial Sequence
  Oligonucleotide primer for the detection of SNP TSC0020046
aaaaccgtttca

SEQ ID NO: 302522 - DNA, 12 bp, Artificial Sequence
  Oligonucleotide primer for the detection of SNP TSC0020046
acctaaccaaca

SEQ ID NO: 302523 - DNA, 12 bp, Artificial Sequence
  Oligonucleotide primer for the detection of SNP TSC0020046
gattgttttatt

SEQ ID NO: 302524 - DNA, 12 bp, Artificial Sequence
  Oligonucleotide primer for the detection of SNP TSC0020046
gatcgttttatt

SEQ ID NO: 302525 - DNA, 12 bp, Artificial Sequence
  Oligonucleotide primer for the detection of SNP TSC0020048
tccccttaaccc

SEQ ID NO: 302526 - DNA, 12 bp, Artificial Sequence
  Oligonucleotide primer for the detection of SNP TSC0020048
ttttagatattg

SEQ ID NO: 302527 - DNA, 12 bp, Artificial Sequence
  Oligonucleotide primer for the detection of SNP TSC0020048
ctctaaacacta

SEQ ID NO: 302528 - DNA, 12 bp, Artificial Sequence
  Oligonucleotide primer for the detection of SNP TSC0020049
aaaataaaattc

SEQ ID NO: 302529 - DNA, 12 bp, Artificial Sequence
  Oligonucleotide primer for the detection of SNP TSC0020049
tacgtttggtta

SEQ ID NO: 302530 - DNA, 12 bp, Artificial Sequence
  Oligonucleotide primer for the detection of SNP TSC0020049
tatgttcggtta

SEQ ID NO: 302531 - DNA, 12 bp, Artificial Sequence
  Oligonucleotide primer for the detection of SNP TSC0020049
tacgttcggtta

SEQ ID NO: 302532 - DNA, 12 bp, Artificial Sequence
  Oligonucleotide primer for the detection of SNP TSC0020050
attacaaacacc

SEQ ID NO: 302533 - DNA, 12 bp, Artificial Sequence
  Oligonucleotide primer for the detection of SNP TSC0020050
attacaaacgcc

SEQ ID NO: 302534 - DNA, 12 bp, Artificial Sequence
  Oligonucleotide primer for the detection of SNP TSC0020050
taggtgtggtgg

SEQ ID NO: 302535 - DNA, 12 bp, Artificial Sequence
  Oligonucleotide primer for the detection of SNP TSC0020050
taggcgtggtgg

SEQ ID NO: 302536 - DNA, 12 bp, Artificial Sequence
  Oligonucleotide primer for the detection of SNP TSC0020050
caaacataataa

SEQ ID NO: 302537 - DNA, 12 bp, Artificial Sequence
  Oligonucleotide primer for the detection of SNP TSC0020050
caaacgtaataa

SEQ ID NO: 302538 - DNA, 12 bp, Artificial Sequence
  Oligonucleotide primer for the detection of SNP TSC0020053
atctaaaatata

SEQ ID NO: 302539 - DNA, 12 bp, Artificial Sequence
  Oligonucleotide primer for the detection of SNP TSC0020053
atctcttccctc

SEQ ID NO: 302540 - DNA, 12 bp, Artificial Sequence
  Oligonucleotide primer for the detection of SNP TSC0020053
gtttgagatata

SEQ ID NO: 302541 - DNA, 12 bp, Artificial Sequence
  Oligonucleotide primer for the detection of SNP TSC0020054
aaccaaaaccac

SEQ ID NO: 302542 - DNA, 12 bp, Artificial Sequence
  Oligonucleotide primer for the detection of SNP TSC0020054
aataagtatttt

SEQ ID NO: 302543 - DNA, 12 bp, Artificial Sequence
  Oligonucleotide primer for the detection of SNP TSC0020054
ggttagaattat

SEQ ID NO: 302544 - DNA, 12 bp, Artificial Sequence
  Oligonucleotide primer for the detection of SNP TSC0020054
ggttagaattac

SEQ ID NO: 302545 - DNA, 12 bp, Artificial Sequence
  Oligonucleotide primer for the detection of SNP TSC0020055
cacactcaatca

SEQ ID NO: 302546 - DNA, 12 bp, Artificial Sequence
  Oligonucleotide primer for the detection of SNP TSC0020055
tctaaaacttct

SEQ ID NO: 302547 - DNA, 12 bp, Artificial Sequence
  Oligonucleotide primer for the detection of SNP TSC0020055
tatatttaatta

SEQ ID NO: 302548 - DNA, 12 bp, Artificial Sequence
  Oligonucleotide primer for the detection of SNP TSC0020056
aaaaataacaca

SEQ ID NO: 302549 - DNA, 12 bp, Artificial Sequence
  Oligonucleotide primer for the detection of SNP TSC0020056
ttttgcgtgatt

SEQ ID NO: 302550 - DNA, 12 bp, Artificial Sequence
  Oligonucleotide primer for the detection of SNP TSC0020056
tctacataatta

SEQ ID NO: 302551 - DNA, 12 bp, Artificial Sequence
  Oligonucleotide primer for the detection of SNP TSC0020056
tctacgtaatta

SEQ ID NO: 302552 - DNA, 12 bp, Artificial Sequence
  Oligonucleotide primer for the detection of SNP TSC0020056
aagataatatat

SEQ ID NO: 302553 - DNA, 12 bp, Artificial Sequence
  Oligonucleotide primer for the detection of SNP TSC0020059
tggtttgttggt

SEQ ID NO: 302554 - DNA, 12 bp, Artificial Sequence
  Oligonucleotide primer for the detection of SNP TSC0020059
cggtttgttggt

SEQ ID NO: 302555 - DNA, 12 bp, Artificial Sequence
  Oligonucleotide primer for the detection of SNP TSC0020059
tggttcgttggt

SEQ ID NO: 302556 - DNA, 12 bp, Artificial Sequence
  Oligonucleotide primer for the detection of SNP TSC0020059
tggtttgtcggt

SEQ ID NO: 302557 - DNA, 12 bp, Artificial Sequence
  Oligonucleotide primer for the detection of SNP TSC0020059
cggttcgttggt

SEQ ID NO: 302558 - DNA, 12 bp, Artificial Sequence
  Oligonucleotide primer for the detection of SNP TSC0020059
cggtttgtcggt

SEQ ID NO: 302559 - DNA, 12 bp, Artificial Sequence
  Oligonucleotide primer for the detection of SNP TSC0020059
tggttcgtcggt

SEQ ID NO: 302560 - DNA, 12 bp, Artificial Sequence
  Oligonucleotide primer for the detection of SNP TSC0020059
cggttcgtcggt

SEQ ID NO: 302561 - DNA, 12 bp, Artificial Sequence
  Oligonucleotide primer for the detection of SNP TSC0020059
ccaactcaccaa

SEQ ID NO: 302562 - DNA, 12 bp, Artificial Sequence
  Oligonucleotide primer for the detection of SNP TSC0020059
ccaactcaccga

SEQ ID NO: 302563 - DNA, 12 bp, Artificial Sequence
  Oligonucleotide primer for the detection of SNP TSC0020059
ccaactcgccaa

SEQ ID NO: 302564 - DNA, 12 bp, Artificial Sequence
  Oligonucleotide primer for the detection of SNP TSC0020059
ccgactcaccaa

SEQ ID NO: 302565 - DNA, 12 bp, Artificial Sequence
  Oligonucleotide primer for the detection of SNP TSC0020059
ccaactcgccga

SEQ ID NO: 302566 - DNA, 12 bp, Artificial Sequence
  Oligonucleotide primer for the detection of SNP TSC0020059
ccgactcaccga

SEQ ID NO: 302567 - DNA, 12 bp, Artificial Sequence
  Oligonucleotide primer for the detection of SNP TSC0020059
ccgactcgccaa

SEQ ID NO: 302568 - DNA, 12 bp, Artificial Sequence
  Oligonucleotide primer for the detection of SNP TSC0020059
ccgactcgccga

SEQ ID NO: 302569 - DNA, 12 bp, Artificial Sequence
  Oligonucleotide primer for the detection of SNP TSC0020059
atgagtaggatg

SEQ ID NO: 302570 - DNA, 12 bp, Artificial Sequence
  Oligonucleotide primer for the detection of SNP TSC0020059
acgagtaggatg

SEQ ID NO: 302571 - DNA, 12 bp, Artificial Sequence
  Oligonucleotide primer for the detection of SNP TSC0020060
acataactaata

SEQ ID NO: 302572 - DNA, 12 bp, Artificial Sequence
  Oligonucleotide primer for the detection of SNP TSC0020060
tatattttttga

SEQ ID NO: 302573 - DNA, 12 bp, Artificial Sequence
  Oligonucleotide primer for the detection of SNP TSC0020060
acatcctctaaa

SEQ ID NO: 302574 - DNA, 12 bp, Artificial Sequence
  Oligonucleotide primer for the detection of SNP TSC0020062
tttaattatact

SEQ ID NO: 302575 - DNA, 12 bp, Artificial Sequence
  Oligonucleotide primer for the detection of SNP TSC0020062
ttttatgagtaa

SEQ ID NO: 302576 - DNA, 12 bp, Artificial Sequence
  Oligonucleotide primer for the detection of SNP TSC0020066
actacataacta

SEQ ID NO: 302577 - DNA, 12 bp, Artificial Sequence
  Oligonucleotide primer for the detection of SNP TSC0020066
tgatgtggaaat

SEQ ID NO: 302578 - DNA, 12 bp, Artificial Sequence
  Oligonucleotide primer for the detection of SNP TSC0020066
taatataaaaac

SEQ ID NO: 302579 - DNA, 12 bp, Artificial Sequence
  Oligonucleotide primer for the detection of SNP TSC0020066
attgtatggttg

SEQ ID NO: 302580 - DNA, 12 bp, Artificial Sequence
  Oligonucleotide primer for the detection of SNP TSC0020067
tacccaaatccc

SEQ ID NO: 302581 - DNA, 12 bp, Artificial Sequence
  Oligonucleotide primer for the detection of SNP TSC0020067
tagggatttgta

SEQ ID NO: 302582 - DNA, 12 bp, Artificial Sequence
  Oligonucleotide primer for the detection of SNP TSC0020067
caaaaatttata

SEQ ID NO: 302583 - DNA, 12 bp, Artificial Sequence
  Oligonucleotide primer for the detection of SNP TSC0020067
tatttaagtttt

SEQ ID NO: 302584 - DNA, 12 bp, Artificial Sequence
  Oligonucleotide primer for the detection of SNP TSC0020068
cccaaaaacaac

SEQ ID NO: 302585 - DNA, 12 bp, Artificial Sequence
  Oligonucleotide primer for the detection of SNP TSC0020068
aaagtatttgtg

SEQ ID NO: 302586 - DNA, 12 bp, Artificial Sequence
  Oligonucleotide primer for the detection of SNP TSC0020069
tagatgttaata

SEQ ID NO: 302587 - DNA, 12 bp, Artificial Sequence
  Oligonucleotide primer for the detection of SNP TSC0020071
ttatttttaggt

SEQ ID NO: 302588 - DNA, 12 bp, Artificial Sequence
  Oligonucleotide primer for the detection of SNP TSC0020071
ctacctttaaat

SEQ ID NO: 302589 - DNA, 12 bp, Artificial Sequence
  Oligonucleotide primer for the detection of SNP TSC0020071
gagaagggatga

SEQ ID NO: 302590 - DNA, 12 bp, Artificial Sequence
  Oligonucleotide primer for the detection of SNP TSC0020072
atttttagagta

SEQ ID NO: 302591 - DNA, 12 bp, Artificial Sequence
  Oligonucleotide primer for the detection of SNP TSC0020072
actcccaaaaca

SEQ ID NO: 302592 - DNA, 12 bp, Artificial Sequence
  Oligonucleotide primer for the detection of SNP TSC0020072
aaaagggagttt

SEQ ID NO: 302593 - DNA, 12 bp, Artificial Sequence
  Oligonucleotide primer for the detection of SNP TSC0020073
aggattataaag

SEQ ID NO: 302594 - DNA, 12 bp, Artificial Sequence
  Oligonucleotide primer for the detection of SNP TSC0020074
caaaaatttcat

SEQ ID NO: 302595 - DNA, 12 bp, Artificial Sequence
  Oligonucleotide primer for the detection of SNP TSC0020074
tttaaaaaggag

SEQ ID NO: 302596 - DNA, 12 bp, Artificial Sequence
  Oligonucleotide primer for the detection of SNP TSC0020075
cccaacctttaa

SEQ ID NO: 302597 - DNA, 12 bp, Artificial Sequence
  Oligonucleotide primer for the detection of SNP TSC0020075
gaaataaaattg

SEQ ID NO: 302598 - DNA, 12 bp, Artificial Sequence
  Oligonucleotide primer for the detection of SNP TSC0020076
ttacaataaacc

SEQ ID NO: 302599 - DNA, 12 bp, Artificial Sequence
  Oligonucleotide primer for the detection of SNP TSC0020076
tgtagtggtgta

SEQ ID NO: 302600 - DNA, 12 bp, Artificial Sequence
  Oligonucleotide primer for the detection of SNP TSC0020077
aataccattaat

SEQ ID NO: 302601 - DNA, 12 bp, Artificial Sequence
  Oligonucleotide primer for the detection of SNP TSC0020077
aataccgttaat

SEQ ID NO: 302602 - DNA, 12 bp, Artificial Sequence
  Oligonucleotide primer for the detection of SNP TSC0020077
aatggagtagaa

SEQ ID NO: 302603 - DNA, 12 bp, Artificial Sequence
  Oligonucleotide primer for the detection of SNP TSC0020078
aacttaaactac

SEQ ID NO: 302604 - DNA, 12 bp, Artificial Sequence
  Oligonucleotide primer for the detection of SNP TSC0020078
atttttattgta

SEQ ID NO: 302605 - DNA, 12 bp, Artificial Sequence
  Oligonucleotide primer for the detection of SNP TSC0020079
tacaaaaatcta

SEQ ID NO: 302606 - DNA, 12 bp, Artificial Sequence
  Oligonucleotide primer for the detection of SNP TSC0020079
tttggaataggt

SEQ ID NO: 302607 - DNA, 12 bp, Artificial Sequence
  Oligonucleotide primer for the detection of SNP TSC0020079
ataggagtttgt

SEQ ID NO: 302608 - DNA, 12 bp, Artificial Sequence
  Oligonucleotide primer for the detection of SNP TSC0020080
aaattacttcaa

SEQ ID NO: 302609 - DNA, 12 bp, Artificial Sequence
  Oligonucleotide primer for the detection of SNP TSC0020080
agaggaagttaa

SEQ ID NO: 302610 - DNA, 12 bp, Artificial Sequence
  Oligonucleotide primer for the detection of SNP TSC0020080
aggttattttag

SEQ ID NO: 302611 - DNA, 12 bp, Artificial Sequence
  Oligonucleotide primer for the detection of SNP TSC0020083
acaaaaaatact

SEQ ID NO: 302612 - DNA, 12 bp, Artificial Sequence
  Oligonucleotide primer for the detection of SNP TSC0020083
aagaaatatgta

SEQ ID NO: 302613 - DNA, 12 bp, Artificial Sequence
  Oligonucleotide primer for the detection of SNP TSC0020084
actattaaaccc

SEQ ID NO: 302614 - DNA, 12 bp, Artificial Sequence
  Oligonucleotide primer for the detection of SNP TSC0020084
tgattgttatgg

SEQ ID NO: 302615 - DNA, 12 bp, Artificial Sequence
  Oligonucleotide primer for the detection of SNP TSC0020084
taactatcataa

SEQ ID NO: 302616 - DNA, 12 bp, Artificial Sequence
  Oligonucleotide primer for the detection of SNP TSC0020084
attgttgggttt

SEQ ID NO: 302617 - DNA, 12 bp, Artificial Sequence
  Oligonucleotide primer for the detection of SNP TSC0020085
cccctcctcact

SEQ ID NO: 302618 - DNA, 12 bp, Artificial Sequence
  Oligonucleotide primer for the detection of SNP TSC0020085
aagagtggtagg

SEQ ID NO: 302619 - DNA, 12 bp, Artificial Sequence
  Oligonucleotide primer for the detection of SNP TSC0020087
aatacctactac

SEQ ID NO: 302620 - DNA, 12 bp, Artificial Sequence
  Oligonucleotide primer for the detection of SNP TSC0020087
gtaagaattgga

SEQ ID NO: 302621 - DNA, 12 bp, Artificial Sequence
  Oligonucleotide primer for the detection of SNP TSC0020088
taaaaaacttat

SEQ ID NO: 302622 - DNA, 12 bp, Artificial Sequence
  Oligonucleotide primer for the detection of SNP TSC0020088
tttatttatgat

SEQ ID NO: 302623 - DNA, 12 bp, Artificial Sequence
  Oligonucleotide primer for the detection of SNP TSC0020088
tttatctataat

SEQ ID NO: 302624 - DNA, 12 bp, Artificial Sequence
  Oligonucleotide primer for the detection of SNP TSC0020088
tgaggagtttat

SEQ ID NO: 302625 - DNA, 12 bp, Artificial Sequence
  Oligonucleotide primer for the detection of SNP TSC0020089
taccaatcatta

SEQ ID NO: 302626 - DNA, 12 bp, Artificial Sequence
  Oligonucleotide primer for the detection of SNP TSC0020089
ctcttcccttta

SEQ ID NO: 302627 - DNA, 12 bp, Artificial Sequence
  Oligonucleotide primer for the detection of SNP TSC0020089
gttaattattgt

SEQ ID NO: 302628 - DNA, 12 bp, Artificial Sequence
  Oligonucleotide primer for the detection of SNP TSC0020089
gttaattattgc

SEQ ID NO: 302629 - DNA, 12 bp, Artificial Sequence
  Oligonucleotide primer for the detection of SNP TSC0020090
ttctcctttctc

SEQ ID NO: 302630 - DNA, 12 bp, Artificial Sequence
  Oligonucleotide primer for the detection of SNP TSC0020090
aagataaaaagg

SEQ ID NO: 302631 - DNA, 12 bp, Artificial Sequence
  Oligonucleotide primer for the detection of SNP TSC0020091
atattatatttc

SEQ ID NO: 302632 - DNA, 12 bp, Artificial Sequence
  Oligonucleotide primer for the detection of SNP TSC0020091
aggagagaaagg

SEQ ID NO: 302633 - DNA, 12 bp, Artificial Sequence
  Oligonucleotide primer for the detection of SNP TSC0020097
tctataataact

SEQ ID NO: 302634 - DNA, 12 bp, Artificial Sequence
  Oligonucleotide primer for the detection of SNP TSC0020097
tgtttgttaaga

SEQ ID NO: 302635 - DNA, 12 bp, Artificial Sequence
  Oligonucleotide primer for the detection of SNP TSC0020098
atactaaaacac

SEQ ID NO: 302636 - DNA, 12 bp, Artificial Sequence
  Oligonucleotide primer for the detection of SNP TSC0020098
atactaaaacgc

SEQ ID NO: 302637 - DNA, 12 bp, Artificial Sequence
  Oligonucleotide primer for the detection of SNP TSC0020098
atagtattttta

SEQ ID NO: 302638 - DNA, 12 bp, Artificial Sequence
  Oligonucleotide primer for the detection of SNP TSC0020099
aataaaaactcc

SEQ ID NO: 302639 - DNA, 12 bp, Artificial Sequence
  Oligonucleotide primer for the detection of SNP TSC0020100
acctaaaacact

SEQ ID NO: 302640 - DNA, 12 bp, Artificial Sequence
  Oligonucleotide primer for the detection of SNP TSC0020100
tttgttgttttg

SEQ ID NO: 302641 - DNA, 12 bp, Artificial Sequence
  Oligonucleotide primer for the detection of SNP TSC0020101
tttaggttagag

SEQ ID NO: 302642 - DNA, 12 bp, Artificial Sequence
  Oligonucleotide primer for the detection of SNP TSC0020102
taaatttatacc

SEQ ID NO: 302643 - DNA, 12 bp, Artificial Sequence
  Oligonucleotide primer for the detection of SNP TSC0020102
tagtttggtatg

SEQ ID NO: 302644 - DNA, 12 bp, Artificial Sequence
  Oligonucleotide primer for the detection of SNP TSC0020102
tagttcggtatg

SEQ ID NO: 302645 - DNA, 12 bp, Artificial Sequence
  Oligonucleotide primer for the detection of SNP TSC0020106
actacaaattcc

SEQ ID NO: 302646 - DNA, 12 bp, Artificial Sequence
  Oligonucleotide primer for the detection of SNP TSC0020106
ggaaaggagtta

SEQ ID NO: 302647 - DNA, 12 bp, Artificial Sequence
  Oligonucleotide primer for the detection of SNP TSC0020107
attcacattttc

SEQ ID NO: 302648 - DNA, 12 bp, Artificial Sequence
  Oligonucleotide primer for the detection of SNP TSC0020107
tcccaaaaaaaa

SEQ ID NO: 302649 - DNA, 12 bp, Artificial Sequence
  Oligonucleotide primer for the detection of SNP TSC0020107
atttatattttc

SEQ ID NO: 302650 - DNA, 12 bp, Artificial Sequence
  Oligonucleotide primer for the detection of SNP TSC0020108
aaaaacaacctt

SEQ ID NO: 302651 - DNA, 12 bp, Artificial Sequence
  Oligonucleotide primer for the detection of SNP TSC0020108
tagttagagtta

SEQ ID NO: 302652 - DNA, 12 bp, Artificial Sequence
  Oligonucleotide primer for the detection of SNP TSC0020108
taatcaaaacca

SEQ ID NO: 302653 - DNA, 12 bp, Artificial Sequence
  Oligonucleotide primer for the detection of SNP TSC0020108
gaagatagtttt

SEQ ID NO: 302654 - DNA, 12 bp, Artificial Sequence
  Oligonucleotide primer for the detection of SNP TSC0020109
cgaaaaaaaaaa

SEQ ID NO: 302655 - DNA, 12 bp, Artificial Sequence
  Oligonucleotide primer for the detection of SNP TSC0020109
accctactccta

SEQ ID NO: 302656 - DNA, 12 bp, Artificial Sequence
  Oligonucleotide primer for the detection of SNP TSC0020109
tggaagggggag

SEQ ID NO: 302657 - DNA, 12 bp, Artificial Sequence
  Oligonucleotide primer for the detection of SNP TSC0020109
cggaagggggag

SEQ ID NO: 302658 - DNA, 12 bp, Artificial Sequence
  Oligonukleotid-Primer
tataaaccaaca

SEQ ID NO: 302659 - DNA, 12 bp, Artificial Sequence
  Oligonucleotide primer for the detection of SNP TSC0020110
tccctcctcccc

SEQ ID NO: 302660 - DNA, 12 bp, Artificial Sequence
  Oligonucleotide primer for the detection of SNP TSC0020110
tgtggattagta

SEQ ID NO: 302661 - DNA, 12 bp, Artificial Sequence
  Oligonucleotide primer for the detection of SNP TSC0020111
tatcaatccaca

SEQ ID NO: 302662 - DNA, 12 bp, Artificial Sequence
  Oligonucleotide primer for the detection of SNP TSC0020111
tatcaatccacg

SEQ ID NO: 302663 - DNA, 12 bp, Artificial Sequence
  Oligonucleotide primer for the detection of SNP TSC0020111
tgtgttttttgt

SEQ ID NO: 302664 - DNA, 12 bp, Artificial Sequence
  Oligonucleotide primer for the detection of SNP TSC0020111
tatattctctat

SEQ ID NO: 302665 - DNA, 12 bp, Artificial Sequence
  Oligonucleotide primer for the detection of SNP TSC0020111
tgttagtttatg

SEQ ID NO: 302666 - DNA, 12 bp, Artificial Sequence
  Oligonucleotide primer for the detection of SNP TSC0020111
tgttagtttacg

SEQ ID NO: 302667 - DNA, 12 bp, Artificial Sequence
  Oligonucleotide primer for the detection of SNP TSC0020112
ccaccacaataa

SEQ ID NO: 302668 - DNA, 12 bp, Artificial Sequence
  Oligonucleotide primer for the detection of SNP TSC0020112
agtagataatgt

SEQ ID NO: 302669 - DNA, 12 bp, Artificial Sequence
  Oligonucleotide primer for the detection of SNP TSC0020112
acaaacaataca

SEQ ID NO: 302670 - DNA, 12 bp, Artificial Sequence
  Oligonucleotide primer for the detection of SNP TSC0020112
attattataata

SEQ ID NO: 302671 - DNA, 12 bp, Artificial Sequence
  Oligonucleotide primer for the detection of SNP TSC0020113
taccacaaaact

SEQ ID NO: 302672 - DNA, 12 bp, Artificial Sequence
  Oligonucleotide primer for the detection of SNP TSC0020113
taccacgaaact

SEQ ID NO: 302673 - DNA, 12 bp, Artificial Sequence
  Oligonucleotide primer for the detection of SNP TSC0020113
tggtggttggtg

SEQ ID NO: 302674 - DNA, 12 bp, Artificial Sequence
  Oligonucleotide primer for the detection of SNP TSC0020115
taccttctatac

SEQ ID NO: 302675 - DNA, 12 bp, Artificial Sequence
  Oligonucleotide primer for the detection of SNP TSC0020115
tggaaatattga

SEQ ID NO: 302676 - DNA, 12 bp, Artificial Sequence
  Oligonucleotide primer for the detection of SNP TSC0020115
tggaaatatcga

SEQ ID NO: 302677 - DNA, 12 bp, Artificial Sequence
  Oligonucleotide primer for the detection of SNP TSC0020116
acctactaccat

SEQ ID NO: 302678 - DNA, 12 bp, Artificial Sequence
  Oligonucleotide primer for the detection of SNP TSC0020118
taaacttccaaa

SEQ ID NO: 302679 - DNA, 12 bp, Artificial Sequence
  Oligonucleotide primer for the detection of SNP TSC0020118
taaacttccgaa

SEQ ID NO: 302680 - DNA, 12 bp, Artificial Sequence
  Oligonucleotide primer for the detection of SNP TSC0020118
tggtttgttttt

SEQ ID NO: 302681 - DNA, 12 bp, Artificial Sequence
  Oligonucleotide primer for the detection of SNP TSC0020118
ataacttacctt

SEQ ID NO: 302682 - DNA, 12 bp, Artificial Sequence
  Oligonucleotide primer for the detection of SNP TSC0020118
gagtttttgggt

SEQ ID NO: 302683 - DNA, 12 bp, Artificial Sequence
  Oligonucleotide primer for the detection of SNP TSC0020118
gagttttcgggt

SEQ ID NO: 302684 - DNA, 12 bp, Artificial Sequence
  Oligonucleotide primer for the detection of SNP TSC0020119
acaaaataaatc

SEQ ID NO: 302685 - DNA, 12 bp, Artificial Sequence
  Oligonucleotide primer for the detection of SNP TSC0020119
agttttagttag

SEQ ID NO: 302686 - DNA, 12 bp, Artificial Sequence
  Oligonucleotide primer for the detection of SNP TSC0020119
aaccccaaccaa

SEQ ID NO: 302687 - DNA, 12 bp, Artificial Sequence
  Oligonucleotide primer for the detection of SNP TSC0020119
gtaaaatgggtt

SEQ ID NO: 302688 - DNA, 12 bp, Artificial Sequence
  Oligonucleotide primer for the detection of SNP TSC0020120
aaaaataactcc

SEQ ID NO: 302689 - DNA, 12 bp, Artificial Sequence
  Oligonucleotide primer for the detection of SNP TSC0020120
agggtttagtta

SEQ ID NO: 302690 - DNA, 12 bp, Artificial Sequence
  Oligonucleotide primer for the detection of SNP TSC0020120
aaaacttaacca

SEQ ID NO: 302691 - DNA, 12 bp, Artificial Sequence
  Oligonucleotide primer for the detection of SNP TSC0020120
aggggtggtttt

SEQ ID NO: 302692 - DNA, 12 bp, Artificial Sequence
  Oligonucleotide primer for the detection of SNP TSC0020121
aaaccctaatta

SEQ ID NO: 302693 - DNA, 12 bp, Artificial Sequence
  Oligonucleotide primer for the detection of SNP TSC0020121
tgttgtattttg

SEQ ID NO: 302694 - DNA, 12 bp, Artificial Sequence
  Oligonucleotide primer for the detection of SNP TSC0020121
tactacatctta

SEQ ID NO: 302695 - DNA, 12 bp, Artificial Sequence
  Oligonucleotide primer for the detection of SNP TSC0020121
tgggttttgatt

SEQ ID NO: 302696 - DNA, 12 bp, Artificial Sequence
  Oligonucleotide primer for the detection of SNP TSC0020125
aaaaacaactac

SEQ ID NO: 302697 - DNA, 12 bp, Artificial Sequence
  Oligonucleotide primer for the detection of SNP TSC0020125
agattttgggag

SEQ ID NO: 302698 - DNA, 12 bp, Artificial Sequence
  Oligonucleotide primer for the detection of SNP TSC0020125
aaactttaaaaa

SEQ ID NO: 302699 - DNA, 12 bp, Artificial Sequence
  Oligonucleotide primer for the detection of SNP TSC0020125
gagaataattgt

SEQ ID NO: 302700 - DNA, 12 bp, Artificial Sequence
  Oligonucleotide primer for the detection of SNP TSC0020126
ctaataacacaa

SEQ ID NO: 302701 - DNA, 12 bp, Artificial Sequence
  Oligonucleotide primer for the detection of SNP TSC0020126
ggattattttta

SEQ ID NO: 302702 - DNA, 12 bp, Artificial Sequence
  Oligonucleotide primer for the detection of SNP TSC0020126
aaattatcttta

SEQ ID NO: 302703 - DNA, 12 bp, Artificial Sequence
  Oligonucleotide primer for the detection of SNP TSC0020126
ggttgatagtat

SEQ ID NO: 302704 - DNA, 12 bp, Artificial Sequence
  Oligonucleotide primer for the detection of SNP TSC0020127
acacccaaaacc

SEQ ID NO: 302705 - DNA, 12 bp, Artificial Sequence
  Oligonucleotide primer for the detection of SNP TSC0020127
acgcccaaaacc

SEQ ID NO: 302706 - DNA, 12 bp, Artificial Sequence
  Oligonucleotide primer for the detection of SNP TSC0020127
ggttggagttag

SEQ ID NO: 302707 - DNA, 12 bp, Artificial Sequence
  Oligonucleotide primer for the detection of SNP TSC0020127
gtgtttagggtt

SEQ ID NO: 302708 - DNA, 12 bp, Artificial Sequence
  Oligonucleotide primer for the detection of SNP TSC0020127
gcgtttagggtt

SEQ ID NO: 302709 - DNA, 12 bp, Artificial Sequence
  Oligonucleotide primer for the detection of SNP TSC0020130
aaacctatcccc

SEQ ID NO: 302710 - DNA, 12 bp, Artificial Sequence
  Oligonucleotide primer for the detection of SNP TSC0020130
atgttttgtgag

SEQ ID NO: 302711 - DNA, 12 bp, Artificial Sequence
  Oligonucleotide primer for the detection of SNP TSC0020130
acgttttgtgag

SEQ ID NO: 302712 - DNA, 12 bp, Artificial Sequence
  Oligonucleotide primer for the detection of SNP TSC0020130
atgttttgcgag

SEQ ID NO: 302713 - DNA, 12 bp, Artificial Sequence
  Oligonucleotide primer for the detection of SNP TSC0020130
acgttttgcgag

SEQ ID NO: 302714 - DNA, 12 bp, Artificial Sequence
  Oligonucleotide primer for the detection of SNP TSC0020131
acaacaacatat

SEQ ID NO: 302715 - DNA, 12 bp, Artificial Sequence
  Oligonucleotide primer for the detection of SNP TSC0020131
acaacgacatat

SEQ ID NO: 302716 - DNA, 12 bp, Artificial Sequence
  Oligonucleotide primer for the detection of SNP TSC0020131
tgttaggagggt

SEQ ID NO: 302717 - DNA, 12 bp, Artificial Sequence
  Oligonucleotide primer for the detection of SNP TSC0020131
cgttaggagggt

SEQ ID NO: 302718 - DNA, 12 bp, Artificial Sequence
  Oligonucleotide primer for the detection of SNP TSC0020131
acatcaaaaaaa

SEQ ID NO: 302719 - DNA, 12 bp, Artificial Sequence
  Oligonucleotide primer for the detection of SNP TSC0020131
acgtcaaaaaaa

SEQ ID NO: 302720 - DNA, 12 bp, Artificial Sequence
  Oligonucleotide primer for the detection of SNP TSC0020131
tagtggtatgtt

SEQ ID NO: 302721 - DNA, 12 bp, Artificial Sequence
  Oligonucleotide primer for the detection of SNP TSC0020131
tagcggtatgtt

SEQ ID NO: 302722 - DNA, 12 bp, Artificial Sequence
  Oligonucleotide primer for the detection of SNP TSC0020132
aaaaacccaccc

SEQ ID NO: 302723 - DNA, 12 bp, Artificial Sequence
  Oligonukleotid-Primer
gggaagtggtgg

SEQ ID NO: 302724 - DNA, 12 bp, Artificial Sequence
  Oligonucleotide primer for the detection of SNP TSC0020133
cctattcaattt

SEQ ID NO: 302725 - DNA, 12 bp, Artificial Sequence
  Oligonucleotide primer for the detection of SNP TSC0020133
atgatggtttaa

SEQ ID NO: 302726 - DNA, 12 bp, Artificial Sequence
  Oligonucleotide primer for the detection of SNP TSC0020135
aaccactatacc

SEQ ID NO: 302727 - DNA, 12 bp, Artificial Sequence
  Oligonukleotid-Primer
attgttatagga

SEQ ID NO: 302728 - DNA, 12 bp, Artificial Sequence
  Oligonucleotide primer for the detection of SNP TSC0020135
actattacaaaa

SEQ ID NO: 302729 - DNA, 12 bp, Artificial Sequence
  Oligonucleotide primer for the detection of SNP TSC0020136
tttccccaaaat

SEQ ID NO: 302730 - DNA, 12 bp, Artificial Sequence
  Oligonucleotide primer for the detection of SNP TSC0020136
tttcgttttttg

SEQ ID NO: 302731 - DNA, 12 bp, Artificial Sequence
  Oligonucleotide primer for the detection of SNP TSC0020136
ttccattcttta

SEQ ID NO: 302732 - DNA, 12 bp, Artificial Sequence
  Oligonucleotide primer for the detection of SNP TSC0020136
ttccgttcttta

SEQ ID NO: 302733 - DNA, 12 bp, Artificial Sequence
  Oligonucleotide primer for the detection of SNP TSC0020136
tttttttaagat

SEQ ID NO: 302734 - DNA, 12 bp, Artificial Sequence
  Oligonucleotide primer for the detection of SNP TSC0020137
ctatcttctata

SEQ ID NO: 302735 - DNA, 12 bp, Artificial Sequence
  Oligonucleotide primer for the detection of SNP TSC0020137
agtttttagtgt

SEQ ID NO: 302736 - DNA, 12 bp, Artificial Sequence
  Oligonucleotide primer for the detection of SNP TSC0020137
agtttttagcgt

SEQ ID NO: 302737 - DNA, 12 bp, Artificial Sequence
  Oligonucleotide primer for the detection of SNP TSC0020137
aactcccaacat

SEQ ID NO: 302738 - DNA, 12 bp, Artificial Sequence
  Oligonucleotide primer for the detection of SNP TSC0020137
aactcccaacgt

SEQ ID NO: 302739 - DNA, 12 bp, Artificial Sequence
  Oligonucleotide primer for the detection of SNP TSC0020140
atttgttttgta

SEQ ID NO: 302740 - DNA, 12 bp, Artificial Sequence
  Oligonucleotide primer for the detection of SNP TSC0020141
aaaaactatatt

SEQ ID NO: 302741 - DNA, 12 bp, Artificial Sequence
  Oligonucleotide primer for the detection of SNP TSC0020141
attgattttgaa

SEQ ID NO: 302742 - DNA, 12 bp, Artificial Sequence
  Oligonucleotide primer for the detection of SNP TSC0020142
actctaaatttt

SEQ ID NO: 302743 - DNA, 12 bp, Artificial Sequence
  Oligonucleotide primer for the detection of SNP TSC0020142
gggagaatttaa

SEQ ID NO: 302744 - DNA, 12 bp, Artificial Sequence
  Oligonucleotide primer for the detection of SNP TSC0020147
caacataaaaaa

SEQ ID NO: 302745 - DNA, 12 bp, Artificial Sequence
  Oligonucleotide primer for the detection of SNP TSC0020147
aggtttttggtt

SEQ ID NO: 302746 - DNA, 12 bp, Artificial Sequence
  Oligonucleotide primer for the detection of SNP TSC0020147
caaattcctaac

SEQ ID NO: 302747 - DNA, 12 bp, Artificial Sequence
  Oligonucleotide primer for the detection of SNP TSC0020147
agtagtatgggg

SEQ ID NO: 302748 - DNA, 12 bp, Artificial Sequence
  Oligonucleotide primer for the detection of SNP TSC0020151
aaatattttctt

SEQ ID NO: 302749 - DNA, 12 bp, Artificial Sequence
  Oligonucleotide primer for the detection of SNP TSC0020151
ttgtttatttgt

SEQ ID NO: 302750 - DNA, 12 bp, Artificial Sequence
  Oligonucleotide primer for the detection of SNP TSC0020151
ttgtttattcgt

SEQ ID NO: 302751 - DNA, 12 bp, Artificial Sequence
  Oligonucleotide primer for the detection of SNP TSC0020152
aactctaaatcc

SEQ ID NO: 302752 - DNA, 12 bp, Artificial Sequence
  Oligonucleotide primer for the detection of SNP TSC0020152
gggtaataaaga

SEQ ID NO: 302753 - DNA, 12 bp, Artificial Sequence
  Oligonucleotide primer for the detection of SNP TSC0020155
tataatttcaat

SEQ ID NO: 302754 - DNA, 12 bp, Artificial Sequence
  Oligonucleotide primer for the detection of SNP TSC0020155
aataagaaatat

SEQ ID NO: 302755 - DNA, 12 bp, Artificial Sequence
  Oligonucleotide primer for the detection of SNP TSC0020155
tatagttttagt

SEQ ID NO: 302756 - DNA, 12 bp, Artificial Sequence
  Oligonucleotide primer for the detection of SNP TSC0020156
actttctccctt

SEQ ID NO: 302757 - DNA, 12 bp, Artificial Sequence
  Oligonucleotide primer for the detection of SNP TSC0020156
ttagtttggtag

SEQ ID NO: 302758 - DNA, 12 bp, Artificial Sequence
  Oligonucleotide primer for the detection of SNP TSC0020157
tttttttttagc

SEQ ID NO: 302759 - DNA, 12 bp, Artificial Sequence
  Oligonucleotide primer for the detection of SNP TSC0020157
ttctctccctaa

SEQ ID NO: 302760 - DNA, 12 bp, Artificial Sequence
  Oligonucleotide primer for the detection of SNP TSC0020157
ggagatggtaga

SEQ ID NO: 302761 - DNA, 12 bp, Artificial Sequence
  Oligonucleotide primer for the detection of SNP TSC0020158
tttttttagcgt

SEQ ID NO: 302762 - DNA, 12 bp, Artificial Sequence
  Oligonucleotide primer for the detection of SNP TSC0020158
ctctccctaaca

SEQ ID NO: 302763 - DNA, 12 bp, Artificial Sequence
  Oligonucleotide primer for the detection of SNP TSC0020158
ctctccctaacg

SEQ ID NO: 302764 - DNA, 12 bp, Artificial Sequence
  Oligonucleotide primer for the detection of SNP TSC0020158
agtggagatggt

SEQ ID NO: 302765 - DNA, 12 bp, Artificial Sequence
  Oligonucleotide primer for the detection of SNP TSC0020159
actacaactttc

SEQ ID NO: 302766 - DNA, 12 bp, Artificial Sequence
  Oligonucleotide primer for the detection of SNP TSC0020159
attatggtgaaa

SEQ ID NO: 302767 - DNA, 12 bp, Artificial Sequence
  Oligonucleotide primer for the detection of SNP TSC0020159
accataataaaa

SEQ ID NO: 302768 - DNA, 12 bp, Artificial Sequence
  Oligonucleotide primer for the detection of SNP TSC0020159
gttgtagttttt

SEQ ID NO: 302769 - DNA, 12 bp, Artificial Sequence
  Oligonucleotide primer for the detection of SNP TSC0020160
cccatatctaaa

SEQ ID NO: 302770 - DNA, 12 bp, Artificial Sequence
  Oligonucleotide primer for the detection of SNP TSC0020160
taaataatttgt

SEQ ID NO: 302771 - DNA, 12 bp, Artificial Sequence
  Oligonucleotide primer for the detection of SNP TSC0020160
taaataatttgc

SEQ ID NO: 302772 - DNA, 12 bp, Artificial Sequence
  Oligonucleotide primer for the detection of SNP TSC0020160
caaacaatctac

SEQ ID NO: 302773 - DNA, 12 bp, Artificial Sequence
  Oligonucleotide primer for the detection of SNP TSC0020160
tatttatatttg

SEQ ID NO: 302774 - DNA, 12 bp, Artificial Sequence
  Oligonucleotide primer for the detection of SNP TSC0020162
caaattataaaa

SEQ ID NO: 302775 - DNA, 12 bp, Artificial Sequence
  Oligonucleotide primer for the detection of SNP TSC0020162
atatatgtaatt

SEQ ID NO: 302776 - DNA, 12 bp, Artificial Sequence
  Oligonucleotide primer for the detection of SNP TSC0020162
caatacatataa

SEQ ID NO: 302777 - DNA, 12 bp, Artificial Sequence
  Oligonucleotide primer for the detection of SNP TSC0020162
tatttaagttgt

SEQ ID NO: 302778 - DNA, 12 bp, Artificial Sequence
  Oligonucleotide primer for the detection of SNP TSC0020163
taattattttac

SEQ ID NO: 302779 - DNA, 12 bp, Artificial Sequence
  Oligonucleotide primer for the detection of SNP TSC0020163
gtatttatttaa

SEQ ID NO: 302780 - DNA, 12 bp, Artificial Sequence
  Oligonucleotide primer for the detection of SNP TSC0020165
caactcaacctt

SEQ ID NO: 302781 - DNA, 12 bp, Artificial Sequence
  Oligonucleotide primer for the detection of SNP TSC0020165
tttggttattta

SEQ ID NO: 302782 - DNA, 12 bp, Artificial Sequence
  Oligonucleotide primer for the detection of SNP TSC0020166
tttggataaaat

SEQ ID NO: 302783 - DNA, 12 bp, Artificial Sequence
  Oligonucleotide primer for the detection of SNP TSC0020166
tttaaataaaat

SEQ ID NO: 302784 - DNA, 12 bp, Artificial Sequence
  Oligonucleotide primer for the detection of SNP TSC0020166
agatttttgaag

SEQ ID NO: 302785 - DNA, 12 bp, Artificial Sequence
  Oligonucleotide primer for the detection of SNP TSC0020167
cactatttaata

SEQ ID NO: 302786 - DNA, 12 bp, Artificial Sequence
  Oligonucleotide primer for the detection of SNP TSC0020167
attttattattt

SEQ ID NO: 302787 - DNA, 12 bp, Artificial Sequence
  Oligonucleotide primer for the detection of SNP TSC0020167
ctttattatcta

SEQ ID NO: 302788 - DNA, 12 bp, Artificial Sequence
  Oligonucleotide primer for the detection of SNP TSC0020167
ttattgtttagt

SEQ ID NO: 302789 - DNA, 12 bp, Artificial Sequence
  Oligonucleotide primer for the detection of SNP TSC0020168
actttattatct

SEQ ID NO: 302790 - DNA, 12 bp, Artificial Sequence
  Oligonucleotide primer for the detection of SNP TSC0020168
gttattgtttag

SEQ ID NO: 302791 - DNA, 12 bp, Artificial Sequence
  Oligonucleotide primer for the detection of SNP TSC0020169
taaaacatcata

SEQ ID NO: 302792 - DNA, 12 bp, Artificial Sequence
  Oligonucleotide primer for the detection of SNP TSC0020169
atttaggatttt

SEQ ID NO: 302793 - DNA, 12 bp, Artificial Sequence
  Oligonucleotide primer for the detection of SNP TSC0020169
attcacccaaaa

SEQ ID NO: 302794 - DNA, 12 bp, Artificial Sequence
  Oligonucleotide primer for the detection of SNP TSC0020169
agagtattatat

SEQ ID NO: 302795 - DNA, 12 bp, Artificial Sequence
  Oligonucleotide primer for the detection of SNP TSC0020170
aatttacaaatc

SEQ ID NO: 302796 - DNA, 12 bp, Artificial Sequence
  Oligonucleotide primer for the detection of SNP TSC0020170
gaaagatgaata

SEQ ID NO: 302797 - DNA, 12 bp, Artificial Sequence
  Oligonucleotide primer for the detection of SNP TSC0020171
cttctccaataa

SEQ ID NO: 302798 - DNA, 12 bp, Artificial Sequence
  Oligonucleotide primer for the detection of SNP TSC0020171
agtgatattttt

SEQ ID NO: 302799 - DNA, 12 bp, Artificial Sequence
  Oligonucleotide primer for the detection of SNP TSC0020171
aaataatacctt

SEQ ID NO: 302800 - DNA, 12 bp, Artificial Sequence
  Oligonucleotide primer for the detection of SNP TSC0020171
tttttttagtga

SEQ ID NO: 302801 - DNA, 12 bp, Artificial Sequence
  Oligonucleotide primer for the detection of SNP TSC0020172
aaaactcactat

SEQ ID NO: 302802 - DNA, 12 bp, Artificial Sequence
  Oligonucleotide primer for the detection of SNP TSC0020172
atttttttgtta

SEQ ID NO: 302803 - DNA, 12 bp, Artificial Sequence
  Oligonucleotide primer for the detection of SNP TSC0020172
attttcctatta

SEQ ID NO: 302804 - DNA, 12 bp, Artificial Sequence
  Oligonucleotide primer for the detection of SNP TSC0020172
agagtttattat

SEQ ID NO: 302805 - DNA, 12 bp, Artificial Sequence
  Oligonucleotide primer for the detection of SNP TSC0020173
aatccaaactct

SEQ ID NO: 302806 - DNA, 12 bp, Artificial Sequence
  Oligonucleotide primer for the detection of SNP TSC0020173
gtgtagtgagaa

SEQ ID NO: 302807 - DNA, 12 bp, Artificial Sequence
  Oligonucleotide primer for the detection of SNP TSC0020174
ctacaaacctac

SEQ ID NO: 302808 - DNA, 12 bp, Artificial Sequence
  Oligonucleotide primer for the detection of SNP TSC0020174
ctacgaacctac

SEQ ID NO: 302809 - DNA, 12 bp, Artificial Sequence
  Oligonucleotide primer for the detection of SNP TSC0020174
tatgtagtttta

SEQ ID NO: 302810 - DNA, 12 bp, Artificial Sequence
  Oligonucleotide primer for the detection of SNP TSC0020174
tacgtagtttta

SEQ ID NO: 302811 - DNA, 12 bp, Artificial Sequence
  Oligonucleotide primer for the detection of SNP TSC0020175
aactctaaccaa

SEQ ID NO: 302812 - DNA, 12 bp, Artificial Sequence
  Oligonucleotide primer for the detection of SNP TSC0020175
aactctaaccga

SEQ ID NO: 302813 - DNA, 12 bp, Artificial Sequence
  Oligonucleotide primer for the detection of SNP TSC0020175
agttaggagata

SEQ ID NO: 302814 - DNA, 12 bp, Artificial Sequence
  Oligonucleotide primer for the detection of SNP TSC0020175
aaccaaaaaaca

SEQ ID NO: 302815 - DNA, 12 bp, Artificial Sequence
  Oligonucleotide primer for the detection of SNP TSC0020175
agttttggttgg

SEQ ID NO: 302816 - DNA, 12 bp, Artificial Sequence
  Oligonucleotide primer for the detection of SNP TSC0020175
agttttggtcgg

SEQ ID NO: 302817 - DNA, 12 bp, Artificial Sequence
  Oligonucleotide primer for the detection of SNP TSC0020176
gaggggtgaatt

SEQ ID NO: 302818 - DNA, 12 bp, Artificial Sequence
  Oligonucleotide primer for the detection of SNP TSC0020176
aaaataaattaa

SEQ ID NO: 302819 - DNA, 12 bp, Artificial Sequence
  Oligonucleotide primer for the detection of SNP TSC0020176
gatttttgtatt

SEQ ID NO: 302820 - DNA, 12 bp, Artificial Sequence
  Oligonucleotide primer for the detection of SNP TSC0020176
gatttttgtatc

SEQ ID NO: 302821 - DNA, 12 bp, Artificial Sequence
  Oligonucleotide primer for the detection of SNP TSC0020177
tggtttggtttg

SEQ ID NO: 302822 - DNA, 12 bp, Artificial Sequence
  Oligonucleotide primer for the detection of SNP TSC0020178
aatcccaccact

SEQ ID NO: 302823 - DNA, 12 bp, Artificial Sequence
  Oligonucleotide primer for the detection of SNP TSC0020178
taggttggagag

SEQ ID NO: 302824 - DNA, 12 bp, Artificial Sequence
  Oligonucleotide primer for the detection of SNP TSC0020179
cacatcacatac

SEQ ID NO: 302825 - DNA, 12 bp, Artificial Sequence
  Oligonucleotide primer for the detection of SNP TSC0020179
atttaggtaatg

SEQ ID NO: 302826 - DNA, 12 bp, Artificial Sequence
  Oligonucleotide primer for the detection of SNP TSC0020179
atttaggtaacg

SEQ ID NO: 302827 - DNA, 12 bp, Artificial Sequence
  Oligonucleotide primer for the detection of SNP TSC0020180
tatgaaaaaatg

SEQ ID NO: 302828 - DNA, 12 bp, Artificial Sequence
  Oligonucleotide primer for the detection of SNP TSC0020180
attaaagtaatt

SEQ ID NO: 302829 - DNA, 12 bp, Artificial Sequence
  Oligonucleotide primer for the detection of SNP TSC0020181
aaccattaacaa

SEQ ID NO: 302830 - DNA, 12 bp, Artificial Sequence
  Oligonucleotide primer for the detection of SNP TSC0020181
aaaggaaagagt

SEQ ID NO: 302831 - DNA, 12 bp, Artificial Sequence
  Oligonucleotide primer for the detection of SNP TSC0020181
aattattaataa

SEQ ID NO: 302832 - DNA, 12 bp, Artificial Sequence
  Oligonucleotide primer for the detection of SNP TSC0020182
acaacaaaatat

SEQ ID NO: 302833 - DNA, 12 bp, Artificial Sequence
  Oligonucleotide primer for the detection of SNP TSC0020182
ttttaagaatag

SEQ ID NO: 302834 - DNA, 12 bp, Artificial Sequence
  Oligonucleotide primer for the detection of SNP TSC0020185
taaatacatatc

SEQ ID NO: 302835 - DNA, 12 bp, Artificial Sequence
  Oligonucleotide primer for the detection of SNP TSC0020185
tggatttttatg

SEQ ID NO: 302836 - DNA, 12 bp, Artificial Sequence
  Oligonucleotide primer for the detection of SNP TSC0020186
tttaaatatttg

SEQ ID NO: 302837 - DNA, 12 bp, Artificial Sequence
  Oligonucleotide primer for the detection of SNP TSC0020186
tccaaatatcta

SEQ ID NO: 302838 - DNA, 12 bp, Artificial Sequence
  Oligonucleotide primer for the detection of SNP TSC0020186
gatttaagagat

SEQ ID NO: 302839 - DNA, 12 bp, Artificial Sequence
  Oligonucleotide primer for the detection of SNP TSC0020187
ttaacatacaaa

SEQ ID NO: 302840 - DNA, 12 bp, Artificial Sequence
  Oligonucleotide primer for the detection of SNP TSC0020187
ttttaagaaaaa

SEQ ID NO: 302841 - DNA, 12 bp, Artificial Sequence
  Oligonucleotide primer for the detection of SNP TSC0020187
ttagtatgtagg

SEQ ID NO: 302842 - DNA, 12 bp, Artificial Sequence
  Oligonucleotide primer for the detection of SNP TSC0020188
ttagtttttgat

SEQ ID NO: 302843 - DNA, 12 bp, Artificial Sequence
  Oligonucleotide primer for the detection of SNP TSC0020188
attaatccctaa

SEQ ID NO: 302844 - DNA, 12 bp, Artificial Sequence
  Oligonucleotide primer for the detection of SNP TSC0020188
aaagtagggaat

SEQ ID NO: 302845 - DNA, 12 bp, Artificial Sequence
  Oligonucleotide primer for the detection of SNP TSC0020188
aaagtagggaac

SEQ ID NO: 302846 - DNA, 12 bp, Artificial Sequence
  Oligonucleotide primer for the detection of SNP TSC0020189
tacccaaactaa

SEQ ID NO: 302847 - DNA, 12 bp, Artificial Sequence
  Oligonucleotide primer for the detection of SNP TSC0020189
tttaggagtttt

SEQ ID NO: 302848 - DNA, 12 bp, Artificial Sequence
  Oligonucleotide primer for the detection of SNP TSC0020189
tcaaaaattcca

SEQ ID NO: 302849 - DNA, 12 bp, Artificial Sequence
  Oligonucleotide primer for the detection of SNP TSC0020189
atttaggttggt

SEQ ID NO: 302850 - DNA, 12 bp, Artificial Sequence
  Oligonucleotide primer for the detection of SNP TSC0020190
ttcatacttaat

SEQ ID NO: 302851 - DNA, 12 bp, Artificial Sequence
  Oligonucleotide primer for the detection of SNP TSC0020190
attaaggaagtt

SEQ ID NO: 302852 - DNA, 12 bp, Artificial Sequence
  Oligonucleotide primer for the detection of SNP TSC0020194
tctatcatattt

SEQ ID NO: 302853 - DNA, 12 bp, Artificial Sequence
  Oligonucleotide primer for the detection of SNP TSC0020194
ttatgagaaatt

SEQ ID NO: 302854 - DNA, 12 bp, Artificial Sequence
  Oligonucleotide primer for the detection of SNP TSC0020195
aaaaaatttctt

SEQ ID NO: 302855 - DNA, 12 bp, Artificial Sequence
  Oligonucleotide primer for the detection of SNP TSC0020195
atgagaaagtta

SEQ ID NO: 302856 - DNA, 12 bp, Artificial Sequence
  Oligonucleotide primer for the detection of SNP TSC0020195
acgagaaagtta

SEQ ID NO: 302857 - DNA, 12 bp, Artificial Sequence
  Oligonucleotide primer for the detection of SNP TSC0020199
cccctttaaaaa

SEQ ID NO: 302858 - DNA, 12 bp, Artificial Sequence
  Oligonucleotide primer for the detection of SNP TSC0020199
ttttgttatttc

SEQ ID NO: 302859 - DNA, 12 bp, Artificial Sequence
  Oligonucleotide primer for the detection of SNP TSC0020199
ctttaccatttc

SEQ ID NO: 302860 - DNA, 12 bp, Artificial Sequence
  Oligonucleotide primer for the detection of SNP TSC0020200
ttggttggtttt

SEQ ID NO: 302861 - DNA, 12 bp, Artificial Sequence
  Oligonucleotide primer for the detection of SNP TSC0020200
ctaactaacccc

SEQ ID NO: 302862 - DNA, 12 bp, Artificial Sequence
  Oligonucleotide primer for the detection of SNP TSC0020200
ttttggggagga

SEQ ID NO: 302863 - DNA, 12 bp, Artificial Sequence
  Oligonucleotide primer for the detection of SNP TSC0020201
atgtataataat

SEQ ID NO: 302864 - DNA, 12 bp, Artificial Sequence
  Oligonucleotide primer for the detection of SNP TSC0020201
atatacaataac

SEQ ID NO: 302865 - DNA, 12 bp, Artificial Sequence
  Oligonucleotide primer for the detection of SNP TSC0020201
taattaagatta

SEQ ID NO: 302866 - DNA, 12 bp, Artificial Sequence
  Oligonucleotide primer for the detection of SNP TSC0020202
ccctaaccctaa

SEQ ID NO: 302867 - DNA, 12 bp, Artificial Sequence
  Oligonucleotide primer for the detection of SNP TSC0020202
tttttaagtgtt

SEQ ID NO: 302868 - DNA, 12 bp, Artificial Sequence
  Oligonucleotide primer for the detection of SNP TSC0020202
tttccaaatact

SEQ ID NO: 302869 - DNA, 12 bp, Artificial Sequence
  Oligonucleotide primer for the detection of SNP TSC0020202
ttttggttttga

SEQ ID NO: 302870 - DNA, 12 bp, Artificial Sequence
  Oligonucleotide primer for the detection of SNP TSC0020203
gtaagataattg

SEQ ID NO: 302871 - DNA, 12 bp, Artificial Sequence
  Oligonucleotide primer for the detection of SNP TSC0020203
acaaaataatta

SEQ ID NO: 302872 - DNA, 12 bp, Artificial Sequence
  Oligonucleotide primer for the detection of SNP TSC0020204
acaaccccaacc

SEQ ID NO: 302873 - DNA, 12 bp, Artificial Sequence
  Oligonucleotide primer for the detection of SNP TSC0020204
acaaccccgacc

SEQ ID NO: 302874 - DNA, 12 bp, Artificial Sequence
  Oligonucleotide primer for the detection of SNP TSC0020204
tttgtaaaggaa

SEQ ID NO: 302875 - DNA, 12 bp, Artificial Sequence
  Oligonucleotide primer for the detection of SNP TSC0020204
cctacaaaaaaa

SEQ ID NO: 302876 - DNA, 12 bp, Artificial Sequence
  Oligonucleotide primer for the detection of SNP TSC0020204
atagttttggtt

SEQ ID NO: 302877 - DNA, 12 bp, Artificial Sequence
  Oligonucleotide primer for the detection of SNP TSC0020204
atagtttcggtt

SEQ ID NO: 302878 - DNA, 12 bp, Artificial Sequence
  Oligonucleotide primer for the detection of SNP TSC0020206
cataatacaacc

SEQ ID NO: 302879 - DNA, 12 bp, Artificial Sequence
  Oligonucleotide primer for the detection of SNP TSC0020206
cgtaatacaacc

SEQ ID NO: 302880 - DNA, 12 bp, Artificial Sequence
  Oligonucleotide primer for the detection of SNP TSC0020206
tttaggagtgat

SEQ ID NO: 302881 - DNA, 12 bp, Artificial Sequence
  Oligonucleotide primer for the detection of SNP TSC0020206
tttaggagtgac

SEQ ID NO: 302882 - DNA, 12 bp, Artificial Sequence
  Oligonucleotide primer for the detection of SNP TSC0020206
cctaaaaataac

SEQ ID NO: 302883 - DNA, 12 bp, Artificial Sequence
  Oligonucleotide primer for the detection of SNP TSC0020206
tgtggtatagtt

SEQ ID NO: 302884 - DNA, 12 bp, Artificial Sequence
  Oligonucleotide primer for the detection of SNP TSC0020206
cgtggtatagtt

SEQ ID NO: 302885 - DNA, 12 bp, Artificial Sequence
  Oligonucleotide primer for the detection of SNP TSC0020206
tgtggtatagtc

SEQ ID NO: 302886 - DNA, 12 bp, Artificial Sequence
  Oligonucleotide primer for the detection of SNP TSC0020206
cgtggtatagtc

SEQ ID NO: 302887 - DNA, 12 bp, Artificial Sequence
  Oligonucleotide primer for the detection of SNP TSC0020207
ttttatttgagt

SEQ ID NO: 302888 - DNA, 12 bp, Artificial Sequence
  Oligonucleotide primer for the detection of SNP TSC0020207
ccccatttaaac

SEQ ID NO: 302889 - DNA, 12 bp, Artificial Sequence
  Oligonucleotide primer for the detection of SNP TSC0020207
gtgatagatttg

SEQ ID NO: 302890 - DNA, 12 bp, Artificial Sequence
  Oligonucleotide primer for the detection of SNP TSC0020209
cttaacctacac

SEQ ID NO: 302891 - DNA, 12 bp, Artificial Sequence
  Oligonucleotide primer for the detection of SNP TSC0020209
cttaacctacgc

SEQ ID NO: 302892 - DNA, 12 bp, Artificial Sequence
  Oligonucleotide primer for the detection of SNP TSC0020209
ttaggaggaagt

SEQ ID NO: 302893 - DNA, 12 bp, Artificial Sequence
  Oligonucleotide primer for the detection of SNP TSC0020209
ctaaaaaaaaat

SEQ ID NO: 302894 - DNA, 12 bp, Artificial Sequence
  Oligonucleotide primer for the detection of SNP TSC0020209
tttgatttgtgt

SEQ ID NO: 302895 - DNA, 12 bp, Artificial Sequence
  Oligonucleotide primer for the detection of SNP TSC0020209
tttgatttgcgt

SEQ ID NO: 302896 - DNA, 12 bp, Artificial Sequence
  Oligonucleotide primer for the detection of SNP TSC0020210
ccatcttaacct

SEQ ID NO: 302897 - DNA, 12 bp, Artificial Sequence
  Oligonucleotide primer for the detection of SNP TSC0020211
accaaactatcc

SEQ ID NO: 302898 - DNA, 12 bp, Artificial Sequence
  Oligonucleotide primer for the detection of SNP TSC0020211
ttaatagggtta

SEQ ID NO: 302899 - DNA, 12 bp, Artificial Sequence
  Oligonucleotide primer for the detection of SNP TSC0020213
aaaaaaactaat

SEQ ID NO: 302900 - DNA, 12 bp, Artificial Sequence
  Oligonucleotide primer for the detection of SNP TSC0020213
tttattaaattg

SEQ ID NO: 302901 - DNA, 12 bp, Artificial Sequence
  Oligonucleotide primer for the detection of SNP TSC0020214
gaagtttttgag

SEQ ID NO: 302902 - DNA, 12 bp, Artificial Sequence
  Oligonucleotide primer for the detection of SNP TSC0020217
atctaaacccta

SEQ ID NO: 302903 - DNA, 12 bp, Artificial Sequence
  Oligonucleotide primer for the detection of SNP TSC0020217
tttagtattatt

SEQ ID NO: 302904 - DNA, 12 bp, Artificial Sequence
  Oligonucleotide primer for the detection of SNP TSC0020217
cccaacactacc

SEQ ID NO: 302905 - DNA, 12 bp, Artificial Sequence
  Oligonucleotide primer for the detection of SNP TSC0020217
gtttgggttttg

SEQ ID NO: 302906 - DNA, 12 bp, Artificial Sequence
  Oligonucleotide primer for the detection of SNP TSC0020218
acccccctacac

SEQ ID NO: 302907 - DNA, 12 bp, Artificial Sequence
  Oligonucleotide primer for the detection of SNP TSC0020218
tgtgtgagtgtg

SEQ ID NO: 302908 - DNA, 12 bp, Artificial Sequence
  Oligonucleotide primer for the detection of SNP TSC0020219
ctatattatctc

SEQ ID NO: 302909 - DNA, 12 bp, Artificial Sequence
  Oligonucleotide primer for the detection of SNP TSC0020219
ggagattttgaa

SEQ ID NO: 302910 - DNA, 12 bp, Artificial Sequence
  Oligonucleotide primer for the detection of SNP TSC0020220
tcaaacaaactc

SEQ ID NO: 302911 - DNA, 12 bp, Artificial Sequence
  Oligonucleotide primer for the detection of SNP TSC0020220
tcaaacgaactc

SEQ ID NO: 302912 - DNA, 12 bp, Artificial Sequence
  Oligonucleotide primer for the detection of SNP TSC0020220
ttttaggaaaga

SEQ ID NO: 302913 - DNA, 12 bp, Artificial Sequence
  Oligonucleotide primer for the detection of SNP TSC0020221
ccaaaattcccc

SEQ ID NO: 302914 - DNA, 12 bp, Artificial Sequence
  Oligonucleotide primer for the detection of SNP TSC0020221
agaaaaaaaaaa

SEQ ID NO: 302915 - DNA, 12 bp, Artificial Sequence
  Oligonucleotide primer for the detection of SNP TSC0020222
tccctaaaaaat

SEQ ID NO: 302916 - DNA, 12 bp, Artificial Sequence
  Oligonucleotide primer for the detection of SNP TSC0020222
gttaatgttgga

SEQ ID NO: 302917 - DNA, 12 bp, Artificial Sequence
  Oligonucleotide primer for the detection of SNP TSC0020225
ccaatactccca

SEQ ID NO: 302918 - DNA, 12 bp, Artificial Sequence
  Oligonucleotide primer for the detection of SNP TSC0020225
ccgatactccca

SEQ ID NO: 302919 - DNA, 12 bp, Artificial Sequence
  Oligonucleotide primer for the detection of SNP TSC0020225
actcccacaacc

SEQ ID NO: 302920 - DNA, 12 bp, Artificial Sequence
  Oligonucleotide primer for the detection of SNP TSC0020225
tcggtgttttta

SEQ ID NO: 302921 - DNA, 12 bp, Artificial Sequence
  Oligonukleotid-Primer
atcccaaaaact

SEQ ID NO: 302922 - DNA, 12 bp, Artificial Sequence
  Oligonucleotide primer for the detection of SNP TSC0020228
ataaagtgatta

SEQ ID NO: 302923 - DNA, 12 bp, Artificial Sequence
  Oligonucleotide primer for the detection of SNP TSC0020231
aaataatttaaa

SEQ ID NO: 302924 - DNA, 12 bp, Artificial Sequence
  Oligonucleotide primer for the detection of SNP TSC0020231
gtagtgagaggt

SEQ ID NO: 302925 - DNA, 12 bp, Artificial Sequence
  Oligonucleotide primer for the detection of SNP TSC0020231
acaataaaaaac

SEQ ID NO: 302926 - DNA, 12 bp, Artificial Sequence
  Oligonucleotide primer for the detection of SNP TSC0020231
gaataatttgag

SEQ ID NO: 302927 - DNA, 12 bp, Artificial Sequence
  Oligonucleotide primer for the detection of SNP TSC0020232
cttaaaaaacac

SEQ ID NO: 302928 - DNA, 12 bp, Artificial Sequence
  Oligonucleotide primer for the detection of SNP TSC0020232
ttggtttagaaa

SEQ ID NO: 302929 - DNA, 12 bp, Artificial Sequence
  Oligonucleotide primer for the detection of SNP TSC0020233
ttacacaataac

SEQ ID NO: 302930 - DNA, 12 bp, Artificial Sequence
  Oligonucleotide primer for the detection of SNP TSC0020233
ttacgcaataac

SEQ ID NO: 302931 - DNA, 12 bp, Artificial Sequence
  Oligonucleotide primer for the detection of SNP TSC0020233
ttagtttatgta

SEQ ID NO: 302932 - DNA, 12 bp, Artificial Sequence
  Oligonucleotide primer for the detection of SNP TSC0020233
ttaacccataca

SEQ ID NO: 302933 - DNA, 12 bp, Artificial Sequence
  Oligonucleotide primer for the detection of SNP TSC0020233
ttgtgtagtggt

SEQ ID NO: 302934 - DNA, 12 bp, Artificial Sequence
  Oligonucleotide primer for the detection of SNP TSC0020233
ttgcgtagtggt

SEQ ID NO: 302935 - DNA, 12 bp, Artificial Sequence
  Oligonucleotide primer for the detection of SNP TSC0020234
tccaaaataaaa

SEQ ID NO: 302936 - DNA, 12 bp, Artificial Sequence
  Oligonucleotide primer for the detection of SNP TSC0020234
cctacccatttc

SEQ ID NO: 302937 - DNA, 12 bp, Artificial Sequence
  Oligonucleotide primer for the detection of SNP TSC0020234
tttaaaatagga

SEQ ID NO: 302938 - DNA, 12 bp, Artificial Sequence
  Oligonucleotide primer for the detection of SNP TSC0020237
actatactccaa

SEQ ID NO: 302939 - DNA, 12 bp, Artificial Sequence
  Oligonucleotide primer for the detection of SNP TSC0020237
actctatcaccc

SEQ ID NO: 302940 - DNA, 12 bp, Artificial Sequence
  Oligonucleotide primer for the detection of SNP TSC0020237
attgtattttag

SEQ ID NO: 302941 - DNA, 12 bp, Artificial Sequence
  Oligonucleotide primer for the detection of SNP TSC0020240
atggaaagtaaa

SEQ ID NO: 302942 - DNA, 12 bp, Artificial Sequence
  Oligonucleotide primer for the detection of SNP TSC0020241
cccacactttca

SEQ ID NO: 302943 - DNA, 12 bp, Artificial Sequence
  Oligonucleotide primer for the detection of SNP TSC0020241
gaagattaaaaa

SEQ ID NO: 302944 - DNA, 12 bp, Artificial Sequence
  Oligonucleotide primer for the detection of SNP TSC0020243
ttctaaaaaacc

SEQ ID NO: 302945 - DNA, 12 bp, Artificial Sequence
  Oligonucleotide primer for the detection of SNP TSC0020243
cttctttactta

SEQ ID NO: 302946 - DNA, 12 bp, Artificial Sequence
  Oligonucleotide primer for the detection of SNP TSC0020243
ttgagaagtttt

SEQ ID NO: 302947 - DNA, 12 bp, Artificial Sequence
  Oligonucleotide primer for the detection of SNP TSC0020244
ccaaacaaatat

SEQ ID NO: 302948 - DNA, 12 bp, Artificial Sequence
  Oligonucleotide primer for the detection of SNP TSC0020244
tgtgttagtgta

SEQ ID NO: 302949 - DNA, 12 bp, Artificial Sequence
  Oligonucleotide primer for the detection of SNP TSC0020244
tatatcaataca

SEQ ID NO: 302950 - DNA, 12 bp, Artificial Sequence
  Oligonucleotide primer for the detection of SNP TSC0020244
ttaggtagatgt

SEQ ID NO: 302951 - DNA, 12 bp, Artificial Sequence
  Oligonucleotide primer for the detection of SNP TSC0020247
actccatacata

SEQ ID NO: 302952 - DNA, 12 bp, Artificial Sequence
  Oligonucleotide primer for the detection of SNP TSC0020247
aattattttgag

SEQ ID NO: 302953 - DNA, 12 bp, Artificial Sequence
  Oligonucleotide primer for the detection of SNP TSC0020248
catatataaccc

SEQ ID NO: 302954 - DNA, 12 bp, Artificial Sequence
  Oligonucleotide primer for the detection of SNP TSC0020248
cgtatataaccc

SEQ ID NO: 302955 - DNA, 12 bp, Artificial Sequence
  Oligonucleotide primer for the detection of SNP TSC0020248
gggatgaaggga

SEQ ID NO: 302956 - DNA, 12 bp, Artificial Sequence
  Oligonucleotide primer for the detection of SNP TSC0020249
aaccaatcattt

SEQ ID NO: 302957 - DNA, 12 bp, Artificial Sequence
  Oligonucleotide primer for the detection of SNP TSC0020249
aaccaatcgttt

SEQ ID NO: 302958 - DNA, 12 bp, Artificial Sequence
  Oligonucleotide primer for the detection of SNP TSC0020249
tgttgaagatga

SEQ ID NO: 302959 - DNA, 12 bp, Artificial Sequence
  Oligonucleotide primer for the detection of SNP TSC0020251
gttaatgagtag

SEQ ID NO: 302960 - DNA, 12 bp, Artificial Sequence
  Oligonucleotide primer for the detection of SNP TSC0020251
accaataaataa

SEQ ID NO: 302961 - DNA, 12 bp, Artificial Sequence
  Oligonucleotide primer for the detection of SNP TSC0020251
agggattggttt

SEQ ID NO: 302962 - DNA, 12 bp, Artificial Sequence
  Oligonucleotide primer for the detection of SNP TSC0020253
agtttaggtaaa

SEQ ID NO: 302963 - DNA, 12 bp, Artificial Sequence
  Oligonucleotide primer for the detection of SNP TSC0020254
aactttacatac

SEQ ID NO: 302964 - DNA, 12 bp, Artificial Sequence
  Oligonucleotide primer for the detection of SNP TSC0020254
aactttacgtac

SEQ ID NO: 302965 - DNA, 12 bp, Artificial Sequence
  Oligonucleotide primer for the detection of SNP TSC0020254
attgagaatttt

SEQ ID NO: 302966 - DNA, 12 bp, Artificial Sequence
  Oligonucleotide primer for the detection of SNP TSC0020254
attcactaaaaa

SEQ ID NO: 302967 - DNA, 12 bp, Artificial Sequence
  Oligonucleotide primer for the detection of SNP TSC0020254
aattttatgtgt

SEQ ID NO: 302968 - DNA, 12 bp, Artificial Sequence
  Oligonucleotide primer for the detection of SNP TSC0020254
aattttacgtgt

SEQ ID NO: 302969 - DNA, 12 bp, Artificial Sequence
  Oligonucleotide primer for the detection of SNP TSC0020254
aattttatgtgc

SEQ ID NO: 302970 - DNA, 12 bp, Artificial Sequence
  Oligonucleotide primer for the detection of SNP TSC0020254
aattttacgtgc

SEQ ID NO: 302971 - DNA, 12 bp, Artificial Sequence
  Oligonucleotide primer for the detection of SNP TSC0020259
attaactaataa

SEQ ID NO: 302972 - DNA, 12 bp, Artificial Sequence
  Oligonucleotide primer for the detection of SNP TSC0020259
ttatggggttag

SEQ ID NO: 302973 - DNA, 12 bp, Artificial Sequence
  Oligonucleotide primer for the detection of SNP TSC0020259
ttataaaatcaa

SEQ ID NO: 302974 - DNA, 12 bp, Artificial Sequence
  Oligonucleotide primer for the detection of SNP TSC0020259
gattgattgata

SEQ ID NO: 302975 - DNA, 12 bp, Artificial Sequence
  Oligonucleotide primer for the detection of SNP TSC0020260
acataacaaata

SEQ ID NO: 302976 - DNA, 12 bp, Artificial Sequence
  Oligonucleotide primer for the detection of SNP TSC0020260
ttgtgtgttatt

SEQ ID NO: 302977 - DNA, 12 bp, Artificial Sequence
  Oligonucleotide primer for the detection of SNP TSC0020260
ttatatatcatc

SEQ ID NO: 302978 - DNA, 12 bp, Artificial Sequence
  Oligonucleotide primer for the detection of SNP TSC0020260
gtatgatagatg

SEQ ID NO: 302979 - DNA, 12 bp, Artificial Sequence
  Oligonucleotide primer for the detection of SNP TSC0020261
aaactttacaaa

SEQ ID NO: 302980 - DNA, 12 bp, Artificial Sequence
  Oligonucleotide primer for the detection of SNP TSC0020261
tattaatagtta

SEQ ID NO: 302981 - DNA, 12 bp, Artificial Sequence
  Oligonucleotide primer for the detection of SNP TSC0020261
accaacaaccaa

SEQ ID NO: 302982 - DNA, 12 bp, Artificial Sequence
  Oligonucleotide primer for the detection of SNP TSC0020261
gattttgtaagt

SEQ ID NO: 302983 - DNA, 12 bp, Artificial Sequence
  Oligonucleotide primer for the detection of SNP TSC0020261
gattttgtaagc

SEQ ID NO: 302984 - DNA, 12 bp, Artificial Sequence
  Oligonucleotide primer for the detection of SNP TSC0020262
aataaatcaaac

SEQ ID NO: 302985 - DNA, 12 bp, Artificial Sequence
  Oligonucleotide primer for the detection of SNP TSC0020262
aataaatcgaac

SEQ ID NO: 302986 - DNA, 12 bp, Artificial Sequence
  Oligonucleotide primer for the detection of SNP TSC0020262
atttgtgtatgg

SEQ ID NO: 302987 - DNA, 12 bp, Artificial Sequence
  Oligonucleotide primer for the detection of SNP TSC0020262
acttatacataa

SEQ ID NO: 302988 - DNA, 12 bp, Artificial Sequence
  Oligonucleotide primer for the detection of SNP TSC0020262
aatgggttggat

SEQ ID NO: 302989 - DNA, 12 bp, Artificial Sequence
  Oligonucleotide primer for the detection of SNP TSC0020262
aatgggtcggat

SEQ ID NO: 302990 - DNA, 12 bp, Artificial Sequence
  Oligonucleotide primer for the detection of SNP TSC0020263
aaaccaatcaaa

SEQ ID NO: 302991 - DNA, 12 bp, Artificial Sequence
  Oligonucleotide primer for the detection of SNP TSC0020263
aactctaccttc

SEQ ID NO: 302992 - DNA, 12 bp, Artificial Sequence
  Oligonucleotide primer for the detection of SNP TSC0020263
atgaagttaatt

SEQ ID NO: 302993 - DNA, 12 bp, Artificial Sequence
  Oligonucleotide primer for the detection of SNP TSC0020264
ttccttcctcca

SEQ ID NO: 302994 - DNA, 12 bp, Artificial Sequence
  Oligonucleotide primer for the detection of SNP TSC0020264
aagttagttgtt

SEQ ID NO: 302995 - DNA, 12 bp, Artificial Sequence
  Oligonucleotide primer for the detection of SNP TSC0020264
aagttagtcgtt

SEQ ID NO: 302996 - DNA, 12 bp, Artificial Sequence
  Oligonucleotide primer for the detection of SNP TSC0020264
caaaccaatcac

SEQ ID NO: 302997 - DNA, 12 bp, Artificial Sequence
  Oligonucleotide primer for the detection of SNP TSC0020264
caaaccaatcgc

SEQ ID NO: 302998 - DNA, 12 bp, Artificial Sequence
  Oligonucleotide primer for the detection of SNP TSC0020265
catacacccaac

SEQ ID NO: 302999 - DNA, 12 bp, Artificial Sequence
  Oligonucleotide primer for the detection of SNP TSC0020265
catacgcccaac

SEQ ID NO: 303000 - DNA, 12 bp, Artificial Sequence
  Oligonucleotide primer for the detection of SNP TSC0020265
tgttttattttg

SEQ ID NO: 303001 - DNA, 12 bp, Artificial Sequence
  Oligonucleotide primer for the detection of SNP TSC0020265
tatttcatttta

SEQ ID NO: 303002 - DNA, 12 bp, Artificial Sequence
  Oligonucleotide primer for the detection of SNP TSC0020265
tatatgtttaat

SEQ ID NO: 303003 - DNA, 12 bp, Artificial Sequence
  Oligonucleotide primer for the detection of SNP TSC0020265
tatacgtttaat

SEQ ID NO: 303004 - DNA, 12 bp, Artificial Sequence
  Oligonucleotide primer for the detection of SNP TSC0020266
acttttaaactc

SEQ ID NO: 303005 - DNA, 12 bp, Artificial Sequence
  Oligonucleotide primer for the detection of SNP TSC0020266
gttattatggtg

SEQ ID NO: 303006 - DNA, 12 bp, Artificial Sequence
  Oligonucleotide primer for the detection of SNP TSC0020267
acctatctatct

SEQ ID NO: 303007 - DNA, 12 bp, Artificial Sequence
  Oligonucleotide primer for the detection of SNP TSC0020267
ataagaggggga

SEQ ID NO: 303008 - DNA, 12 bp, Artificial Sequence
  Oligonucleotide primer for the detection of SNP TSC0020268
tatctactcccc

SEQ ID NO: 303009 - DNA, 12 bp, Artificial Sequence
  Oligonucleotide primer for the detection of SNP TSC0020268
ttttttataaga

SEQ ID NO: 303010 - DNA, 12 bp, Artificial Sequence
  Oligonucleotide primer for the detection of SNP TSC0020269
ttcccctaaaat

SEQ ID NO: 303011 - DNA, 12 bp, Artificial Sequence
  Oligonucleotide primer for the detection of SNP TSC0020269
gtgggatggtta

SEQ ID NO: 303012 - DNA, 12 bp, Artificial Sequence
  Oligonucleotide primer for the detection of SNP TSC0020269
tttttttggagt

SEQ ID NO: 303013 - DNA, 12 bp, Artificial Sequence
  Oligonucleotide primer for the detection of SNP TSC0020270
gtttattgagaa

SEQ ID NO: 303014 - DNA, 12 bp, Artificial Sequence
  Oligonucleotide primer for the detection of SNP TSC0020270
gaagaggaatgt

SEQ ID NO: 303015 - DNA, 12 bp, Artificial Sequence
  Oligonucleotide primer for the detection of SNP TSC0020273
aaaaattaaata

SEQ ID NO: 303016 - DNA, 12 bp, Artificial Sequence
  Oligonucleotide primer for the detection of SNP TSC0020273
ttttaaaaattt

SEQ ID NO: 303017 - DNA, 12 bp, Artificial Sequence
  Oligonucleotide primer for the detection of SNP TSC0020273
ttccaaaaattt

SEQ ID NO: 303018 - DNA, 12 bp, Artificial Sequence
  Oligonucleotide primer for the detection of SNP TSC0020273
gagaattagata

SEQ ID NO: 303019 - DNA, 12 bp, Artificial Sequence
  Oligonucleotide primer for the detection of SNP TSC0020274
acctaaaatccc

SEQ ID NO: 303020 - DNA, 12 bp, Artificial Sequence
  Oligonucleotide primer for the detection of SNP TSC0020274
agttttttaaaa

SEQ ID NO: 303021 - DNA, 12 bp, Artificial Sequence
  Oligonucleotide primer for the detection of SNP TSC0020277
aaaattataaac

SEQ ID NO: 303022 - DNA, 12 bp, Artificial Sequence
  Oligonucleotide primer for the detection of SNP TSC0020277
ggtgtgttggtg

SEQ ID NO: 303023 - DNA, 12 bp, Artificial Sequence
  Oligonucleotide primer for the detection of SNP TSC0020277
gggattataagt

SEQ ID NO: 303024 - DNA, 12 bp, Artificial Sequence
  Oligonucleotide primer for the detection of SNP TSC0020278
tctacataaaat

SEQ ID NO: 303025 - DNA, 12 bp, Artificial Sequence
  Oligonucleotide primer for the detection of SNP TSC0020281
ctaaaccctaac

SEQ ID NO: 303026 - DNA, 12 bp, Artificial Sequence
  Oligonucleotide primer for the detection of SNP TSC0020281
gtttggggttaa

SEQ ID NO: 303027 - DNA, 12 bp, Artificial Sequence
  Oligonucleotide primer for the detection of SNP TSC0020284
tactttaaataa

SEQ ID NO: 303028 - DNA, 12 bp, Artificial Sequence
  Oligonucleotide primer for the detection of SNP TSC0020284
agaaattatttt

SEQ ID NO: 303029 - DNA, 12 bp, Artificial Sequence
  Oligonucleotide primer for the detection of SNP TSC0020284
aaaattattcca

SEQ ID NO: 303030 - DNA, 12 bp, Artificial Sequence
  Oligonucleotide primer for the detection of SNP TSC0020284
tgttttgaataa

SEQ ID NO: 303031 - DNA, 12 bp, Artificial Sequence
  Oligonucleotide primer for the detection of SNP TSC0020285
tatgaataagat

SEQ ID NO: 303032 - DNA, 12 bp, Artificial Sequence
  Oligonucleotide primer for the detection of SNP TSC0020285
cataaataaaat

SEQ ID NO: 303033 - DNA, 12 bp, Artificial Sequence
  Oligonucleotide primer for the detection of SNP TSC0020285
tgaaagtagaga

SEQ ID NO: 303034 - DNA, 12 bp, Artificial Sequence
  Oligonucleotide primer for the detection of SNP TSC0020286
ccataaataaca

SEQ ID NO: 303035 - DNA, 12 bp, Artificial Sequence
  Oligonucleotide primer for the detection of SNP TSC0020286
ccataaataacg

SEQ ID NO: 303036 - DNA, 12 bp, Artificial Sequence
  Oligonucleotide primer for the detection of SNP TSC0020286
ccgtaaataaca

SEQ ID NO: 303037 - DNA, 12 bp, Artificial Sequence
  Oligonucleotide primer for the detection of SNP TSC0020286
ccgtaaataacg

SEQ ID NO: 303038 - DNA, 12 bp, Artificial Sequence
  Oligonucleotide primer for the detection of SNP TSC0020286
aagtttattagt

SEQ ID NO: 303039 - DNA, 12 bp, Artificial Sequence
  Oligonucleotide primer for the detection of SNP TSC0020286
aagtttattagc

SEQ ID NO: 303040 - DNA, 12 bp, Artificial Sequence
  Oligonucleotide primer for the detection of SNP TSC0020286
aaaacttattaa

SEQ ID NO: 303041 - DNA, 12 bp, Artificial Sequence
  Oligonucleotide primer for the detection of SNP TSC0020286
tttgtgagtggt

SEQ ID NO: 303042 - DNA, 12 bp, Artificial Sequence
  Oligonucleotide primer for the detection of SNP TSC0020286
ttcgtgagtggt

SEQ ID NO: 303043 - DNA, 12 bp, Artificial Sequence
  Oligonucleotide primer for the detection of SNP TSC0020286
tttgtgagtggc

SEQ ID NO: 303044 - DNA, 12 bp, Artificial Sequence
  Oligonucleotide primer for the detection of SNP TSC0020286
ttcgtgagtggc

SEQ ID NO: 303045 - DNA, 12 bp, Artificial Sequence
  Oligonucleotide primer for the detection of SNP TSC0020287
taattttagagg

SEQ ID NO: 303046 - DNA, 12 bp, Artificial Sequence
  Oligonucleotide primer for the detection of SNP TSC0020288
caaatatcacaa

SEQ ID NO: 303047 - DNA, 12 bp, Artificial Sequence
  Oligonucleotide primer for the detection of SNP TSC0020288
taagtttttttt

SEQ ID NO: 303048 - DNA, 12 bp, Artificial Sequence
  Oligonucleotide primer for the detection of SNP TSC0020288
caaatctctccc

SEQ ID NO: 303049 - DNA, 12 bp, Artificial Sequence
  Oligonucleotide primer for the detection of SNP TSC0020288
taagtgttatag

SEQ ID NO: 303050 - DNA, 12 bp, Artificial Sequence
  Oligonucleotide primer for the detection of SNP TSC0020289
acataaaccact

SEQ ID NO: 303051 - DNA, 12 bp, Artificial Sequence
  Oligonucleotide primer for the detection of SNP TSC0020289
acgtaaaccact

SEQ ID NO: 303052 - DNA, 12 bp, Artificial Sequence
  Oligonucleotide primer for the detection of SNP TSC0020289
ttttaggttggg

SEQ ID NO: 303053 - DNA, 12 bp, Artificial Sequence
  Oligonucleotide primer for the detection of SNP TSC0020289
ttttaggtcggg

SEQ ID NO: 303054 - DNA, 12 bp, Artificial Sequence
  Oligonucleotide primer for the detection of SNP TSC0020289
ttccaaaccaaa

SEQ ID NO: 303055 - DNA, 12 bp, Artificial Sequence
  Oligonucleotide primer for the detection of SNP TSC0020289
ttccaaaccgaa

SEQ ID NO: 303056 - DNA, 12 bp, Artificial Sequence
  Oligonucleotide primer for the detection of SNP TSC0020293
ccccacaatccc

SEQ ID NO: 303057 - DNA, 12 bp, Artificial Sequence
  Oligonucleotide primer for the detection of SNP TSC0020293
tagggtttttgg

SEQ ID NO: 303058 - DNA, 12 bp, Artificial Sequence
  Oligonucleotide primer for the detection of SNP TSC0020293
tagggttttcgg

SEQ ID NO: 303059 - DNA, 12 bp, Artificial Sequence
  Oligonucleotide primer for the detection of SNP TSC0020294
aacataaatatc

SEQ ID NO: 303060 - DNA, 12 bp, Artificial Sequence
  Oligonucleotide primer for the detection of SNP TSC0020294
tgttaataatta

SEQ ID NO: 303061 - DNA, 12 bp, Artificial Sequence
  Oligonucleotide primer for the detection of SNP TSC0020295
acaaatttattt

SEQ ID NO: 303062 - DNA, 12 bp, Artificial Sequence
  Oligonucleotide primer for the detection of SNP TSC0020295
tgtattttgtaa

SEQ ID NO: 303063 - DNA, 12 bp, Artificial Sequence
  Oligonucleotide primer for the detection of SNP TSC0020296
cataacccataa

SEQ ID NO: 303064 - DNA, 12 bp, Artificial Sequence
  Oligonucleotide primer for the detection of SNP TSC0020296
tgggaggtgttt

SEQ ID NO: 303065 - DNA, 12 bp, Artificial Sequence
  Oligonucleotide primer for the detection of SNP TSC0020296
aaaaaatattca

SEQ ID NO: 303066 - DNA, 12 bp, Artificial Sequence
  Oligonucleotide primer for the detection of SNP TSC0020296
atgatttatgat

SEQ ID NO: 303067 - DNA, 12 bp, Artificial Sequence
  Oligonucleotide primer for the detection of SNP TSC0020297
attttaaataat

SEQ ID NO: 303068 - DNA, 12 bp, Artificial Sequence
  Oligonucleotide primer for the detection of SNP TSC0020297
ttagaattgaaa

SEQ ID NO: 303069 - DNA, 12 bp, Artificial Sequence
  Oligonucleotide primer for the detection of SNP TSC0020298
ttatttaaaatt

SEQ ID NO: 303070 - DNA, 12 bp, Artificial Sequence
  Oligonucleotide primer for the detection of SNP TSC0020298
ttatttaaaatc

SEQ ID NO: 303071 - DNA, 12 bp, Artificial Sequence
  Oligonucleotide primer for the detection of SNP TSC0020298
tttaatttgtaa

SEQ ID NO: 303072 - DNA, 12 bp, Artificial Sequence
  Oligonucleotide primer for the detection of SNP TSC0020299
aattgtttattt

SEQ ID NO: 303073 - DNA, 12 bp, Artificial Sequence
  Oligonucleotide primer for the detection of SNP TSC0020299
aattactcattc

SEQ ID NO: 303074 - DNA, 12 bp, Artificial Sequence
  Oligonucleotide primer for the detection of SNP TSC0020299
aatagaaaaaat

SEQ ID NO: 303075 - DNA, 12 bp, Artificial Sequence
  Oligonucleotide primer for the detection of SNP TSC0020300
accccactctac

SEQ ID NO: 303076 - DNA, 12 bp, Artificial Sequence
  Oligonucleotide primer for the detection of SNP TSC0020300
tgtttggatata

SEQ ID NO: 303077 - DNA, 12 bp, Artificial Sequence
  Oligonucleotide primer for the detection of SNP TSC0020302
aaaataaatccc

SEQ ID NO: 303078 - DNA, 12 bp, Artificial Sequence
  Oligonucleotide primer for the detection of SNP TSC0020302
tatggataagag

SEQ ID NO: 303079 - DNA, 12 bp, Artificial Sequence
  Oligonucleotide primer for the detection of SNP TSC0020308
actaaaatacac

SEQ ID NO: 303080 - DNA, 12 bp, Artificial Sequence
  Oligonucleotide primer for the detection of SNP TSC0020308
agaagatattaa

SEQ ID NO: 303081 - DNA, 12 bp, Artificial Sequence
  Oligonucleotide primer for the detection of SNP TSC0020311
atttctctccat

SEQ ID NO: 303082 - DNA, 12 bp, Artificial Sequence
  Oligonucleotide primer for the detection of SNP TSC0020311
atttctctccgt

SEQ ID NO: 303083 - DNA, 12 bp, Artificial Sequence
  Oligonucleotide primer for the detection of SNP TSC0020311
tttagttagggg

SEQ ID NO: 303084 - DNA, 12 bp, Artificial Sequence
  Oligonucleotide primer for the detection of SNP TSC0020312
taattcccttcc

SEQ ID NO: 303085 - DNA, 12 bp, Artificial Sequence
  Oligonucleotide primer for the detection of SNP TSC0020312
taggtttagata

SEQ ID NO: 303086 - DNA, 12 bp, Artificial Sequence
  Oligonucleotide primer for the detection of SNP TSC0020312
caaactcaaaca

SEQ ID NO: 303087 - DNA, 12 bp, Artificial Sequence
  Oligonucleotide primer for the detection of SNP TSC0020313
tcatccaacccc

SEQ ID NO: 303088 - DNA, 12 bp, Artificial Sequence
  Oligonucleotide primer for the detection of SNP TSC0020313
agtagaggggaa

SEQ ID NO: 303089 - DNA, 12 bp, Artificial Sequence
  Oligonucleotide primer for the detection of SNP TSC0020318
taatacctaata

SEQ ID NO: 303090 - DNA, 12 bp, Artificial Sequence
  Oligonucleotide primer for the detection of SNP TSC0020318
gagtgtggtata

SEQ ID NO: 303091 - DNA, 12 bp, Artificial Sequence
  Oligonucleotide primer for the detection of SNP TSC0020318
gagcgtggtata

SEQ ID NO: 303092 - DNA, 12 bp, Artificial Sequence
  Oligonucleotide primer for the detection of SNP TSC0020318
aaacataacaca

SEQ ID NO: 303093 - DNA, 12 bp, Artificial Sequence
  Oligonucleotide primer for the detection of SNP TSC0020318
aaacgtaacaca

SEQ ID NO: 303094 - DNA, 12 bp, Artificial Sequence
  Oligonucleotide primer for the detection of SNP TSC0020318
tgatgtttggtg

SEQ ID NO: 303095 - DNA, 12 bp, Artificial Sequence
  Oligonukleotid-Primer
ttacataacaca

SEQ ID NO: 303096 - DNA, 12 bp, Artificial Sequence
  Oligonucleotide primer for the detection of SNP TSC0020322
atctaacttctt

SEQ ID NO: 303097 - DNA, 12 bp, Artificial Sequence
  Oligonucleotide primer for the detection of SNP TSC0020322
ttatatagtata

SEQ ID NO: 303098 - DNA, 12 bp, Artificial Sequence
  Oligonucleotide primer for the detection of SNP TSC0020324
cacaaaaccaaa

SEQ ID NO: 303099 - DNA, 12 bp, Artificial Sequence
  Oligonucleotide primer for the detection of SNP TSC0020324
atagaaatatat

SEQ ID NO: 303100 - DNA, 12 bp, Artificial Sequence
  Oligonucleotide primer for the detection of SNP TSC0020324
ataaaaatacat

SEQ ID NO: 303101 - DNA, 12 bp, Artificial Sequence
  Oligonucleotide primer for the detection of SNP TSC0020324
tataaaattagg

SEQ ID NO: 303102 - DNA, 12 bp, Artificial Sequence
  Oligonucleotide primer for the detection of SNP TSC0020326
catactcaacta

SEQ ID NO: 303103 - DNA, 12 bp, Artificial Sequence
  Oligonucleotide primer for the detection of SNP TSC0020326
cgtactcaacta

SEQ ID NO: 303104 - DNA, 12 bp, Artificial Sequence
  Oligonucleotide primer for the detection of SNP TSC0020326
agaatgtatttt

SEQ ID NO: 303105 - DNA, 12 bp, Artificial Sequence
  Oligonucleotide primer for the detection of SNP TSC0020326
agaacgtatttt

SEQ ID NO: 303106 - DNA, 12 bp, Artificial Sequence
  Oligonucleotide primer for the detection of SNP TSC0020326
agaatgtatttc

SEQ ID NO: 303107 - DNA, 12 bp, Artificial Sequence
  Oligonucleotide primer for the detection of SNP TSC0020326
agaacgtatttc

SEQ ID NO: 303108 - DNA, 12 bp, Artificial Sequence
  Oligonucleotide primer for the detection of SNP TSC0020326
caaaacacattt

SEQ ID NO: 303109 - DNA, 12 bp, Artificial Sequence
  Oligonucleotide primer for the detection of SNP TSC0020326
caaaacgcattt

SEQ ID NO: 303110 - DNA, 12 bp, Artificial Sequence
  Oligonucleotide primer for the detection of SNP TSC0020326
tgtgtttagtta

SEQ ID NO: 303111 - DNA, 12 bp, Artificial Sequence
  Oligonucleotide primer for the detection of SNP TSC0020326
cgtgtttagtta

SEQ ID NO: 303112 - DNA, 12 bp, Artificial Sequence
  Oligonucleotide primer for the detection of SNP TSC0020327
taaattttcacc

SEQ ID NO: 303113 - DNA, 12 bp, Artificial Sequence
  Oligonucleotide primer for the detection of SNP TSC0020327
tatttagatatt

SEQ ID NO: 303114 - DNA, 12 bp, Artificial Sequence
  Oligonucleotide primer for the detection of SNP TSC0020327
tccaaacattaa

SEQ ID NO: 303115 - DNA, 12 bp, Artificial Sequence
  Oligonucleotide primer for the detection of SNP TSC0020327
taggtttttatt

SEQ ID NO: 303116 - DNA, 12 bp, Artificial Sequence
  Oligonucleotide primer for the detection of SNP TSC0020327
taggtttttatc

SEQ ID NO: 303117 - DNA, 12 bp, Artificial Sequence
  Oligonucleotide primer for the detection of SNP TSC0020328
taaactccataa

SEQ ID NO: 303118 - DNA, 12 bp, Artificial Sequence
  Oligonucleotide primer for the detection of SNP TSC0020328
taaactccgtaa

SEQ ID NO: 303119 - DNA, 12 bp, Artificial Sequence
  Oligonucleotide primer for the detection of SNP TSC0020328
aattagtttgtt

SEQ ID NO: 303120 - DNA, 12 bp, Artificial Sequence
  Oligonucleotide primer for the detection of SNP TSC0020328
ccaaccaaccta

SEQ ID NO: 303121 - DNA, 12 bp, Artificial Sequence
  Oligonucleotide primer for the detection of SNP TSC0020329
ccattctaaaaa

SEQ ID NO: 303122 - DNA, 12 bp, Artificial Sequence
  Oligonucleotide primer for the detection of SNP TSC0020329
ccgttctaaaaa

SEQ ID NO: 303123 - DNA, 12 bp, Artificial Sequence
  Oligonucleotide primer for the detection of SNP TSC0020329
tttattcgtttt

SEQ ID NO: 303124 - DNA, 12 bp, Artificial Sequence
  Oligonucleotide primer for the detection of SNP TSC0020329
tttatttgtttc

SEQ ID NO: 303125 - DNA, 12 bp, Artificial Sequence
  Oligonucleotide primer for the detection of SNP TSC0020329
tttattcgtttc

SEQ ID NO: 303126 - DNA, 12 bp, Artificial Sequence
  Oligonucleotide primer for the detection of SNP TSC0020329
atttcacccact

SEQ ID NO: 303127 - DNA, 12 bp, Artificial Sequence
  Oligonucleotide primer for the detection of SNP TSC0020329
atttcacccgct

SEQ ID NO: 303128 - DNA, 12 bp, Artificial Sequence
  Oligonucleotide primer for the detection of SNP TSC0020329
tcgttttagaga

SEQ ID NO: 303129 - DNA, 12 bp, Artificial Sequence
  Oligonucleotide primer for the detection of SNP TSC0020331
agtaaagatagg

SEQ ID NO: 303130 - DNA, 12 bp, Artificial Sequence
  Oligonucleotide primer for the detection of SNP TSC0020333
attaacacatct

SEQ ID NO: 303131 - DNA, 12 bp, Artificial Sequence
  Oligonucleotide primer for the detection of SNP TSC0020333
attagtatattt

SEQ ID NO: 303132 - DNA, 12 bp, Artificial Sequence
  Oligonucleotide primer for the detection of SNP TSC0020334
ttaaaacatcct

SEQ ID NO: 303133 - DNA, 12 bp, Artificial Sequence
  Oligonucleotide primer for the detection of SNP TSC0020334
taattggtaaga

SEQ ID NO: 303134 - DNA, 12 bp, Artificial Sequence
  Oligonucleotide primer for the detection of SNP TSC0020334
aactaataaaaa

SEQ ID NO: 303135 - DNA, 12 bp, Artificial Sequence
  Oligonucleotide primer for the detection of SNP TSC0020334
ttaaagtatttt

SEQ ID NO: 303136 - DNA, 12 bp, Artificial Sequence
  Oligonucleotide primer for the detection of SNP TSC0020335
ctatataaaact

SEQ ID NO: 303137 - DNA, 12 bp, Artificial Sequence
  Oligonucleotide primer for the detection of SNP TSC0020335
gtttatgtattg

SEQ ID NO: 303138 - DNA, 12 bp, Artificial Sequence
  Oligonucleotide primer for the detection of SNP TSC0020335
gtttacgtattg

SEQ ID NO: 303139 - DNA, 12 bp, Artificial Sequence
  Oligonucleotide primer for the detection of SNP TSC0020339
tataaacactta

SEQ ID NO: 303140 - DNA, 12 bp, Artificial Sequence
  Oligonucleotide primer for the detection of SNP TSC0020339
gatatggtttgt

SEQ ID NO: 303141 - DNA, 12 bp, Artificial Sequence
  Oligonucleotide primer for the detection of SNP TSC0020339
aacataacctat

SEQ ID NO: 303142 - DNA, 12 bp, Artificial Sequence
  Oligonucleotide primer for the detection of SNP TSC0020339
tgtggatattta

SEQ ID NO: 303143 - DNA, 12 bp, Artificial Sequence
  Oligonucleotide primer for the detection of SNP TSC0020340
aacctaatcaac

SEQ ID NO: 303144 - DNA, 12 bp, Artificial Sequence
  Oligonucleotide primer for the detection of SNP TSC0020343
aaaaaaccaaca

SEQ ID NO: 303145 - DNA, 12 bp, Artificial Sequence
  Oligonucleotide primer for the detection of SNP TSC0020343
tgttggttgttt

SEQ ID NO: 303146 - DNA, 12 bp, Artificial Sequence
  Oligonucleotide primer for the detection of SNP TSC0020343
tgttggtcgttt

SEQ ID NO: 303147 - DNA, 12 bp, Artificial Sequence
  Oligonucleotide primer for the detection of SNP TSC0020343
tttactaaccac

SEQ ID NO: 303148 - DNA, 12 bp, Artificial Sequence
  Oligonucleotide primer for the detection of SNP TSC0020343
tttactaaccgc

SEQ ID NO: 303149 - DNA, 12 bp, Artificial Sequence
  Oligonucleotide primer for the detection of SNP TSC0020343
gaaggttaatat

SEQ ID NO: 303150 - DNA, 12 bp, Artificial Sequence
  Oligonucleotide primer for the detection of SNP TSC0020346
acctactcataa

SEQ ID NO: 303151 - DNA, 12 bp, Artificial Sequence
  Oligonucleotide primer for the detection of SNP TSC0020346
acctactcgtaa

SEQ ID NO: 303152 - DNA, 12 bp, Artificial Sequence
  Oligonucleotide primer for the detection of SNP TSC0020346
attgtagtagtt

SEQ ID NO: 303153 - DNA, 12 bp, Artificial Sequence
  Oligonucleotide primer for the detection of SNP TSC0020346
actataataacc

SEQ ID NO: 303154 - DNA, 12 bp, Artificial Sequence
  Oligonucleotide primer for the detection of SNP TSC0020346
gtttgtttgtga

SEQ ID NO: 303155 - DNA, 12 bp, Artificial Sequence
  Oligonucleotide primer for the detection of SNP TSC0020346
gtttgttcgtga

SEQ ID NO: 303156 - DNA, 12 bp, Artificial Sequence
  Oligonucleotide primer for the detection of SNP TSC0020347
aacccaactaat

SEQ ID NO: 303157 - DNA, 12 bp, Artificial Sequence
  Oligonucleotide primer for the detection of SNP TSC0020349
ccacccctataa

SEQ ID NO: 303158 - DNA, 12 bp, Artificial Sequence
  Oligonucleotide primer for the detection of SNP TSC0020349
tagagttgtgat

SEQ ID NO: 303159 - DNA, 12 bp, Artificial Sequence
  Oligonucleotide primer for the detection of SNP TSC0020349
caaaactataat

SEQ ID NO: 303160 - DNA, 12 bp, Artificial Sequence
  Oligonucleotide primer for the detection of SNP TSC0020349
ttatttttgtgg

SEQ ID NO: 303161 - DNA, 12 bp, Artificial Sequence
  Oligonucleotide primer for the detection of SNP TSC0020350
tataattttctt

SEQ ID NO: 303162 - DNA, 12 bp, Artificial Sequence
  Oligonucleotide primer for the detection of SNP TSC0020350
taaattgtttta

SEQ ID NO: 303163 - DNA, 12 bp, Artificial Sequence
  Oligonucleotide primer for the detection of SNP TSC0020351
ataaaaacaaac

SEQ ID NO: 303164 - DNA, 12 bp, Artificial Sequence
  Oligonucleotide primer for the detection of SNP TSC0020351
ataaaaacgaac

SEQ ID NO: 303165 - DNA, 12 bp, Artificial Sequence
  Oligonucleotide primer for the detection of SNP TSC0020351
agatattgagga

SEQ ID NO: 303166 - DNA, 12 bp, Artificial Sequence
  Oligonucleotide primer for the detection of SNP TSC0020351
gtaggagtgaat

SEQ ID NO: 303167 - DNA, 12 bp, Artificial Sequence
  Oligonucleotide primer for the detection of SNP TSC0020351
gtaggagcgaat

SEQ ID NO: 303168 - DNA, 12 bp, Artificial Sequence
  Oligonukleotid-Primer
caataacgcaat

SEQ ID NO: 303169 - DNA, 12 bp, Artificial Sequence
  Oligonucleotide primer for the detection of SNP TSC0020352
agtaagttaaga

SEQ ID NO: 303170 - DNA, 12 bp, Artificial Sequence
  Oligonucleotide primer for the detection of SNP TSC0020353
tacaacaacccc

SEQ ID NO: 303171 - DNA, 12 bp, Artificial Sequence
  Oligonucleotide primer for the detection of SNP TSC0020353
ttgaaggtaaga

SEQ ID NO: 303172 - DNA, 12 bp, Artificial Sequence
  Oligonukleotid-Primer
catactacctat

SEQ ID NO: 303173 - DNA, 12 bp, Artificial Sequence
  Oligonucleotide primer for the detection of SNP TSC0020355
ttattaaatatt

SEQ ID NO: 303174 - DNA, 12 bp, Artificial Sequence
  Oligonucleotide primer for the detection of SNP TSC0020355
acctaccaaata

SEQ ID NO: 303175 - DNA, 12 bp, Artificial Sequence
  Oligonucleotide primer for the detection of SNP TSC0020355
tatattatttat

SEQ ID NO: 303176 - DNA, 12 bp, Artificial Sequence
  Oligonucleotide primer for the detection of SNP TSC0020356
aaaataacgaac

SEQ ID NO: 303177 - DNA, 12 bp, Artificial Sequence
  Oligonucleotide primer for the detection of SNP TSC0020356
gaaataacaaac

SEQ ID NO: 303178 - DNA, 12 bp, Artificial Sequence
  Oligonucleotide primer for the detection of SNP TSC0020356
gaaataacgaac

SEQ ID NO: 303179 - DNA, 12 bp, Artificial Sequence
  Oligonucleotide primer for the detection of SNP TSC0020356
tgtgtttggtgg

SEQ ID NO: 303180 - DNA, 12 bp, Artificial Sequence
  Oligonucleotide primer for the detection of SNP TSC0020356
cgtgtttggtgg

SEQ ID NO: 303181 - DNA, 12 bp, Artificial Sequence
  Oligonucleotide primer for the detection of SNP TSC0020356
tgtgtttggcgg

SEQ ID NO: 303182 - DNA, 12 bp, Artificial Sequence
  Oligonucleotide primer for the detection of SNP TSC0020356
cgtgtttggcgg

SEQ ID NO: 303183 - DNA, 12 bp, Artificial Sequence
  Oligonucleotide primer for the detection of SNP TSC0020357
ccaacaaaaaaa

SEQ ID NO: 303184 - DNA, 12 bp, Artificial Sequence
  Oligonucleotide primer for the detection of SNP TSC0020357
gtataaagggaa

SEQ ID NO: 303185 - DNA, 12 bp, Artificial Sequence
  Oligonucleotide primer for the detection of SNP TSC0020357
acataaaaaaaa

SEQ ID NO: 303186 - DNA, 12 bp, Artificial Sequence
  Oligonucleotide primer for the detection of SNP TSC0020360
aaaattttatac

SEQ ID NO: 303187 - DNA, 12 bp, Artificial Sequence
  Oligonucleotide primer for the detection of SNP TSC0020360
ataataaatatg

SEQ ID NO: 303188 - DNA, 12 bp, Artificial Sequence
  Oligonucleotide primer for the detection of SNP TSC0020361
atatttagttaa

SEQ ID NO: 303189 - DNA, 12 bp, Artificial Sequence
  Oligonucleotide primer for the detection of SNP TSC0020362
aaacttcttctt

SEQ ID NO: 303190 - DNA, 12 bp, Artificial Sequence
  Oligonucleotide primer for the detection of SNP TSC0020363
ccacttaatata

SEQ ID NO: 303191 - DNA, 12 bp, Artificial Sequence
  Oligonucleotide primer for the detection of SNP TSC0020363
ccgcttaatata

SEQ ID NO: 303192 - DNA, 12 bp, Artificial Sequence
  Oligonucleotide primer for the detection of SNP TSC0020363
gttttttatgat

SEQ ID NO: 303193 - DNA, 12 bp, Artificial Sequence
  Oligonucleotide primer for the detection of SNP TSC0020363
atcctccataat

SEQ ID NO: 303194 - DNA, 12 bp, Artificial Sequence
  Oligonucleotide primer for the detection of SNP TSC0020363
ttgtttgatgta

SEQ ID NO: 303195 - DNA, 12 bp, Artificial Sequence
  Oligonucleotide primer for the detection of SNP TSC0020363
tcgtttgatgta

SEQ ID NO: 303196 - DNA, 12 bp, Artificial Sequence
  Oligonucleotide primer for the detection of SNP TSC0020364
catctaacaact

SEQ ID NO: 303197 - DNA, 12 bp, Artificial Sequence
  Oligonucleotide primer for the detection of SNP TSC0020364
gtatttgaggag

SEQ ID NO: 303198 - DNA, 12 bp, Artificial Sequence
  Oligonucleotide primer for the detection of SNP TSC0020365
ttccctactcat

SEQ ID NO: 303199 - DNA, 12 bp, Artificial Sequence
  Oligonucleotide primer for the detection of SNP TSC0020365
gagtttttgagg

SEQ ID NO: 303200 - DNA, 12 bp, Artificial Sequence
  Oligonucleotide primer for the detection of SNP TSC0020365
gagttttcgagg

SEQ ID NO: 303201 - DNA, 12 bp, Artificial Sequence
  Oligonucleotide primer for the detection of SNP TSC0020373
atcatctccctt

SEQ ID NO: 303202 - DNA, 12 bp, Artificial Sequence
  Oligonucleotide primer for the detection of SNP TSC0020373
atcgtctccctt

SEQ ID NO: 303203 - DNA, 12 bp, Artificial Sequence
  Oligonucleotide primer for the detection of SNP TSC0020373
gtcatctccctt

SEQ ID NO: 303204 - DNA, 12 bp, Artificial Sequence
  Oligonucleotide primer for the detection of SNP TSC0020373
gtcgtctccctt

SEQ ID NO: 303205 - DNA, 12 bp, Artificial Sequence
  Oligonucleotide primer for the detection of SNP TSC0020373
aggggagaggtg

SEQ ID NO: 303206 - DNA, 12 bp, Artificial Sequence
  Oligonucleotide primer for the detection of SNP TSC0020374
ccctccccatac

SEQ ID NO: 303207 - DNA, 12 bp, Artificial Sequence
  Oligonucleotide primer for the detection of SNP TSC0020374
ttggttgtgtag

SEQ ID NO: 303208 - DNA, 12 bp, Artificial Sequence
  Oligonucleotide primer for the detection of SNP TSC0020374
ttaactatacaa

SEQ ID NO: 303209 - DNA, 12 bp, Artificial Sequence
  Oligonucleotide primer for the detection of SNP TSC0020374
ttttttttatac

SEQ ID NO: 303210 - DNA, 12 bp, Artificial Sequence
  Oligonucleotide primer for the detection of SNP TSC0020375
caaatctcccta

SEQ ID NO: 303211 - DNA, 12 bp, Artificial Sequence
  Oligonucleotide primer for the detection of SNP TSC0020375
gtttagttgtgt

SEQ ID NO: 303212 - DNA, 12 bp, Artificial Sequence
  Oligonucleotide primer for the detection of SNP TSC0020375
tagattttttta

SEQ ID NO: 303213 - DNA, 12 bp, Artificial Sequence
  Oligonucleotide primer for the detection of SNP TSC0020385
ctccaaatcaca

SEQ ID NO: 303214 - DNA, 12 bp, Artificial Sequence
  Oligonucleotide primer for the detection of SNP TSC0020385
cttccacttact

SEQ ID NO: 303215 - DNA, 12 bp, Artificial Sequence
  Oligonucleotide primer for the detection of SNP TSC0020385
ttttaaattata

SEQ ID NO: 303216 - DNA, 12 bp, Artificial Sequence
  Oligonucleotide primer for the detection of SNP TSC0020386
ccttctctatac

SEQ ID NO: 303217 - DNA, 12 bp, Artificial Sequence
  Oligonucleotide primer for the detection of SNP TSC0020386
aatcctcctcaa

SEQ ID NO: 303218 - DNA, 12 bp, Artificial Sequence
  Oligonucleotide primer for the detection of SNP TSC0020386
ttttttttgtac

SEQ ID NO: 303219 - DNA, 12 bp, Artificial Sequence
  Oligonucleotide primer for the detection of SNP TSC0020388
tttttcaatata

SEQ ID NO: 303220 - DNA, 12 bp, Artificial Sequence
  Oligonucleotide primer for the detection of SNP TSC0020388
gaaaagagggaa

SEQ ID NO: 303221 - DNA, 12 bp, Artificial Sequence
  Oligonucleotide primer for the detection of SNP TSC0020389
cataattcattt

SEQ ID NO: 303222 - DNA, 12 bp, Artificial Sequence
  Oligonucleotide primer for the detection of SNP TSC0020389
tttatattgaaa

SEQ ID NO: 303223 - DNA, 12 bp, Artificial Sequence
  Oligonucleotide primer for the detection of SNP TSC0020391
attttattatat

SEQ ID NO: 303224 - DNA, 12 bp, Artificial Sequence
  Oligonucleotide primer for the detection of SNP TSC0020391
ttatatattaag

SEQ ID NO: 303225 - DNA, 12 bp, Artificial Sequence
  Oligonucleotide primer for the detection of SNP TSC0020392
atcccatcccac

SEQ ID NO: 303226 - DNA, 12 bp, Artificial Sequence
  Oligonucleotide primer for the detection of SNP TSC0020392
atagaatggaaa

SEQ ID NO: 303227 - DNA, 12 bp, Artificial Sequence
  Oligonucleotide primer for the detection of SNP TSC0020397
tccctatccctc

SEQ ID NO: 303228 - DNA, 12 bp, Artificial Sequence
  Oligonucleotide primer for the detection of SNP TSC0020397
ttagtaagagtg

SEQ ID NO: 303229 - DNA, 12 bp, Artificial Sequence
  Oligonucleotide primer for the detection of SNP TSC0020398
ctcttccctatc

SEQ ID NO: 303230 - DNA, 12 bp, Artificial Sequence
  Oligonucleotide primer for the detection of SNP TSC0020398
taagagtgagag

SEQ ID NO: 303231 - DNA, 12 bp, Artificial Sequence
  Oligonucleotide primer for the detection of SNP TSC0020399
tacactcactct

SEQ ID NO: 303232 - DNA, 12 bp, Artificial Sequence
  Oligonucleotide primer for the detection of SNP TSC0020399
agagggataggg

SEQ ID NO: 303233 - DNA, 12 bp, Artificial Sequence
  Oligonucleotide primer for the detection of SNP TSC0020402
ttcaataactaa

SEQ ID NO: 303234 - DNA, 12 bp, Artificial Sequence
  Oligonucleotide primer for the detection of SNP TSC0020402
ttataaatttat

SEQ ID NO: 303235 - DNA, 12 bp, Artificial Sequence
  Oligonucleotide primer for the detection of SNP TSC0020402
tcataaattcat

SEQ ID NO: 303236 - DNA, 12 bp, Artificial Sequence
  Oligonucleotide primer for the detection of SNP TSC0020402
tttaatgattaa

SEQ ID NO: 303237 - DNA, 12 bp, Artificial Sequence
  Oligonucleotide primer for the detection of SNP TSC0020403
ataatctatata

SEQ ID NO: 303238 - DNA, 12 bp, Artificial Sequence
  Oligonucleotide primer for the detection of SNP TSC0020403
gatataaatatt

SEQ ID NO: 303239 - DNA, 12 bp, Artificial Sequence
  Oligonucleotide primer for the detection of SNP TSC0020403
tacaaatactaa

SEQ ID NO: 303240 - DNA, 12 bp, Artificial Sequence
  Oligonucleotide primer for the detection of SNP TSC0020403
gtggtttgtata

SEQ ID NO: 303241 - DNA, 12 bp, Artificial Sequence
  Oligonucleotide primer for the detection of SNP TSC0020404
ttagttttggta

SEQ ID NO: 303242 - DNA, 12 bp, Artificial Sequence
  Oligonucleotide primer for the detection of SNP TSC0020404
ccaaccctaata

SEQ ID NO: 303243 - DNA, 12 bp, Artificial Sequence
  Oligonucleotide primer for the detection of SNP TSC0020404
aagtaaaaaggt

SEQ ID NO: 303244 - DNA, 12 bp, Artificial Sequence
  Oligonucleotide primer for the detection of SNP TSC0020405
ttgttgtatgga

SEQ ID NO: 303245 - DNA, 12 bp, Artificial Sequence
  Oligonucleotide primer for the detection of SNP TSC0020406
ttaagttttggg

SEQ ID NO: 303246 - DNA, 12 bp, Artificial Sequence
  Oligonucleotide primer for the detection of SNP TSC0020407
cataaccaaacc

SEQ ID NO: 303247 - DNA, 12 bp, Artificial Sequence
  Oligonucleotide primer for the detection of SNP TSC0020407
attgaggtttta

SEQ ID NO: 303248 - DNA, 12 bp, Artificial Sequence
  Oligonucleotide primer for the detection of SNP TSC0020407
atcgaggtttta

SEQ ID NO: 303249 - DNA, 12 bp, Artificial Sequence
  Oligonucleotide primer for the detection of SNP TSC0020408
tctaaaaactaa

SEQ ID NO: 303250 - DNA, 12 bp, Artificial Sequence
  Oligonucleotide primer for the detection of SNP TSC0020408
gttatatttggt

SEQ ID NO: 303251 - DNA, 12 bp, Artificial Sequence
  Oligonucleotide primer for the detection of SNP TSC0020408
tcacacttaata

SEQ ID NO: 303252 - DNA, 12 bp, Artificial Sequence
  Oligonucleotide primer for the detection of SNP TSC0020408
tttagaagttgg

SEQ ID NO: 303253 - DNA, 12 bp, Artificial Sequence
  Oligonucleotide primer for the detection of SNP TSC0020409
tattgggtttgt

SEQ ID NO: 303254 - DNA, 12 bp, Artificial Sequence
  Oligonucleotide primer for the detection of SNP TSC0020409
tattgggtttgc

SEQ ID NO: 303255 - DNA, 12 bp, Artificial Sequence
  Oligonucleotide primer for the detection of SNP TSC0020409
cactaaacctac

SEQ ID NO: 303256 - DNA, 12 bp, Artificial Sequence
  Oligonucleotide primer for the detection of SNP TSC0020409
gaggtgagggaa

SEQ ID NO: 303257 - DNA, 12 bp, Artificial Sequence
  Oligonucleotide primer for the detection of SNP TSC0020410
ttcaaatatcac

SEQ ID NO: 303258 - DNA, 12 bp, Artificial Sequence
  Oligonucleotide primer for the detection of SNP TSC0020410
tgtgattataag

SEQ ID NO: 303259 - DNA, 12 bp, Artificial Sequence
  Oligonucleotide primer for the detection of SNP TSC0020410
cgtgattataag

SEQ ID NO: 303260 - DNA, 12 bp, Artificial Sequence
  Oligonucleotide primer for the detection of SNP TSC0020412
cccatatccccc

SEQ ID NO: 303261 - DNA, 12 bp, Artificial Sequence
  Oligonucleotide primer for the detection of SNP TSC0020412
cccgtatccccc

SEQ ID NO: 303262 - DNA, 12 bp, Artificial Sequence
  Oligonucleotide primer for the detection of SNP TSC0020412
ggatttgggggt

SEQ ID NO: 303263 - DNA, 12 bp, Artificial Sequence
  Oligonucleotide primer for the detection of SNP TSC0020412
tttgtgtttttc

SEQ ID NO: 303264 - DNA, 12 bp, Artificial Sequence
  Oligonucleotide primer for the detection of SNP TSC0020412
ttcgtgtttttc

SEQ ID NO: 303265 - DNA, 12 bp, Artificial Sequence
  Oligonucleotide primer for the detection of SNP TSC0020413
acataaaaatca

SEQ ID NO: 303266 - DNA, 12 bp, Artificial Sequence
  Oligonucleotide primer for the detection of SNP TSC0020413
tgtgttttgttt

SEQ ID NO: 303267 - DNA, 12 bp, Artificial Sequence
  Oligonucleotide primer for the detection of SNP TSC0020413
tatactctactc

SEQ ID NO: 303268 - DNA, 12 bp, Artificial Sequence
  Oligonucleotide primer for the detection of SNP TSC0020413
gtatgagaatta

SEQ ID NO: 303269 - DNA, 12 bp, Artificial Sequence
  Oligonucleotide primer for the detection of SNP TSC0020414
tcctcaaaaatt

SEQ ID NO: 303270 - DNA, 12 bp, Artificial Sequence
  Oligonucleotide primer for the detection of SNP TSC0020414
tatgagaattta

SEQ ID NO: 303271 - DNA, 12 bp, Artificial Sequence
  Oligonucleotide primer for the detection of SNP TSC0020415
atcctcaaaaat

SEQ ID NO: 303272 - DNA, 12 bp, Artificial Sequence
  Oligonucleotide primer for the detection of SNP TSC0020415
atgagaatttaa

SEQ ID NO: 303273 - DNA, 12 bp, Artificial Sequence
  Oligonukleotid-Primer
atttttaagggt

SEQ ID NO: 303274 - DNA, 12 bp, Artificial Sequence
  Oligonucleotide primer for the detection of SNP TSC0020416
ctaaaaaaaaac

SEQ ID NO: 303275 - DNA, 12 bp, Artificial Sequence
  Oligonucleotide primer for the detection of SNP TSC0020416
aatgttgtggag

SEQ ID NO: 303276 - DNA, 12 bp, Artificial Sequence
  Oligonucleotide primer for the detection of SNP TSC0020416
aatgtcgtggag

SEQ ID NO: 303277 - DNA, 12 bp, Artificial Sequence
  Oligonukleotid-Primer
tccatctcaaaa

SEQ ID NO: 303278 - DNA, 12 bp, Artificial Sequence
  Oligonucleotide primer for the detection of SNP TSC0020417
atttaaaacttt

SEQ ID NO: 303279 - DNA, 12 bp, Artificial Sequence
  Oligonucleotide primer for the detection of SNP TSC0020418
caaattatattt

SEQ ID NO: 303280 - DNA, 12 bp, Artificial Sequence
  Oligonucleotide primer for the detection of SNP TSC0020418
atttttattggg

SEQ ID NO: 303281 - DNA, 12 bp, Artificial Sequence
  Oligonukleotid-Primer
aataaaacacct

SEQ ID NO: 303282 - DNA, 12 bp, Artificial Sequence
  Oligonucleotide primer for the detection of SNP TSC0020420
aataaaacgcct

SEQ ID NO: 303283 - DNA, 12 bp, Artificial Sequence
  Oligonucleotide primer for the detection of SNP TSC0020420
gaaggtttttaa

SEQ ID NO: 303284 - DNA, 12 bp, Artificial Sequence
  Oligonucleotide primer for the detection of SNP TSC0020421
tcaaaaaaactt

SEQ ID NO: 303285 - DNA, 12 bp, Artificial Sequence
  Oligonucleotide primer for the detection of SNP TSC0020421
tcgaaaaaactt

SEQ ID NO: 303286 - DNA, 12 bp, Artificial Sequence
  Oligonucleotide primer for the detection of SNP TSC0020421
ggggttttggta

SEQ ID NO: 303287 - DNA, 12 bp, Artificial Sequence
  Oligonucleotide primer for the detection of SNP TSC0020421
ggggtttcggta

SEQ ID NO: 303288 - DNA, 12 bp, Artificial Sequence
  Oligonucleotide primer for the detection of SNP TSC0020422
aatcatccttac

SEQ ID NO: 303289 - DNA, 12 bp, Artificial Sequence
  Oligonucleotide primer for the detection of SNP TSC0020422
ccaactccctaa

SEQ ID NO: 303290 - DNA, 12 bp, Artificial Sequence
  Oligonucleotide primer for the detection of SNP TSC0020422
agttatttttgt

SEQ ID NO: 303291 - DNA, 12 bp, Artificial Sequence
  Oligonucleotide primer for the detection of SNP TSC0020423
aaacataacacc

SEQ ID NO: 303292 - DNA, 12 bp, Artificial Sequence
  Oligonucleotide primer for the detection of SNP TSC0020423
tttgattttgta

SEQ ID NO: 303293 - DNA, 12 bp, Artificial Sequence
  Oligonucleotide primer for the detection of SNP TSC0020425
caaaaactaact

SEQ ID NO: 303294 - DNA, 12 bp, Artificial Sequence
  Oligonucleotide primer for the detection of SNP TSC0020425
atgttataattg

SEQ ID NO: 303295 - DNA, 12 bp, Artificial Sequence
  Oligonucleotide primer for the detection of SNP TSC0020426
aaatgtaaatgg

SEQ ID NO: 303296 - DNA, 12 bp, Artificial Sequence
  Oligonucleotide primer for the detection of SNP TSC0020427
gttaaagtttaa

SEQ ID NO: 303297 - DNA, 12 bp, Artificial Sequence
  Oligonucleotide primer for the detection of SNP TSC0020428
ttataaataaaa

SEQ ID NO: 303298 - DNA, 12 bp, Artificial Sequence
  Oligonucleotide primer for the detection of SNP TSC0020428
tttatttttaaa

SEQ ID NO: 303299 - DNA, 12 bp, Artificial Sequence
  Oligonucleotide primer for the detection of SNP TSC0020428
tatccttaaaaa

SEQ ID NO: 303300 - DNA, 12 bp, Artificial Sequence
  Oligonucleotide primer for the detection of SNP TSC0020428
ttataagtgaaa

SEQ ID NO: 303301 - DNA, 12 bp, Artificial Sequence
  Oligonucleotide primer for the detection of SNP TSC0020430
tacaaattctac

SEQ ID NO: 303302 - DNA, 12 bp, Artificial Sequence
  Oligonucleotide primer for the detection of SNP TSC0020430
atatggttattg

SEQ ID NO: 303303 - DNA, 12 bp, Artificial Sequence
  Oligonucleotide primer for the detection of SNP TSC0020431
aatactaaaatc

SEQ ID NO: 303304 - DNA, 12 bp, Artificial Sequence
  Oligonucleotide primer for the detection of SNP TSC0020431
atggttatttta

SEQ ID NO: 303305 - DNA, 12 bp, Artificial Sequence
  Oligonucleotide primer for the detection of SNP TSC0020432
accctcccttta

SEQ ID NO: 303306 - DNA, 12 bp, Artificial Sequence
  Oligonucleotide primer for the detection of SNP TSC0020432
ggattgatgaag

SEQ ID NO: 303307 - DNA, 12 bp, Artificial Sequence
  Oligonucleotide primer for the detection of SNP TSC0020432
aaactaataaaa

SEQ ID NO: 303308 - DNA, 12 bp, Artificial Sequence
  Oligonucleotide primer for the detection of SNP TSC0020433
caactaaccccc

SEQ ID NO: 303309 - DNA, 12 bp, Artificial Sequence
  Oligonucleotide primer for the detection of SNP TSC0020433
cgactaaccccc

SEQ ID NO: 303310 - DNA, 12 bp, Artificial Sequence
  Oligonucleotide primer for the detection of SNP TSC0020433
ttggatgttgtg

SEQ ID NO: 303311 - DNA, 12 bp, Artificial Sequence
  Oligonucleotide primer for the detection of SNP TSC0020433
ttggatgtcgtg

SEQ ID NO: 303312 - DNA, 12 bp, Artificial Sequence
  Oligonucleotide primer for the detection of SNP TSC0020433
ttggatgttgcg

SEQ ID NO: 303313 - DNA, 12 bp, Artificial Sequence
  Oligonucleotide primer for the detection of SNP TSC0020433
ttggatgtcgcg

SEQ ID NO: 303314 - DNA, 12 bp, Artificial Sequence
  Oligonucleotide primer for the detection of SNP TSC0020433
ctaaatatcaca

SEQ ID NO: 303315 - DNA, 12 bp, Artificial Sequence
  Oligonucleotide primer for the detection of SNP TSC0020433
ctaaatatcacg

SEQ ID NO: 303316 - DNA, 12 bp, Artificial Sequence
  Oligonucleotide primer for the detection of SNP TSC0020433
ctaaatatcgca

SEQ ID NO: 303317 - DNA, 12 bp, Artificial Sequence
  Oligonucleotide primer for the detection of SNP TSC0020433
ctaaatatcgcg

SEQ ID NO: 303318 - DNA, 12 bp, Artificial Sequence
  Oligonucleotide primer for the detection of SNP TSC0020433
tgattgattttt

SEQ ID NO: 303319 - DNA, 12 bp, Artificial Sequence
  Oligonucleotide primer for the detection of SNP TSC0020433
cgattgattttt

SEQ ID NO: 303320 - DNA, 12 bp, Artificial Sequence
  Oligonucleotide primer for the detection of SNP TSC0020433
tgattgattttc

SEQ ID NO: 303321 - DNA, 12 bp, Artificial Sequence
  Oligonucleotide primer for the detection of SNP TSC0020433
cgattgattttc

SEQ ID NO: 303322 - DNA, 12 bp, Artificial Sequence
  Oligonucleotide primer for the detection of SNP TSC0020434
aaaaaacacaac

SEQ ID NO: 303323 - DNA, 12 bp, Artificial Sequence
  Oligonucleotide primer for the detection of SNP TSC0020434
ggttggttgttg

SEQ ID NO: 303324 - DNA, 12 bp, Artificial Sequence
  Oligonucleotide primer for the detection of SNP TSC0020434
aattaattatta

SEQ ID NO: 303325 - DNA, 12 bp, Artificial Sequence
  Oligonucleotide primer for the detection of SNP TSC0020434
aaaaaatatagt

SEQ ID NO: 303326 - DNA, 12 bp, Artificial Sequence
  Oligonucleotide primer for the detection of SNP TSC0020436
ataacacacatc

SEQ ID NO: 303327 - DNA, 12 bp, Artificial Sequence
  Oligonucleotide primer for the detection of SNP TSC0020436
aaataatatata

SEQ ID NO: 303328 - DNA, 12 bp, Artificial Sequence
  Oligonucleotide primer for the detection of SNP TSC0020440
tcttttcctaaa

SEQ ID NO: 303329 - DNA, 12 bp, Artificial Sequence
  Oligonucleotide primer for the detection of SNP TSC0020440
ttttttttaggc

SEQ ID NO: 303330 - DNA, 12 bp, Artificial Sequence
  Oligonucleotide primer for the detection of SNP TSC0020441
ttataactaatc

SEQ ID NO: 303331 - DNA, 12 bp, Artificial Sequence
  Oligonucleotide primer for the detection of SNP TSC0020441
taaaaggggaaa

SEQ ID NO: 303332 - DNA, 12 bp, Artificial Sequence
  Oligonucleotide primer for the detection of SNP TSC0020442
atctcttatatt

SEQ ID NO: 303333 - DNA, 12 bp, Artificial Sequence
  Oligonucleotide primer for the detection of SNP TSC0020442
tattttagatgg

SEQ ID NO: 303334 - DNA, 12 bp, Artificial Sequence
  Oligonucleotide primer for the detection of SNP TSC0020443
aaaattaaccca

SEQ ID NO: 303335 - DNA, 12 bp, Artificial Sequence
  Oligonucleotide primer for the detection of SNP TSC0020443
gttggtgtttat

SEQ ID NO: 303336 - DNA, 12 bp, Artificial Sequence
  Oligonucleotide primer for the detection of SNP TSC0020443
gttggcgtttat

SEQ ID NO: 303337 - DNA, 12 bp, Artificial Sequence
  Oligonucleotide primer for the detection of SNP TSC0020443
aactaacatcca

SEQ ID NO: 303338 - DNA, 12 bp, Artificial Sequence
  Oligonucleotide primer for the detection of SNP TSC0020443
aactaacgtcca

SEQ ID NO: 303339 - DNA, 12 bp, Artificial Sequence
  Oligonucleotide primer for the detection of SNP TSC0020443
agggttggttta

SEQ ID NO: 303340 - DNA, 12 bp, Artificial Sequence
  Oligonucleotide primer for the detection of SNP TSC0020445
aatcttcctcta

SEQ ID NO: 303341 - DNA, 12 bp, Artificial Sequence
  Oligonucleotide primer for the detection of SNP TSC0020445
acacttcaactt

SEQ ID NO: 303342 - DNA, 12 bp, Artificial Sequence
  Oligonucleotide primer for the detection of SNP TSC0020446
actacaaataaa

SEQ ID NO: 303343 - DNA, 12 bp, Artificial Sequence
  Oligonucleotide primer for the detection of SNP TSC0020446
tagaagttattt

SEQ ID NO: 303344 - DNA, 12 bp, Artificial Sequence
  Oligonucleotide primer for the detection of SNP TSC0020446
gttgtagatgag

SEQ ID NO: 303345 - DNA, 12 bp, Artificial Sequence
  Oligonucleotide primer for the detection of SNP TSC0020447
taacacataaat

SEQ ID NO: 303346 - DNA, 12 bp, Artificial Sequence
  Oligonucleotide primer for the detection of SNP TSC0020447
taacgcataaat

SEQ ID NO: 303347 - DNA, 12 bp, Artificial Sequence
  Oligonucleotide primer for the detection of SNP TSC0020447
gtggaataaatg

SEQ ID NO: 303348 - DNA, 12 bp, Artificial Sequence
  Oligonucleotide primer for the detection of SNP TSC0020447
gtggaataaacg

SEQ ID NO: 303349 - DNA, 12 bp, Artificial Sequence
  Oligonucleotide primer for the detection of SNP TSC0020448
aaattacctaac

SEQ ID NO: 303350 - DNA, 12 bp, Artificial Sequence
  Oligonucleotide primer for the detection of SNP TSC0020448
atgtaatttatg

SEQ ID NO: 303351 - DNA, 12 bp, Artificial Sequence
  Oligonucleotide primer for the detection of SNP TSC0020448
acgtaatttatg

SEQ ID NO: 303352 - DNA, 12 bp, Artificial Sequence
  Oligonucleotide primer for the detection of SNP TSC0020448
acataactcata

SEQ ID NO: 303353 - DNA, 12 bp, Artificial Sequence
  Oligonucleotide primer for the detection of SNP TSC0020448
acgtaactcata

SEQ ID NO: 303354 - DNA, 12 bp, Artificial Sequence
  Oligonucleotide primer for the detection of SNP TSC0020448
gggttgtttagt

SEQ ID NO: 303355 - DNA, 12 bp, Artificial Sequence
  Oligonucleotide primer for the detection of SNP TSC0020448
gggttgtttagc

SEQ ID NO: 303356 - DNA, 12 bp, Artificial Sequence
  Oligonucleotide primer for the detection of SNP TSC0020449
tataaaatattc

SEQ ID NO: 303357 - DNA, 12 bp, Artificial Sequence
  Oligonucleotide primer for the detection of SNP TSC0020449
gttaggtaattt

SEQ ID NO: 303358 - DNA, 12 bp, Artificial Sequence
  Oligonucleotide primer for the detection of SNP TSC0020449
gttaggtaattc

SEQ ID NO: 303359 - DNA, 12 bp, Artificial Sequence
  Oligonucleotide primer for the detection of SNP TSC0020449
actaaacaaccc

SEQ ID NO: 303360 - DNA, 12 bp, Artificial Sequence
  Oligonucleotide primer for the detection of SNP TSC0020449
gctaaacaaccc

SEQ ID NO: 303361 - DNA, 12 bp, Artificial Sequence
  Oligonucleotide primer for the detection of SNP TSC0020449
gtgaggtgtttt

SEQ ID NO: 303362 - DNA, 12 bp, Artificial Sequence
  Oligonukleotid-Primer
ccaacaaaacca

SEQ ID NO: 303363 - DNA, 12 bp, Artificial Sequence
  Oligonucleotide primer for the detection of SNP TSC0020450
ccaacgaaacca

SEQ ID NO: 303364 - DNA, 12 bp, Artificial Sequence
  Oligonucleotide primer for the detection of SNP TSC0020450
ttaggtgggttt

SEQ ID NO: 303365 - DNA, 12 bp, Artificial Sequence
  Oligonucleotide primer for the detection of SNP TSC0020450
ccaaataaattt

SEQ ID NO: 303366 - DNA, 12 bp, Artificial Sequence
  Oligonucleotide primer for the detection of SNP TSC0020450
ttagtgagatta

SEQ ID NO: 303367 - DNA, 12 bp, Artificial Sequence
  Oligonucleotide primer for the detection of SNP TSC0020450
ttagcgagatta

SEQ ID NO: 303368 - DNA, 12 bp, Artificial Sequence
  Oligonucleotide primer for the detection of SNP TSC0020451
aattaaccaaac

SEQ ID NO: 303369 - DNA, 12 bp, Artificial Sequence
  Oligonucleotide primer for the detection of SNP TSC0020451
tattcgtttttg

SEQ ID NO: 303370 - DNA, 12 bp, Artificial Sequence
  Oligonucleotide primer for the detection of SNP TSC0020451
tattcgttttcg

SEQ ID NO: 303371 - DNA, 12 bp, Artificial Sequence
  Oligonucleotide primer for the detection of SNP TSC0020451
cacccacctcca

SEQ ID NO: 303372 - DNA, 12 bp, Artificial Sequence
  Oligonucleotide primer for the detection of SNP TSC0020451
cacccacctccg

SEQ ID NO: 303373 - DNA, 12 bp, Artificial Sequence
  Oligonucleotide primer for the detection of SNP TSC0020451
cacccgcctcca

SEQ ID NO: 303374 - DNA, 12 bp, Artificial Sequence
  Oligonucleotide primer for the detection of SNP TSC0020451
cacccgcctccg

SEQ ID NO: 303375 - DNA, 12 bp, Artificial Sequence
  Oligonucleotide primer for the detection of SNP TSC0020451
aattagttaggt

SEQ ID NO: 303376 - DNA, 12 bp, Artificial Sequence
  Oligonucleotide primer for the detection of SNP TSC0020451
aattagttaggc

SEQ ID NO: 303377 - DNA, 12 bp, Artificial Sequence
  Oligonucleotide primer for the detection of SNP TSC0020452
cactaccaaaat

SEQ ID NO: 303378 - DNA, 12 bp, Artificial Sequence
  Oligonucleotide primer for the detection of SNP TSC0020452
tatcttaatcaa

SEQ ID NO: 303379 - DNA, 12 bp, Artificial Sequence
  Oligonucleotide primer for the detection of SNP TSC0020452
tattgttaagat

SEQ ID NO: 303380 - DNA, 12 bp, Artificial Sequence
  Oligonucleotide primer for the detection of SNP TSC0020453
ccctacaatcac

SEQ ID NO: 303381 - DNA, 12 bp, Artificial Sequence
  Oligonucleotide primer for the detection of SNP TSC0020453
atattttttggg

SEQ ID NO: 303382 - DNA, 12 bp, Artificial Sequence
  Oligonucleotide primer for the detection of SNP TSC0020453
acacctcctaaa

SEQ ID NO: 303383 - DNA, 12 bp, Artificial Sequence
  Oligonucleotide primer for the detection of SNP TSC0020453
ttttgtagttat

SEQ ID NO: 303384 - DNA, 12 bp, Artificial Sequence
  Oligonucleotide primer for the detection of SNP TSC0020454
acacctaactta

SEQ ID NO: 303385 - DNA, 12 bp, Artificial Sequence
  Oligonucleotide primer for the detection of SNP TSC0020454
ttagttatgaga

SEQ ID NO: 303386 - DNA, 12 bp, Artificial Sequence
  Oligonucleotide primer for the detection of SNP TSC0020454
ttaaccataaaa

SEQ ID NO: 303387 - DNA, 12 bp, Artificial Sequence
  Oligonucleotide primer for the detection of SNP TSC0020454
gtatttggtttg

SEQ ID NO: 303388 - DNA, 12 bp, Artificial Sequence
  Oligonucleotide primer for the detection of SNP TSC0020455
accctaacctct

SEQ ID NO: 303389 - DNA, 12 bp, Artificial Sequence
  Oligonucleotide primer for the detection of SNP TSC0020455
aggagattatag

SEQ ID NO: 303390 - DNA, 12 bp, Artificial Sequence
  Oligonucleotide primer for the detection of SNP TSC0020456
atctctctactt

SEQ ID NO: 303391 - DNA, 12 bp, Artificial Sequence
  Oligonucleotide primer for the detection of SNP TSC0020456
aagtattttata

SEQ ID NO: 303392 - DNA, 12 bp, Artificial Sequence
  Oligonucleotide primer for the detection of SNP TSC0020457
aaataatatatc

SEQ ID NO: 303393 - DNA, 12 bp, Artificial Sequence
  Oligonucleotide primer for the detection of SNP TSC0020457
accctaaaacta

SEQ ID NO: 303394 - DNA, 12 bp, Artificial Sequence
  Oligonucleotide primer for the detection of SNP TSC0020457
gggtgatgtatt

SEQ ID NO: 303395 - DNA, 12 bp, Artificial Sequence
  Oligonucleotide primer for the detection of SNP TSC0020458
aaccaaaatcca

SEQ ID NO: 303396 - DNA, 12 bp, Artificial Sequence
  Oligonucleotide primer for the detection of SNP TSC0020458
tattttcgaggt

SEQ ID NO: 303397 - DNA, 12 bp, Artificial Sequence
  Oligonucleotide primer for the detection of SNP TSC0020459
cttccaacattt

SEQ ID NO: 303398 - DNA, 12 bp, Artificial Sequence
  Oligonucleotide primer for the detection of SNP TSC0020460
acacaaaaaaaa

SEQ ID NO: 303399 - DNA, 12 bp, Artificial Sequence
  Oligonucleotide primer for the detection of SNP TSC0020460
acacgaaaaaaa

SEQ ID NO: 303400 - DNA, 12 bp, Artificial Sequence
  Oligonucleotide primer for the detection of SNP TSC0020460
acgcaaaaaaaa

SEQ ID NO: 303401 - DNA, 12 bp, Artificial Sequence
  Oligonucleotide primer for the detection of SNP TSC0020460
gcacaaaaaaaa

SEQ ID NO: 303402 - DNA, 12 bp, Artificial Sequence
  Oligonucleotide primer for the detection of SNP TSC0020460
acgcgaaaaaaa

SEQ ID NO: 303403 - DNA, 12 bp, Artificial Sequence
  Oligonucleotide primer for the detection of SNP TSC0020460
gcacgaaaaaaa

SEQ ID NO: 303404 - DNA, 12 bp, Artificial Sequence
  Oligonucleotide primer for the detection of SNP TSC0020460
gcgcaaaaaaaa

SEQ ID NO: 303405 - DNA, 12 bp, Artificial Sequence
  Oligonucleotide primer for the detection of SNP TSC0020460
gcgcgaaaaaaa

SEQ ID NO: 303406 - DNA, 12 bp, Artificial Sequence
  Oligonucleotide primer for the detection of SNP TSC0020460
ttgttttttgtt

SEQ ID NO: 303407 - DNA, 12 bp, Artificial Sequence
  Oligonucleotide primer for the detection of SNP TSC0020460
tcgttttttgtt

SEQ ID NO: 303408 - DNA, 12 bp, Artificial Sequence
  Oligonucleotide primer for the detection of SNP TSC0020460
ttgtttttcgtt

SEQ ID NO: 303409 - DNA, 12 bp, Artificial Sequence
  Oligonucleotide primer for the detection of SNP TSC0020460
ttgttttttgtc

SEQ ID NO: 303410 - DNA, 12 bp, Artificial Sequence
  Oligonucleotide primer for the detection of SNP TSC0020460
tcgtttttcgtt

SEQ ID NO: 303411 - DNA, 12 bp, Artificial Sequence
  Oligonucleotide primer for the detection of SNP TSC0020460
tcgttttttgtc

SEQ ID NO: 303412 - DNA, 12 bp, Artificial Sequence
  Oligonucleotide primer for the detection of SNP TSC0020460
ttgtttttcgtc

SEQ ID NO: 303413 - DNA, 12 bp, Artificial Sequence
  Oligonucleotide primer for the detection of SNP TSC0020460
tcgtttttcgtc

SEQ ID NO: 303414 - DNA, 12 bp, Artificial Sequence
  Oligonucleotide primer for the detection of SNP TSC0020460
caccctccacca

SEQ ID NO: 303415 - DNA, 12 bp, Artificial Sequence
  Oligonukleotid-Primer
caccctccaccg

SEQ ID NO: 303416 - DNA, 12 bp, Artificial Sequence
  Oligonucleotide primer for the detection of SNP TSC0020460
caccctccgcca

SEQ ID NO: 303417 - DNA, 12 bp, Artificial Sequence
  Oligonucleotide primer for the detection of SNP TSC0020460
cgccctccacca

SEQ ID NO: 303418 - DNA, 12 bp, Artificial Sequence
  Oligonucleotide primer for the detection of SNP TSC0020460
caccctccgccg

SEQ ID NO: 303419 - DNA, 12 bp, Artificial Sequence
  Oligonucleotide primer for the detection of SNP TSC0020460
cgccctccaccg

SEQ ID NO: 303420 - DNA, 12 bp, Artificial Sequence
  Oligonucleotide primer for the detection of SNP TSC0020460
cgccctccgcca

SEQ ID NO: 303421 - DNA, 12 bp, Artificial Sequence
  Oligonucleotide primer for the detection of SNP TSC0020460
cgccctccgccg

SEQ ID NO: 303422 - DNA, 12 bp, Artificial Sequence
  Oligonucleotide primer for the detection of SNP TSC0020460
gtgtggggggag

SEQ ID NO: 303423 - DNA, 12 bp, Artificial Sequence
  Oligonucleotide primer for the detection of SNP TSC0020460
gcgtggggggag

SEQ ID NO: 303424 - DNA, 12 bp, Artificial Sequence
  Oligonucleotide primer for the detection of SNP TSC0020460
gtgcggggggag

SEQ ID NO: 303425 - DNA, 12 bp, Artificial Sequence
  Oligonucleotide primer for the detection of SNP TSC0020460
gcgcggggggag

SEQ ID NO: 303426 - DNA, 12 bp, Artificial Sequence
  Oligonucleotide primer for the detection of SNP TSC0020464
tttacctctata

SEQ ID NO: 303427 - DNA, 12 bp, Artificial Sequence
  Oligonucleotide primer for the detection of SNP TSC0020464
tatagtggtatt

SEQ ID NO: 303428 - DNA, 12 bp, Artificial Sequence
  Oligonucleotide primer for the detection of SNP TSC0020464
tacaataacatc

SEQ ID NO: 303429 - DNA, 12 bp, Artificial Sequence
  Oligonucleotide primer for the detection of SNP TSC0020464
tttgtttttgta

SEQ ID NO: 303430 - DNA, 12 bp, Artificial Sequence
  Oligonucleotide primer for the detection of SNP TSC0020465
aataattaattc

SEQ ID NO: 303431 - DNA, 12 bp, Artificial Sequence
  Oligonucleotide primer for the detection of SNP TSC0020465
tatgttttatga

SEQ ID NO: 303432 - DNA, 12 bp, Artificial Sequence
  Oligonucleotide primer for the detection of SNP TSC0020466
taaaacctaaac

SEQ ID NO: 303433 - DNA, 12 bp, Artificial Sequence
  Oligonucleotide primer for the detection of SNP TSC0020466
aataggggtttg

SEQ ID NO: 303434 - DNA, 12 bp, Artificial Sequence
  Oligonucleotide primer for the detection of SNP TSC0020466
aacaaaaactta

SEQ ID NO: 303435 - DNA, 12 bp, Artificial Sequence
  Oligonucleotide primer for the detection of SNP TSC0020466
tggagtttgaat

SEQ ID NO: 303436 - DNA, 12 bp, Artificial Sequence
  Oligonucleotide primer for the detection of SNP TSC0020467
caattccacaca

SEQ ID NO: 303437 - DNA, 12 bp, Artificial Sequence
  Oligonucleotide primer for the detection of SNP TSC0020467
ggtttaggtttt

SEQ ID NO: 303438 - DNA, 12 bp, Artificial Sequence
  Oligonucleotide primer for the detection of SNP TSC0020467
aattcaaactcc

SEQ ID NO: 303439 - DNA, 12 bp, Artificial Sequence
  Oligonucleotide primer for the detection of SNP TSC0020467
taattttatata

SEQ ID NO: 303440 - DNA, 12 bp, Artificial Sequence
  Oligonucleotide primer for the detection of SNP TSC0020470
ctctcctttact

SEQ ID NO: 303441 - DNA, 12 bp, Artificial Sequence
  Oligonucleotide primer for the detection of SNP TSC0020470
gggagtggagaa

SEQ ID NO: 303442 - DNA, 12 bp, Artificial Sequence
  Oligonucleotide primer for the detection of SNP TSC0020470
gggagcggagaa

SEQ ID NO: 303443 - DNA, 12 bp, Artificial Sequence
  Oligonucleotide primer for the detection of SNP TSC0020471
aaaacatatcta

SEQ ID NO: 303444 - DNA, 12 bp, Artificial Sequence
  Oligonucleotide primer for the detection of SNP TSC0020471
aaaacgtatcta

SEQ ID NO: 303445 - DNA, 12 bp, Artificial Sequence
  Oligonucleotide primer for the detection of SNP TSC0020471
taaagtgttttt

SEQ ID NO: 303446 - DNA, 12 bp, Artificial Sequence
  Oligonucleotide primer for the detection of SNP TSC0020471
caaaatacttct

SEQ ID NO: 303447 - DNA, 12 bp, Artificial Sequence
  Oligonucleotide primer for the detection of SNP TSC0020471
aaagtgtgttta

SEQ ID NO: 303448 - DNA, 12 bp, Artificial Sequence
  Oligonucleotide primer for the detection of SNP TSC0020471
aaagcgtgttta

SEQ ID NO: 303449 - DNA, 12 bp, Artificial Sequence
  Oligonucleotide primer for the detection of SNP TSC0020473
aaaaaataacct

SEQ ID NO: 303450 - DNA, 12 bp, Artificial Sequence
  Oligonucleotide primer for the detection of SNP TSC0020473
ttgatattttag

SEQ ID NO: 303451 - DNA, 12 bp, Artificial Sequence
  Oligonucleotide primer for the detection of SNP TSC0020474
tctacttaattt

SEQ ID NO: 303452 - DNA, 12 bp, Artificial Sequence
  Oligonucleotide primer for the detection of SNP TSC0020474
aaaaaatatata

SEQ ID NO: 303453 - DNA, 12 bp, Artificial Sequence
  Oligonucleotide primer for the detection of SNP TSC0020475
tttccattctac

SEQ ID NO: 303454 - DNA, 12 bp, Artificial Sequence
  Oligonucleotide primer for the detection of SNP TSC0020475
tgtgttttgtta

SEQ ID NO: 303455 - DNA, 12 bp, Artificial Sequence
  Oligonucleotide primer for the detection of SNP TSC0020475
tgcgttttgtta

SEQ ID NO: 303456 - DNA, 12 bp, Artificial Sequence
  Oligonucleotide primer for the detection of SNP TSC0020477
cttaccactcat

SEQ ID NO: 303457 - DNA, 12 bp, Artificial Sequence
  Oligonucleotide primer for the detection of SNP TSC0020477
ttaataaaggtg

SEQ ID NO: 303458 - DNA, 12 bp, Artificial Sequence
  Oligonucleotide primer for the detection of SNP TSC0020479
ataaccctatct

SEQ ID NO: 303459 - DNA, 12 bp, Artificial Sequence
  Oligonucleotide primer for the detection of SNP TSC0020479
gtaaccctatct

SEQ ID NO: 303460 - DNA, 12 bp, Artificial Sequence
  Oligonucleotide primer for the detection of SNP TSC0020479
tggggaggggta

SEQ ID NO: 303461 - DNA, 12 bp, Artificial Sequence
  Oligonucleotide primer for the detection of SNP TSC0020486
ttatagaaaatt

SEQ ID NO: 303462 - DNA, 12 bp, Artificial Sequence
  Oligonucleotide primer for the detection of SNP TSC0020486
ttataaaaaact

SEQ ID NO: 303463 - DNA, 12 bp, Artificial Sequence
  Oligonucleotide primer for the detection of SNP TSC0020486
tattttatagaa

SEQ ID NO: 303464 - DNA, 12 bp, Artificial Sequence
  Oligonucleotide primer for the detection of SNP TSC0020490
taattatcaaaa

SEQ ID NO: 303465 - DNA, 12 bp, Artificial Sequence
  Oligonucleotide primer for the detection of SNP TSC0020490
atattatgtttt

SEQ ID NO: 303466 - DNA, 12 bp, Artificial Sequence
  Oligonucleotide primer for the detection of SNP TSC0020490
atattatgtttc

SEQ ID NO: 303467 - DNA, 12 bp, Artificial Sequence
  Oligonucleotide primer for the detection of SNP TSC0020490
aaaataccatat

SEQ ID NO: 303468 - DNA, 12 bp, Artificial Sequence
  Oligonucleotide primer for the detection of SNP TSC0020490
gaaataccatat

SEQ ID NO: 303469 - DNA, 12 bp, Artificial Sequence
  Oligonucleotide primer for the detection of SNP TSC0020490
tggttgttagga

SEQ ID NO: 303470 - DNA, 12 bp, Artificial Sequence
  Oligonucleotide primer for the detection of SNP TSC0020491
aaactccactaa

SEQ ID NO: 303471 - DNA, 12 bp, Artificial Sequence
  Oligonucleotide primer for the detection of SNP TSC0020491
gtttttgtaagt

SEQ ID NO: 303472 - DNA, 12 bp, Artificial Sequence
  Oligonucleotide primer for the detection of SNP TSC0020491
atccttacaaat

SEQ ID NO: 303473 - DNA, 12 bp, Artificial Sequence
  Oligonucleotide primer for the detection of SNP TSC0020491
aggttttattga

SEQ ID NO: 303474 - DNA, 12 bp, Artificial Sequence
  Oligonucleotide primer for the detection of SNP TSC0020492
tttgattattga

SEQ ID NO: 303475 - DNA, 12 bp, Artificial Sequence
  Oligonucleotide primer for the detection of SNP TSC0020494
taacttttaaaa

SEQ ID NO: 303476 - DNA, 12 bp, Artificial Sequence
  Oligonucleotide primer for the detection of SNP TSC0020494
tttattatgttg

SEQ ID NO: 303477 - DNA, 12 bp, Artificial Sequence
  Oligonucleotide primer for the detection of SNP TSC0020494
tttattacgttg

SEQ ID NO: 303478 - DNA, 12 bp, Artificial Sequence
  Oligonucleotide primer for the detection of SNP TSC0020494
atcacattaaaa

SEQ ID NO: 303479 - DNA, 12 bp, Artificial Sequence
  Oligonucleotide primer for the detection of SNP TSC0020494
atcacgttaaaa

SEQ ID NO: 303480 - DNA, 12 bp, Artificial Sequence
  Oligonukleotid-Primer
ggtttttaagat

SEQ ID NO: 303481 - DNA, 12 bp, Artificial Sequence
  Oligonucleotide primer for the detection of SNP TSC0020495
tatcaaaatttc

SEQ ID NO: 303482 - DNA, 12 bp, Artificial Sequence
  Oligonucleotide primer for the detection of SNP TSC0020495
caactttattca

SEQ ID NO: 303483 - DNA, 12 bp, Artificial Sequence
  Oligonucleotide primer for the detection of SNP TSC0020495
tgttaaagtttt

SEQ ID NO: 303484 - DNA, 12 bp, Artificial Sequence
  Oligonukleotid-Primer
acaatttcaaaa

SEQ ID NO: 303485 - DNA, 12 bp, Artificial Sequence
  Oligonucleotide primer for the detection of SNP TSC0020496
aaacattactta

SEQ ID NO: 303486 - DNA, 12 bp, Artificial Sequence
  Oligonucleotide primer for the detection of SNP TSC0020496
gattatagtttt

SEQ ID NO: 303487 - DNA, 12 bp, Artificial Sequence
  Oligonucleotide primer for the detection of SNP TSC0020497
tacacatccaaa

SEQ ID NO: 303488 - DNA, 12 bp, Artificial Sequence
  Oligonucleotide primer for the detection of SNP TSC0020497
tgattttttaat

SEQ ID NO: 303489 - DNA, 12 bp, Artificial Sequence
  Oligonucleotide primer for the detection of SNP TSC0020497
ataatcttccaa

SEQ ID NO: 303490 - DNA, 12 bp, Artificial Sequence
  Oligonucleotide primer for the detection of SNP TSC0020497
tatatatttaag

SEQ ID NO: 303491 - DNA, 12 bp, Artificial Sequence
  Oligonucleotide primer for the detection of SNP TSC0020498
ctaacttcaaaa

SEQ ID NO: 303492 - DNA, 12 bp, Artificial Sequence
  Oligonucleotide primer for the detection of SNP TSC0020498
gagaatttgtgt

SEQ ID NO: 303493 - DNA, 12 bp, Artificial Sequence
  Oligonucleotide primer for the detection of SNP TSC0020498
ttggttttaggg

SEQ ID NO: 303494 - DNA, 12 bp, Artificial Sequence
  Oligonucleotide primer for the detection of SNP TSC0020501
aaccctaaaact

SEQ ID NO: 303495 - DNA, 12 bp, Artificial Sequence
  Oligonucleotide primer for the detection of SNP TSC0020501
aaacccctcaca

SEQ ID NO: 303496 - DNA, 12 bp, Artificial Sequence
  Oligonucleotide primer for the detection of SNP TSC0020502
tattgggaatga

SEQ ID NO: 303497 - DNA, 12 bp, Artificial Sequence
  Oligonucleotide primer for the detection of SNP TSC0020503
tatccttaccct

SEQ ID NO: 303498 - DNA, 12 bp, Artificial Sequence
  Oligonucleotide primer for the detection of SNP TSC0020503
aataatgtttat

SEQ ID NO: 303499 - DNA, 12 bp, Artificial Sequence
  Oligonucleotide primer for the detection of SNP TSC0020503
aataatacccac

SEQ ID NO: 303500 - DNA, 12 bp, Artificial Sequence
  Oligonucleotide primer for the detection of SNP TSC0020504
tataaccctcac

SEQ ID NO: 303501 - DNA, 12 bp, Artificial Sequence
  Oligonucleotide primer for the detection of SNP TSC0020504
attttagagtag

SEQ ID NO: 303502 - DNA, 12 bp, Artificial Sequence
  Oligonucleotide primer for the detection of SNP TSC0020504
atctcaaaataa

SEQ ID NO: 303503 - DNA, 12 bp, Artificial Sequence
  Oligonucleotide primer for the detection of SNP TSC0020506
ttgtttgtattt

SEQ ID NO: 303504 - DNA, 12 bp, Artificial Sequence
  Oligonucleotide primer for the detection of SNP TSC0020506
ttatttatatct

SEQ ID NO: 303505 - DNA, 12 bp, Artificial Sequence
  Oligonucleotide primer for the detection of SNP TSC0020506
taagaaatgaag

SEQ ID NO: 303506 - DNA, 12 bp, Artificial Sequence
  Oligonucleotide primer for the detection of SNP TSC0020507
attccaaaaaaa

SEQ ID NO: 303507 - DNA, 12 bp, Artificial Sequence
  Oligonucleotide primer for the detection of SNP TSC0020507
tttttagatgta

SEQ ID NO: 303508 - DNA, 12 bp, Artificial Sequence
  Oligonucleotide primer for the detection of SNP TSC0020509
cttcttcactat

SEQ ID NO: 303509 - DNA, 12 bp, Artificial Sequence
  Oligonucleotide primer for the detection of SNP TSC0020509
aatttatgtagg

SEQ ID NO: 303510 - DNA, 12 bp, Artificial Sequence
  Oligonucleotide primer for the detection of SNP TSC0020510
aattttcctaac

SEQ ID NO: 303511 - DNA, 12 bp, Artificial Sequence
  Oligonucleotide primer for the detection of SNP TSC0020510
ttgaaaattaaa

SEQ ID NO: 303512 - DNA, 12 bp, Artificial Sequence
  Oligonucleotide primer for the detection of SNP TSC0020511
caaatcacttcc

SEQ ID NO: 303513 - DNA, 12 bp, Artificial Sequence
  Oligonucleotide primer for the detection of SNP TSC0020511
aaagaattttta

SEQ ID NO: 303514 - DNA, 12 bp, Artificial Sequence
  Oligonucleotide primer for the detection of SNP TSC0020512
acatacacacat

SEQ ID NO: 303515 - DNA, 12 bp, Artificial Sequence
  Oligonucleotide primer for the detection of SNP TSC0020512
agtagagaagag

SEQ ID NO: 303516 - DNA, 12 bp, Artificial Sequence
  Oligonucleotide primer for the detection of SNP TSC0020513
atattccctact

SEQ ID NO: 303517 - DNA, 12 bp, Artificial Sequence
  Oligonucleotide primer for the detection of SNP TSC0020513
tggttaaaaaaa

SEQ ID NO: 303518 - DNA, 12 bp, Artificial Sequence
  Oligonucleotide primer for the detection of SNP TSC0020514
caaaatcttacc

SEQ ID NO: 303519 - DNA, 12 bp, Artificial Sequence
  Oligonucleotide primer for the detection of SNP TSC0020514
aaagaagtaaag

SEQ ID NO: 303520 - DNA, 12 bp, Artificial Sequence
  Oligonucleotide primer for the detection of SNP TSC0020515
ttaatttcaaat

SEQ ID NO: 303521 - DNA, 12 bp, Artificial Sequence
  Oligonucleotide primer for the detection of SNP TSC0020515
taattagaaaaa

SEQ ID NO: 303522 - DNA, 12 bp, Artificial Sequence
  Oligonucleotide primer for the detection of SNP TSC0020516
ccaaattacaat

SEQ ID NO: 303523 - DNA, 12 bp, Artificial Sequence
  Oligonucleotide primer for the detection of SNP TSC0020516
tgtgagggaaga

SEQ ID NO: 303524 - DNA, 12 bp, Artificial Sequence
  Oligonucleotide primer for the detection of SNP TSC0020517
acaataattata

SEQ ID NO: 303525 - DNA, 12 bp, Artificial Sequence
  Oligonucleotide primer for the detection of SNP TSC0020517
atgtaatgtaat

SEQ ID NO: 303526 - DNA, 12 bp, Artificial Sequence
  Oligonucleotide primer for the detection of SNP TSC0020517
atacaatacaat

SEQ ID NO: 303527 - DNA, 12 bp, Artificial Sequence
  Oligonucleotide primer for the detection of SNP TSC0020517
atagtgattgta

SEQ ID NO: 303528 - DNA, 12 bp, Artificial Sequence
  Oligonucleotide primer for the detection of SNP TSC0020518
ccaatcactaaa

SEQ ID NO: 303529 - DNA, 12 bp, Artificial Sequence
  Oligonucleotide primer for the detection of SNP TSC0020518
taggggtagttc

SEQ ID NO: 303530 - DNA, 12 bp, Artificial Sequence
  Oligonucleotide primer for the detection of SNP TSC0020518
caaaaacaaccc

SEQ ID NO: 303531 - DNA, 12 bp, Artificial Sequence
  Oligonucleotide primer for the detection of SNP TSC0020518
ttagttattgga

SEQ ID NO: 303532 - DNA, 12 bp, Artificial Sequence
  Oligonucleotide primer for the detection of SNP TSC0020520
tattagtttgaa

SEQ ID NO: 303533 - DNA, 12 bp, Artificial Sequence
  Oligonucleotide primer for the detection of SNP TSC0020521
aaaaatttcacc

SEQ ID NO: 303534 - DNA, 12 bp, Artificial Sequence
  Oligonucleotide primer for the detection of SNP TSC0020521
aaaaatttcgcc

SEQ ID NO: 303535 - DNA, 12 bp, Artificial Sequence
  Oligonucleotide primer for the detection of SNP TSC0020521
tattattattag

SEQ ID NO: 303536 - DNA, 12 bp, Artificial Sequence
  Oligonucleotide primer for the detection of SNP TSC0020522
aaatcctaccca

SEQ ID NO: 303537 - DNA, 12 bp, Artificial Sequence
  Oligonucleotide primer for the detection of SNP TSC0020522
ttgtattaagtt

SEQ ID NO: 303538 - DNA, 12 bp, Artificial Sequence
  Oligonucleotide primer for the detection of SNP TSC0020522
ttacaccaaacc

SEQ ID NO: 303539 - DNA, 12 bp, Artificial Sequence
  Oligonucleotide primer for the detection of SNP TSC0020522
ggggttttgttt

SEQ ID NO: 303540 - DNA, 12 bp, Artificial Sequence
  Oligonucleotide primer for the detection of SNP TSC0020523
taaaattcaata

SEQ ID NO: 303541 - DNA, 12 bp, Artificial Sequence
  Oligonucleotide primer for the detection of SNP TSC0020523
tagaattgtgtg

SEQ ID NO: 303542 - DNA, 12 bp, Artificial Sequence
  Oligonucleotide primer for the detection of SNP TSC0020523
taaaactatata

SEQ ID NO: 303543 - DNA, 12 bp, Artificial Sequence
  Oligonucleotide primer for the detection of SNP TSC0020523
ggtttagtattt

SEQ ID NO: 303544 - DNA, 12 bp, Artificial Sequence
  Oligonucleotide primer for the detection of SNP TSC0020527
aattaaaactcc

SEQ ID NO: 303545 - DNA, 12 bp, Artificial Sequence
  Oligonucleotide primer for the detection of SNP TSC0020527
aatgagagttta

SEQ ID NO: 303546 - DNA, 12 bp, Artificial Sequence
  Oligonucleotide primer for the detection of SNP TSC0020527
aataaaaactca

SEQ ID NO: 303547 - DNA, 12 bp, Artificial Sequence
  Oligonucleotide primer for the detection of SNP TSC0020527
agttaggatttt

SEQ ID NO: 303548 - DNA, 12 bp, Artificial Sequence
  Oligonucleotide primer for the detection of SNP TSC0020528
aacaataacaaa

SEQ ID NO: 303549 - DNA, 12 bp, Artificial Sequence
  Oligonucleotide primer for the detection of SNP TSC0020528
atccaattctcc

SEQ ID NO: 303550 - DNA, 12 bp, Artificial Sequence
  Oligonucleotide primer for the detection of SNP TSC0020528
atgagtaatggt

SEQ ID NO: 303551 - DNA, 12 bp, Artificial Sequence
  Oligonucleotide primer for the detection of SNP TSC0020529
gggtgataaggt

SEQ ID NO: 303552 - DNA, 12 bp, Artificial Sequence
  Oligonucleotide primer for the detection of SNP TSC0020529
aaataacaaaac

SEQ ID NO: 303553 - DNA, 12 bp, Artificial Sequence
  Oligonucleotide primer for the detection of SNP TSC0020529
ggtagggattgt

SEQ ID NO: 303554 - DNA, 12 bp, Artificial Sequence
  Oligonucleotide primer for the detection of SNP TSC0020530
aacaaaaacatc

SEQ ID NO: 303555 - DNA, 12 bp, Artificial Sequence
  Oligonucleotide primer for the detection of SNP TSC0020530
agtaagaattag

SEQ ID NO: 303556 - DNA, 12 bp, Artificial Sequence
  Oligonucleotide primer for the detection of SNP TSC0020531
tctctataatac

SEQ ID NO: 303557 - DNA, 12 bp, Artificial Sequence
  Oligonucleotide primer for the detection of SNP TSC0020532
cacgataactca

SEQ ID NO: 303558 - DNA, 12 bp, Artificial Sequence
  Oligonucleotide primer for the detection of SNP TSC0020532
tattgagatgat

SEQ ID NO: 303559 - DNA, 12 bp, Artificial Sequence
  Oligonucleotide primer for the detection of SNP TSC0020532
tatggtggttta

SEQ ID NO: 303560 - DNA, 12 bp, Artificial Sequence
  Oligonucleotide primer for the detection of SNP TSC0020532
tacggtggttta

SEQ ID NO: 303561 - DNA, 12 bp, Artificial Sequence
  Oligonucleotide primer for the detection of SNP TSC0020533
aaaaaaacaatc

SEQ ID NO: 303562 - DNA, 12 bp, Artificial Sequence
  Oligonucleotide primer for the detection of SNP TSC0020533
gtgtgtattaag

SEQ ID NO: 303563 - DNA, 12 bp, Artificial Sequence
  Oligonucleotide primer for the detection of SNP TSC0020534
taacttaactcc

SEQ ID NO: 303564 - DNA, 12 bp, Artificial Sequence
  Oligonucleotide primer for the detection of SNP TSC0020534
ctttttaaacct

SEQ ID NO: 303565 - DNA, 12 bp, Artificial Sequence
  Oligonucleotide primer for the detection of SNP TSC0020534
tgatttggtttt

SEQ ID NO: 303566 - DNA, 12 bp, Artificial Sequence
  Oligonucleotide primer for the detection of SNP TSC0020535
ccaatccaaaca

SEQ ID NO: 303567 - DNA, 12 bp, Artificial Sequence
  Oligonucleotide primer for the detection of SNP TSC0020535
ccaatccaaacg

SEQ ID NO: 303568 - DNA, 12 bp, Artificial Sequence
  Oligonucleotide primer for the detection of SNP TSC0020535
tagaggtatttt

SEQ ID NO: 303569 - DNA, 12 bp, Artificial Sequence
  Oligonucleotide primer for the detection of SNP TSC0020535
caaaaatacccc

SEQ ID NO: 303570 - DNA, 12 bp, Artificial Sequence
  Oligonucleotide primer for the detection of SNP TSC0020535
ttagtttaggtg

SEQ ID NO: 303571 - DNA, 12 bp, Artificial Sequence
  Oligonucleotide primer for the detection of SNP TSC0020535
ttagtttaggcg

SEQ ID NO: 303572 - DNA, 12 bp, Artificial Sequence
  Oligonucleotide primer for the detection of SNP TSC0020536
tctaaatacctt

SEQ ID NO: 303573 - DNA, 12 bp, Artificial Sequence
  Oligonucleotide primer for the detection of SNP TSC0020536
tttaggataagg

SEQ ID NO: 303574 - DNA, 12 bp, Artificial Sequence
  Oligonucleotide primer for the detection of SNP TSC0020536
cccaaaacaaaa

SEQ ID NO: 303575 - DNA, 12 bp, Artificial Sequence
  Oligonucleotide primer for the detection of SNP TSC0020538
ctaatttcactt

SEQ ID NO: 303576 - DNA, 12 bp, Artificial Sequence
  Oligonucleotide primer for the detection of SNP TSC0020538
gtgtgaaggtaa

SEQ ID NO: 303577 - DNA, 12 bp, Artificial Sequence
  Oligonucleotide primer for the detection of SNP TSC0020539
cccacaacaccc

SEQ ID NO: 303578 - DNA, 12 bp, Artificial Sequence
  Oligonucleotide primer for the detection of SNP TSC0020539
cccgcaacaccc

SEQ ID NO: 303579 - DNA, 12 bp, Artificial Sequence
  Oligonucleotide primer for the detection of SNP TSC0020539
ttttttgaggtt

SEQ ID NO: 303580 - DNA, 12 bp, Artificial Sequence
  Oligonucleotide primer for the detection of SNP TSC0020539
ttcctaaaacca

SEQ ID NO: 303581 - DNA, 12 bp, Artificial Sequence
  Oligonucleotide primer for the detection of SNP TSC0020539
tttgtagtattt

SEQ ID NO: 303582 - DNA, 12 bp, Artificial Sequence
  Oligonucleotide primer for the detection of SNP TSC0020539
ttcgtagtattt

SEQ ID NO: 303583 - DNA, 12 bp, Artificial Sequence
  Oligonucleotide primer for the detection of SNP TSC0020539
tttgtagtattc

SEQ ID NO: 303584 - DNA, 12 bp, Artificial Sequence
  Oligonucleotide primer for the detection of SNP TSC0020539
ttcgtagtattc

SEQ ID NO: 303585 - DNA, 12 bp, Artificial Sequence
  Oligonucleotide primer for the detection of SNP TSC0020540
aatttcataata

SEQ ID NO: 303586 - DNA, 12 bp, Artificial Sequence
  Oligonucleotide primer for the detection of SNP TSC0020540
aatttcgtaata

SEQ ID NO: 303587 - DNA, 12 bp, Artificial Sequence
  Oligonucleotide primer for the detection of SNP TSC0020540
aagttaaagtag

SEQ ID NO: 303588 - DNA, 12 bp, Artificial Sequence
  Oligonucleotide primer for the detection of SNP TSC0020540
gttttgtggtgt

SEQ ID NO: 303589 - DNA, 12 bp, Artificial Sequence
  Oligonukleotid-Primer
gtttcgtggtgt

SEQ ID NO: 303590 - DNA, 12 bp, Artificial Sequence
  Oligonucleotide primer for the detection of SNP TSC0020541
ctatccaaattt

SEQ ID NO: 303591 - DNA, 12 bp, Artificial Sequence
  Oligonucleotide primer for the detection of SNP TSC0020541
aaaggaaaagaa

SEQ ID NO: 303592 - DNA, 12 bp, Artificial Sequence
  Oligonucleotide primer for the detection of SNP TSC0020542
accaataatatt

SEQ ID NO: 303593 - DNA, 12 bp, Artificial Sequence
  Oligonukleotid-Primer
tatattatgttt

SEQ ID NO: 303594 - DNA, 12 bp, Artificial Sequence
  Oligonucleotide primer for the detection of SNP TSC0020542
atattatactta

SEQ ID NO: 303595 - DNA, 12 bp, Artificial Sequence
  Oligonucleotide primer for the detection of SNP TSC0020542
attagtgatgtt

SEQ ID NO: 303596 - DNA, 12 bp, Artificial Sequence
  Oligonucleotide primer for the detection of SNP TSC0020543
aaatatttcccc

SEQ ID NO: 303597 - DNA, 12 bp, Artificial Sequence
  Oligonucleotide primer for the detection of SNP TSC0020543
gaatttttaata

SEQ ID NO: 303598 - DNA, 12 bp, Artificial Sequence
  Oligonucleotide primer for the detection of SNP TSC0020546
ttaggttaaagg

SEQ ID NO: 303599 - DNA, 12 bp, Artificial Sequence
  Oligonucleotide primer for the detection of SNP TSC0020546
ccaaatcaaaaa

SEQ ID NO: 303600 - DNA, 12 bp, Artificial Sequence
  Oligonucleotide primer for the detection of SNP TSC0020546
ataaaagtaaat

SEQ ID NO: 303601 - DNA, 12 bp, Artificial Sequence
  Oligonucleotide primer for the detection of SNP TSC0020547
cattttctcttc

SEQ ID NO: 303602 - DNA, 12 bp, Artificial Sequence
  Oligonucleotide primer for the detection of SNP TSC0020547
taaagttatatt

SEQ ID NO: 303603 - DNA, 12 bp, Artificial Sequence
  Oligonucleotide primer for the detection of SNP TSC0020547
aaaatcacatta

SEQ ID NO: 303604 - DNA, 12 bp, Artificial Sequence
  Oligonucleotide primer for the detection of SNP TSC0020548
taaaacttttat

SEQ ID NO: 303605 - DNA, 12 bp, Artificial Sequence
  Oligonucleotide primer for the detection of SNP TSC0020548
agtttgaagaag

SEQ ID NO: 303606 - DNA, 12 bp, Artificial Sequence
  Oligonucleotide primer for the detection of SNP TSC0020548
aacttaaaaaaa

SEQ ID NO: 303607 - DNA, 12 bp, Artificial Sequence
  Oligonucleotide primer for the detection of SNP TSC0020548
tgaggtttttat

SEQ ID NO: 303608 - DNA, 12 bp, Artificial Sequence
  Oligonucleotide primer for the detection of SNP TSC0020550
atatgtggtttt

SEQ ID NO: 303609 - DNA, 12 bp, Artificial Sequence
  Oligonucleotide primer for the detection of SNP TSC0020550
acatataacttt

SEQ ID NO: 303610 - DNA, 12 bp, Artificial Sequence
  Oligonucleotide primer for the detection of SNP TSC0020552
tagttattttgg

SEQ ID NO: 303611 - DNA, 12 bp, Artificial Sequence
  Oligonucleotide primer for the detection of SNP TSC0020552
aactactctaaa

SEQ ID NO: 303612 - DNA, 12 bp, Artificial Sequence
  Oligonucleotide primer for the detection of SNP TSC0020553
aaacttacctta

SEQ ID NO: 303613 - DNA, 12 bp, Artificial Sequence
  Oligonucleotide primer for the detection of SNP TSC0020553
agaaggatggat

SEQ ID NO: 303614 - DNA, 12 bp, Artificial Sequence
  Oligonucleotide primer for the detection of SNP TSC0020553
agaaggacggat

SEQ ID NO: 303615 - DNA, 12 bp, Artificial Sequence
  Oligonucleotide primer for the detection of SNP TSC0020553
aaaaaaacaaat

SEQ ID NO: 303616 - DNA, 12 bp, Artificial Sequence
  Oligonucleotide primer for the detection of SNP TSC0020553
aaaaaaacgaat

SEQ ID NO: 303617 - DNA, 12 bp, Artificial Sequence
  Oligonucleotide primer for the detection of SNP TSC0020553
aaatttgtttta

SEQ ID NO: 303618 - DNA, 12 bp, Artificial Sequence
  Oligonucleotide primer for the detection of SNP TSC0020559
taatatactcca

SEQ ID NO: 303619 - DNA, 12 bp, Artificial Sequence
  Oligonucleotide primer for the detection of SNP TSC0020559
taatatactccg

SEQ ID NO: 303620 - DNA, 12 bp, Artificial Sequence
  Oligonucleotide primer for the detection of SNP TSC0020559
ggtttcgatttt

SEQ ID NO: 303621 - DNA, 12 bp, Artificial Sequence
  Oligonucleotide primer for the detection of SNP TSC0020559
attccaacctca

SEQ ID NO: 303622 - DNA, 12 bp, Artificial Sequence
  Oligonucleotide primer for the detection of SNP TSC0020559
attccgacctca

SEQ ID NO: 303623 - DNA, 12 bp, Artificial Sequence
  Oligonucleotide primer for the detection of SNP TSC0020559
tggtgtgttttg

SEQ ID NO: 303624 - DNA, 12 bp, Artificial Sequence
  Oligonucleotide primer for the detection of SNP TSC0020559
tggtgtgtttcg

SEQ ID NO: 303625 - DNA, 12 bp, Artificial Sequence
  Oligonucleotide primer for the detection of SNP TSC0020560
caatacctaaaa

SEQ ID NO: 303626 - DNA, 12 bp, Artificial Sequence
  Oligonucleotide primer for the detection of SNP TSC0020560
cgatacctaaaa

SEQ ID NO: 303627 - DNA, 12 bp, Artificial Sequence
  Oligonucleotide primer for the detection of SNP TSC0020560
tgtgttttgtag

SEQ ID NO: 303628 - DNA, 12 bp, Artificial Sequence
  Oligonucleotide primer for the detection of SNP TSC0020560
cgtgttttgtag

SEQ ID NO: 303629 - DNA, 12 bp, Artificial Sequence
  Oligonucleotide primer for the detection of SNP TSC0020560
tgcgttttgtag

SEQ ID NO: 303630 - DNA, 12 bp, Artificial Sequence
  Oligonucleotide primer for the detection of SNP TSC0020560
tgtgtttcgtag

SEQ ID NO: 303631 - DNA, 12 bp, Artificial Sequence
  Oligonucleotide primer for the detection of SNP TSC0020560
cgcgttttgtag

SEQ ID NO: 303632 - DNA, 12 bp, Artificial Sequence
  Oligonucleotide primer for the detection of SNP TSC0020560
cgtgtttcgtag

SEQ ID NO: 303633 - DNA, 12 bp, Artificial Sequence
  Oligonucleotide primer for the detection of SNP TSC0020560
tgcgtttcgtag

SEQ ID NO: 303634 - DNA, 12 bp, Artificial Sequence
  Oligonucleotide primer for the detection of SNP TSC0020560
cgcgtttcgtag

SEQ ID NO: 303635 - DNA, 12 bp, Artificial Sequence
  Oligonucleotide primer for the detection of SNP TSC0020560
cacatcccacaa

SEQ ID NO: 303636 - DNA, 12 bp, Artificial Sequence
  Oligonucleotide primer for the detection of SNP TSC0020560
cacatcccgcaa

SEQ ID NO: 303637 - DNA, 12 bp, Artificial Sequence
  Oligonucleotide primer for the detection of SNP TSC0020560
cacgtcccacaa

SEQ ID NO: 303638 - DNA, 12 bp, Artificial Sequence
  Oligonucleotide primer for the detection of SNP TSC0020560
cgcatcccacaa

SEQ ID NO: 303639 - DNA, 12 bp, Artificial Sequence
  Oligonucleotide primer for the detection of SNP TSC0020560
cacgtcccgcaa

SEQ ID NO: 303640 - DNA, 12 bp, Artificial Sequence
  Oligonucleotide primer for the detection of SNP TSC0020560
cgcatcccgcaa

SEQ ID NO: 303641 - DNA, 12 bp, Artificial Sequence
  Oligonucleotide primer for the detection of SNP TSC0020560
cgcgtcccacaa

SEQ ID NO: 303642 - DNA, 12 bp, Artificial Sequence
  Oligonucleotide primer for the detection of SNP TSC0020560
cgcgtcccgcaa

SEQ ID NO: 303643 - DNA, 12 bp, Artificial Sequence
  Oligonucleotide primer for the detection of SNP TSC0020560
atgatgtttggg

SEQ ID NO: 303644 - DNA, 12 bp, Artificial Sequence
  Oligonucleotide primer for the detection of SNP TSC0020560
acgatgtttggg

SEQ ID NO: 303645 - DNA, 12 bp, Artificial Sequence
  Oligonucleotide primer for the detection of SNP TSC0020561
acaaaatataac

SEQ ID NO: 303646 - DNA, 12 bp, Artificial Sequence
  Oligonukleotid-Primer
acgaaatataac

SEQ ID NO: 303647 - DNA, 12 bp, Artificial Sequence
  Oligonucleotide primer for the detection of SNP TSC0020561
ttatggattatg

SEQ ID NO: 303648 - DNA, 12 bp, Artificial Sequence
  Oligonucleotide primer for the detection of SNP TSC0020561
ttacggattatg

SEQ ID NO: 303649 - DNA, 12 bp, Artificial Sequence
  Oligonucleotide primer for the detection of SNP TSC0020563
aaaaacaaacct

SEQ ID NO: 303650 - DNA, 12 bp, Artificial Sequence
  Oligonukleotid-Primer
aaaaacgaacct

SEQ ID NO: 303651 - DNA, 12 bp, Artificial Sequence
  Oligonucleotide primer for the detection of SNP TSC0020563
tgttattattta

SEQ ID NO: 303652 - DNA, 12 bp, Artificial Sequence
  Oligonucleotide primer for the detection of SNP TSC0020565
cctaaacaaaaa

SEQ ID NO: 303653 - DNA, 12 bp, Artificial Sequence
  Oligonucleotide primer for the detection of SNP TSC0020565
ggttaggaggtt

SEQ ID NO: 303654 - DNA, 12 bp, Artificial Sequence
  Oligonucleotide primer for the detection of SNP TSC0020565
atcaaaaaacta

SEQ ID NO: 303655 - DNA, 12 bp, Artificial Sequence
  Oligonucleotide primer for the detection of SNP TSC0020565
tttgaataaagg

SEQ ID NO: 303656 - DNA, 12 bp, Artificial Sequence
  Oligonucleotide primer for the detection of SNP TSC0020572
cataacataatc

SEQ ID NO: 303657 - DNA, 12 bp, Artificial Sequence
  Oligonucleotide primer for the detection of SNP TSC0020572
cgtaacataatc

SEQ ID NO: 303658 - DNA, 12 bp, Artificial Sequence
  Oligonucleotide primer for the detection of SNP TSC0020572
atttatgaaatg

SEQ ID NO: 303659 - DNA, 12 bp, Artificial Sequence
  Oligonucleotide primer for the detection of SNP TSC0020573
aatatctactac

SEQ ID NO: 303660 - DNA, 12 bp, Artificial Sequence
  Oligonucleotide primer for the detection of SNP TSC0020573
gagttgggagag

SEQ ID NO: 303661 - DNA, 12 bp, Artificial Sequence
  Oligonucleotide primer for the detection of SNP TSC0020579
tttttattttaa

SEQ ID NO: 303662 - DNA, 12 bp, Artificial Sequence
  Oligonucleotide primer for the detection of SNP TSC0020580
caataaaaatcc

SEQ ID NO: 303663 - DNA, 12 bp, Artificial Sequence
  Oligonucleotide primer for the detection of SNP TSC0020585
aatcaaaaaacc

SEQ ID NO: 303664 - DNA, 12 bp, Artificial Sequence
  Oligonucleotide primer for the detection of SNP TSC0020589
aataaatcaaat

SEQ ID NO: 303665 - DNA, 12 bp, Artificial Sequence
  Oligonucleotide primer for the detection of SNP TSC0020589
ttttgtgaaaat

SEQ ID NO: 303666 - DNA, 12 bp, Artificial Sequence
  Oligonucleotide primer for the detection of SNP TSC0020589
actttataaaaa

SEQ ID NO: 303667 - DNA, 12 bp, Artificial Sequence
  Oligonucleotide primer for the detection of SNP TSC0020589
aataaattaaat

SEQ ID NO: 303668 - DNA, 12 bp, Artificial Sequence
  Oligonucleotide primer for the detection of SNP TSC0020591
tacccaataatc

SEQ ID NO: 303669 - DNA, 12 bp, Artificial Sequence
  Oligonucleotide primer for the detection of SNP TSC0020591
tacccgataatc

SEQ ID NO: 303670 - DNA, 12 bp, Artificial Sequence
  Oligonucleotide primer for the detection of SNP TSC0020591
tttttatttata

SEQ ID NO: 303671 - DNA, 12 bp, Artificial Sequence
  Oligonucleotide primer for the detection of SNP TSC0020594
aaactaaaattt

SEQ ID NO: 303672 - DNA, 12 bp, Artificial Sequence
  Oligonucleotide primer for the detection of SNP TSC0020594
gttgtaaaattt

SEQ ID NO: 303673 - DNA, 12 bp, Artificial Sequence
  Oligonucleotide primer for the detection of SNP TSC0020594
actataaaattt

SEQ ID NO: 303674 - DNA, 12 bp, Artificial Sequence
  Oligonucleotide primer for the detection of SNP TSC0020594
ggattaggattt

SEQ ID NO: 303675 - DNA, 12 bp, Artificial Sequence
  Oligonucleotide primer for the detection of SNP TSC0020595
atcctttcttat

SEQ ID NO: 303676 - DNA, 12 bp, Artificial Sequence
  Oligonucleotide primer for the detection of SNP TSC0020595
agtagttggata

SEQ ID NO: 303677 - DNA, 12 bp, Artificial Sequence
  Oligonucleotide primer for the detection of SNP TSC0020597
cctatcctaaca

SEQ ID NO: 303678 - DNA, 12 bp, Artificial Sequence
  Oligonucleotide primer for the detection of SNP TSC0020597
ttgaaaggagag

SEQ ID NO: 303679 - DNA, 12 bp, Artificial Sequence
  Oligonucleotide primer for the detection of SNP TSC0020597
ttttgttttaat

SEQ ID NO: 303680 - DNA, 12 bp, Artificial Sequence
  Oligonucleotide primer for the detection of SNP TSC0020598
ttataaataccc

SEQ ID NO: 303681 - DNA, 12 bp, Artificial Sequence
  Oligonucleotide primer for the detection of SNP TSC0020598
tggttttgtgga

SEQ ID NO: 303682 - DNA, 12 bp, Artificial Sequence
  Oligonucleotide primer for the detection of SNP TSC0020601
caaacctaaata

SEQ ID NO: 303683 - DNA, 12 bp, Artificial Sequence
  Oligonucleotide primer for the detection of SNP TSC0020601
aggagggagaga

SEQ ID NO: 303684 - DNA, 12 bp, Artificial Sequence
  Oligonucleotide primer for the detection of SNP TSC0020601
taggtttgagtg

SEQ ID NO: 303685 - DNA, 12 bp, Artificial Sequence
  Oligonucleotide primer for the detection of SNP TSC0020602
aacatacacttc

SEQ ID NO: 303686 - DNA, 12 bp, Artificial Sequence
  Oligonucleotide primer for the detection of SNP TSC0020604
caaacaatccaa

SEQ ID NO: 303687 - DNA, 12 bp, Artificial Sequence
  Oligonucleotide primer for the detection of SNP TSC0020604
aaaataatatgt

SEQ ID NO: 303688 - DNA, 12 bp, Artificial Sequence
  Oligonucleotide primer for the detection of SNP TSC0020604
aaaataatatat

SEQ ID NO: 303689 - DNA, 12 bp, Artificial Sequence
  Oligonucleotide primer for the detection of SNP TSC0020604
tagatagtttaa

SEQ ID NO: 303690 - DNA, 12 bp, Artificial Sequence
  Oligonucleotide primer for the detection of SNP TSC0020605
aatataaacaac

SEQ ID NO: 303691 - DNA, 12 bp, Artificial Sequence
  Oligonucleotide primer for the detection of SNP TSC0020605
tggaggaattag

SEQ ID NO: 303692 - DNA, 12 bp, Artificial Sequence
  Oligonucleotide primer for the detection of SNP TSC0020606
aaaacaccatac

SEQ ID NO: 303693 - DNA, 12 bp, Artificial Sequence
  Oligonucleotide primer for the detection of SNP TSC0020606
tgttgtttaaaa

SEQ ID NO: 303694 - DNA, 12 bp, Artificial Sequence
  Oligonucleotide primer for the detection of SNP TSC0020606
cgttgtttaaaa

SEQ ID NO: 303695 - DNA, 12 bp, Artificial Sequence
  Oligonucleotide primer for the detection of SNP TSC0020606
cactatttaaaa

SEQ ID NO: 303696 - DNA, 12 bp, Artificial Sequence
  Oligonucleotide primer for the detection of SNP TSC0020606
cgctatttaaaa

SEQ ID NO: 303697 - DNA, 12 bp, Artificial Sequence
  Oligonucleotide primer for the detection of SNP TSC0020606
gaggtattatgt

SEQ ID NO: 303698 - DNA, 12 bp, Artificial Sequence
  Oligonucleotide primer for the detection of SNP TSC0020607
ttttcccacttc

SEQ ID NO: 303699 - DNA, 12 bp, Artificial Sequence
  Oligonucleotide primer for the detection of SNP TSC0020607
tgttttaattgt

SEQ ID NO: 303700 - DNA, 12 bp, Artificial Sequence
  Oligonucleotide primer for the detection of SNP TSC0020607
tgttttaattgc

SEQ ID NO: 303701 - DNA, 12 bp, Artificial Sequence
  Oligonucleotide primer for the detection of SNP TSC0020607
taccccaactac

SEQ ID NO: 303702 - DNA, 12 bp, Artificial Sequence
  Oligonucleotide primer for the detection of SNP TSC0020611
aaaaattacaaa

SEQ ID NO: 303703 - DNA, 12 bp, Artificial Sequence
  Oligonucleotide primer for the detection of SNP TSC0020611
taatcatccaac

SEQ ID NO: 303704 - DNA, 12 bp, Artificial Sequence
  Oligonucleotide primer for the detection of SNP TSC0020611
gaagaattatag

SEQ ID NO: 303705 - DNA, 12 bp, Artificial Sequence
  Oligonucleotide primer for the detection of SNP TSC0020612
ctttataacaac

SEQ ID NO: 303706 - DNA, 12 bp, Artificial Sequence
  Oligonucleotide primer for the detection of SNP TSC0020612
ctttataacgac

SEQ ID NO: 303707 - DNA, 12 bp, Artificial Sequence
  Oligonucleotide primer for the detection of SNP TSC0020612
tgaaagaggagg

SEQ ID NO: 303708 - DNA, 12 bp, Artificial Sequence
  Oligonucleotide primer for the detection of SNP TSC0020612
cgaaagaggagg

SEQ ID NO: 303709 - DNA, 12 bp, Artificial Sequence
  Oligonucleotide primer for the detection of SNP TSC0020613
aaaactacgaac

SEQ ID NO: 303710 - DNA, 12 bp, Artificial Sequence
  Oligonucleotide primer for the detection of SNP TSC0020615
ttttctaatcac

SEQ ID NO: 303711 - DNA, 12 bp, Artificial Sequence
  Oligonucleotide primer for the detection of SNP TSC0020615
taatgtgtttaa

SEQ ID NO: 303712 - DNA, 12 bp, Artificial Sequence
  Oligonucleotide primer for the detection of SNP TSC0020616
ctaatcaaattc

SEQ ID NO: 303713 - DNA, 12 bp, Artificial Sequence
  Oligonucleotide primer for the detection of SNP TSC0020616
agaaaagtataa

SEQ ID NO: 303714 - DNA, 12 bp, Artificial Sequence
  Oligonucleotide primer for the detection of SNP TSC0020616
ttgattaggttt

SEQ ID NO: 303715 - DNA, 12 bp, Artificial Sequence
  Oligonucleotide primer for the detection of SNP TSC0020617
aattaaactccc

SEQ ID NO: 303716 - DNA, 12 bp, Artificial Sequence
  Oligonucleotide primer for the detection of SNP TSC0020617
tttatttgttaa

SEQ ID NO: 303717 - DNA, 12 bp, Artificial Sequence
  Oligonucleotide primer for the detection of SNP TSC0020618
ccccaaacttcc

SEQ ID NO: 303718 - DNA, 12 bp, Artificial Sequence
  Oligonucleotide primer for the detection of SNP TSC0020618
tattttgttatt

SEQ ID NO: 303719 - DNA, 12 bp, Artificial Sequence
  Oligonucleotide primer for the detection of SNP TSC0020618
tattttgttatc

SEQ ID NO: 303720 - DNA, 12 bp, Artificial Sequence
  Oligonucleotide primer for the detection of SNP TSC0020618
catcctaccacc

SEQ ID NO: 303721 - DNA, 12 bp, Artificial Sequence
  Oligonucleotide primer for the detection of SNP TSC0020618
ttttaggttttc

SEQ ID NO: 303722 - DNA, 12 bp, Artificial Sequence
  Oligonucleotide primer for the detection of SNP TSC0020619
actcaaaacaat

SEQ ID NO: 303723 - DNA, 12 bp, Artificial Sequence
  Oligonucleotide primer for the detection of SNP TSC0020619
tttaggattaga

SEQ ID NO: 303724 - DNA, 12 bp, Artificial Sequence
  Oligonucleotide primer for the detection of SNP TSC0020619
cccaaaaccaaa

SEQ ID NO: 303725 - DNA, 12 bp, Artificial Sequence
  Oligonucleotide primer for the detection of SNP TSC0020619
gtttagggtagt

SEQ ID NO: 303726 - DNA, 12 bp, Artificial Sequence
  Oligonucleotide primer for the detection of SNP TSC0020620
caaaacaataaa

SEQ ID NO: 303727 - DNA, 12 bp, Artificial Sequence
  Oligonucleotide primer for the detection of SNP TSC0020620
taggattagatt

SEQ ID NO: 303728 - DNA, 12 bp, Artificial Sequence
  Oligonucleotide primer for the detection of SNP TSC0020620
caaaaccaaacc

SEQ ID NO: 303729 - DNA, 12 bp, Artificial Sequence
  Oligonucleotide primer for the detection of SNP TSC0020620
tagggtagtgag

SEQ ID NO: 303730 - DNA, 12 bp, Artificial Sequence
  Oligonucleotide primer for the detection of SNP TSC0020621
ttttgtatttat

SEQ ID NO: 303731 - DNA, 12 bp, Artificial Sequence
  Oligonucleotide primer for the detection of SNP TSC0020621
cctacacctaca

SEQ ID NO: 303732 - DNA, 12 bp, Artificial Sequence
  Oligonucleotide primer for the detection of SNP TSC0020621
atgaggtgattt

SEQ ID NO: 303733 - DNA, 12 bp, Artificial Sequence
  Oligonucleotide primer for the detection of SNP TSC0020622
ggttaggtatgg

SEQ ID NO: 303734 - DNA, 12 bp, Artificial Sequence
  Oligonucleotide primer for the detection of SNP TSC0020622
ggttaggtacgg

SEQ ID NO: 303735 - DNA, 12 bp, Artificial Sequence
  Oligonucleotide primer for the detection of SNP TSC0020623
aataaaattaat

SEQ ID NO: 303736 - DNA, 12 bp, Artificial Sequence
  Oligonucleotide primer for the detection of SNP TSC0020623
ttgtgaaaatta

SEQ ID NO: 303737 - DNA, 12 bp, Artificial Sequence
  Oligonucleotide primer for the detection of SNP TSC0020624
attctataatat

SEQ ID NO: 303738 - DNA, 12 bp, Artificial Sequence
  Oligonucleotide primer for the detection of SNP TSC0020624
tgtagttagatg

SEQ ID NO: 303739 - DNA, 12 bp, Artificial Sequence
  Oligonucleotide primer for the detection of SNP TSC0020625
tccttttccact

SEQ ID NO: 303740 - DNA, 12 bp, Artificial Sequence
  Oligonucleotide primer for the detection of SNP TSC0020625
ggattagaaaat

SEQ ID NO: 303741 - DNA, 12 bp, Artificial Sequence
  Oligonucleotide primer for the detection of SNP TSC0020625
aattaaaaaata

SEQ ID NO: 303742 - DNA, 12 bp, Artificial Sequence
  Oligonucleotide primer for the detection of SNP TSC0020626
caaacccatacc

SEQ ID NO: 303743 - DNA, 12 bp, Artificial Sequence
  Oligonucleotide primer for the detection of SNP TSC0020626
cgaacccatacc

SEQ ID NO: 303744 - DNA, 12 bp, Artificial Sequence
  Oligonucleotide primer for the detection of SNP TSC0020626
ggattgagtgta

SEQ ID NO: 303745 - DNA, 12 bp, Artificial Sequence
  Oligonucleotide primer for the detection of SNP TSC0020627
ttatctttatct

SEQ ID NO: 303746 - DNA, 12 bp, Artificial Sequence
  Oligonucleotide primer for the detection of SNP TSC0020627
ttaatttgttga

SEQ ID NO: 303747 - DNA, 12 bp, Artificial Sequence
  Oligonucleotide primer for the detection of SNP TSC0020627
ccaatctactaa

SEQ ID NO: 303748 - DNA, 12 bp, Artificial Sequence
  Oligonucleotide primer for the detection of SNP TSC0020628
aatcaataaata

SEQ ID NO: 303749 - DNA, 12 bp, Artificial Sequence
  Oligonucleotide primer for the detection of SNP TSC0020628
ttatttataaat

SEQ ID NO: 303750 - DNA, 12 bp, Artificial Sequence
  Oligonucleotide primer for the detection of SNP TSC0020628
ctacccataaac

SEQ ID NO: 303751 - DNA, 12 bp, Artificial Sequence
  Oligonucleotide primer for the detection of SNP TSC0020628
aattaatgggta

SEQ ID NO: 303752 - DNA, 12 bp, Artificial Sequence
  Oligonucleotide primer for the detection of SNP TSC0020629
atactaatattc

SEQ ID NO: 303753 - DNA, 12 bp, Artificial Sequence
  Oligonucleotide primer for the detection of SNP TSC0020629
tatttatttaac

SEQ ID NO: 303754 - DNA, 12 bp, Artificial Sequence
  Oligonucleotide primer for the detection of SNP TSC0020629
tatttattcaac

SEQ ID NO: 303755 - DNA, 12 bp, Artificial Sequence
  Oligonukleotid-Primer
gttgatattttt

SEQ ID NO: 303756 - DNA, 12 bp, Artificial Sequence
  Oligonucleotide primer for the detection of SNP TSC0020630
aagtattatgtg

SEQ ID NO: 303757 - DNA, 12 bp, Artificial Sequence
  Oligonucleotide primer for the detection of SNP TSC0020631
attaacataaat

SEQ ID NO: 303758 - DNA, 12 bp, Artificial Sequence
  Oligonucleotide primer for the detection of SNP TSC0020631
aaattttgttat

SEQ ID NO: 303759 - DNA, 12 bp, Artificial Sequence
  Oligonukleotid-Primer
aaactctatcac

SEQ ID NO: 303760 - DNA, 12 bp, Artificial Sequence
  Oligonucleotide primer for the detection of SNP TSC0020631
attagtatgagt

SEQ ID NO: 303761 - DNA, 12 bp, Artificial Sequence
  Oligonucleotide primer for the detection of SNP TSC0020632
tcctaaacccca

SEQ ID NO: 303762 - DNA, 12 bp, Artificial Sequence
  Oligonucleotide primer for the detection of SNP TSC0020632
ttggaattaatt

SEQ ID NO: 303763 - DNA, 12 bp, Artificial Sequence
  Oligonucleotide primer for the detection of SNP TSC0020632
ctaaaaccaacc

SEQ ID NO: 303764 - DNA, 12 bp, Artificial Sequence
  Oligonucleotide primer for the detection of SNP TSC0020632
ttttggatttta

SEQ ID NO: 303765 - DNA, 12 bp, Artificial Sequence
  Oligonucleotide primer for the detection of SNP TSC0020633
gggtatagaggg

SEQ ID NO: 303766 - DNA, 12 bp, Artificial Sequence
  Oligonucleotide primer for the detection of SNP TSC0020634
aacatctataac

SEQ ID NO: 303767 - DNA, 12 bp, Artificial Sequence
  Oligonucleotide primer for the detection of SNP TSC0020634
aggttttttttg

SEQ ID NO: 303768 - DNA, 12 bp, Artificial Sequence
  Oligonucleotide primer for the detection of SNP TSC0020634
aggtttttttcg

SEQ ID NO: 303769 - DNA, 12 bp, Artificial Sequence
  Oligonucleotide primer for the detection of SNP TSC0020634
aaatttctccca

SEQ ID NO: 303770 - DNA, 12 bp, Artificial Sequence
  Oligonucleotide primer for the detection of SNP TSC0020634
aaatttctcccg

SEQ ID NO: 303771 - DNA, 12 bp, Artificial Sequence
  Oligonucleotide primer for the detection of SNP TSC0020634
aatatttgtgat

SEQ ID NO: 303772 - DNA, 12 bp, Artificial Sequence
  Oligonucleotide primer for the detection of SNP TSC0020635
tctttccaaatc

SEQ ID NO: 303773 - DNA, 12 bp, Artificial Sequence
  Oligonucleotide primer for the detection of SNP TSC0020635
gggatttatgaa

SEQ ID NO: 303774 - DNA, 12 bp, Artificial Sequence
  Oligonucleotide primer for the detection of SNP TSC0020636
tattctacatat

SEQ ID NO: 303775 - DNA, 12 bp, Artificial Sequence
  Oligonucleotide primer for the detection of SNP TSC0020636
tattctacgtat

SEQ ID NO: 303776 - DNA, 12 bp, Artificial Sequence
  Oligonucleotide primer for the detection of SNP TSC0020636
aaaaaaatttag

SEQ ID NO: 303777 - DNA, 12 bp, Artificial Sequence
  Oligonucleotide primer for the detection of SNP TSC0020639
aattagataatt

SEQ ID NO: 303778 - DNA, 12 bp, Artificial Sequence
  Oligonucleotide primer for the detection of SNP TSC0020639
aaccaaacaacc

SEQ ID NO: 303779 - DNA, 12 bp, Artificial Sequence
  Oligonucleotide primer for the detection of SNP TSC0020639
tggaaaaattgg

SEQ ID NO: 303780 - DNA, 12 bp, Artificial Sequence
  Oligonucleotide primer for the detection of SNP TSC0020640
tattaaaccctt

SEQ ID NO: 303781 - DNA, 12 bp, Artificial Sequence
  Oligonucleotide primer for the detection of SNP TSC0020640
tggtttatttta

SEQ ID NO: 303782 - DNA, 12 bp, Artificial Sequence
  Oligonucleotide primer for the detection of SNP TSC0020641
aattctaaataa

SEQ ID NO: 303783 - DNA, 12 bp, Artificial Sequence
  Oligonucleotide primer for the detection of SNP TSC0020641
gatttaggtttt

SEQ ID NO: 303784 - DNA, 12 bp, Artificial Sequence
  Oligonucleotide primer for the detection of SNP TSC0020641
gatttaggtttc

SEQ ID NO: 303785 - DNA, 12 bp, Artificial Sequence
  Oligonucleotide primer for the detection of SNP TSC0020641
ataacctaaact

SEQ ID NO: 303786 - DNA, 12 bp, Artificial Sequence
  Oligonucleotide primer for the detection of SNP TSC0020641
agttttgaatga

SEQ ID NO: 303787 - DNA, 12 bp, Artificial Sequence
  Oligonucleotide primer for the detection of SNP TSC0020642
actacaacaccc

SEQ ID NO: 303788 - DNA, 12 bp, Artificial Sequence
  Oligonucleotide primer for the detection of SNP TSC0020642
tttttttgggta

SEQ ID NO: 303789 - DNA, 12 bp, Artificial Sequence
  Oligonucleotide primer for the detection of SNP TSC0020643
tccaacaaactc

SEQ ID NO: 303790 - DNA, 12 bp, Artificial Sequence
  Oligonucleotide primer for the detection of SNP TSC0020643
tccaacgaactc

SEQ ID NO: 303791 - DNA, 12 bp, Artificial Sequence
  Oligonucleotide primer for the detection of SNP TSC0020643
ttaggtgtttta

SEQ ID NO: 303792 - DNA, 12 bp, Artificial Sequence
  Oligonucleotide primer for the detection of SNP TSC0020644
aacctattttac

SEQ ID NO: 303793 - DNA, 12 bp, Artificial Sequence
  Oligonucleotide primer for the detection of SNP TSC0020644
aatttgtgtttg

SEQ ID NO: 303794 - DNA, 12 bp, Artificial Sequence
  Oligonucleotide primer for the detection of SNP TSC0020645
aaaactttaaaa

SEQ ID NO: 303795 - DNA, 12 bp, Artificial Sequence
  Oligonucleotide primer for the detection of SNP TSC0020645
aaggttataaaa

SEQ ID NO: 303796 - DNA, 12 bp, Artificial Sequence
  Oligonucleotide primer for the detection of SNP TSC0020645
agaggttttaga

SEQ ID NO: 303797 - DNA, 12 bp, Artificial Sequence
  Oligonucleotide primer for the detection of SNP TSC0020646
acacacaaaaat

SEQ ID NO: 303798 - DNA, 12 bp, Artificial Sequence
  Oligonucleotide primer for the detection of SNP TSC0020646
tgataatagtga

SEQ ID NO: 303799 - DNA, 12 bp, Artificial Sequence
  Oligonucleotide primer for the detection of SNP TSC0020647
catactatataa

SEQ ID NO: 303800 - DNA, 12 bp, Artificial Sequence
  Oligonucleotide primer for the detection of SNP TSC0020647
ttttgtgtgttt

SEQ ID NO: 303801 - DNA, 12 bp, Artificial Sequence
  Oligonucleotide primer for the detection of SNP TSC0020647
atttctatatac

SEQ ID NO: 303802 - DNA, 12 bp, Artificial Sequence
  Oligonucleotide primer for the detection of SNP TSC0020647
tatgttatatag

SEQ ID NO: 303803 - DNA, 12 bp, Artificial Sequence
  Oligonucleotide primer for the detection of SNP TSC0020648
cacttaaattat

SEQ ID NO: 303804 - DNA, 12 bp, Artificial Sequence
  Oligonucleotide primer for the detection of SNP TSC0020648
ttaagaagtata

SEQ ID NO: 303805 - DNA, 12 bp, Artificial Sequence
  Oligonucleotide primer for the detection of SNP TSC0020649
cccttatcctct

SEQ ID NO: 303806 - DNA, 12 bp, Artificial Sequence
  Oligonucleotide primer for the detection of SNP TSC0020649
agatgtaggagt

SEQ ID NO: 303807 - DNA, 12 bp, Artificial Sequence
  Oligonucleotide primer for the detection of SNP TSC0020650
aaaccataacac

SEQ ID NO: 303808 - DNA, 12 bp, Artificial Sequence
  Oligonucleotide primer for the detection of SNP TSC0020650
tttgggtggggg

SEQ ID NO: 303809 - DNA, 12 bp, Artificial Sequence
  Oligonucleotide primer for the detection of SNP TSC0020650
cctaaataaaaa

SEQ ID NO: 303810 - DNA, 12 bp, Artificial Sequence
  Oligonucleotide primer for the detection of SNP TSC0020650
aaattatagtat

SEQ ID NO: 303811 - DNA, 12 bp, Artificial Sequence
  Oligonucleotide primer for the detection of SNP TSC0020652
gaaaaacgaaaa

SEQ ID NO: 303812 - DNA, 12 bp, Artificial Sequence
  Oligonucleotide primer for the detection of SNP TSC0020652
ataataggagtt

SEQ ID NO: 303813 - DNA, 12 bp, Artificial Sequence
  Oligonucleotide primer for the detection of SNP TSC0020652
ataacaaaaatt

SEQ ID NO: 303814 - DNA, 12 bp, Artificial Sequence
  Oligonucleotide primer for the detection of SNP TSC0020652
gaggggtgaaaa

SEQ ID NO: 303815 - DNA, 12 bp, Artificial Sequence
  Oligonucleotide primer for the detection of SNP TSC0020652
gaggggcgaaaa

SEQ ID NO: 303816 - DNA, 12 bp, Artificial Sequence
  Oligonucleotide primer for the detection of SNP TSC0020653
caaaccaaacaa

SEQ ID NO: 303817 - DNA, 12 bp, Artificial Sequence
  Oligonucleotide primer for the detection of SNP TSC0020653
cgaaccaaacaa

SEQ ID NO: 303818 - DNA, 12 bp, Artificial Sequence
  Oligonucleotide primer for the detection of SNP TSC0020653
gtaattttgttt

SEQ ID NO: 303819 - DNA, 12 bp, Artificial Sequence
  Oligonucleotide primer for the detection of SNP TSC0020653
ataattctattt

SEQ ID NO: 303820 - DNA, 12 bp, Artificial Sequence
  Oligonucleotide primer for the detection of SNP TSC0020653
tggattaggtaa

SEQ ID NO: 303821 - DNA, 12 bp, Artificial Sequence
  Oligonucleotide primer for the detection of SNP TSC0020653
cggattaggtaa

SEQ ID NO: 303822 - DNA, 12 bp, Artificial Sequence
  Oligonucleotide primer for the detection of SNP TSC0020654
gttgagattatg

SEQ ID NO: 303823 - DNA, 12 bp, Artificial Sequence
  Oligonucleotide primer for the detection of SNP TSC0020654
gttgagattacg

SEQ ID NO: 303824 - DNA, 12 bp, Artificial Sequence
  Oligonucleotide primer for the detection of SNP TSC0020659
aatatataatct

SEQ ID NO: 303825 - DNA, 12 bp, Artificial Sequence
  Oligonucleotide primer for the detection of SNP TSC0020659
tgagtaataaaa

SEQ ID NO: 303826 - DNA, 12 bp, Artificial Sequence
  Oligonucleotide primer for the detection of SNP TSC0020660
tactcatccatc

SEQ ID NO: 303827 - DNA, 12 bp, Artificial Sequence
  Oligonucleotide primer for the detection of SNP TSC0020660
aatgtttatgga

SEQ ID NO: 303828 - DNA, 12 bp, Artificial Sequence
  Oligonucleotide primer for the detection of SNP TSC0020663
tacccttaccca

SEQ ID NO: 303829 - DNA, 12 bp, Artificial Sequence
  Oligonucleotide primer for the detection of SNP TSC0020663
tttggggagttt

SEQ ID NO: 303830 - DNA, 12 bp, Artificial Sequence
  Oligonucleotide primer for the detection of SNP TSC0020664
ttcccttaaaat

SEQ ID NO: 303831 - DNA, 12 bp, Artificial Sequence
  Oligonucleotide primer for the detection of SNP TSC0020664
ggtttttgggtg

SEQ ID NO: 303832 - DNA, 12 bp, Artificial Sequence
  Oligonucleotide primer for the detection of SNP TSC0020665
tcatacctcatt

SEQ ID NO: 303833 - DNA, 12 bp, Artificial Sequence
  Oligonucleotide primer for the detection of SNP TSC0020665
aattggaggttg

SEQ ID NO: 303834 - DNA, 12 bp, Artificial Sequence
  Oligonucleotide primer for the detection of SNP TSC0020666
ttttctaacttt

SEQ ID NO: 303835 - DNA, 12 bp, Artificial Sequence
  Oligonucleotide primer for the detection of SNP TSC0020666
gaagattaagta

SEQ ID NO: 303836 - DNA, 12 bp, Artificial Sequence
  Oligonucleotide primer for the detection of SNP TSC0020668
catcaaaatcac

SEQ ID NO: 303837 - DNA, 12 bp, Artificial Sequence
  Oligonucleotide primer for the detection of SNP TSC0020668
ttaaggttagta

SEQ ID NO: 303838 - DNA, 12 bp, Artificial Sequence
  Oligonucleotide primer for the detection of SNP TSC0020669
aaaattattaac

SEQ ID NO: 303839 - DNA, 12 bp, Artificial Sequence
  Oligonucleotide primer for the detection of SNP TSC0020669
attgattttttg

SEQ ID NO: 303840 - DNA, 12 bp, Artificial Sequence
  Oligonucleotide primer for the detection of SNP TSC0020671
cccaaatccaca

SEQ ID NO: 303841 - DNA, 12 bp, Artificial Sequence
  Oligonucleotide primer for the detection of SNP TSC0020671
cccaaatccacg

SEQ ID NO: 303842 - DNA, 12 bp, Artificial Sequence
  Oligonucleotide primer for the detection of SNP TSC0020671
tttaggtttatg

SEQ ID NO: 303843 - DNA, 12 bp, Artificial Sequence
  Oligonucleotide primer for the detection of SNP TSC0020671
tttaggtttacg

SEQ ID NO: 303844 - DNA, 12 bp, Artificial Sequence
  Oligonucleotide primer for the detection of SNP TSC0020673
ctacctaattca

SEQ ID NO: 303845 - DNA, 12 bp, Artificial Sequence
  Oligonucleotide primer for the detection of SNP TSC0020673
tttggggtaatt

SEQ ID NO: 303846 - DNA, 12 bp, Artificial Sequence
  Oligonucleotide primer for the detection of SNP TSC0020673
cttaaaataacc

SEQ ID NO: 303847 - DNA, 12 bp, Artificial Sequence
  Oligonucleotide primer for the detection of SNP TSC0020673
ttgtttgattta

SEQ ID NO: 303848 - DNA, 12 bp, Artificial Sequence
  Oligonucleotide primer for the detection of SNP TSC0020674
caaaaccatatc

SEQ ID NO: 303849 - DNA, 12 bp, Artificial Sequence
  Oligonucleotide primer for the detection of SNP TSC0020674
ttttgtaggtgg

SEQ ID NO: 303850 - DNA, 12 bp, Artificial Sequence
  Oligonucleotide primer for the detection of SNP TSC0020675
ccaaacataatt

SEQ ID NO: 303851 - DNA, 12 bp, Artificial Sequence
  Oligonucleotide primer for the detection of SNP TSC0020675
ttaagtatagtt

SEQ ID NO: 303852 - DNA, 12 bp, Artificial Sequence
  Oligonucleotide primer for the detection of SNP TSC0020676
accaaacataat

SEQ ID NO: 303853 - DNA, 12 bp, Artificial Sequence
  Oligonucleotide primer for the detection of SNP TSC0020676
ataggtgtttat

SEQ ID NO: 303854 - DNA, 12 bp, Artificial Sequence
  Oligonucleotide primer for the detection of SNP TSC0020676
gttaagtatagt

SEQ ID NO: 303855 - DNA, 12 bp, Artificial Sequence
  Oligonucleotide primer for the detection of SNP TSC0020677
cacaccccccaa

SEQ ID NO: 303856 - DNA, 12 bp, Artificial Sequence
  Oligonucleotide primer for the detection of SNP TSC0020677
tggtttaatggg

SEQ ID NO: 303857 - DNA, 12 bp, Artificial Sequence
  Oligonucleotide primer for the detection of SNP TSC0020677
taattcaataaa

SEQ ID NO: 303858 - DNA, 12 bp, Artificial Sequence
  Oligonucleotide primer for the detection of SNP TSC0020678
acctaactttac

SEQ ID NO: 303859 - DNA, 12 bp, Artificial Sequence
  Oligonucleotide primer for the detection of SNP TSC0020678
gtttagagattg

SEQ ID NO: 303860 - DNA, 12 bp, Artificial Sequence
  Oligonucleotide primer for the detection of SNP TSC0020678
atttaaaaatta

SEQ ID NO: 303861 - DNA, 12 bp, Artificial Sequence
  Oligonucleotide primer for the detection of SNP TSC0020679
gattattattta

SEQ ID NO: 303862 - DNA, 12 bp, Artificial Sequence
  Oligonucleotide primer for the detection of SNP TSC0020680
ccccaactaccc

SEQ ID NO: 303863 - DNA, 12 bp, Artificial Sequence
  Oligonucleotide primer for the detection of SNP TSC0020680
ccccgactaccc

SEQ ID NO: 303864 - DNA, 12 bp, Artificial Sequence
  Oligonucleotide primer for the detection of SNP TSC0020680
tttgagggaaat

SEQ ID NO: 303865 - DNA, 12 bp, Artificial Sequence
  Oligonucleotide primer for the detection of SNP TSC0020680
tttgagggaaac

SEQ ID NO: 303866 - DNA, 12 bp, Artificial Sequence
  Oligonucleotide primer for the detection of SNP TSC0020680
ttctaaaaaaaa

SEQ ID NO: 303867 - DNA, 12 bp, Artificial Sequence
  Oligonucleotide primer for the detection of SNP TSC0020680
tttggttgtttt

SEQ ID NO: 303868 - DNA, 12 bp, Artificial Sequence
  Oligonukleotid-Primer
ttcggttgtttt

SEQ ID NO: 303869 - DNA, 12 bp, Artificial Sequence
  Oligonucleotide primer for the detection of SNP TSC0020681
cttaatttcctt

SEQ ID NO: 303870 - DNA, 12 bp, Artificial Sequence
  Oligonucleotide primer for the detection of SNP TSC0020681
ttattttttaga

SEQ ID NO: 303871 - DNA, 12 bp, Artificial Sequence
  Oligonucleotide primer for the detection of SNP TSC0020682
aattttttcaaa

SEQ ID NO: 303872 - DNA, 12 bp, Artificial Sequence
  Oligonukleotid-Primer
tgtatatggttt

SEQ ID NO: 303873 - DNA, 12 bp, Artificial Sequence
  Oligonucleotide primer for the detection of SNP TSC0020682
tacatataactc

SEQ ID NO: 303874 - DNA, 12 bp, Artificial Sequence
  Oligonucleotide primer for the detection of SNP TSC0020682
aatttttttaag

SEQ ID NO: 303875 - DNA, 12 bp, Artificial Sequence
  Oligonucleotide primer for the detection of SNP TSC0020683
cttaacccaaaa

SEQ ID NO: 303876 - DNA, 12 bp, Artificial Sequence
  Oligonucleotide primer for the detection of SNP TSC0020683
ttttagttttgg

SEQ ID NO: 303877 - DNA, 12 bp, Artificial Sequence
  Oligonucleotide primer for the detection of SNP TSC0020683
ttttaatcttaa

SEQ ID NO: 303878 - DNA, 12 bp, Artificial Sequence
  Oligonucleotide primer for the detection of SNP TSC0020683
tttgatttaaga

SEQ ID NO: 303879 - DNA, 12 bp, Artificial Sequence
  Oligonucleotide primer for the detection of SNP TSC0020684
ctaaaaaaatcc

SEQ ID NO: 303880 - DNA, 12 bp, Artificial Sequence
  Oligonucleotide primer for the detection of SNP TSC0020684
tagaaaagtaaa

SEQ ID NO: 303881 - DNA, 12 bp, Artificial Sequence
  Oligonucleotide primer for the detection of SNP TSC0020684
ttggaaaagttt

SEQ ID NO: 303882 - DNA, 12 bp, Artificial Sequence
  Oligonucleotide primer for the detection of SNP TSC0020685
tagaattataaa

SEQ ID NO: 303883 - DNA, 12 bp, Artificial Sequence
  Oligonucleotide primer for the detection of SNP TSC0020685
tggttttgggtt

SEQ ID NO: 303884 - DNA, 12 bp, Artificial Sequence
  Oligonucleotide primer for the detection of SNP TSC0020685
tggtttcgggtt

SEQ ID NO: 303885 - DNA, 12 bp, Artificial Sequence
  Oligonucleotide primer for the detection of SNP TSC0020686
aaaatacaaacc

SEQ ID NO: 303886 - DNA, 12 bp, Artificial Sequence
  Oligonucleotide primer for the detection of SNP TSC0020686
aagttgggtttg

SEQ ID NO: 303887 - DNA, 12 bp, Artificial Sequence
  Oligonucleotide primer for the detection of SNP TSC0020686
aagtcgggtttg

SEQ ID NO: 303888 - DNA, 12 bp, Artificial Sequence
  Oligonucleotide primer for the detection of SNP TSC0020686
aaaccaaaccta

SEQ ID NO: 303889 - DNA, 12 bp, Artificial Sequence
  Oligonucleotide primer for the detection of SNP TSC0020686
aaaccgaaccta

SEQ ID NO: 303890 - DNA, 12 bp, Artificial Sequence
  Oligonucleotide primer for the detection of SNP TSC0020686
ggggtgtaggtt

SEQ ID NO: 303891 - DNA, 12 bp, Artificial Sequence
  Oligonucleotide primer for the detection of SNP TSC0020687
acaaccactata

SEQ ID NO: 303892 - DNA, 12 bp, Artificial Sequence
  Oligonucleotide primer for the detection of SNP TSC0020687
acaaccgctata

SEQ ID NO: 303893 - DNA, 12 bp, Artificial Sequence
  Oligonucleotide primer for the detection of SNP TSC0020687
ggtgggttttgt

SEQ ID NO: 303894 - DNA, 12 bp, Artificial Sequence
  Oligonucleotide primer for the detection of SNP TSC0020687
ggtgggtttcgt

SEQ ID NO: 303895 - DNA, 12 bp, Artificial Sequence
  Oligonucleotide primer for the detection of SNP TSC0020687
aataaatcccat

SEQ ID NO: 303896 - DNA, 12 bp, Artificial Sequence
  Oligonucleotide primer for the detection of SNP TSC0020687
aataaatcccgt

SEQ ID NO: 303897 - DNA, 12 bp, Artificial Sequence
  Oligonucleotide primer for the detection of SNP TSC0020687
gataaatcccat

SEQ ID NO: 303898 - DNA, 12 bp, Artificial Sequence
  Oligonucleotide primer for the detection of SNP TSC0020687
gataaatcccgt

SEQ ID NO: 303899 - DNA, 12 bp, Artificial Sequence
  Oligonucleotide primer for the detection of SNP TSC0020687
gtagttgttgtg

SEQ ID NO: 303900 - DNA, 12 bp, Artificial Sequence
  Oligonucleotide primer for the detection of SNP TSC0020687
gtagtcgttgtg

SEQ ID NO: 303901 - DNA, 12 bp, Artificial Sequence
  Oligonucleotide primer for the detection of SNP TSC0020688
ttaacacacata

SEQ ID NO: 303902 - DNA, 12 bp, Artificial Sequence
  Oligonucleotide primer for the detection of SNP TSC0020688
ttaaagtagttt

SEQ ID NO: 303903 - DNA, 12 bp, Artificial Sequence
  Oligonucleotide primer for the detection of SNP TSC0020688
ctaaaacaattt

SEQ ID NO: 303904 - DNA, 12 bp, Artificial Sequence
  Oligonucleotide primer for the detection of SNP TSC0020689
ataaaaacaatc

SEQ ID NO: 303905 - DNA, 12 bp, Artificial Sequence
  Oligonucleotide primer for the detection of SNP TSC0020689
ttaaaaagtata

SEQ ID NO: 303906 - DNA, 12 bp, Artificial Sequence
  Oligonucleotide primer for the detection of SNP TSC0020690
caaatttcaccc

SEQ ID NO: 303907 - DNA, 12 bp, Artificial Sequence
  Oligonucleotide primer for the detection of SNP TSC0020690
atatggtataat

SEQ ID NO: 303908 - DNA, 12 bp, Artificial Sequence
  Oligonucleotide primer for the detection of SNP TSC0020690
cataatataata

SEQ ID NO: 303909 - DNA, 12 bp, Artificial Sequence
  Oligonucleotide primer for the detection of SNP TSC0020690
taaattttattt

SEQ ID NO: 303910 - DNA, 12 bp, Artificial Sequence
  Oligonucleotide primer for the detection of SNP TSC0020691
aattattacacc

SEQ ID NO: 303911 - DNA, 12 bp, Artificial Sequence
  Oligonucleotide primer for the detection of SNP TSC0020691
ggaagtagaata

SEQ ID NO: 303912 - DNA, 12 bp, Artificial Sequence
  Oligonucleotide primer for the detection of SNP TSC0020692
aatttcatcata

SEQ ID NO: 303913 - DNA, 12 bp, Artificial Sequence
  Oligonucleotide primer for the detection of SNP TSC0020692
gtttttagaagg

SEQ ID NO: 303914 - DNA, 12 bp, Artificial Sequence
  Oligonucleotide primer for the detection of SNP TSC0020692
attttattatgt

SEQ ID NO: 303915 - DNA, 12 bp, Artificial Sequence
  Oligonucleotide primer for the detection of SNP TSC0020693
taactaacactt

SEQ ID NO: 303916 - DNA, 12 bp, Artificial Sequence
  Oligonucleotide primer for the detection of SNP TSC0020694
atactacctaaa

SEQ ID NO: 303917 - DNA, 12 bp, Artificial Sequence
  Oligonucleotide primer for the detection of SNP TSC0020694
actcccacccct

SEQ ID NO: 303918 - DNA, 12 bp, Artificial Sequence
  Oligonucleotide primer for the detection of SNP TSC0020694
gtattgtttgaa

SEQ ID NO: 303919 - DNA, 12 bp, Artificial Sequence
  Oligonucleotide primer for the detection of SNP TSC0020697
ctataacaaatt

SEQ ID NO: 303920 - DNA, 12 bp, Artificial Sequence
  Oligonucleotide primer for the detection of SNP TSC0020697
accttcaaaaat

SEQ ID NO: 303921 - DNA, 12 bp, Artificial Sequence
  Oligonucleotide primer for the detection of SNP TSC0020697
ttatagtagatt

SEQ ID NO: 303922 - DNA, 12 bp, Artificial Sequence
  Oligonucleotide primer for the detection of SNP TSC0020698
tattcaaacctt

SEQ ID NO: 303923 - DNA, 12 bp, Artificial Sequence
  Oligonucleotide primer for the detection of SNP TSC0020698
tagattagttga

SEQ ID NO: 303924 - DNA, 12 bp, Artificial Sequence
  Oligonucleotide primer for the detection of SNP TSC0020699
atctccataata

SEQ ID NO: 303925 - DNA, 12 bp, Artificial Sequence
  Oligonucleotide primer for the detection of SNP TSC0020699
attatatattgg

SEQ ID NO: 303926 - DNA, 12 bp, Artificial Sequence
  Oligonucleotide primer for the detection of SNP TSC0020699
actacatactaa

SEQ ID NO: 303927 - DNA, 12 bp, Artificial Sequence
  Oligonucleotide primer for the detection of SNP TSC0020699
atttttataatg

SEQ ID NO: 303928 - DNA, 12 bp, Artificial Sequence
  Oligonucleotide primer for the detection of SNP TSC0020700
aaaaaatcctcc

SEQ ID NO: 303929 - DNA, 12 bp, Artificial Sequence
  Oligonucleotide primer for the detection of SNP TSC0020700
tttttgattgtt

SEQ ID NO: 303930 - DNA, 12 bp, Artificial Sequence
  Oligonucleotide primer for the detection of SNP TSC0020701
aactccattctt

SEQ ID NO: 303931 - DNA, 12 bp, Artificial Sequence
  Oligonucleotide primer for the detection of SNP TSC0020701
tgggttgagtgg

SEQ ID NO: 303932 - DNA, 12 bp, Artificial Sequence
  Oligonucleotide primer for the detection of SNP TSC0020701
tgggttgagcgg

SEQ ID NO: 303933 - DNA, 12 bp, Artificial Sequence
  Oligonucleotide primer for the detection of SNP TSC0020702
ttaagatttgat

SEQ ID NO: 303934 - DNA, 12 bp, Artificial Sequence
  Oligonucleotide primer for the detection of SNP TSC0020702
ttaagattcgat

SEQ ID NO: 303935 - DNA, 12 bp, Artificial Sequence
  Oligonucleotide primer for the detection of SNP TSC0020702
tcaaaatccaac

SEQ ID NO: 303936 - DNA, 12 bp, Artificial Sequence
  Oligonucleotide primer for the detection of SNP TSC0020702
tcaaaatccgac

SEQ ID NO: 303937 - DNA, 12 bp, Artificial Sequence
  Oligonucleotide primer for the detection of SNP TSC0020702
agaggtgagagg

SEQ ID NO: 303938 - DNA, 12 bp, Artificial Sequence
  Oligonucleotide primer for the detection of SNP TSC0020719
aataatattttc

SEQ ID NO: 303939 - DNA, 12 bp, Artificial Sequence
  Oligonucleotide primer for the detection of SNP TSC0020719
ttaaatagataa

SEQ ID NO: 303940 - DNA, 12 bp, Artificial Sequence
  Oligonucleotide primer for the detection of SNP TSC0020720
tatcacacactt

SEQ ID NO: 303941 - DNA, 12 bp, Artificial Sequence
  Oligonucleotide primer for the detection of SNP TSC0020721
tacttcttatct

SEQ ID NO: 303942 - DNA, 12 bp, Artificial Sequence
  Oligonucleotide primer for the detection of SNP TSC0020721
ttttattatata

SEQ ID NO: 303943 - DNA, 12 bp, Artificial Sequence
  Oligonucleotide primer for the detection of SNP TSC0020721
tcttatcacaca

SEQ ID NO: 303944 - DNA, 12 bp, Artificial Sequence
  Oligonucleotide primer for the detection of SNP TSC0020722
attataataaac

SEQ ID NO: 303945 - DNA, 12 bp, Artificial Sequence
  Oligonucleotide primer for the detection of SNP TSC0020722
gtaatggtgtga

SEQ ID NO: 303946 - DNA, 12 bp, Artificial Sequence
  Oligonucleotide primer for the detection of SNP TSC0020722
gtaacggtgtga

SEQ ID NO: 303947 - DNA, 12 bp, Artificial Sequence
  Oligonucleotide primer for the detection of SNP TSC0020722
gtaatggtgcga

SEQ ID NO: 303948 - DNA, 12 bp, Artificial Sequence
  Oligonucleotide primer for the detection of SNP TSC0020722
gtaacggtgcga

SEQ ID NO: 303949 - DNA, 12 bp, Artificial Sequence
  Oligonucleotide primer for the detection of SNP TSC0020722
acaacaatacaa

SEQ ID NO: 303950 - DNA, 12 bp, Artificial Sequence
  Oligonucleotide primer for the detection of SNP TSC0020722
acaacaatacga

SEQ ID NO: 303951 - DNA, 12 bp, Artificial Sequence
  Oligonucleotide primer for the detection of SNP TSC0020722
acaacgatacaa

SEQ ID NO: 303952 - DNA, 12 bp, Artificial Sequence
  Oligonucleotide primer for the detection of SNP TSC0020722
acaacgatacga

SEQ ID NO: 303953 - DNA, 12 bp, Artificial Sequence
  Oligonukleotid-Primer
tataataataaa

SEQ ID NO: 303954 - DNA, 12 bp, Artificial Sequence
  Oligonucleotide primer for the detection of SNP TSC0020723
agttggtattat

SEQ ID NO: 303955 - DNA, 12 bp, Artificial Sequence
  Oligonucleotide primer for the detection of SNP TSC0020723
tgtggtggtgga

SEQ ID NO: 303956 - DNA, 12 bp, Artificial Sequence
  Oligonucleotide primer for the detection of SNP TSC0020724
aataatggaaag

SEQ ID NO: 303957 - DNA, 12 bp, Artificial Sequence
  Oligonucleotide primer for the detection of SNP TSC0020724
aacaataaaaaa

SEQ ID NO: 303958 - DNA, 12 bp, Artificial Sequence
  Oligonucleotide primer for the detection of SNP TSC0020724
gtaattaaaaat

SEQ ID NO: 303959 - DNA, 12 bp, Artificial Sequence
  Oligonucleotide primer for the detection of SNP TSC0020725
accattacactc

SEQ ID NO: 303960 - DNA, 12 bp, Artificial Sequence
  Oligonucleotide primer for the detection of SNP TSC0020725
gccattacactc

SEQ ID NO: 303961 - DNA, 12 bp, Artificial Sequence
  Oligonucleotide primer for the detection of SNP TSC0020725
ttgttgtttgga

SEQ ID NO: 303962 - DNA, 12 bp, Artificial Sequence
  Oligonucleotide primer for the detection of SNP TSC0020726
aatttgggagga

SEQ ID NO: 303963 - DNA, 12 bp, Artificial Sequence
  Oligonucleotide primer for the detection of SNP TSC0020727
cgatataaataa

SEQ ID NO: 303964 - DNA, 12 bp, Artificial Sequence
  Oligonucleotide primer for the detection of SNP TSC0020727
attaatagggat

SEQ ID NO: 303965 - DNA, 12 bp, Artificial Sequence
  Oligonucleotide primer for the detection of SNP TSC0020727
accaataaaaat

SEQ ID NO: 303966 - DNA, 12 bp, Artificial Sequence
  Oligonucleotide primer for the detection of SNP TSC0020727
ggtgtaggtgat

SEQ ID NO: 303967 - DNA, 12 bp, Artificial Sequence
  Oligonucleotide primer for the detection of SNP TSC0020728
tgttgtaaggaa

SEQ ID NO: 303968 - DNA, 12 bp, Artificial Sequence
  Oligonucleotide primer for the detection of SNP TSC0020729
ctcgaaaaacta

SEQ ID NO: 303969 - DNA, 12 bp, Artificial Sequence
  Oligonucleotide primer for the detection of SNP TSC0020729
atttgggaagtt

SEQ ID NO: 303970 - DNA, 12 bp, Artificial Sequence
  Oligonucleotide primer for the detection of SNP TSC0020729
attcgggaagtt

SEQ ID NO: 303971 - DNA, 12 bp, Artificial Sequence
  Oligonucleotide primer for the detection of SNP TSC0020730
tgtggtggtaga

SEQ ID NO: 303972 - DNA, 12 bp, Artificial Sequence
  Oligonucleotide primer for the detection of SNP TSC0020731
tatttgttatta

SEQ ID NO: 303973 - DNA, 12 bp, Artificial Sequence
  Oligonucleotide primer for the detection of SNP TSC0020731
catctaccacca

SEQ ID NO: 303974 - DNA, 12 bp, Artificial Sequence
  Oligonucleotide primer for the detection of SNP TSC0020732
taaccaacataa

SEQ ID NO: 303975 - DNA, 12 bp, Artificial Sequence
  Oligonucleotide primer for the detection of SNP TSC0020732
agatggggtttt

SEQ ID NO: 303976 - DNA, 12 bp, Artificial Sequence
  Oligonucleotide primer for the detection of SNP TSC0020732
aaataaaatttc

SEQ ID NO: 303977 - DNA, 12 bp, Artificial Sequence
  Oligonucleotide primer for the detection of SNP TSC0020733
ttaaaatttgta

SEQ ID NO: 303978 - DNA, 12 bp, Artificial Sequence
  Oligonucleotide primer for the detection of SNP TSC0020734
actccccacact

SEQ ID NO: 303979 - DNA, 12 bp, Artificial Sequence
  Oligonucleotide primer for the detection of SNP TSC0020734
actccccgcact

SEQ ID NO: 303980 - DNA, 12 bp, Artificial Sequence
  Oligonucleotide primer for the detection of SNP TSC0020734
ttgtgggtttaa

SEQ ID NO: 303981 - DNA, 12 bp, Artificial Sequence
  Oligonucleotide primer for the detection of SNP TSC0020734
ataaacccaaaa

SEQ ID NO: 303982 - DNA, 12 bp, Artificial Sequence
  Oligonucleotide primer for the detection of SNP TSC0020734
ttttcgtatttt

SEQ ID NO: 303983 - DNA, 12 bp, Artificial Sequence
  Oligonucleotide primer for the detection of SNP TSC0020734
tttttgtatttc

SEQ ID NO: 303984 - DNA, 12 bp, Artificial Sequence
  Oligonucleotide primer for the detection of SNP TSC0020734
ttttcgtatttc

SEQ ID NO: 303985 - DNA, 12 bp, Artificial Sequence
  Oligonucleotide primer for the detection of SNP TSC0020735
cgcaaaaaaaaa

SEQ ID NO: 303986 - DNA, 12 bp, Artificial Sequence
  Oligonucleotide primer for the detection of SNP TSC0020735
atttgttgtata

SEQ ID NO: 303987 - DNA, 12 bp, Artificial Sequence
  Oligonucleotide primer for the detection of SNP TSC0020735
attcgttgtata

SEQ ID NO: 303988 - DNA, 12 bp, Artificial Sequence
  Oligonucleotide primer for the detection of SNP TSC0020735
atttgtcgtata

SEQ ID NO: 303989 - DNA, 12 bp, Artificial Sequence
  Oligonucleotide primer for the detection of SNP TSC0020735
attcgtcgtata

SEQ ID NO: 303990 - DNA, 12 bp, Artificial Sequence
  Oligonucleotide primer for the detection of SNP TSC0020735
attcaccacaca

SEQ ID NO: 303991 - DNA, 12 bp, Artificial Sequence
  Oligonucleotide primer for the detection of SNP TSC0020735
attcaccgcaca

SEQ ID NO: 303992 - DNA, 12 bp, Artificial Sequence
  Oligonucleotide primer for the detection of SNP TSC0020735
attcgccacaca

SEQ ID NO: 303993 - DNA, 12 bp, Artificial Sequence
  Oligonucleotide primer for the detection of SNP TSC0020735
attcgccgcaca

SEQ ID NO: 303994 - DNA, 12 bp, Artificial Sequence
  Oligonucleotide primer for the detection of SNP TSC0020735
tgtaggaagggg

SEQ ID NO: 303995 - DNA, 12 bp, Artificial Sequence
  Oligonucleotide primer for the detection of SNP TSC0020735
cgtaggaagggg

SEQ ID NO: 303996 - DNA, 12 bp, Artificial Sequence
  Oligonucleotide primer for the detection of SNP TSC0020736
ccaataaaaatt

SEQ ID NO: 303997 - DNA, 12 bp, Artificial Sequence
  Oligonucleotide primer for the detection of SNP TSC0020736
attagtatttta

SEQ ID NO: 303998 - DNA, 12 bp, Artificial Sequence
  Oligonucleotide primer for the detection of SNP TSC0020737
ccaaattaaatt

SEQ ID NO: 303999 - DNA, 12 bp, Artificial Sequence
  Oligonucleotide primer for the detection of SNP TSC0020738
taggtgtttttt

SEQ ID NO: 304000 - DNA, 12 bp, Artificial Sequence
  Oligonucleotide primer for the detection of SNP TSC0020738
taggcgtttttt

SEQ ID NO: 304001 - DNA, 12 bp, Artificial Sequence
  Oligonucleotide primer for the detection of SNP TSC0020738
aaacatccttta

SEQ ID NO: 304002 - DNA, 12 bp, Artificial Sequence
  Oligonucleotide primer for the detection of SNP TSC0020738
aaacgtccttta

SEQ ID NO: 304003 - DNA, 12 bp, Artificial Sequence
  Oligonucleotide primer for the detection of SNP TSC0020738
taagtaaggtgg

SEQ ID NO: 304004 - DNA, 12 bp, Artificial Sequence
  Oligonucleotide primer for the detection of SNP TSC0020739
acttaccaacca

SEQ ID NO: 304005 - DNA, 12 bp, Artificial Sequence
  Oligonucleotide primer for the detection of SNP TSC0020739
gtgtggtagtat

SEQ ID NO: 304006 - DNA, 12 bp, Artificial Sequence
  Oligonucleotide primer for the detection of SNP TSC0020739
tatataacaaca

SEQ ID NO: 304007 - DNA, 12 bp, Artificial Sequence
  Oligonucleotide primer for the detection of SNP TSC0020739
tgtttattagtt

SEQ ID NO: 304008 - DNA, 12 bp, Artificial Sequence
  Oligonucleotide primer for the detection of SNP TSC0020743
aaaaactatatc

SEQ ID NO: 304009 - DNA, 12 bp, Artificial Sequence
  Oligonucleotide primer for the detection of SNP TSC0020743
tgatttttgttg

SEQ ID NO: 304010 - DNA, 12 bp, Artificial Sequence
  Oligonucleotide primer for the detection of SNP TSC0020743
tgattttcgttg

SEQ ID NO: 304011 - DNA, 12 bp, Artificial Sequence
  Oligonucleotide primer for the detection of SNP TSC0020743
taaccctcacta

SEQ ID NO: 304012 - DNA, 12 bp, Artificial Sequence
  Oligonucleotide primer for the detection of SNP TSC0020743
taaccctcgcta

SEQ ID NO: 304013 - DNA, 12 bp, Artificial Sequence
  Oligonucleotide primer for the detection of SNP TSC0020743
ggaggttgtgtt

SEQ ID NO: 304014 - DNA, 12 bp, Artificial Sequence
  Oligonucleotide primer for the detection of SNP TSC0020743
ggaggttgtgtc

SEQ ID NO: 304015 - DNA, 12 bp, Artificial Sequence
  Oligonucleotide primer for the detection of SNP TSC0020744
agttaatttata

SEQ ID NO: 304016 - DNA, 12 bp, Artificial Sequence
  Oligonucleotide primer for the detection of SNP TSC0020745
aaacaatccacc

SEQ ID NO: 304017 - DNA, 12 bp, Artificial Sequence
  Oligonucleotide primer for the detection of SNP TSC0020745
aaacaatccgcc

SEQ ID NO: 304018 - DNA, 12 bp, Artificial Sequence
  Oligonucleotide primer for the detection of SNP TSC0020745
aagtaatttgtt

SEQ ID NO: 304019 - DNA, 12 bp, Artificial Sequence
  Oligonucleotide primer for the detection of SNP TSC0020745
aagtaattcgtt

SEQ ID NO: 304020 - DNA, 12 bp, Artificial Sequence
  Oligonucleotide primer for the detection of SNP TSC0020749
atattatttatt

SEQ ID NO: 304021 - DNA, 12 bp, Artificial Sequence
  Oligonucleotide primer for the detection of SNP TSC0020749
gaattttttata

SEQ ID NO: 304022 - DNA, 12 bp, Artificial Sequence
  Oligonucleotide primer for the detection of SNP TSC0020751
aataattcaata

SEQ ID NO: 304023 - DNA, 12 bp, Artificial Sequence
  Oligonucleotide primer for the detection of SNP TSC0020751
tgaagaagagga

SEQ ID NO: 304024 - DNA, 12 bp, Artificial Sequence
  Oligonucleotide primer for the detection of SNP TSC0020752
gttgttgtttag

SEQ ID NO: 304025 - DNA, 12 bp, Artificial Sequence
  Oligonucleotide primer for the detection of SNP TSC0020752
gtcgttgtttag

SEQ ID NO: 304026 - DNA, 12 bp, Artificial Sequence
  Oligonucleotide primer for the detection of SNP TSC0020752
atcactatttaa

SEQ ID NO: 304027 - DNA, 12 bp, Artificial Sequence
  Oligonucleotide primer for the detection of SNP TSC0020752
atcgctatttaa

SEQ ID NO: 304028 - DNA, 12 bp, Artificial Sequence
  Oligonucleotide primer for the detection of SNP TSC0020752
atgatattatag

SEQ ID NO: 304029 - DNA, 12 bp, Artificial Sequence
  Oligonucleotide primer for the detection of SNP TSC0020753
ataaaaatcttt

SEQ ID NO: 304030 - DNA, 12 bp, Artificial Sequence
  Oligonucleotide primer for the detection of SNP TSC0020753
aaaagttatagg

SEQ ID NO: 304031 - DNA, 12 bp, Artificial Sequence
  Oligonucleotide primer for the detection of SNP TSC0020753
aaaaactacaaa

SEQ ID NO: 304032 - DNA, 12 bp, Artificial Sequence
  Oligonucleotide primer for the detection of SNP TSC0020753
gtgaaaattttt

SEQ ID NO: 304033 - DNA, 12 bp, Artificial Sequence
  Oligonucleotide primer for the detection of SNP TSC0020754
ttttccttaaaa

SEQ ID NO: 304034 - DNA, 12 bp, Artificial Sequence
  Oligonucleotide primer for the detection of SNP TSC0020754
tttattgataaa

SEQ ID NO: 304035 - DNA, 12 bp, Artificial Sequence
  Oligonucleotide primer for the detection of SNP TSC0020754
tttatcgataaa

SEQ ID NO: 304036 - DNA, 12 bp, Artificial Sequence
  Oligonucleotide primer for the detection of SNP TSC0020754
tttaccgataaa

SEQ ID NO: 304037 - DNA, 12 bp, Artificial Sequence
  Oligonucleotide primer for the detection of SNP TSC0020755
aaaccctactat

SEQ ID NO: 304038 - DNA, 12 bp, Artificial Sequence
  Oligonucleotide primer for the detection of SNP TSC0020755
aaataggataaa

SEQ ID NO: 304039 - DNA, 12 bp, Artificial Sequence
  Oligonucleotide primer for the detection of SNP TSC0020755
gagttttgttat

SEQ ID NO: 304040 - DNA, 12 bp, Artificial Sequence
  Oligonucleotide primer for the detection of SNP TSC0020757
atacccctcttc

SEQ ID NO: 304041 - DNA, 12 bp, Artificial Sequence
  Oligonucleotide primer for the detection of SNP TSC0020757
ttatttagtttc

SEQ ID NO: 304042 - DNA, 12 bp, Artificial Sequence
  Oligonukleotid-Primer
accatccaattt

SEQ ID NO: 304043 - DNA, 12 bp, Artificial Sequence
  Oligonucleotide primer for the detection of SNP TSC0020762
ctaaatctataa

SEQ ID NO: 304044 - DNA, 12 bp, Artificial Sequence
  Oligonucleotide primer for the detection of SNP TSC0020762
agaaagagaatt

SEQ ID NO: 304045 - DNA, 12 bp, Artificial Sequence
  Oligonucleotide primer for the detection of SNP TSC0020762
ttaaatttgtga

SEQ ID NO: 304046 - DNA, 12 bp, Artificial Sequence
  Oligonukleotid-Primer
ttaattataact

SEQ ID NO: 304047 - DNA, 12 bp, Artificial Sequence
  Oligonucleotide primer for the detection of SNP TSC0020763
aaattaaaataa

SEQ ID NO: 304048 - DNA, 12 bp, Artificial Sequence
  Oligonucleotide primer for the detection of SNP TSC0020763
aaatcaaaataa

SEQ ID NO: 304049 - DNA, 12 bp, Artificial Sequence
  Oligonucleotide primer for the detection of SNP TSC0020763
ttaattatagtt

SEQ ID NO: 304050 - DNA, 12 bp, Artificial Sequence
  Oligonucleotide primer for the detection of SNP TSC0020764
aaaaaatacgaa

SEQ ID NO: 304051 - DNA, 12 bp, Artificial Sequence
  Oligonucleotide primer for the detection of SNP TSC0020764
aaaaattggatt

SEQ ID NO: 304052 - DNA, 12 bp, Artificial Sequence
  Oligonucleotide primer for the detection of SNP TSC0020764
aaaaattggatc

SEQ ID NO: 304053 - DNA, 12 bp, Artificial Sequence
  Oligonucleotide primer for the detection of SNP TSC0020764
aaaactaaatcg

SEQ ID NO: 304054 - DNA, 12 bp, Artificial Sequence
  Oligonucleotide primer for the detection of SNP TSC0020764
agagtgtggatt

SEQ ID NO: 304055 - DNA, 12 bp, Artificial Sequence
  Oligonucleotide primer for the detection of SNP TSC0020764
agagtgcggatt

SEQ ID NO: 304056 - DNA, 12 bp, Artificial Sequence
  Oligonucleotide primer for the detection of SNP TSC0020764
agagtgtggatc

SEQ ID NO: 304057 - DNA, 12 bp, Artificial Sequence
  Oligonucleotide primer for the detection of SNP TSC0020764
agagtgcggatc

SEQ ID NO: 304058 - DNA, 12 bp, Artificial Sequence
  Oligonucleotide primer for the detection of SNP TSC0020766
actcccaaattc

SEQ ID NO: 304059 - DNA, 12 bp, Artificial Sequence
  Oligonucleotide primer for the detection of SNP TSC0020766
aggtaggagaaa

SEQ ID NO: 304060 - DNA, 12 bp, Artificial Sequence
  Oligonucleotide primer for the detection of SNP TSC0020766
gtttttaggttt

SEQ ID NO: 304061 - DNA, 12 bp, Artificial Sequence
  Oligonucleotide primer for the detection of SNP TSC0020767
acaatctcactc

SEQ ID NO: 304062 - DNA, 12 bp, Artificial Sequence
  Oligonucleotide primer for the detection of SNP TSC0020767
atagttttattt

SEQ ID NO: 304063 - DNA, 12 bp, Artificial Sequence
  Oligonucleotide primer for the detection of SNP TSC0020770
tataaatctcac

SEQ ID NO: 304064 - DNA, 12 bp, Artificial Sequence
  Oligonucleotide primer for the detection of SNP TSC0020770
gaaattaaatta

SEQ ID NO: 304065 - DNA, 12 bp, Artificial Sequence
  Oligonucleotide primer for the detection of SNP TSC0020771
agtaatatattt

SEQ ID NO: 304066 - DNA, 12 bp, Artificial Sequence
  Oligonucleotide primer for the detection of SNP TSC0020771
aacaacacattc

SEQ ID NO: 304067 - DNA, 12 bp, Artificial Sequence
  Oligonucleotide primer for the detection of SNP TSC0020771
tatgagtagaaa

SEQ ID NO: 304068 - DNA, 12 bp, Artificial Sequence
  Oligonucleotide primer for the detection of SNP TSC0020772
tcaaaatcaacc

SEQ ID NO: 304069 - DNA, 12 bp, Artificial Sequence
  Oligonucleotide primer for the detection of SNP TSC0020772
tttgttaggaat

SEQ ID NO: 304070 - DNA, 12 bp, Artificial Sequence
  Oligonucleotide primer for the detection of SNP TSC0020772
tttgttaggaac

SEQ ID NO: 304071 - DNA, 12 bp, Artificial Sequence
  Oligonucleotide primer for the detection of SNP TSC0020772
acctaccaaaaa

SEQ ID NO: 304072 - DNA, 12 bp, Artificial Sequence
  Oligonucleotide primer for the detection of SNP TSC0020772
tagaattagttt

SEQ ID NO: 304073 - DNA, 12 bp, Artificial Sequence
  Oligonucleotide primer for the detection of SNP TSC0020773
gttaagtgtggg

SEQ ID NO: 304074 - DNA, 12 bp, Artificial Sequence
  Oligonucleotide primer for the detection of SNP TSC0020773
accaaatataaa

SEQ ID NO: 304075 - DNA, 12 bp, Artificial Sequence
  Oligonucleotide primer for the detection of SNP TSC0020773
aggtttaggagt

SEQ ID NO: 304076 - DNA, 12 bp, Artificial Sequence
  Oligonucleotide primer for the detection of SNP TSC0020775
taaattaataat

SEQ ID NO: 304077 - DNA, 12 bp, Artificial Sequence
  Oligonucleotide primer for the detection of SNP TSC0020776
aatggagttttt

SEQ ID NO: 304078 - DNA, 12 bp, Artificial Sequence
  Oligonucleotide primer for the detection of SNP TSC0020776
aataaaaccctt

SEQ ID NO: 304079 - DNA, 12 bp, Artificial Sequence
  Oligonucleotide primer for the detection of SNP TSC0020776
agaagaaagata

SEQ ID NO: 304080 - DNA, 12 bp, Artificial Sequence
  Oligonucleotide primer for the detection of SNP TSC0020777
aaacttctatcc

SEQ ID NO: 304081 - DNA, 12 bp, Artificial Sequence
  Oligonucleotide primer for the detection of SNP TSC0020777
gttattttttaa

SEQ ID NO: 304082 - DNA, 12 bp, Artificial Sequence
  Oligonucleotide primer for the detection of SNP TSC0020778
aacccttactat

SEQ ID NO: 304083 - DNA, 12 bp, Artificial Sequence
  Oligonucleotide primer for the detection of SNP TSC0020778
ttagtgtttgta

SEQ ID NO: 304084 - DNA, 12 bp, Artificial Sequence
  Oligonucleotide primer for the detection of SNP TSC0020778
ttagcgtttgta

SEQ ID NO: 304085 - DNA, 12 bp, Artificial Sequence
  Oligonucleotide primer for the detection of SNP TSC0020779
tcttataattta

SEQ ID NO: 304086 - DNA, 12 bp, Artificial Sequence
  Oligonucleotide primer for the detection of SNP TSC0020779
gtaatgattgtt

SEQ ID NO: 304087 - DNA, 12 bp, Artificial Sequence
  Oligonucleotide primer for the detection of SNP TSC0020779
acaataattatc

SEQ ID NO: 304088 - DNA, 12 bp, Artificial Sequence
  Oligonucleotide primer for the detection of SNP TSC0020779
ttttgtaattta

SEQ ID NO: 304089 - DNA, 12 bp, Artificial Sequence
  Oligonucleotide primer for the detection of SNP TSC0020780
atcaaataaact

SEQ ID NO: 304090 - DNA, 12 bp, Artificial Sequence
  Oligonucleotide primer for the detection of SNP TSC0020780
gttttttatgtg

SEQ ID NO: 304091 - DNA, 12 bp, Artificial Sequence
  Oligonucleotide primer for the detection of SNP TSC0020780
actttttatata

SEQ ID NO: 304092 - DNA, 12 bp, Artificial Sequence
  Oligonucleotide primer for the detection of SNP TSC0020780
attaaatgagtt

SEQ ID NO: 304093 - DNA, 12 bp, Artificial Sequence
  Oligonucleotide primer for the detection of SNP TSC0020781
ctactactacta

SEQ ID NO: 304094 - DNA, 12 bp, Artificial Sequence
  Oligonucleotide primer for the detection of SNP TSC0020781
agtagtagtaat

SEQ ID NO: 304095 - DNA, 12 bp, Artificial Sequence
  Oligonucleotide primer for the detection of SNP TSC0020782
aaaaatttatcc

SEQ ID NO: 304096 - DNA, 12 bp, Artificial Sequence
  Oligonucleotide primer for the detection of SNP TSC0020783
atcactactcat

SEQ ID NO: 304097 - DNA, 12 bp, Artificial Sequence
  Oligonucleotide primer for the detection of SNP TSC0020783
atcgctactcat

SEQ ID NO: 304098 - DNA, 12 bp, Artificial Sequence
  Oligonucleotide primer for the detection of SNP TSC0020783
atgtatagttaa

SEQ ID NO: 304099 - DNA, 12 bp, Artificial Sequence
  Oligonucleotide primer for the detection of SNP TSC0020785
aaacctttaaaa

SEQ ID NO: 304100 - DNA, 12 bp, Artificial Sequence
  Oligonucleotide primer for the detection of SNP TSC0020785
tagttttatatt

SEQ ID NO: 304101 - DNA, 12 bp, Artificial Sequence
  Oligonucleotide primer for the detection of SNP TSC0020785
caattttatatt

SEQ ID NO: 304102 - DNA, 12 bp, Artificial Sequence
  Oligonucleotide primer for the detection of SNP TSC0020786
taccacctcccc

SEQ ID NO: 304103 - DNA, 12 bp, Artificial Sequence
  Oligonucleotide primer for the detection of SNP TSC0020786
taccgcctcccc

SEQ ID NO: 304104 - DNA, 12 bp, Artificial Sequence
  Oligonucleotide primer for the detection of SNP TSC0020786
tagtttatgggg

SEQ ID NO: 304105 - DNA, 12 bp, Artificial Sequence
  Oligonucleotide primer for the detection of SNP TSC0020786
tagtttacgggg

SEQ ID NO: 304106 - DNA, 12 bp, Artificial Sequence
  Oligonucleotide primer for the detection of SNP TSC0020786
caactcacaaaa

SEQ ID NO: 304107 - DNA, 12 bp, Artificial Sequence
  Oligonucleotide primer for the detection of SNP TSC0020786
caactcacgaaa

SEQ ID NO: 304108 - DNA, 12 bp, Artificial Sequence
  Oligonucleotide primer for the detection of SNP TSC0020786
tgtcgttttttt

SEQ ID NO: 304109 - DNA, 12 bp, Artificial Sequence
  Oligonucleotide primer for the detection of SNP TSC0020786
tgttgttttttc

SEQ ID NO: 304110 - DNA, 12 bp, Artificial Sequence
  Oligonucleotide primer for the detection of SNP TSC0020786
tgtcgttttttc

SEQ ID NO: 304111 - DNA, 12 bp, Artificial Sequence
  Oligonucleotide primer for the detection of SNP TSC0020787
ctcttctaatcc

SEQ ID NO: 304112 - DNA, 12 bp, Artificial Sequence
  Oligonucleotide primer for the detection of SNP TSC0020787
gttttattgtaa

SEQ ID NO: 304113 - DNA, 12 bp, Artificial Sequence
  Oligonucleotide primer for the detection of SNP TSC0020789
catacacatcaa

SEQ ID NO: 304114 - DNA, 12 bp, Artificial Sequence
  Oligonucleotide primer for the detection of SNP TSC0020789
ttaatttatatt

SEQ ID NO: 304115 - DNA, 12 bp, Artificial Sequence
  Oligonucleotide primer for the detection of SNP TSC0020789
ttaatttacact

SEQ ID NO: 304116 - DNA, 12 bp, Artificial Sequence
  Oligonucleotide primer for the detection of SNP TSC0020790
aaccattattcc

SEQ ID NO: 304117 - DNA, 12 bp, Artificial Sequence
  Oligonucleotide primer for the detection of SNP TSC0020791
accaattctaca

SEQ ID NO: 304118 - DNA, 12 bp, Artificial Sequence
  Oligonucleotide primer for the detection of SNP TSC0020791
tgtatatgttag

SEQ ID NO: 304119 - DNA, 12 bp, Artificial Sequence
  Oligonucleotide primer for the detection of SNP TSC0020791
tacacatatcaa

SEQ ID NO: 304120 - DNA, 12 bp, Artificial Sequence
  Oligonucleotide primer for the detection of SNP TSC0020791
taattttgtatt

SEQ ID NO: 304121 - DNA, 12 bp, Artificial Sequence
  Oligonucleotide primer for the detection of SNP TSC0020792
ttacaaatttac

SEQ ID NO: 304122 - DNA, 12 bp, Artificial Sequence
  Oligonucleotide primer for the detection of SNP TSC0020792
tattgtttatat

SEQ ID NO: 304123 - DNA, 12 bp, Artificial Sequence
  Oligonucleotide primer for the detection of SNP TSC0020792
cattattcacat

SEQ ID NO: 304124 - DNA, 12 bp, Artificial Sequence
  Oligonucleotide primer for the detection of SNP TSC0020792
ttgtagatttat

SEQ ID NO: 304125 - DNA, 12 bp, Artificial Sequence
  Oligonucleotide primer for the detection of SNP TSC0020793
tttcttcacatc

SEQ ID NO: 304126 - DNA, 12 bp, Artificial Sequence
  Oligonucleotide primer for the detection of SNP TSC0020793
tttcttcgcatc

SEQ ID NO: 304127 - DNA, 12 bp, Artificial Sequence
  Oligonukleotid-Primer
tagaggtgttag

SEQ ID NO: 304128 - DNA, 12 bp, Artificial Sequence
  Oligonucleotide primer for the detection of SNP TSC0020794
ctcctccctaca

SEQ ID NO: 304129 - DNA, 12 bp, Artificial Sequence
  Oligonucleotide primer for the detection of SNP TSC0020794
ctcctccctacg

SEQ ID NO: 304130 - DNA, 12 bp, Artificial Sequence
  Oligonucleotide primer for the detection of SNP TSC0020794
agtgaggtaggt

SEQ ID NO: 304131 - DNA, 12 bp, Artificial Sequence
  Oligonucleotide primer for the detection of SNP TSC0020794
tttttttttgcg

SEQ ID NO: 304132 - DNA, 12 bp, Artificial Sequence
  Oligonucleotide primer for the detection of SNP TSC0020795
aaaaacaataac

SEQ ID NO: 304133 - DNA, 12 bp, Artificial Sequence
  Oligonucleotide primer for the detection of SNP TSC0020795
ggttgggtgatg

SEQ ID NO: 304134 - DNA, 12 bp, Artificial Sequence
  Oligonucleotide primer for the detection of SNP TSC0020795
ggttgggtgacg

SEQ ID NO: 304135 - DNA, 12 bp, Artificial Sequence
  Oligonucleotide primer for the detection of SNP TSC0020795
aactaaataaca

SEQ ID NO: 304136 - DNA, 12 bp, Artificial Sequence
  Oligonucleotide primer for the detection of SNP TSC0020795
aactaaataacg

SEQ ID NO: 304137 - DNA, 12 bp, Artificial Sequence
  Oligonucleotide primer for the detection of SNP TSC0020795
ggggatagtgat

SEQ ID NO: 304138 - DNA, 12 bp, Artificial Sequence
  Oligonucleotide primer for the detection of SNP TSC0020795
ggggatagtgac

SEQ ID NO: 304139 - DNA, 12 bp, Artificial Sequence
  Oligonucleotide primer for the detection of SNP TSC0020796
taaacccctaaa

SEQ ID NO: 304140 - DNA, 12 bp, Artificial Sequence
  Oligonucleotide primer for the detection of SNP TSC0020796
tattttggtttt

SEQ ID NO: 304141 - DNA, 12 bp, Artificial Sequence
  Oligonucleotide primer for the detection of SNP TSC0020796
tatttcggtttt

SEQ ID NO: 304142 - DNA, 12 bp, Artificial Sequence
  Oligonucleotide primer for the detection of SNP TSC0020796
caccccaacccc

SEQ ID NO: 304143 - DNA, 12 bp, Artificial Sequence
  Oligonucleotide primer for the detection of SNP TSC0020796
caccccgacccc

SEQ ID NO: 304144 - DNA, 12 bp, Artificial Sequence
  Oligonucleotide primer for the detection of SNP TSC0020796
tggatttttagg

SEQ ID NO: 304145 - DNA, 12 bp, Artificial Sequence
  Oligonucleotide primer for the detection of SNP TSC0020797
cctccaaaaata

SEQ ID NO: 304146 - DNA, 12 bp, Artificial Sequence
  Oligonucleotide primer for the detection of SNP TSC0020797
gtttgtaatttt

SEQ ID NO: 304147 - DNA, 12 bp, Artificial Sequence
  Oligonucleotide primer for the detection of SNP TSC0020797
cctataatccta

SEQ ID NO: 304148 - DNA, 12 bp, Artificial Sequence
  Oligonucleotide primer for the detection of SNP TSC0020797
gtttttaaaagt

SEQ ID NO: 304149 - DNA, 12 bp, Artificial Sequence
  Oligonucleotide primer for the detection of SNP TSC0020798
agtatttagttt

SEQ ID NO: 304150 - DNA, 12 bp, Artificial Sequence
  Oligonucleotide primer for the detection of SNP TSC0020798
aatatttaattt

SEQ ID NO: 304151 - DNA, 12 bp, Artificial Sequence
  Oligonucleotide primer for the detection of SNP TSC0020798
agagaagaggag

SEQ ID NO: 304152 - DNA, 12 bp, Artificial Sequence
  Oligonucleotide primer for the detection of SNP TSC0020799
ccccctataaca

SEQ ID NO: 304153 - DNA, 12 bp, Artificial Sequence
  Oligonucleotide primer for the detection of SNP TSC0020799
tatggggtagat

SEQ ID NO: 304154 - DNA, 12 bp, Artificial Sequence
  Oligonucleotide primer for the detection of SNP TSC0020799
tataaaacaaat

SEQ ID NO: 304155 - DNA, 12 bp, Artificial Sequence
  Oligonucleotide primer for the detection of SNP TSC0020799
ttttttgtgata

SEQ ID NO: 304156 - DNA, 12 bp, Artificial Sequence
  Oligonucleotide primer for the detection of SNP TSC0020803
ctaaaaaactaa

SEQ ID NO: 304157 - DNA, 12 bp, Artificial Sequence
  Oligonucleotide primer for the detection of SNP TSC0020803
tttgttataata

SEQ ID NO: 304158 - DNA, 12 bp, Artificial Sequence
  Oligonucleotide primer for the detection of SNP TSC0020805
tcattcaaccaa

SEQ ID NO: 304159 - DNA, 12 bp, Artificial Sequence
  Oligonucleotide primer for the detection of SNP TSC0020805
gagtttatagat

SEQ ID NO: 304160 - DNA, 12 bp, Artificial Sequence
  Oligonucleotide primer for the detection of SNP TSC0020805
aaacttacaaat

SEQ ID NO: 304161 - DNA, 12 bp, Artificial Sequence
  Oligonucleotide primer for the detection of SNP TSC0020806
atttacacctta

SEQ ID NO: 304162 - DNA, 12 bp, Artificial Sequence
  Oligonucleotide primer for the detection of SNP TSC0020806
atagtttttttc

SEQ ID NO: 304163 - DNA, 12 bp, Artificial Sequence
  Oligonucleotide primer for the detection of SNP TSC0020806
acaacttttccc

SEQ ID NO: 304164 - DNA, 12 bp, Artificial Sequence
  Oligonucleotide primer for the detection of SNP TSC0020806
gtttgtattttg

SEQ ID NO: 304165 - DNA, 12 bp, Artificial Sequence
  Oligonucleotide primer for the detection of SNP TSC0020808
tttttggaagat

SEQ ID NO: 304166 - DNA, 12 bp, Artificial Sequence
  Oligonucleotide primer for the detection of SNP TSC0020809
gtgagttgtgtg

SEQ ID NO: 304167 - DNA, 12 bp, Artificial Sequence
  Oligonucleotide primer for the detection of SNP TSC0020809
ataaactatata

SEQ ID NO: 304168 - DNA, 12 bp, Artificial Sequence
  Oligonucleotide primer for the detection of SNP TSC0020810
aaaaacaaatcc

SEQ ID NO: 304169 - DNA, 12 bp, Artificial Sequence
  Oligonucleotide primer for the detection of SNP TSC0020810
aaaaacgaatcc

SEQ ID NO: 304170 - DNA, 12 bp, Artificial Sequence
  Oligonucleotide primer for the detection of SNP TSC0020810
agttttacgttg

SEQ ID NO: 304171 - DNA, 12 bp, Artificial Sequence
  Oligonucleotide primer for the detection of SNP TSC0020811
acaaacaaaaaa

SEQ ID NO: 304172 - DNA, 12 bp, Artificial Sequence
  Oligonucleotide primer for the detection of SNP TSC0020811
acgaacaaaaaa

SEQ ID NO: 304173 - DNA, 12 bp, Artificial Sequence
  Oligonucleotide primer for the detection of SNP TSC0020811
ggtgtgttgtgt

SEQ ID NO: 304174 - DNA, 12 bp, Artificial Sequence
  Oligonucleotide primer for the detection of SNP TSC0020811
ggcgtgttgtgt

SEQ ID NO: 304175 - DNA, 12 bp, Artificial Sequence
  Oligonucleotide primer for the detection of SNP TSC0020811
ggtgcgttgtgt

SEQ ID NO: 304176 - DNA, 12 bp, Artificial Sequence
  Oligonucleotide primer for the detection of SNP TSC0020811
ggtgtgttgcgt

SEQ ID NO: 304177 - DNA, 12 bp, Artificial Sequence
  Oligonucleotide primer for the detection of SNP TSC0020811
ggcgcgttgtgt

SEQ ID NO: 304178 - DNA, 12 bp, Artificial Sequence
  Oligonucleotide primer for the detection of SNP TSC0020811
ggcgtgttgcgt

SEQ ID NO: 304179 - DNA, 12 bp, Artificial Sequence
  Oligonucleotide primer for the detection of SNP TSC0020811
ggtgcgttgcgt

SEQ ID NO: 304180 - DNA, 12 bp, Artificial Sequence
  Oligonucleotide primer for the detection of SNP TSC0020811
ggcgcgttgcgt

SEQ ID NO: 304181 - DNA, 12 bp, Artificial Sequence
  Oligonucleotide primer for the detection of SNP TSC0020811
acacactacata

SEQ ID NO: 304182 - DNA, 12 bp, Artificial Sequence
  Oligonucleotide primer for the detection of SNP TSC0020811
acacactacgta

SEQ ID NO: 304183 - DNA, 12 bp, Artificial Sequence
  Oligonucleotide primer for the detection of SNP TSC0020811
acacgctacata

SEQ ID NO: 304184 - DNA, 12 bp, Artificial Sequence
  Oligonucleotide primer for the detection of SNP TSC0020811
acgcactacata

SEQ ID NO: 304185 - DNA, 12 bp, Artificial Sequence
  Oligonucleotide primer for the detection of SNP TSC0020811
acacgctacgta

SEQ ID NO: 304186 - DNA, 12 bp, Artificial Sequence
  Oligonucleotide primer for the detection of SNP TSC0020811
acgcactacgta

SEQ ID NO: 304187 - DNA, 12 bp, Artificial Sequence
  Oligonucleotide primer for the detection of SNP TSC0020811
acgcgctacata

SEQ ID NO: 304188 - DNA, 12 bp, Artificial Sequence
  Oligonucleotide primer for the detection of SNP TSC0020811
acgcgctacgta

SEQ ID NO: 304189 - DNA, 12 bp, Artificial Sequence
  Oligonucleotide primer for the detection of SNP TSC0020811
tgggtagagggt

SEQ ID NO: 304190 - DNA, 12 bp, Artificial Sequence
  Oligonucleotide primer for the detection of SNP TSC0020811
cgggtagagggt

SEQ ID NO: 304191 - DNA, 12 bp, Artificial Sequence
  Oligonucleotide primer for the detection of SNP TSC0020812
ataaatattatc

SEQ ID NO: 304192 - DNA, 12 bp, Artificial Sequence
  Oligonucleotide primer for the detection of SNP TSC0020812
aaaattagttta

SEQ ID NO: 304193 - DNA, 12 bp, Artificial Sequence
  Oligonucleotide primer for the detection of SNP TSC0020813
aaaaatcactaa

SEQ ID NO: 304194 - DNA, 12 bp, Artificial Sequence
  Oligonucleotide primer for the detection of SNP TSC0020813
tttgtgttatat

SEQ ID NO: 304195 - DNA, 12 bp, Artificial Sequence
  Oligonucleotide primer for the detection of SNP TSC0020813
ttcgtgttatat

SEQ ID NO: 304196 - DNA, 12 bp, Artificial Sequence
  Oligonucleotide primer for the detection of SNP TSC0020813
tcataccacaca

SEQ ID NO: 304197 - DNA, 12 bp, Artificial Sequence
  Oligonucleotide primer for the detection of SNP TSC0020813
tcgtaccacaca

SEQ ID NO: 304198 - DNA, 12 bp, Artificial Sequence
  Oligonucleotide primer for the detection of SNP TSC0020813
aagattattagt

SEQ ID NO: 304199 - DNA, 12 bp, Artificial Sequence
  Oligonucleotide primer for the detection of SNP TSC0020814
ttactattttac

SEQ ID NO: 304200 - DNA, 12 bp, Artificial Sequence
  Oligonucleotide primer for the detection of SNP TSC0020814
aagattagtttg

SEQ ID NO: 304201 - DNA, 12 bp, Artificial Sequence
  Oligonucleotide primer for the detection of SNP TSC0020815
ctaaataccctc

SEQ ID NO: 304202 - DNA, 12 bp, Artificial Sequence
  Oligonucleotide primer for the detection of SNP TSC0020815
ggtgtgtattta

SEQ ID NO: 304203 - DNA, 12 bp, Artificial Sequence
  Oligonucleotide primer for the detection of SNP TSC0020816
tcccatacttat

SEQ ID NO: 304204 - DNA, 12 bp, Artificial Sequence
  Oligonucleotide primer for the detection of SNP TSC0020816
tgttagttttaa

SEQ ID NO: 304205 - DNA, 12 bp, Artificial Sequence
  Oligonucleotide primer for the detection of SNP TSC0020817
taacaaaaaata

SEQ ID NO: 304206 - DNA, 12 bp, Artificial Sequence
  Oligonucleotide primer for the detection of SNP TSC0020817
gtttgttatatt

SEQ ID NO: 304207 - DNA, 12 bp, Artificial Sequence
  Oligonucleotide primer for the detection of SNP TSC0020817
acctaccacacc

SEQ ID NO: 304208 - DNA, 12 bp, Artificial Sequence
  Oligonucleotide primer for the detection of SNP TSC0020817
tgatagagggtg

SEQ ID NO: 304209 - DNA, 12 bp, Artificial Sequence
  Oligonucleotide primer for the detection of SNP TSC0020818
tcaaactaatct

SEQ ID NO: 304210 - DNA, 12 bp, Artificial Sequence
  Oligonucleotide primer for the detection of SNP TSC0020822
aaaaatccattc

SEQ ID NO: 304211 - DNA, 12 bp, Artificial Sequence
  Oligonucleotide primer for the detection of SNP TSC0020822
ggttaggtaaaa

SEQ ID NO: 304212 - DNA, 12 bp, Artificial Sequence
  Oligonucleotide primer for the detection of SNP TSC0020823
cattcccctatc

SEQ ID NO: 304213 - DNA, 12 bp, Artificial Sequence
  Oligonucleotide primer for the detection of SNP TSC0020823
cgttcccctatc

SEQ ID NO: 304214 - DNA, 12 bp, Artificial Sequence
  Oligonucleotide primer for the detection of SNP TSC0020823
ggtgttttgtga

SEQ ID NO: 304215 - DNA, 12 bp, Artificial Sequence
  Oligonucleotide primer for the detection of SNP TSC0020823
aatatcctataa

SEQ ID NO: 304216 - DNA, 12 bp, Artificial Sequence
  Oligonucleotide primer for the detection of SNP TSC0020823
cgtttttttgtt

SEQ ID NO: 304217 - DNA, 12 bp, Artificial Sequence
  Oligonucleotide primer for the detection of SNP TSC0020824
cataataactcc

SEQ ID NO: 304218 - DNA, 12 bp, Artificial Sequence
  Oligonucleotide primer for the detection of SNP TSC0020824
cgtaataactcc

SEQ ID NO: 304219 - DNA, 12 bp, Artificial Sequence
  Oligonucleotide primer for the detection of SNP TSC0020824
tgtggtggtttt

SEQ ID NO: 304220 - DNA, 12 bp, Artificial Sequence
  Oligonucleotide primer for the detection of SNP TSC0020824
cgtggtggtttt

SEQ ID NO: 304221 - DNA, 12 bp, Artificial Sequence
  Oligonucleotide primer for the detection of SNP TSC0020826
ctaaattataca

SEQ ID NO: 304222 - DNA, 12 bp, Artificial Sequence
  Oligonucleotide primer for the detection of SNP TSC0020826
tttacatcccac

SEQ ID NO: 304223 - DNA, 12 bp, Artificial Sequence
  Oligonucleotide primer for the detection of SNP TSC0020826
attgagttgtgt

SEQ ID NO: 304224 - DNA, 12 bp, Artificial Sequence
  Oligonucleotide primer for the detection of SNP TSC0020829
caatacaaacca

SEQ ID NO: 304225 - DNA, 12 bp, Artificial Sequence
  Oligonucleotide primer for the detection of SNP TSC0020829
caatacaaaccg

SEQ ID NO: 304226 - DNA, 12 bp, Artificial Sequence
  Oligonucleotide primer for the detection of SNP TSC0020829
cgatacaaacca

SEQ ID NO: 304227 - DNA, 12 bp, Artificial Sequence
  Oligonucleotide primer for the detection of SNP TSC0020829
cgatacaaaccg

SEQ ID NO: 304228 - DNA, 12 bp, Artificial Sequence
  Oligonucleotide primer for the detection of SNP TSC0020829
atggtagtattt

SEQ ID NO: 304229 - DNA, 12 bp, Artificial Sequence
  Oligonucleotide primer for the detection of SNP TSC0020829
acggtagtattt

SEQ ID NO: 304230 - DNA, 12 bp, Artificial Sequence
  Oligonucleotide primer for the detection of SNP TSC0020829
acaacaacacct

SEQ ID NO: 304231 - DNA, 12 bp, Artificial Sequence
  Oligonucleotide primer for the detection of SNP TSC0020829
acgacaacacct

SEQ ID NO: 304232 - DNA, 12 bp, Artificial Sequence
  Oligonucleotide primer for the detection of SNP TSC0020829
atggtataggtt

SEQ ID NO: 304233 - DNA, 12 bp, Artificial Sequence
  Oligonucleotide primer for the detection of SNP TSC0020829
acggtataggtt

SEQ ID NO: 304234 - DNA, 12 bp, Artificial Sequence
  Oligonucleotide primer for the detection of SNP TSC0020829
atggtataggtc

SEQ ID NO: 304235 - DNA, 12 bp, Artificial Sequence
  Oligonucleotide primer for the detection of SNP TSC0020829
acggtataggtc

SEQ ID NO: 304236 - DNA, 12 bp, Artificial Sequence
  Oligonucleotide primer for the detection of SNP TSC0020830
attttttgtgtt

SEQ ID NO: 304237 - DNA, 12 bp, Artificial Sequence
  Oligonucleotide primer for the detection of SNP TSC0020830
actctctatacc

SEQ ID NO: 304238 - DNA, 12 bp, Artificial Sequence
  Oligonucleotide primer for the detection of SNP TSC0020830
attttggtaagg

SEQ ID NO: 304239 - DNA, 12 bp, Artificial Sequence
  Oligonucleotide primer for the detection of SNP TSC0020831
ccaaaaaactat

SEQ ID NO: 304240 - DNA, 12 bp, Artificial Sequence
  Oligonucleotide primer for the detection of SNP TSC0020831
aaatatatagag

SEQ ID NO: 304241 - DNA, 12 bp, Artificial Sequence
  Oligonucleotide primer for the detection of SNP TSC0020834
acaaaaactaca

SEQ ID NO: 304242 - DNA, 12 bp, Artificial Sequence
  Oligonucleotide primer for the detection of SNP TSC0020834
atttatttagtt

SEQ ID NO: 304243 - DNA, 12 bp, Artificial Sequence
  Oligonucleotide primer for the detection of SNP TSC0020834
acccactcaatc

SEQ ID NO: 304244 - DNA, 12 bp, Artificial Sequence
  Oligonucleotide primer for the detection of SNP TSC0020834
gataggggttat

SEQ ID NO: 304245 - DNA, 12 bp, Artificial Sequence
  Oligonucleotide primer for the detection of SNP TSC0020835
actcataattat

SEQ ID NO: 304246 - DNA, 12 bp, Artificial Sequence
  Oligonucleotide primer for the detection of SNP TSC0020835
aggaatgttgta

SEQ ID NO: 304247 - DNA, 12 bp, Artificial Sequence
  Oligonucleotide primer for the detection of SNP TSC0020836
aaatcaccaaaa

SEQ ID NO: 304248 - DNA, 12 bp, Artificial Sequence
  Oligonucleotide primer for the detection of SNP TSC0020836
ggattattaaag

SEQ ID NO: 304249 - DNA, 12 bp, Artificial Sequence
  Oligonucleotide primer for the detection of SNP TSC0020837
ccaaaacctatt

SEQ ID NO: 304250 - DNA, 12 bp, Artificial Sequence
  Oligonucleotide primer for the detection of SNP TSC0020838
cattacccaaat

SEQ ID NO: 304251 - DNA, 12 bp, Artificial Sequence
  Oligonucleotide primer for the detection of SNP TSC0020838
agttgtttaatg

SEQ ID NO: 304252 - DNA, 12 bp, Artificial Sequence
  Oligonucleotide primer for the detection of SNP TSC0020838
agtcgtttaatg

SEQ ID NO: 304253 - DNA, 12 bp, Artificial Sequence
  Oligonucleotide primer for the detection of SNP TSC0020838
aatcactcaata

SEQ ID NO: 304254 - DNA, 12 bp, Artificial Sequence
  Oligonucleotide primer for the detection of SNP TSC0020838
aatcgctcaata

SEQ ID NO: 304255 - DNA, 12 bp, Artificial Sequence
  Oligonucleotide primer for the detection of SNP TSC0020838
tattgtttaagt

SEQ ID NO: 304256 - DNA, 12 bp, Artificial Sequence
  Oligonucleotide primer for the detection of SNP TSC0020839
aaaatcttttat

SEQ ID NO: 304257 - DNA, 12 bp, Artificial Sequence
  Oligonucleotide primer for the detection of SNP TSC0020839
tagatttgtttg

SEQ ID NO: 304258 - DNA, 12 bp, Artificial Sequence
  Oligonucleotide primer for the detection of SNP TSC0020839
tagattcgtttg

SEQ ID NO: 304259 - DNA, 12 bp, Artificial Sequence
  Oligonucleotide primer for the detection of SNP TSC0020840
tatgattttaga

SEQ ID NO: 304260 - DNA, 12 bp, Artificial Sequence
  Oligonucleotide primer for the detection of SNP TSC0020840
tacgattttaga

SEQ ID NO: 304261 - DNA, 12 bp, Artificial Sequence
  Oligonucleotide primer for the detection of SNP TSC0020841
aaactttttcca

SEQ ID NO: 304262 - DNA, 12 bp, Artificial Sequence
  Oligonucleotide primer for the detection of SNP TSC0020841
ttttttgggatt

SEQ ID NO: 304263 - DNA, 12 bp, Artificial Sequence
  Oligonucleotide primer for the detection of SNP TSC0020841
ttttttgggatc

SEQ ID NO: 304264 - DNA, 12 bp, Artificial Sequence
  Oligonucleotide primer for the detection of SNP TSC0020841
atcctctaaaat

SEQ ID NO: 304265 - DNA, 12 bp, Artificial Sequence
  Oligonucleotide primer for the detection of SNP TSC0020842
acttaaattcaa

SEQ ID NO: 304266 - DNA, 12 bp, Artificial Sequence
  Oligonucleotide primer for the detection of SNP TSC0020842
gaagatttatgt

SEQ ID NO: 304267 - DNA, 12 bp, Artificial Sequence
  Oligonucleotide primer for the detection of SNP TSC0020842
aaaatttatata

SEQ ID NO: 304268 - DNA, 12 bp, Artificial Sequence
  Oligonucleotide primer for the detection of SNP TSC0020842
tttgaatttagt

SEQ ID NO: 304269 - DNA, 12 bp, Artificial Sequence
  Oligonukleotid-Primer
aattatttaact

SEQ ID NO: 304270 - DNA, 12 bp, Artificial Sequence
  Oligonucleotide primer for the detection of SNP TSC0020844
ttttgggatgga

SEQ ID NO: 304271 - DNA, 12 bp, Artificial Sequence
  Oligonucleotide primer for the detection of SNP TSC0020845
aacatttaaatc

SEQ ID NO: 304272 - DNA, 12 bp, Artificial Sequence
  Oligonucleotide primer for the detection of SNP TSC0020845
aacgtttaaatc

SEQ ID NO: 304273 - DNA, 12 bp, Artificial Sequence
  Oligonucleotide primer for the detection of SNP TSC0020845
gtttttttatga

SEQ ID NO: 304274 - DNA, 12 bp, Artificial Sequence
  Oligonucleotide primer for the detection of SNP TSC0020845
acctctctataa

SEQ ID NO: 304275 - DNA, 12 bp, Artificial Sequence
  Oligonucleotide primer for the detection of SNP TSC0020845
ggtgtttgaatt

SEQ ID NO: 304276 - DNA, 12 bp, Artificial Sequence
  Oligonucleotide primer for the detection of SNP TSC0020845
ggcgtttgaatt

SEQ ID NO: 304277 - DNA, 12 bp, Artificial Sequence
  Oligonucleotide primer for the detection of SNP TSC0020846
taattacaaatc

SEQ ID NO: 304278 - DNA, 12 bp, Artificial Sequence
  Oligonucleotide primer for the detection of SNP TSC0020846
ttagaattagtg

SEQ ID NO: 304279 - DNA, 12 bp, Artificial Sequence
  Oligonucleotide primer for the detection of SNP TSC0020847
acatatattatt

SEQ ID NO: 304280 - DNA, 12 bp, Artificial Sequence
  Oligonucleotide primer for the detection of SNP TSC0020848
aaactcataatt

SEQ ID NO: 304281 - DNA, 12 bp, Artificial Sequence
  Oligonucleotide primer for the detection of SNP TSC0020848
aaggattaaatt

SEQ ID NO: 304282 - DNA, 12 bp, Artificial Sequence
  Oligonucleotide primer for the detection of SNP TSC0020849
tactttcctctt

SEQ ID NO: 304283 - DNA, 12 bp, Artificial Sequence
  Oligonucleotide primer for the detection of SNP TSC0020849
agagatgtagtg

SEQ ID NO: 304284 - DNA, 12 bp, Artificial Sequence
  Oligonucleotide primer for the detection of SNP TSC0020850
acctaataaaaa

SEQ ID NO: 304285 - DNA, 12 bp, Artificial Sequence
  Oligonucleotide primer for the detection of SNP TSC0020850
ttgtttttgtgt

SEQ ID NO: 304286 - DNA, 12 bp, Artificial Sequence
  Oligonucleotide primer for the detection of SNP TSC0020850
ttgtttttgcgt

SEQ ID NO: 304287 - DNA, 12 bp, Artificial Sequence
  Oligonucleotide primer for the detection of SNP TSC0020850
ttatccctacac

SEQ ID NO: 304288 - DNA, 12 bp, Artificial Sequence
  Oligonucleotide primer for the detection of SNP TSC0020850
ttatccctacgc

SEQ ID NO: 304289 - DNA, 12 bp, Artificial Sequence
  Oligonucleotide primer for the detection of SNP TSC0020850
agaatttaatgg

SEQ ID NO: 304290 - DNA, 12 bp, Artificial Sequence
  Oligonucleotide primer for the detection of SNP TSC0020851
ttaatttttgaa

SEQ ID NO: 304291 - DNA, 12 bp, Artificial Sequence
  Oligonucleotide primer for the detection of SNP TSC0020854
aaaacaacaact

SEQ ID NO: 304292 - DNA, 12 bp, Artificial Sequence
  Oligonucleotide primer for the detection of SNP TSC0020855
atccaaattacc

SEQ ID NO: 304293 - DNA, 12 bp, Artificial Sequence
  Oligonucleotide primer for the detection of SNP TSC0020855
tttaagattttg

SEQ ID NO: 304294 - DNA, 12 bp, Artificial Sequence
  Oligonucleotide primer for the detection of SNP TSC0020856
aacctaatcttt

SEQ ID NO: 304295 - DNA, 12 bp, Artificial Sequence
  Oligonucleotide primer for the detection of SNP TSC0020856
ttagggaagaga

SEQ ID NO: 304296 - DNA, 12 bp, Artificial Sequence
  Oligonucleotide primer for the detection of SNP TSC0020859
ataatctcctac

SEQ ID NO: 304297 - DNA, 12 bp, Artificial Sequence
  Oligonucleotide primer for the detection of SNP TSC0020859
aaggagatgggg

SEQ ID NO: 304298 - DNA, 12 bp, Artificial Sequence
  Oligonucleotide primer for the detection of SNP TSC0020859
aaggagacgggg

SEQ ID NO: 304299 - DNA, 12 bp, Artificial Sequence
  Oligonucleotide primer for the detection of SNP TSC0020860
ccaactaacaca

SEQ ID NO: 304300 - DNA, 12 bp, Artificial Sequence
  Oligonucleotide primer for the detection of SNP TSC0020860
ccgactaacaca

SEQ ID NO: 304301 - DNA, 12 bp, Artificial Sequence
  Oligonucleotide primer for the detection of SNP TSC0020860
tgggttattatt

SEQ ID NO: 304302 - DNA, 12 bp, Artificial Sequence
  Oligonucleotide primer for the detection of SNP TSC0020860
taaatcaccacc

SEQ ID NO: 304303 - DNA, 12 bp, Artificial Sequence
  Oligonucleotide primer for the detection of SNP TSC0020860
ttggttagtata

SEQ ID NO: 304304 - DNA, 12 bp, Artificial Sequence
  Oligonucleotide primer for the detection of SNP TSC0020860
tcggttagtata

SEQ ID NO: 304305 - DNA, 12 bp, Artificial Sequence
  Oligonucleotide primer for the detection of SNP TSC0020862
taaaaaaccata

SEQ ID NO: 304306 - DNA, 12 bp, Artificial Sequence
  Oligonucleotide primer for the detection of SNP TSC0020862
tttgtgtttggt

SEQ ID NO: 304307 - DNA, 12 bp, Artificial Sequence
  Oligonucleotide primer for the detection of SNP TSC0020862
tttgtgtttggc

SEQ ID NO: 304308 - DNA, 12 bp, Artificial Sequence
  Oligonucleotide primer for the detection of SNP TSC0020862
cttatatctaac

SEQ ID NO: 304309 - DNA, 12 bp, Artificial Sequence
  Oligonucleotide primer for the detection of SNP TSC0020862
tggagggttatg

SEQ ID NO: 304310 - DNA, 12 bp, Artificial Sequence
  Oligonucleotide primer for the detection of SNP TSC0020863
cctataactata

SEQ ID NO: 304311 - DNA, 12 bp, Artificial Sequence
  Oligonucleotide primer for the detection of SNP TSC0020863
gaaattatgagt

SEQ ID NO: 304312 - DNA, 12 bp, Artificial Sequence
  Oligonucleotide primer for the detection of SNP TSC0020863
gaaattacgagt

SEQ ID NO: 304313 - DNA, 12 bp, Artificial Sequence
  Oligonucleotide primer for the detection of SNP TSC0020863
aaaaccacaaac

SEQ ID NO: 304314 - DNA, 12 bp, Artificial Sequence
  Oligonucleotide primer for the detection of SNP TSC0020863
aaaaccacgaac

SEQ ID NO: 304315 - DNA, 12 bp, Artificial Sequence
  Oligonucleotide primer for the detection of SNP TSC0020863
tttgtggttgtg

SEQ ID NO: 304316 - DNA, 12 bp, Artificial Sequence
  Oligonucleotide primer for the detection of SNP TSC0020865
tcaaataattat

SEQ ID NO: 304317 - DNA, 12 bp, Artificial Sequence
  Oligonucleotide primer for the detection of SNP TSC0020865
tgtttttaagga

SEQ ID NO: 304318 - DNA, 12 bp, Artificial Sequence
  Oligonucleotide primer for the detection of SNP TSC0020868
tgttttttggaa

SEQ ID NO: 304319 - DNA, 12 bp, Artificial Sequence
  Oligonucleotide primer for the detection of SNP TSC0020868
tattctttaaaa

SEQ ID NO: 304320 - DNA, 12 bp, Artificial Sequence
  Oligonucleotide primer for the detection of SNP TSC0020868
tgaataaataat

SEQ ID NO: 304321 - DNA, 12 bp, Artificial Sequence
  Oligonucleotide primer for the detection of SNP TSC0020870
ccacaaataacc

SEQ ID NO: 304322 - DNA, 12 bp, Artificial Sequence
  Oligonucleotide primer for the detection of SNP TSC0020870
ataaattattaa

SEQ ID NO: 304323 - DNA, 12 bp, Artificial Sequence
  Oligonucleotide primer for the detection of SNP TSC0020870
ataaactattaa

SEQ ID NO: 304324 - DNA, 12 bp, Artificial Sequence
  Oligonucleotide primer for the detection of SNP TSC0020870
ttataggtaatt

SEQ ID NO: 304325 - DNA, 12 bp, Artificial Sequence
  Oligonucleotide primer for the detection of SNP TSC0020871
ccacttctaaac

SEQ ID NO: 304326 - DNA, 12 bp, Artificial Sequence
  Oligonucleotide primer for the detection of SNP TSC0020871
ccgcttctaaac

SEQ ID NO: 304327 - DNA, 12 bp, Artificial Sequence
  Oligonucleotide primer for the detection of SNP TSC0020871
ttgtttttaggt

SEQ ID NO: 304328 - DNA, 12 bp, Artificial Sequence
  Oligonucleotide primer for the detection of SNP TSC0020871
tcgtttttaggt

SEQ ID NO: 304329 - DNA, 12 bp, Artificial Sequence
  Oligonucleotide primer for the detection of SNP TSC0020872
tttaaggatgaa

SEQ ID NO: 304330 - DNA, 12 bp, Artificial Sequence
  Oligonucleotide primer for the detection of SNP TSC0020872
gaaaaaaaattt

SEQ ID NO: 304331 - DNA, 12 bp, Artificial Sequence
  Oligonucleotide primer for the detection of SNP TSC0020873
aaaactctacct

SEQ ID NO: 304332 - DNA, 12 bp, Artificial Sequence
  Oligonucleotide primer for the detection of SNP TSC0020873
tgaagttagtta

SEQ ID NO: 304333 - DNA, 12 bp, Artificial Sequence
  Oligonucleotide primer for the detection of SNP TSC0020873
cgaagttagtta

SEQ ID NO: 304334 - DNA, 12 bp, Artificial Sequence
  Oligonucleotide primer for the detection of SNP TSC0020875
tacaaccataca

SEQ ID NO: 304335 - DNA, 12 bp, Artificial Sequence
  Oligonucleotide primer for the detection of SNP TSC0020875
tacaaccatacg

SEQ ID NO: 304336 - DNA, 12 bp, Artificial Sequence
  Oligonucleotide primer for the detection of SNP TSC0020875
tgtttaaagatt

SEQ ID NO: 304337 - DNA, 12 bp, Artificial Sequence
  Oligonucleotide primer for the detection of SNP TSC0020875
tattcaaaaact

SEQ ID NO: 304338 - DNA, 12 bp, Artificial Sequence
  Oligonucleotide primer for the detection of SNP TSC0020875
ttatagttatgt

SEQ ID NO: 304339 - DNA, 12 bp, Artificial Sequence
  Oligonucleotide primer for the detection of SNP TSC0020875
ttatagttatgc

SEQ ID NO: 304340 - DNA, 12 bp, Artificial Sequence
  Oligonucleotide primer for the detection of SNP TSC0020876
taccaccatatt

SEQ ID NO: 304341 - DNA, 12 bp, Artificial Sequence
  Oligonucleotide primer for the detection of SNP TSC0020876
taccgccatatt

SEQ ID NO: 304342 - DNA, 12 bp, Artificial Sequence
  Oligonucleotide primer for the detection of SNP TSC0020876
atgaagttaggg

SEQ ID NO: 304343 - DNA, 12 bp, Artificial Sequence
  Oligonucleotide primer for the detection of SNP TSC0020879
caaaaacttccc

SEQ ID NO: 304344 - DNA, 12 bp, Artificial Sequence
  Oligonucleotide primer for the detection of SNP TSC0020879
aaaaggggtttt

SEQ ID NO: 304345 - DNA, 12 bp, Artificial Sequence
  Oligonucleotide primer for the detection of SNP TSC0020879
taaaaatttttt

SEQ ID NO: 304346 - DNA, 12 bp, Artificial Sequence
  Oligonucleotide primer for the detection of SNP TSC0020879
taaaaatttttc

SEQ ID NO: 304347 - DNA, 12 bp, Artificial Sequence
  Oligonucleotide primer for the detection of SNP TSC0020881
tacaaactaaca

SEQ ID NO: 304348 - DNA, 12 bp, Artificial Sequence
  Oligonucleotide primer for the detection of SNP TSC0020881
ctccccttacta

SEQ ID NO: 304349 - DNA, 12 bp, Artificial Sequence
  Oligonucleotide primer for the detection of SNP TSC0020881
ttgtaggttagt

SEQ ID NO: 304350 - DNA, 12 bp, Artificial Sequence
  Oligonucleotide primer for the detection of SNP TSC0020883
ccccctatcaaa

SEQ ID NO: 304351 - DNA, 12 bp, Artificial Sequence
  Oligonucleotide primer for the detection of SNP TSC0020883
gttttttttatt

SEQ ID NO: 304352 - DNA, 12 bp, Artificial Sequence
  Oligonucleotide primer for the detection of SNP TSC0020883
gttttttttatc

SEQ ID NO: 304353 - DNA, 12 bp, Artificial Sequence
  Oligonucleotide primer for the detection of SNP TSC0020883
aatctttcccat

SEQ ID NO: 304354 - DNA, 12 bp, Artificial Sequence
  Oligonukleotid-Primer
tttttgttaggt

SEQ ID NO: 304355 - DNA, 12 bp, Artificial Sequence
  Oligonucleotide primer for the detection of SNP TSC0020884
aaaacacaaccc

SEQ ID NO: 304356 - DNA, 12 bp, Artificial Sequence
  Oligonucleotide primer for the detection of SNP TSC0020884
gaaacacaaccc

SEQ ID NO: 304357 - DNA, 12 bp, Artificial Sequence
  Oligonucleotide primer for the detection of SNP TSC0020884
tcgatttgatag

SEQ ID NO: 304358 - DNA, 12 bp, Artificial Sequence
  Oligonucleotide primer for the detection of SNP TSC0020884
tcaacctaacaa

SEQ ID NO: 304359 - DNA, 12 bp, Artificial Sequence
  Oligonucleotide primer for the detection of SNP TSC0020884
tcgacctaacaa

SEQ ID NO: 304360 - DNA, 12 bp, Artificial Sequence
  Oligonucleotide primer for the detection of SNP TSC0020884
ggggtatagttt

SEQ ID NO: 304361 - DNA, 12 bp, Artificial Sequence
  Oligonucleotide primer for the detection of SNP TSC0020886
aatttaaacatt

SEQ ID NO: 304362 - DNA, 12 bp, Artificial Sequence
  Oligonucleotide primer for the detection of SNP TSC0020886
tgtaaagttata

SEQ ID NO: 304363 - DNA, 12 bp, Artificial Sequence
  Oligonucleotide primer for the detection of SNP TSC0020887
ttaacatttctc

SEQ ID NO: 304364 - DNA, 12 bp, Artificial Sequence
  Oligonucleotide primer for the detection of SNP TSC0020887
attgttgggtta

SEQ ID NO: 304365 - DNA, 12 bp, Artificial Sequence
  Oligonucleotide primer for the detection of SNP TSC0020888
tatgagggttgt

SEQ ID NO: 304366 - DNA, 12 bp, Artificial Sequence
  Oligonucleotide primer for the detection of SNP TSC0020888
cataaaaattac

SEQ ID NO: 304367 - DNA, 12 bp, Artificial Sequence
  Oligonucleotide primer for the detection of SNP TSC0020888
taaatttgatag

SEQ ID NO: 304368 - DNA, 12 bp, Artificial Sequence
  Oligonucleotide primer for the detection of SNP TSC0020889
aaaactcttaaa

SEQ ID NO: 304369 - DNA, 12 bp, Artificial Sequence
  Oligonucleotide primer for the detection of SNP TSC0020889
gaaactcttaaa

SEQ ID NO: 304370 - DNA, 12 bp, Artificial Sequence
  Oligonucleotide primer for the detection of SNP TSC0020889
tggttgttatgt

SEQ ID NO: 304371 - DNA, 12 bp, Artificial Sequence
  Oligonucleotide primer for the detection of SNP TSC0020889
ataactaccata

SEQ ID NO: 304372 - DNA, 12 bp, Artificial Sequence
  Oligonucleotide primer for the detection of SNP TSC0020889
tgaagtttttga

SEQ ID NO: 304373 - DNA, 12 bp, Artificial Sequence
  Oligonucleotide primer for the detection of SNP TSC0020889
cgaagtttttga

SEQ ID NO: 304374 - DNA, 12 bp, Artificial Sequence
  Oligonucleotide primer for the detection of SNP TSC0020890
taataaaatact

SEQ ID NO: 304375 - DNA, 12 bp, Artificial Sequence
  Oligonucleotide primer for the detection of SNP TSC0020890
gttaggagatag

SEQ ID NO: 304376 - DNA, 12 bp, Artificial Sequence
  Oligonucleotide primer for the detection of SNP TSC0020892
tccatatctcct

SEQ ID NO: 304377 - DNA, 12 bp, Artificial Sequence
  Oligonucleotide primer for the detection of SNP TSC0020892
tagtattatttt

SEQ ID NO: 304378 - DNA, 12 bp, Artificial Sequence
  Oligonucleotide primer for the detection of SNP TSC0020892
aaaacaacacta

SEQ ID NO: 304379 - DNA, 12 bp, Artificial Sequence
  Oligonucleotide primer for the detection of SNP TSC0020894
ttattttacaac

SEQ ID NO: 304380 - DNA, 12 bp, Artificial Sequence
  Oligonucleotide primer for the detection of SNP TSC0020894
gtgtattagtta

SEQ ID NO: 304381 - DNA, 12 bp, Artificial Sequence
  Oligonucleotide primer for the detection of SNP TSC0020895
tataatttaaat

SEQ ID NO: 304382 - DNA, 12 bp, Artificial Sequence
  Oligonucleotide primer for the detection of SNP TSC0020895
ctataatctaaa

SEQ ID NO: 304383 - DNA, 12 bp, Artificial Sequence
  Oligonucleotide primer for the detection of SNP TSC0020895
ttaagttgtttt

SEQ ID NO: 304384 - DNA, 12 bp, Artificial Sequence
  Oligonucleotide primer for the detection of SNP TSC0020896
aaacactttttc

SEQ ID NO: 304385 - DNA, 12 bp, Artificial Sequence
  Oligonucleotide primer for the detection of SNP TSC0020896
aaacgctttttc

SEQ ID NO: 304386 - DNA, 12 bp, Artificial Sequence
  Oligonucleotide primer for the detection of SNP TSC0020896
atttttgtagag

SEQ ID NO: 304387 - DNA, 12 bp, Artificial Sequence
  Oligonucleotide primer for the detection of SNP TSC0020897
aaaactacaatt

SEQ ID NO: 304388 - DNA, 12 bp, Artificial Sequence
  Oligonucleotide primer for the detection of SNP TSC0020898
tttaaagtattg

SEQ ID NO: 304389 - DNA, 12 bp, Artificial Sequence
  Oligonucleotide primer for the detection of SNP TSC0020898
tccaaaacatta

SEQ ID NO: 304390 - DNA, 12 bp, Artificial Sequence
  Oligonucleotide primer for the detection of SNP TSC0020898
aaaaagaaagaa

SEQ ID NO: 304391 - DNA, 12 bp, Artificial Sequence
  Oligonucleotide primer for the detection of SNP TSC0020899
ttgtatgaatat

SEQ ID NO: 304392 - DNA, 12 bp, Artificial Sequence
  Oligonucleotide primer for the detection of SNP TSC0020899
ctatataaatac

SEQ ID NO: 304393 - DNA, 12 bp, Artificial Sequence
  Oligonucleotide primer for the detection of SNP TSC0020899
ggggatggggag

SEQ ID NO: 304394 - DNA, 12 bp, Artificial Sequence
  Oligonucleotide primer for the detection of SNP TSC0020900
acttcataaaaa

SEQ ID NO: 304395 - DNA, 12 bp, Artificial Sequence
  Oligonucleotide primer for the detection of SNP TSC0020900
acttcgtaaaaa

SEQ ID NO: 304396 - DNA, 12 bp, Artificial Sequence
  Oligonucleotide primer for the detection of SNP TSC0020900
taccttaccccc

SEQ ID NO: 304397 - DNA, 12 bp, Artificial Sequence
  Oligonucleotide primer for the detection of SNP TSC0020900
attttgtggggg

SEQ ID NO: 304398 - DNA, 12 bp, Artificial Sequence
  Oligonucleotide primer for the detection of SNP TSC0020900
atttcgtggggg

SEQ ID NO: 304399 - DNA, 12 bp, Artificial Sequence
  Oligonucleotide primer for the detection of SNP TSC0020901
cttaaaccctaa

SEQ ID NO: 304400 - DNA, 12 bp, Artificial Sequence
  Oligonucleotide primer for the detection of SNP TSC0020901
acccccaccccc

SEQ ID NO: 304401 - DNA, 12 bp, Artificial Sequence
  Oligonucleotide primer for the detection of SNP TSC0020901
tttaaattttga

SEQ ID NO: 304402 - DNA, 12 bp, Artificial Sequence
  Oligonucleotide primer for the detection of SNP TSC0020902
aataccaattat

SEQ ID NO: 304403 - DNA, 12 bp, Artificial Sequence
  Oligonucleotide primer for the detection of SNP TSC0020902
aataccgattat

SEQ ID NO: 304404 - DNA, 12 bp, Artificial Sequence
  Oligonucleotide primer for the detection of SNP TSC0020902
gtgtttagaata

SEQ ID NO: 304405 - DNA, 12 bp, Artificial Sequence
  Oligonucleotide primer for the detection of SNP TSC0020909
ctaaaatttccc

SEQ ID NO: 304406 - DNA, 12 bp, Artificial Sequence
  Oligonucleotide primer for the detection of SNP TSC0020909
tttatttaagag

SEQ ID NO: 304407 - DNA, 12 bp, Artificial Sequence
  Oligonucleotide primer for the detection of SNP TSC0020909
ctcatctaaaaa

SEQ ID NO: 304408 - DNA, 12 bp, Artificial Sequence
  Oligonucleotide primer for the detection of SNP TSC0020909
ttgggatttttt

SEQ ID NO: 304409 - DNA, 12 bp, Artificial Sequence
  Oligonucleotide primer for the detection of SNP TSC0020910
tattccaatatc

SEQ ID NO: 304410 - DNA, 12 bp, Artificial Sequence
  Oligonucleotide primer for the detection of SNP TSC0020910
tgtagggtgata

SEQ ID NO: 304411 - DNA, 12 bp, Artificial Sequence
  Oligonucleotide primer for the detection of SNP TSC0020910
tacaaaataata

SEQ ID NO: 304412 - DNA, 12 bp, Artificial Sequence
  Oligonucleotide primer for the detection of SNP TSC0020910
tattttaatatt

SEQ ID NO: 304413 - DNA, 12 bp, Artificial Sequence
  Oligonucleotide primer for the detection of SNP TSC0020911
ctacaccctcat

SEQ ID NO: 304414 - DNA, 12 bp, Artificial Sequence
  Oligonucleotide primer for the detection of SNP TSC0020911
ctacgccctcat

SEQ ID NO: 304415 - DNA, 12 bp, Artificial Sequence
  Oligonucleotide primer for the detection of SNP TSC0020912
aaaatacacaac

SEQ ID NO: 304416 - DNA, 12 bp, Artificial Sequence
  Oligonucleotide primer for the detection of SNP TSC0020912
aaaatacacgac

SEQ ID NO: 304417 - DNA, 12 bp, Artificial Sequence
  Oligonucleotide primer for the detection of SNP TSC0020912
tttagtaggtaa

SEQ ID NO: 304418 - DNA, 12 bp, Artificial Sequence
  Oligonucleotide primer for the detection of SNP TSC0020912
cccaacaaacaa

SEQ ID NO: 304419 - DNA, 12 bp, Artificial Sequence
  Oligonucleotide primer for the detection of SNP TSC0020912
gaggtatatggt

SEQ ID NO: 304420 - DNA, 12 bp, Artificial Sequence
  Oligonucleotide primer for the detection of SNP TSC0020912
gaggtatacggt

SEQ ID NO: 304421 - DNA, 12 bp, Artificial Sequence
  Oligonucleotide primer for the detection of SNP TSC0020913
aaaaaaacatct

SEQ ID NO: 304422 - DNA, 12 bp, Artificial Sequence
  Oligonucleotide primer for the detection of SNP TSC0020913
aaaaaaacgtct

SEQ ID NO: 304423 - DNA, 12 bp, Artificial Sequence
  Oligonucleotide primer for the detection of SNP TSC0020913
atgttgtttgaa

SEQ ID NO: 304424 - DNA, 12 bp, Artificial Sequence
  Oligonucleotide primer for the detection of SNP TSC0020917
acaaacacataa

SEQ ID NO: 304425 - DNA, 12 bp, Artificial Sequence
  Oligonucleotide primer for the detection of SNP TSC0020917
acgaacacataa

SEQ ID NO: 304426 - DNA, 12 bp, Artificial Sequence
  Oligonucleotide primer for the detection of SNP TSC0020917
tagtgtgaattt

SEQ ID NO: 304427 - DNA, 12 bp, Artificial Sequence
  Oligonucleotide primer for the detection of SNP TSC0020917
tagcgtgaattt

SEQ ID NO: 304428 - DNA, 12 bp, Artificial Sequence
  Oligonucleotide primer for the detection of SNP TSC0020917
caacataaaccc

SEQ ID NO: 304429 - DNA, 12 bp, Artificial Sequence
  Oligonucleotide primer for the detection of SNP TSC0020917
caacgtaaaccc

SEQ ID NO: 304430 - DNA, 12 bp, Artificial Sequence
  Oligonucleotide primer for the detection of SNP TSC0020917
gtggatatatgg

SEQ ID NO: 304431 - DNA, 12 bp, Artificial Sequence
  Oligonukleotid-Primer
gcggatatatgg

SEQ ID NO: 304432 - DNA, 12 bp, Artificial Sequence
  Oligonucleotide primer for the detection of SNP TSC0020918
atccccacatac

SEQ ID NO: 304433 - DNA, 12 bp, Artificial Sequence
  Oligonucleotide primer for the detection of SNP TSC0020918
atccccacgtac

SEQ ID NO: 304434 - DNA, 12 bp, Artificial Sequence
  Oligonucleotide primer for the detection of SNP TSC0020918
atccccgcatac

SEQ ID NO: 304435 - DNA, 12 bp, Artificial Sequence
  Oligonucleotide primer for the detection of SNP TSC0020918
atccccgcgtac

SEQ ID NO: 304436 - DNA, 12 bp, Artificial Sequence
  Oligonucleotide primer for the detection of SNP TSC0020918
tttgaatggtaa

SEQ ID NO: 304437 - DNA, 12 bp, Artificial Sequence
  Oligonucleotide primer for the detection of SNP TSC0020926
aaaccaaaacct

SEQ ID NO: 304438 - DNA, 12 bp, Artificial Sequence
  Oligonucleotide primer for the detection of SNP TSC0020926
aggatgggtggg

SEQ ID NO: 304439 - DNA, 12 bp, Artificial Sequence
  Oligonucleotide primer for the detection of SNP TSC0020926
aggttaggattt

SEQ ID NO: 304440 - DNA, 12 bp, Artificial Sequence
  Oligonucleotide primer for the detection of SNP TSC0020930
aataacttaata

SEQ ID NO: 304441 - DNA, 12 bp, Artificial Sequence
  Oligonucleotide primer for the detection of SNP TSC0020930
gtttgtgtatag

SEQ ID NO: 304442 - DNA, 12 bp, Artificial Sequence
  Oligonucleotide primer for the detection of SNP TSC0020930
acctatacataa

SEQ ID NO: 304443 - DNA, 12 bp, Artificial Sequence
  Oligonucleotide primer for the detection of SNP TSC0020930
gatgatttgatg

SEQ ID NO: 304444 - DNA, 12 bp, Artificial Sequence
  Oligonucleotide primer for the detection of SNP TSC0020931
ttatttaaaaca

SEQ ID NO: 304445 - DNA, 12 bp, Artificial Sequence
  Oligonucleotide primer for the detection of SNP TSC0020931
tttaaaaacctc

SEQ ID NO: 304446 - DNA, 12 bp, Artificial Sequence
  Oligonucleotide primer for the detection of SNP TSC0020931
ttatttgaaata

SEQ ID NO: 304447 - DNA, 12 bp, Artificial Sequence
  Oligonucleotide primer for the detection of SNP TSC0020935
ctcccccacccc

SEQ ID NO: 304448 - DNA, 12 bp, Artificial Sequence
  Oligonucleotide primer for the detection of SNP TSC0020936
aaacaacaaatt

SEQ ID NO: 304449 - DNA, 12 bp, Artificial Sequence
  Oligonucleotide primer for the detection of SNP TSC0020936
aaacgacaaatt

SEQ ID NO: 304450 - DNA, 12 bp, Artificial Sequence
  Oligonucleotide primer for the detection of SNP TSC0020936
ggtttattttgg

SEQ ID NO: 304451 - DNA, 12 bp, Artificial Sequence
  Oligonucleotide primer for the detection of SNP TSC0020937
catctctacata

SEQ ID NO: 304452 - DNA, 12 bp, Artificial Sequence
  Oligonucleotide primer for the detection of SNP TSC0020937
catctctacgta

SEQ ID NO: 304453 - DNA, 12 bp, Artificial Sequence
  Oligonucleotide primer for the detection of SNP TSC0020937
taagttgggtat

SEQ ID NO: 304454 - DNA, 12 bp, Artificial Sequence
  Oligonucleotide primer for the detection of SNP TSC0020937
tatttttatgtg

SEQ ID NO: 304455 - DNA, 12 bp, Artificial Sequence
  Oligonucleotide primer for the detection of SNP TSC0020937
tatttttacgtg

SEQ ID NO: 304456 - DNA, 12 bp, Artificial Sequence
  Oligonucleotide primer for the detection of SNP TSC0020939
cctaatacactc

SEQ ID NO: 304457 - DNA, 12 bp, Artificial Sequence
  Oligonucleotide primer for the detection of SNP TSC0020939
aatagtatggta

SEQ ID NO: 304458 - DNA, 12 bp, Artificial Sequence
  Oligonucleotide primer for the detection of SNP TSC0020940
ctcatataaaaa

SEQ ID NO: 304459 - DNA, 12 bp, Artificial Sequence
  Oligonucleotide primer for the detection of SNP TSC0020940
agtaggttatgt

SEQ ID NO: 304460 - DNA, 12 bp, Artificial Sequence
  Oligonucleotide primer for the detection of SNP TSC0020940
aataaattatac

SEQ ID NO: 304461 - DNA, 12 bp, Artificial Sequence
  Oligonucleotide primer for the detection of SNP TSC0020940
tttatgtaaaaa

SEQ ID NO: 304462 - DNA, 12 bp, Artificial Sequence
  Oligonucleotide primer for the detection of SNP TSC0020945
acaatcttataa

SEQ ID NO: 304463 - DNA, 12 bp, Artificial Sequence
  Oligonucleotide primer for the detection of SNP TSC0020945
tataactattcc

SEQ ID NO: 304464 - DNA, 12 bp, Artificial Sequence
  Oligonucleotide primer for the detection of SNP TSC0020945
tatagttttatg

SEQ ID NO: 304465 - DNA, 12 bp, Artificial Sequence
  Oligonucleotide primer for the detection of SNP TSC0020948
caatctccccat

SEQ ID NO: 304466 - DNA, 12 bp, Artificial Sequence
  Oligonucleotide primer for the detection of SNP TSC0020950
tggatgatagag

SEQ ID NO: 304467 - DNA, 12 bp, Artificial Sequence
  Oligonucleotide primer for the detection of SNP TSC0020950
tggacgatagag

SEQ ID NO: 304468 - DNA, 12 bp, Artificial Sequence
  Oligonucleotide primer for the detection of SNP TSC0020950
gagagggagttt

SEQ ID NO: 304469 - DNA, 12 bp, Artificial Sequence
  Oligonucleotide primer for the detection of SNP TSC0020951
actaaaacaaac

SEQ ID NO: 304470 - DNA, 12 bp, Artificial Sequence
  Oligonucleotide primer for the detection of SNP TSC0020951
actaaaacgaac

SEQ ID NO: 304471 - DNA, 12 bp, Artificial Sequence
  Oligonucleotide primer for the detection of SNP TSC0020951
ggggagaaggtg

SEQ ID NO: 304472 - DNA, 12 bp, Artificial Sequence
  Oligonucleotide primer for the detection of SNP TSC0020952
ttattttttgtc

SEQ ID NO: 304473 - DNA, 12 bp, Artificial Sequence
  Oligonucleotide primer for the detection of SNP TSC0020952
ttatttttcgtc

SEQ ID NO: 304474 - DNA, 12 bp, Artificial Sequence
  Oligonucleotide primer for the detection of SNP TSC0020952
ccactccccacc

SEQ ID NO: 304475 - DNA, 12 bp, Artificial Sequence
  Oligonucleotide primer for the detection of SNP TSC0020952
ccactccccgcc

SEQ ID NO: 304476 - DNA, 12 bp, Artificial Sequence
  Oligonucleotide primer for the detection of SNP TSC0020952
gaaattgaggtt

SEQ ID NO: 304477 - DNA, 12 bp, Artificial Sequence
  Oligonucleotide primer for the detection of SNP TSC0020962
tcatcattttct

SEQ ID NO: 304478 - DNA, 12 bp, Artificial Sequence
  Oligonucleotide primer for the detection of SNP TSC0020962
tgagaaaaatga

SEQ ID NO: 304479 - DNA, 12 bp, Artificial Sequence
  Oligonucleotide primer for the detection of SNP TSC0020963
atcattttctct

SEQ ID NO: 304480 - DNA, 12 bp, Artificial Sequence
  Oligonucleotide primer for the detection of SNP TSC0020963
tgatgagaaaaa

SEQ ID NO: 304481 - DNA, 12 bp, Artificial Sequence
  Oligonucleotide primer for the detection of SNP TSC0020964
ctactatataaa

SEQ ID NO: 304482 - DNA, 12 bp, Artificial Sequence
  Oligonucleotide primer for the detection of SNP TSC0020964
atttagagtaat

SEQ ID NO: 304483 - DNA, 12 bp, Artificial Sequence
  Oligonucleotide primer for the detection of SNP TSC0020964
attcaaaacaat

SEQ ID NO: 304484 - DNA, 12 bp, Artificial Sequence
  Oligonucleotide primer for the detection of SNP TSC0020964
ttattgtgtgaa

SEQ ID NO: 304485 - DNA, 12 bp, Artificial Sequence
  Oligonucleotide primer for the detection of SNP TSC0020966
acccctattcct

SEQ ID NO: 304486 - DNA, 12 bp, Artificial Sequence
  Oligonucleotide primer for the detection of SNP TSC0020966
gttgtaaggaaa

SEQ ID NO: 304487 - DNA, 12 bp, Artificial Sequence
  Oligonucleotide primer for the detection of SNP TSC0020967
aaactcgataaa

SEQ ID NO: 304488 - DNA, 12 bp, Artificial Sequence
  Oligonucleotide primer for the detection of SNP TSC0020967
atgataggaatt

SEQ ID NO: 304489 - DNA, 12 bp, Artificial Sequence
  Oligonucleotide primer for the detection of SNP TSC0020967
atgataggaatc

SEQ ID NO: 304490 - DNA, 12 bp, Artificial Sequence
  Oligonucleotide primer for the detection of SNP TSC0020967
taataataaaaa

SEQ ID NO: 304491 - DNA, 12 bp, Artificial Sequence
  Oligonucleotide primer for the detection of SNP TSC0020967
gagtttgataaa

SEQ ID NO: 304492 - DNA, 12 bp, Artificial Sequence
  Oligonucleotide primer for the detection of SNP TSC0020967
gagttcgataaa

SEQ ID NO: 304493 - DNA, 12 bp, Artificial Sequence
  Oligonucleotide primer for the detection of SNP TSC0020968
gagtatatgtta

SEQ ID NO: 304494 - DNA, 12 bp, Artificial Sequence
  Oligonucleotide primer for the detection of SNP TSC0020969
ggttgaagtgtt

SEQ ID NO: 304495 - DNA, 12 bp, Artificial Sequence
  Oligonucleotide primer for the detection of SNP TSC0020969
aattaaaatatc

SEQ ID NO: 304496 - DNA, 12 bp, Artificial Sequence
  Oligonucleotide primer for the detection of SNP TSC0020969
gtagtggtaggg

SEQ ID NO: 304497 - DNA, 12 bp, Artificial Sequence
  Oligonucleotide primer for the detection of SNP TSC0020970
taaaaaaccaca

SEQ ID NO: 304498 - DNA, 12 bp, Artificial Sequence
  Oligonucleotide primer for the detection of SNP TSC0020970
taaaaaaccacg

SEQ ID NO: 304499 - DNA, 12 bp, Artificial Sequence
  Oligonucleotide primer for the detection of SNP TSC0020970
ggattgaggtgt

SEQ ID NO: 304500 - DNA, 12 bp, Artificial Sequence
  Oligonucleotide primer for the detection of SNP TSC0020970
ggattgaggtgc

SEQ ID NO: 304501 - DNA, 12 bp, Artificial Sequence
  Oligonucleotide primer for the detection of SNP TSC0020970
gaactaaaatac

SEQ ID NO: 304502 - DNA, 12 bp, Artificial Sequence
  Oligonucleotide primer for the detection of SNP TSC0020970
tgaagagttatg

SEQ ID NO: 304503 - DNA, 12 bp, Artificial Sequence
  Oligonucleotide primer for the detection of SNP TSC0020970
tgaagagttacg

SEQ ID NO: 304504 - DNA, 12 bp, Artificial Sequence
  Oligonucleotide primer for the detection of SNP TSC0020971
ccaacctctcca

SEQ ID NO: 304505 - DNA, 12 bp, Artificial Sequence
  Oligonucleotide primer for the detection of SNP TSC0020971
gaaaggatggat

SEQ ID NO: 304506 - DNA, 12 bp, Artificial Sequence
  Oligonucleotide primer for the detection of SNP TSC0020971
gaaaggacggat

SEQ ID NO: 304507 - DNA, 12 bp, Artificial Sequence
  Oligonucleotide primer for the detection of SNP TSC0020972
caaaaaaattct

SEQ ID NO: 304508 - DNA, 12 bp, Artificial Sequence
  Oligonucleotide primer for the detection of SNP TSC0020972
taagtataaata

SEQ ID NO: 304509 - DNA, 12 bp, Artificial Sequence
  Oligonucleotide primer for the detection of SNP TSC0020973
ataaatatattt

SEQ ID NO: 304510 - DNA, 12 bp, Artificial Sequence
  Oligonucleotide primer for the detection of SNP TSC0020973
atttaattttaa

SEQ ID NO: 304511 - DNA, 12 bp, Artificial Sequence
  Oligonucleotide primer for the detection of SNP TSC0020975
ttaacaaaacta

SEQ ID NO: 304512 - DNA, 12 bp, Artificial Sequence
  Oligonucleotide primer for the detection of SNP TSC0020975
ttaacgaaacta

SEQ ID NO: 304513 - DNA, 12 bp, Artificial Sequence
  Oligonucleotide primer for the detection of SNP TSC0020975
ttatagtatttt

SEQ ID NO: 304514 - DNA, 12 bp, Artificial Sequence
  Oligonucleotide primer for the detection of SNP TSC0020975
ccacaacactcc

SEQ ID NO: 304515 - DNA, 12 bp, Artificial Sequence
  Oligonucleotide primer for the detection of SNP TSC0020975
ttggtggggttg

SEQ ID NO: 304516 - DNA, 12 bp, Artificial Sequence
  Oligonucleotide primer for the detection of SNP TSC0020975
ttggcggggttg

SEQ ID NO: 304517 - DNA, 12 bp, Artificial Sequence
  Oligonucleotide primer for the detection of SNP TSC0020976
caaacttttaaa

SEQ ID NO: 304518 - DNA, 12 bp, Artificial Sequence
  Oligonucleotide primer for the detection of SNP TSC0020976
ggaatttttggg

SEQ ID NO: 304519 - DNA, 12 bp, Artificial Sequence
  Oligonucleotide primer for the detection of SNP TSC0020976
aaaattcttaaa

SEQ ID NO: 304520 - DNA, 12 bp, Artificial Sequence
  Oligonukleotid-Primer
ttaggtttttaa

SEQ ID NO: 304521 - DNA, 12 bp, Artificial Sequence
  Oligonucleotide primer for the detection of SNP TSC0020977
ttctataccaaa

SEQ ID NO: 304522 - DNA, 12 bp, Artificial Sequence
  Oligonucleotide primer for the detection of SNP TSC0020977
agggttttaaag

SEQ ID NO: 304523 - DNA, 12 bp, Artificial Sequence
  Oligonucleotide primer for the detection of SNP TSC0020977
aaaattttaaaa

SEQ ID NO: 304524 - DNA, 12 bp, Artificial Sequence
  Oligonucleotide primer for the detection of SNP TSC0020977
gttttgtgttaa

SEQ ID NO: 304525 - DNA, 12 bp, Artificial Sequence
  Oligonucleotide primer for the detection of SNP TSC0020979
actcacttatct

SEQ ID NO: 304526 - DNA, 12 bp, Artificial Sequence
  Oligonucleotide primer for the detection of SNP TSC0020979
gataagatttta

SEQ ID NO: 304527 - DNA, 12 bp, Artificial Sequence
  Oligonucleotide primer for the detection of SNP TSC0020981
acttcctccttt

SEQ ID NO: 304528 - DNA, 12 bp, Artificial Sequence
  Oligonucleotide primer for the detection of SNP TSC0020981
ggaaggagagaa

SEQ ID NO: 304529 - DNA, 12 bp, Artificial Sequence
  Oligonucleotide primer for the detection of SNP TSC0020982
attacacaatac

SEQ ID NO: 304530 - DNA, 12 bp, Artificial Sequence
  Oligonucleotide primer for the detection of SNP TSC0020982
gattattttaga

SEQ ID NO: 304531 - DNA, 12 bp, Artificial Sequence
  Oligonucleotide primer for the detection of SNP TSC0020983
aaaactaatcta

SEQ ID NO: 304532 - DNA, 12 bp, Artificial Sequence
  Oligonucleotide primer for the detection of SNP TSC0020983
tatttgtagtat

SEQ ID NO: 304533 - DNA, 12 bp, Artificial Sequence
  Oligonucleotide primer for the detection of SNP TSC0020983
tattcgtagtat

SEQ ID NO: 304534 - DNA, 12 bp, Artificial Sequence
  Oligonucleotide primer for the detection of SNP TSC0020983
catccacaacac

SEQ ID NO: 304535 - DNA, 12 bp, Artificial Sequence
  Oligonucleotide primer for the detection of SNP TSC0020983
catccgcaacac

SEQ ID NO: 304536 - DNA, 12 bp, Artificial Sequence
  Oligonucleotide primer for the detection of SNP TSC0020983
gaaattgatttg

SEQ ID NO: 304537 - DNA, 12 bp, Artificial Sequence
  Oligonucleotide primer for the detection of SNP TSC0020990
aaaccaaattac

SEQ ID NO: 304538 - DNA, 12 bp, Artificial Sequence
  Oligonucleotide primer for the detection of SNP TSC0020990
attattgatggt

SEQ ID NO: 304539 - DNA, 12 bp, Artificial Sequence
  Oligonucleotide primer for the detection of SNP TSC0020990
attattgatggc

SEQ ID NO: 304540 - DNA, 12 bp, Artificial Sequence
  Oligonucleotide primer for the detection of SNP TSC0020990
atcattaataac

SEQ ID NO: 304541 - DNA, 12 bp, Artificial Sequence
  Oligonucleotide primer for the detection of SNP TSC0020990
aggttaaattat

SEQ ID NO: 304542 - DNA, 12 bp, Artificial Sequence
  Oligonucleotide primer for the detection of SNP TSC0020990
aggttaaattac

SEQ ID NO: 304543 - DNA, 12 bp, Artificial Sequence
  Oligonucleotide primer for the detection of SNP TSC0020991
tttataaactat

SEQ ID NO: 304544 - DNA, 12 bp, Artificial Sequence
  Oligonucleotide primer for the detection of SNP TSC0020991
aatataagttat

SEQ ID NO: 304545 - DNA, 12 bp, Artificial Sequence
  Oligonucleotide primer for the detection of SNP TSC0020991
aacacaaaccat

SEQ ID NO: 304546 - DNA, 12 bp, Artificial Sequence
  Oligonucleotide primer for the detection of SNP TSC0020991
tttgtaagttat

SEQ ID NO: 304547 - DNA, 12 bp, Artificial Sequence
  Oligonucleotide primer for the detection of SNP TSC0020992
tttttatatatt

SEQ ID NO: 304548 - DNA, 12 bp, Artificial Sequence
  Oligonucleotide primer for the detection of SNP TSC0020992
taaagtaaaaaa

SEQ ID NO: 304549 - DNA, 12 bp, Artificial Sequence
  Oligonucleotide primer for the detection of SNP TSC0020996
aaacgacaataa

SEQ ID NO: 304550 - DNA, 12 bp, Artificial Sequence
  Oligonucleotide primer for the detection of SNP TSC0020996
tttctttatctt

SEQ ID NO: 304551 - DNA, 12 bp, Artificial Sequence
  Oligonucleotide primer for the detection of SNP TSC0020996
ggatggtaatga

SEQ ID NO: 304552 - DNA, 12 bp, Artificial Sequence
  Oligonucleotide primer for the detection of SNP TSC0020996
ggacggtaatga

SEQ ID NO: 304553 - DNA, 12 bp, Artificial Sequence
  Oligonucleotide primer for the detection of SNP TSC0020997
cacaaaaaccct

SEQ ID NO: 304554 - DNA, 12 bp, Artificial Sequence
  Oligonucleotide primer for the detection of SNP TSC0020997
cgcaaaaaccct

SEQ ID NO: 304555 - DNA, 12 bp, Artificial Sequence
  Oligonucleotide primer for the detection of SNP TSC0020997
gttgtttttggt

SEQ ID NO: 304556 - DNA, 12 bp, Artificial Sequence
  Oligonucleotide primer for the detection of SNP TSC0020997
gttgtttttggc

SEQ ID NO: 304557 - DNA, 12 bp, Artificial Sequence
  Oligonucleotide primer for the detection of SNP TSC0020997
ctatctttaaca

SEQ ID NO: 304558 - DNA, 12 bp, Artificial Sequence
  Oligonucleotide primer for the detection of SNP TSC0020997
ctatctttaacg

SEQ ID NO: 304559 - DNA, 12 bp, Artificial Sequence
  Oligonucleotide primer for the detection of SNP TSC0020998
ataaaacaaaat

SEQ ID NO: 304560 - DNA, 12 bp, Artificial Sequence
  Oligonucleotide primer for the detection of SNP TSC0020998
atatttttgata

SEQ ID NO: 304561 - DNA, 12 bp, Artificial Sequence
  Oligonucleotide primer for the detection of SNP TSC0020998
atattttcgata

SEQ ID NO: 304562 - DNA, 12 bp, Artificial Sequence
  Oligonucleotide primer for the detection of SNP TSC0020998
atatccccaata

SEQ ID NO: 304563 - DNA, 12 bp, Artificial Sequence
  Oligonucleotide primer for the detection of SNP TSC0020998
atatccccgata

SEQ ID NO: 304564 - DNA, 12 bp, Artificial Sequence
  Oligonucleotide primer for the detection of SNP TSC0020998
gtgaggtagaat

SEQ ID NO: 304565 - DNA, 12 bp, Artificial Sequence
  Oligonucleotide primer for the detection of SNP TSC0020999
taaaccaataca

SEQ ID NO: 304566 - DNA, 12 bp, Artificial Sequence
  Oligonucleotide primer for the detection of SNP TSC0020999
taaaccaatacg

SEQ ID NO: 304567 - DNA, 12 bp, Artificial Sequence
  Oligonucleotide primer for the detection of SNP TSC0020999
gtgtttattatt

SEQ ID NO: 304568 - DNA, 12 bp, Artificial Sequence
  Oligonucleotide primer for the detection of SNP TSC0020999
atatctatcact

SEQ ID NO: 304569 - DNA, 12 bp, Artificial Sequence
  Oligonucleotide primer for the detection of SNP TSC0020999
ttgaattagtat

SEQ ID NO: 304570 - DNA, 12 bp, Artificial Sequence
  Oligonucleotide primer for the detection of SNP TSC0020999
ttgaattagtac

SEQ ID NO: 304571 - DNA, 12 bp, Artificial Sequence
  Oligonucleotide primer for the detection of SNP TSC0021000
tcttaaaaatat

SEQ ID NO: 304572 - DNA, 12 bp, Artificial Sequence
  Oligonucleotide primer for the detection of SNP TSC0021000
ttaagtagtgag

SEQ ID NO: 304573 - DNA, 12 bp, Artificial Sequence
  Oligonucleotide primer for the detection of SNP TSC0021000
ttaagtagcgag

SEQ ID NO: 304574 - DNA, 12 bp, Artificial Sequence
  Oligonucleotide primer for the detection of SNP TSC0021000
ccaaacaacaaa

SEQ ID NO: 304575 - DNA, 12 bp, Artificial Sequence
  Oligonucleotide primer for the detection of SNP TSC0021000
ccaaacaacgaa

SEQ ID NO: 304576 - DNA, 12 bp, Artificial Sequence
  Oligonucleotide primer for the detection of SNP TSC0021000
ttttagggatgt

SEQ ID NO: 304577 - DNA, 12 bp, Artificial Sequence
  Oligonucleotide primer for the detection of SNP TSC0021001
ctatactaaaat

SEQ ID NO: 304578 - DNA, 12 bp, Artificial Sequence
  Oligonucleotide primer for the detection of SNP TSC0021001
atagttttttta

SEQ ID NO: 304579 - DNA, 12 bp, Artificial Sequence
  Oligonucleotide primer for the detection of SNP TSC0021002
caactttctacc

SEQ ID NO: 304580 - DNA, 12 bp, Artificial Sequence
  Oligonucleotide primer for the detection of SNP TSC0021002
acctacttccta

SEQ ID NO: 304581 - DNA, 12 bp, Artificial Sequence
  Oligonucleotide primer for the detection of SNP TSC0021002
taattttttatt

SEQ ID NO: 304582 - DNA, 12 bp, Artificial Sequence
  Oligonucleotide primer for the detection of SNP TSC0021003
cctcaaacttac

SEQ ID NO: 304583 - DNA, 12 bp, Artificial Sequence
  Oligonucleotide primer for the detection of SNP TSC0021003
ttatttatttgt

SEQ ID NO: 304584 - DNA, 12 bp, Artificial Sequence
  Oligonucleotide primer for the detection of SNP TSC0021003
tatctacctaca

SEQ ID NO: 304585 - DNA, 12 bp, Artificial Sequence
  Oligonukleotid-Primer
tttagatttgtt

SEQ ID NO: 304586 - DNA, 12 bp, Artificial Sequence
  Oligonucleotide primer for the detection of SNP TSC0021004
actatttcccat

SEQ ID NO: 304587 - DNA, 12 bp, Artificial Sequence
  Oligonucleotide primer for the detection of SNP TSC0021004
gtttttttattt

SEQ ID NO: 304588 - DNA, 12 bp, Artificial Sequence
  Oligonucleotide primer for the detection of SNP TSC0021004
acctccctattt

SEQ ID NO: 304589 - DNA, 12 bp, Artificial Sequence
  Oligonukleotid-Primer
ttaaataattaa

SEQ ID NO: 304590 - DNA, 12 bp, Artificial Sequence
  Oligonucleotide primer for the detection of SNP TSC0021005
tgttgttattga

SEQ ID NO: 304591 - DNA, 12 bp, Artificial Sequence
  Oligonucleotide primer for the detection of SNP TSC0021005
tactactattaa

SEQ ID NO: 304592 - DNA, 12 bp, Artificial Sequence
  Oligonucleotide primer for the detection of SNP TSC0021005
ttaagtagttaa

SEQ ID NO: 304593 - DNA, 12 bp, Artificial Sequence
  Oligonucleotide primer for the detection of SNP TSC0021006
tactataataac

SEQ ID NO: 304594 - DNA, 12 bp, Artificial Sequence
  Oligonucleotide primer for the detection of SNP TSC0021006
ataaattaattg

SEQ ID NO: 304595 - DNA, 12 bp, Artificial Sequence
  Oligonucleotide primer for the detection of SNP TSC0021006
ataaactaacta

SEQ ID NO: 304596 - DNA, 12 bp, Artificial Sequence
  Oligonucleotide primer for the detection of SNP TSC0021006
tgttatggtgat

SEQ ID NO: 304597 - DNA, 12 bp, Artificial Sequence
  Oligonucleotide primer for the detection of SNP TSC0021013
ataaataaacaa

SEQ ID NO: 304598 - DNA, 12 bp, Artificial Sequence
  Oligonucleotide primer for the detection of SNP TSC0021013
ttttgattttat

SEQ ID NO: 304599 - DNA, 12 bp, Artificial Sequence
  Oligonucleotide primer for the detection of SNP TSC0021013
ttttgattttac

SEQ ID NO: 304600 - DNA, 12 bp, Artificial Sequence
  Oligonucleotide primer for the detection of SNP TSC0021013
ccctaaccttac

SEQ ID NO: 304601 - DNA, 12 bp, Artificial Sequence
  Oligonucleotide primer for the detection of SNP TSC0021013
gtgagtgggtag

SEQ ID NO: 304602 - DNA, 12 bp, Artificial Sequence
  Oligonucleotide primer for the detection of SNP TSC0021014
tctctttacatt

SEQ ID NO: 304603 - DNA, 12 bp, Artificial Sequence
  Oligonucleotide primer for the detection of SNP TSC0021014
tataaataagga

SEQ ID NO: 304604 - DNA, 12 bp, Artificial Sequence
  Oligonucleotide primer for the detection of SNP TSC0021015
tctttacattct

SEQ ID NO: 304605 - DNA, 12 bp, Artificial Sequence
  Oligonucleotide primer for the detection of SNP TSC0021015
agtataaataag

SEQ ID NO: 304606 - DNA, 12 bp, Artificial Sequence
  Oligonucleotide primer for the detection of SNP TSC0021016
actactaaaaca

SEQ ID NO: 304607 - DNA, 12 bp, Artificial Sequence
  Oligonucleotide primer for the detection of SNP TSC0021016
gctactaaaaca

SEQ ID NO: 304608 - DNA, 12 bp, Artificial Sequence
  Oligonucleotide primer for the detection of SNP TSC0021016
gataaattggtt

SEQ ID NO: 304609 - DNA, 12 bp, Artificial Sequence
  Oligonucleotide primer for the detection of SNP TSC0021016
taataaattaac

SEQ ID NO: 304610 - DNA, 12 bp, Artificial Sequence
  Oligonucleotide primer for the detection of SNP TSC0021016
tgttgttgagat

SEQ ID NO: 304611 - DNA, 12 bp, Artificial Sequence
  Oligonucleotide primer for the detection of SNP TSC0021016
cgttgttgagat

SEQ ID NO: 304612 - DNA, 12 bp, Artificial Sequence
  Oligonucleotide primer for the detection of SNP TSC0021017
ttttatcaaaac

SEQ ID NO: 304613 - DNA, 12 bp, Artificial Sequence
  Oligonucleotide primer for the detection of SNP TSC0021017
tgtatatttggt

SEQ ID NO: 304614 - DNA, 12 bp, Artificial Sequence
  Oligonucleotide primer for the detection of SNP TSC0021017
tgtatattcggt

SEQ ID NO: 304615 - DNA, 12 bp, Artificial Sequence
  Oligonucleotide primer for the detection of SNP TSC0021021
ggttattattaa

SEQ ID NO: 304616 - DNA, 12 bp, Artificial Sequence
  Oligonucleotide primer for the detection of SNP TSC0021022
acacaatcatct

SEQ ID NO: 304617 - DNA, 12 bp, Artificial Sequence
  Oligonucleotide primer for the detection of SNP TSC0021022
gaagatataaaa

SEQ ID NO: 304618 - DNA, 12 bp, Artificial Sequence
  Oligonucleotide primer for the detection of SNP TSC0021023
tataatttattt

SEQ ID NO: 304619 - DNA, 12 bp, Artificial Sequence
  Oligonucleotide primer for the detection of SNP TSC0021023
atattggtgata

SEQ ID NO: 304620 - DNA, 12 bp, Artificial Sequence
  Oligonucleotide primer for the detection of SNP TSC0021024
tccacatcaaac

SEQ ID NO: 304621 - DNA, 12 bp, Artificial Sequence
  Oligonucleotide primer for the detection of SNP TSC0021024
taatagtagttg

SEQ ID NO: 304622 - DNA, 12 bp, Artificial Sequence
  Oligonucleotide primer for the detection of SNP TSC0021025
tcccccacaacc

SEQ ID NO: 304623 - DNA, 12 bp, Artificial Sequence
  Oligonucleotide primer for the detection of SNP TSC0021025
tacctaccatta

SEQ ID NO: 304624 - DNA, 12 bp, Artificial Sequence
  Oligonucleotide primer for the detection of SNP TSC0021025
ttttttatagtt

SEQ ID NO: 304625 - DNA, 12 bp, Artificial Sequence
  Oligonucleotide primer for the detection of SNP TSC0021026
aaaataaactcc

SEQ ID NO: 304626 - DNA, 12 bp, Artificial Sequence
  Oligonucleotide primer for the detection of SNP TSC0021026
tttatatgataa

SEQ ID NO: 304627 - DNA, 12 bp, Artificial Sequence
  Oligonucleotide primer for the detection of SNP TSC0021026
tttatacgataa

SEQ ID NO: 304628 - DNA, 12 bp, Artificial Sequence
  Oligonucleotide primer for the detection of SNP TSC0021027
caacctcccacc

SEQ ID NO: 304629 - DNA, 12 bp, Artificial Sequence
  Oligonucleotide primer for the detection of SNP TSC0021027
caacctcccgcc

SEQ ID NO: 304630 - DNA, 12 bp, Artificial Sequence
  Oligonucleotide primer for the detection of SNP TSC0021027
gagaatttaagg

SEQ ID NO: 304631 - DNA, 12 bp, Artificial Sequence
  Oligonucleotide primer for the detection of SNP TSC0021028
ccaaactaccaa

SEQ ID NO: 304632 - DNA, 12 bp, Artificial Sequence
  Oligonucleotide primer for the detection of SNP TSC0021028
ggatggtgggag

SEQ ID NO: 304633 - DNA, 12 bp, Artificial Sequence
  Oligonucleotide primer for the detection of SNP TSC0021028
ggatggcgggag

SEQ ID NO: 304634 - DNA, 12 bp, Artificial Sequence
  Oligonucleotide primer for the detection of SNP TSC0021028
aaataacaaaaa

SEQ ID NO: 304635 - DNA, 12 bp, Artificial Sequence
  Oligonucleotide primer for the detection of SNP TSC0021028
aaataacgaaaa

SEQ ID NO: 304636 - DNA, 12 bp, Artificial Sequence
  Oligonucleotide primer for the detection of SNP TSC0021028
tttaaattgtta

SEQ ID NO: 304637 - DNA, 12 bp, Artificial Sequence
  Oligonucleotide primer for the detection of SNP TSC0021029
ctttccccaacc

SEQ ID NO: 304638 - DNA, 12 bp, Artificial Sequence
  Oligonucleotide primer for the detection of SNP TSC0021029
agattataaatg

SEQ ID NO: 304639 - DNA, 12 bp, Artificial Sequence
  Oligonucleotide primer for the detection of SNP TSC0021029
agattataaacg

SEQ ID NO: 304640 - DNA, 12 bp, Artificial Sequence
  Oligonucleotide primer for the detection of SNP TSC0021031
ttttgatttttt

SEQ ID NO: 304641 - DNA, 12 bp, Artificial Sequence
  Oligonucleotide primer for the detection of SNP TSC0021031
tcctaatttcct

SEQ ID NO: 304642 - DNA, 12 bp, Artificial Sequence
  Oligonucleotide primer for the detection of SNP TSC0021031
gtgggaagaata

SEQ ID NO: 304643 - DNA, 12 bp, Artificial Sequence
  Oligonucleotide primer for the detection of SNP TSC0021032
atctcttcttac

SEQ ID NO: 304644 - DNA, 12 bp, Artificial Sequence
  Oligonucleotide primer for the detection of SNP TSC0021032
ttggtttgagga

SEQ ID NO: 304645 - DNA, 12 bp, Artificial Sequence
  Oligonucleotide primer for the detection of SNP TSC0021034
tatagaagttat

SEQ ID NO: 304646 - DNA, 12 bp, Artificial Sequence
  Oligonucleotide primer for the detection of SNP TSC0021034
tacaaaaaccat

SEQ ID NO: 304647 - DNA, 12 bp, Artificial Sequence
  Oligonucleotide primer for the detection of SNP TSC0021034
agatttaagttt

SEQ ID NO: 304648 - DNA, 12 bp, Artificial Sequence
  Oligonucleotide primer for the detection of SNP TSC0021035
taactcatacct

SEQ ID NO: 304649 - DNA, 12 bp, Artificial Sequence
  Oligonucleotide primer for the detection of SNP TSC0021035
aaaatgttggga

SEQ ID NO: 304650 - DNA, 12 bp, Artificial Sequence
  Oligonucleotide primer for the detection of SNP TSC0021036
aatttttacttc

SEQ ID NO: 304651 - DNA, 12 bp, Artificial Sequence
  Oligonucleotide primer for the detection of SNP TSC0021036
atcaaattacta

SEQ ID NO: 304652 - DNA, 12 bp, Artificial Sequence
  Oligonucleotide primer for the detection of SNP TSC0021037
aaacaatactaa

SEQ ID NO: 304653 - DNA, 12 bp, Artificial Sequence
  Oligonucleotide primer for the detection of SNP TSC0021037
tctccacctcca

SEQ ID NO: 304654 - DNA, 12 bp, Artificial Sequence
  Oligonucleotide primer for the detection of SNP TSC0021037
agatagtgttgg

SEQ ID NO: 304655 - DNA, 12 bp, Artificial Sequence
  Oligonucleotide primer for the detection of SNP TSC0021038
acccctcaaaac

SEQ ID NO: 304656 - DNA, 12 bp, Artificial Sequence
  Oligonucleotide primer for the detection of SNP TSC0021038
ttgatttttttg

SEQ ID NO: 304657 - DNA, 12 bp, Artificial Sequence
  Oligonucleotide primer for the detection of SNP TSC0021039
acctcttccttc

SEQ ID NO: 304658 - DNA, 12 bp, Artificial Sequence
  Oligonucleotide primer for the detection of SNP TSC0021039
ttggaaagtggg

SEQ ID NO: 304659 - DNA, 12 bp, Artificial Sequence
  Oligonucleotide primer for the detection of SNP TSC0021041
aaatctaattct

SEQ ID NO: 304660 - DNA, 12 bp, Artificial Sequence
  Oligonucleotide primer for the detection of SNP TSC0021041
agttatagagag

SEQ ID NO: 304661 - DNA, 12 bp, Artificial Sequence
  Oligonucleotide primer for the detection of SNP TSC0021042
aaatatcaacat

SEQ ID NO: 304662 - DNA, 12 bp, Artificial Sequence
  Oligonucleotide primer for the detection of SNP TSC0021042
tattttgttgga

SEQ ID NO: 304663 - DNA, 12 bp, Artificial Sequence
  Oligonucleotide primer for the detection of SNP TSC0021042
tattttgtcgga

SEQ ID NO: 304664 - DNA, 12 bp, Artificial Sequence
  Oligonucleotide primer for the detection of SNP TSC0021043
ccaatatacctt

SEQ ID NO: 304665 - DNA, 12 bp, Artificial Sequence
  Oligonucleotide primer for the detection of SNP TSC0021043
aaattgttttag

SEQ ID NO: 304666 - DNA, 12 bp, Artificial Sequence
  Oligonucleotide primer for the detection of SNP TSC0021044
tagtgggagatg

SEQ ID NO: 304667 - DNA, 12 bp, Artificial Sequence
  Oligonucleotide primer for the detection of SNP TSC0021044
caataaaaaata

SEQ ID NO: 304668 - DNA, 12 bp, Artificial Sequence
  Oligonucleotide primer for the detection of SNP TSC0021044
tagaagaaaatg

SEQ ID NO: 304669 - DNA, 12 bp, Artificial Sequence
  Oligonucleotide primer for the detection of SNP TSC0021048
atatcctaaatt

SEQ ID NO: 304670 - DNA, 12 bp, Artificial Sequence
  Oligonucleotide primer for the detection of SNP TSC0021049
tactccataaat

SEQ ID NO: 304671 - DNA, 12 bp, Artificial Sequence
  Oligonucleotide primer for the detection of SNP TSC0021054
acttaatacctt

SEQ ID NO: 304672 - DNA, 12 bp, Artificial Sequence
  Oligonucleotide primer for the detection of SNP TSC0021054
ataaaatgatta

SEQ ID NO: 304673 - DNA, 12 bp, Artificial Sequence
  Oligonucleotide primer for the detection of SNP TSC0021055
tccccttaatta

SEQ ID NO: 304674 - DNA, 12 bp, Artificial Sequence
  Oligonucleotide primer for the detection of SNP TSC0021055
agtagagaatat

SEQ ID NO: 304675 - DNA, 12 bp, Artificial Sequence
  Oligonucleotide primer for the detection of SNP TSC0021055
aacaaaaaacat

SEQ ID NO: 304676 - DNA, 12 bp, Artificial Sequence
  Oligonucleotide primer for the detection of SNP TSC0021059
tattttacaaat

SEQ ID NO: 304677 - DNA, 12 bp, Artificial Sequence
  Oligonucleotide primer for the detection of SNP TSC0021059
tattttacgaat

SEQ ID NO: 304678 - DNA, 12 bp, Artificial Sequence
  Oligonucleotide primer for the detection of SNP TSC0021059
ccttcactcata

SEQ ID NO: 304679 - DNA, 12 bp, Artificial Sequence
  Oligonucleotide primer for the detection of SNP TSC0021059
tgttttatgaat

SEQ ID NO: 304680 - DNA, 12 bp, Artificial Sequence
  Oligonucleotide primer for the detection of SNP TSC0021059
tgttttacgaat

SEQ ID NO: 304681 - DNA, 12 bp, Artificial Sequence
  Oligonucleotide primer for the detection of SNP TSC0021060
ctataatacaaa

SEQ ID NO: 304682 - DNA, 12 bp, Artificial Sequence
  Oligonucleotide primer for the detection of SNP TSC0021060
aacattcaaccc

SEQ ID NO: 304683 - DNA, 12 bp, Artificial Sequence
  Oligonucleotide primer for the detection of SNP TSC0021060
ttgtggtataga

SEQ ID NO: 304684 - DNA, 12 bp, Artificial Sequence
  Oligonucleotide primer for the detection of SNP TSC0021061
atattaatctcc

SEQ ID NO: 304685 - DNA, 12 bp, Artificial Sequence
  Oligonucleotide primer for the detection of SNP TSC0021061
tgaatatatgaa

SEQ ID NO: 304686 - DNA, 12 bp, Artificial Sequence
  Oligonucleotide primer for the detection of SNP TSC0021062
cataaaataaca

SEQ ID NO: 304687 - DNA, 12 bp, Artificial Sequence
  Oligonucleotide primer for the detection of SNP TSC0021062
agagagttgggt

SEQ ID NO: 304688 - DNA, 12 bp, Artificial Sequence
  Oligonucleotide primer for the detection of SNP TSC0021062
aaaaaactaaac

SEQ ID NO: 304689 - DNA, 12 bp, Artificial Sequence
  Oligonucleotide primer for the detection of SNP TSC0021062
tatgaaatgata

SEQ ID NO: 304690 - DNA, 12 bp, Artificial Sequence
  Oligonucleotide primer for the detection of SNP TSC0021063
ctacttcataca

SEQ ID NO: 304691 - DNA, 12 bp, Artificial Sequence
  Oligonucleotide primer for the detection of SNP TSC0021063
ctacttcatacg

SEQ ID NO: 304692 - DNA, 12 bp, Artificial Sequence
  Oligonucleotide primer for the detection of SNP TSC0021063
actcacaacaac

SEQ ID NO: 304693 - DNA, 12 bp, Artificial Sequence
  Oligonucleotide primer for the detection of SNP TSC0021063
ttgttttatatg

SEQ ID NO: 304694 - DNA, 12 bp, Artificial Sequence
  Oligonukleotid-Primer
ttgttttatacg

SEQ ID NO: 304695 - DNA, 12 bp, Artificial Sequence
  Oligonucleotide primer for the detection of SNP TSC0021064
aaccaccatacc

SEQ ID NO: 304696 - DNA, 12 bp, Artificial Sequence
  Oligonucleotide primer for the detection of SNP TSC0021064
aaccaccgtacc

SEQ ID NO: 304697 - DNA, 12 bp, Artificial Sequence
  Oligonucleotide primer for the detection of SNP TSC0021064
atataatttagg

SEQ ID NO: 304698 - DNA, 12 bp, Artificial Sequence
  Oligonucleotide primer for the detection of SNP TSC0021064
atacaactcaaa

SEQ ID NO: 304699 - DNA, 12 bp, Artificial Sequence
  Oligonucleotide primer for the detection of SNP TSC0021065
aatctctaaaat

SEQ ID NO: 304700 - DNA, 12 bp, Artificial Sequence
  Oligonucleotide primer for the detection of SNP TSC0021065
ttttttatgtta

SEQ ID NO: 304701 - DNA, 12 bp, Artificial Sequence
  Oligonucleotide primer for the detection of SNP TSC0021067
attcaaaatcaa

SEQ ID NO: 304702 - DNA, 12 bp, Artificial Sequence
  Oligonucleotide primer for the detection of SNP TSC0021067
atagtttttggg

SEQ ID NO: 304703 - DNA, 12 bp, Artificial Sequence
  Oligonucleotide primer for the detection of SNP TSC0021067
atagttttcggg

SEQ ID NO: 304704 - DNA, 12 bp, Artificial Sequence
  Oligonucleotide primer for the detection of SNP TSC0021067
acaattcccaaa

SEQ ID NO: 304705 - DNA, 12 bp, Artificial Sequence
  Oligonucleotide primer for the detection of SNP TSC0021067
acaattcccgaa

SEQ ID NO: 304706 - DNA, 12 bp, Artificial Sequence
  Oligonucleotide primer for the detection of SNP TSC0021067
atttaggattag

SEQ ID NO: 304707 - DNA, 12 bp, Artificial Sequence
  Oligonucleotide primer for the detection of SNP TSC0021068
ttcaatacaata

SEQ ID NO: 304708 - DNA, 12 bp, Artificial Sequence
  Oligonucleotide primer for the detection of SNP TSC0021068
ttttgataaagt

SEQ ID NO: 304709 - DNA, 12 bp, Artificial Sequence
  Oligonucleotide primer for the detection of SNP TSC0021068
cctaataaaata

SEQ ID NO: 304710 - DNA, 12 bp, Artificial Sequence
  Oligonucleotide primer for the detection of SNP TSC0021068
tttagtgtaata

SEQ ID NO: 304711 - DNA, 12 bp, Artificial Sequence
  Oligonucleotide primer for the detection of SNP TSC0021069
aattacaaacgt

SEQ ID NO: 304712 - DNA, 12 bp, Artificial Sequence
  Oligonucleotide primer for the detection of SNP TSC0021069
ttgggtgtggtg

SEQ ID NO: 304713 - DNA, 12 bp, Artificial Sequence
  Oligonucleotide primer for the detection of SNP TSC0021069
tcgggtgtggtg

SEQ ID NO: 304714 - DNA, 12 bp, Artificial Sequence
  Oligonucleotide primer for the detection of SNP TSC0021069
ttgggcgtggtg

SEQ ID NO: 304715 - DNA, 12 bp, Artificial Sequence
  Oligonucleotide primer for the detection of SNP TSC0021069
tcgggcgtggtg

SEQ ID NO: 304716 - DNA, 12 bp, Artificial Sequence
  Oligonucleotide primer for the detection of SNP TSC0021070
ggtgtggtgatt

SEQ ID NO: 304717 - DNA, 12 bp, Artificial Sequence
  Oligonucleotide primer for the detection of SNP TSC0021070
ggcgtggtgatt

SEQ ID NO: 304718 - DNA, 12 bp, Artificial Sequence
  Oligonucleotide primer for the detection of SNP TSC0021070
gattataggcgt

SEQ ID NO: 304719 - DNA, 12 bp, Artificial Sequence
  Oligonucleotide primer for the detection of SNP TSC0021071
atacattataat

SEQ ID NO: 304720 - DNA, 12 bp, Artificial Sequence
  Oligonucleotide primer for the detection of SNP TSC0021074
aatacttaacat

SEQ ID NO: 304721 - DNA, 12 bp, Artificial Sequence
  Oligonucleotide primer for the detection of SNP TSC0021074
atattgatttta

SEQ ID NO: 304722 - DNA, 12 bp, Artificial Sequence
  Oligonucleotide primer for the detection of SNP TSC0021076
atttttttgttg

SEQ ID NO: 304723 - DNA, 12 bp, Artificial Sequence
  Oligonucleotide primer for the detection of SNP TSC0021076
attttttcgttg

SEQ ID NO: 304724 - DNA, 12 bp, Artificial Sequence
  Oligonucleotide primer for the detection of SNP TSC0021077
atttttatattg

SEQ ID NO: 304725 - DNA, 12 bp, Artificial Sequence
  Oligonucleotide primer for the detection of SNP TSC0021077
atttttatatcg

SEQ ID NO: 304726 - DNA, 12 bp, Artificial Sequence
  Oligonucleotide primer for the detection of SNP TSC0021077
atctttacacca

SEQ ID NO: 304727 - DNA, 12 bp, Artificial Sequence
  Oligonucleotide primer for the detection of SNP TSC0021077
atctttacaccg

SEQ ID NO: 304728 - DNA, 12 bp, Artificial Sequence
  Oligonucleotide primer for the detection of SNP TSC0021077
tgaggagtgagt

SEQ ID NO: 304729 - DNA, 12 bp, Artificial Sequence
  Oligonucleotide primer for the detection of SNP TSC0021078
tatttattaatt

SEQ ID NO: 304730 - DNA, 12 bp, Artificial Sequence
  Oligonucleotide primer for the detection of SNP TSC0021078
cacccatcaacc

SEQ ID NO: 304731 - DNA, 12 bp, Artificial Sequence
  Oligonucleotide primer for the detection of SNP TSC0021078
taatatagatga

SEQ ID NO: 304732 - DNA, 12 bp, Artificial Sequence
  Oligonucleotide primer for the detection of SNP TSC0021079
ataataatttcc

SEQ ID NO: 304733 - DNA, 12 bp, Artificial Sequence
  Oligonucleotide primer for the detection of SNP TSC0021079
gatgtggatgaa

SEQ ID NO: 304734 - DNA, 12 bp, Artificial Sequence
  Oligonucleotide primer for the detection of SNP TSC0021079
gacgtggatgaa

SEQ ID NO: 304735 - DNA, 12 bp, Artificial Sequence
  Oligonucleotide primer for the detection of SNP TSC0021080
accaaacctcat

SEQ ID NO: 304736 - DNA, 12 bp, Artificial Sequence
  Oligonucleotide primer for the detection of SNP TSC0021081
tctttctaaact

SEQ ID NO: 304737 - DNA, 12 bp, Artificial Sequence
  Oligonucleotide primer for the detection of SNP TSC0021081
tagattttatga

SEQ ID NO: 304738 - DNA, 12 bp, Artificial Sequence
  Oligonucleotide primer for the detection of SNP TSC0021081
tagattttacga

SEQ ID NO: 304739 - DNA, 12 bp, Artificial Sequence
  Oligonucleotide primer for the detection of SNP TSC0021082
tttctttcttcc

SEQ ID NO: 304740 - DNA, 12 bp, Artificial Sequence
  Oligonucleotide primer for the detection of SNP TSC0021082
aaaaaaaaagga

SEQ ID NO: 304741 - DNA, 12 bp, Artificial Sequence
  Oligonucleotide primer for the detection of SNP TSC0021083
atttaatttaaa

SEQ ID NO: 304742 - DNA, 12 bp, Artificial Sequence
  Oligonucleotide primer for the detection of SNP TSC0021083
gttttaggtgat

SEQ ID NO: 304743 - DNA, 12 bp, Artificial Sequence
  Oligonucleotide primer for the detection of SNP TSC0021083
aatcttaaataa

SEQ ID NO: 304744 - DNA, 12 bp, Artificial Sequence
  Oligonucleotide primer for the detection of SNP TSC0021083
taatttgattta

SEQ ID NO: 304745 - DNA, 12 bp, Artificial Sequence
  Oligonucleotide primer for the detection of SNP TSC0021084
aattatattttc

SEQ ID NO: 304746 - DNA, 12 bp, Artificial Sequence
  Oligonucleotide primer for the detection of SNP TSC0021084
gtttaggttaat

SEQ ID NO: 304747 - DNA, 12 bp, Artificial Sequence
  Oligonucleotide primer for the detection of SNP TSC0021084
cctaaaccaata

SEQ ID NO: 304748 - DNA, 12 bp, Artificial Sequence
  Oligonucleotide primer for the detection of SNP TSC0021089
catatacaataa

SEQ ID NO: 304749 - DNA, 12 bp, Artificial Sequence
  Oligonucleotide primer for the detection of SNP TSC0021089
attttatgggat

SEQ ID NO: 304750 - DNA, 12 bp, Artificial Sequence
  Oligonucleotide primer for the detection of SNP TSC0021089
attttatgggac

SEQ ID NO: 304751 - DNA, 12 bp, Artificial Sequence
  Oligonucleotide primer for the detection of SNP TSC0021089
atcttataaaac

SEQ ID NO: 304752 - DNA, 12 bp, Artificial Sequence
  Oligonucleotide primer for the detection of SNP TSC0021089
atatataatggt

SEQ ID NO: 304753 - DNA, 12 bp, Artificial Sequence
  Oligonucleotide primer for the detection of SNP TSC0021094
tatttaaaaaca

SEQ ID NO: 304754 - DNA, 12 bp, Artificial Sequence
  Oligonucleotide primer for the detection of SNP TSC0021094
aataataaaaat

SEQ ID NO: 304755 - DNA, 12 bp, Artificial Sequence
  Oligonucleotide primer for the detection of SNP TSC0021094
tatttgaaaata

SEQ ID NO: 304756 - DNA, 12 bp, Artificial Sequence
  Oligonucleotide primer for the detection of SNP TSC0021095
acacatactatc

SEQ ID NO: 304757 - DNA, 12 bp, Artificial Sequence
  Oligonucleotide primer for the detection of SNP TSC0021095
tgtagttagtgg

SEQ ID NO: 304758 - DNA, 12 bp, Artificial Sequence
  Oligonucleotide primer for the detection of SNP TSC0021096
cataacccaaat

SEQ ID NO: 304759 - DNA, 12 bp, Artificial Sequence
  Oligonucleotide primer for the detection of SNP TSC0021096
gtagttatagag

SEQ ID NO: 304760 - DNA, 12 bp, Artificial Sequence
  Oligonucleotide primer for the detection of SNP TSC0021097
cttctctaaaca

SEQ ID NO: 304761 - DNA, 12 bp, Artificial Sequence
  Oligonucleotide primer for the detection of SNP TSC0021097
gtgtaatagggt

SEQ ID NO: 304762 - DNA, 12 bp, Artificial Sequence
  Oligonucleotide primer for the detection of SNP TSC0021097
atacaataaaat

SEQ ID NO: 304763 - DNA, 12 bp, Artificial Sequence
  Oligonucleotide primer for the detection of SNP TSC0021098
aaataataaaat

SEQ ID NO: 304764 - DNA, 12 bp, Artificial Sequence
  Oligonucleotide primer for the detection of SNP TSC0021099
aaacaataatcc

SEQ ID NO: 304765 - DNA, 12 bp, Artificial Sequence
  Oligonucleotide primer for the detection of SNP TSC0021099
ttacaccccaaa

SEQ ID NO: 304766 - DNA, 12 bp, Artificial Sequence
  Oligonucleotide primer for the detection of SNP TSC0021099
ggatagtgattt

SEQ ID NO: 304767 - DNA, 12 bp, Artificial Sequence
  Oligonucleotide primer for the detection of SNP TSC0021100
aatttcacttca

SEQ ID NO: 304768 - DNA, 12 bp, Artificial Sequence
  Oligonucleotide primer for the detection of SNP TSC0021100
ttaatgggaaat

SEQ ID NO: 304769 - DNA, 12 bp, Artificial Sequence
  Oligonucleotide primer for the detection of SNP TSC0021101
tgggatttttgt

SEQ ID NO: 304770 - DNA, 12 bp, Artificial Sequence
  Oligonucleotide primer for the detection of SNP TSC0021101
taaaatctttac

SEQ ID NO: 304771 - DNA, 12 bp, Artificial Sequence
  Oligonucleotide primer for the detection of SNP TSC0021101
agatgttgatga

SEQ ID NO: 304772 - DNA, 12 bp, Artificial Sequence
  Oligonucleotide primer for the detection of SNP TSC0021102
tctctttaattc

SEQ ID NO: 304773 - DNA, 12 bp, Artificial Sequence
  Oligonucleotide primer for the detection of SNP TSC0021102
gaatttgtgggg

SEQ ID NO: 304774 - DNA, 12 bp, Artificial Sequence
  Oligonucleotide primer for the detection of SNP TSC0021106
cctccaacctaa

SEQ ID NO: 304775 - DNA, 12 bp, Artificial Sequence
  Oligonucleotide primer for the detection of SNP TSC0021106
ttcttactttat

SEQ ID NO: 304776 - DNA, 12 bp, Artificial Sequence
  Oligonucleotide primer for the detection of SNP TSC0021106
tttttagtttgg

SEQ ID NO: 304777 - DNA, 12 bp, Artificial Sequence
  Oligonucleotide primer for the detection of SNP TSC0021107
acataataactt

SEQ ID NO: 304778 - DNA, 12 bp, Artificial Sequence
  Oligonucleotide primer for the detection of SNP TSC0021107
acgtaataactt

SEQ ID NO: 304779 - DNA, 12 bp, Artificial Sequence
  Oligonucleotide primer for the detection of SNP TSC0021108
accttttctccc

SEQ ID NO: 304780 - DNA, 12 bp, Artificial Sequence
  Oligonucleotide primer for the detection of SNP TSC0021108
atttttttggaa

SEQ ID NO: 304781 - DNA, 12 bp, Artificial Sequence
  Oligonucleotide primer for the detection of SNP TSC0021110
ccaaccataaca

SEQ ID NO: 304782 - DNA, 12 bp, Artificial Sequence
  Oligonucleotide primer for the detection of SNP TSC0021110
atttagtttgat

SEQ ID NO: 304783 - DNA, 12 bp, Artificial Sequence
  Oligonucleotide primer for the detection of SNP TSC0021110
atccaatctaat

SEQ ID NO: 304784 - DNA, 12 bp, Artificial Sequence
  Oligonucleotide primer for the detection of SNP TSC0021110
ttaattataata

SEQ ID NO: 304785 - DNA, 12 bp, Artificial Sequence
  Oligonucleotide primer for the detection of SNP TSC0021114
gaaaggagtttt

SEQ ID NO: 304786 - DNA, 12 bp, Artificial Sequence
  Oligonucleotide primer for the detection of SNP TSC0021114
gaaaggagtttc

SEQ ID NO: 304787 - DNA, 12 bp, Artificial Sequence
  Oligonucleotide primer for the detection of SNP TSC0021114
ggaatgaggggt

SEQ ID NO: 304788 - DNA, 12 bp, Artificial Sequence
  Oligonucleotide primer for the detection of SNP TSC0021115
tcctaaactaat

SEQ ID NO: 304789 - DNA, 12 bp, Artificial Sequence
  Oligonucleotide primer for the detection of SNP TSC0021115
ataattaatagt

SEQ ID NO: 304790 - DNA, 12 bp, Artificial Sequence
  Oligonucleotide primer for the detection of SNP TSC0021115
aataatcaataa

SEQ ID NO: 304791 - DNA, 12 bp, Artificial Sequence
  Oligonucleotide primer for the detection of SNP TSC0021115
ttttgggttggt

SEQ ID NO: 304792 - DNA, 12 bp, Artificial Sequence
  Oligonucleotide primer for the detection of SNP TSC0021116
tccaaaaacaac

SEQ ID NO: 304793 - DNA, 12 bp, Artificial Sequence
  Oligonucleotide primer for the detection of SNP TSC0021116
tccaaaaacgac

SEQ ID NO: 304794 - DNA, 12 bp, Artificial Sequence
  Oligonucleotide primer for the detection of SNP TSC0021116
ggtatgtttttg

SEQ ID NO: 304795 - DNA, 12 bp, Artificial Sequence
  Oligonucleotide primer for the detection of SNP TSC0021116
aatatattccta

SEQ ID NO: 304796 - DNA, 12 bp, Artificial Sequence
  Oligonucleotide primer for the detection of SNP TSC0021116
tttaaaaatgat

SEQ ID NO: 304797 - DNA, 12 bp, Artificial Sequence
  Oligonucleotide primer for the detection of SNP TSC0021116
tttaaaaacgat

SEQ ID NO: 304798 - DNA, 12 bp, Artificial Sequence
  Oligonucleotide primer for the detection of SNP TSC0021117
ctcaaaaattta

SEQ ID NO: 304799 - DNA, 12 bp, Artificial Sequence
  Oligonukleotid-Primer
tttattgtagtt

SEQ ID NO: 304800 - DNA, 12 bp, Artificial Sequence
  Oligonucleotide primer for the detection of SNP TSC0021117
gtttaggagttt

SEQ ID NO: 304801 - DNA, 12 bp, Artificial Sequence
  Oligonucleotide primer for the detection of SNP TSC0021118
ttacatacatct

SEQ ID NO: 304802 - DNA, 12 bp, Artificial Sequence
  Oligonucleotide primer for the detection of SNP TSC0021118
ttacgtacatct

SEQ ID NO: 304803 - DNA, 12 bp, Artificial Sequence
  Oligonucleotide primer for the detection of SNP TSC0021118
tagtttattgtg

SEQ ID NO: 304804 - DNA, 12 bp, Artificial Sequence
  Oligonucleotide primer for the detection of SNP TSC0021118
tagtttatcgtg

SEQ ID NO: 304805 - DNA, 12 bp, Artificial Sequence
  Oligonucleotide primer for the detection of SNP TSC0021121
tgggtgtggtgg

SEQ ID NO: 304806 - DNA, 12 bp, Artificial Sequence
  Oligonucleotide primer for the detection of SNP TSC0021121
tgggcgtggtgg

SEQ ID NO: 304807 - DNA, 12 bp, Artificial Sequence
  Oligonucleotide primer for the detection of SNP TSC0021121
tgggtgcggtgg

SEQ ID NO: 304808 - DNA, 12 bp, Artificial Sequence
  Oligonucleotide primer for the detection of SNP TSC0021121
tgggcgcggtgg

SEQ ID NO: 304809 - DNA, 12 bp, Artificial Sequence
  Oligonucleotide primer for the detection of SNP TSC0021121
taaacacgataa

SEQ ID NO: 304810 - DNA, 12 bp, Artificial Sequence
  Oligonucleotide primer for the detection of SNP TSC0021121
taaacgcaataa

SEQ ID NO: 304811 - DNA, 12 bp, Artificial Sequence
  Oligonucleotide primer for the detection of SNP TSC0021121
taaacgcgataa

SEQ ID NO: 304812 - DNA, 12 bp, Artificial Sequence
  Oligonucleotide primer for the detection of SNP TSC0021121
gggattataggc

SEQ ID NO: 304813 - DNA, 12 bp, Artificial Sequence
  Oligonucleotide primer for the detection of SNP TSC0021122
aacaattatacc

SEQ ID NO: 304814 - DNA, 12 bp, Artificial Sequence
  Oligonucleotide primer for the detection of SNP TSC0021122
tatgtagtggta

SEQ ID NO: 304815 - DNA, 12 bp, Artificial Sequence
  Oligonucleotide primer for the detection of SNP TSC0021123
aaaatacattaa

SEQ ID NO: 304816 - DNA, 12 bp, Artificial Sequence
  Oligonucleotide primer for the detection of SNP TSC0021123
cgttattacgtt

SEQ ID NO: 304817 - DNA, 12 bp, Artificial Sequence
  Oligonucleotide primer for the detection of SNP TSC0021123
aaaatatattag

SEQ ID NO: 304818 - DNA, 12 bp, Artificial Sequence
  Oligonucleotide primer for the detection of SNP TSC0021124
ccaaaaccaaac

SEQ ID NO: 304819 - DNA, 12 bp, Artificial Sequence
  Oligonucleotide primer for the detection of SNP TSC0021124
ccaaaaccgaac

SEQ ID NO: 304820 - DNA, 12 bp, Artificial Sequence
  Oligonucleotide primer for the detection of SNP TSC0021124
ttagggttgggt

SEQ ID NO: 304821 - DNA, 12 bp, Artificial Sequence
  Oligonucleotide primer for the detection of SNP TSC0021124
ttagggtcgggt

SEQ ID NO: 304822 - DNA, 12 bp, Artificial Sequence
  Oligonucleotide primer for the detection of SNP TSC0021124
ttagggttgggc

SEQ ID NO: 304823 - DNA, 12 bp, Artificial Sequence
  Oligonucleotide primer for the detection of SNP TSC0021124
ttagggtcgggc

SEQ ID NO: 304824 - DNA, 12 bp, Artificial Sequence
  Oligonucleotide primer for the detection of SNP TSC0021126
cactatactccc

SEQ ID NO: 304825 - DNA, 12 bp, Artificial Sequence
  Oligonucleotide primer for the detection of SNP TSC0021126
tttgttattaag

SEQ ID NO: 304826 - DNA, 12 bp, Artificial Sequence
  Oligonucleotide primer for the detection of SNP TSC0021127
ttactttttaat

SEQ ID NO: 304827 - DNA, 12 bp, Artificial Sequence
  Oligonucleotide primer for the detection of SNP TSC0021127
atcttattttaa

SEQ ID NO: 304828 - DNA, 12 bp, Artificial Sequence
  Oligonucleotide primer for the detection of SNP TSC0021127
ttgttttttagt

SEQ ID NO: 304829 - DNA, 12 bp, Artificial Sequence
  Oligonucleotide primer for the detection of SNP TSC0021128
ttataatacttc

SEQ ID NO: 304830 - DNA, 12 bp, Artificial Sequence
  Oligonucleotide primer for the detection of SNP TSC0021128
taaaaagtaatg

SEQ ID NO: 304831 - DNA, 12 bp, Artificial Sequence
  Oligonucleotide primer for the detection of SNP TSC0021129
aaatattattta

SEQ ID NO: 304832 - DNA, 12 bp, Artificial Sequence
  Oligonucleotide primer for the detection of SNP TSC0021129
gtattataagtt

SEQ ID NO: 304833 - DNA, 12 bp, Artificial Sequence
  Oligonucleotide primer for the detection of SNP TSC0021129
tatcacaaatta

SEQ ID NO: 304834 - DNA, 12 bp, Artificial Sequence
  Oligonucleotide primer for the detection of SNP TSC0021129
taaatattgttt

SEQ ID NO: 304835 - DNA, 12 bp, Artificial Sequence
  Oligonucleotide primer for the detection of SNP TSC0021130
ccaaccctcttt

SEQ ID NO: 304836 - DNA, 12 bp, Artificial Sequence
  Oligonucleotide primer for the detection of SNP TSC0021130
ggatatttttta

SEQ ID NO: 304837 - DNA, 12 bp, Artificial Sequence
  Oligonucleotide primer for the detection of SNP TSC0021131
tgtttagagtaa

SEQ ID NO: 304838 - DNA, 12 bp, Artificial Sequence
  Oligonucleotide primer for the detection of SNP TSC0021132
tacttacttatc

SEQ ID NO: 304839 - DNA, 12 bp, Artificial Sequence
  Oligonucleotide primer for the detection of SNP TSC0021132
tatagggggtgg

SEQ ID NO: 304840 - DNA, 12 bp, Artificial Sequence
  Oligonucleotide primer for the detection of SNP TSC0021132
tatttgtttgtt

SEQ ID NO: 304841 - DNA, 12 bp, Artificial Sequence
  Oligonucleotide primer for the detection of SNP TSC0021132
tatttgtttgtc

SEQ ID NO: 304842 - DNA, 12 bp, Artificial Sequence
  Oligonucleotide primer for the detection of SNP TSC0021133
aacataaaaaat

SEQ ID NO: 304843 - DNA, 12 bp, Artificial Sequence
  Oligonucleotide primer for the detection of SNP TSC0021133
aacgtaaaaaat

SEQ ID NO: 304844 - DNA, 12 bp, Artificial Sequence
  Oligonucleotide primer for the detection of SNP TSC0021133
tgtttattgtta

SEQ ID NO: 304845 - DNA, 12 bp, Artificial Sequence
  Oligonucleotide primer for the detection of SNP TSC0021134
cataataactat

SEQ ID NO: 304846 - DNA, 12 bp, Artificial Sequence
  Oligonucleotide primer for the detection of SNP TSC0021134
aagtatttatta

SEQ ID NO: 304847 - DNA, 12 bp, Artificial Sequence
  Oligonucleotide primer for the detection of SNP TSC0021135
ctacaaaaataa

SEQ ID NO: 304848 - DNA, 12 bp, Artificial Sequence
  Oligonucleotide primer for the detection of SNP TSC0021135
agagatgggaat

SEQ ID NO: 304849 - DNA, 12 bp, Artificial Sequence
  Oligonucleotide primer for the detection of SNP TSC0021135
tgtagaaataat

SEQ ID NO: 304850 - DNA, 12 bp, Artificial Sequence
  Oligonucleotide primer for the detection of SNP TSC0021140
attcactattat

SEQ ID NO: 304851 - DNA, 12 bp, Artificial Sequence
  Oligonucleotide primer for the detection of SNP TSC0021140
attgttttttaa

SEQ ID NO: 304852 - DNA, 12 bp, Artificial Sequence
  Oligonucleotide primer for the detection of SNP TSC0021141
aaaccctaccaa

SEQ ID NO: 304853 - DNA, 12 bp, Artificial Sequence
  Oligonucleotide primer for the detection of SNP TSC0021141
gttttgaggggg

SEQ ID NO: 304854 - DNA, 12 bp, Artificial Sequence
  Oligonucleotide primer for the detection of SNP TSC0021141
gtttcgaggggg

SEQ ID NO: 304855 - DNA, 12 bp, Artificial Sequence
  Oligonucleotide primer for the detection of SNP TSC0021141
accccaaaaaaa

SEQ ID NO: 304856 - DNA, 12 bp, Artificial Sequence
  Oligonucleotide primer for the detection of SNP TSC0021141
accccgaaaaaa

SEQ ID NO: 304857 - DNA, 12 bp, Artificial Sequence
  Oligonucleotide primer for the detection of SNP TSC0021141
aagttttgttag

SEQ ID NO: 304858 - DNA, 12 bp, Artificial Sequence
  Oligonucleotide primer for the detection of SNP TSC0021142
cgaaaaaaatac

SEQ ID NO: 304859 - DNA, 12 bp, Artificial Sequence
  Oligonucleotide primer for the detection of SNP TSC0021142
ttataggggtag

SEQ ID NO: 304860 - DNA, 12 bp, Artificial Sequence
  Oligonucleotide primer for the detection of SNP TSC0021143
tattgttgatat

SEQ ID NO: 304861 - DNA, 12 bp, Artificial Sequence
  Oligonucleotide primer for the detection of SNP TSC0021143
cattactaatat

SEQ ID NO: 304862 - DNA, 12 bp, Artificial Sequence
  Oligonucleotide primer for the detection of SNP TSC0021144
aacctaactccc

SEQ ID NO: 304863 - DNA, 12 bp, Artificial Sequence
  Oligonucleotide primer for the detection of SNP TSC0021144
gttaggatgtta

SEQ ID NO: 304864 - DNA, 12 bp, Artificial Sequence
  Oligonucleotide primer for the detection of SNP TSC0021144
accaaaatacta

SEQ ID NO: 304865 - DNA, 12 bp, Artificial Sequence
  Oligonucleotide primer for the detection of SNP TSC0021144
ggtttggttttt

SEQ ID NO: 304866 - DNA, 12 bp, Artificial Sequence
  Oligonucleotide primer for the detection of SNP TSC0021145
actcatcctatc

SEQ ID NO: 304867 - DNA, 12 bp, Artificial Sequence
  Oligonucleotide primer for the detection of SNP TSC0021145
ttttgtttagga

SEQ ID NO: 304868 - DNA, 12 bp, Artificial Sequence
  Oligonucleotide primer for the detection of SNP TSC0021145
ctctacccaaaa

SEQ ID NO: 304869 - DNA, 12 bp, Artificial Sequence
  Oligonucleotide primer for the detection of SNP TSC0021145
atttattttgtt

SEQ ID NO: 304870 - DNA, 12 bp, Artificial Sequence
  Oligonucleotide primer for the detection of SNP TSC0021146
tttcactatatt

SEQ ID NO: 304871 - DNA, 12 bp, Artificial Sequence
  Oligonucleotide primer for the detection of SNP TSC0021146
agattagtttgg

SEQ ID NO: 304872 - DNA, 12 bp, Artificial Sequence
  Oligonucleotide primer for the detection of SNP TSC0021147
atatagtgaaat

SEQ ID NO: 304873 - DNA, 12 bp, Artificial Sequence
  Oligonucleotide primer for the detection of SNP TSC0021147
atatagtgaaac

SEQ ID NO: 304874 - DNA, 12 bp, Artificial Sequence
  Oligonucleotide primer for the detection of SNP TSC0021148
taactaaaactc

SEQ ID NO: 304875 - DNA, 12 bp, Artificial Sequence
  Oligonucleotide primer for the detection of SNP TSC0021148
tggttttgattc

SEQ ID NO: 304876 - DNA, 12 bp, Artificial Sequence
  Oligonucleotide primer for the detection of SNP TSC0021148
ctaattttaatt

SEQ ID NO: 304877 - DNA, 12 bp, Artificial Sequence
  Oligonucleotide primer for the detection of SNP TSC0021148
tagttggagttt

SEQ ID NO: 304878 - DNA, 12 bp, Artificial Sequence
  Oligonucleotide primer for the detection of SNP TSC0021149
actaataacttc

SEQ ID NO: 304879 - DNA, 12 bp, Artificial Sequence
  Oligonucleotide primer for the detection of SNP TSC0021149
atagagatttag

SEQ ID NO: 304880 - DNA, 12 bp, Artificial Sequence
  Oligonucleotide primer for the detection of SNP TSC0021150
cacaattaaacc

SEQ ID NO: 304881 - DNA, 12 bp, Artificial Sequence
  Oligonucleotide primer for the detection of SNP TSC0021150
gatttgatttgg

SEQ ID NO: 304882 - DNA, 12 bp, Artificial Sequence
  Oligonucleotide primer for the detection of SNP TSC0021150
aatttaacctaa

SEQ ID NO: 304883 - DNA, 12 bp, Artificial Sequence
  Oligonucleotide primer for the detection of SNP TSC0021150
tatagttgagtt

SEQ ID NO: 304884 - DNA, 12 bp, Artificial Sequence
  Oligonucleotide primer for the detection of SNP TSC0021152
aaaaaatctaca

SEQ ID NO: 304885 - DNA, 12 bp, Artificial Sequence
  Oligonucleotide primer for the detection of SNP TSC0021152
aatttatatttt

SEQ ID NO: 304886 - DNA, 12 bp, Artificial Sequence
  Oligonucleotide primer for the detection of SNP TSC0021152
aatttatatctt

SEQ ID NO: 304887 - DNA, 12 bp, Artificial Sequence
  Oligonucleotide primer for the detection of SNP TSC0021152
aagaggtttgta

SEQ ID NO: 304888 - DNA, 12 bp, Artificial Sequence
  Oligonukleotid-Primer
attttttcctat

SEQ ID NO: 304889 - DNA, 12 bp, Artificial Sequence
  Oligonucleotide primer for the detection of SNP TSC0021154
gttaggtgatga

SEQ ID NO: 304890 - DNA, 12 bp, Artificial Sequence
  Oligonucleotide primer for the detection of SNP TSC0021155
tataataattag

SEQ ID NO: 304891 - DNA, 12 bp, Artificial Sequence
  Oligonucleotide primer for the detection of SNP TSC0021156
ccaattccccac

SEQ ID NO: 304892 - DNA, 12 bp, Artificial Sequence
  Oligonukleotid-Primer
aagagataattt

SEQ ID NO: 304893 - DNA, 12 bp, Artificial Sequence
  Oligonucleotide primer for the detection of SNP TSC0021159
tacacctaacct

SEQ ID NO: 304894 - DNA, 12 bp, Artificial Sequence
  Oligonucleotide primer for the detection of SNP TSC0021159
tacgcctaacct

SEQ ID NO: 304895 - DNA, 12 bp, Artificial Sequence
  Oligonucleotide primer for the detection of SNP TSC0021159
atatagaagggt

SEQ ID NO: 304896 - DNA, 12 bp, Artificial Sequence
  Oligonucleotide primer for the detection of SNP TSC0021159
tgcgtttggttt

SEQ ID NO: 304897 - DNA, 12 bp, Artificial Sequence
  Oligonucleotide primer for the detection of SNP TSC0021160
ctttaaaaaaat

SEQ ID NO: 304898 - DNA, 12 bp, Artificial Sequence
  Oligonucleotide primer for the detection of SNP TSC0021160
tatgaattaaag

SEQ ID NO: 304899 - DNA, 12 bp, Artificial Sequence
  Oligonucleotide primer for the detection of SNP TSC0021161
tcctttcattat

SEQ ID NO: 304900 - DNA, 12 bp, Artificial Sequence
  Oligonucleotide primer for the detection of SNP TSC0021161
ttttaggatggg

SEQ ID NO: 304901 - DNA, 12 bp, Artificial Sequence
  Oligonucleotide primer for the detection of SNP TSC0021162
atatttaaactc

SEQ ID NO: 304902 - DNA, 12 bp, Artificial Sequence
  Oligonucleotide primer for the detection of SNP TSC0021162
atttaaatattg

SEQ ID NO: 304903 - DNA, 12 bp, Artificial Sequence
  Oligonucleotide primer for the detection of SNP TSC0021162
acttaaatatta

SEQ ID NO: 304904 - DNA, 12 bp, Artificial Sequence
  Oligonucleotide primer for the detection of SNP TSC0021163
aaacctcccatt

SEQ ID NO: 304905 - DNA, 12 bp, Artificial Sequence
  Oligonucleotide primer for the detection of SNP TSC0021163
aaacctcccgtt

SEQ ID NO: 304906 - DNA, 12 bp, Artificial Sequence
  Oligonucleotide primer for the detection of SNP TSC0021163
gagttatttggg

SEQ ID NO: 304907 - DNA, 12 bp, Artificial Sequence
  Oligonucleotide primer for the detection of SNP TSC0021164
aactctcaatcc

SEQ ID NO: 304908 - DNA, 12 bp, Artificial Sequence
  Oligonucleotide primer for the detection of SNP TSC0021164
ttagttaagtta

SEQ ID NO: 304909 - DNA, 12 bp, Artificial Sequence
  Oligonucleotide primer for the detection of SNP TSC0021164
ccaaccaaacca

SEQ ID NO: 304910 - DNA, 12 bp, Artificial Sequence
  Oligonucleotide primer for the detection of SNP TSC0021164
gatttttagttt

SEQ ID NO: 304911 - DNA, 12 bp, Artificial Sequence
  Oligonucleotide primer for the detection of SNP TSC0021165
aacccctcatac

SEQ ID NO: 304912 - DNA, 12 bp, Artificial Sequence
  Oligonucleotide primer for the detection of SNP TSC0021165
taggaattaaaa

SEQ ID NO: 304913 - DNA, 12 bp, Artificial Sequence
  Oligonucleotide primer for the detection of SNP TSC0021166
ataactaaaatt

SEQ ID NO: 304914 - DNA, 12 bp, Artificial Sequence
  Oligonucleotide primer for the detection of SNP TSC0021166
tggtggtgtatg

SEQ ID NO: 304915 - DNA, 12 bp, Artificial Sequence
  Oligonucleotide primer for the detection of SNP TSC0021168
tacttctatctc

SEQ ID NO: 304916 - DNA, 12 bp, Artificial Sequence
  Oligonucleotide primer for the detection of SNP TSC0021168
ttattatttttg

SEQ ID NO: 304917 - DNA, 12 bp, Artificial Sequence
  Oligonucleotide primer for the detection of SNP TSC0021168
ttattattctta

SEQ ID NO: 304918 - DNA, 12 bp, Artificial Sequence
  Oligonucleotide primer for the detection of SNP TSC0021169
cccaaaaaactt

SEQ ID NO: 304919 - DNA, 12 bp, Artificial Sequence
  Oligonucleotide primer for the detection of SNP TSC0021169
gttatttttgga

SEQ ID NO: 304920 - DNA, 12 bp, Artificial Sequence
  Oligonucleotide primer for the detection of SNP TSC0021170
taatcaattttt

SEQ ID NO: 304921 - DNA, 12 bp, Artificial Sequence
  Oligonucleotide primer for the detection of SNP TSC0021170
aaaaatatttga

SEQ ID NO: 304922 - DNA, 12 bp, Artificial Sequence
  Oligonucleotide primer for the detection of SNP TSC0021170
tggttagttttt

SEQ ID NO: 304923 - DNA, 12 bp, Artificial Sequence
  Oligonucleotide primer for the detection of SNP TSC0021171
taaccctatcta

SEQ ID NO: 304924 - DNA, 12 bp, Artificial Sequence
  Oligonucleotide primer for the detection of SNP TSC0021171
atttttggttat

SEQ ID NO: 304925 - DNA, 12 bp, Artificial Sequence
  Oligonucleotide primer for the detection of SNP TSC0021171
attcctaattac

SEQ ID NO: 304926 - DNA, 12 bp, Artificial Sequence
  Oligonucleotide primer for the detection of SNP TSC0021171
tagttttgttta

SEQ ID NO: 304927 - DNA, 12 bp, Artificial Sequence
  Oligonucleotide primer for the detection of SNP TSC0021173
ctatattatcta

SEQ ID NO: 304928 - DNA, 12 bp, Artificial Sequence
  Oligonucleotide primer for the detection of SNP TSC0021173
tgatatatggat

SEQ ID NO: 304929 - DNA, 12 bp, Artificial Sequence
  Oligonucleotide primer for the detection of SNP TSC0021173
aacatataaata

SEQ ID NO: 304930 - DNA, 12 bp, Artificial Sequence
  Oligonucleotide primer for the detection of SNP TSC0021173
attatgttgttt

SEQ ID NO: 304931 - DNA, 12 bp, Artificial Sequence
  Oligonucleotide primer for the detection of SNP TSC0021174
tatctccttcct

SEQ ID NO: 304932 - DNA, 12 bp, Artificial Sequence
  Oligonucleotide primer for the detection of SNP TSC0021174
taggtttaggtg

SEQ ID NO: 304933 - DNA, 12 bp, Artificial Sequence
  Oligonucleotide primer for the detection of SNP TSC0021175
ataaccacacat

SEQ ID NO: 304934 - DNA, 12 bp, Artificial Sequence
  Oligonucleotide primer for the detection of SNP TSC0021175
tcccatttactc

SEQ ID NO: 304935 - DNA, 12 bp, Artificial Sequence
  Oligonucleotide primer for the detection of SNP TSC0021175
tagttatatatt

SEQ ID NO: 304936 - DNA, 12 bp, Artificial Sequence
  Oligonucleotide primer for the detection of SNP TSC0021175
tagttatatatc

SEQ ID NO: 304937 - DNA, 12 bp, Artificial Sequence
  Oligonucleotide primer for the detection of SNP TSC0021176
taatatccaaat

SEQ ID NO: 304938 - DNA, 12 bp, Artificial Sequence
  Oligonucleotide primer for the detection of SNP TSC0021181
cctattccaaaa

SEQ ID NO: 304939 - DNA, 12 bp, Artificial Sequence
  Oligonucleotide primer for the detection of SNP TSC0021181
gggtgagggggg

SEQ ID NO: 304940 - DNA, 12 bp, Artificial Sequence
  Oligonucleotide primer for the detection of SNP TSC0021181
gggcgagggggg

SEQ ID NO: 304941 - DNA, 12 bp, Artificial Sequence
  Oligonucleotide primer for the detection of SNP TSC0021181
gaacaaaaaaaa

SEQ ID NO: 304942 - DNA, 12 bp, Artificial Sequence
  Oligonucleotide primer for the detection of SNP TSC0021181
gaacgaaaaaaa

SEQ ID NO: 304943 - DNA, 12 bp, Artificial Sequence
  Oligonucleotide primer for the detection of SNP TSC0021181
ttgttttaaagt

SEQ ID NO: 304944 - DNA, 12 bp, Artificial Sequence
  Oligonucleotide primer for the detection of SNP TSC0021182
aaatttacacta

SEQ ID NO: 304945 - DNA, 12 bp, Artificial Sequence
  Oligonucleotide primer for the detection of SNP TSC0021182
atatttttatta

SEQ ID NO: 304946 - DNA, 12 bp, Artificial Sequence
  Oligonucleotide primer for the detection of SNP TSC0021183
caacatactaat

SEQ ID NO: 304947 - DNA, 12 bp, Artificial Sequence
  Oligonucleotide primer for the detection of SNP TSC0021183
caacgtactaat

SEQ ID NO: 304948 - DNA, 12 bp, Artificial Sequence
  Oligonucleotide primer for the detection of SNP TSC0021183
agttggaattga

SEQ ID NO: 304949 - DNA, 12 bp, Artificial Sequence
  Oligonucleotide primer for the detection of SNP TSC0021183
agtcggaattga

SEQ ID NO: 304950 - DNA, 12 bp, Artificial Sequence
  Oligonucleotide primer for the detection of SNP TSC0021183
aaccaaaattaa

SEQ ID NO: 304951 - DNA, 12 bp, Artificial Sequence
  Oligonucleotide primer for the detection of SNP TSC0021183
aaccgaaattaa

SEQ ID NO: 304952 - DNA, 12 bp, Artificial Sequence
  Oligonucleotide primer for the detection of SNP TSC0021183
taatgtgttggt

SEQ ID NO: 304953 - DNA, 12 bp, Artificial Sequence
  Oligonucleotide primer for the detection of SNP TSC0021183
taacgtgttggt

SEQ ID NO: 304954 - DNA, 12 bp, Artificial Sequence
  Oligonucleotide primer for the detection of SNP TSC0021184
aaatcctataaa

SEQ ID NO: 304955 - DNA, 12 bp, Artificial Sequence
  Oligonucleotide primer for the detection of SNP TSC0021184
gggataggggga

SEQ ID NO: 304956 - DNA, 12 bp, Artificial Sequence
  Oligonucleotide primer for the detection of SNP TSC0021184
ggattttgtggg

SEQ ID NO: 304957 - DNA, 12 bp, Artificial Sequence
  Oligonucleotide primer for the detection of SNP TSC0021187
tttttgggaagg

SEQ ID NO: 304958 - DNA, 12 bp, Artificial Sequence
  Oligonucleotide primer for the detection of SNP TSC0021187
cttttaaaaaaa

SEQ ID NO: 304959 - DNA, 12 bp, Artificial Sequence
  Oligonucleotide primer for the detection of SNP TSC0021187
aaaggaaggaat

SEQ ID NO: 304960 - DNA, 12 bp, Artificial Sequence
  Oligonucleotide primer for the detection of SNP TSC0021190
tataaaacttta

SEQ ID NO: 304961 - DNA, 12 bp, Artificial Sequence
  Oligonucleotide primer for the detection of SNP TSC0021190
ggtgtaaatttt

SEQ ID NO: 304962 - DNA, 12 bp, Artificial Sequence
  Oligonucleotide primer for the detection of SNP TSC0021190
aatataaacttt

SEQ ID NO: 304963 - DNA, 12 bp, Artificial Sequence
  Oligonucleotide primer for the detection of SNP TSC0021190
tgtagaattttg

SEQ ID NO: 304964 - DNA, 12 bp, Artificial Sequence
  Oligonucleotide primer for the detection of SNP TSC0021191
aacaattctcac

SEQ ID NO: 304965 - DNA, 12 bp, Artificial Sequence
  Oligonucleotide primer for the detection of SNP TSC0021191
agaaggtaaata

SEQ ID NO: 304966 - DNA, 12 bp, Artificial Sequence
  Oligonucleotide primer for the detection of SNP TSC0021192
cacctcctacct

SEQ ID NO: 304967 - DNA, 12 bp, Artificial Sequence
  Oligonucleotide primer for the detection of SNP TSC0021192
aggttggttttg

SEQ ID NO: 304968 - DNA, 12 bp, Artificial Sequence
  Oligonucleotide primer for the detection of SNP TSC0021192
aggtcggttttg

SEQ ID NO: 304969 - DNA, 12 bp, Artificial Sequence
  Oligonucleotide primer for the detection of SNP TSC0021192
aaatcaactcta

SEQ ID NO: 304970 - DNA, 12 bp, Artificial Sequence
  Oligonucleotide primer for the detection of SNP TSC0021192
aaatcgactcta

SEQ ID NO: 304971 - DNA, 12 bp, Artificial Sequence
  Oligonucleotide primer for the detection of SNP TSC0021193
accctaccacct

SEQ ID NO: 304972 - DNA, 12 bp, Artificial Sequence
  Oligonucleotide primer for the detection of SNP TSC0021193
tttgaggttgga

SEQ ID NO: 304973 - DNA, 12 bp, Artificial Sequence
  Oligonucleotide primer for the detection of SNP TSC0021193
ttcgaggttgga

SEQ ID NO: 304974 - DNA, 12 bp, Artificial Sequence
  Oligonucleotide primer for the detection of SNP TSC0021195
aaccttactttc

SEQ ID NO: 304975 - DNA, 12 bp, Artificial Sequence
  Oligonucleotide primer for the detection of SNP TSC0021195
gaccttactttc

SEQ ID NO: 304976 - DNA, 12 bp, Artificial Sequence
  Oligonucleotide primer for the detection of SNP TSC0021195
attggagaagaa

SEQ ID NO: 304977 - DNA, 12 bp, Artificial Sequence
  Oligonucleotide primer for the detection of SNP TSC0021197
caatataaatta

SEQ ID NO: 304978 - DNA, 12 bp, Artificial Sequence
  Oligonucleotide primer for the detection of SNP TSC0021197
atctcatatctc

SEQ ID NO: 304979 - DNA, 12 bp, Artificial Sequence
  Oligonucleotide primer for the detection of SNP TSC0021197
ttagtgtgagtt

SEQ ID NO: 304980 - DNA, 12 bp, Artificial Sequence
  Oligonucleotide primer for the detection of SNP TSC0021199
aaggagaagtgg

SEQ ID NO: 304981 - DNA, 12 bp, Artificial Sequence
  Oligonukleotid-Primer
ttatattataat

SEQ ID NO: 304982 - DNA, 12 bp, Artificial Sequence
  Oligonucleotide primer for the detection of SNP TSC0021200
tcacactattac

SEQ ID NO: 304983 - DNA, 12 bp, Artificial Sequence
  Oligonucleotide primer for the detection of SNP TSC0021200
attagtttagtg

SEQ ID NO: 304984 - DNA, 12 bp, Artificial Sequence
  Oligonucleotide primer for the detection of SNP TSC0021201
ctaattaaaacc

SEQ ID NO: 304985 - DNA, 12 bp, Artificial Sequence
  Oligonukleotid-Primer
gttttggattgg

SEQ ID NO: 304986 - DNA, 12 bp, Artificial Sequence
  Oligonucleotide primer for the detection of SNP TSC0021202
catacctaatac

SEQ ID NO: 304987 - DNA, 12 bp, Artificial Sequence
  Oligonucleotide primer for the detection of SNP TSC0021202
cgtacctaatac

SEQ ID NO: 304988 - DNA, 12 bp, Artificial Sequence
  Oligonucleotide primer for the detection of SNP TSC0021202
atttttgtaaag

SEQ ID NO: 304989 - DNA, 12 bp, Artificial Sequence
  Oligonucleotide primer for the detection of SNP TSC0021202
actcctacaaaa

SEQ ID NO: 304990 - DNA, 12 bp, Artificial Sequence
  Oligonucleotide primer for the detection of SNP TSC0021202
tgtatttggtat

SEQ ID NO: 304991 - DNA, 12 bp, Artificial Sequence
  Oligonucleotide primer for the detection of SNP TSC0021202
cgtatttggtat

SEQ ID NO: 304992 - DNA, 12 bp, Artificial Sequence
  Oligonucleotide primer for the detection of SNP TSC0021202
tgtatttggtac

SEQ ID NO: 304993 - DNA, 12 bp, Artificial Sequence
  Oligonucleotide primer for the detection of SNP TSC0021202
cgtatttggtac

SEQ ID NO: 304994 - DNA, 12 bp, Artificial Sequence
  Oligonucleotide primer for the detection of SNP TSC0021203
aataattctaaa

SEQ ID NO: 304995 - DNA, 12 bp, Artificial Sequence
  Oligonucleotide primer for the detection of SNP TSC0021203
tgatttggttga

SEQ ID NO: 304996 - DNA, 12 bp, Artificial Sequence
  Oligonucleotide primer for the detection of SNP TSC0021203
ggtgattttgag

SEQ ID NO: 304997 - DNA, 12 bp, Artificial Sequence
  Oligonucleotide primer for the detection of SNP TSC0021205
ctcacaaaatct

SEQ ID NO: 304998 - DNA, 12 bp, Artificial Sequence
  Oligonucleotide primer for the detection of SNP TSC0021205
tgagtggagatg

SEQ ID NO: 304999 - DNA, 12 bp, Artificial Sequence
  Oligonucleotide primer for the detection of SNP TSC0021206
aattaaaaatct

SEQ ID NO: 305000 - DNA, 12 bp, Artificial Sequence
  Oligonucleotide primer for the detection of SNP TSC0021206
tttttatgtaaa

SEQ ID NO: 305001 - DNA, 12 bp, Artificial Sequence
  Oligonucleotide primer for the detection of SNP TSC0021207
gtttttttggtt

SEQ ID NO: 305002 - DNA, 12 bp, Artificial Sequence
  Oligonucleotide primer for the detection of SNP TSC0021207
acctccttaatc

SEQ ID NO: 305003 - DNA, 12 bp, Artificial Sequence
  Oligonucleotide primer for the detection of SNP TSC0021207
tgtgggagaaat

SEQ ID NO: 305004 - DNA, 12 bp, Artificial Sequence
  Oligonucleotide primer for the detection of SNP TSC0021207
cgtgggagaaat

SEQ ID NO: 305005 - DNA, 12 bp, Artificial Sequence
  Oligonucleotide primer for the detection of SNP TSC0021207
tgcgggagaaat

SEQ ID NO: 305006 - DNA, 12 bp, Artificial Sequence
  Oligonucleotide primer for the detection of SNP TSC0021207
cgcgggagaaat

SEQ ID NO: 305007 - DNA, 12 bp, Artificial Sequence
  Oligonucleotide primer for the detection of SNP TSC0021207
tgtgggagaaac

SEQ ID NO: 305008 - DNA, 12 bp, Artificial Sequence
  Oligonucleotide primer for the detection of SNP TSC0021207
cgtgggagaaac

SEQ ID NO: 305009 - DNA, 12 bp, Artificial Sequence
  Oligonucleotide primer for the detection of SNP TSC0021207
tgcgggagaaac

SEQ ID NO: 305010 - DNA, 12 bp, Artificial Sequence
  Oligonucleotide primer for the detection of SNP TSC0021207
cgcgggagaaac

SEQ ID NO: 305011 - DNA, 12 bp, Artificial Sequence
  Oligonucleotide primer for the detection of SNP TSC0021210
aaccaataatta

SEQ ID NO: 305012 - DNA, 12 bp, Artificial Sequence
  Oligonucleotide primer for the detection of SNP TSC0021210
tggtaggttttt

SEQ ID NO: 305013 - DNA, 12 bp, Artificial Sequence
  Oligonucleotide primer for the detection of SNP TSC0021210
aacaaattccca

SEQ ID NO: 305014 - DNA, 12 bp, Artificial Sequence
  Oligonucleotide primer for the detection of SNP TSC0021210
taattagtagtt

SEQ ID NO: 305015 - DNA, 12 bp, Artificial Sequence
  Oligonucleotide primer for the detection of SNP TSC0021212
gattttgtttta

SEQ ID NO: 305016 - DNA, 12 bp, Artificial Sequence
  Oligonucleotide primer for the detection of SNP TSC0021213
ccatctcaaaaa

SEQ ID NO: 305017 - DNA, 12 bp, Artificial Sequence
  Oligonucleotide primer for the detection of SNP TSC0021215
attcaaaattct

SEQ ID NO: 305018 - DNA, 12 bp, Artificial Sequence
  Oligonucleotide primer for the detection of SNP TSC0021215
attttgatttta

SEQ ID NO: 305019 - DNA, 12 bp, Artificial Sequence
  Oligonucleotide primer for the detection of SNP TSC0021216
aatccaactcta

SEQ ID NO: 305020 - DNA, 12 bp, Artificial Sequence
  Oligonucleotide primer for the detection of SNP TSC0021216
aatccgactcta

SEQ ID NO: 305021 - DNA, 12 bp, Artificial Sequence
  Oligonucleotide primer for the detection of SNP TSC0021216
ctattcttctac

SEQ ID NO: 305022 - DNA, 12 bp, Artificial Sequence
  Oligonucleotide primer for the detection of SNP TSC0021216
agtttgattttg

SEQ ID NO: 305023 - DNA, 12 bp, Artificial Sequence
  Oligonucleotide primer for the detection of SNP TSC0021216
agttcgattttg

SEQ ID NO: 305024 - DNA, 12 bp, Artificial Sequence
  Oligonucleotide primer for the detection of SNP TSC0021217
ataattaaaatt

SEQ ID NO: 305025 - DNA, 12 bp, Artificial Sequence
  Oligonucleotide primer for the detection of SNP TSC0021217
gaagagtttttg

SEQ ID NO: 305026 - DNA, 12 bp, Artificial Sequence
  Oligonucleotide primer for the detection of SNP TSC0021217
gtggttgaagtt

SEQ ID NO: 305027 - DNA, 12 bp, Artificial Sequence
  Oligonucleotide primer for the detection of SNP TSC0021218
cctacaattttc

SEQ ID NO: 305028 - DNA, 12 bp, Artificial Sequence
  Oligonucleotide primer for the detection of SNP TSC0021218
tattttaagggg

SEQ ID NO: 305029 - DNA, 12 bp, Artificial Sequence
  Oligonucleotide primer for the detection of SNP TSC0021218
ttatagtttttt

SEQ ID NO: 305030 - DNA, 12 bp, Artificial Sequence
  Oligonucleotide primer for the detection of SNP TSC0021219
ttcttcaaaacc

SEQ ID NO: 305031 - DNA, 12 bp, Artificial Sequence
  Oligonucleotide primer for the detection of SNP TSC0021219
aagatggataag

SEQ ID NO: 305032 - DNA, 12 bp, Artificial Sequence
  Oligonucleotide primer for the detection of SNP TSC0021220
accccatctcta

SEQ ID NO: 305033 - DNA, 12 bp, Artificial Sequence
  Oligonucleotide primer for the detection of SNP TSC0021221
tacctctacaaa

SEQ ID NO: 305034 - DNA, 12 bp, Artificial Sequence
  Oligonucleotide primer for the detection of SNP TSC0021221
ttatttgggagt

SEQ ID NO: 305035 - DNA, 12 bp, Artificial Sequence
  Oligonucleotide primer for the detection of SNP TSC0021221
ccacttaaaaac

SEQ ID NO: 305036 - DNA, 12 bp, Artificial Sequence
  Oligonucleotide primer for the detection of SNP TSC0021226
aacctcccatac

SEQ ID NO: 305037 - DNA, 12 bp, Artificial Sequence
  Oligonucleotide primer for the detection of SNP TSC0021226
aacctcccgtac

SEQ ID NO: 305038 - DNA, 12 bp, Artificial Sequence
  Oligonucleotide primer for the detection of SNP TSC0021226
gacctcccatac

SEQ ID NO: 305039 - DNA, 12 bp, Artificial Sequence
  Oligonucleotide primer for the detection of SNP TSC0021226
gacctcccgtac

SEQ ID NO: 305040 - DNA, 12 bp, Artificial Sequence
  Oligonucleotide primer for the detection of SNP TSC0021226
ttgggttgggag

SEQ ID NO: 305041 - DNA, 12 bp, Artificial Sequence
  Oligonucleotide primer for the detection of SNP TSC0021226
ttgggtcgggag

SEQ ID NO: 305042 - DNA, 12 bp, Artificial Sequence
  Oligonucleotide primer for the detection of SNP TSC0021234
catttattcatc

SEQ ID NO: 305043 - DNA, 12 bp, Artificial Sequence
  Oligonucleotide primer for the detection of SNP TSC0021234
taaatatttgta

SEQ ID NO: 305044 - DNA, 12 bp, Artificial Sequence
  Oligonucleotide primer for the detection of SNP TSC0021237
cccataccacct

SEQ ID NO: 305045 - DNA, 12 bp, Artificial Sequence
  Oligonucleotide primer for the detection of SNP TSC0021238
aacaatcaatat

SEQ ID NO: 305046 - DNA, 12 bp, Artificial Sequence
  Oligonucleotide primer for the detection of SNP TSC0021238
agtgaggtttaa

SEQ ID NO: 305047 - DNA, 12 bp, Artificial Sequence
  Oligonucleotide primer for the detection of SNP TSC0021248
aaaaaaattcta

SEQ ID NO: 305048 - DNA, 12 bp, Artificial Sequence
  Oligonucleotide primer for the detection of SNP TSC0021248
aggaggattatt

SEQ ID NO: 305049 - DNA, 12 bp, Artificial Sequence
  Oligonucleotide primer for the detection of SNP TSC0021248
tcaaaaaaatta

SEQ ID NO: 305050 - DNA, 12 bp, Artificial Sequence
  Oligonucleotide primer for the detection of SNP TSC0021248
gaggggattttg

SEQ ID NO: 305051 - DNA, 12 bp, Artificial Sequence
  Oligonucleotide primer for the detection of SNP TSC0021249
actactatccca

SEQ ID NO: 305052 - DNA, 12 bp, Artificial Sequence
  Oligonucleotide primer for the detection of SNP TSC0021249
aggtttgtagtt

SEQ ID NO: 305053 - DNA, 12 bp, Artificial Sequence
  Oligonucleotide primer for the detection of SNP TSC0021249
aaacctataacc

SEQ ID NO: 305054 - DNA, 12 bp, Artificial Sequence
  Oligonucleotide primer for the detection of SNP TSC0021249
attgttgtttta

SEQ ID NO: 305055 - DNA, 12 bp, Artificial Sequence
  Oligonucleotide primer for the detection of SNP TSC0021250
gagagagggtag

SEQ ID NO: 305056 - DNA, 12 bp, Artificial Sequence
  Oligonucleotide primer for the detection of SNP TSC0021250
agaaagggattt

SEQ ID NO: 305057 - DNA, 12 bp, Artificial Sequence
  Oligonucleotide primer for the detection of SNP TSC0021252
atcttaaaaata

SEQ ID NO: 305058 - DNA, 12 bp, Artificial Sequence
  Oligonucleotide primer for the detection of SNP TSC0021252
aaaaaatagaaa

SEQ ID NO: 305059 - DNA, 12 bp, Artificial Sequence
  Oligonucleotide primer for the detection of SNP TSC0021252
attttaaaaata

SEQ ID NO: 305060 - DNA, 12 bp, Artificial Sequence
  Oligonucleotide primer for the detection of SNP TSC0021254
tttaaacaaatt

SEQ ID NO: 305061 - DNA, 12 bp, Artificial Sequence
  Oligonucleotide primer for the detection of SNP TSC0021254
tggatatattaa

SEQ ID NO: 305062 - DNA, 12 bp, Artificial Sequence
  Oligonucleotide primer for the detection of SNP TSC0021255
aatcataaacac

SEQ ID NO: 305063 - DNA, 12 bp, Artificial Sequence
  Oligonucleotide primer for the detection of SNP TSC0021257
aaacctaccttc

SEQ ID NO: 305064 - DNA, 12 bp, Artificial Sequence
  Oligonucleotide primer for the detection of SNP TSC0021257
agtttggagtga

SEQ ID NO: 305065 - DNA, 12 bp, Artificial Sequence
  Oligonucleotide primer for the detection of SNP TSC0021259
aaactaaaaatt

SEQ ID NO: 305066 - DNA, 12 bp, Artificial Sequence
  Oligonucleotide primer for the detection of SNP TSC0021259
tttaaagttgta

SEQ ID NO: 305067 - DNA, 12 bp, Artificial Sequence
  Oligonucleotide primer for the detection of SNP TSC0021259
tctaaaactata

SEQ ID NO: 305068 - DNA, 12 bp, Artificial Sequence
  Oligonucleotide primer for the detection of SNP TSC0021259
aaattagaaatt

SEQ ID NO: 305069 - DNA, 12 bp, Artificial Sequence
  Oligonucleotide primer for the detection of SNP TSC0021260
atctcctaaaaa

SEQ ID NO: 305070 - DNA, 12 bp, Artificial Sequence
  Oligonucleotide primer for the detection of SNP TSC0021261
actaatttcatc

SEQ ID NO: 305071 - DNA, 12 bp, Artificial Sequence
  Oligonucleotide primer for the detection of SNP TSC0021261
aatattattaaa

SEQ ID NO: 305072 - DNA, 12 bp, Artificial Sequence
  Oligonucleotide primer for the detection of SNP TSC0021264
caaatttactat

SEQ ID NO: 305073 - DNA, 12 bp, Artificial Sequence
  Oligonucleotide primer for the detection of SNP TSC0021264
tattaatgtgta

SEQ ID NO: 305074 - DNA, 12 bp, Artificial Sequence
  Oligonucleotide primer for the detection of SNP TSC0021266
ttggttaaatat

SEQ ID NO: 305075 - DNA, 12 bp, Artificial Sequence
  Oligonucleotide primer for the detection of SNP TSC0021266
taatcaaacata

SEQ ID NO: 305076 - DNA, 12 bp, Artificial Sequence
  Oligonucleotide primer for the detection of SNP TSC0021266
tttaaaggtaat

SEQ ID NO: 305077 - DNA, 12 bp, Artificial Sequence
  Oligonucleotide primer for the detection of SNP TSC0021267
aattttaaaaaa

SEQ ID NO: 305078 - DNA, 12 bp, Artificial Sequence
  Oligonucleotide primer for the detection of SNP TSC0021267
ggaataaaagtg

SEQ ID NO: 305079 - DNA, 12 bp, Artificial Sequence
  Oligonucleotide primer for the detection of SNP TSC0021268
taagaaaaggaa

SEQ ID NO: 305080 - DNA, 12 bp, Artificial Sequence
  Oligonucleotide primer for the detection of SNP TSC0021268
gggaataaaagt

SEQ ID NO: 305081 - DNA, 12 bp, Artificial Sequence
  Oligonucleotide primer for the detection of SNP TSC0021270
ctaattcacaac

SEQ ID NO: 305082 - DNA, 12 bp, Artificial Sequence
  Oligonucleotide primer for the detection of SNP TSC0021271
ctccttccccta

SEQ ID NO: 305083 - DNA, 12 bp, Artificial Sequence
  Oligonucleotide primer for the detection of SNP TSC0021271
tgtgggtatgtt

SEQ ID NO: 305084 - DNA, 12 bp, Artificial Sequence
  Oligonucleotide primer for the detection of SNP TSC0021271
tataaacatatc

SEQ ID NO: 305085 - DNA, 12 bp, Artificial Sequence
  Oligonucleotide primer for the detection of SNP TSC0021275
ctataaaatcct

SEQ ID NO: 305086 - DNA, 12 bp, Artificial Sequence
  Oligonucleotide primer for the detection of SNP TSC0021275
aagtgtttttta

SEQ ID NO: 305087 - DNA, 12 bp, Artificial Sequence
  Oligonucleotide primer for the detection of SNP TSC0021276
aaacaatattat

SEQ ID NO: 305088 - DNA, 12 bp, Artificial Sequence
  Oligonucleotide primer for the detection of SNP TSC0021276
gttaaatatttt

SEQ ID NO: 305089 - DNA, 12 bp, Artificial Sequence
  Oligonucleotide primer for the detection of SNP TSC0021276
atcaaacatccc

SEQ ID NO: 305090 - DNA, 12 bp, Artificial Sequence
  Oligonucleotide primer for the detection of SNP TSC0021276
gggtagtgttgt

SEQ ID NO: 305091 - DNA, 12 bp, Artificial Sequence
  Oligonucleotide primer for the detection of SNP TSC0021277
ctttatctaatt

SEQ ID NO: 305092 - DNA, 12 bp, Artificial Sequence
  Oligonucleotide primer for the detection of SNP TSC0021277
tttaaggattta

SEQ ID NO: 305093 - DNA, 12 bp, Artificial Sequence
  Oligonucleotide primer for the detection of SNP TSC0021280
aattccctataa

SEQ ID NO: 305094 - DNA, 12 bp, Artificial Sequence
  Oligonucleotide primer for the detection of SNP TSC0021280
gtaaggggagaa

SEQ ID NO: 305095 - DNA, 12 bp, Artificial Sequence
  Oligonucleotide primer for the detection of SNP TSC0021280
aattttttgtga

SEQ ID NO: 305096 - DNA, 12 bp, Artificial Sequence
  Oligonucleotide primer for the detection of SNP TSC0021282
acgaacaaacaa

SEQ ID NO: 305097 - DNA, 12 bp, Artificial Sequence
  Oligonucleotide primer for the detection of SNP TSC0021282
gtgtgatgtttt

SEQ ID NO: 305098 - DNA, 12 bp, Artificial Sequence
  Oligonukleotid-Primer
atgggtaggtag

SEQ ID NO: 305099 - DNA, 12 bp, Artificial Sequence
  Oligonucleotide primer for the detection of SNP TSC0021282
acgggtaggtag

SEQ ID NO: 305100 - DNA, 12 bp, Artificial Sequence
  Oligonucleotide primer for the detection of SNP TSC0021283
caaatacttatt

SEQ ID NO: 305101 - DNA, 12 bp, Artificial Sequence
  Oligonucleotide primer for the detection of SNP TSC0021283
ttgtatagtagg

SEQ ID NO: 305102 - DNA, 12 bp, Artificial Sequence
  Oligonukleotid-Primer
aaaattttatca

SEQ ID NO: 305103 - DNA, 12 bp, Artificial Sequence
  Oligonucleotide primer for the detection of SNP TSC0021284
attagtttgggt

SEQ ID NO: 305104 - DNA, 12 bp, Artificial Sequence
  Oligonucleotide primer for the detection of SNP TSC0021284
accaacctaaac

SEQ ID NO: 305105 - DNA, 12 bp, Artificial Sequence
  Oligonucleotide primer for the detection of SNP TSC0021285
ttttatataagt

SEQ ID NO: 305106 - DNA, 12 bp, Artificial Sequence
  Oligonucleotide primer for the detection of SNP TSC0021285
atcttacataaa

SEQ ID NO: 305107 - DNA, 12 bp, Artificial Sequence
  Oligonucleotide primer for the detection of SNP TSC0021285
tggaggaaagtg

SEQ ID NO: 305108 - DNA, 12 bp, Artificial Sequence
  Oligonucleotide primer for the detection of SNP TSC0021288
aacctaattatt

SEQ ID NO: 305109 - DNA, 12 bp, Artificial Sequence
  Oligonucleotide primer for the detection of SNP TSC0021288
tatataaataga

SEQ ID NO: 305110 - DNA, 12 bp, Artificial Sequence
  Oligonucleotide primer for the detection of SNP TSC0021289
taacctaattat

SEQ ID NO: 305111 - DNA, 12 bp, Artificial Sequence
  Oligonucleotide primer for the detection of SNP TSC0021289
atataaatagaa

SEQ ID NO: 305112 - DNA, 12 bp, Artificial Sequence
  Oligonucleotide primer for the detection of SNP TSC0021290
ggagtggtatgg

SEQ ID NO: 305113 - DNA, 12 bp, Artificial Sequence
  Oligonucleotide primer for the detection of SNP TSC0021291
ctctttatcctc

SEQ ID NO: 305114 - DNA, 12 bp, Artificial Sequence
  Oligonucleotide primer for the detection of SNP TSC0021291
aggtagtagagg

SEQ ID NO: 305115 - DNA, 12 bp, Artificial Sequence
  Oligonucleotide primer for the detection of SNP TSC0021298
tctctattacaa

SEQ ID NO: 305116 - DNA, 12 bp, Artificial Sequence
  Oligonucleotide primer for the detection of SNP TSC0021298
tgataaagttga

SEQ ID NO: 305117 - DNA, 12 bp, Artificial Sequence
  Oligonucleotide primer for the detection of SNP TSC0021298
acaaaactaaaa

SEQ ID NO: 305118 - DNA, 12 bp, Artificial Sequence
  Oligonucleotide primer for the detection of SNP TSC0021298
ttttgttgtaat

SEQ ID NO: 305119 - DNA, 12 bp, Artificial Sequence
  Oligonucleotide primer for the detection of SNP TSC0021298
ttttgttgtaac

SEQ ID NO: 305120 - DNA, 12 bp, Artificial Sequence
  Oligonucleotide primer for the detection of SNP TSC0021300
ttataatttatt

SEQ ID NO: 305121 - DNA, 12 bp, Artificial Sequence
  Oligonucleotide primer for the detection of SNP TSC0021300
tttttataatgg

SEQ ID NO: 305122 - DNA, 12 bp, Artificial Sequence
  Oligonucleotide primer for the detection of SNP TSC0021304
tcaccaacaaac

SEQ ID NO: 305123 - DNA, 12 bp, Artificial Sequence
  Oligonucleotide primer for the detection of SNP TSC0021304
atgaggatttgg

SEQ ID NO: 305124 - DNA, 12 bp, Artificial Sequence
  Oligonucleotide primer for the detection of SNP TSC0021305
caataacaactt

SEQ ID NO: 305125 - DNA, 12 bp, Artificial Sequence
  Oligonucleotide primer for the detection of SNP TSC0021305
ttttttgtagag

SEQ ID NO: 305126 - DNA, 12 bp, Artificial Sequence
  Oligonucleotide primer for the detection of SNP TSC0021306
aaccttaaattc

SEQ ID NO: 305127 - DNA, 12 bp, Artificial Sequence
  Oligonucleotide primer for the detection of SNP TSC0021306
attttgatagta

SEQ ID NO: 305128 - DNA, 12 bp, Artificial Sequence
  Oligonucleotide primer for the detection of SNP TSC0021307
aacacaaaatct

SEQ ID NO: 305129 - DNA, 12 bp, Artificial Sequence
  Oligonucleotide primer for the detection of SNP TSC0021307
tttatggaagat

SEQ ID NO: 305130 - DNA, 12 bp, Artificial Sequence
  Oligonucleotide primer for the detection of SNP TSC0021307
aatataaagttt

SEQ ID NO: 305131 - DNA, 12 bp, Artificial Sequence
  Oligonucleotide primer for the detection of SNP TSC0021308
gaatagtgtatt

SEQ ID NO: 305132 - DNA, 12 bp, Artificial Sequence
  Oligonucleotide primer for the detection of SNP TSC0021309
ctaaatttaacc

SEQ ID NO: 305133 - DNA, 12 bp, Artificial Sequence
  Oligonucleotide primer for the detection of SNP TSC0021309
agtaaattgtag

SEQ ID NO: 305134 - DNA, 12 bp, Artificial Sequence
  Oligonucleotide primer for the detection of SNP TSC0021310
ctttcttttttt

SEQ ID NO: 305135 - DNA, 12 bp, Artificial Sequence
  Oligonucleotide primer for the detection of SNP TSC0021311
caaataatttct

SEQ ID NO: 305136 - DNA, 12 bp, Artificial Sequence
  Oligonucleotide primer for the detection of SNP TSC0021311
ggggtgtttgta

SEQ ID NO: 305137 - DNA, 12 bp, Artificial Sequence
  Oligonucleotide primer for the detection of SNP TSC0021313
accattttctcc

SEQ ID NO: 305138 - DNA, 12 bp, Artificial Sequence
  Oligonucleotide primer for the detection of SNP TSC0021313
attattgggttg

SEQ ID NO: 305139 - DNA, 12 bp, Artificial Sequence
  Oligonucleotide primer for the detection of SNP TSC0021314
tattttttatat

SEQ ID NO: 305140 - DNA, 12 bp, Artificial Sequence
  Oligonucleotide primer for the detection of SNP TSC0021315
atcctaccacaa

SEQ ID NO: 305141 - DNA, 12 bp, Artificial Sequence
  Oligonucleotide primer for the detection of SNP TSC0021315
tgtgatgtggtt

SEQ ID NO: 305142 - DNA, 12 bp, Artificial Sequence
  Oligonucleotide primer for the detection of SNP TSC0021315
cgtgatgtggtt

SEQ ID NO: 305143 - DNA, 12 bp, Artificial Sequence
  Oligonucleotide primer for the detection of SNP TSC0021315
cataatataact

SEQ ID NO: 305144 - DNA, 12 bp, Artificial Sequence
  Oligonucleotide primer for the detection of SNP TSC0021315
cgtaatataact

SEQ ID NO: 305145 - DNA, 12 bp, Artificial Sequence
  Oligonucleotide primer for the detection of SNP TSC0021315
gttttgttataa

SEQ ID NO: 305146 - DNA, 12 bp, Artificial Sequence
  Oligonucleotide primer for the detection of SNP TSC0021316
ataaaactacca

SEQ ID NO: 305147 - DNA, 12 bp, Artificial Sequence
  Oligonucleotide primer for the detection of SNP TSC0021316
aaatcaacaccc

SEQ ID NO: 305148 - DNA, 12 bp, Artificial Sequence
  Oligonucleotide primer for the detection of SNP TSC0021316
gaatcaacaccc

SEQ ID NO: 305149 - DNA, 12 bp, Artificial Sequence
  Oligonucleotide primer for the detection of SNP TSC0021316
atgaggttgtta

SEQ ID NO: 305150 - DNA, 12 bp, Artificial Sequence
  Oligonucleotide primer for the detection of SNP TSC0021320
atctaatatcaa

SEQ ID NO: 305151 - DNA, 12 bp, Artificial Sequence
  Oligonucleotide primer for the detection of SNP TSC0021320
aagtattttaag

SEQ ID NO: 305152 - DNA, 12 bp, Artificial Sequence
  Oligonucleotide primer for the detection of SNP TSC0021322
attaaaaattac

SEQ ID NO: 305153 - DNA, 12 bp, Artificial Sequence
  Oligonucleotide primer for the detection of SNP TSC0021323
aacatcctctcc

SEQ ID NO: 305154 - DNA, 12 bp, Artificial Sequence
  Oligonucleotide primer for the detection of SNP TSC0021323
tttagtagggag

SEQ ID NO: 305155 - DNA, 12 bp, Artificial Sequence
  Oligonucleotide primer for the detection of SNP TSC0021324
tttttacacatc

SEQ ID NO: 305156 - DNA, 12 bp, Artificial Sequence
  Oligonucleotide primer for the detection of SNP TSC0021324
atatagaaaaaa

SEQ ID NO: 305157 - DNA, 12 bp, Artificial Sequence
  Oligonucleotide primer for the detection of SNP TSC0021325
taaataatctat

SEQ ID NO: 305158 - DNA, 12 bp, Artificial Sequence
  Oligonucleotide primer for the detection of SNP TSC0021325
gtgttttaatta

SEQ ID NO: 305159 - DNA, 12 bp, Artificial Sequence
  Oligonucleotide primer for the detection of SNP TSC0021326
gtatgtaggaga

SEQ ID NO: 305160 - DNA, 12 bp, Artificial Sequence
  Oligonucleotide primer for the detection of SNP TSC0021327
attctaataata

SEQ ID NO: 305161 - DNA, 12 bp, Artificial Sequence
  Oligonucleotide primer for the detection of SNP TSC0021327
ggagaattaatt

SEQ ID NO: 305162 - DNA, 12 bp, Artificial Sequence
  Oligonucleotide primer for the detection of SNP TSC0021327
attttgataatg

SEQ ID NO: 305163 - DNA, 12 bp, Artificial Sequence
  Oligonucleotide primer for the detection of SNP TSC0021329
tcaaccaaaaac

SEQ ID NO: 305164 - DNA, 12 bp, Artificial Sequence
  Oligonucleotide primer for the detection of SNP TSC0021329
tcaaccgaaaac

SEQ ID NO: 305165 - DNA, 12 bp, Artificial Sequence
  Oligonucleotide primer for the detection of SNP TSC0021329
gagtatgagtaa

SEQ ID NO: 305166 - DNA, 12 bp, Artificial Sequence
  Oligonucleotide primer for the detection of SNP TSC0021329
gagtacgagtaa

SEQ ID NO: 305167 - DNA, 12 bp, Artificial Sequence
  Oligonucleotide primer for the detection of SNP TSC0021331
tatcaaatccta

SEQ ID NO: 305168 - DNA, 12 bp, Artificial Sequence
  Oligonucleotide primer for the detection of SNP TSC0021331
gtaggaatgtta

SEQ ID NO: 305169 - DNA, 12 bp, Artificial Sequence
  Oligonucleotide primer for the detection of SNP TSC0021331
ataaaaatacta

SEQ ID NO: 305170 - DNA, 12 bp, Artificial Sequence
  Oligonucleotide primer for the detection of SNP TSC0021331
gtaaaaatacta

SEQ ID NO: 305171 - DNA, 12 bp, Artificial Sequence
  Oligonucleotide primer for the detection of SNP TSC0021331
tgttaaatttta

SEQ ID NO: 305172 - DNA, 12 bp, Artificial Sequence
  Oligonucleotide primer for the detection of SNP TSC0021332
ctaaaaacaccc

SEQ ID NO: 305173 - DNA, 12 bp, Artificial Sequence
  Oligonucleotide primer for the detection of SNP TSC0021332
aggttagttttg

SEQ ID NO: 305174 - DNA, 12 bp, Artificial Sequence
  Oligonucleotide primer for the detection of SNP TSC0021333
taacaacacctt

SEQ ID NO: 305175 - DNA, 12 bp, Artificial Sequence
  Oligonucleotide primer for the detection of SNP TSC0021333
agtgagggaggt

SEQ ID NO: 305176 - DNA, 12 bp, Artificial Sequence
  Oligonucleotide primer for the detection of SNP TSC0021333
agcgagggaggt

SEQ ID NO: 305177 - DNA, 12 bp, Artificial Sequence
  Oligonucleotide primer for the detection of SNP TSC0021333
tagtattttttc

SEQ ID NO: 305178 - DNA, 12 bp, Artificial Sequence
  Oligonucleotide primer for the detection of SNP TSC0021334
acacttttaaaa

SEQ ID NO: 305179 - DNA, 12 bp, Artificial Sequence
  Oligonucleotide primer for the detection of SNP TSC0021334
ggttttatttgt

SEQ ID NO: 305180 - DNA, 12 bp, Artificial Sequence
  Oligonucleotide primer for the detection of SNP TSC0021334
attccacttaca

SEQ ID NO: 305181 - DNA, 12 bp, Artificial Sequence
  Oligonucleotide primer for the detection of SNP TSC0021335
acaaaacacatt

SEQ ID NO: 305182 - DNA, 12 bp, Artificial Sequence
  Oligonucleotide primer for the detection of SNP TSC0021335
ttgtgttgtaga

SEQ ID NO: 305183 - DNA, 12 bp, Artificial Sequence
  Oligonucleotide primer for the detection of SNP TSC0021335
ttgtgtcgtaga

SEQ ID NO: 305184 - DNA, 12 bp, Artificial Sequence
  Oligonucleotide primer for the detection of SNP TSC0021336
aaccacaacaaa

SEQ ID NO: 305185 - DNA, 12 bp, Artificial Sequence
  Oligonucleotide primer for the detection of SNP TSC0021336
gggagttgttgt

SEQ ID NO: 305186 - DNA, 12 bp, Artificial Sequence
  Oligonucleotide primer for the detection of SNP TSC0021336
gggagtcgttgt

SEQ ID NO: 305187 - DNA, 12 bp, Artificial Sequence
  Oligonucleotide primer for the detection of SNP TSC0021336
aaaaaccactat

SEQ ID NO: 305188 - DNA, 12 bp, Artificial Sequence
  Oligonucleotide primer for the detection of SNP TSC0021336
aaaaaccgctat

SEQ ID NO: 305189 - DNA, 12 bp, Artificial Sequence
  Oligonucleotide primer for the detection of SNP TSC0021336
tggttatagtaa

SEQ ID NO: 305190 - DNA, 12 bp, Artificial Sequence
  Oligonucleotide primer for the detection of SNP TSC0021337
ataactttccaa

SEQ ID NO: 305191 - DNA, 12 bp, Artificial Sequence
  Oligonucleotide primer for the detection of SNP TSC0021337
ttttttgagggt

SEQ ID NO: 305192 - DNA, 12 bp, Artificial Sequence
  Oligonucleotide primer for the detection of SNP TSC0021337
tccctaaaaata

SEQ ID NO: 305193 - DNA, 12 bp, Artificial Sequence
  Oligonucleotide primer for the detection of SNP TSC0021337
gtggttttttag

SEQ ID NO: 305194 - DNA, 12 bp, Artificial Sequence
  Oligonucleotide primer for the detection of SNP TSC0021340
tattctaaaaca

SEQ ID NO: 305195 - DNA, 12 bp, Artificial Sequence
  Oligonucleotide primer for the detection of SNP TSC0021340
gaaaggtagaaa

SEQ ID NO: 305196 - DNA, 12 bp, Artificial Sequence
  Oligonucleotide primer for the detection of SNP TSC0021340
gttttggggtat

SEQ ID NO: 305197 - DNA, 12 bp, Artificial Sequence
  Oligonucleotide primer for the detection of SNP TSC0021340
gttttggggtac

SEQ ID NO: 305198 - DNA, 12 bp, Artificial Sequence
  Oligonucleotide primer for the detection of SNP TSC0021341
aataaaccattc

SEQ ID NO: 305199 - DNA, 12 bp, Artificial Sequence
  Oligonucleotide primer for the detection of SNP TSC0021341
aataaaccgttc

SEQ ID NO: 305200 - DNA, 12 bp, Artificial Sequence
  Oligonucleotide primer for the detection of SNP TSC0021341
ggggattttaaa

SEQ ID NO: 305201 - DNA, 12 bp, Artificial Sequence
  Oligonucleotide primer for the detection of SNP TSC0021342
ccatcctctccc

SEQ ID NO: 305202 - DNA, 12 bp, Artificial Sequence
  Oligonucleotide primer for the detection of SNP TSC0021342
ccgtcctctccc

SEQ ID NO: 305203 - DNA, 12 bp, Artificial Sequence
  Oligonucleotide primer for the detection of SNP TSC0021342
tatattttaggg

SEQ ID NO: 305204 - DNA, 12 bp, Artificial Sequence
  Oligonucleotide primer for the detection of SNP TSC0021342
cgtttttttttt

SEQ ID NO: 305205 - DNA, 12 bp, Artificial Sequence
  Oligonucleotide primer for the detection of SNP TSC0021343
tcgttttttttt

SEQ ID NO: 305206 - DNA, 12 bp, Artificial Sequence
  Oligonucleotide primer for the detection of SNP TSC0021344
tcctataactcc

SEQ ID NO: 305207 - DNA, 12 bp, Artificial Sequence
  Oligonucleotide primer for the detection of SNP TSC0021344
acacttaattca

SEQ ID NO: 305208 - DNA, 12 bp, Artificial Sequence
  Oligonucleotide primer for the detection of SNP TSC0021344
ttgtggtttttt

SEQ ID NO: 305209 - DNA, 12 bp, Artificial Sequence
  Oligonucleotide primer for the detection of SNP TSC0021345
caattaaactcc

SEQ ID NO: 305210 - DNA, 12 bp, Artificial Sequence
  Oligonucleotide primer for the detection of SNP TSC0021346
accacacccaac

SEQ ID NO: 305211 - DNA, 12 bp, Artificial Sequence
  Oligonucleotide primer for the detection of SNP TSC0021346
accacacccgac

SEQ ID NO: 305212 - DNA, 12 bp, Artificial Sequence
  Oligonucleotide primer for the detection of SNP TSC0021346
accacgcccaac

SEQ ID NO: 305213 - DNA, 12 bp, Artificial Sequence
  Oligonucleotide primer for the detection of SNP TSC0021346
accgcacccaac

SEQ ID NO: 305214 - DNA, 12 bp, Artificial Sequence
  Oligonucleotide primer for the detection of SNP TSC0021346
accacgcccgac

SEQ ID NO: 305215 - DNA, 12 bp, Artificial Sequence
  Oligonucleotide primer for the detection of SNP TSC0021346
accgcacccgac

SEQ ID NO: 305216 - DNA, 12 bp, Artificial Sequence
  Oligonucleotide primer for the detection of SNP TSC0021346
accgcgcccaac

SEQ ID NO: 305217 - DNA, 12 bp, Artificial Sequence
  Oligonucleotide primer for the detection of SNP TSC0021346
accgcgcccgac

SEQ ID NO: 305218 - DNA, 12 bp, Artificial Sequence
  Oligonucleotide primer for the detection of SNP TSC0021346
attgtgtttggt

SEQ ID NO: 305219 - DNA, 12 bp, Artificial Sequence
  Oligonukleotid-Primer
atcgtgtttggt

SEQ ID NO: 305220 - DNA, 12 bp, Artificial Sequence
  Oligonucleotide primer for the detection of SNP TSC0021346
attgcgtttggt

SEQ ID NO: 305221 - DNA, 12 bp, Artificial Sequence
  Oligonucleotide primer for the detection of SNP TSC0021346
attgtgttcggt

SEQ ID NO: 305222 - DNA, 12 bp, Artificial Sequence
  Oligonucleotide primer for the detection of SNP TSC0021346
atcgcgtttggt

SEQ ID NO: 305223 - DNA, 12 bp, Artificial Sequence
  Oligonucleotide primer for the detection of SNP TSC0021346
atcgtgttcggt

SEQ ID NO: 305224 - DNA, 12 bp, Artificial Sequence
  Oligonucleotide primer for the detection of SNP TSC0021346
attgcgttcggt

SEQ ID NO: 305225 - DNA, 12 bp, Artificial Sequence
  Oligonucleotide primer for the detection of SNP TSC0021346
atcgcgttcggt

SEQ ID NO: 305226 - DNA, 12 bp, Artificial Sequence
  Oligonucleotide primer for the detection of SNP TSC0021347
ccttaaaataca

SEQ ID NO: 305227 - DNA, 12 bp, Artificial Sequence
  Oligonucleotide primer for the detection of SNP TSC0021347
tttgtttttggt

SEQ ID NO: 305228 - DNA, 12 bp, Artificial Sequence
  Oligonucleotide primer for the detection of SNP TSC0021347
ttttaggatata

SEQ ID NO: 305229 - DNA, 12 bp, Artificial Sequence
  Oligonucleotide primer for the detection of SNP TSC0021348
aaacacaataaa

SEQ ID NO: 305230 - DNA, 12 bp, Artificial Sequence
  Oligonucleotide primer for the detection of SNP TSC0021348
caattaaacaac

SEQ ID NO: 305231 - DNA, 12 bp, Artificial Sequence
  Oligonucleotide primer for the detection of SNP TSC0021348
tggatatagtag

SEQ ID NO: 305232 - DNA, 12 bp, Artificial Sequence
  Oligonucleotide primer for the detection of SNP TSC0021350
actataataatt

SEQ ID NO: 305233 - DNA, 12 bp, Artificial Sequence
  Oligonucleotide primer for the detection of SNP TSC0021350
aaatatttgtaa

SEQ ID NO: 305234 - DNA, 12 bp, Artificial Sequence
  Oligonucleotide primer for the detection of SNP TSC0021350
aaacatttataa

SEQ ID NO: 305235 - DNA, 12 bp, Artificial Sequence
  Oligonucleotide primer for the detection of SNP TSC0021350
gttgtgatagtt

SEQ ID NO: 305236 - DNA, 12 bp, Artificial Sequence
  Oligonucleotide primer for the detection of SNP TSC0021352
ctaaacccacca

SEQ ID NO: 305237 - DNA, 12 bp, Artificial Sequence
  Oligonucleotide primer for the detection of SNP TSC0021352
ggtttagggttt

SEQ ID NO: 305238 - DNA, 12 bp, Artificial Sequence
  Oligonucleotide primer for the detection of SNP TSC0021352
ggtttagggttc

SEQ ID NO: 305239 - DNA, 12 bp, Artificial Sequence
  Oligonucleotide primer for the detection of SNP TSC0021352
aattcaaaactc

SEQ ID NO: 305240 - DNA, 12 bp, Artificial Sequence
  Oligonucleotide primer for the detection of SNP TSC0021352
gttgagtttatt

SEQ ID NO: 305241 - DNA, 12 bp, Artificial Sequence
  Oligonucleotide primer for the detection of SNP TSC0021353
aatcctatctac

SEQ ID NO: 305242 - DNA, 12 bp, Artificial Sequence
  Oligonucleotide primer for the detection of SNP TSC0021353
tttaagtttata

SEQ ID NO: 305243 - DNA, 12 bp, Artificial Sequence
  Oligonucleotide primer for the detection of SNP TSC0021353
ctcaaatttaca

SEQ ID NO: 305244 - DNA, 12 bp, Artificial Sequence
  Oligonucleotide primer for the detection of SNP TSC0021353
aattttgtttat

SEQ ID NO: 305245 - DNA, 12 bp, Artificial Sequence
  Oligonucleotide primer for the detection of SNP TSC0021354
actaacctctac

SEQ ID NO: 305246 - DNA, 12 bp, Artificial Sequence
  Oligonucleotide primer for the detection of SNP TSC0021354
tagttgatgttg

SEQ ID NO: 305247 - DNA, 12 bp, Artificial Sequence
  Oligonucleotide primer for the detection of SNP TSC0021354
tagtcgatgttg

SEQ ID NO: 305248 - DNA, 12 bp, Artificial Sequence
  Oligonucleotide primer for the detection of SNP TSC0021354
caatcaatacta

SEQ ID NO: 305249 - DNA, 12 bp, Artificial Sequence
  Oligonucleotide primer for the detection of SNP TSC0021354
caatcgatacta

SEQ ID NO: 305250 - DNA, 12 bp, Artificial Sequence
  Oligonucleotide primer for the detection of SNP TSC0021354
gttgatttttgt

SEQ ID NO: 305251 - DNA, 12 bp, Artificial Sequence
  Oligonucleotide primer for the detection of SNP TSC0021357
aaaattaaacac

SEQ ID NO: 305252 - DNA, 12 bp, Artificial Sequence
  Oligonucleotide primer for the detection of SNP TSC0021357
tgagttttttta

SEQ ID NO: 305253 - DNA, 12 bp, Artificial Sequence
  Oligonucleotide primer for the detection of SNP TSC0021358
aaactacaacct

SEQ ID NO: 305254 - DNA, 12 bp, Artificial Sequence
  Oligonucleotide primer for the detection of SNP TSC0021358
tgtatttattag

SEQ ID NO: 305255 - DNA, 12 bp, Artificial Sequence
  Oligonucleotide primer for the detection of SNP TSC0021359
acgataacaata

SEQ ID NO: 305256 - DNA, 12 bp, Artificial Sequence
  Oligonucleotide primer for the detection of SNP TSC0021359
attgaatattat

SEQ ID NO: 305257 - DNA, 12 bp, Artificial Sequence
  Oligonucleotide primer for the detection of SNP TSC0021359
ctaaatactaca

SEQ ID NO: 305258 - DNA, 12 bp, Artificial Sequence
  Oligonucleotide primer for the detection of SNP TSC0021359
atgatggtagta

SEQ ID NO: 305259 - DNA, 12 bp, Artificial Sequence
  Oligonucleotide primer for the detection of SNP TSC0021359
acgatggtagta

SEQ ID NO: 305260 - DNA, 12 bp, Artificial Sequence
  Oligonucleotide primer for the detection of SNP TSC0021360
actaaccaatcc

SEQ ID NO: 305261 - DNA, 12 bp, Artificial Sequence
  Oligonucleotide primer for the detection of SNP TSC0021360
gttagggttagg

SEQ ID NO: 305262 - DNA, 12 bp, Artificial Sequence
  Oligonucleotide primer for the detection of SNP TSC0021362
atctcgaacttc

SEQ ID NO: 305263 - DNA, 12 bp, Artificial Sequence
  Oligonucleotide primer for the detection of SNP TSC0021362
agattgttagag

SEQ ID NO: 305264 - DNA, 12 bp, Artificial Sequence
  Oligonucleotide primer for the detection of SNP TSC0021362
aaattactaaaa

SEQ ID NO: 305265 - DNA, 12 bp, Artificial Sequence
  Oligonucleotide primer for the detection of SNP TSC0021363
attacccatatt

SEQ ID NO: 305266 - DNA, 12 bp, Artificial Sequence
  Oligonucleotide primer for the detection of SNP TSC0021363
attacccgtatt

SEQ ID NO: 305267 - DNA, 12 bp, Artificial Sequence
  Oligonucleotide primer for the detection of SNP TSC0021363
agatttgtttag

SEQ ID NO: 305268 - DNA, 12 bp, Artificial Sequence
  Oligonucleotide primer for the detection of SNP TSC0021364
acctacctaaac

SEQ ID NO: 305269 - DNA, 12 bp, Artificial Sequence
  Oligonucleotide primer for the detection of SNP TSC0021364
ttatgttgtttg

SEQ ID NO: 305270 - DNA, 12 bp, Artificial Sequence
  Oligonucleotide primer for the detection of SNP TSC0021364
ttatgttgttcg

SEQ ID NO: 305271 - DNA, 12 bp, Artificial Sequence
  Oligonucleotide primer for the detection of SNP TSC0021365
aatcaatctccc

SEQ ID NO: 305272 - DNA, 12 bp, Artificial Sequence
  Oligonucleotide primer for the detection of SNP TSC0021365
ttgtattattag

SEQ ID NO: 305273 - DNA, 12 bp, Artificial Sequence
  Oligonucleotide primer for the detection of SNP TSC0021366
cattataaaaaa

SEQ ID NO: 305274 - DNA, 12 bp, Artificial Sequence
  Oligonucleotide primer for the detection of SNP TSC0021366
atccttacccct

SEQ ID NO: 305275 - DNA, 12 bp, Artificial Sequence
  Oligonucleotide primer for the detection of SNP TSC0021366
tattatggggga

SEQ ID NO: 305276 - DNA, 12 bp, Artificial Sequence
  Oligonucleotide primer for the detection of SNP TSC0021368
ttactataaata

SEQ ID NO: 305277 - DNA, 12 bp, Artificial Sequence
  Oligonucleotide primer for the detection of SNP TSC0021368
tattagtttatt

SEQ ID NO: 305278 - DNA, 12 bp, Artificial Sequence
  Oligonucleotide primer for the detection of SNP TSC0021368
cattaactcatt

SEQ ID NO: 305279 - DNA, 12 bp, Artificial Sequence
  Oligonucleotide primer for the detection of SNP TSC0021368
gttataaatatt

SEQ ID NO: 305280 - DNA, 12 bp, Artificial Sequence
  Oligonucleotide primer for the detection of SNP TSC0021369
acttcctaaaaa

SEQ ID NO: 305281 - DNA, 12 bp, Artificial Sequence
  Oligonucleotide primer for the detection of SNP TSC0021369
aattcactattt

SEQ ID NO: 305282 - DNA, 12 bp, Artificial Sequence
  Oligonucleotide primer for the detection of SNP TSC0021369
gttttttgagaa

SEQ ID NO: 305283 - DNA, 12 bp, Artificial Sequence
  Oligonucleotide primer for the detection of SNP TSC0021370
aatagttttatt

SEQ ID NO: 305284 - DNA, 12 bp, Artificial Sequence
  Oligonucleotide primer for the detection of SNP TSC0021370
aacaaccccacc

SEQ ID NO: 305285 - DNA, 12 bp, Artificial Sequence
  Oligonucleotide primer for the detection of SNP TSC0021370
ggtaggtatggg

SEQ ID NO: 305286 - DNA, 12 bp, Artificial Sequence
  Oligonucleotide primer for the detection of SNP TSC0021371
accattaaaaac

SEQ ID NO: 305287 - DNA, 12 bp, Artificial Sequence
  Oligonucleotide primer for the detection of SNP TSC0021371
accgttaaaaac

SEQ ID NO: 305288 - DNA, 12 bp, Artificial Sequence
  Oligonucleotide primer for the detection of SNP TSC0021371
ttttgttgtgag

SEQ ID NO: 305289 - DNA, 12 bp, Artificial Sequence
  Oligonucleotide primer for the detection of SNP TSC0021373
tcctaccattct

SEQ ID NO: 305290 - DNA, 12 bp, Artificial Sequence
  Oligonucleotide primer for the detection of SNP TSC0021373
attggtgtggga

SEQ ID NO: 305291 - DNA, 12 bp, Artificial Sequence
  Oligonucleotide primer for the detection of SNP TSC0021374
aaaccactcttc

SEQ ID NO: 305292 - DNA, 12 bp, Artificial Sequence
  Oligonucleotide primer for the detection of SNP TSC0021374
aatcaccacaaa

SEQ ID NO: 305293 - DNA, 12 bp, Artificial Sequence
  Oligonucleotide primer for the detection of SNP TSC0021374
gggttatttttt

SEQ ID NO: 305294 - DNA, 12 bp, Artificial Sequence
  Oligonucleotide primer for the detection of SNP TSC0021374
gggttatttttc

SEQ ID NO: 305295 - DNA, 12 bp, Artificial Sequence
  Oligonucleotide primer for the detection of SNP TSC0021375
ctaaaaaaacca

SEQ ID NO: 305296 - DNA, 12 bp, Artificial Sequence
  Oligonukleotid-Primer
tgattgggaata

SEQ ID NO: 305297 - DNA, 12 bp, Artificial Sequence
  Oligonucleotide primer for the detection of SNP TSC0021375
taactaaaaaca

SEQ ID NO: 305298 - DNA, 12 bp, Artificial Sequence
  Oligonucleotide primer for the detection of SNP TSC0021375
ttgagggagtta

SEQ ID NO: 305299 - DNA, 12 bp, Artificial Sequence
  Oligonucleotide primer for the detection of SNP TSC0021376
aatccttcaaaa

SEQ ID NO: 305300 - DNA, 12 bp, Artificial Sequence
  Oligonucleotide primer for the detection of SNP TSC0021376
aatccttcgaaa

SEQ ID NO: 305301 - DNA, 12 bp, Artificial Sequence
  Oligonucleotide primer for the detection of SNP TSC0021376
tggttatagtgg

SEQ ID NO: 305302 - DNA, 12 bp, Artificial Sequence
  Oligonucleotide primer for the detection of SNP TSC0021376
taaccataataa

SEQ ID NO: 305303 - DNA, 12 bp, Artificial Sequence
  Oligonucleotide primer for the detection of SNP TSC0021376
tagttttttgga

SEQ ID NO: 305304 - DNA, 12 bp, Artificial Sequence
  Oligonucleotide primer for the detection of SNP TSC0021376
tagtttttcgga

SEQ ID NO: 305305 - DNA, 12 bp, Artificial Sequence
  Oligonucleotide primer for the detection of SNP TSC0021377
aaaaaacttaat

SEQ ID NO: 305306 - DNA, 12 bp, Artificial Sequence
  Oligonucleotide primer for the detection of SNP TSC0021377
tgaagttagtaa

SEQ ID NO: 305307 - DNA, 12 bp, Artificial Sequence
  Oligonucleotide primer for the detection of SNP TSC0021380
aatatatgtaaa

SEQ ID NO: 305308 - DNA, 12 bp, Artificial Sequence
  Oligonucleotide primer for the detection of SNP TSC0021381
agggtgggtgtg

SEQ ID NO: 305309 - DNA, 12 bp, Artificial Sequence
  Oligonucleotide primer for the detection of SNP TSC0021381
atagagtgaaga

SEQ ID NO: 305310 - DNA, 12 bp, Artificial Sequence
  Oligonucleotide primer for the detection of SNP TSC0021382
acaactcaaaaa

SEQ ID NO: 305311 - DNA, 12 bp, Artificial Sequence
  Oligonucleotide primer for the detection of SNP TSC0021382
aactttttatac

SEQ ID NO: 305312 - DNA, 12 bp, Artificial Sequence
  Oligonucleotide primer for the detection of SNP TSC0021382
tttagaaatttt

SEQ ID NO: 305313 - DNA, 12 bp, Artificial Sequence
  Oligonucleotide primer for the detection of SNP TSC0021383
ttttatacttca

SEQ ID NO: 305314 - DNA, 12 bp, Artificial Sequence
  Oligonucleotide primer for the detection of SNP TSC0021383
agtttagaaatt

SEQ ID NO: 305315 - DNA, 12 bp, Artificial Sequence
  Oligonucleotide primer for the detection of SNP TSC0021384
ataataaactaa

SEQ ID NO: 305316 - DNA, 12 bp, Artificial Sequence
  Oligonucleotide primer for the detection of SNP TSC0021384
tttgtaaaaaaa

SEQ ID NO: 305317 - DNA, 12 bp, Artificial Sequence
  Oligonucleotide primer for the detection of SNP TSC0021384
cttacaaaaaaa

SEQ ID NO: 305318 - DNA, 12 bp, Artificial Sequence
  Oligonucleotide primer for the detection of SNP TSC0021384
gtaatgggttaa

SEQ ID NO: 305319 - DNA, 12 bp, Artificial Sequence
  Oligonucleotide primer for the detection of SNP TSC0021385
acactaaaatat

SEQ ID NO: 305320 - DNA, 12 bp, Artificial Sequence
  Oligonucleotide primer for the detection of SNP TSC0021385
tatttttagtaa

SEQ ID NO: 305321 - DNA, 12 bp, Artificial Sequence
  Oligonucleotide primer for the detection of SNP TSC0021386
tatacaaatcat

SEQ ID NO: 305322 - DNA, 12 bp, Artificial Sequence
  Oligonucleotide primer for the detection of SNP TSC0021386
gaaaatttttta

SEQ ID NO: 305323 - DNA, 12 bp, Artificial Sequence
  Oligonucleotide primer for the detection of SNP TSC0021388
tattataaatat

SEQ ID NO: 305324 - DNA, 12 bp, Artificial Sequence
  Oligonucleotide primer for the detection of SNP TSC0021388
ggttagtataaa

SEQ ID NO: 305325 - DNA, 12 bp, Artificial Sequence
  Oligonucleotide primer for the detection of SNP TSC0021389
tgggggttttta

SEQ ID NO: 305326 - DNA, 12 bp, Artificial Sequence
  Oligonucleotide primer for the detection of SNP TSC0021389
cgggggttttta

SEQ ID NO: 305327 - DNA, 12 bp, Artificial Sequence
  Oligonucleotide primer for the detection of SNP TSC0021389
caaaaactccca

SEQ ID NO: 305328 - DNA, 12 bp, Artificial Sequence
  Oligonucleotide primer for the detection of SNP TSC0021389
cgaaaactccca

SEQ ID NO: 305329 - DNA, 12 bp, Artificial Sequence
  Oligonucleotide primer for the detection of SNP TSC0021389
gaaagtgaattt

SEQ ID NO: 305330 - DNA, 12 bp, Artificial Sequence
  Oligonucleotide primer for the detection of SNP TSC0021390
tgattgagtaaa

SEQ ID NO: 305331 - DNA, 12 bp, Artificial Sequence
  Oligonucleotide primer for the detection of SNP TSC0021391
attttctcctaa

SEQ ID NO: 305332 - DNA, 12 bp, Artificial Sequence
  Oligonucleotide primer for the detection of SNP TSC0021391
aatgggatttaa

SEQ ID NO: 305333 - DNA, 12 bp, Artificial Sequence
  Oligonucleotide primer for the detection of SNP TSC0021391
aataaaatttaa

SEQ ID NO: 305334 - DNA, 12 bp, Artificial Sequence
  Oligonucleotide primer for the detection of SNP TSC0021391
tttttttttaat

SEQ ID NO: 305335 - DNA, 12 bp, Artificial Sequence
  Oligonucleotide primer for the detection of SNP TSC0021392
aacctaaaaaat

SEQ ID NO: 305336 - DNA, 12 bp, Artificial Sequence
  Oligonucleotide primer for the detection of SNP TSC0021392
ttttttggttaa

SEQ ID NO: 305337 - DNA, 12 bp, Artificial Sequence
  Oligonucleotide primer for the detection of SNP TSC0021393
tatttcttaaac

SEQ ID NO: 305338 - DNA, 12 bp, Artificial Sequence
  Oligonucleotide primer for the detection of SNP TSC0021393
taaatttagtta

SEQ ID NO: 305339 - DNA, 12 bp, Artificial Sequence
  Oligonucleotide primer for the detection of SNP TSC0021395
ccaaaccatttt

SEQ ID NO: 305340 - DNA, 12 bp, Artificial Sequence
  Oligonucleotide primer for the detection of SNP TSC0021395
aggtggaatgta

SEQ ID NO: 305341 - DNA, 12 bp, Artificial Sequence
  Oligonucleotide primer for the detection of SNP TSC0021396
ccaacaactatc

SEQ ID NO: 305342 - DNA, 12 bp, Artificial Sequence
  Oligonucleotide primer for the detection of SNP TSC0021396
gggaggggaagg

SEQ ID NO: 305343 - DNA, 12 bp, Artificial Sequence
  Oligonucleotide primer for the detection of SNP TSC0021397
cttttacttaat

SEQ ID NO: 305344 - DNA, 12 bp, Artificial Sequence
  Oligonucleotide primer for the detection of SNP TSC0021397
ataaagatttta

SEQ ID NO: 305345 - DNA, 12 bp, Artificial Sequence
  Oligonucleotide primer for the detection of SNP TSC0021398
ttttatgtatta

SEQ ID NO: 305346 - DNA, 12 bp, Artificial Sequence
  Oligonucleotide primer for the detection of SNP TSC0021398
ccccatacatta

SEQ ID NO: 305347 - DNA, 12 bp, Artificial Sequence
  Oligonucleotide primer for the detection of SNP TSC0021398
agattgagagga

SEQ ID NO: 305348 - DNA, 12 bp, Artificial Sequence
  Oligonucleotide primer for the detection of SNP TSC0021399
caacacaaccta

SEQ ID NO: 305349 - DNA, 12 bp, Artificial Sequence
  Oligonucleotide primer for the detection of SNP TSC0021399
ttagggttatgg

SEQ ID NO: 305350 - DNA, 12 bp, Artificial Sequence
  Oligonucleotide primer for the detection of SNP TSC0021399
taatatagtttg

SEQ ID NO: 305351 - DNA, 12 bp, Artificial Sequence
  Oligonucleotide primer for the detection of SNP TSC0021400
taggatgtgttg

SEQ ID NO: 305352 - DNA, 12 bp, Artificial Sequence
  Oligonucleotide primer for the detection of SNP TSC0021400
taggatgtgtcg

SEQ ID NO: 305353 - DNA, 12 bp, Artificial Sequence
  Oligonucleotide primer for the detection of SNP TSC0021401
cccaattctatt

SEQ ID NO: 305354 - DNA, 12 bp, Artificial Sequence
  Oligonucleotide primer for the detection of SNP TSC0021401
aggttaggatgg

SEQ ID NO: 305355 - DNA, 12 bp, Artificial Sequence
  Oligonucleotide primer for the detection of SNP TSC0021402
aaacacaatctc

SEQ ID NO: 305356 - DNA, 12 bp, Artificial Sequence
  Oligonucleotide primer for the detection of SNP TSC0021402
ttattttagatg

SEQ ID NO: 305357 - DNA, 12 bp, Artificial Sequence
  Oligonucleotide primer for the detection of SNP TSC0021409
ataatttctatt

SEQ ID NO: 305358 - DNA, 12 bp, Artificial Sequence
  Oligonucleotide primer for the detection of SNP TSC0021409
ttttattgaata

SEQ ID NO: 305359 - DNA, 12 bp, Artificial Sequence
  Oligonucleotide primer for the detection of SNP TSC0021410
aaataccctaat

SEQ ID NO: 305360 - DNA, 12 bp, Artificial Sequence
  Oligonucleotide primer for the detection of SNP TSC0021410
ttaattaattta

SEQ ID NO: 305361 - DNA, 12 bp, Artificial Sequence
  Oligonucleotide primer for the detection of SNP TSC0021411
catcaaaattct

SEQ ID NO: 305362 - DNA, 12 bp, Artificial Sequence
  Oligonucleotide primer for the detection of SNP TSC0021411
aagtgtttattg

SEQ ID NO: 305363 - DNA, 12 bp, Artificial Sequence
  Oligonucleotide primer for the detection of SNP TSC0021411
aagcgtttattg

SEQ ID NO: 305364 - DNA, 12 bp, Artificial Sequence
  Oligonucleotide primer for the detection of SNP TSC0021412
taccaaacatcc

SEQ ID NO: 305365 - DNA, 12 bp, Artificial Sequence
  Oligonucleotide primer for the detection of SNP TSC0021412
ctttcaacaaaa

SEQ ID NO: 305366 - DNA, 12 bp, Artificial Sequence
  Oligonucleotide primer for the detection of SNP TSC0021412
tgttaggtattt

SEQ ID NO: 305367 - DNA, 12 bp, Artificial Sequence
  Oligonucleotide primer for the detection of SNP TSC0021414
cactcactaaaa

SEQ ID NO: 305368 - DNA, 12 bp, Artificial Sequence
  Oligonucleotide primer for the detection of SNP TSC0021414
cactcgctaaaa

SEQ ID NO: 305369 - DNA, 12 bp, Artificial Sequence
  Oligonucleotide primer for the detection of SNP TSC0021414
tgtttgagtgtt

SEQ ID NO: 305370 - DNA, 12 bp, Artificial Sequence
  Oligonucleotide primer for the detection of SNP TSC0021414
tgttcgagtgtt

SEQ ID NO: 305371 - DNA, 12 bp, Artificial Sequence
  Oligonucleotide primer for the detection of SNP TSC0021414
tgtttgagcgtt

SEQ ID NO: 305372 - DNA, 12 bp, Artificial Sequence
  Oligonucleotide primer for the detection of SNP TSC0021414
tgttcgagcgtt

SEQ ID NO: 305373 - DNA, 12 bp, Artificial Sequence
  Oligonucleotide primer for the detection of SNP TSC0021414
cccaaacactaa

SEQ ID NO: 305374 - DNA, 12 bp, Artificial Sequence
  Oligonucleotide primer for the detection of SNP TSC0021414
cccaaacgctaa

SEQ ID NO: 305375 - DNA, 12 bp, Artificial Sequence
  Oligonucleotide primer for the detection of SNP TSC0021414
cccgaacactaa

SEQ ID NO: 305376 - DNA, 12 bp, Artificial Sequence
  Oligonucleotide primer for the detection of SNP TSC0021414
cccgaacgctaa

SEQ ID NO: 305377 - DNA, 12 bp, Artificial Sequence
  Oligonucleotide primer for the detection of SNP TSC0021414
ggtatttgttgg

SEQ ID NO: 305378 - DNA, 12 bp, Artificial Sequence
  Oligonucleotide primer for the detection of SNP TSC0021414
ggtattcgttgg

SEQ ID NO: 305379 - DNA, 12 bp, Artificial Sequence
  Oligonucleotide primer for the detection of SNP TSC0021415
ccacttctcccc

SEQ ID NO: 305380 - DNA, 12 bp, Artificial Sequence
  Oligonucleotide primer for the detection of SNP TSC0021415
ccgcttctcccc

SEQ ID NO: 305381 - DNA, 12 bp, Artificial Sequence
  Oligonucleotide primer for the detection of SNP TSC0021417
ctcccttattat

SEQ ID NO: 305382 - DNA, 12 bp, Artificial Sequence
  Oligonucleotide primer for the detection of SNP TSC0021417
ttgatttataat

SEQ ID NO: 305383 - DNA, 12 bp, Artificial Sequence
  Oligonucleotide primer for the detection of SNP TSC0021418
attggggatttt

SEQ ID NO: 305384 - DNA, 12 bp, Artificial Sequence
  Oligonucleotide primer for the detection of SNP TSC0021418
attaaaaaccct

SEQ ID NO: 305385 - DNA, 12 bp, Artificial Sequence
  Oligonucleotide primer for the detection of SNP TSC0021418
tatatgagtgta

SEQ ID NO: 305386 - DNA, 12 bp, Artificial Sequence
  Oligonucleotide primer for the detection of SNP TSC0021421
acattcttaatc

SEQ ID NO: 305387 - DNA, 12 bp, Artificial Sequence
  Oligonucleotide primer for the detection of SNP TSC0021421
ggtaatatagag

SEQ ID NO: 305388 - DNA, 12 bp, Artificial Sequence
  Oligonucleotide primer for the detection of SNP TSC0021424
tctaaaaaatta

SEQ ID NO: 305389 - DNA, 12 bp, Artificial Sequence
  Oligonucleotide primer for the detection of SNP TSC0021424
ttatttattgtt

SEQ ID NO: 305390 - DNA, 12 bp, Artificial Sequence
  Oligonucleotide primer for the detection of SNP TSC0021424
tactcactacca

SEQ ID NO: 305391 - DNA, 12 bp, Artificial Sequence
  Oligonucleotide primer for the detection of SNP TSC0021424
tttgagggattg

SEQ ID NO: 305392 - DNA, 12 bp, Artificial Sequence
  Oligonucleotide primer for the detection of SNP TSC0021425
tataacataact

SEQ ID NO: 305393 - DNA, 12 bp, Artificial Sequence
  Oligonucleotide primer for the detection of SNP TSC0021425
ttttttgtttaa

SEQ ID NO: 305394 - DNA, 12 bp, Artificial Sequence
  Oligonucleotide primer for the detection of SNP TSC0021425
tcccctacctaa

SEQ ID NO: 305395 - DNA, 12 bp, Artificial Sequence
  Oligonucleotide primer for the detection of SNP TSC0021425
tgtagtatgatt

SEQ ID NO: 305396 - DNA, 12 bp, Artificial Sequence
  Oligonucleotide primer for the detection of SNP TSC0021426
tttgttgggaat

SEQ ID NO: 305397 - DNA, 12 bp, Artificial Sequence
  Oligonucleotide primer for the detection of SNP TSC0021426
ttcgttgggaat

SEQ ID NO: 305398 - DNA, 12 bp, Artificial Sequence
  Oligonucleotide primer for the detection of SNP TSC0021426
tccactaaaaac

SEQ ID NO: 305399 - DNA, 12 bp, Artificial Sequence
  Oligonucleotide primer for the detection of SNP TSC0021426
tccgctaaaaac

SEQ ID NO: 305400 - DNA, 12 bp, Artificial Sequence
  Oligonucleotide primer for the detection of SNP TSC0021426
agtggagatgaa

SEQ ID NO: 305401 - DNA, 12 bp, Artificial Sequence
  Oligonukleotid-Primer
ctcccttcaaat

SEQ ID NO: 305402 - DNA, 12 bp, Artificial Sequence
  Oligonucleotide primer for the detection of SNP TSC0021427
tgtgttttgttg

SEQ ID NO: 305403 - DNA, 12 bp, Artificial Sequence
  Oligonucleotide primer for the detection of SNP TSC0021428
cccctcacctca

SEQ ID NO: 305404 - DNA, 12 bp, Artificial Sequence
  Oligonucleotide primer for the detection of SNP TSC0021428
taggaaatgagt

SEQ ID NO: 305405 - DNA, 12 bp, Artificial Sequence
  Oligonukleotid-Primer
aaaataccacca

SEQ ID NO: 305406 - DNA, 12 bp, Artificial Sequence
  Oligonucleotide primer for the detection of SNP TSC0021429
aaaataccaccg

SEQ ID NO: 305407 - DNA, 12 bp, Artificial Sequence
  Oligonucleotide primer for the detection of SNP TSC0021429
attgggattatt

SEQ ID NO: 305408 - DNA, 12 bp, Artificial Sequence
  Oligonucleotide primer for the detection of SNP TSC0021429
ttaaaatcatta

SEQ ID NO: 305409 - DNA, 12 bp, Artificial Sequence
  Oligonucleotide primer for the detection of SNP TSC0021429
agaatgttattg

SEQ ID NO: 305410 - DNA, 12 bp, Artificial Sequence
  Oligonucleotide primer for the detection of SNP TSC0021429
agaatgttatcg

SEQ ID NO: 305411 - DNA, 12 bp, Artificial Sequence
  Oligonucleotide primer for the detection of SNP TSC0021430
caatctaataac

SEQ ID NO: 305412 - DNA, 12 bp, Artificial Sequence
  Oligonucleotide primer for the detection of SNP TSC0021430
ggttattttttt

SEQ ID NO: 305413 - DNA, 12 bp, Artificial Sequence
  Oligonucleotide primer for the detection of SNP TSC0021430
aaccaccctccc

SEQ ID NO: 305414 - DNA, 12 bp, Artificial Sequence
  Oligonucleotide primer for the detection of SNP TSC0021430
taatttgatgat

SEQ ID NO: 305415 - DNA, 12 bp, Artificial Sequence
  Oligonucleotide primer for the detection of SNP TSC0021431
ctaaacaaaacc

SEQ ID NO: 305416 - DNA, 12 bp, Artificial Sequence
  Oligonucleotide primer for the detection of SNP TSC0021431
tagggtttttta

SEQ ID NO: 305417 - DNA, 12 bp, Artificial Sequence
  Oligonucleotide primer for the detection of SNP TSC0021431
ttgggtagagtt

SEQ ID NO: 305418 - DNA, 12 bp, Artificial Sequence
  Oligonucleotide primer for the detection of SNP TSC0021431
ttgggtagagtc

SEQ ID NO: 305419 - DNA, 12 bp, Artificial Sequence
  Oligonucleotide primer for the detection of SNP TSC0021432
attttgttatta

SEQ ID NO: 305420 - DNA, 12 bp, Artificial Sequence
  Oligonucleotide primer for the detection of SNP TSC0021439
gtagggattttg

SEQ ID NO: 305421 - DNA, 12 bp, Artificial Sequence
  Oligonucleotide primer for the detection of SNP TSC0021440
aaaaattaggtt

SEQ ID NO: 305422 - DNA, 12 bp, Artificial Sequence
  Oligonucleotide primer for the detection of SNP TSC0021441
aatcctcctcat

SEQ ID NO: 305423 - DNA, 12 bp, Artificial Sequence
  Oligonucleotide primer for the detection of SNP TSC0021441
ttggatttgatg

SEQ ID NO: 305424 - DNA, 12 bp, Artificial Sequence
  Oligonucleotide primer for the detection of SNP TSC0021442
acaacccaaaaa

SEQ ID NO: 305425 - DNA, 12 bp, Artificial Sequence
  Oligonucleotide primer for the detection of SNP TSC0021442
acgacccaaaaa

SEQ ID NO: 305426 - DNA, 12 bp, Artificial Sequence
  Oligonucleotide primer for the detection of SNP TSC0021442
ggattaggtttt

SEQ ID NO: 305427 - DNA, 12 bp, Artificial Sequence
  Oligonucleotide primer for the detection of SNP TSC0021442
ggattaggtttc

SEQ ID NO: 305428 - DNA, 12 bp, Artificial Sequence
  Oligonucleotide primer for the detection of SNP TSC0021442
gtggtttaaggg

SEQ ID NO: 305429 - DNA, 12 bp, Artificial Sequence
  Oligonucleotide primer for the detection of SNP TSC0021442
gcggtttaaggg

SEQ ID NO: 305430 - DNA, 12 bp, Artificial Sequence
  Oligonucleotide primer for the detection of SNP TSC0021443
cccaccccaacc

SEQ ID NO: 305431 - DNA, 12 bp, Artificial Sequence
  Oligonucleotide primer for the detection of SNP TSC0021443
ttatttttgaat

SEQ ID NO: 305432 - DNA, 12 bp, Artificial Sequence
  Oligonucleotide primer for the detection of SNP TSC0021443
tatccttaaata

SEQ ID NO: 305433 - DNA, 12 bp, Artificial Sequence
  Oligonucleotide primer for the detection of SNP TSC0021444
cacatactcaat

SEQ ID NO: 305434 - DNA, 12 bp, Artificial Sequence
  Oligonucleotide primer for the detection of SNP TSC0021444
tggtgataagta

SEQ ID NO: 305435 - DNA, 12 bp, Artificial Sequence
  Oligonucleotide primer for the detection of SNP TSC0021445
tataccatctat

SEQ ID NO: 305436 - DNA, 12 bp, Artificial Sequence
  Oligonucleotide primer for the detection of SNP TSC0021445
taattgtattaa

SEQ ID NO: 305437 - DNA, 12 bp, Artificial Sequence
  Oligonucleotide primer for the detection of SNP TSC0021446
ttcgtttattta

SEQ ID NO: 305438 - DNA, 12 bp, Artificial Sequence
  Oligonucleotide primer for the detection of SNP TSC0021446
cccatccaccta

SEQ ID NO: 305439 - DNA, 12 bp, Artificial Sequence
  Oligonucleotide primer for the detection of SNP TSC0021446
cccgtccaccta

SEQ ID NO: 305440 - DNA, 12 bp, Artificial Sequence
  Oligonucleotide primer for the detection of SNP TSC0021446
aggaggaatttt

SEQ ID NO: 305441 - DNA, 12 bp, Artificial Sequence
  Oligonucleotide primer for the detection of SNP TSC0021446
aggaggaatttc

SEQ ID NO: 305442 - DNA, 12 bp, Artificial Sequence
  Oligonucleotide primer for the detection of SNP TSC0021447
tacttaaatcta

SEQ ID NO: 305443 - DNA, 12 bp, Artificial Sequence
  Oligonucleotide primer for the detection of SNP TSC0021447
tttttatgagtt

SEQ ID NO: 305444 - DNA, 12 bp, Artificial Sequence
  Oligonucleotide primer for the detection of SNP TSC0021447
tcctcataaatc

SEQ ID NO: 305445 - DNA, 12 bp, Artificial Sequence
  Oligonucleotide primer for the detection of SNP TSC0021447
tatttgagtttg

SEQ ID NO: 305446 - DNA, 12 bp, Artificial Sequence
  Oligonucleotide primer for the detection of SNP TSC0021449
aaatcaatccaa

SEQ ID NO: 305447 - DNA, 12 bp, Artificial Sequence
  Oligonucleotide primer for the detection of SNP TSC0021449
ttgggattaaat

SEQ ID NO: 305448 - DNA, 12 bp, Artificial Sequence
  Oligonucleotide primer for the detection of SNP TSC0021449
ctaaaattaaac

SEQ ID NO: 305449 - DNA, 12 bp, Artificial Sequence
  Oligonucleotide primer for the detection of SNP TSC0021449
gggttaatttag

SEQ ID NO: 305450 - DNA, 12 bp, Artificial Sequence
  Oligonucleotide primer for the detection of SNP TSC0021450
tctatcttacac

SEQ ID NO: 305451 - DNA, 12 bp, Artificial Sequence
  Oligonucleotide primer for the detection of SNP TSC0021450
cccatcaacttc

SEQ ID NO: 305452 - DNA, 12 bp, Artificial Sequence
  Oligonucleotide primer for the detection of SNP TSC0021450
tttgttttatac

SEQ ID NO: 305453 - DNA, 12 bp, Artificial Sequence
  Oligonucleotide primer for the detection of SNP TSC0021453
attaaactcact

SEQ ID NO: 305454 - DNA, 12 bp, Artificial Sequence
  Oligonucleotide primer for the detection of SNP TSC0021453
ttgtagtttagg

SEQ ID NO: 305455 - DNA, 12 bp, Artificial Sequence
  Oligonucleotide primer for the detection of SNP TSC0021454
cctactatataa

SEQ ID NO: 305456 - DNA, 12 bp, Artificial Sequence
  Oligonucleotide primer for the detection of SNP TSC0021454
gtgtatgttttt

SEQ ID NO: 305457 - DNA, 12 bp, Artificial Sequence
  Oligonucleotide primer for the detection of SNP TSC0021454
atacatatctcc

SEQ ID NO: 305458 - DNA, 12 bp, Artificial Sequence
  Oligonucleotide primer for the detection of SNP TSC0021454
tttattatgtgg

SEQ ID NO: 305459 - DNA, 12 bp, Artificial Sequence
  Oligonucleotide primer for the detection of SNP TSC0021455
cattctctctcc

SEQ ID NO: 305460 - DNA, 12 bp, Artificial Sequence
  Oligonucleotide primer for the detection of SNP TSC0021455
tttatagggtgg

SEQ ID NO: 305461 - DNA, 12 bp, Artificial Sequence
  Oligonucleotide primer for the detection of SNP TSC0021457
cttataccaatt

SEQ ID NO: 305462 - DNA, 12 bp, Artificial Sequence
  Oligonucleotide primer for the detection of SNP TSC0021457
gatagtatttta

SEQ ID NO: 305463 - DNA, 12 bp, Artificial Sequence
  Oligonucleotide primer for the detection of SNP TSC0021458
ctaccccaaacc

SEQ ID NO: 305464 - DNA, 12 bp, Artificial Sequence
  Oligonucleotide primer for the detection of SNP TSC0021458
gggaagatgtgg

SEQ ID NO: 305465 - DNA, 12 bp, Artificial Sequence
  Oligonucleotide primer for the detection of SNP TSC0021459
taaaaaacctaa

SEQ ID NO: 305466 - DNA, 12 bp, Artificial Sequence
  Oligonucleotide primer for the detection of SNP TSC0021459
atatttttggat

SEQ ID NO: 305467 - DNA, 12 bp, Artificial Sequence
  Oligonucleotide primer for the detection of SNP TSC0021459
aatatccctaaa

SEQ ID NO: 305468 - DNA, 12 bp, Artificial Sequence
  Oligonucleotide primer for the detection of SNP TSC0021460
cccacccaacac

SEQ ID NO: 305469 - DNA, 12 bp, Artificial Sequence
  Oligonucleotide primer for the detection of SNP TSC0021460
cccacccaacgc

SEQ ID NO: 305470 - DNA, 12 bp, Artificial Sequence
  Oligonucleotide primer for the detection of SNP TSC0021460
cccgcccaacac

SEQ ID NO: 305471 - DNA, 12 bp, Artificial Sequence
  Oligonucleotide primer for the detection of SNP TSC0021460
cccgcccaacgc

SEQ ID NO: 305472 - DNA, 12 bp, Artificial Sequence
  Oligonucleotide primer for the detection of SNP TSC0021460
aggagtggatgt

SEQ ID NO: 305473 - DNA, 12 bp, Artificial Sequence
  Oligonucleotide primer for the detection of SNP TSC0021460
aggagcggatgt

SEQ ID NO: 305474 - DNA, 12 bp, Artificial Sequence
  Oligonucleotide primer for the detection of SNP TSC0021460
aacaaatacaaa

SEQ ID NO: 305475 - DNA, 12 bp, Artificial Sequence
  Oligonucleotide primer for the detection of SNP TSC0021460
aacgaatacaaa

SEQ ID NO: 305476 - DNA, 12 bp, Artificial Sequence
  Oligonucleotide primer for the detection of SNP TSC0021460
tttgtttagtgt

SEQ ID NO: 305477 - DNA, 12 bp, Artificial Sequence
  Oligonucleotide primer for the detection of SNP TSC0021460
ttcgtttagtgt

SEQ ID NO: 305478 - DNA, 12 bp, Artificial Sequence
  Oligonucleotide primer for the detection of SNP TSC0021460
tttgtttagcgt

SEQ ID NO: 305479 - DNA, 12 bp, Artificial Sequence
  Oligonucleotide primer for the detection of SNP TSC0021460
tttgtttagtgc

SEQ ID NO: 305480 - DNA, 12 bp, Artificial Sequence
  Oligonucleotide primer for the detection of SNP TSC0021460
ttcgtttagcgt

SEQ ID NO: 305481 - DNA, 12 bp, Artificial Sequence
  Oligonucleotide primer for the detection of SNP TSC0021460
ttcgtttagtgc

SEQ ID NO: 305482 - DNA, 12 bp, Artificial Sequence
  Oligonukleotid-Primer
tttgtttagcgc

SEQ ID NO: 305483 - DNA, 12 bp, Artificial Sequence
  Oligonucleotide primer for the detection of SNP TSC0021460
ttcgtttagcgc

SEQ ID NO: 305484 - DNA, 12 bp, Artificial Sequence
  Oligonucleotide primer for the detection of SNP TSC0021461
ggttttttaatt

SEQ ID NO: 305485 - DNA, 12 bp, Artificial Sequence
  Oligonucleotide primer for the detection of SNP TSC0021461
aacttctcaatc

SEQ ID NO: 305486 - DNA, 12 bp, Artificial Sequence
  Oligonukleotid-Primer
cacaaaaaaaca

SEQ ID NO: 305487 - DNA, 12 bp, Artificial Sequence
  Oligonucleotide primer for the detection of SNP TSC0021462
aattcgtatttt

SEQ ID NO: 305488 - DNA, 12 bp, Artificial Sequence
  Oligonucleotide primer for the detection of SNP TSC0021462
tccacactctaa

SEQ ID NO: 305489 - DNA, 12 bp, Artificial Sequence
  Oligonucleotide primer for the detection of SNP TSC0021462
tccgcactctaa

SEQ ID NO: 305490 - DNA, 12 bp, Artificial Sequence
  Oligonucleotide primer for the detection of SNP TSC0021462
tagaaagatatt

SEQ ID NO: 305491 - DNA, 12 bp, Artificial Sequence
  Oligonucleotide primer for the detection of SNP TSC0021462
tagaaagatatc

SEQ ID NO: 305492 - DNA, 12 bp, Artificial Sequence
  Oligonucleotide primer for the detection of SNP TSC0021464
tctataacccat

SEQ ID NO: 305493 - DNA, 12 bp, Artificial Sequence
  Oligonucleotide primer for the detection of SNP TSC0021464
ttttttatttgg

SEQ ID NO: 305494 - DNA, 12 bp, Artificial Sequence
  Oligonucleotide primer for the detection of SNP TSC0021465
acataaccacta

SEQ ID NO: 305495 - DNA, 12 bp, Artificial Sequence
  Oligonucleotide primer for the detection of SNP TSC0021465
ttttttataaaa

SEQ ID NO: 305496 - DNA, 12 bp, Artificial Sequence
  Oligonucleotide primer for the detection of SNP TSC0021465
aatatagttatt

SEQ ID NO: 305497 - DNA, 12 bp, Artificial Sequence
  Oligonucleotide primer for the detection of SNP TSC0021466
aaacttcccatc

SEQ ID NO: 305498 - DNA, 12 bp, Artificial Sequence
  Oligonucleotide primer for the detection of SNP TSC0021466
tatgttttgtta

SEQ ID NO: 305499 - DNA, 12 bp, Artificial Sequence
  Oligonucleotide primer for the detection of SNP TSC0021467
ataataaaaaac

SEQ ID NO: 305500 - DNA, 12 bp, Artificial Sequence
  Oligonucleotide primer for the detection of SNP TSC0021467
ttaaaagttttg

SEQ ID NO: 305501 - DNA, 12 bp, Artificial Sequence
  Oligonucleotide primer for the detection of SNP TSC0021468
catcactctata

SEQ ID NO: 305502 - DNA, 12 bp, Artificial Sequence
  Oligonucleotide primer for the detection of SNP TSC0021468
taaagttatagg

SEQ ID NO: 305503 - DNA, 12 bp, Artificial Sequence
  Oligonucleotide primer for the detection of SNP TSC0021468
caaaatcataaa

SEQ ID NO: 305504 - DNA, 12 bp, Artificial Sequence
  Oligonucleotide primer for the detection of SNP TSC0021468
gtattattttgt

SEQ ID NO: 305505 - DNA, 12 bp, Artificial Sequence
  Oligonucleotide primer for the detection of SNP TSC0021469
catctaaaaaca

SEQ ID NO: 305506 - DNA, 12 bp, Artificial Sequence
  Oligonucleotide primer for the detection of SNP TSC0021469
catctaaaaacg

SEQ ID NO: 305507 - DNA, 12 bp, Artificial Sequence
  Oligonucleotide primer for the detection of SNP TSC0021469
gagtttttatat

SEQ ID NO: 305508 - DNA, 12 bp, Artificial Sequence
  Oligonucleotide primer for the detection of SNP TSC0021469
taaacccccaca

SEQ ID NO: 305509 - DNA, 12 bp, Artificial Sequence
  Oligonucleotide primer for the detection of SNP TSC0021469
gtatttgggggt

SEQ ID NO: 305510 - DNA, 12 bp, Artificial Sequence
  Oligonucleotide primer for the detection of SNP TSC0021469
gtatttgggggc

SEQ ID NO: 305511 - DNA, 12 bp, Artificial Sequence
  Oligonucleotide primer for the detection of SNP TSC0021473
ttaactattctt

SEQ ID NO: 305512 - DNA, 12 bp, Artificial Sequence
  Oligonucleotide primer for the detection of SNP TSC0021474
actacaaatact

SEQ ID NO: 305513 - DNA, 12 bp, Artificial Sequence
  Oligonucleotide primer for the detection of SNP TSC0021474
ggagaaagtatg

SEQ ID NO: 305514 - DNA, 12 bp, Artificial Sequence
  Oligonucleotide primer for the detection of SNP TSC0021475
accctaacaact

SEQ ID NO: 305515 - DNA, 12 bp, Artificial Sequence
  Oligonucleotide primer for the detection of SNP TSC0021475
tggagagtttga

SEQ ID NO: 305516 - DNA, 12 bp, Artificial Sequence
  Oligonucleotide primer for the detection of SNP TSC0021476
ctaaaaatcaaa

SEQ ID NO: 305517 - DNA, 12 bp, Artificial Sequence
  Oligonucleotide primer for the detection of SNP TSC0021476
tatgtttttgta

SEQ ID NO: 305518 - DNA, 12 bp, Artificial Sequence
  Oligonucleotide primer for the detection of SNP TSC0021476
catatttctata

SEQ ID NO: 305519 - DNA, 12 bp, Artificial Sequence
  Oligonucleotide primer for the detection of SNP TSC0021476
ttggaaattaag

SEQ ID NO: 305520 - DNA, 12 bp, Artificial Sequence
  Oligonucleotide primer for the detection of SNP TSC0021477
ataccttctcct

SEQ ID NO: 305521 - DNA, 12 bp, Artificial Sequence
  Oligonucleotide primer for the detection of SNP TSC0021478
ataatcacattc

SEQ ID NO: 305522 - DNA, 12 bp, Artificial Sequence
  Oligonucleotide primer for the detection of SNP TSC0021478
ataatcacgttc

SEQ ID NO: 305523 - DNA, 12 bp, Artificial Sequence
  Oligonucleotide primer for the detection of SNP TSC0021478
ataatcgcattc

SEQ ID NO: 305524 - DNA, 12 bp, Artificial Sequence
  Oligonucleotide primer for the detection of SNP TSC0021478
ataatcgcgttc

SEQ ID NO: 305525 - DNA, 12 bp, Artificial Sequence
  Oligonucleotide primer for the detection of SNP TSC0021478
ttatatttggta

SEQ ID NO: 305526 - DNA, 12 bp, Artificial Sequence
  Oligonucleotide primer for the detection of SNP TSC0021481
aataaattatcc

SEQ ID NO: 305527 - DNA, 12 bp, Artificial Sequence
  Oligonucleotide primer for the detection of SNP TSC0021481
aagataatagta

SEQ ID NO: 305528 - DNA, 12 bp, Artificial Sequence
  Oligonucleotide primer for the detection of SNP TSC0021482
acctactaacat

SEQ ID NO: 305529 - DNA, 12 bp, Artificial Sequence
  Oligonucleotide primer for the detection of SNP TSC0021482
tttttagaaatg

SEQ ID NO: 305530 - DNA, 12 bp, Artificial Sequence
  Oligonucleotide primer for the detection of SNP TSC0021483
caacaaaccatt

SEQ ID NO: 305531 - DNA, 12 bp, Artificial Sequence
  Oligonucleotide primer for the detection of SNP TSC0021484
ataaaaactaat

SEQ ID NO: 305532 - DNA, 12 bp, Artificial Sequence
  Oligonucleotide primer for the detection of SNP TSC0021484
tgaataagttga

SEQ ID NO: 305533 - DNA, 12 bp, Artificial Sequence
  Oligonucleotide primer for the detection of SNP TSC0021484
taaataaattaa

SEQ ID NO: 305534 - DNA, 12 bp, Artificial Sequence
  Oligonucleotide primer for the detection of SNP TSC0021484
ataaaagttaat

SEQ ID NO: 305535 - DNA, 12 bp, Artificial Sequence
  Oligonucleotide primer for the detection of SNP TSC0021486
aaatttcaaaaa

SEQ ID NO: 305536 - DNA, 12 bp, Artificial Sequence
  Oligonucleotide primer for the detection of SNP TSC0021486
aaattttataat

SEQ ID NO: 305537 - DNA, 12 bp, Artificial Sequence
  Oligonucleotide primer for the detection of SNP TSC0021486
aaattttacaat

SEQ ID NO: 305538 - DNA, 12 bp, Artificial Sequence
  Oligonucleotide primer for the detection of SNP TSC0021486
ggattttaaaaa

SEQ ID NO: 305539 - DNA, 12 bp, Artificial Sequence
  Oligonucleotide primer for the detection of SNP TSC0021487
aaactatttttt

SEQ ID NO: 305540 - DNA, 12 bp, Artificial Sequence
  Oligonucleotide primer for the detection of SNP TSC0021487
tataatagttaa

SEQ ID NO: 305541 - DNA, 12 bp, Artificial Sequence
  Oligonucleotide primer for the detection of SNP TSC0021488
tattctaaatct

SEQ ID NO: 305542 - DNA, 12 bp, Artificial Sequence
  Oligonucleotide primer for the detection of SNP TSC0021488
agaatatattta

SEQ ID NO: 305543 - DNA, 12 bp, Artificial Sequence
  Oligonucleotide primer for the detection of SNP TSC0021488
aaaatacactca

SEQ ID NO: 305544 - DNA, 12 bp, Artificial Sequence
  Oligonucleotide primer for the detection of SNP TSC0021488
tattttgaattt

SEQ ID NO: 305545 - DNA, 12 bp, Artificial Sequence
  Oligonucleotide primer for the detection of SNP TSC0021489
aattaccattaa

SEQ ID NO: 305546 - DNA, 12 bp, Artificial Sequence
  Oligonucleotide primer for the detection of SNP TSC0021489
tttagtgaaaag

SEQ ID NO: 305547 - DNA, 12 bp, Artificial Sequence
  Oligonucleotide primer for the detection of SNP TSC0021490
attatctttcct

SEQ ID NO: 305548 - DNA, 12 bp, Artificial Sequence
  Oligonucleotide primer for the detection of SNP TSC0021490
tatgtatgggta

SEQ ID NO: 305549 - DNA, 12 bp, Artificial Sequence
  Oligonucleotide primer for the detection of SNP TSC0021490
tatgtacgggta

SEQ ID NO: 305550 - DNA, 12 bp, Artificial Sequence
  Oligonucleotide primer for the detection of SNP TSC0021491
aatataaaaaca

SEQ ID NO: 305551 - DNA, 12 bp, Artificial Sequence
  Oligonucleotide primer for the detection of SNP TSC0021491
ttgggtgtttgt

SEQ ID NO: 305552 - DNA, 12 bp, Artificial Sequence
  Oligonucleotide primer for the detection of SNP TSC0021491
ctaaatacctac

SEQ ID NO: 305553 - DNA, 12 bp, Artificial Sequence
  Oligonucleotide primer for the detection of SNP TSC0021491
agtatggagata

SEQ ID NO: 305554 - DNA, 12 bp, Artificial Sequence
  Oligonucleotide primer for the detection of SNP TSC0021492
aactaacccctt

SEQ ID NO: 305555 - DNA, 12 bp, Artificial Sequence
  Oligonucleotide primer for the detection of SNP TSC0021492
tggagaggtatg

SEQ ID NO: 305556 - DNA, 12 bp, Artificial Sequence
  Oligonucleotide primer for the detection of SNP TSC0021495
ttaaactcatcc

SEQ ID NO: 305557 - DNA, 12 bp, Artificial Sequence
  Oligonucleotide primer for the detection of SNP TSC0021495
ggttatgggtag

SEQ ID NO: 305558 - DNA, 12 bp, Artificial Sequence
  Oligonucleotide primer for the detection of SNP TSC0021496
tgaaataaaatt

SEQ ID NO: 305559 - DNA, 12 bp, Artificial Sequence
  Oligonucleotide primer for the detection of SNP TSC0021496
ttttaaaaagag

SEQ ID NO: 305560 - DNA, 12 bp, Artificial Sequence
  Oligonucleotide primer for the detection of SNP TSC0021497
taaatatatatc

SEQ ID NO: 305561 - DNA, 12 bp, Artificial Sequence
  Oligonucleotide primer for the detection of SNP TSC0021497
tgtaaaatgtaa

SEQ ID NO: 305562 - DNA, 12 bp, Artificial Sequence
  Oligonucleotide primer for the detection of SNP TSC0021504
tttaatcaaaac

SEQ ID NO: 305563 - DNA, 12 bp, Artificial Sequence
  Oligonucleotide primer for the detection of SNP TSC0021504
atatattgatat

SEQ ID NO: 305564 - DNA, 12 bp, Artificial Sequence
  Oligonucleotide primer for the detection of SNP TSC0021504
atatactaacat

SEQ ID NO: 305565 - DNA, 12 bp, Artificial Sequence
  Oligonucleotide primer for the detection of SNP TSC0021504
ttaattaaaatt

SEQ ID NO: 305566 - DNA, 12 bp, Artificial Sequence
  Oligonucleotide primer for the detection of SNP TSC0021505
attacaaatact

SEQ ID NO: 305567 - DNA, 12 bp, Artificial Sequence
  Oligonucleotide primer for the detection of SNP TSC0021505
tgggtgtagtgg

SEQ ID NO: 305568 - DNA, 12 bp, Artificial Sequence
  Oligonucleotide primer for the detection of SNP TSC0021505
cgggtgtagtgg

SEQ ID NO: 305569 - DNA, 12 bp, Artificial Sequence
  Oligonucleotide primer for the detection of SNP TSC0021505
tgggcgtagtgg

SEQ ID NO: 305570 - DNA, 12 bp, Artificial Sequence
  Oligonucleotide primer for the detection of SNP TSC0021505
cgggcgtagtgg

SEQ ID NO: 305571 - DNA, 12 bp, Artificial Sequence
  Oligonucleotide primer for the detection of SNP TSC0021507
aaataatactca

SEQ ID NO: 305572 - DNA, 12 bp, Artificial Sequence
  Oligonucleotide primer for the detection of SNP TSC0021507
ttgttaaatatt

SEQ ID NO: 305573 - DNA, 12 bp, Artificial Sequence
  Oligonucleotide primer for the detection of SNP TSC0021507
gggtaatattta

SEQ ID NO: 305574 - DNA, 12 bp, Artificial Sequence
  Oligonucleotide primer for the detection of SNP TSC0021508
aaaaattaattg

SEQ ID NO: 305575 - DNA, 12 bp, Artificial Sequence
  Oligonucleotide primer for the detection of SNP TSC0021508
aaaaattaatcg

SEQ ID NO: 305576 - DNA, 12 bp, Artificial Sequence
  Oligonucleotide primer for the detection of SNP TSC0021508
aaaaattaatca

SEQ ID NO: 305577 - DNA, 12 bp, Artificial Sequence
  Oligonucleotide primer for the detection of SNP TSC0021508
tttaattggagt

SEQ ID NO: 305578 - DNA, 12 bp, Artificial Sequence
  Oligonucleotide primer for the detection of SNP TSC0021509
taatattaaaaa

SEQ ID NO: 305579 - DNA, 12 bp, Artificial Sequence
  Oligonucleotide primer for the detection of SNP TSC0021509
aaatttttccat

SEQ ID NO: 305580 - DNA, 12 bp, Artificial Sequence
  Oligonucleotide primer for the detection of SNP TSC0021509
tggtattggaaa

SEQ ID NO: 305581 - DNA, 12 bp, Artificial Sequence
  Oligonucleotide primer for the detection of SNP TSC0021513
acttccctactt

SEQ ID NO: 305582 - DNA, 12 bp, Artificial Sequence
  Oligonucleotide primer for the detection of SNP TSC0021513
taaatttaatat

SEQ ID NO: 305583 - DNA, 12 bp, Artificial Sequence
  Oligonukleotid-Primer
taaattcaacat

SEQ ID NO: 305584 - DNA, 12 bp, Artificial Sequence
  Oligonucleotide primer for the detection of SNP TSC0021514
cccaaacatatt

SEQ ID NO: 305585 - DNA, 12 bp, Artificial Sequence
  Oligonucleotide primer for the detection of SNP TSC0021514
cccgaacatatt

SEQ ID NO: 305586 - DNA, 12 bp, Artificial Sequence
  Oligonucleotide primer for the detection of SNP TSC0021514
aagaaatgttgg

SEQ ID NO: 305587 - DNA, 12 bp, Artificial Sequence
  Oligonucleotide primer for the detection of SNP TSC0021514
tttgaatatatt

SEQ ID NO: 305588 - DNA, 12 bp, Artificial Sequence
  Oligonucleotide primer for the detection of SNP TSC0021514
ttcgaatatatt

SEQ ID NO: 305589 - DNA, 12 bp, Artificial Sequence
  Oligonucleotide primer for the detection of SNP TSC0021515
ttcatctacctc

SEQ ID NO: 305590 - DNA, 12 bp, Artificial Sequence
  Oligonucleotide primer for the detection of SNP TSC0021515
aatggattgaag

SEQ ID NO: 305591 - DNA, 12 bp, Artificial Sequence
  Oligonucleotide primer for the detection of SNP TSC0021522
ccaataacccat

SEQ ID NO: 305592 - DNA, 12 bp, Artificial Sequence
  Oligonucleotide primer for the detection of SNP TSC0021522
taaattttatta

SEQ ID NO: 305593 - DNA, 12 bp, Artificial Sequence
  Oligonucleotide primer for the detection of SNP TSC0021522
caaatcccatta

SEQ ID NO: 305594 - DNA, 12 bp, Artificial Sequence
  Oligonucleotide primer for the detection of SNP TSC0021522
ttaataatttat

SEQ ID NO: 305595 - DNA, 12 bp, Artificial Sequence
  Oligonucleotide primer for the detection of SNP TSC0021525
catattaaccaa

SEQ ID NO: 305596 - DNA, 12 bp, Artificial Sequence
  Oligonucleotide primer for the detection of SNP TSC0021525
gtttaagattgg

SEQ ID NO: 305597 - DNA, 12 bp, Artificial Sequence
  Oligonucleotide primer for the detection of SNP TSC0021525
attcaaaattaa

SEQ ID NO: 305598 - DNA, 12 bp, Artificial Sequence
  Oligonucleotide primer for the detection of SNP TSC0021525
tatattgattag

SEQ ID NO: 305599 - DNA, 12 bp, Artificial Sequence
  Oligonucleotide primer for the detection of SNP TSC0021526
cataaccacacc

SEQ ID NO: 305600 - DNA, 12 bp, Artificial Sequence
  Oligonucleotide primer for the detection of SNP TSC0021526
tatgattatatt

SEQ ID NO: 305601 - DNA, 12 bp, Artificial Sequence
  Oligonucleotide primer for the detection of SNP TSC0021527
aaaccttcctac

SEQ ID NO: 305602 - DNA, 12 bp, Artificial Sequence
  Oligonucleotide primer for the detection of SNP TSC0021527
taatttattatg

SEQ ID NO: 305603 - DNA, 12 bp, Artificial Sequence
  Oligonucleotide primer for the detection of SNP TSC0021528
cactataaattc

SEQ ID NO: 305604 - DNA, 12 bp, Artificial Sequence
  Oligonucleotide primer for the detection of SNP TSC0021528
agggtttgattt

SEQ ID NO: 305605 - DNA, 12 bp, Artificial Sequence
  Oligonucleotide primer for the detection of SNP TSC0021528
agggtttgattc

SEQ ID NO: 305606 - DNA, 12 bp, Artificial Sequence
  Oligonucleotide primer for the detection of SNP TSC0021528
aaaacctaaccc

SEQ ID NO: 305607 - DNA, 12 bp, Artificial Sequence
  Oligonucleotide primer for the detection of SNP TSC0021528
tattatgaattc

SEQ ID NO: 305608 - DNA, 12 bp, Artificial Sequence
  Oligonucleotide primer for the detection of SNP TSC0021530
aaaacccataaa

SEQ ID NO: 305609 - DNA, 12 bp, Artificial Sequence
  Oligonucleotide primer for the detection of SNP TSC0021530
tttataagtttt

SEQ ID NO: 305610 - DNA, 12 bp, Artificial Sequence
  Oligonucleotide primer for the detection of SNP TSC0021530
acaaaccctaaa

SEQ ID NO: 305611 - DNA, 12 bp, Artificial Sequence
  Oligonucleotide primer for the detection of SNP TSC0021530
taaagtttatag

SEQ ID NO: 305612 - DNA, 12 bp, Artificial Sequence
  Oligonucleotide primer for the detection of SNP TSC0021531
tattgataaatt

SEQ ID NO: 305613 - DNA, 12 bp, Artificial Sequence
  Oligonucleotide primer for the detection of SNP TSC0021531
tactaacaaact

SEQ ID NO: 305614 - DNA, 12 bp, Artificial Sequence
  Oligonucleotide primer for the detection of SNP TSC0021531
aaattttgttta

SEQ ID NO: 305615 - DNA, 12 bp, Artificial Sequence
  Oligonucleotide primer for the detection of SNP TSC0021532
aatactcccaaa

SEQ ID NO: 305616 - DNA, 12 bp, Artificial Sequence
  Oligonucleotide primer for the detection of SNP TSC0021532
aggatagggttt

SEQ ID NO: 305617 - DNA, 12 bp, Artificial Sequence
  Oligonucleotide primer for the detection of SNP TSC0021532
aaaataaaacct

SEQ ID NO: 305618 - DNA, 12 bp, Artificial Sequence
  Oligonucleotide primer for the detection of SNP TSC0021532
ggtgtttttaga

SEQ ID NO: 305619 - DNA, 12 bp, Artificial Sequence
  Oligonucleotide primer for the detection of SNP TSC0021533
acaaaaaccaaa

SEQ ID NO: 305620 - DNA, 12 bp, Artificial Sequence
  Oligonucleotide primer for the detection of SNP TSC0021533
tgtagttagttt

SEQ ID NO: 305621 - DNA, 12 bp, Artificial Sequence
  Oligonucleotide primer for the detection of SNP TSC0021533
tacaaccaaccc

SEQ ID NO: 305622 - DNA, 12 bp, Artificial Sequence
  Oligonucleotide primer for the detection of SNP TSC0021533
gtaggggttaga

SEQ ID NO: 305623 - DNA, 12 bp, Artificial Sequence
  Oligonucleotide primer for the detection of SNP TSC0021534
cttttatttctc

SEQ ID NO: 305624 - DNA, 12 bp, Artificial Sequence
  Oligonucleotide primer for the detection of SNP TSC0021534
attattttaggg

SEQ ID NO: 305625 - DNA, 12 bp, Artificial Sequence
  Oligonucleotide primer for the detection of SNP TSC0021535
caaataccaccg

SEQ ID NO: 305626 - DNA, 12 bp, Artificial Sequence
  Oligonucleotide primer for the detection of SNP TSC0021535
cgaataccaccg

SEQ ID NO: 305627 - DNA, 12 bp, Artificial Sequence
  Oligonucleotide primer for the detection of SNP TSC0021535
gaaataaaaata

SEQ ID NO: 305628 - DNA, 12 bp, Artificial Sequence
  Oligonucleotide primer for the detection of SNP TSC0021535
tggatgttattg

SEQ ID NO: 305629 - DNA, 12 bp, Artificial Sequence
  Oligonucleotide primer for the detection of SNP TSC0021535
cggatgttattg

SEQ ID NO: 305630 - DNA, 12 bp, Artificial Sequence
  Oligonucleotide primer for the detection of SNP TSC0021535
tggatgttatcg

SEQ ID NO: 305631 - DNA, 12 bp, Artificial Sequence
  Oligonucleotide primer for the detection of SNP TSC0021535
cggatgttatcg

SEQ ID NO: 305632 - DNA, 12 bp, Artificial Sequence
  Oligonucleotide primer for the detection of SNP TSC0021536
acccttaaattt

SEQ ID NO: 305633 - DNA, 12 bp, Artificial Sequence
  Oligonucleotide primer for the detection of SNP TSC0021536
ggagatatttta

SEQ ID NO: 305634 - DNA, 12 bp, Artificial Sequence
  Oligonucleotide primer for the detection of SNP TSC0021536
aaaaatatctca

SEQ ID NO: 305635 - DNA, 12 bp, Artificial Sequence
  Oligonucleotide primer for the detection of SNP TSC0021536
gtttttgagttt

SEQ ID NO: 305636 - DNA, 12 bp, Artificial Sequence
  Oligonucleotide primer for the detection of SNP TSC0021538
gagattatattg

SEQ ID NO: 305637 - DNA, 12 bp, Artificial Sequence
  Oligonucleotide primer for the detection of SNP TSC0021539
atctacacacct

SEQ ID NO: 305638 - DNA, 12 bp, Artificial Sequence
  Oligonucleotide primer for the detection of SNP TSC0021539
tttgtggtgtag

SEQ ID NO: 305639 - DNA, 12 bp, Artificial Sequence
  Oligonucleotide primer for the detection of SNP TSC0021540
gtagttttataa

SEQ ID NO: 305640 - DNA, 12 bp, Artificial Sequence
  Oligonucleotide primer for the detection of SNP TSC0021540
acaactccacaa

SEQ ID NO: 305641 - DNA, 12 bp, Artificial Sequence
  Oligonucleotide primer for the detection of SNP TSC0021540
gatggagtgttt

SEQ ID NO: 305642 - DNA, 12 bp, Artificial Sequence
  Oligonucleotide primer for the detection of SNP TSC0021540
gacggagtgttt

SEQ ID NO: 305643 - DNA, 12 bp, Artificial Sequence
  Oligonucleotide primer for the detection of SNP TSC0021541
tattaacccaat

SEQ ID NO: 305644 - DNA, 12 bp, Artificial Sequence
  Oligonucleotide primer for the detection of SNP TSC0021541
tattaacccgat

SEQ ID NO: 305645 - DNA, 12 bp, Artificial Sequence
  Oligonucleotide primer for the detection of SNP TSC0021541
tattattttaag

SEQ ID NO: 305646 - DNA, 12 bp, Artificial Sequence
  Oligonucleotide primer for the detection of SNP TSC0021541
caccaccccaaa

SEQ ID NO: 305647 - DNA, 12 bp, Artificial Sequence
  Oligonucleotide primer for the detection of SNP TSC0021541
tgttggtttggt

SEQ ID NO: 305648 - DNA, 12 bp, Artificial Sequence
  Oligonucleotide primer for the detection of SNP TSC0021541
tgttggttcggt

SEQ ID NO: 305649 - DNA, 12 bp, Artificial Sequence
  Oligonucleotide primer for the detection of SNP TSC0021544
aatatgaattgg

SEQ ID NO: 305650 - DNA, 12 bp, Artificial Sequence
  Oligonucleotide primer for the detection of SNP TSC0021544
aatacgaattgg

SEQ ID NO: 305651 - DNA, 12 bp, Artificial Sequence
  Oligonucleotide primer for the detection of SNP TSC0021544
aacacaaactaa

SEQ ID NO: 305652 - DNA, 12 bp, Artificial Sequence
  Oligonucleotide primer for the detection of SNP TSC0021544
aacacgaactaa

SEQ ID NO: 305653 - DNA, 12 bp, Artificial Sequence
  Oligonucleotide primer for the detection of SNP TSC0021544
ttgaggagagtt

SEQ ID NO: 305654 - DNA, 12 bp, Artificial Sequence
  Oligonucleotide primer for the detection of SNP TSC0021545
ggaggattttag

SEQ ID NO: 305655 - DNA, 12 bp, Artificial Sequence
  Oligonucleotide primer for the detection of SNP TSC0021545
aattgaaaggtt

SEQ ID NO: 305656 - DNA, 12 bp, Artificial Sequence
  Oligonucleotide primer for the detection of SNP TSC0021549
attaaaaacatt

SEQ ID NO: 305657 - DNA, 12 bp, Artificial Sequence
  Oligonucleotide primer for the detection of SNP TSC0021549
attaggagtatt

SEQ ID NO: 305658 - DNA, 12 bp, Artificial Sequence
  Oligonucleotide primer for the detection of SNP TSC0021550
tactaaaatttc

SEQ ID NO: 305659 - DNA, 12 bp, Artificial Sequence
  Oligonucleotide primer for the detection of SNP TSC0021550
tgttggggtttt

SEQ ID NO: 305660 - DNA, 12 bp, Artificial Sequence
  Oligonucleotide primer for the detection of SNP TSC0021552
attacttttaaa

SEQ ID NO: 305661 - DNA, 12 bp, Artificial Sequence
  Oligonucleotide primer for the detection of SNP TSC0021552
atgagttagtat

SEQ ID NO: 305662 - DNA, 12 bp, Artificial Sequence
  Oligonucleotide primer for the detection of SNP TSC0021552
acgagttagtat

SEQ ID NO: 305663 - DNA, 12 bp, Artificial Sequence
  Oligonucleotide primer for the detection of SNP TSC0021552
acaaatcaatat

SEQ ID NO: 305664 - DNA, 12 bp, Artificial Sequence
  Oligonucleotide primer for the detection of SNP TSC0021552
acgaatcaatat

SEQ ID NO: 305665 - DNA, 12 bp, Artificial Sequence
  Oligonucleotide primer for the detection of SNP TSC0021552
attgtttttaga

SEQ ID NO: 305666 - DNA, 12 bp, Artificial Sequence
  Oligonucleotide primer for the detection of SNP TSC0021553
aattattttact

SEQ ID NO: 305667 - DNA, 12 bp, Artificial Sequence
  Oligonucleotide primer for the detection of SNP TSC0021553
taggtaaatata

SEQ ID NO: 305668 - DNA, 12 bp, Artificial Sequence
  Oligonucleotide primer for the detection of SNP TSC0021553
aattattttatt

SEQ ID NO: 305669 - DNA, 12 bp, Artificial Sequence
  Oligonucleotide primer for the detection of SNP TSC0021555
tttttttccccc

SEQ ID NO: 305670 - DNA, 12 bp, Artificial Sequence
  Oligonucleotide primer for the detection of SNP TSC0021555
agtgaaattttg

SEQ ID NO: 305671 - DNA, 12 bp, Artificial Sequence
  Oligonucleotide primer for the detection of SNP TSC0021555
aataaaactcta

SEQ ID NO: 305672 - DNA, 12 bp, Artificial Sequence
  Oligonucleotide primer for the detection of SNP TSC0021557
aacctaataaaa

SEQ ID NO: 305673 - DNA, 12 bp, Artificial Sequence
  Oligonucleotide primer for the detection of SNP TSC0021557
tttgtatttaat

SEQ ID NO: 305674 - DNA, 12 bp, Artificial Sequence
  Oligonucleotide primer for the detection of SNP TSC0021557
ctatacctaata

SEQ ID NO: 305675 - DNA, 12 bp, Artificial Sequence
  Oligonucleotide primer for the detection of SNP TSC0021557
gttgggtttggt

SEQ ID NO: 305676 - DNA, 12 bp, Artificial Sequence
  Oligonucleotide primer for the detection of SNP TSC0021558
tatcaacaatat

SEQ ID NO: 305677 - DNA, 12 bp, Artificial Sequence
  Oligonucleotide primer for the detection of SNP TSC0021558
atatgtatagat

SEQ ID NO: 305678 - DNA, 12 bp, Artificial Sequence
  Oligonucleotide primer for the detection of SNP TSC0021558
aacatatacaaa

SEQ ID NO: 305679 - DNA, 12 bp, Artificial Sequence
  Oligonucleotide primer for the detection of SNP TSC0021558
tgttagtaatgt

SEQ ID NO: 305680 - DNA, 12 bp, Artificial Sequence
  Oligonucleotide primer for the detection of SNP TSC0021559
ataaatcattac

SEQ ID NO: 305681 - DNA, 12 bp, Artificial Sequence
  Oligonucleotide primer for the detection of SNP TSC0021559
taattgtataaa

SEQ ID NO: 305682 - DNA, 12 bp, Artificial Sequence
  Oligonucleotide primer for the detection of SNP TSC0021561
ctaatcaaaatc

SEQ ID NO: 305683 - DNA, 12 bp, Artificial Sequence
  Oligonucleotide primer for the detection of SNP TSC0021561
gagaaggaatta

SEQ ID NO: 305684 - DNA, 12 bp, Artificial Sequence
  Oligonucleotide primer for the detection of SNP TSC0021562
tccccaccattt

SEQ ID NO: 305685 - DNA, 12 bp, Artificial Sequence
  Oligonucleotide primer for the detection of SNP TSC0021562
gagggattaaat

SEQ ID NO: 305686 - DNA, 12 bp, Artificial Sequence
  Oligonucleotide primer for the detection of SNP TSC0021563
tatcaaaaaaat

SEQ ID NO: 305687 - DNA, 12 bp, Artificial Sequence
  Oligonucleotide primer for the detection of SNP TSC0021563
gggtttgtgaaa

SEQ ID NO: 305688 - DNA, 12 bp, Artificial Sequence
  Oligonucleotide primer for the detection of SNP TSC0021564
atacttaaaaat

SEQ ID NO: 305689 - DNA, 12 bp, Artificial Sequence
  Oligonucleotide primer for the detection of SNP TSC0021564
tttataataatt

SEQ ID NO: 305690 - DNA, 12 bp, Artificial Sequence
  Oligonucleotide primer for the detection of SNP TSC0021564
ttataacaacca

SEQ ID NO: 305691 - DNA, 12 bp, Artificial Sequence
  Oligonucleotide primer for the detection of SNP TSC0021564
tagggatttttt

SEQ ID NO: 305692 - DNA, 12 bp, Artificial Sequence
  Oligonucleotide primer for the detection of SNP TSC0021567
actacccacatc

SEQ ID NO: 305693 - DNA, 12 bp, Artificial Sequence
  Oligonucleotide primer for the detection of SNP TSC0021567
gttgagggtgag

SEQ ID NO: 305694 - DNA, 12 bp, Artificial Sequence
  Oligonucleotide primer for the detection of SNP TSC0021567
gtcgagggtgag

SEQ ID NO: 305695 - DNA, 12 bp, Artificial Sequence
  Oligonucleotide primer for the detection of SNP TSC0021569
ttaggtatattg

SEQ ID NO: 305696 - DNA, 12 bp, Artificial Sequence
  Oligonucleotide primer for the detection of SNP TSC0021569
ccaaacacacta

SEQ ID NO: 305697 - DNA, 12 bp, Artificial Sequence
  Oligonucleotide primer for the detection of SNP TSC0021569
aaatttgtgatt

SEQ ID NO: 305698 - DNA, 12 bp, Artificial Sequence
  Oligonucleotide primer for the detection of SNP TSC0021570
cttataatatac

SEQ ID NO: 305699 - DNA, 12 bp, Artificial Sequence
  Oligonucleotide primer for the detection of SNP TSC0021571
aaaaccctattt

SEQ ID NO: 305700 - DNA, 12 bp, Artificial Sequence
  Oligonucleotide primer for the detection of SNP TSC0021571
ttaagtataaga

SEQ ID NO: 305701 - DNA, 12 bp, Artificial Sequence
  Oligonucleotide primer for the detection of SNP TSC0021571
ggaattttgttt

SEQ ID NO: 305702 - DNA, 12 bp, Artificial Sequence
  Oligonucleotide primer for the detection of SNP TSC0021581
caaaaatatcct

SEQ ID NO: 305703 - DNA, 12 bp, Artificial Sequence
  Oligonucleotide primer for the detection of SNP TSC0021581
aaatgtggtata

SEQ ID NO: 305704 - DNA, 12 bp, Artificial Sequence
  Oligonucleotide primer for the detection of SNP TSC0021581
aaatataacata

SEQ ID NO: 305705 - DNA, 12 bp, Artificial Sequence
  Oligonucleotide primer for the detection of SNP TSC0021581
taggggtatttt

SEQ ID NO: 305706 - DNA, 12 bp, Artificial Sequence
  Oligonucleotide primer for the detection of SNP TSC0021584
aaaataaacaaa

SEQ ID NO: 305707 - DNA, 12 bp, Artificial Sequence
  Oligonucleotide primer for the detection of SNP TSC0021584
ttgaagtttttt

SEQ ID NO: 305708 - DNA, 12 bp, Artificial Sequence
  Oligonucleotide primer for the detection of SNP TSC0021584
tcttaaaacttc

SEQ ID NO: 305709 - DNA, 12 bp, Artificial Sequence
  Oligonucleotide primer for the detection of SNP TSC0021584
gatggataaatt

SEQ ID NO: 305710 - DNA, 12 bp, Artificial Sequence
  Oligonucleotide primer for the detection of SNP TSC0021585
tcattcatacat

SEQ ID NO: 305711 - DNA, 12 bp, Artificial Sequence
  Oligonucleotide primer for the detection of SNP TSC0021585
ttggtgaggagg

SEQ ID NO: 305712 - DNA, 12 bp, Artificial Sequence
  Oligonucleotide primer for the detection of SNP TSC0021585
ttatttatatat

SEQ ID NO: 305713 - DNA, 12 bp, Artificial Sequence
  Oligonucleotide primer for the detection of SNP TSC0021586
taatacaaaacc

SEQ ID NO: 305714 - DNA, 12 bp, Artificial Sequence
  Oligonucleotide primer for the detection of SNP TSC0021589
atcaacatcccc

SEQ ID NO: 305715 - DNA, 12 bp, Artificial Sequence
  Oligonucleotide primer for the detection of SNP TSC0021589
atcgacatcccc

SEQ ID NO: 305716 - DNA, 12 bp, Artificial Sequence
  Oligonucleotide primer for the detection of SNP TSC0021589
gggagaggagta

SEQ ID NO: 305717 - DNA, 12 bp, Artificial Sequence
  Oligonucleotide primer for the detection of SNP TSC0021589
attgatattttt

SEQ ID NO: 305718 - DNA, 12 bp, Artificial Sequence
  Oligonucleotide primer for the detection of SNP TSC0021589
atcgatattttt

SEQ ID NO: 305719 - DNA, 12 bp, Artificial Sequence
  Oligonucleotide primer for the detection of SNP TSC0021590
cttctccctaaa

SEQ ID NO: 305720 - DNA, 12 bp, Artificial Sequence
  Oligonucleotide primer for the detection of SNP TSC0021591
caaataaattaa

SEQ ID NO: 305721 - DNA, 12 bp, Artificial Sequence
  Oligonucleotide primer for the detection of SNP TSC0021591
tttatatttaaa

SEQ ID NO: 305722 - DNA, 12 bp, Artificial Sequence
  Oligonucleotide primer for the detection of SNP TSC0021595
aaaattatttaa

SEQ ID NO: 305723 - DNA, 12 bp, Artificial Sequence
  Oligonucleotide primer for the detection of SNP TSC0021595
gtttaaataatt

SEQ ID NO: 305724 - DNA, 12 bp, Artificial Sequence
  Oligonucleotide primer for the detection of SNP TSC0021595
aactcaaataac

SEQ ID NO: 305725 - DNA, 12 bp, Artificial Sequence
  Oligonucleotide primer for the detection of SNP TSC0021595
ggagttgtttgg

SEQ ID NO: 305726 - DNA, 12 bp, Artificial Sequence
  Oligonucleotide primer for the detection of SNP TSC0021596
ataaaaaacaac

SEQ ID NO: 305727 - DNA, 12 bp, Artificial Sequence
  Oligonucleotide primer for the detection of SNP TSC0021596
gattgtggtttg

SEQ ID NO: 305728 - DNA, 12 bp, Artificial Sequence
  Oligonucleotide primer for the detection of SNP TSC0021597
tctatctaccta

SEQ ID NO: 305729 - DNA, 12 bp, Artificial Sequence
  Oligonucleotide primer for the detection of SNP TSC0021597
ctccaccattta

SEQ ID NO: 305730 - DNA, 12 bp, Artificial Sequence
  Oligonucleotide primer for the detection of SNP TSC0021598
tttaaaattatc

SEQ ID NO: 305731 - DNA, 12 bp, Artificial Sequence
  Oligonucleotide primer for the detection of SNP TSC0021600
tctaatcacacc

SEQ ID NO: 305732 - DNA, 12 bp, Artificial Sequence
  Oligonucleotide primer for the detection of SNP TSC0021600
taagtttgtaaa

SEQ ID NO: 305733 - DNA, 12 bp, Artificial Sequence
  Oligonucleotide primer for the detection of SNP TSC0021601
ttctaaatctac

SEQ ID NO: 305734 - DNA, 12 bp, Artificial Sequence
  Oligonucleotide primer for the detection of SNP TSC0021601
ttatgggatgta

SEQ ID NO: 305735 - DNA, 12 bp, Artificial Sequence
  Oligonucleotide primer for the detection of SNP TSC0021602
ctttactaaaac

SEQ ID NO: 305736 - DNA, 12 bp, Artificial Sequence
  Oligonucleotide primer for the detection of SNP TSC0021602
ggtttatggttg

SEQ ID NO: 305737 - DNA, 12 bp, Artificial Sequence
  Oligonucleotide primer for the detection of SNP TSC0021603
ctaactcccaac

SEQ ID NO: 305738 - DNA, 12 bp, Artificial Sequence
  Oligonucleotide primer for the detection of SNP TSC0021604
cctaatcattct

SEQ ID NO: 305739 - DNA, 12 bp, Artificial Sequence
  Oligonucleotide primer for the detection of SNP TSC0021604
ttttattatggg

SEQ ID NO: 305740 - DNA, 12 bp, Artificial Sequence
  Oligonucleotide primer for the detection of SNP TSC0021606
acaaaatcaccc

SEQ ID NO: 305741 - DNA, 12 bp, Artificial Sequence
  Oligonucleotide primer for the detection of SNP TSC0021606
acgaaatcaccc

SEQ ID NO: 305742 - DNA, 12 bp, Artificial Sequence
  Oligonucleotide primer for the detection of SNP TSC0021606
tcccccttcaaa

SEQ ID NO: 305743 - DNA, 12 bp, Artificial Sequence
  Oligonucleotide primer for the detection of SNP TSC0021606
atggggttattt

SEQ ID NO: 305744 - DNA, 12 bp, Artificial Sequence
  Oligonucleotide primer for the detection of SNP TSC0021606
acggggttattt

SEQ ID NO: 305745 - DNA, 12 bp, Artificial Sequence
  Oligonucleotide primer for the detection of SNP TSC0021610
cataaatcaatt

SEQ ID NO: 305746 - DNA, 12 bp, Artificial Sequence
  Oligonucleotide primer for the detection of SNP TSC0021610
ttttgaaaaagt

SEQ ID NO: 305747 - DNA, 12 bp, Artificial Sequence
  Oligonucleotide primer for the detection of SNP TSC0021610
accctaaaaaaa

SEQ ID NO: 305748 - DNA, 12 bp, Artificial Sequence
  Oligonucleotide primer for the detection of SNP TSC0021610
tatgaattagtt

SEQ ID NO: 305749 - DNA, 12 bp, Artificial Sequence
  Oligonucleotide primer for the detection of SNP TSC0021611
attgtttttaaa

SEQ ID NO: 305750 - DNA, 12 bp, Artificial Sequence
  Oligonucleotide primer for the detection of SNP TSC0021612
cccatctctact

SEQ ID NO: 305751 - DNA, 12 bp, Artificial Sequence
  Oligonucleotide primer for the detection of SNP TSC0021612
cccgtctctact

SEQ ID NO: 305752 - DNA, 12 bp, Artificial Sequence
  Oligonucleotide primer for the detection of SNP TSC0021613
attacatccact

SEQ ID NO: 305753 - DNA, 12 bp, Artificial Sequence
  Oligonucleotide primer for the detection of SNP TSC0021613
taatgtaaaaaa

SEQ ID NO: 305754 - DNA, 12 bp, Artificial Sequence
  Oligonucleotide primer for the detection of SNP TSC0021613
caatacaaaaaa

SEQ ID NO: 305755 - DNA, 12 bp, Artificial Sequence
  Oligonucleotide primer for the detection of SNP TSC0021613
attgtatttatt

SEQ ID NO: 305756 - DNA, 12 bp, Artificial Sequence
  Oligonucleotide primer for the detection of SNP TSC0021614
tccctacccata

SEQ ID NO: 305757 - DNA, 12 bp, Artificial Sequence
  Oligonucleotide primer for the detection of SNP TSC0021614
gattttatgggg

SEQ ID NO: 305758 - DNA, 12 bp, Artificial Sequence
  Oligonucleotide primer for the detection of SNP TSC0021614
gattttacgggg

SEQ ID NO: 305759 - DNA, 12 bp, Artificial Sequence
  Oligonucleotide primer for the detection of SNP TSC0021614
aaccccacaaaa

SEQ ID NO: 305760 - DNA, 12 bp, Artificial Sequence
  Oligonucleotide primer for the detection of SNP TSC0021614
aaccccacgaaa

SEQ ID NO: 305761 - DNA, 12 bp, Artificial Sequence
  Oligonucleotide primer for the detection of SNP TSC0021616
atattattaaat

SEQ ID NO: 305762 - DNA, 12 bp, Artificial Sequence
  Oligonucleotide primer for the detection of SNP TSC0021616
ttttgtaaatga

SEQ ID NO: 305763 - DNA, 12 bp, Artificial Sequence
  Oligonucleotide primer for the detection of SNP TSC0021616
ttctataaataa

SEQ ID NO: 305764 - DNA, 12 bp, Artificial Sequence
  Oligonucleotide primer for the detection of SNP TSC0021618
ccctaaattcct

SEQ ID NO: 305765 - DNA, 12 bp, Artificial Sequence
  Oligonucleotide primer for the detection of SNP TSC0021618
agtgggtattag

SEQ ID NO: 305766 - DNA, 12 bp, Artificial Sequence
  Oligonucleotide primer for the detection of SNP TSC0021618
aataaacatcaa

SEQ ID NO: 305767 - DNA, 12 bp, Artificial Sequence
  Oligonucleotide primer for the detection of SNP TSC0021618
ttttggattttt

SEQ ID NO: 305768 - DNA, 12 bp, Artificial Sequence
  Oligonucleotide primer for the detection of SNP TSC0021621
tcaatactcaat

SEQ ID NO: 305769 - DNA, 12 bp, Artificial Sequence
  Oligonucleotide primer for the detection of SNP TSC0021621
ttggagatagtt

SEQ ID NO: 305770 - DNA, 12 bp, Artificial Sequence
  Oligonucleotide primer for the detection of SNP TSC0021621
ctaaaaacaacc

SEQ ID NO: 305771 - DNA, 12 bp, Artificial Sequence
  Oligonucleotide primer for the detection of SNP TSC0021621
ttagtgtttagt

SEQ ID NO: 305772 - DNA, 12 bp, Artificial Sequence
  Oligonucleotide primer for the detection of SNP TSC0021622
gtatatatttta

SEQ ID NO: 305773 - DNA, 12 bp, Artificial Sequence
  Oligonucleotide primer for the detection of SNP TSC0021622
acacacactcca

SEQ ID NO: 305774 - DNA, 12 bp, Artificial Sequence
  Oligonucleotide primer for the detection of SNP TSC0021622
gagtatgtgtgt

SEQ ID NO: 305775 - DNA, 12 bp, Artificial Sequence
  Oligonucleotide primer for the detection of SNP TSC0021623
aaatattaacta

SEQ ID NO: 305776 - DNA, 12 bp, Artificial Sequence
  Oligonucleotide primer for the detection of SNP TSC0021623
tatggaagatgt

SEQ ID NO: 305777 - DNA, 12 bp, Artificial Sequence
  Oligonucleotide primer for the detection of SNP TSC0021623
tacggaagatgt

SEQ ID NO: 305778 - DNA, 12 bp, Artificial Sequence
  Oligonucleotide primer for the detection of SNP TSC0021623
cacaaaaaatac

SEQ ID NO: 305779 - DNA, 12 bp, Artificial Sequence
  Oligonucleotide primer for the detection of SNP TSC0021623
cacgaaaaatac

SEQ ID NO: 305780 - DNA, 12 bp, Artificial Sequence
  Oligonucleotide primer for the detection of SNP TSC0021623
aaatgttgatta

SEQ ID NO: 305781 - DNA, 12 bp, Artificial Sequence
  Oligonukleotid-Primer
ttaccttaaatc

SEQ ID NO: 305782 - DNA, 12 bp, Artificial Sequence
  Oligonucleotide primer for the detection of SNP TSC0021624
tatgatttttgg

SEQ ID NO: 305783 - DNA, 12 bp, Artificial Sequence
  Oligonucleotide primer for the detection of SNP TSC0021624
cataatctttaa

SEQ ID NO: 305784 - DNA, 12 bp, Artificial Sequence
  Oligonucleotide primer for the detection of SNP TSC0021624
ttattttggatt

SEQ ID NO: 305785 - DNA, 12 bp, Artificial Sequence
  Oligonucleotide primer for the detection of SNP TSC0021629
ctcattttcaac

SEQ ID NO: 305786 - DNA, 12 bp, Artificial Sequence
  Oligonucleotide primer for the detection of SNP TSC0021629
ttattgaattgg

SEQ ID NO: 305787 - DNA, 12 bp, Artificial Sequence
  Oligonucleotide primer for the detection of SNP TSC0021631
atttttaataaa

SEQ ID NO: 305788 - DNA, 12 bp, Artificial Sequence
  Oligonucleotide primer for the detection of SNP TSC0021631
gtgaaattttat

SEQ ID NO: 305789 - DNA, 12 bp, Artificial Sequence
  Oligonucleotide primer for the detection of SNP TSC0021632
accctactcaaa

SEQ ID NO: 305790 - DNA, 12 bp, Artificial Sequence
  Oligonucleotide primer for the detection of SNP TSC0021632
aggttggatata

SEQ ID NO: 305791 - DNA, 12 bp, Artificial Sequence
  Oligonucleotide primer for the detection of SNP TSC0021632
aaactaaacaca

SEQ ID NO: 305792 - DNA, 12 bp, Artificial Sequence
  Oligonucleotide primer for the detection of SNP TSC0021632
ttttgtttagat

SEQ ID NO: 305793 - DNA, 12 bp, Artificial Sequence
  Oligonucleotide primer for the detection of SNP TSC0021632
ttttgtttagac

SEQ ID NO: 305794 - DNA, 12 bp, Artificial Sequence
  Oligonucleotide primer for the detection of SNP TSC0021637
aaataaaaaccc

SEQ ID NO: 305795 - DNA, 12 bp, Artificial Sequence
  Oligonucleotide primer for the detection of SNP TSC0021637
ttatgtttagtg

SEQ ID NO: 305796 - DNA, 12 bp, Artificial Sequence
  Oligonucleotide primer for the detection of SNP TSC0021637
ttatgtttagcg

SEQ ID NO: 305797 - DNA, 12 bp, Artificial Sequence
  Oligonucleotide primer for the detection of SNP TSC0021637
ccatactcaaca

SEQ ID NO: 305798 - DNA, 12 bp, Artificial Sequence
  Oligonucleotide primer for the detection of SNP TSC0021637
ccatactcaacg

SEQ ID NO: 305799 - DNA, 12 bp, Artificial Sequence
  Oligonucleotide primer for the detection of SNP TSC0021637
aggtggagattt

SEQ ID NO: 305800 - DNA, 12 bp, Artificial Sequence
  Oligonucleotide primer for the detection of SNP TSC0021638
caatacaactcc

SEQ ID NO: 305801 - DNA, 12 bp, Artificial Sequence
  Oligonucleotide primer for the detection of SNP TSC0021639
aacaatatattt

SEQ ID NO: 305802 - DNA, 12 bp, Artificial Sequence
  Oligonucleotide primer for the detection of SNP TSC0021639
ccttctattttt

SEQ ID NO: 305803 - DNA, 12 bp, Artificial Sequence
  Oligonucleotide primer for the detection of SNP TSC0021639
gatagtatattt

SEQ ID NO: 305804 - DNA, 12 bp, Artificial Sequence
  Oligonucleotide primer for the detection of SNP TSC0021640
tctacaatccct

SEQ ID NO: 305805 - DNA, 12 bp, Artificial Sequence
  Oligonucleotide primer for the detection of SNP TSC0021640
tagttttgtgag

SEQ ID NO: 305806 - DNA, 12 bp, Artificial Sequence
  Oligonucleotide primer for the detection of SNP TSC0021641
gtgtaggtggta

SEQ ID NO: 305807 - DNA, 12 bp, Artificial Sequence
  Oligonucleotide primer for the detection of SNP TSC0021642
aactttccatat

SEQ ID NO: 305808 - DNA, 12 bp, Artificial Sequence
  Oligonucleotide primer for the detection of SNP TSC0021642
ggatttggtgta

SEQ ID NO: 305809 - DNA, 12 bp, Artificial Sequence
  Oligonucleotide primer for the detection of SNP TSC0021643
aaaaaaacgacc

SEQ ID NO: 305810 - DNA, 12 bp, Artificial Sequence
  Oligonucleotide primer for the detection of SNP TSC0021645
ccaacaacaaat

SEQ ID NO: 305811 - DNA, 12 bp, Artificial Sequence
  Oligonucleotide primer for the detection of SNP TSC0021645
ccaacaacgaat

SEQ ID NO: 305812 - DNA, 12 bp, Artificial Sequence
  Oligonucleotide primer for the detection of SNP TSC0021645
agggaaagggaa

SEQ ID NO: 305813 - DNA, 12 bp, Artificial Sequence
  Oligonucleotide primer for the detection of SNP TSC0021650
aaaaaaccctta

SEQ ID NO: 305814 - DNA, 12 bp, Artificial Sequence
  Oligonucleotide primer for the detection of SNP TSC0021650
atttgatggttt

SEQ ID NO: 305815 - DNA, 12 bp, Artificial Sequence
  Oligonucleotide primer for the detection of SNP TSC0021650
aacttaataacc

SEQ ID NO: 305816 - DNA, 12 bp, Artificial Sequence
  Oligonucleotide primer for the detection of SNP TSC0021650
ggaaggattttt

SEQ ID NO: 305817 - DNA, 12 bp, Artificial Sequence
  Oligonucleotide primer for the detection of SNP TSC0021651
atcccttctatc

SEQ ID NO: 305818 - DNA, 12 bp, Artificial Sequence
  Oligonucleotide primer for the detection of SNP TSC0021651
tttagaaattta

SEQ ID NO: 305819 - DNA, 12 bp, Artificial Sequence
  Oligonucleotide primer for the detection of SNP TSC0021651
tctaaaaattta

SEQ ID NO: 305820 - DNA, 12 bp, Artificial Sequence
  Oligonucleotide primer for the detection of SNP TSC0021652
acccactacaac

SEQ ID NO: 305821 - DNA, 12 bp, Artificial Sequence
  Oligonucleotide primer for the detection of SNP TSC0021652
ggagttagttag

SEQ ID NO: 305822 - DNA, 12 bp, Artificial Sequence
  Oligonucleotide primer for the detection of SNP TSC0021654
actctatctcta

SEQ ID NO: 305823 - DNA, 12 bp, Artificial Sequence
  Oligonucleotide primer for the detection of SNP TSC0021654
ttttgtattttt

SEQ ID NO: 305824 - DNA, 12 bp, Artificial Sequence
  Oligonucleotide primer for the detection of SNP TSC0021654
ctaatttttata

SEQ ID NO: 305825 - DNA, 12 bp, Artificial Sequence
  Oligonucleotide primer for the detection of SNP TSC0021654
ttttgtttttac

SEQ ID NO: 305826 - DNA, 12 bp, Artificial Sequence
  Oligonucleotide primer for the detection of SNP TSC0021655
acaaactaattt

SEQ ID NO: 305827 - DNA, 12 bp, Artificial Sequence
  Oligonucleotide primer for the detection of SNP TSC0021655
ttaatgtaatta

SEQ ID NO: 305828 - DNA, 12 bp, Artificial Sequence
  Oligonucleotide primer for the detection of SNP TSC0021655
ttaatacaatta

SEQ ID NO: 305829 - DNA, 12 bp, Artificial Sequence
  Oligonucleotide primer for the detection of SNP TSC0021655
ataggttaattt

SEQ ID NO: 305830 - DNA, 12 bp, Artificial Sequence
  Oligonucleotide primer for the detection of SNP TSC0021656
ataattttaaca

SEQ ID NO: 305831 - DNA, 12 bp, Artificial Sequence
  Oligonucleotide primer for the detection of SNP TSC0021657
taattttaatat

SEQ ID NO: 305832 - DNA, 12 bp, Artificial Sequence
  Oligonucleotide primer for the detection of SNP TSC0021657
gtttttattaaa

SEQ ID NO: 305833 - DNA, 12 bp, Artificial Sequence
  Oligonucleotide primer for the detection of SNP TSC0021658
ttcccatcaaac

SEQ ID NO: 305834 - DNA, 12 bp, Artificial Sequence
  Oligonucleotide primer for the detection of SNP TSC0021658
gaatgttaatgg

SEQ ID NO: 305835 - DNA, 12 bp, Artificial Sequence
  Oligonucleotide primer for the detection of SNP TSC0021659
caccttccataa

SEQ ID NO: 305836 - DNA, 12 bp, Artificial Sequence
  Oligonucleotide primer for the detection of SNP TSC0021659
ggaaggaaggat

SEQ ID NO: 305837 - DNA, 12 bp, Artificial Sequence
  Oligonucleotide primer for the detection of SNP TSC0021660
ctaccccttccc

SEQ ID NO: 305838 - DNA, 12 bp, Artificial Sequence
  Oligonucleotide primer for the detection of SNP TSC0021660
ttttgttgttga

SEQ ID NO: 305839 - DNA, 12 bp, Artificial Sequence
  Oligonucleotide primer for the detection of SNP TSC0021660
tttcgttgttga

SEQ ID NO: 305840 - DNA, 12 bp, Artificial Sequence
  Oligonucleotide primer for the detection of SNP TSC0021661
ttctttttaaac

SEQ ID NO: 305841 - DNA, 12 bp, Artificial Sequence
  Oligonucleotide primer for the detection of SNP TSC0021661
aagggaagaggg

SEQ ID NO: 305842 - DNA, 12 bp, Artificial Sequence
  Oligonucleotide primer for the detection of SNP TSC0021663
cctctaaatact

SEQ ID NO: 305843 - DNA, 12 bp, Artificial Sequence
  Oligonucleotide primer for the detection of SNP TSC0021663
gattatgtagga

SEQ ID NO: 305844 - DNA, 12 bp, Artificial Sequence
  Oligonucleotide primer for the detection of SNP TSC0021664
aataccaactct

SEQ ID NO: 305845 - DNA, 12 bp, Artificial Sequence
  Oligonucleotide primer for the detection of SNP TSC0021664
tgattagggaaa

SEQ ID NO: 305846 - DNA, 12 bp, Artificial Sequence
  Oligonucleotide primer for the detection of SNP TSC0021665
ttaacaaacaat

SEQ ID NO: 305847 - DNA, 12 bp, Artificial Sequence
  Oligonucleotide primer for the detection of SNP TSC0021665
attttggtaata

SEQ ID NO: 305848 - DNA, 12 bp, Artificial Sequence
  Oligonucleotide primer for the detection of SNP TSC0021666
ttccaaccttaa

SEQ ID NO: 305849 - DNA, 12 bp, Artificial Sequence
  Oligonucleotide primer for the detection of SNP TSC0021666
agttttaaaatt

SEQ ID NO: 305850 - DNA, 12 bp, Artificial Sequence
  Oligonucleotide primer for the detection of SNP TSC0021667
attacctaaatt

SEQ ID NO: 305851 - DNA, 12 bp, Artificial Sequence
  Oligonucleotide primer for the detection of SNP TSC0021667
tatagaagggga

SEQ ID NO: 305852 - DNA, 12 bp, Artificial Sequence
  Oligonucleotide primer for the detection of SNP TSC0021670
aataactattct

SEQ ID NO: 305853 - DNA, 12 bp, Artificial Sequence
  Oligonucleotide primer for the detection of SNP TSC0021670
ttttttgtaaaa

SEQ ID NO: 305854 - DNA, 12 bp, Artificial Sequence
  Oligonucleotide primer for the detection of SNP TSC0021671
ctacttccttat

SEQ ID NO: 305855 - DNA, 12 bp, Artificial Sequence
  Oligonucleotide primer for the detection of SNP TSC0021671
ttaatagtgaaa

SEQ ID NO: 305856 - DNA, 12 bp, Artificial Sequence
  Oligonucleotide primer for the detection of SNP TSC0021674
acacactaattt

SEQ ID NO: 305857 - DNA, 12 bp, Artificial Sequence
  Oligonucleotide primer for the detection of SNP TSC0021674
acacgctaattt

SEQ ID NO: 305858 - DNA, 12 bp, Artificial Sequence
  Oligonucleotide primer for the detection of SNP TSC0021675
ggtttgaagttt

SEQ ID NO: 305859 - DNA, 12 bp, Artificial Sequence
  Oligonucleotide primer for the detection of SNP TSC0021675
aatttaaaaccc

SEQ ID NO: 305860 - DNA, 12 bp, Artificial Sequence
  Oligonucleotide primer for the detection of SNP TSC0021675
tttgatgtaaat

SEQ ID NO: 305861 - DNA, 12 bp, Artificial Sequence
  Oligonucleotide primer for the detection of SNP TSC0021675
tttgatgtaaac

SEQ ID NO: 305862 - DNA, 12 bp, Artificial Sequence
  Oligonucleotide primer for the detection of SNP TSC0021676
agagtaagattt

SEQ ID NO: 305863 - DNA, 12 bp, Artificial Sequence
  Oligonucleotide primer for the detection of SNP TSC0021676
aaaacaaaactc

SEQ ID NO: 305864 - DNA, 12 bp, Artificial Sequence
  Oligonucleotide primer for the detection of SNP TSC0021677
taatatatttca

SEQ ID NO: 305865 - DNA, 12 bp, Artificial Sequence
  Oligonucleotide primer for the detection of SNP TSC0021677
aaattataaaat

SEQ ID NO: 305866 - DNA, 12 bp, Artificial Sequence
  Oligonucleotide primer for the detection of SNP TSC0021677
aaattataaaac

SEQ ID NO: 305867 - DNA, 12 bp, Artificial Sequence
  Oligonucleotide primer for the detection of SNP TSC0021677
aaaccacaaaac

SEQ ID NO: 305868 - DNA, 12 bp, Artificial Sequence
  Oligonucleotide primer for the detection of SNP TSC0021677
tagtgtatttta

SEQ ID NO: 305869 - DNA, 12 bp, Artificial Sequence
  Oligonucleotide primer for the detection of SNP TSC0021678
gttgttaattta

SEQ ID NO: 305870 - DNA, 12 bp, Artificial Sequence
  Oligonucleotide primer for the detection of SNP TSC0021678
actatcaactca

SEQ ID NO: 305871 - DNA, 12 bp, Artificial Sequence
  Oligonucleotide primer for the detection of SNP TSC0021678
agtaaagagtat

SEQ ID NO: 305872 - DNA, 12 bp, Artificial Sequence
  Oligonucleotide primer for the detection of SNP TSC0021681
cataattacaac

SEQ ID NO: 305873 - DNA, 12 bp, Artificial Sequence
  Oligonucleotide primer for the detection of SNP TSC0021681
tttggaagtttt

SEQ ID NO: 305874 - DNA, 12 bp, Artificial Sequence
  Oligonucleotide primer for the detection of SNP TSC0021681
ttaaaaattcca

SEQ ID NO: 305875 - DNA, 12 bp, Artificial Sequence
  Oligonucleotide primer for the detection of SNP TSC0021681
tatggttgtagt

SEQ ID NO: 305876 - DNA, 12 bp, Artificial Sequence
  Oligonucleotide primer for the detection of SNP TSC0021682
ttactaaatatt

SEQ ID NO: 305877 - DNA, 12 bp, Artificial Sequence
  Oligonucleotide primer for the detection of SNP TSC0021682
ttagtgaggaag

SEQ ID NO: 305878 - DNA, 12 bp, Artificial Sequence
  Oligonucleotide primer for the detection of SNP TSC0021684
cttttctatcat

SEQ ID NO: 305879 - DNA, 12 bp, Artificial Sequence
  Oligonucleotide primer for the detection of SNP TSC0021684
attagtagaata

SEQ ID NO: 305880 - DNA, 12 bp, Artificial Sequence
  Oligonucleotide primer for the detection of SNP TSC0021684
accaacaaaaca

SEQ ID NO: 305881 - DNA, 12 bp, Artificial Sequence
  Oligonucleotide primer for the detection of SNP TSC0021685
tatctccaaaat

SEQ ID NO: 305882 - DNA, 12 bp, Artificial Sequence
  Oligonucleotide primer for the detection of SNP TSC0021685
tattagaaattt

SEQ ID NO: 305883 - DNA, 12 bp, Artificial Sequence
  Oligonucleotide primer for the detection of SNP TSC0021685
ccacattaaaaa

SEQ ID NO: 305884 - DNA, 12 bp, Artificial Sequence
  Oligonucleotide primer for the detection of SNP TSC0021685
gtttttagggtt

SEQ ID NO: 305885 - DNA, 12 bp, Artificial Sequence
  Oligonucleotide primer for the detection of SNP TSC0021686
aaatactccaaa

SEQ ID NO: 305886 - DNA, 12 bp, Artificial Sequence
  Oligonucleotide primer for the detection of SNP TSC0021686
attattttagtt

SEQ ID NO: 305887 - DNA, 12 bp, Artificial Sequence
  Oligonucleotide primer for the detection of SNP TSC0021686
ttactattccaa

SEQ ID NO: 305888 - DNA, 12 bp, Artificial Sequence
  Oligonucleotide primer for the detection of SNP TSC0021686
agatattttaag

SEQ ID NO: 305889 - DNA, 12 bp, Artificial Sequence
  Oligonucleotide primer for the detection of SNP TSC0021688
ccaacccaaaat

SEQ ID NO: 305890 - DNA, 12 bp, Artificial Sequence
  Oligonucleotide primer for the detection of SNP TSC0021689
gttattttttgt

SEQ ID NO: 305891 - DNA, 12 bp, Artificial Sequence
  Oligonucleotide primer for the detection of SNP TSC0021689
gttatttttcgt

SEQ ID NO: 305892 - DNA, 12 bp, Artificial Sequence
  Oligonucleotide primer for the detection of SNP TSC0021689
accacccctcac

SEQ ID NO: 305893 - DNA, 12 bp, Artificial Sequence
  Oligonucleotide primer for the detection of SNP TSC0021689
accacccctcgc

SEQ ID NO: 305894 - DNA, 12 bp, Artificial Sequence
  Oligonucleotide primer for the detection of SNP TSC0021689
aggtaatggggt

SEQ ID NO: 305895 - DNA, 12 bp, Artificial Sequence
  Oligonucleotide primer for the detection of SNP TSC0021689
aggtaatggggc

SEQ ID NO: 305896 - DNA, 12 bp, Artificial Sequence
  Oligonucleotide primer for the detection of SNP TSC0021690
aaaatcaaaatt

SEQ ID NO: 305897 - DNA, 12 bp, Artificial Sequence
  Oligonucleotide primer for the detection of SNP TSC0021690
gaaatcaaaatt

SEQ ID NO: 305898 - DNA, 12 bp, Artificial Sequence
  Oligonukleotid-Primer
agtagtgtgttt

SEQ ID NO: 305899 - DNA, 12 bp, Artificial Sequence
  Oligonucleotide primer for the detection of SNP TSC0021690
agtagcgtgttt

SEQ ID NO: 305900 - DNA, 12 bp, Artificial Sequence
  Oligonucleotide primer for the detection of SNP TSC0021690
acaacatattta

SEQ ID NO: 305901 - DNA, 12 bp, Artificial Sequence
  Oligonucleotide primer for the detection of SNP TSC0021690
acaacgtattta

SEQ ID NO: 305902 - DNA, 12 bp, Artificial Sequence
  Oligonucleotide primer for the detection of SNP TSC0021690
gggttagagttt

SEQ ID NO: 305903 - DNA, 12 bp, Artificial Sequence
  Oligonucleotide primer for the detection of SNP TSC0021691
aatacaacaaat

SEQ ID NO: 305904 - DNA, 12 bp, Artificial Sequence
  Oligonucleotide primer for the detection of SNP TSC0021692
acctttatttat

SEQ ID NO: 305905 - DNA, 12 bp, Artificial Sequence
  Oligonucleotide primer for the detection of SNP TSC0021692
aggggagtagta

SEQ ID NO: 305906 - DNA, 12 bp, Artificial Sequence
  Oligonucleotide primer for the detection of SNP TSC0021694
acaaccaattat

SEQ ID NO: 305907 - DNA, 12 bp, Artificial Sequence
  Oligonucleotide primer for the detection of SNP TSC0021694
ttttttaggaga

SEQ ID NO: 305908 - DNA, 12 bp, Artificial Sequence
  Oligonucleotide primer for the detection of SNP TSC0021696
aaatttttttaa

SEQ ID NO: 305909 - DNA, 12 bp, Artificial Sequence
  Oligonucleotide primer for the detection of SNP TSC0021696
taaaatttttaa

SEQ ID NO: 305910 - DNA, 12 bp, Artificial Sequence
  Oligonucleotide primer for the detection of SNP TSC0021696
taaaatctccaa

SEQ ID NO: 305911 - DNA, 12 bp, Artificial Sequence
  Oligonucleotide primer for the detection of SNP TSC0021696
ttaggttttttt

SEQ ID NO: 305912 - DNA, 12 bp, Artificial Sequence
  Oligonucleotide primer for the detection of SNP TSC0021697
cctccaaattct

SEQ ID NO: 305913 - DNA, 12 bp, Artificial Sequence
  Oligonucleotide primer for the detection of SNP TSC0021697
aggattttagta

SEQ ID NO: 305914 - DNA, 12 bp, Artificial Sequence
  Oligonucleotide primer for the detection of SNP TSC0021699
taaataaacttc

SEQ ID NO: 305915 - DNA, 12 bp, Artificial Sequence
  Oligonucleotide primer for the detection of SNP TSC0021699
atggaggagggg

SEQ ID NO: 305916 - DNA, 12 bp, Artificial Sequence
  Oligonucleotide primer for the detection of SNP TSC0021699
taaataaatttc

SEQ ID NO: 305917 - DNA, 12 bp, Artificial Sequence
  Oligonucleotide primer for the detection of SNP TSC0021700
aacatataacca

SEQ ID NO: 305918 - DNA, 12 bp, Artificial Sequence
  Oligonucleotide primer for the detection of SNP TSC0021700
aataatatatat

SEQ ID NO: 305919 - DNA, 12 bp, Artificial Sequence
  Oligonucleotide primer for the detection of SNP TSC0021700
aacaatatatac

SEQ ID NO: 305920 - DNA, 12 bp, Artificial Sequence
  Oligonucleotide primer for the detection of SNP TSC0021700
aaatatatagtt

SEQ ID NO: 305921 - DNA, 12 bp, Artificial Sequence
  Oligonucleotide primer for the detection of SNP TSC0021701
ggtgtatgttat

SEQ ID NO: 305922 - DNA, 12 bp, Artificial Sequence
  Oligonucleotide primer for the detection of SNP TSC0021701
ggcgtatgttat

SEQ ID NO: 305923 - DNA, 12 bp, Artificial Sequence
  Oligonucleotide primer for the detection of SNP TSC0021701
ggtgtacgttat

SEQ ID NO: 305924 - DNA, 12 bp, Artificial Sequence
  Oligonucleotide primer for the detection of SNP TSC0021701
ggcgtacgttat

SEQ ID NO: 305925 - DNA, 12 bp, Artificial Sequence
  Oligonucleotide primer for the detection of SNP TSC0021701
ggtgtatgttac

SEQ ID NO: 305926 - DNA, 12 bp, Artificial Sequence
  Oligonucleotide primer for the detection of SNP TSC0021701
ggcgtatgttac

SEQ ID NO: 305927 - DNA, 12 bp, Artificial Sequence
  Oligonucleotide primer for the detection of SNP TSC0021701
ggtgtacgttac

SEQ ID NO: 305928 - DNA, 12 bp, Artificial Sequence
  Oligonucleotide primer for the detection of SNP TSC0021701
ggcgtacgttac

SEQ ID NO: 305929 - DNA, 12 bp, Artificial Sequence
  Oligonucleotide primer for the detection of SNP TSC0021701
aacacacaccac

SEQ ID NO: 305930 - DNA, 12 bp, Artificial Sequence
  Oligonucleotide primer for the detection of SNP TSC0021701
aacacacgccac

SEQ ID NO: 305931 - DNA, 12 bp, Artificial Sequence
  Oligonucleotide primer for the detection of SNP TSC0021701
aacgcacaccac

SEQ ID NO: 305932 - DNA, 12 bp, Artificial Sequence
  Oligonucleotide primer for the detection of SNP TSC0021701
aacgcacgccac

SEQ ID NO: 305933 - DNA, 12 bp, Artificial Sequence
  Oligonucleotide primer for the detection of SNP TSC0021701
ttagttaggtat

SEQ ID NO: 305934 - DNA, 12 bp, Artificial Sequence
  Oligonucleotide primer for the detection of SNP TSC0021702
tattttgagagg

SEQ ID NO: 305935 - DNA, 12 bp, Artificial Sequence
  Oligonucleotide primer for the detection of SNP TSC0021703
tacactaatact

SEQ ID NO: 305936 - DNA, 12 bp, Artificial Sequence
  Oligonucleotide primer for the detection of SNP TSC0021703
gattagattata

SEQ ID NO: 305937 - DNA, 12 bp, Artificial Sequence
  Oligonucleotide primer for the detection of SNP TSC0021703
aactaaactaca

SEQ ID NO: 305938 - DNA, 12 bp, Artificial Sequence
  Oligonucleotide primer for the detection of SNP TSC0021703
tgtattgatatt

SEQ ID NO: 305939 - DNA, 12 bp, Artificial Sequence
  Oligonucleotide primer for the detection of SNP TSC0021704
atctctatccca

SEQ ID NO: 305940 - DNA, 12 bp, Artificial Sequence
  Oligonucleotide primer for the detection of SNP TSC0021704
ttttggggatat

SEQ ID NO: 305941 - DNA, 12 bp, Artificial Sequence
  Oligonucleotide primer for the detection of SNP TSC0021704
tttcggggatat

SEQ ID NO: 305942 - DNA, 12 bp, Artificial Sequence
  Oligonucleotide primer for the detection of SNP TSC0021704
cctcaaaaacat

SEQ ID NO: 305943 - DNA, 12 bp, Artificial Sequence
  Oligonucleotide primer for the detection of SNP TSC0021704
cctcgaaaacat

SEQ ID NO: 305944 - DNA, 12 bp, Artificial Sequence
  Oligonucleotide primer for the detection of SNP TSC0021706
tccctatcaaac

SEQ ID NO: 305945 - DNA, 12 bp, Artificial Sequence
  Oligonucleotide primer for the detection of SNP TSC0021706
gataggaattaa

SEQ ID NO: 305946 - DNA, 12 bp, Artificial Sequence
  Oligonucleotide primer for the detection of SNP TSC0021710
cccactccccat

SEQ ID NO: 305947 - DNA, 12 bp, Artificial Sequence
  Oligonucleotide primer for the detection of SNP TSC0021710
ttgtggttttta

SEQ ID NO: 305948 - DNA, 12 bp, Artificial Sequence
  Oligonucleotide primer for the detection of SNP TSC0021716
ctccctttcccc

SEQ ID NO: 305949 - DNA, 12 bp, Artificial Sequence
  Oligonucleotide primer for the detection of SNP TSC0021716
gtgttattgttg

SEQ ID NO: 305950 - DNA, 12 bp, Artificial Sequence
  Oligonucleotide primer for the detection of SNP TSC0021717
gaaatattgttt

SEQ ID NO: 305951 - DNA, 12 bp, Artificial Sequence
  Oligonucleotide primer for the detection of SNP TSC0021717
cattatccaaaa

SEQ ID NO: 305952 - DNA, 12 bp, Artificial Sequence
  Oligonucleotide primer for the detection of SNP TSC0021717
agggtagtatat

SEQ ID NO: 305953 - DNA, 12 bp, Artificial Sequence
  Oligonucleotide primer for the detection of SNP TSC0021718
ttaaaacatttt

SEQ ID NO: 305954 - DNA, 12 bp, Artificial Sequence
  Oligonucleotide primer for the detection of SNP TSC0021718
tgtgttattttt

SEQ ID NO: 305955 - DNA, 12 bp, Artificial Sequence
  Oligonucleotide primer for the detection of SNP TSC0021718
tatactaccctt

SEQ ID NO: 305956 - DNA, 12 bp, Artificial Sequence
  Oligonucleotide primer for the detection of SNP TSC0021718
ttgggatatttt

SEQ ID NO: 305957 - DNA, 12 bp, Artificial Sequence
  Oligonucleotide primer for the detection of SNP TSC0021719
tttttactcttc

SEQ ID NO: 305958 - DNA, 12 bp, Artificial Sequence
  Oligonucleotide primer for the detection of SNP TSC0021719
gagagaaaatag

SEQ ID NO: 305959 - DNA, 12 bp, Artificial Sequence
  Oligonucleotide primer for the detection of SNP TSC0021720
tacaaaaaacac

SEQ ID NO: 305960 - DNA, 12 bp, Artificial Sequence
  Oligonucleotide primer for the detection of SNP TSC0021720
tacgaaaaacac

SEQ ID NO: 305961 - DNA, 12 bp, Artificial Sequence
  Oligonucleotide primer for the detection of SNP TSC0021720
attttagatagg

SEQ ID NO: 305962 - DNA, 12 bp, Artificial Sequence
  Oligonucleotide primer for the detection of SNP TSC0021720
accccaaacaaa

SEQ ID NO: 305963 - DNA, 12 bp, Artificial Sequence
  Oligonucleotide primer for the detection of SNP TSC0021720
tgtggggagtat

SEQ ID NO: 305964 - DNA, 12 bp, Artificial Sequence
  Oligonucleotide primer for the detection of SNP TSC0021720
tgcggggagtat

SEQ ID NO: 305965 - DNA, 12 bp, Artificial Sequence
  Oligonucleotide primer for the detection of SNP TSC0021721
accacccccacc

SEQ ID NO: 305966 - DNA, 12 bp, Artificial Sequence
  Oligonucleotide primer for the detection of SNP TSC0021721
gggatattatta

SEQ ID NO: 305967 - DNA, 12 bp, Artificial Sequence
  Oligonucleotide primer for the detection of SNP TSC0021721
aaaacatcatca

SEQ ID NO: 305968 - DNA, 12 bp, Artificial Sequence
  Oligonucleotide primer for the detection of SNP TSC0021722
ttaggtgtttat

SEQ ID NO: 305969 - DNA, 12 bp, Artificial Sequence
  Oligonucleotide primer for the detection of SNP TSC0021722
actaaataccca

SEQ ID NO: 305970 - DNA, 12 bp, Artificial Sequence
  Oligonucleotide primer for the detection of SNP TSC0021722
aaaatgtaaggt

SEQ ID NO: 305971 - DNA, 12 bp, Artificial Sequence
  Oligonucleotide primer for the detection of SNP TSC0021724
aatataataact

SEQ ID NO: 305972 - DNA, 12 bp, Artificial Sequence
  Oligonucleotide primer for the detection of SNP TSC0021724
tgtttttttaaa

SEQ ID NO: 305973 - DNA, 12 bp, Artificial Sequence
  Oligonucleotide primer for the detection of SNP TSC0021725
tcctataaattc

SEQ ID NO: 305974 - DNA, 12 bp, Artificial Sequence
  Oligonucleotide primer for the detection of SNP TSC0021725
tagtatgtatag

SEQ ID NO: 305975 - DNA, 12 bp, Artificial Sequence
  Oligonucleotide primer for the detection of SNP TSC0021725
taacatacacaa

SEQ ID NO: 305976 - DNA, 12 bp, Artificial Sequence
  Oligonucleotide primer for the detection of SNP TSC0021725
ttttatgagttt

SEQ ID NO: 305977 - DNA, 12 bp, Artificial Sequence
  Oligonucleotide primer for the detection of SNP TSC0021728
caaacattttat

SEQ ID NO: 305978 - DNA, 12 bp, Artificial Sequence
  Oligonucleotide primer for the detection of SNP TSC0021728
agtttttttagt

SEQ ID NO: 305979 - DNA, 12 bp, Artificial Sequence
  Oligonukleotid-Primer
caatttctccaa

SEQ ID NO: 305980 - DNA, 12 bp, Artificial Sequence
  Oligonucleotide primer for the detection of SNP TSC0021729
tttttttgtggg

SEQ ID NO: 305981 - DNA, 12 bp, Artificial Sequence
  Oligonucleotide primer for the detection of SNP TSC0021729
tctccttataaa

SEQ ID NO: 305982 - DNA, 12 bp, Artificial Sequence
  Oligonucleotide primer for the detection of SNP TSC0021729
ggtttttagagt

SEQ ID NO: 305983 - DNA, 12 bp, Artificial Sequence
  Oligonukleotid-Primer
atgttgatttgg

SEQ ID NO: 305984 - DNA, 12 bp, Artificial Sequence
  Oligonucleotide primer for the detection of SNP TSC0021731
tacatccataca

SEQ ID NO: 305985 - DNA, 12 bp, Artificial Sequence
  Oligonucleotide primer for the detection of SNP TSC0021731
tacatccgtaca

SEQ ID NO: 305986 - DNA, 12 bp, Artificial Sequence
  Oligonucleotide primer for the detection of SNP TSC0021731
ttaatagttatt

SEQ ID NO: 305987 - DNA, 12 bp, Artificial Sequence
  Oligonucleotide primer for the detection of SNP TSC0021731
ccaacaaccacc

SEQ ID NO: 305988 - DNA, 12 bp, Artificial Sequence
  Oligonucleotide primer for the detection of SNP TSC0021731
tgtatttgtgta

SEQ ID NO: 305989 - DNA, 12 bp, Artificial Sequence
  Oligonucleotide primer for the detection of SNP TSC0021731
tgtattcgtgta

SEQ ID NO: 305990 - DNA, 12 bp, Artificial Sequence
  Oligonucleotide primer for the detection of SNP TSC0021734
ctaacaatatta

SEQ ID NO: 305991 - DNA, 12 bp, Artificial Sequence
  Oligonucleotide primer for the detection of SNP TSC0021734
ttttagtttgta

SEQ ID NO: 305992 - DNA, 12 bp, Artificial Sequence
  Oligonucleotide primer for the detection of SNP TSC0021734
tttcaatttaca

SEQ ID NO: 305993 - DNA, 12 bp, Artificial Sequence
  Oligonucleotide primer for the detection of SNP TSC0021734
ttagtaatatta

SEQ ID NO: 305994 - DNA, 12 bp, Artificial Sequence
  Oligonucleotide primer for the detection of SNP TSC0021736
tttaatcaaaaa

SEQ ID NO: 305995 - DNA, 12 bp, Artificial Sequence
  Oligonucleotide primer for the detection of SNP TSC0021736
aattggagaggt

SEQ ID NO: 305996 - DNA, 12 bp, Artificial Sequence
  Oligonucleotide primer for the detection of SNP TSC0021736
tttggttaaaga

SEQ ID NO: 305997 - DNA, 12 bp, Artificial Sequence
  Oligonucleotide primer for the detection of SNP TSC0021749
ataaaaactact

SEQ ID NO: 305998 - DNA, 12 bp, Artificial Sequence
  Oligonucleotide primer for the detection of SNP TSC0021757
aattcatatcct

SEQ ID NO: 305999 - DNA, 12 bp, Artificial Sequence
  Oligonucleotide primer for the detection of SNP TSC0021757
gatattgtagtg

SEQ ID NO: 306000 - DNA, 12 bp, Artificial Sequence
  Oligonucleotide primer for the detection of SNP TSC0021758
actaatatcact

SEQ ID NO: 306001 - DNA, 12 bp, Artificial Sequence
  Oligonucleotide primer for the detection of SNP TSC0021758
tttgggattttt

SEQ ID NO: 306002 - DNA, 12 bp, Artificial Sequence
  Oligonucleotide primer for the detection of SNP TSC0021758
ttcgggattttt

SEQ ID NO: 306003 - DNA, 12 bp, Artificial Sequence
  Oligonucleotide primer for the detection of SNP TSC0021759
tagattttaaaa

SEQ ID NO: 306004 - DNA, 12 bp, Artificial Sequence
  Oligonucleotide primer for the detection of SNP TSC0021759
caaaccccaaaa

SEQ ID NO: 306005 - DNA, 12 bp, Artificial Sequence
  Oligonucleotide primer for the detection of SNP TSC0021759
tatttttaggat

SEQ ID NO: 306006 - DNA, 12 bp, Artificial Sequence
  Oligonucleotide primer for the detection of SNP TSC0021760
agaaggagtttt

SEQ ID NO: 306007 - DNA, 12 bp, Artificial Sequence
  Oligonucleotide primer for the detection of SNP TSC0021760
attaggagggaa

SEQ ID NO: 306008 - DNA, 12 bp, Artificial Sequence
  Oligonucleotide primer for the detection of SNP TSC0021763
tctataataatt

SEQ ID NO: 306009 - DNA, 12 bp, Artificial Sequence
  Oligonucleotide primer for the detection of SNP TSC0021763
gtttataaattt

SEQ ID NO: 306010 - DNA, 12 bp, Artificial Sequence
  Oligonucleotide primer for the detection of SNP TSC0021764
gttgagatgatt

SEQ ID NO: 306011 - DNA, 12 bp, Artificial Sequence
  Oligonucleotide primer for the detection of SNP TSC0021764
attaaatgtaaa

SEQ ID NO: 306012 - DNA, 12 bp, Artificial Sequence
  Oligonucleotide primer for the detection of SNP TSC0021766
tgaagaagatat

SEQ ID NO: 306013 - DNA, 12 bp, Artificial Sequence
  Oligonucleotide primer for the detection of SNP TSC0021767
atatatatattc

SEQ ID NO: 306014 - DNA, 12 bp, Artificial Sequence
  Oligonucleotide primer for the detection of SNP TSC0021767
gggtttagtttt

SEQ ID NO: 306015 - DNA, 12 bp, Artificial Sequence
  Oligonucleotide primer for the detection of SNP TSC0021767
aaacccaacctc

SEQ ID NO: 306016 - DNA, 12 bp, Artificial Sequence
  Oligonucleotide primer for the detection of SNP TSC0021767
atgtgtgtgttt

SEQ ID NO: 306017 - DNA, 12 bp, Artificial Sequence
  Oligonucleotide primer for the detection of SNP TSC0021768
caaaataatcct

SEQ ID NO: 306018 - DNA, 12 bp, Artificial Sequence
  Oligonucleotide primer for the detection of SNP TSC0021768
cgaaataatcct

SEQ ID NO: 306019 - DNA, 12 bp, Artificial Sequence
  Oligonucleotide primer for the detection of SNP TSC0021768
tttagaggttta

SEQ ID NO: 306020 - DNA, 12 bp, Artificial Sequence
  Oligonucleotide primer for the detection of SNP TSC0021769
tttttttatggt

SEQ ID NO: 306021 - DNA, 12 bp, Artificial Sequence
  Oligonucleotide primer for the detection of SNP TSC0021769
tttttttacggt

SEQ ID NO: 306022 - DNA, 12 bp, Artificial Sequence
  Oligonucleotide primer for the detection of SNP TSC0021769
tctttctacaat

SEQ ID NO: 306023 - DNA, 12 bp, Artificial Sequence
  Oligonucleotide primer for the detection of SNP TSC0021769
tctttctacgat

SEQ ID NO: 306024 - DNA, 12 bp, Artificial Sequence
  Oligonucleotide primer for the detection of SNP TSC0021769
tatattagaaaa

SEQ ID NO: 306025 - DNA, 12 bp, Artificial Sequence
  Oligonucleotide primer for the detection of SNP TSC0021770
tttaagtatgta

SEQ ID NO: 306026 - DNA, 12 bp, Artificial Sequence
  Oligonucleotide primer for the detection of SNP TSC0021773
aaaattatatct

SEQ ID NO: 306027 - DNA, 12 bp, Artificial Sequence
  Oligonucleotide primer for the detection of SNP TSC0021773
gaggatgaaaaa

SEQ ID NO: 306028 - DNA, 12 bp, Artificial Sequence
  Oligonucleotide primer for the detection of SNP TSC0021774
aaaatttttgat

SEQ ID NO: 306029 - DNA, 12 bp, Artificial Sequence
  Oligonucleotide primer for the detection of SNP TSC0021774
aaaattcttaac

SEQ ID NO: 306030 - DNA, 12 bp, Artificial Sequence
  Oligonucleotide primer for the detection of SNP TSC0021774
ataagtgaaata

SEQ ID NO: 306031 - DNA, 12 bp, Artificial Sequence
  Oligonucleotide primer for the detection of SNP TSC0021775
ggttgtttggtg

SEQ ID NO: 306032 - DNA, 12 bp, Artificial Sequence
  Oligonucleotide primer for the detection of SNP TSC0021775
ggtcgtttggtg

SEQ ID NO: 306033 - DNA, 12 bp, Artificial Sequence
  Oligonucleotide primer for the detection of SNP TSC0021775
ggttgttcggtg

SEQ ID NO: 306034 - DNA, 12 bp, Artificial Sequence
  Oligonucleotide primer for the detection of SNP TSC0021775
ggtcgttcggtg

SEQ ID NO: 306035 - DNA, 12 bp, Artificial Sequence
  Oligonucleotide primer for the detection of SNP TSC0021775
aaccacccaata

SEQ ID NO: 306036 - DNA, 12 bp, Artificial Sequence
  Oligonucleotide primer for the detection of SNP TSC0021775
aaccacccgata

SEQ ID NO: 306037 - DNA, 12 bp, Artificial Sequence
  Oligonucleotide primer for the detection of SNP TSC0021775
aaccgcccaata

SEQ ID NO: 306038 - DNA, 12 bp, Artificial Sequence
  Oligonucleotide primer for the detection of SNP TSC0021775
aaccgcccgata

SEQ ID NO: 306039 - DNA, 12 bp, Artificial Sequence
  Oligonucleotide primer for the detection of SNP TSC0021777
aaaaaaccataa

SEQ ID NO: 306040 - DNA, 12 bp, Artificial Sequence
  Oligonucleotide primer for the detection of SNP TSC0021777
gttagttattaa

SEQ ID NO: 306041 - DNA, 12 bp, Artificial Sequence
  Oligonucleotide primer for the detection of SNP TSC0021777
atcaattatcaa

SEQ ID NO: 306042 - DNA, 12 bp, Artificial Sequence
  Oligonucleotide primer for the detection of SNP TSC0021777
gaggattatgat

SEQ ID NO: 306043 - DNA, 12 bp, Artificial Sequence
  Oligonucleotide primer for the detection of SNP TSC0021778
aaaaccacattc

SEQ ID NO: 306044 - DNA, 12 bp, Artificial Sequence
  Oligonucleotide primer for the detection of SNP TSC0021778
aaaaccgcattc

SEQ ID NO: 306045 - DNA, 12 bp, Artificial Sequence
  Oligonucleotide primer for the detection of SNP TSC0021778
tatatttgttga

SEQ ID NO: 306046 - DNA, 12 bp, Artificial Sequence
  Oligonucleotide primer for the detection of SNP TSC0021784
cacttcaaactc

SEQ ID NO: 306047 - DNA, 12 bp, Artificial Sequence
  Oligonucleotide primer for the detection of SNP TSC0021784
cacttcgaactc

SEQ ID NO: 306048 - DNA, 12 bp, Artificial Sequence
  Oligonucleotide primer for the detection of SNP TSC0021784
attgtaggaggg

SEQ ID NO: 306049 - DNA, 12 bp, Artificial Sequence
  Oligonucleotide primer for the detection of SNP TSC0021784
atcgtaggaggg

SEQ ID NO: 306050 - DNA, 12 bp, Artificial Sequence
  Oligonucleotide primer for the detection of SNP TSC0021789
ccacaccccccc

SEQ ID NO: 306051 - DNA, 12 bp, Artificial Sequence
  Oligonucleotide primer for the detection of SNP TSC0021789
ccacgccccccc

SEQ ID NO: 306052 - DNA, 12 bp, Artificial Sequence
  Oligonucleotide primer for the detection of SNP TSC0021789
ttatgttttttt

SEQ ID NO: 306053 - DNA, 12 bp, Artificial Sequence
  Oligonucleotide primer for the detection of SNP TSC0021789
ttacgttttttt

SEQ ID NO: 306054 - DNA, 12 bp, Artificial Sequence
  Oligonucleotide primer for the detection of SNP TSC0021790
aattttcatttt

SEQ ID NO: 306055 - DNA, 12 bp, Artificial Sequence
  Oligonucleotide primer for the detection of SNP TSC0021791
ttatttttcatt

SEQ ID NO: 306056 - DNA, 12 bp, Artificial Sequence
  Oligonucleotide primer for the detection of SNP TSC0021791
aggttggaagaa

SEQ ID NO: 306057 - DNA, 12 bp, Artificial Sequence
  Oligonucleotide primer for the detection of SNP TSC0021794
ctaaaactacat

SEQ ID NO: 306058 - DNA, 12 bp, Artificial Sequence
  Oligonucleotide primer for the detection of SNP TSC0021794
ctaaaactacgt

SEQ ID NO: 306059 - DNA, 12 bp, Artificial Sequence
  Oligonucleotide primer for the detection of SNP TSC0021794
tttgtggagtta

SEQ ID NO: 306060 - DNA, 12 bp, Artificial Sequence
  Oligonucleotide primer for the detection of SNP TSC0021794
tctataaaatta

SEQ ID NO: 306061 - DNA, 12 bp, Artificial Sequence
  Oligonucleotide primer for the detection of SNP TSC0021794
ttggggttgtgt

SEQ ID NO: 306062 - DNA, 12 bp, Artificial Sequence
  Oligonucleotide primer for the detection of SNP TSC0021794
ttggggttgcgt

SEQ ID NO: 306063 - DNA, 12 bp, Artificial Sequence
  Oligonucleotide primer for the detection of SNP TSC0021795
ataaattttatt

SEQ ID NO: 306064 - DNA, 12 bp, Artificial Sequence
  Oligonucleotide primer for the detection of SNP TSC0021795
ataaatttcatt

SEQ ID NO: 306065 - DNA, 12 bp, Artificial Sequence
  Oligonucleotide primer for the detection of SNP TSC0021795
gaaatttagtgt

SEQ ID NO: 306066 - DNA, 12 bp, Artificial Sequence
  Oligonucleotide primer for the detection of SNP TSC0021796
cattataatttc

SEQ ID NO: 306067 - DNA, 12 bp, Artificial Sequence
  Oligonucleotide primer for the detection of SNP TSC0021796
cgttataatttc

SEQ ID NO: 306068 - DNA, 12 bp, Artificial Sequence
  Oligonucleotide primer for the detection of SNP TSC0021796
gatggtatggaa

SEQ ID NO: 306069 - DNA, 12 bp, Artificial Sequence
  Oligonucleotide primer for the detection of SNP TSC0021796
aataatataaaa

SEQ ID NO: 306070 - DNA, 12 bp, Artificial Sequence
  Oligonucleotide primer for the detection of SNP TSC0021796
tgttgtgatttt

SEQ ID NO: 306071 - DNA, 12 bp, Artificial Sequence
  Oligonucleotide primer for the detection of SNP TSC0021796
cgttgtgatttt

SEQ ID NO: 306072 - DNA, 12 bp, Artificial Sequence
  Oligonucleotide primer for the detection of SNP TSC0021797
tcaactacaaaa

SEQ ID NO: 306073 - DNA, 12 bp, Artificial Sequence
  Oligonucleotide primer for the detection of SNP TSC0021797
aggggttgattt

SEQ ID NO: 306074 - DNA, 12 bp, Artificial Sequence
  Oligonucleotide primer for the detection of SNP TSC0021797
caaaaactaacc

SEQ ID NO: 306075 - DNA, 12 bp, Artificial Sequence
  Oligonucleotide primer for the detection of SNP TSC0021797
taattataaagt

SEQ ID NO: 306076 - DNA, 12 bp, Artificial Sequence
  Oligonucleotide primer for the detection of SNP TSC0021798
cccacactctac

SEQ ID NO: 306077 - DNA, 12 bp, Artificial Sequence
  Oligonucleotide primer for the detection of SNP TSC0021798
cccacgctctac

SEQ ID NO: 306078 - DNA, 12 bp, Artificial Sequence
  Oligonucleotide primer for the detection of SNP TSC0021798
cccgcactctac

SEQ ID NO: 306079 - DNA, 12 bp, Artificial Sequence
  Oligonucleotide primer for the detection of SNP TSC0021798
cccgcgctctac

SEQ ID NO: 306080 - DNA, 12 bp, Artificial Sequence
  Oligonucleotide primer for the detection of SNP TSC0021798
gggagtgtttgg

SEQ ID NO: 306081 - DNA, 12 bp, Artificial Sequence
  Oligonucleotide primer for the detection of SNP TSC0021798
gggagcgtttgg

SEQ ID NO: 306082 - DNA, 12 bp, Artificial Sequence
  Oligonucleotide primer for the detection of SNP TSC0021798
aaaaacgcttaa

SEQ ID NO: 306083 - DNA, 12 bp, Artificial Sequence
  Oligonucleotide primer for the detection of SNP TSC0021798
tttgtgttttgt

SEQ ID NO: 306084 - DNA, 12 bp, Artificial Sequence
  Oligonucleotide primer for the detection of SNP TSC0021798
ttcgtgttttgt

SEQ ID NO: 306085 - DNA, 12 bp, Artificial Sequence
  Oligonucleotide primer for the detection of SNP TSC0021798
tttgcgttttgt

SEQ ID NO: 306086 - DNA, 12 bp, Artificial Sequence
  Oligonucleotide primer for the detection of SNP TSC0021798
ttcgcgttttgt

SEQ ID NO: 306087 - DNA, 12 bp, Artificial Sequence
  Oligonucleotide primer for the detection of SNP TSC0021799
tagttatttggg

SEQ ID NO: 306088 - DNA, 12 bp, Artificial Sequence
  Oligonucleotide primer for the detection of SNP TSC0021799
aactacttaaaa

SEQ ID NO: 306089 - DNA, 12 bp, Artificial Sequence
  Oligonucleotide primer for the detection of SNP TSC0021800
tatttttttatg

SEQ ID NO: 306090 - DNA, 12 bp, Artificial Sequence
  Oligonucleotide primer for the detection of SNP TSC0021800
tacctcctcata

SEQ ID NO: 306091 - DNA, 12 bp, Artificial Sequence
  Oligonucleotide primer for the detection of SNP TSC0021803
atcaacacaatt

SEQ ID NO: 306092 - DNA, 12 bp, Artificial Sequence
  Oligonucleotide primer for the detection of SNP TSC0021803
atcaacgcaatt

SEQ ID NO: 306093 - DNA, 12 bp, Artificial Sequence
  Oligonucleotide primer for the detection of SNP TSC0021803
ttataggtgtta

SEQ ID NO: 306094 - DNA, 12 bp, Artificial Sequence
  Oligonucleotide primer for the detection of SNP TSC0021804
acaatcttaaca

SEQ ID NO: 306095 - DNA, 12 bp, Artificial Sequence
  Oligonucleotide primer for the detection of SNP TSC0021804
acgatcttaaca

SEQ ID NO: 306096 - DNA, 12 bp, Artificial Sequence
  Oligonucleotide primer for the detection of SNP TSC0021804
taaattaaatgt

SEQ ID NO: 306097 - DNA, 12 bp, Artificial Sequence
  Oligonucleotide primer for the detection of SNP TSC0021804
caaaccaaatac

SEQ ID NO: 306098 - DNA, 12 bp, Artificial Sequence
  Oligonucleotide primer for the detection of SNP TSC0021804
atgattttggta

SEQ ID NO: 306099 - DNA, 12 bp, Artificial Sequence
  Oligonucleotide primer for the detection of SNP TSC0021804
acgattttggta

SEQ ID NO: 306100 - DNA, 12 bp, Artificial Sequence
  Oligonucleotide primer for the detection of SNP TSC0021805
ttcctattcttc

SEQ ID NO: 306101 - DNA, 12 bp, Artificial Sequence
  Oligonucleotide primer for the detection of SNP TSC0021805
gggggattatat

SEQ ID NO: 306102 - DNA, 12 bp, Artificial Sequence
  Oligonucleotide primer for the detection of SNP TSC0021805
gggggattatac

SEQ ID NO: 306103 - DNA, 12 bp, Artificial Sequence
  Oligonucleotide primer for the detection of SNP TSC0021805
taaaaaatcaca

SEQ ID NO: 306104 - DNA, 12 bp, Artificial Sequence
  Oligonucleotide primer for the detection of SNP TSC0021806
ctaattttaaac

SEQ ID NO: 306105 - DNA, 12 bp, Artificial Sequence
  Oligonucleotide primer for the detection of SNP TSC0021806
ttaaagaatttt

SEQ ID NO: 306106 - DNA, 12 bp, Artificial Sequence
  Oligonucleotide primer for the detection of SNP TSC0021806
atcaaaaaattc

SEQ ID NO: 306107 - DNA, 12 bp, Artificial Sequence
  Oligonucleotide primer for the detection of SNP TSC0021806
ttgattttagat

SEQ ID NO: 306108 - DNA, 12 bp, Artificial Sequence
  Oligonucleotide primer for the detection of SNP TSC0021806
ttgattttagac

SEQ ID NO: 306109 - DNA, 12 bp, Artificial Sequence
  Oligonucleotide primer for the detection of SNP TSC0021809
taccctatacca

SEQ ID NO: 306110 - DNA, 12 bp, Artificial Sequence
  Oligonucleotide primer for the detection of SNP TSC0021809
tttatagagttt

SEQ ID NO: 306111 - DNA, 12 bp, Artificial Sequence
  Oligonucleotide primer for the detection of SNP TSC0021809
tctacaaaatcc

SEQ ID NO: 306112 - DNA, 12 bp, Artificial Sequence
  Oligonucleotide primer for the detection of SNP TSC0021809
tgttttgtgtta

SEQ ID NO: 306113 - DNA, 12 bp, Artificial Sequence
  Oligonucleotide primer for the detection of SNP TSC0021810
actaactcttat

SEQ ID NO: 306114 - DNA, 12 bp, Artificial Sequence
  Oligonucleotide primer for the detection of SNP TSC0021810
ttggttattata

SEQ ID NO: 306115 - DNA, 12 bp, Artificial Sequence
  Oligonucleotide primer for the detection of SNP TSC0021811
acaatacccctc

SEQ ID NO: 306116 - DNA, 12 bp, Artificial Sequence
  Oligonucleotide primer for the detection of SNP TSC0021811
tgtatgaagtag

SEQ ID NO: 306117 - DNA, 12 bp, Artificial Sequence
  Oligonucleotide primer for the detection of SNP TSC0021812
cctaaaaacaat

SEQ ID NO: 306118 - DNA, 12 bp, Artificial Sequence
  Oligonucleotide primer for the detection of SNP TSC0021812
tattgttttata

SEQ ID NO: 306119 - DNA, 12 bp, Artificial Sequence
  Oligonucleotide primer for the detection of SNP TSC0021812
cactacttcata

SEQ ID NO: 306120 - DNA, 12 bp, Artificial Sequence
  Oligonucleotide primer for the detection of SNP TSC0021812
tttaagggtagt

SEQ ID NO: 306121 - DNA, 12 bp, Artificial Sequence
  Oligonucleotide primer for the detection of SNP TSC0021813
gggggatagggt

SEQ ID NO: 306122 - DNA, 12 bp, Artificial Sequence
  Oligonucleotide primer for the detection of SNP TSC0021814
atcctaattttc

SEQ ID NO: 306123 - DNA, 12 bp, Artificial Sequence
  Oligonucleotide primer for the detection of SNP TSC0021814
gagtgtggattg

SEQ ID NO: 306124 - DNA, 12 bp, Artificial Sequence
  Oligonucleotide primer for the detection of SNP TSC0021817
tatggttatttt

SEQ ID NO: 306125 - DNA, 12 bp, Artificial Sequence
  Oligonucleotide primer for the detection of SNP TSC0021817
tataactaccct

SEQ ID NO: 306126 - DNA, 12 bp, Artificial Sequence
  Oligonucleotide primer for the detection of SNP TSC0021817
gtggaggaaaaa

SEQ ID NO: 306127 - DNA, 12 bp, Artificial Sequence
  Oligonucleotide primer for the detection of SNP TSC0021818
tatatcaaaaaa

SEQ ID NO: 306128 - DNA, 12 bp, Artificial Sequence
  Oligonucleotide primer for the detection of SNP TSC0021818
agtgaaatgttt

SEQ ID NO: 306129 - DNA, 12 bp, Artificial Sequence
  Oligonucleotide primer for the detection of SNP TSC0021818
aataaaatattc

SEQ ID NO: 306130 - DNA, 12 bp, Artificial Sequence
  Oligonucleotide primer for the detection of SNP TSC0021818
atattaaaaagt

SEQ ID NO: 306131 - DNA, 12 bp, Artificial Sequence
  Oligonucleotide primer for the detection of SNP TSC0021818
atattaaaaagc

SEQ ID NO: 306132 - DNA, 12 bp, Artificial Sequence
  Oligonucleotide primer for the detection of SNP TSC0021819
actaaaaataaa

SEQ ID NO: 306133 - DNA, 12 bp, Artificial Sequence
  Oligonucleotide primer for the detection of SNP TSC0021819
taatgtgggaat

SEQ ID NO: 306134 - DNA, 12 bp, Artificial Sequence
  Oligonucleotide primer for the detection of SNP TSC0021819
taacgtgggaat

SEQ ID NO: 306135 - DNA, 12 bp, Artificial Sequence
  Oligonucleotide primer for the detection of SNP TSC0021819
taacataaaaac

SEQ ID NO: 306136 - DNA, 12 bp, Artificial Sequence
  Oligonucleotide primer for the detection of SNP TSC0021819
taacgtaaaaac

SEQ ID NO: 306137 - DNA, 12 bp, Artificial Sequence
  Oligonucleotide primer for the detection of SNP TSC0021819
attggaagtggg

SEQ ID NO: 306138 - DNA, 12 bp, Artificial Sequence
  Oligonucleotide primer for the detection of SNP TSC0021820
ctctaaaaacta

SEQ ID NO: 306139 - DNA, 12 bp, Artificial Sequence
  Oligonucleotide primer for the detection of SNP TSC0021820
aaaatgagttat

SEQ ID NO: 306140 - DNA, 12 bp, Artificial Sequence
  Oligonucleotide primer for the detection of SNP TSC0021820
tttggaaattat

SEQ ID NO: 306141 - DNA, 12 bp, Artificial Sequence
  Oligonucleotide primer for the detection of SNP TSC0021822
ttcctactttcc

SEQ ID NO: 306142 - DNA, 12 bp, Artificial Sequence
  Oligonucleotide primer for the detection of SNP TSC0021822
aaaataatagag

SEQ ID NO: 306143 - DNA, 12 bp, Artificial Sequence
  Oligonucleotide primer for the detection of SNP TSC0021825
ataaaaaaaacc

SEQ ID NO: 306144 - DNA, 12 bp, Artificial Sequence
  Oligonucleotide primer for the detection of SNP TSC0021825
gggtagattttt

SEQ ID NO: 306145 - DNA, 12 bp, Artificial Sequence
  Oligonucleotide primer for the detection of SNP TSC0021825
gggtagattttc

SEQ ID NO: 306146 - DNA, 12 bp, Artificial Sequence
  Oligonucleotide primer for the detection of SNP TSC0021825
aaacaaatcccc

SEQ ID NO: 306147 - DNA, 12 bp, Artificial Sequence
  Oligonucleotide primer for the detection of SNP TSC0021825
gtggggaagatt

SEQ ID NO: 306148 - DNA, 12 bp, Artificial Sequence
  Oligonucleotide primer for the detection of SNP TSC0021825
gtggggaagatc

SEQ ID NO: 306149 - DNA, 12 bp, Artificial Sequence
  Oligonucleotide primer for the detection of SNP TSC0021827
tccacaaaacca

SEQ ID NO: 306150 - DNA, 12 bp, Artificial Sequence
  Oligonucleotide primer for the detection of SNP TSC0021827
aaggatattttt

SEQ ID NO: 306151 - DNA, 12 bp, Artificial Sequence
  Oligonucleotide primer for the detection of SNP TSC0021827
aaaaacaccccc

SEQ ID NO: 306152 - DNA, 12 bp, Artificial Sequence
  Oligonucleotide primer for the detection of SNP TSC0021827
ttttataaagtt

SEQ ID NO: 306153 - DNA, 12 bp, Artificial Sequence
  Oligonukleotid-Primer
aaaccatttaca

SEQ ID NO: 306154 - DNA, 12 bp, Artificial Sequence
  Oligonucleotide primer for the detection of SNP TSC0021828
aaaccatttacg

SEQ ID NO: 306155 - DNA, 12 bp, Artificial Sequence
  Oligonucleotide primer for the detection of SNP TSC0021828
gtattatgttta

SEQ ID NO: 306156 - DNA, 12 bp, Artificial Sequence
  Oligonucleotide primer for the detection of SNP TSC0021828
atattataccca

SEQ ID NO: 306157 - DNA, 12 bp, Artificial Sequence
  Oligonucleotide primer for the detection of SNP TSC0021828
agattatttatg

SEQ ID NO: 306158 - DNA, 12 bp, Artificial Sequence
  Oligonucleotide primer for the detection of SNP TSC0021828
agattatttacg

SEQ ID NO: 306159 - DNA, 12 bp, Artificial Sequence
  Oligonucleotide primer for the detection of SNP TSC0021834
aaatttagggaa

SEQ ID NO: 306160 - DNA, 12 bp, Artificial Sequence
  Oligonucleotide primer for the detection of SNP TSC0021835
taaatcactcca

SEQ ID NO: 306161 - DNA, 12 bp, Artificial Sequence
  Oligonucleotide primer for the detection of SNP TSC0021835
tttatttgtagt

SEQ ID NO: 306162 - DNA, 12 bp, Artificial Sequence
  Oligonucleotide primer for the detection of SNP TSC0021835
tctatttacaat

SEQ ID NO: 306163 - DNA, 12 bp, Artificial Sequence
  Oligonucleotide primer for the detection of SNP TSC0021835
tgggttatttta

SEQ ID NO: 306164 - DNA, 12 bp, Artificial Sequence
  Oligonucleotide primer for the detection of SNP TSC0021839
cttaaatctccc

SEQ ID NO: 306165 - DNA, 12 bp, Artificial Sequence
  Oligonucleotide primer for the detection of SNP TSC0021839
ttggttgtagta

SEQ ID NO: 306166 - DNA, 12 bp, Artificial Sequence
  Oligonucleotide primer for the detection of SNP TSC0021842
aacaattaacaa

SEQ ID NO: 306167 - DNA, 12 bp, Artificial Sequence
  Oligonucleotide primer for the detection of SNP TSC0021842
agatattgaatt

SEQ ID NO: 306168 - DNA, 12 bp, Artificial Sequence
  Oligonucleotide primer for the detection of SNP TSC0021842
aaatattaaact

SEQ ID NO: 306169 - DNA, 12 bp, Artificial Sequence
  Oligonucleotide primer for the detection of SNP TSC0021842
aggtaattgata

SEQ ID NO: 306170 - DNA, 12 bp, Artificial Sequence
  Oligonucleotide primer for the detection of SNP TSC0021845
tcacaccataat

SEQ ID NO: 306171 - DNA, 12 bp, Artificial Sequence
  Oligonucleotide primer for the detection of SNP TSC0021845
gggaggagatat

SEQ ID NO: 306172 - DNA, 12 bp, Artificial Sequence
  Oligonucleotide primer for the detection of SNP TSC0021846
ctaaaacaaatc

SEQ ID NO: 306173 - DNA, 12 bp, Artificial Sequence
  Oligonucleotide primer for the detection of SNP TSC0021846
ttttttttacgg

SEQ ID NO: 306174 - DNA, 12 bp, Artificial Sequence
  Oligonucleotide primer for the detection of SNP TSC0021846
tcctccccacaa

SEQ ID NO: 306175 - DNA, 12 bp, Artificial Sequence
  Oligonucleotide primer for the detection of SNP TSC0021846
tcctccccacga

SEQ ID NO: 306176 - DNA, 12 bp, Artificial Sequence
  Oligonucleotide primer for the detection of SNP TSC0021846
tggggtaagttt

SEQ ID NO: 306177 - DNA, 12 bp, Artificial Sequence
  Oligonucleotide primer for the detection of SNP TSC0021852
tatttttggtaa

SEQ ID NO: 306178 - DNA, 12 bp, Artificial Sequence
  Oligonucleotide primer for the detection of SNP TSC0021852
cacccttaataa

SEQ ID NO: 306179 - DNA, 12 bp, Artificial Sequence
  Oligonucleotide primer for the detection of SNP TSC0021852
ataatgttaaga

SEQ ID NO: 306180 - DNA, 12 bp, Artificial Sequence
  Oligonucleotide primer for the detection of SNP TSC0021856
caaaactcaaaa

SEQ ID NO: 306181 - DNA, 12 bp, Artificial Sequence
  Oligonucleotide primer for the detection of SNP TSC0021856
tggtaaattttt

SEQ ID NO: 306182 - DNA, 12 bp, Artificial Sequence
  Oligonucleotide primer for the detection of SNP TSC0021856
cggtaaattttt

SEQ ID NO: 306183 - DNA, 12 bp, Artificial Sequence
  Oligonucleotide primer for the detection of SNP TSC0021856
caacaaattccc

SEQ ID NO: 306184 - DNA, 12 bp, Artificial Sequence
  Oligonucleotide primer for the detection of SNP TSC0021856
cgacaaattccc

SEQ ID NO: 306185 - DNA, 12 bp, Artificial Sequence
  Oligonucleotide primer for the detection of SNP TSC0021856
taagatttaaag

SEQ ID NO: 306186 - DNA, 12 bp, Artificial Sequence
  Oligonucleotide primer for the detection of SNP TSC0021857
aattcataccaa

SEQ ID NO: 306187 - DNA, 12 bp, Artificial Sequence
  Oligonucleotide primer for the detection of SNP TSC0021857
tgtgatagtatt

SEQ ID NO: 306188 - DNA, 12 bp, Artificial Sequence
  Oligonucleotide primer for the detection of SNP TSC0021857
tataacaacatc

SEQ ID NO: 306189 - DNA, 12 bp, Artificial Sequence
  Oligonucleotide primer for the detection of SNP TSC0021857
ggtttatgttag

SEQ ID NO: 306190 - DNA, 12 bp, Artificial Sequence
  Oligonucleotide primer for the detection of SNP TSC0021858
aatcccccttcc

SEQ ID NO: 306191 - DNA, 12 bp, Artificial Sequence
  Oligonucleotide primer for the detection of SNP TSC0021858
ttagtttttgtg

SEQ ID NO: 306192 - DNA, 12 bp, Artificial Sequence
  Oligonucleotide primer for the detection of SNP TSC0021858
ttagttttcgtg

SEQ ID NO: 306193 - DNA, 12 bp, Artificial Sequence
  Oligonucleotide primer for the detection of SNP TSC0021859
gtttaagggtag

SEQ ID NO: 306194 - DNA, 12 bp, Artificial Sequence
  Oligonucleotide primer for the detection of SNP TSC0021859
actcaaaaacaa

SEQ ID NO: 306195 - DNA, 12 bp, Artificial Sequence
  Oligonucleotide primer for the detection of SNP TSC0021859
ggaggggtaggt

SEQ ID NO: 306196 - DNA, 12 bp, Artificial Sequence
  Oligonucleotide primer for the detection of SNP TSC0021860
ccaaaatctcca

SEQ ID NO: 306197 - DNA, 12 bp, Artificial Sequence
  Oligonucleotide primer for the detection of SNP TSC0021860
ccaaaatctccg

SEQ ID NO: 306198 - DNA, 12 bp, Artificial Sequence
  Oligonucleotide primer for the detection of SNP TSC0021860
tttttattgagg

SEQ ID NO: 306199 - DNA, 12 bp, Artificial Sequence
  Oligonucleotide primer for the detection of SNP TSC0021860
ttcccactaaaa

SEQ ID NO: 306200 - DNA, 12 bp, Artificial Sequence
  Oligonucleotide primer for the detection of SNP TSC0021860
tagagttttcgt

SEQ ID NO: 306201 - DNA, 12 bp, Artificial Sequence
  Oligonucleotide primer for the detection of SNP TSC0021865
ctacatttttct

SEQ ID NO: 306202 - DNA, 12 bp, Artificial Sequence
  Oligonucleotide primer for the detection of SNP TSC0021865
tgggttttggtt

SEQ ID NO: 306203 - DNA, 12 bp, Artificial Sequence
  Oligonucleotide primer for the detection of SNP TSC0021865
tgggtttcggtt

SEQ ID NO: 306204 - DNA, 12 bp, Artificial Sequence
  Oligonucleotide primer for the detection of SNP TSC0021865
taaacttcaatt

SEQ ID NO: 306205 - DNA, 12 bp, Artificial Sequence
  Oligonucleotide primer for the detection of SNP TSC0021865
taaacttcgatt

SEQ ID NO: 306206 - DNA, 12 bp, Artificial Sequence
  Oligonucleotide primer for the detection of SNP TSC0021866
ccacacctctcc

SEQ ID NO: 306207 - DNA, 12 bp, Artificial Sequence
  Oligonucleotide primer for the detection of SNP TSC0021866
gtagggttttgt

SEQ ID NO: 306208 - DNA, 12 bp, Artificial Sequence
  Oligonucleotide primer for the detection of SNP TSC0021866
ataaaatcctat

SEQ ID NO: 306209 - DNA, 12 bp, Artificial Sequence
  Oligonucleotide primer for the detection of SNP TSC0021873
taaaacctcaac

SEQ ID NO: 306210 - DNA, 12 bp, Artificial Sequence
  Oligonucleotide primer for the detection of SNP TSC0021873
ttgttaagttaa

SEQ ID NO: 306211 - DNA, 12 bp, Artificial Sequence
  Oligonucleotide primer for the detection of SNP TSC0021874
accctaaataat

SEQ ID NO: 306212 - DNA, 12 bp, Artificial Sequence
  Oligonucleotide primer for the detection of SNP TSC0021874
atttggtagtag

SEQ ID NO: 306213 - DNA, 12 bp, Artificial Sequence
  Oligonucleotide primer for the detection of SNP TSC0021877
ataaataaaact

SEQ ID NO: 306214 - DNA, 12 bp, Artificial Sequence
  Oligonucleotide primer for the detection of SNP TSC0021877
gtaaataaaact

SEQ ID NO: 306215 - DNA, 12 bp, Artificial Sequence
  Oligonucleotide primer for the detection of SNP TSC0021877
tggtagaagtta

SEQ ID NO: 306216 - DNA, 12 bp, Artificial Sequence
  Oligonucleotide primer for the detection of SNP TSC0021877
cggtagaagtta

SEQ ID NO: 306217 - DNA, 12 bp, Artificial Sequence
  Oligonucleotide primer for the detection of SNP TSC0021878
ttactctatatt

SEQ ID NO: 306218 - DNA, 12 bp, Artificial Sequence
  Oligonucleotide primer for the detection of SNP TSC0021878
ctcctacaacaa

SEQ ID NO: 306219 - DNA, 12 bp, Artificial Sequence
  Oligonucleotide primer for the detection of SNP TSC0021878
ttattttgtgtt

SEQ ID NO: 306220 - DNA, 12 bp, Artificial Sequence
  Oligonucleotide primer for the detection of SNP TSC0021879
attaaaattaac

SEQ ID NO: 306221 - DNA, 12 bp, Artificial Sequence
  Oligonucleotide primer for the detection of SNP TSC0021879
tgttattttagg

SEQ ID NO: 306222 - DNA, 12 bp, Artificial Sequence
  Oligonucleotide primer for the detection of SNP TSC0021879
tattattctaaa

SEQ ID NO: 306223 - DNA, 12 bp, Artificial Sequence
  Oligonucleotide primer for the detection of SNP TSC0021879
attagaattagt

SEQ ID NO: 306224 - DNA, 12 bp, Artificial Sequence
  Oligonucleotide primer for the detection of SNP TSC0021880
atactatttctt

SEQ ID NO: 306225 - DNA, 12 bp, Artificial Sequence
  Oligonucleotide primer for the detection of SNP TSC0021880
gtactatttctt

SEQ ID NO: 306226 - DNA, 12 bp, Artificial Sequence
  Oligonucleotide primer for the detection of SNP TSC0021880
ttttttggtagg

SEQ ID NO: 306227 - DNA, 12 bp, Artificial Sequence
  Oligonucleotide primer for the detection of SNP TSC0021881
ttaccttcaaat

SEQ ID NO: 306228 - DNA, 12 bp, Artificial Sequence
  Oligonucleotide primer for the detection of SNP TSC0021881
atttggatttta

SEQ ID NO: 306229 - DNA, 12 bp, Artificial Sequence
  Oligonucleotide primer for the detection of SNP TSC0021881
attcggatttta

SEQ ID NO: 306230 - DNA, 12 bp, Artificial Sequence
  Oligonucleotide primer for the detection of SNP TSC0021881
atccaaactcca

SEQ ID NO: 306231 - DNA, 12 bp, Artificial Sequence
  Oligonucleotide primer for the detection of SNP TSC0021881
atccgaactcca

SEQ ID NO: 306232 - DNA, 12 bp, Artificial Sequence
  Oligonucleotide primer for the detection of SNP TSC0021883
catatacacaaa

SEQ ID NO: 306233 - DNA, 12 bp, Artificial Sequence
  Oligonucleotide primer for the detection of SNP TSC0021883
catatacacgaa

SEQ ID NO: 306234 - DNA, 12 bp, Artificial Sequence
  Oligonucleotide primer for the detection of SNP TSC0021883
tcctcaccaaac

SEQ ID NO: 306235 - DNA, 12 bp, Artificial Sequence
  Oligonucleotide primer for the detection of SNP TSC0021883
tatgtgtatgag

SEQ ID NO: 306236 - DNA, 12 bp, Artificial Sequence
  Oligonucleotide primer for the detection of SNP TSC0021883
tatgtgtacgag

SEQ ID NO: 306237 - DNA, 12 bp, Artificial Sequence
  Oligonucleotide primer for the detection of SNP TSC0021887
taatttaactct

SEQ ID NO: 306238 - DNA, 12 bp, Artificial Sequence
  Oligonukleotid-Primer
tgtttttgtggg

SEQ ID NO: 306239 - DNA, 12 bp, Artificial Sequence
  Oligonucleotide primer for the detection of SNP TSC0021889
ttattaggagtg

SEQ ID NO: 306240 - DNA, 12 bp, Artificial Sequence
  Oligonucleotide primer for the detection of SNP TSC0021889
tcactaaaaata

SEQ ID NO: 306241 - DNA, 12 bp, Artificial Sequence
  Oligonucleotide primer for the detection of SNP TSC0021889
tttttaattaga

SEQ ID NO: 306242 - DNA, 12 bp, Artificial Sequence
  Oligonukleotid-Primer
ataaaccactaa

SEQ ID NO: 306243 - DNA, 12 bp, Artificial Sequence
  Oligonucleotide primer for the detection of SNP TSC0021890
ggagttttttat

SEQ ID NO: 306244 - DNA, 12 bp, Artificial Sequence
  Oligonucleotide primer for the detection of SNP TSC0021890
aaaattttccac

SEQ ID NO: 306245 - DNA, 12 bp, Artificial Sequence
  Oligonucleotide primer for the detection of SNP TSC0021890
gaaattttccac

SEQ ID NO: 306246 - DNA, 12 bp, Artificial Sequence
  Oligonucleotide primer for the detection of SNP TSC0021890
atgagttattgg

SEQ ID NO: 306247 - DNA, 12 bp, Artificial Sequence
  Oligonucleotide primer for the detection of SNP TSC0021892
tggagaggtaat

SEQ ID NO: 306248 - DNA, 12 bp, Artificial Sequence
  Oligonucleotide primer for the detection of SNP TSC0021892
attgttttattg

SEQ ID NO: 306249 - DNA, 12 bp, Artificial Sequence
  Oligonucleotide primer for the detection of SNP TSC0021893
aaacaaaaatat

SEQ ID NO: 306250 - DNA, 12 bp, Artificial Sequence
  Oligonucleotide primer for the detection of SNP TSC0021893
aaagttgaataa

SEQ ID NO: 306251 - DNA, 12 bp, Artificial Sequence
  Oligonucleotide primer for the detection of SNP TSC0021893
gggtaggaatat

SEQ ID NO: 306252 - DNA, 12 bp, Artificial Sequence
  Oligonucleotide primer for the detection of SNP TSC0021894
caaaaaaaaact

SEQ ID NO: 306253 - DNA, 12 bp, Artificial Sequence
  Oligonucleotide primer for the detection of SNP TSC0021894
ttgttattgtag

SEQ ID NO: 306254 - DNA, 12 bp, Artificial Sequence
  Oligonucleotide primer for the detection of SNP TSC0021894
tcgttattgtag

SEQ ID NO: 306255 - DNA, 12 bp, Artificial Sequence
  Oligonucleotide primer for the detection of SNP TSC0021905
attctaactatt

SEQ ID NO: 306256 - DNA, 12 bp, Artificial Sequence
  Oligonucleotide primer for the detection of SNP TSC0021905
ttttagaaaata

SEQ ID NO: 306257 - DNA, 12 bp, Artificial Sequence
  Oligonucleotide primer for the detection of SNP TSC0021907
tctacttcacat

SEQ ID NO: 306258 - DNA, 12 bp, Artificial Sequence
  Oligonucleotide primer for the detection of SNP TSC0021907
tctacttcacgt

SEQ ID NO: 306259 - DNA, 12 bp, Artificial Sequence
  Oligonucleotide primer for the detection of SNP TSC0021907
attagtgtgaaa

SEQ ID NO: 306260 - DNA, 12 bp, Artificial Sequence
  Oligonucleotide primer for the detection of SNP TSC0021908
gtttgttttacg

SEQ ID NO: 306261 - DNA, 12 bp, Artificial Sequence
  Oligonucleotide primer for the detection of SNP TSC0021908
atctacttcaca

SEQ ID NO: 306262 - DNA, 12 bp, Artificial Sequence
  Oligonucleotide primer for the detection of SNP TSC0021908
atctacttcacg

SEQ ID NO: 306263 - DNA, 12 bp, Artificial Sequence
  Oligonucleotide primer for the detection of SNP TSC0021908
ttagtgtgaaat

SEQ ID NO: 306264 - DNA, 12 bp, Artificial Sequence
  Oligonucleotide primer for the detection of SNP TSC0021913
ccaactacttct

SEQ ID NO: 306265 - DNA, 12 bp, Artificial Sequence
  Oligonucleotide primer for the detection of SNP TSC0021913
ccgactacttct

SEQ ID NO: 306266 - DNA, 12 bp, Artificial Sequence
  Oligonucleotide primer for the detection of SNP TSC0021913
atagtattgtta

SEQ ID NO: 306267 - DNA, 12 bp, Artificial Sequence
  Oligonucleotide primer for the detection of SNP TSC0021913
atagtatcgtta

SEQ ID NO: 306268 - DNA, 12 bp, Artificial Sequence
  Oligonucleotide primer for the detection of SNP TSC0021914
taccatataatc

SEQ ID NO: 306269 - DNA, 12 bp, Artificial Sequence
  Oligonucleotide primer for the detection of SNP TSC0021914
ttgttgaaaatg

SEQ ID NO: 306270 - DNA, 12 bp, Artificial Sequence
  Oligonucleotide primer for the detection of SNP TSC0021914
ttgtcgaaaatg

SEQ ID NO: 306271 - DNA, 12 bp, Artificial Sequence
  Oligonucleotide primer for the detection of SNP TSC0021916
aaaaccaccact

SEQ ID NO: 306272 - DNA, 12 bp, Artificial Sequence
  Oligonucleotide primer for the detection of SNP TSC0021916
agtattaatgag

SEQ ID NO: 306273 - DNA, 12 bp, Artificial Sequence
  Oligonucleotide primer for the detection of SNP TSC0021917
ttgattttgggg

SEQ ID NO: 306274 - DNA, 12 bp, Artificial Sequence
  Oligonucleotide primer for the detection of SNP TSC0021917
ctaactttaaaa

SEQ ID NO: 306275 - DNA, 12 bp, Artificial Sequence
  Oligonucleotide primer for the detection of SNP TSC0021917
aattgaagaagt

SEQ ID NO: 306276 - DNA, 12 bp, Artificial Sequence
  Oligonucleotide primer for the detection of SNP TSC0021918
tcgattatttga

SEQ ID NO: 306277 - DNA, 12 bp, Artificial Sequence
  Oligonucleotide primer for the detection of SNP TSC0021919
aacatattacct

SEQ ID NO: 306278 - DNA, 12 bp, Artificial Sequence
  Oligonucleotide primer for the detection of SNP TSC0021919
atgtatgtttta

SEQ ID NO: 306279 - DNA, 12 bp, Artificial Sequence
  Oligonucleotide primer for the detection of SNP TSC0021920
ttattaataact

SEQ ID NO: 306280 - DNA, 12 bp, Artificial Sequence
  Oligonucleotide primer for the detection of SNP TSC0021920
taaatagtagtg

SEQ ID NO: 306281 - DNA, 12 bp, Artificial Sequence
  Oligonucleotide primer for the detection of SNP TSC0021922
aatatctttcaa

SEQ ID NO: 306282 - DNA, 12 bp, Artificial Sequence
  Oligonucleotide primer for the detection of SNP TSC0021922
tgtaatataatt

SEQ ID NO: 306283 - DNA, 12 bp, Artificial Sequence
  Oligonucleotide primer for the detection of SNP TSC0021922
attacaatacaa

SEQ ID NO: 306284 - DNA, 12 bp, Artificial Sequence
  Oligonucleotide primer for the detection of SNP TSC0021922
ataatatttttt

SEQ ID NO: 306285 - DNA, 12 bp, Artificial Sequence
  Oligonucleotide primer for the detection of SNP TSC0021923
cttaatccattc

SEQ ID NO: 306286 - DNA, 12 bp, Artificial Sequence
  Oligonucleotide primer for the detection of SNP TSC0021923
attttgagatta

SEQ ID NO: 306287 - DNA, 12 bp, Artificial Sequence
  Oligonucleotide primer for the detection of SNP TSC0021923
accctaaaatta

SEQ ID NO: 306288 - DNA, 12 bp, Artificial Sequence
  Oligonucleotide primer for the detection of SNP TSC0021924
ccctacaaacaa

SEQ ID NO: 306289 - DNA, 12 bp, Artificial Sequence
  Oligonucleotide primer for the detection of SNP TSC0021924
ttttggggttta

SEQ ID NO: 306290 - DNA, 12 bp, Artificial Sequence
  Oligonucleotide primer for the detection of SNP TSC0021926
gagtcgagatta

SEQ ID NO: 306291 - DNA, 12 bp, Artificial Sequence
  Oligonucleotide primer for the detection of SNP TSC0021928
aacaaaaaacca

SEQ ID NO: 306292 - DNA, 12 bp, Artificial Sequence
  Oligonucleotide primer for the detection of SNP TSC0021928
tgaggaggtttt

SEQ ID NO: 306293 - DNA, 12 bp, Artificial Sequence
  Oligonucleotide primer for the detection of SNP TSC0021928
gggtagaaggtt

SEQ ID NO: 306294 - DNA, 12 bp, Artificial Sequence
  Oligonucleotide primer for the detection of SNP TSC0021931
acaacccccttc

SEQ ID NO: 306295 - DNA, 12 bp, Artificial Sequence
  Oligonucleotide primer for the detection of SNP TSC0021931
ttagggttggag

SEQ ID NO: 306296 - DNA, 12 bp, Artificial Sequence
  Oligonucleotide primer for the detection of SNP TSC0021932
tagaagaattat

SEQ ID NO: 306297 - DNA, 12 bp, Artificial Sequence
  Oligonucleotide primer for the detection of SNP TSC0021932
aaaaaaatcaca

SEQ ID NO: 306298 - DNA, 12 bp, Artificial Sequence
  Oligonucleotide primer for the detection of SNP TSC0021933
ctattcccacta

SEQ ID NO: 306299 - DNA, 12 bp, Artificial Sequence
  Oligonucleotide primer for the detection of SNP TSC0021933
tttagttaagtt

SEQ ID NO: 306300 - DNA, 12 bp, Artificial Sequence
  Oligonucleotide primer for the detection of SNP TSC0021933
cttaatcaaact

SEQ ID NO: 306301 - DNA, 12 bp, Artificial Sequence
  Oligonucleotide primer for the detection of SNP TSC0021934
aaactcattact

SEQ ID NO: 306302 - DNA, 12 bp, Artificial Sequence
  Oligonucleotide primer for the detection of SNP TSC0021934
gttttttttata

SEQ ID NO: 306303 - DNA, 12 bp, Artificial Sequence
  Oligonucleotide primer for the detection of SNP TSC0021935
aaacccccataa

SEQ ID NO: 306304 - DNA, 12 bp, Artificial Sequence
  Oligonucleotide primer for the detection of SNP TSC0021935
attagtttaggt

SEQ ID NO: 306305 - DNA, 12 bp, Artificial Sequence
  Oligonucleotide primer for the detection of SNP TSC0021935
atcaactcaaat

SEQ ID NO: 306306 - DNA, 12 bp, Artificial Sequence
  Oligonucleotide primer for the detection of SNP TSC0021935
gagtttttatgg

SEQ ID NO: 306307 - DNA, 12 bp, Artificial Sequence
  Oligonucleotide primer for the detection of SNP TSC0021941
tgggtgtttttt

SEQ ID NO: 306308 - DNA, 12 bp, Artificial Sequence
  Oligonucleotide primer for the detection of SNP TSC0021941
cgggtgtttttt

SEQ ID NO: 306309 - DNA, 12 bp, Artificial Sequence
  Oligonucleotide primer for the detection of SNP TSC0021941
caaatactttcc

SEQ ID NO: 306310 - DNA, 12 bp, Artificial Sequence
  Oligonucleotide primer for the detection of SNP TSC0021941
cgaatactttcc

SEQ ID NO: 306311 - DNA, 12 bp, Artificial Sequence
  Oligonucleotide primer for the detection of SNP TSC0021941
ttatagggggtg

SEQ ID NO: 306312 - DNA, 12 bp, Artificial Sequence
  Oligonucleotide primer for the detection of SNP TSC0021942
caaattaccaaa

SEQ ID NO: 306313 - DNA, 12 bp, Artificial Sequence
  Oligonucleotide primer for the detection of SNP TSC0021942
cgaattaccaaa

SEQ ID NO: 306314 - DNA, 12 bp, Artificial Sequence
  Oligonucleotide primer for the detection of SNP TSC0021942
ggtatagggaat

SEQ ID NO: 306315 - DNA, 12 bp, Artificial Sequence
  Oligonucleotide primer for the detection of SNP TSC0021942
tgaattgttaga

SEQ ID NO: 306316 - DNA, 12 bp, Artificial Sequence
  Oligonucleotide primer for the detection of SNP TSC0021942
cgaattgttaga

SEQ ID NO: 306317 - DNA, 12 bp, Artificial Sequence
  Oligonucleotide primer for the detection of SNP TSC0021943
acaactccaatc

SEQ ID NO: 306318 - DNA, 12 bp, Artificial Sequence
  Oligonucleotide primer for the detection of SNP TSC0021943
ggtatagatggg

SEQ ID NO: 306319 - DNA, 12 bp, Artificial Sequence
  Oligonucleotide primer for the detection of SNP TSC0021944
ctatccctacca

SEQ ID NO: 306320 - DNA, 12 bp, Artificial Sequence
  Oligonucleotide primer for the detection of SNP TSC0021944
gtttggggttat

SEQ ID NO: 306321 - DNA, 12 bp, Artificial Sequence
  Oligonucleotide primer for the detection of SNP TSC0021944
acctaaaaccac

SEQ ID NO: 306322 - DNA, 12 bp, Artificial Sequence
  Oligonucleotide primer for the detection of SNP TSC0021944
ttgtttttgtta

SEQ ID NO: 306323 - DNA, 12 bp, Artificial Sequence
  Oligonucleotide primer for the detection of SNP TSC0021945
ttaccactacac

SEQ ID NO: 306324 - DNA, 12 bp, Artificial Sequence
  Oligonucleotide primer for the detection of SNP TSC0021945
tatttaggttgg

SEQ ID NO: 306325 - DNA, 12 bp, Artificial Sequence
  Oligonucleotide primer for the detection of SNP TSC0021946
gtttttataaaa

SEQ ID NO: 306326 - DNA, 12 bp, Artificial Sequence
  Oligonucleotide primer for the detection of SNP TSC0021949
ccacaatcaata

SEQ ID NO: 306327 - DNA, 12 bp, Artificial Sequence
  Oligonucleotide primer for the detection of SNP TSC0021949
ccacgatcaata

SEQ ID NO: 306328 - DNA, 12 bp, Artificial Sequence
  Oligonucleotide primer for the detection of SNP TSC0021949
tagagggagttt

SEQ ID NO: 306329 - DNA, 12 bp, Artificial Sequence
  Oligonucleotide primer for the detection of SNP TSC0021949
taaaaaaaacct

SEQ ID NO: 306330 - DNA, 12 bp, Artificial Sequence
  Oligonucleotide primer for the detection of SNP TSC0021949
ttatggttagta

SEQ ID NO: 306331 - DNA, 12 bp, Artificial Sequence
  Oligonucleotide primer for the detection of SNP TSC0021949
ttacggttagta

SEQ ID NO: 306332 - DNA, 12 bp, Artificial Sequence
  Oligonucleotide primer for the detection of SNP TSC0021951
aaaataacctta

SEQ ID NO: 306333 - DNA, 12 bp, Artificial Sequence
  Oligonucleotide primer for the detection of SNP TSC0021951
agaggaaggagt

SEQ ID NO: 306334 - DNA, 12 bp, Artificial Sequence
  Oligonucleotide primer for the detection of SNP TSC0021951
taaagtaatttt

SEQ ID NO: 306335 - DNA, 12 bp, Artificial Sequence
  Oligonucleotide primer for the detection of SNP TSC0021952
attgtgagttta

SEQ ID NO: 306336 - DNA, 12 bp, Artificial Sequence
  Oligonucleotide primer for the detection of SNP TSC0021952
attgcgagttta

SEQ ID NO: 306337 - DNA, 12 bp, Artificial Sequence
  Oligonucleotide primer for the detection of SNP TSC0021956
aaacttattacc

SEQ ID NO: 306338 - DNA, 12 bp, Artificial Sequence
  Oligonucleotide primer for the detection of SNP TSC0021956
attttgtgggga

SEQ ID NO: 306339 - DNA, 12 bp, Artificial Sequence
  Oligonucleotide primer for the detection of SNP TSC0021956
atttcgtgggga

SEQ ID NO: 306340 - DNA, 12 bp, Artificial Sequence
  Oligonucleotide primer for the detection of SNP TSC0021957
atctctccattc

SEQ ID NO: 306341 - DNA, 12 bp, Artificial Sequence
  Oligonucleotide primer for the detection of SNP TSC0021957
tttaataagaag

SEQ ID NO: 306342 - DNA, 12 bp, Artificial Sequence
  Oligonucleotide primer for the detection of SNP TSC0021967
caccctcttttc

SEQ ID NO: 306343 - DNA, 12 bp, Artificial Sequence
  Oligonucleotide primer for the detection of SNP TSC0021967
tattgattaggg

SEQ ID NO: 306344 - DNA, 12 bp, Artificial Sequence
  Oligonucleotide primer for the detection of SNP TSC0021967
tactaaccaaaa

SEQ ID NO: 306345 - DNA, 12 bp, Artificial Sequence
  Oligonucleotide primer for the detection of SNP TSC0021968
ttccatacaacc

SEQ ID NO: 306346 - DNA, 12 bp, Artificial Sequence
  Oligonucleotide primer for the detection of SNP TSC0021968
gatggggaattt

SEQ ID NO: 306347 - DNA, 12 bp, Artificial Sequence
  Oligonucleotide primer for the detection of SNP TSC0021968
tttatgtagttt

SEQ ID NO: 306348 - DNA, 12 bp, Artificial Sequence
  Oligonucleotide primer for the detection of SNP TSC0021969
ctctataatttt

SEQ ID NO: 306349 - DNA, 12 bp, Artificial Sequence
  Oligonucleotide primer for the detection of SNP TSC0021969
gaggaggttatg

SEQ ID NO: 306350 - DNA, 12 bp, Artificial Sequence
  Oligonucleotide primer for the detection of SNP TSC0021970
ctaccctaatca

SEQ ID NO: 306351 - DNA, 12 bp, Artificial Sequence
  Oligonucleotide primer for the detection of SNP TSC0021970
agtagaaggatt

SEQ ID NO: 306352 - DNA, 12 bp, Artificial Sequence
  Oligonucleotide primer for the detection of SNP TSC0021970
tttgttttggtt

SEQ ID NO: 306353 - DNA, 12 bp, Artificial Sequence
  Oligonucleotide primer for the detection of SNP TSC0021971
accaaaaactca

SEQ ID NO: 306354 - DNA, 12 bp, Artificial Sequence
  Oligonucleotide primer for the detection of SNP TSC0021971
tggttagtttat

SEQ ID NO: 306355 - DNA, 12 bp, Artificial Sequence
  Oligonukleotid-Primer
cggttagtttat

SEQ ID NO: 306356 - DNA, 12 bp, Artificial Sequence
  Oligonucleotide primer for the detection of SNP TSC0021971
accaatctataa

SEQ ID NO: 306357 - DNA, 12 bp, Artificial Sequence
  Oligonucleotide primer for the detection of SNP TSC0021971
tattagagattt

SEQ ID NO: 306358 - DNA, 12 bp, Artificial Sequence
  Oligonucleotide primer for the detection of SNP TSC0021972
aacaccaaaaac

SEQ ID NO: 306359 - DNA, 12 bp, Artificial Sequence
  Oligonucleotide primer for the detection of SNP TSC0021972
agtttatggatg

SEQ ID NO: 306360 - DNA, 12 bp, Artificial Sequence
  Oligonucleotide primer for the detection of SNP TSC0021973
atacataacaca

SEQ ID NO: 306361 - DNA, 12 bp, Artificial Sequence
  Oligonucleotide primer for the detection of SNP TSC0021973
atacataacacg

SEQ ID NO: 306362 - DNA, 12 bp, Artificial Sequence
  Oligonucleotide primer for the detection of SNP TSC0021973
atacgtaacaca

SEQ ID NO: 306363 - DNA, 12 bp, Artificial Sequence
  Oligonucleotide primer for the detection of SNP TSC0021973
atacgtaacacg

SEQ ID NO: 306364 - DNA, 12 bp, Artificial Sequence
  Oligonucleotide primer for the detection of SNP TSC0021973
tttaagtatttt

SEQ ID NO: 306365 - DNA, 12 bp, Artificial Sequence
  Oligonucleotide primer for the detection of SNP TSC0021973
ctcaaatattct

SEQ ID NO: 306366 - DNA, 12 bp, Artificial Sequence
  Oligonucleotide primer for the detection of SNP TSC0021973
gtgtgtggtatg

SEQ ID NO: 306367 - DNA, 12 bp, Artificial Sequence
  Oligonucleotide primer for the detection of SNP TSC0021973
gtgcgtggtatg

SEQ ID NO: 306368 - DNA, 12 bp, Artificial Sequence
  Oligonucleotide primer for the detection of SNP TSC0021973
gtgtgtggtacg

SEQ ID NO: 306369 - DNA, 12 bp, Artificial Sequence
  Oligonucleotide primer for the detection of SNP TSC0021973
gtgcgtggtacg

SEQ ID NO: 306370 - DNA, 12 bp, Artificial Sequence
  Oligonucleotide primer for the detection of SNP TSC0021974
taacaacacctc

SEQ ID NO: 306371 - DNA, 12 bp, Artificial Sequence
  Oligonucleotide primer for the detection of SNP TSC0021974
tgagttttggaa

SEQ ID NO: 306372 - DNA, 12 bp, Artificial Sequence
  Oligonucleotide primer for the detection of SNP TSC0021974
cgagttttggaa

SEQ ID NO: 306373 - DNA, 12 bp, Artificial Sequence
  Oligonucleotide primer for the detection of SNP TSC0021974
caaactctaaaa

SEQ ID NO: 306374 - DNA, 12 bp, Artificial Sequence
  Oligonucleotide primer for the detection of SNP TSC0021974
cgaactctaaaa

SEQ ID NO: 306375 - DNA, 12 bp, Artificial Sequence
  Oligonucleotide primer for the detection of SNP TSC0021974
tgatagtatttt

SEQ ID NO: 306376 - DNA, 12 bp, Artificial Sequence
  Oligonucleotide primer for the detection of SNP TSC0021976
acatctaattca

SEQ ID NO: 306377 - DNA, 12 bp, Artificial Sequence
  Oligonucleotide primer for the detection of SNP TSC0021976
atatgaaaaagt

SEQ ID NO: 306378 - DNA, 12 bp, Artificial Sequence
  Oligonucleotide primer for the detection of SNP TSC0021976
atatttgattta

SEQ ID NO: 306379 - DNA, 12 bp, Artificial Sequence
  Oligonucleotide primer for the detection of SNP TSC0021977
ctatatataact

SEQ ID NO: 306380 - DNA, 12 bp, Artificial Sequence
  Oligonucleotide primer for the detection of SNP TSC0021977
tttgggttttta

SEQ ID NO: 306381 - DNA, 12 bp, Artificial Sequence
  Oligonucleotide primer for the detection of SNP TSC0021977
cctaaacttcca

SEQ ID NO: 306382 - DNA, 12 bp, Artificial Sequence
  Oligonucleotide primer for the detection of SNP TSC0021977
ttgtatatagtt

SEQ ID NO: 306383 - DNA, 12 bp, Artificial Sequence
  Oligonucleotide primer for the detection of SNP TSC0021978
cacatatacaca

SEQ ID NO: 306384 - DNA, 12 bp, Artificial Sequence
  Oligonucleotide primer for the detection of SNP TSC0021978
ggtgtgtgtggt

SEQ ID NO: 306385 - DNA, 12 bp, Artificial Sequence
  Oligonucleotide primer for the detection of SNP TSC0021980
ttttgtgttttg

SEQ ID NO: 306386 - DNA, 12 bp, Artificial Sequence
  Oligonucleotide primer for the detection of SNP TSC0021980
tttcgtgttttg

SEQ ID NO: 306387 - DNA, 12 bp, Artificial Sequence
  Oligonucleotide primer for the detection of SNP TSC0021981
aatatctaaatc

SEQ ID NO: 306388 - DNA, 12 bp, Artificial Sequence
  Oligonucleotide primer for the detection of SNP TSC0021981
ttagagtgtaga

SEQ ID NO: 306389 - DNA, 12 bp, Artificial Sequence
  Oligonucleotide primer for the detection of SNP TSC0021982
caaataatcact

SEQ ID NO: 306390 - DNA, 12 bp, Artificial Sequence
  Oligonucleotide primer for the detection of SNP TSC0021982
agaaattttttt

SEQ ID NO: 306391 - DNA, 12 bp, Artificial Sequence
  Oligonucleotide primer for the detection of SNP TSC0021983
aaaccatattat

SEQ ID NO: 306392 - DNA, 12 bp, Artificial Sequence
  Oligonucleotide primer for the detection of SNP TSC0021983
gtttagtaagga

SEQ ID NO: 306393 - DNA, 12 bp, Artificial Sequence
  Oligonucleotide primer for the detection of SNP TSC0021983
atctaataaaaa

SEQ ID NO: 306394 - DNA, 12 bp, Artificial Sequence
  Oligonucleotide primer for the detection of SNP TSC0021983
gtctaataaaaa

SEQ ID NO: 306395 - DNA, 12 bp, Artificial Sequence
  Oligonucleotide primer for the detection of SNP TSC0021983
agattatgttgt

SEQ ID NO: 306396 - DNA, 12 bp, Artificial Sequence
  Oligonucleotide primer for the detection of SNP TSC0021984
tacaaaaccaaa

SEQ ID NO: 306397 - DNA, 12 bp, Artificial Sequence
  Oligonucleotide primer for the detection of SNP TSC0021984
taaataattagt

SEQ ID NO: 306398 - DNA, 12 bp, Artificial Sequence
  Oligonucleotide primer for the detection of SNP TSC0021984
caaataattaat

SEQ ID NO: 306399 - DNA, 12 bp, Artificial Sequence
  Oligonucleotide primer for the detection of SNP TSC0021984
tgtagaattaga

SEQ ID NO: 306400 - DNA, 12 bp, Artificial Sequence
  Oligonucleotide primer for the detection of SNP TSC0021985
taactataaacc

SEQ ID NO: 306401 - DNA, 12 bp, Artificial Sequence
  Oligonucleotide primer for the detection of SNP TSC0021985
ttatgtttatgg

SEQ ID NO: 306402 - DNA, 12 bp, Artificial Sequence
  Oligonucleotide primer for the detection of SNP TSC0021985
tcatacccataa

SEQ ID NO: 306403 - DNA, 12 bp, Artificial Sequence
  Oligonucleotide primer for the detection of SNP TSC0021985
tgattgtgggtt

SEQ ID NO: 306404 - DNA, 12 bp, Artificial Sequence
  Oligonucleotide primer for the detection of SNP TSC0021989
aaattcaaaata

SEQ ID NO: 306405 - DNA, 12 bp, Artificial Sequence
  Oligonucleotide primer for the detection of SNP TSC0021989
tatttggaattt

SEQ ID NO: 306406 - DNA, 12 bp, Artificial Sequence
  Oligonucleotide primer for the detection of SNP TSC0021990
atgaggtttatt

SEQ ID NO: 306407 - DNA, 12 bp, Artificial Sequence
  Oligonucleotide primer for the detection of SNP TSC0021990
ataaaatttatc

SEQ ID NO: 306408 - DNA, 12 bp, Artificial Sequence
  Oligonucleotide primer for the detection of SNP TSC0021990
taatttggttaa

SEQ ID NO: 306409 - DNA, 12 bp, Artificial Sequence
  Oligonucleotide primer for the detection of SNP TSC0021992
tccttaaaaatc

SEQ ID NO: 306410 - DNA, 12 bp, Artificial Sequence
  Oligonucleotide primer for the detection of SNP TSC0021992
tttttataattg

SEQ ID NO: 306411 - DNA, 12 bp, Artificial Sequence
  Oligonucleotide primer for the detection of SNP TSC0021992
tctttacaacta

SEQ ID NO: 306412 - DNA, 12 bp, Artificial Sequence
  Oligonucleotide primer for the detection of SNP TSC0021992
tttttgggagtt

SEQ ID NO: 306413 - DNA, 12 bp, Artificial Sequence
  Oligonucleotide primer for the detection of SNP TSC0021998
ccctacccatac

SEQ ID NO: 306414 - DNA, 12 bp, Artificial Sequence
  Oligonucleotide primer for the detection of SNP TSC0021998
aggagaatgtaa

SEQ ID NO: 306415 - DNA, 12 bp, Artificial Sequence
  Oligonucleotide primer for the detection of SNP TSC0022000
aaaaaaaccaca

SEQ ID NO: 306416 - DNA, 12 bp, Artificial Sequence
  Oligonucleotide primer for the detection of SNP TSC0022000
ttttataagtgg

SEQ ID NO: 306417 - DNA, 12 bp, Artificial Sequence
  Oligonucleotide primer for the detection of SNP TSC0022000
ttttataagcgg

SEQ ID NO: 306418 - DNA, 12 bp, Artificial Sequence
  Oligonucleotide primer for the detection of SNP TSC0022000
ttttataaacaa

SEQ ID NO: 306419 - DNA, 12 bp, Artificial Sequence
  Oligonucleotide primer for the detection of SNP TSC0022000
ttttataaacga

SEQ ID NO: 306420 - DNA, 12 bp, Artificial Sequence
  Oligonucleotide primer for the detection of SNP TSC0022000
taggaggattat

SEQ ID NO: 306421 - DNA, 12 bp, Artificial Sequence
  Oligonucleotide primer for the detection of SNP TSC0022001
ctacccaaacta

SEQ ID NO: 306422 - DNA, 12 bp, Artificial Sequence
  Oligonucleotide primer for the detection of SNP TSC0022001
agagggtttggt

SEQ ID NO: 306423 - DNA, 12 bp, Artificial Sequence
  Oligonucleotide primer for the detection of SNP TSC0022006
ttttaaaattca

SEQ ID NO: 306424 - DNA, 12 bp, Artificial Sequence
  Oligonucleotide primer for the detection of SNP TSC0022006
gaaatttttaaa

SEQ ID NO: 306425 - DNA, 12 bp, Artificial Sequence
  Oligonucleotide primer for the detection of SNP TSC0022010
ctacatataaaa

SEQ ID NO: 306426 - DNA, 12 bp, Artificial Sequence
  Oligonucleotide primer for the detection of SNP TSC0022010
ctacgtataaaa

SEQ ID NO: 306427 - DNA, 12 bp, Artificial Sequence
  Oligonucleotide primer for the detection of SNP TSC0022010
gttaggtaggtt

SEQ ID NO: 306428 - DNA, 12 bp, Artificial Sequence
  Oligonucleotide primer for the detection of SNP TSC0022010
accaaacaaacc

SEQ ID NO: 306429 - DNA, 12 bp, Artificial Sequence
  Oligonucleotide primer for the detection of SNP TSC0022010
ttgtgtgtggag

SEQ ID NO: 306430 - DNA, 12 bp, Artificial Sequence
  Oligonucleotide primer for the detection of SNP TSC0022010
ttgcgtgtggag

SEQ ID NO: 306431 - DNA, 12 bp, Artificial Sequence
  Oligonucleotide primer for the detection of SNP TSC0022011
atttctcaccct

SEQ ID NO: 306432 - DNA, 12 bp, Artificial Sequence
  Oligonukleotid-Primer
ggatttttgggt

SEQ ID NO: 306433 - DNA, 12 bp, Artificial Sequence
  Oligonucleotide primer for the detection of SNP TSC0022011
aaacttttaaac

SEQ ID NO: 306434 - DNA, 12 bp, Artificial Sequence
  Oligonucleotide primer for the detection of SNP TSC0022012
cctatcacaaaa

SEQ ID NO: 306435 - DNA, 12 bp, Artificial Sequence
  Oligonucleotide primer for the detection of SNP TSC0022012
tcattattctaa

SEQ ID NO: 306436 - DNA, 12 bp, Artificial Sequence
  Oligonucleotide primer for the detection of SNP TSC0022012
tttgttataaag

SEQ ID NO: 306437 - DNA, 12 bp, Artificial Sequence
  Oligonucleotide primer for the detection of SNP TSC0022017
ataactcacacc

SEQ ID NO: 306438 - DNA, 12 bp, Artificial Sequence
  Oligonucleotide primer for the detection of SNP TSC0022017
ataactcacgcc

SEQ ID NO: 306439 - DNA, 12 bp, Artificial Sequence
  Oligonucleotide primer for the detection of SNP TSC0022017
ataggtgtgatt

SEQ ID NO: 306440 - DNA, 12 bp, Artificial Sequence
  Oligonucleotide primer for the detection of SNP TSC0022017
ataggcgtgatt

SEQ ID NO: 306441 - DNA, 12 bp, Artificial Sequence
  Oligonucleotide primer for the detection of SNP TSC0022017
caaacataatta

SEQ ID NO: 306442 - DNA, 12 bp, Artificial Sequence
  Oligonucleotide primer for the detection of SNP TSC0022017
caaacgtaatta

SEQ ID NO: 306443 - DNA, 12 bp, Artificial Sequence
  Oligonucleotide primer for the detection of SNP TSC0022017
tggtttatgttt

SEQ ID NO: 306444 - DNA, 12 bp, Artificial Sequence
  Oligonucleotide primer for the detection of SNP TSC0022017
tggtttacgttt

SEQ ID NO: 306445 - DNA, 12 bp, Artificial Sequence
  Oligonucleotide primer for the detection of SNP TSC0022023
ggaatataattg

SEQ ID NO: 306446 - DNA, 12 bp, Artificial Sequence
  Oligonucleotide primer for the detection of SNP TSC0022023
aaaatacaacta

SEQ ID NO: 306447 - DNA, 12 bp, Artificial Sequence
  Oligonucleotide primer for the detection of SNP TSC0022023
ggaagttgtatt

SEQ ID NO: 306448 - DNA, 12 bp, Artificial Sequence
  Oligonucleotide primer for the detection of SNP TSC0022024
aaaacctctact

SEQ ID NO: 306449 - DNA, 12 bp, Artificial Sequence
  Oligonucleotide primer for the detection of SNP TSC0022024
gttatgggtgga

SEQ ID NO: 306450 - DNA, 12 bp, Artificial Sequence
  Oligonucleotide primer for the detection of SNP TSC0022025
ccacctctatcc

SEQ ID NO: 306451 - DNA, 12 bp, Artificial Sequence
  Oligonucleotide primer for the detection of SNP TSC0022025
ccgcctctatcc

SEQ ID NO: 306452 - DNA, 12 bp, Artificial Sequence
  Oligonucleotide primer for the detection of SNP TSC0022025
gagggtagggga

SEQ ID NO: 306453 - DNA, 12 bp, Artificial Sequence
  Oligonucleotide primer for the detection of SNP TSC0022025
tcgtttttgttt

SEQ ID NO: 306454 - DNA, 12 bp, Artificial Sequence
  Oligonucleotide primer for the detection of SNP TSC0022027
attgttttgttt

SEQ ID NO: 306455 - DNA, 12 bp, Artificial Sequence
  Oligonucleotide primer for the detection of SNP TSC0022027
actattttatct

SEQ ID NO: 306456 - DNA, 12 bp, Artificial Sequence
  Oligonucleotide primer for the detection of SNP TSC0022027
taaaaaaattta

SEQ ID NO: 306457 - DNA, 12 bp, Artificial Sequence
  Oligonucleotide primer for the detection of SNP TSC0022032
ctcctccttaac

SEQ ID NO: 306458 - DNA, 12 bp, Artificial Sequence
  Oligonucleotide primer for the detection of SNP TSC0022032
agggagaggtta

SEQ ID NO: 306459 - DNA, 12 bp, Artificial Sequence
  Oligonucleotide primer for the detection of SNP TSC0022033
ttcccaacaata

SEQ ID NO: 306460 - DNA, 12 bp, Artificial Sequence
  Oligonucleotide primer for the detection of SNP TSC0022033
atgatgaatata

SEQ ID NO: 306461 - DNA, 12 bp, Artificial Sequence
  Oligonucleotide primer for the detection of SNP TSC0022033
acgatgaatata

SEQ ID NO: 306462 - DNA, 12 bp, Artificial Sequence
  Oligonucleotide primer for the detection of SNP TSC0022033
acaataaatata

SEQ ID NO: 306463 - DNA, 12 bp, Artificial Sequence
  Oligonucleotide primer for the detection of SNP TSC0022033
acgataaatata

SEQ ID NO: 306464 - DNA, 12 bp, Artificial Sequence
  Oligonucleotide primer for the detection of SNP TSC0022033
tttttaatagta

SEQ ID NO: 306465 - DNA, 12 bp, Artificial Sequence
  Oligonucleotide primer for the detection of SNP TSC0022034
ctccaaataaat

SEQ ID NO: 306466 - DNA, 12 bp, Artificial Sequence
  Oligonucleotide primer for the detection of SNP TSC0022034
aatgtaagatag

SEQ ID NO: 306467 - DNA, 12 bp, Artificial Sequence
  Oligonucleotide primer for the detection of SNP TSC0022035
caacaactataa

SEQ ID NO: 306468 - DNA, 12 bp, Artificial Sequence
  Oligonucleotide primer for the detection of SNP TSC0022035
ataaatataatt

SEQ ID NO: 306469 - DNA, 12 bp, Artificial Sequence
  Oligonucleotide primer for the detection of SNP TSC0022035
ataaatataatc

SEQ ID NO: 306470 - DNA, 12 bp, Artificial Sequence
  Oligonucleotide primer for the detection of SNP TSC0022035
aataaacataat

SEQ ID NO: 306471 - DNA, 12 bp, Artificial Sequence
  Oligonucleotide primer for the detection of SNP TSC0022035
tagtaattataa

SEQ ID NO: 306472 - DNA, 12 bp, Artificial Sequence
  Oligonucleotide primer for the detection of SNP TSC0022036
ctaaattatatc

SEQ ID NO: 306473 - DNA, 12 bp, Artificial Sequence
  Oligonucleotide primer for the detection of SNP TSC0022037
cttcctaacttc

SEQ ID NO: 306474 - DNA, 12 bp, Artificial Sequence
  Oligonucleotide primer for the detection of SNP TSC0022037
ggatgaaaatag

SEQ ID NO: 306475 - DNA, 12 bp, Artificial Sequence
  Oligonucleotide primer for the detection of SNP TSC0022038
tatcccaaacta

SEQ ID NO: 306476 - DNA, 12 bp, Artificial Sequence
  Oligonucleotide primer for the detection of SNP TSC0022038
tcccaacttctc

SEQ ID NO: 306477 - DNA, 12 bp, Artificial Sequence
  Oligonucleotide primer for the detection of SNP TSC0022038
tgttttaaattg

SEQ ID NO: 306478 - DNA, 12 bp, Artificial Sequence
  Oligonucleotide primer for the detection of SNP TSC0022039
ttttttgttaga

SEQ ID NO: 306479 - DNA, 12 bp, Artificial Sequence
  Oligonucleotide primer for the detection of SNP TSC0022039
ttctctatcaaa

SEQ ID NO: 306480 - DNA, 12 bp, Artificial Sequence
  Oligonucleotide primer for the detection of SNP TSC0022039
ttaaaaaagagt

SEQ ID NO: 306481 - DNA, 12 bp, Artificial Sequence
  Oligonucleotide primer for the detection of SNP TSC0022045
tttatatgtgag

SEQ ID NO: 306482 - DNA, 12 bp, Artificial Sequence
  Oligonucleotide primer for the detection of SNP TSC0022046
aaaataaaactc

SEQ ID NO: 306483 - DNA, 12 bp, Artificial Sequence
  Oligonucleotide primer for the detection of SNP TSC0022046
agagtgagattt

SEQ ID NO: 306484 - DNA, 12 bp, Artificial Sequence
  Oligonucleotide primer for the detection of SNP TSC0022049
ccctaacattca

SEQ ID NO: 306485 - DNA, 12 bp, Artificial Sequence
  Oligonucleotide primer for the detection of SNP TSC0022049
aagtttatattt

SEQ ID NO: 306486 - DNA, 12 bp, Artificial Sequence
  Oligonucleotide primer for the detection of SNP TSC0022049
aaatccacactc

SEQ ID NO: 306487 - DNA, 12 bp, Artificial Sequence
  Oligonucleotide primer for the detection of SNP TSC0022049
ttttggtattta

SEQ ID NO: 306488 - DNA, 12 bp, Artificial Sequence
  Oligonucleotide primer for the detection of SNP TSC0022050
tactattcaaaa

SEQ ID NO: 306489 - DNA, 12 bp, Artificial Sequence
  Oligonucleotide primer for the detection of SNP TSC0022050
gaattttggttt

SEQ ID NO: 306490 - DNA, 12 bp, Artificial Sequence
  Oligonucleotide primer for the detection of SNP TSC0022050
gaattttggttc

SEQ ID NO: 306491 - DNA, 12 bp, Artificial Sequence
  Oligonucleotide primer for the detection of SNP TSC0022050
aaattttaactc

SEQ ID NO: 306492 - DNA, 12 bp, Artificial Sequence
  Oligonucleotide primer for the detection of SNP TSC0022050
ttattatttagg

SEQ ID NO: 306493 - DNA, 12 bp, Artificial Sequence
  Oligonucleotide primer for the detection of SNP TSC0022051
caccataaaact

SEQ ID NO: 306494 - DNA, 12 bp, Artificial Sequence
  Oligonucleotide primer for the detection of SNP TSC0022051
tggaatgtagta

SEQ ID NO: 306495 - DNA, 12 bp, Artificial Sequence
  Oligonucleotide primer for the detection of SNP TSC0022052
aactactccact

SEQ ID NO: 306496 - DNA, 12 bp, Artificial Sequence
  Oligonucleotide primer for the detection of SNP TSC0022052
tgggtgtatttg

SEQ ID NO: 306497 - DNA, 12 bp, Artificial Sequence
  Oligonucleotide primer for the detection of SNP TSC0022053
atattatctttt

SEQ ID NO: 306498 - DNA, 12 bp, Artificial Sequence
  Oligonucleotide primer for the detection of SNP TSC0022053
gagttaaagtta

SEQ ID NO: 306499 - DNA, 12 bp, Artificial Sequence
  Oligonucleotide primer for the detection of SNP TSC0022054
caaattaaataa

SEQ ID NO: 306500 - DNA, 12 bp, Artificial Sequence
  Oligonucleotide primer for the detection of SNP TSC0022054
gtgtgggtaagg

SEQ ID NO: 306501 - DNA, 12 bp, Artificial Sequence
  Oligonucleotide primer for the detection of SNP TSC0022055
attctaactttc

SEQ ID NO: 306502 - DNA, 12 bp, Artificial Sequence
  Oligonucleotide primer for the detection of SNP TSC0022055
aggttggagata

SEQ ID NO: 306503 - DNA, 12 bp, Artificial Sequence
  Oligonucleotide primer for the detection of SNP TSC0022056
tctaactttcaa

SEQ ID NO: 306504 - DNA, 12 bp, Artificial Sequence
  Oligonucleotide primer for the detection of SNP TSC0022056
ggagatatttat

SEQ ID NO: 306505 - DNA, 12 bp, Artificial Sequence
  Oligonucleotide primer for the detection of SNP TSC0022056
taaaaataccta

SEQ ID NO: 306506 - DNA, 12 bp, Artificial Sequence
  Oligonucleotide primer for the detection of SNP TSC0022057
atcaacaacaac

SEQ ID NO: 306507 - DNA, 12 bp, Artificial Sequence
  Oligonucleotide primer for the detection of SNP TSC0022057
ggtggaatttgg

SEQ ID NO: 306508 - DNA, 12 bp, Artificial Sequence
  Oligonucleotide primer for the detection of SNP TSC0022057
gttagtagtaat

SEQ ID NO: 306509 - DNA, 12 bp, Artificial Sequence
  Oligonucleotide primer for the detection of SNP TSC0022058
tttcaacaaaac

SEQ ID NO: 306510 - DNA, 12 bp, Artificial Sequence
  Oligonucleotide primer for the detection of SNP TSC0022058
tttcaacgaaac

SEQ ID NO: 306511 - DNA, 12 bp, Artificial Sequence
  Oligonucleotide primer for the detection of SNP TSC0022058
gttttaattttg

SEQ ID NO: 306512 - DNA, 12 bp, Artificial Sequence
  Oligonucleotide primer for the detection of SNP TSC0022058
tcccaactctaa

SEQ ID NO: 306513 - DNA, 12 bp, Artificial Sequence
  Oligonucleotide primer for the detection of SNP TSC0022058
tttaacggagtt

SEQ ID NO: 306514 - DNA, 12 bp, Artificial Sequence
  Oligonucleotide primer for the detection of SNP TSC0022059
attactacataa

SEQ ID NO: 306515 - DNA, 12 bp, Artificial Sequence
  Oligonucleotide primer for the detection of SNP TSC0022059
ttagtatttaga

SEQ ID NO: 306516 - DNA, 12 bp, Artificial Sequence
  Oligonucleotide primer for the detection of SNP TSC0022059
taatattcaaaa

SEQ ID NO: 306517 - DNA, 12 bp, Artificial Sequence
  Oligonucleotide primer for the detection of SNP TSC0022059
attgttatatag

SEQ ID NO: 306518 - DNA, 12 bp, Artificial Sequence
  Oligonucleotide primer for the detection of SNP TSC0022061
attctcctaaac

SEQ ID NO: 306519 - DNA, 12 bp, Artificial Sequence
  Oligonucleotide primer for the detection of SNP TSC0022063
ataattttctcc

SEQ ID NO: 306520 - DNA, 12 bp, Artificial Sequence
  Oligonucleotide primer for the detection of SNP TSC0022063
attattttaaag

SEQ ID NO: 306521 - DNA, 12 bp, Artificial Sequence
  Oligonucleotide primer for the detection of SNP TSC0022063
attaccttaaaa

SEQ ID NO: 306522 - DNA, 12 bp, Artificial Sequence
  Oligonucleotide primer for the detection of SNP TSC0022063
ataatttttttt

SEQ ID NO: 306523 - DNA, 12 bp, Artificial Sequence
  Oligonucleotide primer for the detection of SNP TSC0022064
cacatatatttt

SEQ ID NO: 306524 - DNA, 12 bp, Artificial Sequence
  Oligonucleotide primer for the detection of SNP TSC0022064
tgtgtggtgtaa

SEQ ID NO: 306525 - DNA, 12 bp, Artificial Sequence
  Oligonucleotide primer for the detection of SNP TSC0022065
aaactctaaaac

SEQ ID NO: 306526 - DNA, 12 bp, Artificial Sequence
  Oligonucleotide primer for the detection of SNP TSC0022065
tgtttgaggaat

SEQ ID NO: 306527 - DNA, 12 bp, Artificial Sequence
  Oligonucleotide primer for the detection of SNP TSC0022065
acttaaaaaata

SEQ ID NO: 306528 - DNA, 12 bp, Artificial Sequence
  Oligonucleotide primer for the detection of SNP TSC0022065
agattttgggat

SEQ ID NO: 306529 - DNA, 12 bp, Artificial Sequence
  Oligonucleotide primer for the detection of SNP TSC0022065
agattttgggac

SEQ ID NO: 306530 - DNA, 12 bp, Artificial Sequence
  Oligonucleotide primer for the detection of SNP TSC0022068
caattaccacat

SEQ ID NO: 306531 - DNA, 12 bp, Artificial Sequence
  Oligonucleotide primer for the detection of SNP TSC0022068
caattaccacgt

SEQ ID NO: 306532 - DNA, 12 bp, Artificial Sequence
  Oligonucleotide primer for the detection of SNP TSC0022068
caattaccgcat

SEQ ID NO: 306533 - DNA, 12 bp, Artificial Sequence
  Oligonukleotid-Primer
caattaccgcgt

SEQ ID NO: 306534 - DNA, 12 bp, Artificial Sequence
  Oligonucleotide primer for the detection of SNP TSC0022068
tggagggtaggg

SEQ ID NO: 306535 - DNA, 12 bp, Artificial Sequence
  Oligonucleotide primer for the detection of SNP TSC0022068
cggagggtaggg

SEQ ID NO: 306536 - DNA, 12 bp, Artificial Sequence
  Oligonucleotide primer for the detection of SNP TSC0022068
cgaaaaacaaaa

SEQ ID NO: 306537 - DNA, 12 bp, Artificial Sequence
  Oligonucleotide primer for the detection of SNP TSC0022068
taattgttgtgt

SEQ ID NO: 306538 - DNA, 12 bp, Artificial Sequence
  Oligonucleotide primer for the detection of SNP TSC0022068
taattgtcgtgt

SEQ ID NO: 306539 - DNA, 12 bp, Artificial Sequence
  Oligonucleotide primer for the detection of SNP TSC0022068
taattgttgcgt

SEQ ID NO: 306540 - DNA, 12 bp, Artificial Sequence
  Oligonucleotide primer for the detection of SNP TSC0022068
taattgtcgcgt

SEQ ID NO: 306541 - DNA, 12 bp, Artificial Sequence
  Oligonucleotide primer for the detection of SNP TSC0022069
ccctaaaatcaa

SEQ ID NO: 306542 - DNA, 12 bp, Artificial Sequence
  Oligonucleotide primer for the detection of SNP TSC0022069
ccctaaaatcga

SEQ ID NO: 306543 - DNA, 12 bp, Artificial Sequence
  Oligonucleotide primer for the detection of SNP TSC0022069
tgtggtaattgt

SEQ ID NO: 306544 - DNA, 12 bp, Artificial Sequence
  Oligonucleotide primer for the detection of SNP TSC0022069
cgtggtaattgt

SEQ ID NO: 306545 - DNA, 12 bp, Artificial Sequence
  Oligonucleotide primer for the detection of SNP TSC0022069
tgcggtaattgt

SEQ ID NO: 306546 - DNA, 12 bp, Artificial Sequence
  Oligonucleotide primer for the detection of SNP TSC0022069
cgcggtaattgt

SEQ ID NO: 306547 - DNA, 12 bp, Artificial Sequence
  Oligonucleotide primer for the detection of SNP TSC0022069
tgtggtaattgc

SEQ ID NO: 306548 - DNA, 12 bp, Artificial Sequence
  Oligonucleotide primer for the detection of SNP TSC0022069
cgtggtaattgc

SEQ ID NO: 306549 - DNA, 12 bp, Artificial Sequence
  Oligonucleotide primer for the detection of SNP TSC0022069
tgcggtaattgc

SEQ ID NO: 306550 - DNA, 12 bp, Artificial Sequence
  Oligonucleotide primer for the detection of SNP TSC0022069
cgcggtaattgc

SEQ ID NO: 306551 - DNA, 12 bp, Artificial Sequence
  Oligonucleotide primer for the detection of SNP TSC0022069
cacaacaattac

SEQ ID NO: 306552 - DNA, 12 bp, Artificial Sequence
  Oligonucleotide primer for the detection of SNP TSC0022069
cacgacaattac

SEQ ID NO: 306553 - DNA, 12 bp, Artificial Sequence
  Oligonucleotide primer for the detection of SNP TSC0022069
cgcaacaattac

SEQ ID NO: 306554 - DNA, 12 bp, Artificial Sequence
  Oligonucleotide primer for the detection of SNP TSC0022069
cgcgacaattac

SEQ ID NO: 306555 - DNA, 12 bp, Artificial Sequence
  Oligonucleotide primer for the detection of SNP TSC0022069
ttttggggttgg

SEQ ID NO: 306556 - DNA, 12 bp, Artificial Sequence
  Oligonucleotide primer for the detection of SNP TSC0022069
ttttggggtcgg

SEQ ID NO: 306557 - DNA, 12 bp, Artificial Sequence
  Oligonucleotide primer for the detection of SNP TSC0022070
ccaaaaaacaaa

SEQ ID NO: 306558 - DNA, 12 bp, Artificial Sequence
  Oligonucleotide primer for the detection of SNP TSC0022070
ccaaaaaacgaa

SEQ ID NO: 306559 - DNA, 12 bp, Artificial Sequence
  Oligonucleotide primer for the detection of SNP TSC0022070
ccgaaaaacaaa

SEQ ID NO: 306560 - DNA, 12 bp, Artificial Sequence
  Oligonucleotide primer for the detection of SNP TSC0022070
ccgaaaaacgaa

SEQ ID NO: 306561 - DNA, 12 bp, Artificial Sequence
  Oligonucleotide primer for the detection of SNP TSC0022070
atgtagtttttt

SEQ ID NO: 306562 - DNA, 12 bp, Artificial Sequence
  Oligonucleotide primer for the detection of SNP TSC0022070
acgtagtttttt

SEQ ID NO: 306563 - DNA, 12 bp, Artificial Sequence
  Oligonucleotide primer for the detection of SNP TSC0022070
aaacacaacctc

SEQ ID NO: 306564 - DNA, 12 bp, Artificial Sequence
  Oligonucleotide primer for the detection of SNP TSC0022070
aaacgcaacctc

SEQ ID NO: 306565 - DNA, 12 bp, Artificial Sequence
  Oligonucleotide primer for the detection of SNP TSC0022070
ttggggagtggg

SEQ ID NO: 306566 - DNA, 12 bp, Artificial Sequence
  Oligonucleotide primer for the detection of SNP TSC0022070
tcggggagtggg

SEQ ID NO: 306567 - DNA, 12 bp, Artificial Sequence
  Oligonucleotide primer for the detection of SNP TSC0022070
ttggggagcggg

SEQ ID NO: 306568 - DNA, 12 bp, Artificial Sequence
  Oligonucleotide primer for the detection of SNP TSC0022070
tcggggagcggg

SEQ ID NO: 306569 - DNA, 12 bp, Artificial Sequence
  Oligonucleotide primer for the detection of SNP TSC0022071
ccaatccgaata

SEQ ID NO: 306570 - DNA, 12 bp, Artificial Sequence
  Oligonucleotide primer for the detection of SNP TSC0022071
ccgatccaaata

SEQ ID NO: 306571 - DNA, 12 bp, Artificial Sequence
  Oligonucleotide primer for the detection of SNP TSC0022071
ccgatccgaata

SEQ ID NO: 306572 - DNA, 12 bp, Artificial Sequence
  Oligonucleotide primer for the detection of SNP TSC0022071
attttgaggttt

SEQ ID NO: 306573 - DNA, 12 bp, Artificial Sequence
  Oligonucleotide primer for the detection of SNP TSC0022071
atttcgaggttt

SEQ ID NO: 306574 - DNA, 12 bp, Artificial Sequence
  Oligonucleotide primer for the detection of SNP TSC0022071
aaccccaaaacc

SEQ ID NO: 306575 - DNA, 12 bp, Artificial Sequence
  Oligonucleotide primer for the detection of SNP TSC0022071
aaccccgaaacc

SEQ ID NO: 306576 - DNA, 12 bp, Artificial Sequence
  Oligonucleotide primer for the detection of SNP TSC0022071
gaccccaaaacc

SEQ ID NO: 306577 - DNA, 12 bp, Artificial Sequence
  Oligonucleotide primer for the detection of SNP TSC0022071
gaccccgaaacc

SEQ ID NO: 306578 - DNA, 12 bp, Artificial Sequence
  Oligonucleotide primer for the detection of SNP TSC0022071
ttggtttgggtg

SEQ ID NO: 306579 - DNA, 12 bp, Artificial Sequence
  Oligonucleotide primer for the detection of SNP TSC0022071
tcggtttgggtg

SEQ ID NO: 306580 - DNA, 12 bp, Artificial Sequence
  Oligonucleotide primer for the detection of SNP TSC0022071
ttggttcgggtg

SEQ ID NO: 306581 - DNA, 12 bp, Artificial Sequence
  Oligonucleotide primer for the detection of SNP TSC0022071
tcggttcgggtg

SEQ ID NO: 306582 - DNA, 12 bp, Artificial Sequence
  Oligonucleotide primer for the detection of SNP TSC0022072
tgttaatatggt

SEQ ID NO: 306583 - DNA, 12 bp, Artificial Sequence
  Oligonucleotide primer for the detection of SNP TSC0022072
taccaacataac

SEQ ID NO: 306584 - DNA, 12 bp, Artificial Sequence
  Oligonucleotide primer for the detection of SNP TSC0022072
tagtagaggtgg

SEQ ID NO: 306585 - DNA, 12 bp, Artificial Sequence
  Oligonucleotide primer for the detection of SNP TSC0022073
aaaaataatatt

SEQ ID NO: 306586 - DNA, 12 bp, Artificial Sequence
  Oligonucleotide primer for the detection of SNP TSC0022073
tttatagtgata

SEQ ID NO: 306587 - DNA, 12 bp, Artificial Sequence
  Oligonucleotide primer for the detection of SNP TSC0022077
tacctaatacaa

SEQ ID NO: 306588 - DNA, 12 bp, Artificial Sequence
  Oligonucleotide primer for the detection of SNP TSC0022077
tacacaacattt

SEQ ID NO: 306589 - DNA, 12 bp, Artificial Sequence
  Oligonucleotide primer for the detection of SNP TSC0022077
tatttagtataa

SEQ ID NO: 306590 - DNA, 12 bp, Artificial Sequence
  Oligonucleotide primer for the detection of SNP TSC0022078
actcactacaaa

SEQ ID NO: 306591 - DNA, 12 bp, Artificial Sequence
  Oligonucleotide primer for the detection of SNP TSC0022078
ggtatgaatttg

SEQ ID NO: 306592 - DNA, 12 bp, Artificial Sequence
  Oligonucleotide primer for the detection of SNP TSC0022078
aacataaaccta

SEQ ID NO: 306593 - DNA, 12 bp, Artificial Sequence
  Oligonucleotide primer for the detection of SNP TSC0022078
gtttattgtaag

SEQ ID NO: 306594 - DNA, 12 bp, Artificial Sequence
  Oligonucleotide primer for the detection of SNP TSC0022080
ccttctccaccc

SEQ ID NO: 306595 - DNA, 12 bp, Artificial Sequence
  Oligonucleotide primer for the detection of SNP TSC0022080
atggaaggtttt

SEQ ID NO: 306596 - DNA, 12 bp, Artificial Sequence
  Oligonucleotide primer for the detection of SNP TSC0022080
acggaaggtttt

SEQ ID NO: 306597 - DNA, 12 bp, Artificial Sequence
  Oligonucleotide primer for the detection of SNP TSC0022080
acaaaaaacctt

SEQ ID NO: 306598 - DNA, 12 bp, Artificial Sequence
  Oligonucleotide primer for the detection of SNP TSC0022080
acgaaaaacctt

SEQ ID NO: 306599 - DNA, 12 bp, Artificial Sequence
  Oligonucleotide primer for the detection of SNP TSC0022081
aaaaactccaac

SEQ ID NO: 306600 - DNA, 12 bp, Artificial Sequence
  Oligonucleotide primer for the detection of SNP TSC0022081
agggattttaat

SEQ ID NO: 306601 - DNA, 12 bp, Artificial Sequence
  Oligonucleotide primer for the detection of SNP TSC0022082
cacaacaacccc

SEQ ID NO: 306602 - DNA, 12 bp, Artificial Sequence
  Oligonucleotide primer for the detection of SNP TSC0022082
ttatgagggtga

SEQ ID NO: 306603 - DNA, 12 bp, Artificial Sequence
  Oligonucleotide primer for the detection of SNP TSC0022082
ttatgagggcga

SEQ ID NO: 306604 - DNA, 12 bp, Artificial Sequence
  Oligonucleotide primer for the detection of SNP TSC0022084
tcacaaatttaa

SEQ ID NO: 306605 - DNA, 12 bp, Artificial Sequence
  Oligonucleotide primer for the detection of SNP TSC0022084
ggttttgtagat

SEQ ID NO: 306606 - DNA, 12 bp, Artificial Sequence
  Oligonucleotide primer for the detection of SNP TSC0022084
accctataaata

SEQ ID NO: 306607 - DNA, 12 bp, Artificial Sequence
  Oligonucleotide primer for the detection of SNP TSC0022084
ttataaatttaa

SEQ ID NO: 306608 - DNA, 12 bp, Artificial Sequence
  Oligonucleotide primer for the detection of SNP TSC0022090
tctatcaacatt

SEQ ID NO: 306609 - DNA, 12 bp, Artificial Sequence
  Oligonucleotide primer for the detection of SNP TSC0022090
tctatcaacgtt

SEQ ID NO: 306610 - DNA, 12 bp, Artificial Sequence
  Oligonucleotide primer for the detection of SNP TSC0022090
ttggagttagga

SEQ ID NO: 306611 - DNA, 12 bp, Artificial Sequence
  Oligonucleotide primer for the detection of SNP TSC0022090
tttattaatgtt

SEQ ID NO: 306612 - DNA, 12 bp, Artificial Sequence
  Oligonucleotide primer for the detection of SNP TSC0022090
tttattaacgtt

SEQ ID NO: 306613 - DNA, 12 bp, Artificial Sequence
  Oligonucleotide primer for the detection of SNP TSC0022093
acacaataaaca

SEQ ID NO: 306614 - DNA, 12 bp, Artificial Sequence
  Oligonucleotide primer for the detection of SNP TSC0022093
attggtatttat

SEQ ID NO: 306615 - DNA, 12 bp, Artificial Sequence
  Oligonucleotide primer for the detection of SNP TSC0022093
atcggtatttat

SEQ ID NO: 306616 - DNA, 12 bp, Artificial Sequence
  Oligonucleotide primer for the detection of SNP TSC0022093
accaacattcac

SEQ ID NO: 306617 - DNA, 12 bp, Artificial Sequence
  Oligonucleotide primer for the detection of SNP TSC0022093
accgacattcac

SEQ ID NO: 306618 - DNA, 12 bp, Artificial Sequence
  Oligonucleotide primer for the detection of SNP TSC0022093
atatagtgggta

SEQ ID NO: 306619 - DNA, 12 bp, Artificial Sequence
  Oligonucleotide primer for the detection of SNP TSC0022094
aacctataaccc

SEQ ID NO: 306620 - DNA, 12 bp, Artificial Sequence
  Oligonucleotide primer for the detection of SNP TSC0022094
taggagggatgg

SEQ ID NO: 306621 - DNA, 12 bp, Artificial Sequence
  Oligonucleotide primer for the detection of SNP TSC0022095
tataactataaa

SEQ ID NO: 306622 - DNA, 12 bp, Artificial Sequence
  Oligonucleotide primer for the detection of SNP TSC0022095
cctccacccaca

SEQ ID NO: 306623 - DNA, 12 bp, Artificial Sequence
  Oligonucleotide primer for the detection of SNP TSC0022095
tgtggttgtggg

SEQ ID NO: 306624 - DNA, 12 bp, Artificial Sequence
  Oligonucleotide primer for the detection of SNP TSC0022096
acaaaaaacctc

SEQ ID NO: 306625 - DNA, 12 bp, Artificial Sequence
  Oligonucleotide primer for the detection of SNP TSC0022096
gtaagttggggg

SEQ ID NO: 306626 - DNA, 12 bp, Artificial Sequence
  Oligonucleotide primer for the detection of SNP TSC0022097
ccatctaaatta

SEQ ID NO: 306627 - DNA, 12 bp, Artificial Sequence
  Oligonucleotide primer for the detection of SNP TSC0022097
aatttaggtaat

SEQ ID NO: 306628 - DNA, 12 bp, Artificial Sequence
  Oligonucleotide primer for the detection of SNP TSC0022097
aacctaaataat

SEQ ID NO: 306629 - DNA, 12 bp, Artificial Sequence
  Oligonucleotide primer for the detection of SNP TSC0022097
ttatttaggtta

SEQ ID NO: 306630 - DNA, 12 bp, Artificial Sequence
  Oligonucleotide primer for the detection of SNP TSC0022099
taccttttccaa

SEQ ID NO: 306631 - DNA, 12 bp, Artificial Sequence
  Oligonucleotide primer for the detection of SNP TSC0022099
gtagtttttagt

SEQ ID NO: 306632 - DNA, 12 bp, Artificial Sequence
  Oligonucleotide primer for the detection of SNP TSC0022099
caacctctaata

SEQ ID NO: 306633 - DNA, 12 bp, Artificial Sequence
  Oligonucleotide primer for the detection of SNP TSC0022100
ctcaaattcact

SEQ ID NO: 306634 - DNA, 12 bp, Artificial Sequence
  Oligonucleotide primer for the detection of SNP TSC0022100
gtattttttgga

SEQ ID NO: 306635 - DNA, 12 bp, Artificial Sequence
  Oligonucleotide primer for the detection of SNP TSC0022100
gtatttttcgga

SEQ ID NO: 306636 - DNA, 12 bp, Artificial Sequence
  Oligonucleotide primer for the detection of SNP TSC0022101
aataacttattc

SEQ ID NO: 306637 - DNA, 12 bp, Artificial Sequence
  Oligonucleotide primer for the detection of SNP TSC0022101
agagaggtttta

SEQ ID NO: 306638 - DNA, 12 bp, Artificial Sequence
  Oligonucleotide primer for the detection of SNP TSC0022102
taaaaaaacccc

SEQ ID NO: 306639 - DNA, 12 bp, Artificial Sequence
  Oligonucleotide primer for the detection of SNP TSC0022102
ggaagatgttga

SEQ ID NO: 306640 - DNA, 12 bp, Artificial Sequence
  Oligonucleotide primer for the detection of SNP TSC0022103
agtatgtgtttt

SEQ ID NO: 306641 - DNA, 12 bp, Artificial Sequence
  Oligonucleotide primer for the detection of SNP TSC0022103
aatatatacctt

SEQ ID NO: 306642 - DNA, 12 bp, Artificial Sequence
  Oligonucleotide primer for the detection of SNP TSC0022103
agtttgggaata

SEQ ID NO: 306643 - DNA, 12 bp, Artificial Sequence
  Oligonucleotide primer for the detection of SNP TSC0022105
tattcttataat

SEQ ID NO: 306644 - DNA, 12 bp, Artificial Sequence
  Oligonucleotide primer for the detection of SNP TSC0022105
tgtgtgaattta

SEQ ID NO: 306645 - DNA, 12 bp, Artificial Sequence
  Oligonucleotide primer for the detection of SNP TSC0022105
tgtgcgaattta

SEQ ID NO: 306646 - DNA, 12 bp, Artificial Sequence
  Oligonucleotide primer for the detection of SNP TSC0022105
tatacaaactca

SEQ ID NO: 306647 - DNA, 12 bp, Artificial Sequence
  Oligonukleotid-Primer
tatacgaactca

SEQ ID NO: 306648 - DNA, 12 bp, Artificial Sequence
  Oligonucleotide primer for the detection of SNP TSC0022105
tgtttttgtgat

SEQ ID NO: 306649 - DNA, 12 bp, Artificial Sequence
  Oligonucleotide primer for the detection of SNP TSC0022106
catttacaattt

SEQ ID NO: 306650 - DNA, 12 bp, Artificial Sequence
  Oligonucleotide primer for the detection of SNP TSC0022106
catttacgattt

SEQ ID NO: 306651 - DNA, 12 bp, Artificial Sequence
  Oligonucleotide primer for the detection of SNP TSC0022106
gtaaaaaaagaa

SEQ ID NO: 306652 - DNA, 12 bp, Artificial Sequence
  Oligonucleotide primer for the detection of SNP TSC0022108
aaacaaaaattc

SEQ ID NO: 306653 - DNA, 12 bp, Artificial Sequence
  Oligonucleotide primer for the detection of SNP TSC0022108
atgtttgttggg

SEQ ID NO: 306654 - DNA, 12 bp, Artificial Sequence
  Oligonucleotide primer for the detection of SNP TSC0022109
tacaaactcctt

SEQ ID NO: 306655 - DNA, 12 bp, Artificial Sequence
  Oligonukleotid-Primer
taccattaaaaa

SEQ ID NO: 306656 - DNA, 12 bp, Artificial Sequence
  Oligonucleotide primer for the detection of SNP TSC0022110
ttccaaaattac

SEQ ID NO: 306657 - DNA, 12 bp, Artificial Sequence
  Oligonucleotide primer for the detection of SNP TSC0022110
tgttattaaaag

SEQ ID NO: 306658 - DNA, 12 bp, Artificial Sequence
  Oligonucleotide primer for the detection of SNP TSC0022111
tatattatatat

SEQ ID NO: 306659 - DNA, 12 bp, Artificial Sequence
  Oligonukleotid-Primer
aaaatctaatac

SEQ ID NO: 306660 - DNA, 12 bp, Artificial Sequence
  Oligonucleotide primer for the detection of SNP TSC0022114
tctttaaaaata

SEQ ID NO: 306661 - DNA, 12 bp, Artificial Sequence
  Oligonucleotide primer for the detection of SNP TSC0022114
tattaaattttt

SEQ ID NO: 306662 - DNA, 12 bp, Artificial Sequence
  Oligonucleotide primer for the detection of SNP TSC0022118
aggtagtgttaa

SEQ ID NO: 306663 - DNA, 12 bp, Artificial Sequence
  Oligonucleotide primer for the detection of SNP TSC0022119
ttatctaaatca

SEQ ID NO: 306664 - DNA, 12 bp, Artificial Sequence
  Oligonucleotide primer for the detection of SNP TSC0022119
tttttattgttt

SEQ ID NO: 306665 - DNA, 12 bp, Artificial Sequence
  Oligonucleotide primer for the detection of SNP TSC0022119
ttcttattactt

SEQ ID NO: 306666 - DNA, 12 bp, Artificial Sequence
  Oligonucleotide primer for the detection of SNP TSC0022119
ttatttaagtta

SEQ ID NO: 306667 - DNA, 12 bp, Artificial Sequence
  Oligonukleotid-Primer
cttttactctcc

SEQ ID NO: 306668 - DNA, 12 bp, Artificial Sequence
  Oligonucleotide primer for the detection of SNP TSC0022120
attggtaaggag

SEQ ID NO: 306669 - DNA, 12 bp, Artificial Sequence
  Oligonucleotide primer for the detection of SNP TSC0022127
cataactttctt

SEQ ID NO: 306670 - DNA, 12 bp, Artificial Sequence
  Oligonucleotide primer for the detection of SNP TSC0022127
tattgattttgg

SEQ ID NO: 306671 - DNA, 12 bp, Artificial Sequence
  Oligonucleotide primer for the detection of SNP TSC0022127
tatcgattttgg

SEQ ID NO: 306672 - DNA, 12 bp, Artificial Sequence
  Oligonucleotide primer for the detection of SNP TSC0022128
atatacctacca

SEQ ID NO: 306673 - DNA, 12 bp, Artificial Sequence
  Oligonucleotide primer for the detection of SNP TSC0022128
tttattcggttt

SEQ ID NO: 306674 - DNA, 12 bp, Artificial Sequence
  Oligonucleotide primer for the detection of SNP TSC0022128
tttatttggttc

SEQ ID NO: 306675 - DNA, 12 bp, Artificial Sequence
  Oligonucleotide primer for the detection of SNP TSC0022128
tttattcggttc

SEQ ID NO: 306676 - DNA, 12 bp, Artificial Sequence
  Oligonucleotide primer for the detection of SNP TSC0022128
cactcaacccaa

SEQ ID NO: 306677 - DNA, 12 bp, Artificial Sequence
  Oligonucleotide primer for the detection of SNP TSC0022128
cactcaacccga

SEQ ID NO: 306678 - DNA, 12 bp, Artificial Sequence
  Oligonucleotide primer for the detection of SNP TSC0022128
cactcgacccaa

SEQ ID NO: 306679 - DNA, 12 bp, Artificial Sequence
  Oligonucleotide primer for the detection of SNP TSC0022128
cactcgacccga

SEQ ID NO: 306680 - DNA, 12 bp, Artificial Sequence
  Oligonucleotide primer for the detection of SNP TSC0022128
tgtatttgttat

SEQ ID NO: 306681 - DNA, 12 bp, Artificial Sequence
  Oligonucleotide primer for the detection of SNP TSC0022129
ttttcatatact

SEQ ID NO: 306682 - DNA, 12 bp, Artificial Sequence
  Oligonucleotide primer for the detection of SNP TSC0022129
aatggtaaataa

SEQ ID NO: 306683 - DNA, 12 bp, Artificial Sequence
  Oligonucleotide primer for the detection of SNP TSC0022129
aacggtaaataa

SEQ ID NO: 306684 - DNA, 12 bp, Artificial Sequence
  Oligonucleotide primer for the detection of SNP TSC0022130
acccattcaaca

SEQ ID NO: 306685 - DNA, 12 bp, Artificial Sequence
  Oligonucleotide primer for the detection of SNP TSC0022130
acccgttcaaca

SEQ ID NO: 306686 - DNA, 12 bp, Artificial Sequence
  Oligonucleotide primer for the detection of SNP TSC0022130
tgtttgttgttt

SEQ ID NO: 306687 - DNA, 12 bp, Artificial Sequence
  Oligonucleotide primer for the detection of SNP TSC0022130
tacctattactc

SEQ ID NO: 306688 - DNA, 12 bp, Artificial Sequence
  Oligonucleotide primer for the detection of SNP TSC0022130
gtttgtttaata

SEQ ID NO: 306689 - DNA, 12 bp, Artificial Sequence
  Oligonucleotide primer for the detection of SNP TSC0022130
gttcgtttaata

SEQ ID NO: 306690 - DNA, 12 bp, Artificial Sequence
  Oligonucleotide primer for the detection of SNP TSC0022131
ccctccacttct

SEQ ID NO: 306691 - DNA, 12 bp, Artificial Sequence
  Oligonucleotide primer for the detection of SNP TSC0022131
ccctccgcttct

SEQ ID NO: 306692 - DNA, 12 bp, Artificial Sequence
  Oligonucleotide primer for the detection of SNP TSC0022131
ttttagtgagtg

SEQ ID NO: 306693 - DNA, 12 bp, Artificial Sequence
  Oligonucleotide primer for the detection of SNP TSC0022132
accccaaacccc

SEQ ID NO: 306694 - DNA, 12 bp, Artificial Sequence
  Oligonucleotide primer for the detection of SNP TSC0022132
gtataggttggg

SEQ ID NO: 306695 - DNA, 12 bp, Artificial Sequence
  Oligonucleotide primer for the detection of SNP TSC0022133
accaaactaatc

SEQ ID NO: 306696 - DNA, 12 bp, Artificial Sequence
  Oligonucleotide primer for the detection of SNP TSC0022134
acattaaccaaa

SEQ ID NO: 306697 - DNA, 12 bp, Artificial Sequence
  Oligonucleotide primer for the detection of SNP TSC0022134
gagtttaagatt

SEQ ID NO: 306698 - DNA, 12 bp, Artificial Sequence
  Oligonucleotide primer for the detection of SNP TSC0022134
aattcaaaacca

SEQ ID NO: 306699 - DNA, 12 bp, Artificial Sequence
  Oligonucleotide primer for the detection of SNP TSC0022134
ttatattggtta

SEQ ID NO: 306700 - DNA, 12 bp, Artificial Sequence
  Oligonucleotide primer for the detection of SNP TSC0022135
tacatttttttc

SEQ ID NO: 306701 - DNA, 12 bp, Artificial Sequence
  Oligonucleotide primer for the detection of SNP TSC0022135
tttcgtttttat

SEQ ID NO: 306702 - DNA, 12 bp, Artificial Sequence
  Oligonucleotide primer for the detection of SNP TSC0022135
tttcgtttttac

SEQ ID NO: 306703 - DNA, 12 bp, Artificial Sequence
  Oligonucleotide primer for the detection of SNP TSC0022135
accccgtctcta

SEQ ID NO: 306704 - DNA, 12 bp, Artificial Sequence
  Oligonucleotide primer for the detection of SNP TSC0022137
acatttacataa

SEQ ID NO: 306705 - DNA, 12 bp, Artificial Sequence
  Oligonucleotide primer for the detection of SNP TSC0022137
tttttaaacctc

SEQ ID NO: 306706 - DNA, 12 bp, Artificial Sequence
  Oligonucleotide primer for the detection of SNP TSC0022137
gtatttgtatga

SEQ ID NO: 306707 - DNA, 12 bp, Artificial Sequence
  Oligonucleotide primer for the detection of SNP TSC0022140
ataacaaaactc

SEQ ID NO: 306708 - DNA, 12 bp, Artificial Sequence
  Oligonucleotide primer for the detection of SNP TSC0022140
tttttggagaga

SEQ ID NO: 306709 - DNA, 12 bp, Artificial Sequence
  Oligonucleotide primer for the detection of SNP TSC0022141
accaatatcaca

SEQ ID NO: 306710 - DNA, 12 bp, Artificial Sequence
  Oligonucleotide primer for the detection of SNP TSC0022141
atgagtaaaatt

SEQ ID NO: 306711 - DNA, 12 bp, Artificial Sequence
  Oligonucleotide primer for the detection of SNP TSC0022141
atgagtaaaatc

SEQ ID NO: 306712 - DNA, 12 bp, Artificial Sequence
  Oligonucleotide primer for the detection of SNP TSC0022141
ttagtattatat

SEQ ID NO: 306713 - DNA, 12 bp, Artificial Sequence
  Oligonucleotide primer for the detection of SNP TSC0022144
taaatagaaata

SEQ ID NO: 306714 - DNA, 12 bp, Artificial Sequence
  Oligonucleotide primer for the detection of SNP TSC0022147
aaatacaatttc

SEQ ID NO: 306715 - DNA, 12 bp, Artificial Sequence
  Oligonucleotide primer for the detection of SNP TSC0022147
gaagggggtttg

SEQ ID NO: 306716 - DNA, 12 bp, Artificial Sequence
  Oligonucleotide primer for the detection of SNP TSC0022147
gaagggggttcg

SEQ ID NO: 306717 - DNA, 12 bp, Artificial Sequence
  Oligonucleotide primer for the detection of SNP TSC0022148
cttctacacata

SEQ ID NO: 306718 - DNA, 12 bp, Artificial Sequence
  Oligonucleotide primer for the detection of SNP TSC0022148
tatatgtgtgtt

SEQ ID NO: 306719 - DNA, 12 bp, Artificial Sequence
  Oligonucleotide primer for the detection of SNP TSC0022148
tatacgtgtgtt

SEQ ID NO: 306720 - DNA, 12 bp, Artificial Sequence
  Oligonucleotide primer for the detection of SNP TSC0022148
tacacatatatc

SEQ ID NO: 306721 - DNA, 12 bp, Artificial Sequence
  Oligonucleotide primer for the detection of SNP TSC0022148
tacacgtatatc

SEQ ID NO: 306722 - DNA, 12 bp, Artificial Sequence
  Oligonucleotide primer for the detection of SNP TSC0022149
aactatataaat

SEQ ID NO: 306723 - DNA, 12 bp, Artificial Sequence
  Oligonucleotide primer for the detection of SNP TSC0022149
ttagtattttta

SEQ ID NO: 306724 - DNA, 12 bp, Artificial Sequence
  Oligonucleotide primer for the detection of SNP TSC0022152
taactaaaacta

SEQ ID NO: 306725 - DNA, 12 bp, Artificial Sequence
  Oligonucleotide primer for the detection of SNP TSC0022152
tggggtgtgtat

SEQ ID NO: 306726 - DNA, 12 bp, Artificial Sequence
  Oligonucleotide primer for the detection of SNP TSC0022152
tagttgggatta

SEQ ID NO: 306727 - DNA, 12 bp, Artificial Sequence
  Oligonucleotide primer for the detection of SNP TSC0022153
tttctcaaaaaa

SEQ ID NO: 306728 - DNA, 12 bp, Artificial Sequence
  Oligonucleotide primer for the detection of SNP TSC0022153
atttttagtttg

SEQ ID NO: 306729 - DNA, 12 bp, Artificial Sequence
  Oligonucleotide primer for the detection of SNP TSC0022153
attcctaatcta

SEQ ID NO: 306730 - DNA, 12 bp, Artificial Sequence
  Oligonucleotide primer for the detection of SNP TSC0022153
ttttttaaagag

SEQ ID NO: 306731 - DNA, 12 bp, Artificial Sequence
  Oligonucleotide primer for the detection of SNP TSC0022154
ttcaattaaaaa

SEQ ID NO: 306732 - DNA, 12 bp, Artificial Sequence
  Oligonucleotide primer for the detection of SNP TSC0022154
atttaaaaagtg

SEQ ID NO: 306733 - DNA, 12 bp, Artificial Sequence
  Oligonucleotide primer for the detection of SNP TSC0022157
atgagattagga

SEQ ID NO: 306734 - DNA, 12 bp, Artificial Sequence
  Oligonucleotide primer for the detection of SNP TSC0022158
cacttttatcat

SEQ ID NO: 306735 - DNA, 12 bp, Artificial Sequence
  Oligonucleotide primer for the detection of SNP TSC0022158
atttataataaa

SEQ ID NO: 306736 - DNA, 12 bp, Artificial Sequence
  Oligonucleotide primer for the detection of SNP TSC0022159
ttttattaaaga

SEQ ID NO: 306737 - DNA, 12 bp, Artificial Sequence
  Oligonucleotide primer for the detection of SNP TSC0022159
gatatattggat

SEQ ID NO: 306738 - DNA, 12 bp, Artificial Sequence
  Oligonucleotide primer for the detection of SNP TSC0022160
cccaaactacat

SEQ ID NO: 306739 - DNA, 12 bp, Artificial Sequence
  Oligonucleotide primer for the detection of SNP TSC0022160
ctccctcccata

SEQ ID NO: 306740 - DNA, 12 bp, Artificial Sequence
  Oligonucleotide primer for the detection of SNP TSC0022160
tttaggttgtat

SEQ ID NO: 306741 - DNA, 12 bp, Artificial Sequence
  Oligonucleotide primer for the detection of SNP TSC0022161
aaaactatacac

SEQ ID NO: 306742 - DNA, 12 bp, Artificial Sequence
  Oligonucleotide primer for the detection of SNP TSC0022161
gtttgggtattg

SEQ ID NO: 306743 - DNA, 12 bp, Artificial Sequence
  Oligonucleotide primer for the detection of SNP TSC0022161
acctaaatacta

SEQ ID NO: 306744 - DNA, 12 bp, Artificial Sequence
  Oligonucleotide primer for the detection of SNP TSC0022161
agaattgtgtat

SEQ ID NO: 306745 - DNA, 12 bp, Artificial Sequence
  Oligonucleotide primer for the detection of SNP TSC0022161
agaattgtgtac

SEQ ID NO: 306746 - DNA, 12 bp, Artificial Sequence
  Oligonucleotide primer for the detection of SNP TSC0022162
cactcaacaaaa

SEQ ID NO: 306747 - DNA, 12 bp, Artificial Sequence
  Oligonucleotide primer for the detection of SNP TSC0022162
cactcaacgaaa

SEQ ID NO: 306748 - DNA, 12 bp, Artificial Sequence
  Oligonucleotide primer for the detection of SNP TSC0022162
cgctcaacaaaa

SEQ ID NO: 306749 - DNA, 12 bp, Artificial Sequence
  Oligonucleotide primer for the detection of SNP TSC0022162
cgctcaacgaaa

SEQ ID NO: 306750 - DNA, 12 bp, Artificial Sequence
  Oligonucleotide primer for the detection of SNP TSC0022162
ttatatggtttt

SEQ ID NO: 306751 - DNA, 12 bp, Artificial Sequence
  Oligonucleotide primer for the detection of SNP TSC0022162
ttatatggtttc

SEQ ID NO: 306752 - DNA, 12 bp, Artificial Sequence
  Oligonucleotide primer for the detection of SNP TSC0022162
tcacataactcc

SEQ ID NO: 306753 - DNA, 12 bp, Artificial Sequence
  Oligonucleotide primer for the detection of SNP TSC0022162
tgtttagtggag

SEQ ID NO: 306754 - DNA, 12 bp, Artificial Sequence
  Oligonucleotide primer for the detection of SNP TSC0022162
cgtttagtggag

SEQ ID NO: 306755 - DNA, 12 bp, Artificial Sequence
  Oligonucleotide primer for the detection of SNP TSC0022162
tgtttagcggag

SEQ ID NO: 306756 - DNA, 12 bp, Artificial Sequence
  Oligonucleotide primer for the detection of SNP TSC0022162
cgtttagcggag

SEQ ID NO: 306757 - DNA, 12 bp, Artificial Sequence
  Oligonucleotide primer for the detection of SNP TSC0022165
atcaaaaactca

SEQ ID NO: 306758 - DNA, 12 bp, Artificial Sequence
  Oligonucleotide primer for the detection of SNP TSC0022165
atcaaaaactcg

SEQ ID NO: 306759 - DNA, 12 bp, Artificial Sequence
  Oligonucleotide primer for the detection of SNP TSC0022165
atcgaaaactca

SEQ ID NO: 306760 - DNA, 12 bp, Artificial Sequence
  Oligonucleotide primer for the detection of SNP TSC0022165
atcgaaaactcg

SEQ ID NO: 306761 - DNA, 12 bp, Artificial Sequence
  Oligonucleotide primer for the detection of SNP TSC0022165
cccaaaacccct

SEQ ID NO: 306762 - DNA, 12 bp, Artificial Sequence
  Oligonucleotide primer for the detection of SNP TSC0022165
cccgaaacccct

SEQ ID NO: 306763 - DNA, 12 bp, Artificial Sequence
  Oligonucleotide primer for the detection of SNP TSC0022165
gttggaggtttg

SEQ ID NO: 306764 - DNA, 12 bp, Artificial Sequence
  Oligonucleotide primer for the detection of SNP TSC0022165
gtcggaggtttg

SEQ ID NO: 306765 - DNA, 12 bp, Artificial Sequence
  Oligonucleotide primer for the detection of SNP TSC0022165
gttggaggttcg

SEQ ID NO: 306766 - DNA, 12 bp, Artificial Sequence
  Oligonucleotide primer for the detection of SNP TSC0022165
gtcggaggttcg

SEQ ID NO: 306767 - DNA, 12 bp, Artificial Sequence
  Oligonucleotide primer for the detection of SNP TSC0022166
catttatcaact

SEQ ID NO: 306768 - DNA, 12 bp, Artificial Sequence
  Oligonucleotide primer for the detection of SNP TSC0022166
catttatcgact

SEQ ID NO: 306769 - DNA, 12 bp, Artificial Sequence
  Oligonucleotide primer for the detection of SNP TSC0022166
ttggtatagaga

SEQ ID NO: 306770 - DNA, 12 bp, Artificial Sequence
  Oligonucleotide primer for the detection of SNP TSC0022166
ctaacacaaaaa

SEQ ID NO: 306771 - DNA, 12 bp, Artificial Sequence
  Oligonucleotide primer for the detection of SNP TSC0022167
tttatcaactcc

SEQ ID NO: 306772 - DNA, 12 bp, Artificial Sequence
  Oligonucleotide primer for the detection of SNP TSC0022167
tttatcgactcc

SEQ ID NO: 306773 - DNA, 12 bp, Artificial Sequence
  Oligonucleotide primer for the detection of SNP TSC0022167
tttggtatagag

SEQ ID NO: 306774 - DNA, 12 bp, Artificial Sequence
  Oligonucleotide primer for the detection of SNP TSC0022167
taacacaaaaaa

SEQ ID NO: 306775 - DNA, 12 bp, Artificial Sequence
  Oligonucleotide primer for the detection of SNP TSC0022167
tttattgatttt

SEQ ID NO: 306776 - DNA, 12 bp, Artificial Sequence
  Oligonucleotide primer for the detection of SNP TSC0022167
tttatcgatttt

SEQ ID NO: 306777 - DNA, 12 bp, Artificial Sequence
  Oligonucleotide primer for the detection of SNP TSC0022168
aaataccctcaa

SEQ ID NO: 306778 - DNA, 12 bp, Artificial Sequence
  Oligonucleotide primer for the detection of SNP TSC0022168
tggttaaatttt

SEQ ID NO: 306779 - DNA, 12 bp, Artificial Sequence
  Oligonucleotide primer for the detection of SNP TSC0022168
taatcaaatcct

SEQ ID NO: 306780 - DNA, 12 bp, Artificial Sequence
  Oligonucleotide primer for the detection of SNP TSC0022168
aagtatttttaa

SEQ ID NO: 306781 - DNA, 12 bp, Artificial Sequence
  Oligonucleotide primer for the detection of SNP TSC0022169
atattaccataa

SEQ ID NO: 306782 - DNA, 12 bp, Artificial Sequence
  Oligonucleotide primer for the detection of SNP TSC0022169
atgtatgtatta

SEQ ID NO: 306783 - DNA, 12 bp, Artificial Sequence
  Oligonucleotide primer for the detection of SNP TSC0022169
acgtatgtatta

SEQ ID NO: 306784 - DNA, 12 bp, Artificial Sequence
  Oligonucleotide primer for the detection of SNP TSC0022169
atgtacgtatta

SEQ ID NO: 306785 - DNA, 12 bp, Artificial Sequence
  Oligonucleotide primer for the detection of SNP TSC0022169
acgtacgtatta

SEQ ID NO: 306786 - DNA, 12 bp, Artificial Sequence
  Oligonucleotide primer for the detection of SNP TSC0022169
acatacatatta

SEQ ID NO: 306787 - DNA, 12 bp, Artificial Sequence
  Oligonucleotide primer for the detection of SNP TSC0022169
acatacgtatta

SEQ ID NO: 306788 - DNA, 12 bp, Artificial Sequence
  Oligonucleotide primer for the detection of SNP TSC0022169
acgtacatatta

SEQ ID NO: 306789 - DNA, 12 bp, Artificial Sequence
  Oligonucleotide primer for the detection of SNP TSC0022169
atattattataa

SEQ ID NO: 306790 - DNA, 12 bp, Artificial Sequence
  Oligonucleotide primer for the detection of SNP TSC0022171
ctactataacct

SEQ ID NO: 306791 - DNA, 12 bp, Artificial Sequence
  Oligonucleotide primer for the detection of SNP TSC0022171
atttggttagta

SEQ ID NO: 306792 - DNA, 12 bp, Artificial Sequence
  Oligonucleotide primer for the detection of SNP TSC0022172
aatcatctaccc

SEQ ID NO: 306793 - DNA, 12 bp, Artificial Sequence
  Oligonucleotide primer for the detection of SNP TSC0022172
ttgggttgggtg

SEQ ID NO: 306794 - DNA, 12 bp, Artificial Sequence
  Oligonucleotide primer for the detection of SNP TSC0022172
ttaaactaaata

SEQ ID NO: 306795 - DNA, 12 bp, Artificial Sequence
  Oligonucleotide primer for the detection of SNP TSC0022172
agttatttgttt

SEQ ID NO: 306796 - DNA, 12 bp, Artificial Sequence
  Oligonucleotide primer for the detection of SNP TSC0022172
agttatttgttc

SEQ ID NO: 306797 - DNA, 12 bp, Artificial Sequence
  Oligonucleotide primer for the detection of SNP TSC0022173
acctcatctact

SEQ ID NO: 306798 - DNA, 12 bp, Artificial Sequence
  Oligonucleotide primer for the detection of SNP TSC0022173
taggtattatgg

SEQ ID NO: 306799 - DNA, 12 bp, Artificial Sequence
  Oligonucleotide primer for the detection of SNP TSC0022174
cttttcaccccc

SEQ ID NO: 306800 - DNA, 12 bp, Artificial Sequence
  Oligonucleotide primer for the detection of SNP TSC0022174
agagggagggaa

SEQ ID NO: 306801 - DNA, 12 bp, Artificial Sequence
  Oligonucleotide primer for the detection of SNP TSC0022176
agttaatttaat

SEQ ID NO: 306802 - DNA, 12 bp, Artificial Sequence
  Oligonucleotide primer for the detection of SNP TSC0022176
agttaatttaac

SEQ ID NO: 306803 - DNA, 12 bp, Artificial Sequence
  Oligonucleotide primer for the detection of SNP TSC0022176
aaccaatccaac

SEQ ID NO: 306804 - DNA, 12 bp, Artificial Sequence
  Oligonucleotide primer for the detection of SNP TSC0022176
ttgggttaaaat

SEQ ID NO: 306805 - DNA, 12 bp, Artificial Sequence
  Oligonucleotide primer for the detection of SNP TSC0022179
ccaaacataaac

SEQ ID NO: 306806 - DNA, 12 bp, Artificial Sequence
  Oligonucleotide primer for the detection of SNP TSC0022179
ccgaacataaac

SEQ ID NO: 306807 - DNA, 12 bp, Artificial Sequence
  Oligonucleotide primer for the detection of SNP TSC0022179
ttatggtggtag

SEQ ID NO: 306808 - DNA, 12 bp, Artificial Sequence
  Oligonucleotide primer for the detection of SNP TSC0022179
ttatggcggtag

SEQ ID NO: 306809 - DNA, 12 bp, Artificial Sequence
  Oligonukleotid-Primer
tcataacaacaa

SEQ ID NO: 306810 - DNA, 12 bp, Artificial Sequence
  Oligonucleotide primer for the detection of SNP TSC0022179
tcataacgacaa

SEQ ID NO: 306811 - DNA, 12 bp, Artificial Sequence
  Oligonucleotide primer for the detection of SNP TSC0022179
ttgagtatgagt

SEQ ID NO: 306812 - DNA, 12 bp, Artificial Sequence
  Oligonucleotide primer for the detection of SNP TSC0022179
tcgagtatgagt

SEQ ID NO: 306813 - DNA, 12 bp, Artificial Sequence
  Oligonucleotide primer for the detection of SNP TSC0022185
ttaggaattaaa

SEQ ID NO: 306814 - DNA, 12 bp, Artificial Sequence
  Oligonucleotide primer for the detection of SNP TSC0022186
cataattaataa

SEQ ID NO: 306815 - DNA, 12 bp, Artificial Sequence
  Oligonucleotide primer for the detection of SNP TSC0022186
tttttgttaagt

SEQ ID NO: 306816 - DNA, 12 bp, Artificial Sequence
  Oligonucleotide primer for the detection of SNP TSC0022186
ttttcgttaagt

SEQ ID NO: 306817 - DNA, 12 bp, Artificial Sequence
  Oligonucleotide primer for the detection of SNP TSC0022186
ctccaccaaaca

SEQ ID NO: 306818 - DNA, 12 bp, Artificial Sequence
  Oligonucleotide primer for the detection of SNP TSC0022186
ctccgccaaaca

SEQ ID NO: 306819 - DNA, 12 bp, Artificial Sequence
  Oligonucleotide primer for the detection of SNP TSC0022187
ctctaaatactc

SEQ ID NO: 306820 - DNA, 12 bp, Artificial Sequence
  Oligonucleotide primer for the detection of SNP TSC0022187
tttggattatta

SEQ ID NO: 306821 - DNA, 12 bp, Artificial Sequence
  Oligonucleotide primer for the detection of SNP TSC0022188
taaaaaattaat

SEQ ID NO: 306822 - DNA, 12 bp, Artificial Sequence
  Oligonucleotide primer for the detection of SNP TSC0022189
cccaatccataa

SEQ ID NO: 306823 - DNA, 12 bp, Artificial Sequence
  Oligonucleotide primer for the detection of SNP TSC0022189
atgatattattt

SEQ ID NO: 306824 - DNA, 12 bp, Artificial Sequence
  Oligonucleotide primer for the detection of SNP TSC0022189
acgatattattt

SEQ ID NO: 306825 - DNA, 12 bp, Artificial Sequence
  Oligonucleotide primer for the detection of SNP TSC0022189
ccacaacattac

SEQ ID NO: 306826 - DNA, 12 bp, Artificial Sequence
  Oligonucleotide primer for the detection of SNP TSC0022189
ccacgacattac

SEQ ID NO: 306827 - DNA, 12 bp, Artificial Sequence
  Oligonucleotide primer for the detection of SNP TSC0022189
tttagtttatgg

SEQ ID NO: 306828 - DNA, 12 bp, Artificial Sequence
  Oligonucleotide primer for the detection of SNP TSC0022190
tcgtaaaaatct

SEQ ID NO: 306829 - DNA, 12 bp, Artificial Sequence
  Oligonucleotide primer for the detection of SNP TSC0022190
tttattagttaa

SEQ ID NO: 306830 - DNA, 12 bp, Artificial Sequence
  Oligonucleotide primer for the detection of SNP TSC0022191
tacaacactttc

SEQ ID NO: 306831 - DNA, 12 bp, Artificial Sequence
  Oligonucleotide primer for the detection of SNP TSC0022191
agggttagaggg

SEQ ID NO: 306832 - DNA, 12 bp, Artificial Sequence
  Oligonucleotide primer for the detection of SNP TSC0022192
aattacctccat

SEQ ID NO: 306833 - DNA, 12 bp, Artificial Sequence
  Oligonucleotide primer for the detection of SNP TSC0022192
tttggagatagg

SEQ ID NO: 306834 - DNA, 12 bp, Artificial Sequence
  Oligonucleotide primer for the detection of SNP TSC0022195
cccaaaaaacaa

SEQ ID NO: 306835 - DNA, 12 bp, Artificial Sequence
  Oligonucleotide primer for the detection of SNP TSC0022195
tttttgttgata

SEQ ID NO: 306836 - DNA, 12 bp, Artificial Sequence
  Oligonucleotide primer for the detection of SNP TSC0022195
ttcctattaaca

SEQ ID NO: 306837 - DNA, 12 bp, Artificial Sequence
  Oligonucleotide primer for the detection of SNP TSC0022195
tttaaggaatag

SEQ ID NO: 306838 - DNA, 12 bp, Artificial Sequence
  Oligonucleotide primer for the detection of SNP TSC0022196
tctcttaatttc

SEQ ID NO: 306839 - DNA, 12 bp, Artificial Sequence
  Oligonucleotide primer for the detection of SNP TSC0022196
attaataaagaa

SEQ ID NO: 306840 - DNA, 12 bp, Artificial Sequence
  Oligonucleotide primer for the detection of SNP TSC0022197
ttacaccactac

SEQ ID NO: 306841 - DNA, 12 bp, Artificial Sequence
  Oligonucleotide primer for the detection of SNP TSC0022197
ttacgccactac

SEQ ID NO: 306842 - DNA, 12 bp, Artificial Sequence
  Oligonucleotide primer for the detection of SNP TSC0022198
cacttctaaacc

SEQ ID NO: 306843 - DNA, 12 bp, Artificial Sequence
  Oligonucleotide primer for the detection of SNP TSC0022198
ttaggaaggagg

SEQ ID NO: 306844 - DNA, 12 bp, Artificial Sequence
  Oligonucleotide primer for the detection of SNP TSC0022198
atttttgggttt

SEQ ID NO: 306845 - DNA, 12 bp, Artificial Sequence
  Oligonucleotide primer for the detection of SNP TSC0022199
tttacacccact

SEQ ID NO: 306846 - DNA, 12 bp, Artificial Sequence
  Oligonucleotide primer for the detection of SNP TSC0022199
aatagggtttaa

SEQ ID NO: 306847 - DNA, 12 bp, Artificial Sequence
  Oligonucleotide primer for the detection of SNP TSC0022199
aacaaaatctaa

SEQ ID NO: 306848 - DNA, 12 bp, Artificial Sequence
  Oligonucleotide primer for the detection of SNP TSC0022199
tttgtatttatt

SEQ ID NO: 306849 - DNA, 12 bp, Artificial Sequence
  Oligonucleotide primer for the detection of SNP TSC0022204
gttgtttatatt

SEQ ID NO: 306850 - DNA, 12 bp, Artificial Sequence
  Oligonucleotide primer for the detection of SNP TSC0022204
attactcatacc

SEQ ID NO: 306851 - DNA, 12 bp, Artificial Sequence
  Oligonucleotide primer for the detection of SNP TSC0022204
gtgttaggatta

SEQ ID NO: 306852 - DNA, 12 bp, Artificial Sequence
  Oligonucleotide primer for the detection of SNP TSC0022206
aaaacccaatct

SEQ ID NO: 306853 - DNA, 12 bp, Artificial Sequence
  Oligonucleotide primer for the detection of SNP TSC0022206
aaaacccgatct

SEQ ID NO: 306854 - DNA, 12 bp, Artificial Sequence
  Oligonucleotide primer for the detection of SNP TSC0022206
tttaggttgtta

SEQ ID NO: 306855 - DNA, 12 bp, Artificial Sequence
  Oligonucleotide primer for the detection of SNP TSC0022206
tttaggtcgtta

SEQ ID NO: 306856 - DNA, 12 bp, Artificial Sequence
  Oligonucleotide primer for the detection of SNP TSC0022206
cccaaaccacca

SEQ ID NO: 306857 - DNA, 12 bp, Artificial Sequence
  Oligonucleotide primer for the detection of SNP TSC0022206
cccaaaccgcca

SEQ ID NO: 306858 - DNA, 12 bp, Artificial Sequence
  Oligonucleotide primer for the detection of SNP TSC0022206
gaagtttggttt

SEQ ID NO: 306859 - DNA, 12 bp, Artificial Sequence
  Oligonucleotide primer for the detection of SNP TSC0022206
gaagttcggttt

SEQ ID NO: 306860 - DNA, 12 bp, Artificial Sequence
  Oligonucleotide primer for the detection of SNP TSC0022207
taatcctatctt

SEQ ID NO: 306861 - DNA, 12 bp, Artificial Sequence
  Oligonucleotide primer for the detection of SNP TSC0022207
gtatagtggaga

SEQ ID NO: 306862 - DNA, 12 bp, Artificial Sequence
  Oligonucleotide primer for the detection of SNP TSC0022207
taattttgtttt

SEQ ID NO: 306863 - DNA, 12 bp, Artificial Sequence
  Oligonucleotide primer for the detection of SNP TSC0022209
tttttacaataa

SEQ ID NO: 306864 - DNA, 12 bp, Artificial Sequence
  Oligonucleotide primer for the detection of SNP TSC0022209
aaaaaacttata

SEQ ID NO: 306865 - DNA, 12 bp, Artificial Sequence
  Oligonucleotide primer for the detection of SNP TSC0022209
tttataatggtt

SEQ ID NO: 306866 - DNA, 12 bp, Artificial Sequence
  Oligonucleotide primer for the detection of SNP TSC0022210
ctacattaatcc

SEQ ID NO: 306867 - DNA, 12 bp, Artificial Sequence
  Oligonucleotide primer for the detection of SNP TSC0022210
gtaaattaagga

SEQ ID NO: 306868 - DNA, 12 bp, Artificial Sequence
  Oligonucleotide primer for the detection of SNP TSC0022211
gtgttgtttaga

SEQ ID NO: 306869 - DNA, 12 bp, Artificial Sequence
  Oligonucleotide primer for the detection of SNP TSC0022213
tatttctaattc

SEQ ID NO: 306870 - DNA, 12 bp, Artificial Sequence
  Oligonucleotide primer for the detection of SNP TSC0022213
gtgattttttgg

SEQ ID NO: 306871 - DNA, 12 bp, Artificial Sequence
  Oligonucleotide primer for the detection of SNP TSC0022213
ataattccttaa

SEQ ID NO: 306872 - DNA, 12 bp, Artificial Sequence
  Oligonucleotide primer for the detection of SNP TSC0022214
atttaaaaataa

SEQ ID NO: 306873 - DNA, 12 bp, Artificial Sequence
  Oligonucleotide primer for the detection of SNP TSC0022218
cccaaataatat

SEQ ID NO: 306874 - DNA, 12 bp, Artificial Sequence
  Oligonucleotide primer for the detection of SNP TSC0022218
tttattgttgag

SEQ ID NO: 306875 - DNA, 12 bp, Artificial Sequence
  Oligonucleotide primer for the detection of SNP TSC0022218
tttagataatgt

SEQ ID NO: 306876 - DNA, 12 bp, Artificial Sequence
  Oligonucleotide primer for the detection of SNP TSC0022219
atatttctctct

SEQ ID NO: 306877 - DNA, 12 bp, Artificial Sequence
  Oligonucleotide primer for the detection of SNP TSC0022219
gtatttctctct

SEQ ID NO: 306878 - DNA, 12 bp, Artificial Sequence
  Oligonucleotide primer for the detection of SNP TSC0022219
attaaggagtta

SEQ ID NO: 306879 - DNA, 12 bp, Artificial Sequence
  Oligonucleotide primer for the detection of SNP TSC0022225
atgttatgtaag

SEQ ID NO: 306880 - DNA, 12 bp, Artificial Sequence
  Oligonucleotide primer for the detection of SNP TSC0022225
atattatacaaa

SEQ ID NO: 306881 - DNA, 12 bp, Artificial Sequence
  Oligonucleotide primer for the detection of SNP TSC0022225
aaagaatagagt

SEQ ID NO: 306882 - DNA, 12 bp, Artificial Sequence
  Oligonucleotide primer for the detection of SNP TSC0022226
actaatacaata

SEQ ID NO: 306883 - DNA, 12 bp, Artificial Sequence
  Oligonucleotide primer for the detection of SNP TSC0022226
ttataatatttt

SEQ ID NO: 306884 - DNA, 12 bp, Artificial Sequence
  Oligonucleotide primer for the detection of SNP TSC0022226
ttacaatactct

SEQ ID NO: 306885 - DNA, 12 bp, Artificial Sequence
  Oligonucleotide primer for the detection of SNP TSC0022226
attaatataatg

SEQ ID NO: 306886 - DNA, 12 bp, Artificial Sequence
  Oligonucleotide primer for the detection of SNP TSC0022228
aaaaattttacc

SEQ ID NO: 306887 - DNA, 12 bp, Artificial Sequence
  Oligonucleotide primer for the detection of SNP TSC0022228
tttataatgaag

SEQ ID NO: 306888 - DNA, 12 bp, Artificial Sequence
  Oligonucleotide primer for the detection of SNP TSC0022229
tactaaacaaac

SEQ ID NO: 306889 - DNA, 12 bp, Artificial Sequence
  Oligonucleotide primer for the detection of SNP TSC0022229
aatttggtttta

SEQ ID NO: 306890 - DNA, 12 bp, Artificial Sequence
  Oligonucleotide primer for the detection of SNP TSC0022229
aattcggtttta

SEQ ID NO: 306891 - DNA, 12 bp, Artificial Sequence
  Oligonucleotide primer for the detection of SNP TSC0022229
aattcaattcca

SEQ ID NO: 306892 - DNA, 12 bp, Artificial Sequence
  Oligonucleotide primer for the detection of SNP TSC0022229
aattcgattcca

SEQ ID NO: 306893 - DNA, 12 bp, Artificial Sequence
  Oligonucleotide primer for the detection of SNP TSC0022229
tgttaggtaaat

SEQ ID NO: 306894 - DNA, 12 bp, Artificial Sequence
  Oligonucleotide primer for the detection of SNP TSC0022229
tgttaggtaaac

SEQ ID NO: 306895 - DNA, 12 bp, Artificial Sequence
  Oligonucleotide primer for the detection of SNP TSC0022230
aaaattaaacta

SEQ ID NO: 306896 - DNA, 12 bp, Artificial Sequence
  Oligonucleotide primer for the detection of SNP TSC0022230
atgttaattatt

SEQ ID NO: 306897 - DNA, 12 bp, Artificial Sequence
  Oligonucleotide primer for the detection of SNP TSC0022230
atgttaattatc

SEQ ID NO: 306898 - DNA, 12 bp, Artificial Sequence
  Oligonukleotid-Primer
atatcaattacc

SEQ ID NO: 306899 - DNA, 12 bp, Artificial Sequence
  Oligonucleotide primer for the detection of SNP TSC0022230
tggaattgggtt

SEQ ID NO: 306900 - DNA, 12 bp, Artificial Sequence
  Oligonucleotide primer for the detection of SNP TSC0022232
aaaatataaccc

SEQ ID NO: 306901 - DNA, 12 bp, Artificial Sequence
  Oligonucleotide primer for the detection of SNP TSC0022232
tttattagaaaa

SEQ ID NO: 306902 - DNA, 12 bp, Artificial Sequence
  Oligonukleotid-Primer
tacttttctccc

SEQ ID NO: 306903 - DNA, 12 bp, Artificial Sequence
  Oligonucleotide primer for the detection of SNP TSC0022233
tgggatggggaa

SEQ ID NO: 306904 - DNA, 12 bp, Artificial Sequence
  Oligonucleotide primer for the detection of SNP TSC0022234
aaagaggtaaaa

SEQ ID NO: 306905 - DNA, 12 bp, Artificial Sequence
  Oligonucleotide primer for the detection of SNP TSC0022234
gtttgtatttta

SEQ ID NO: 306906 - DNA, 12 bp, Artificial Sequence
  Oligonukleotid-Primer
cacttccctccc

SEQ ID NO: 306907 - DNA, 12 bp, Artificial Sequence
  Oligonucleotide primer for the detection of SNP TSC0022235
ttgtttgaattg

SEQ ID NO: 306908 - DNA, 12 bp, Artificial Sequence
  Oligonucleotide primer for the detection of SNP TSC0022235
tcgtttgaattg

SEQ ID NO: 306909 - DNA, 12 bp, Artificial Sequence
  Oligonucleotide primer for the detection of SNP TSC0022235
ccatctaaacta

SEQ ID NO: 306910 - DNA, 12 bp, Artificial Sequence
  Oligonucleotide primer for the detection of SNP TSC0022235
ccgtctaaacta

SEQ ID NO: 306911 - DNA, 12 bp, Artificial Sequence
  Oligonucleotide primer for the detection of SNP TSC0022243
aaaataccaatc

SEQ ID NO: 306912 - DNA, 12 bp, Artificial Sequence
  Oligonucleotide primer for the detection of SNP TSC0022243
gttttgatttag

SEQ ID NO: 306913 - DNA, 12 bp, Artificial Sequence
  Oligonucleotide primer for the detection of SNP TSC0022244
cctaatcccccc

SEQ ID NO: 306914 - DNA, 12 bp, Artificial Sequence
  Oligonucleotide primer for the detection of SNP TSC0022244
ttaagggtatag

SEQ ID NO: 306915 - DNA, 12 bp, Artificial Sequence
  Oligonucleotide primer for the detection of SNP TSC0022244
tcaaaaacacaa

SEQ ID NO: 306916 - DNA, 12 bp, Artificial Sequence
  Oligonucleotide primer for the detection of SNP TSC0022244
tttgattttttt

SEQ ID NO: 306917 - DNA, 12 bp, Artificial Sequence
  Oligonucleotide primer for the detection of SNP TSC0022245
aaataactatct

SEQ ID NO: 306918 - DNA, 12 bp, Artificial Sequence
  Oligonucleotide primer for the detection of SNP TSC0022245
tatggatgtggt

SEQ ID NO: 306919 - DNA, 12 bp, Artificial Sequence
  Oligonucleotide primer for the detection of SNP TSC0022247
cttctatccccc

SEQ ID NO: 306920 - DNA, 12 bp, Artificial Sequence
  Oligonucleotide primer for the detection of SNP TSC0022247
gttgaggtatgg

SEQ ID NO: 306921 - DNA, 12 bp, Artificial Sequence
  Oligonucleotide primer for the detection of SNP TSC0022247
gttgaggtacgg

SEQ ID NO: 306922 - DNA, 12 bp, Artificial Sequence
  Oligonucleotide primer for the detection of SNP TSC0022248
ctccctatactt

SEQ ID NO: 306923 - DNA, 12 bp, Artificial Sequence
  Oligonucleotide primer for the detection of SNP TSC0022248
aggtaagagata

SEQ ID NO: 306924 - DNA, 12 bp, Artificial Sequence
  Oligonucleotide primer for the detection of SNP TSC0022249
tcataacattaa

SEQ ID NO: 306925 - DNA, 12 bp, Artificial Sequence
  Oligonucleotide primer for the detection of SNP TSC0022249
gaattttaaagt

SEQ ID NO: 306926 - DNA, 12 bp, Artificial Sequence
  Oligonucleotide primer for the detection of SNP TSC0022249
ttatagtattaa

SEQ ID NO: 306927 - DNA, 12 bp, Artificial Sequence
  Oligonucleotide primer for the detection of SNP TSC0022250
tccttttacaaa

SEQ ID NO: 306928 - DNA, 12 bp, Artificial Sequence
  Oligonucleotide primer for the detection of SNP TSC0022250
gtagttaaagtt

SEQ ID NO: 306929 - DNA, 12 bp, Artificial Sequence
  Oligonucleotide primer for the detection of SNP TSC0022250
aacaatcaaaat

SEQ ID NO: 306930 - DNA, 12 bp, Artificial Sequence
  Oligonucleotide primer for the detection of SNP TSC0022251
aaactcttatta

SEQ ID NO: 306931 - DNA, 12 bp, Artificial Sequence
  Oligonucleotide primer for the detection of SNP TSC0022251
ttttaacccctt

SEQ ID NO: 306932 - DNA, 12 bp, Artificial Sequence
  Oligonucleotide primer for the detection of SNP TSC0022251
gagtttttgtta

SEQ ID NO: 306933 - DNA, 12 bp, Artificial Sequence
  Oligonucleotide primer for the detection of SNP TSC0022252
tatttgggttgt

SEQ ID NO: 306934 - DNA, 12 bp, Artificial Sequence
  Oligonucleotide primer for the detection of SNP TSC0022252
atttaaactaca

SEQ ID NO: 306935 - DNA, 12 bp, Artificial Sequence
  Oligonucleotide primer for the detection of SNP TSC0022252
gaaatatagaat

SEQ ID NO: 306936 - DNA, 12 bp, Artificial Sequence
  Oligonucleotide primer for the detection of SNP TSC0022253
tattgtaaagat

SEQ ID NO: 306937 - DNA, 12 bp, Artificial Sequence
  Oligonucleotide primer for the detection of SNP TSC0022253
cactataaaaat

SEQ ID NO: 306938 - DNA, 12 bp, Artificial Sequence
  Oligonucleotide primer for the detection of SNP TSC0022253
ttggaaaagaat

SEQ ID NO: 306939 - DNA, 12 bp, Artificial Sequence
  Oligonucleotide primer for the detection of SNP TSC0022254
aaaataggtttt

SEQ ID NO: 306940 - DNA, 12 bp, Artificial Sequence
  Oligonucleotide primer for the detection of SNP TSC0022254
aaaataaatttc

SEQ ID NO: 306941 - DNA, 12 bp, Artificial Sequence
  Oligonucleotide primer for the detection of SNP TSC0022254
ttaaaaagaaag

SEQ ID NO: 306942 - DNA, 12 bp, Artificial Sequence
  Oligonucleotide primer for the detection of SNP TSC0022260
tcaataactcct

SEQ ID NO: 306943 - DNA, 12 bp, Artificial Sequence
  Oligonucleotide primer for the detection of SNP TSC0022260
tcgataactcct

SEQ ID NO: 306944 - DNA, 12 bp, Artificial Sequence
  Oligonucleotide primer for the detection of SNP TSC0022260
agggagattaag

SEQ ID NO: 306945 - DNA, 12 bp, Artificial Sequence
  Oligonucleotide primer for the detection of SNP TSC0022261
ccaccccaaaac

SEQ ID NO: 306946 - DNA, 12 bp, Artificial Sequence
  Oligonucleotide primer for the detection of SNP TSC0022261
tgtgttggagta

SEQ ID NO: 306947 - DNA, 12 bp, Artificial Sequence
  Oligonucleotide primer for the detection of SNP TSC0022261
tgcgttggagta

SEQ ID NO: 306948 - DNA, 12 bp, Artificial Sequence
  Oligonucleotide primer for the detection of SNP TSC0022261
tgtgtcggagta

SEQ ID NO: 306949 - DNA, 12 bp, Artificial Sequence
  Oligonucleotide primer for the detection of SNP TSC0022261
tgcgtcggagta

SEQ ID NO: 306950 - DNA, 12 bp, Artificial Sequence
  Oligonucleotide primer for the detection of SNP TSC0022265
aaataaaaccat

SEQ ID NO: 306951 - DNA, 12 bp, Artificial Sequence
  Oligonucleotide primer for the detection of SNP TSC0022265
gagtgagtaggt

SEQ ID NO: 306952 - DNA, 12 bp, Artificial Sequence
  Oligonucleotide primer for the detection of SNP TSC0022265
aaataaataaac

SEQ ID NO: 306953 - DNA, 12 bp, Artificial Sequence
  Oligonucleotide primer for the detection of SNP TSC0022265
aataagattatt

SEQ ID NO: 306954 - DNA, 12 bp, Artificial Sequence
  Oligonucleotide primer for the detection of SNP TSC0022265
aataagattatc

SEQ ID NO: 306955 - DNA, 12 bp, Artificial Sequence
  Oligonucleotide primer for the detection of SNP TSC0022266
actttctaaatt

SEQ ID NO: 306956 - DNA, 12 bp, Artificial Sequence
  Oligonucleotide primer for the detection of SNP TSC0022266
atgtgatagaaa

SEQ ID NO: 306957 - DNA, 12 bp, Artificial Sequence
  Oligonucleotide primer for the detection of SNP TSC0022268
ttacaaacacac

SEQ ID NO: 306958 - DNA, 12 bp, Artificial Sequence
  Oligonucleotide primer for the detection of SNP TSC0022268
ttacgaacacac

SEQ ID NO: 306959 - DNA, 12 bp, Artificial Sequence
  Oligonucleotide primer for the detection of SNP TSC0022268
agtagagtaagg

SEQ ID NO: 306960 - DNA, 12 bp, Artificial Sequence
  Oligonucleotide primer for the detection of SNP TSC0022270
aataccttcctc

SEQ ID NO: 306961 - DNA, 12 bp, Artificial Sequence
  Oligonucleotide primer for the detection of SNP TSC0022270
ggggttttttag

SEQ ID NO: 306962 - DNA, 12 bp, Artificial Sequence
  Oligonucleotide primer for the detection of SNP TSC0022271
tacataaaattt

SEQ ID NO: 306963 - DNA, 12 bp, Artificial Sequence
  Oligonucleotide primer for the detection of SNP TSC0022271
ttggataaagtt

SEQ ID NO: 306964 - DNA, 12 bp, Artificial Sequence
  Oligonucleotide primer for the detection of SNP TSC0022271
ttaaataaaacc

SEQ ID NO: 306965 - DNA, 12 bp, Artificial Sequence
  Oligonucleotide primer for the detection of SNP TSC0022271
tatatggagttt

SEQ ID NO: 306966 - DNA, 12 bp, Artificial Sequence
  Oligonucleotide primer for the detection of SNP TSC0022272
tatatctaaata

SEQ ID NO: 306967 - DNA, 12 bp, Artificial Sequence
  Oligonucleotide primer for the detection of SNP TSC0022272
cccttttattcc

SEQ ID NO: 306968 - DNA, 12 bp, Artificial Sequence
  Oligonucleotide primer for the detection of SNP TSC0022272
tgtgtttgggtg

SEQ ID NO: 306969 - DNA, 12 bp, Artificial Sequence
  Oligonucleotide primer for the detection of SNP TSC0022275
tcaaatccatca

SEQ ID NO: 306970 - DNA, 12 bp, Artificial Sequence
  Oligonucleotide primer for the detection of SNP TSC0022275
agaaattagggt

SEQ ID NO: 306971 - DNA, 12 bp, Artificial Sequence
  Oligonucleotide primer for the detection of SNP TSC0022275
ttaggtttatta

SEQ ID NO: 306972 - DNA, 12 bp, Artificial Sequence
  Oligonucleotide primer for the detection of SNP TSC0022276
aaccattccctt

SEQ ID NO: 306973 - DNA, 12 bp, Artificial Sequence
  Oligonucleotide primer for the detection of SNP TSC0022276
aaccgttccctt

SEQ ID NO: 306974 - DNA, 12 bp, Artificial Sequence
  Oligonucleotide primer for the detection of SNP TSC0022276
gtgttgtggttg

SEQ ID NO: 306975 - DNA, 12 bp, Artificial Sequence
  Oligonucleotide primer for the detection of SNP TSC0022277
ctacttacatac

SEQ ID NO: 306976 - DNA, 12 bp, Artificial Sequence
  Oligonucleotide primer for the detection of SNP TSC0022277
tggggtggggtg

SEQ ID NO: 306977 - DNA, 12 bp, Artificial Sequence
  Oligonucleotide primer for the detection of SNP TSC0022280
cacaataatatc

SEQ ID NO: 306978 - DNA, 12 bp, Artificial Sequence
  Oligonucleotide primer for the detection of SNP TSC0022280
attatttaaata

SEQ ID NO: 306979 - DNA, 12 bp, Artificial Sequence
  Oligonucleotide primer for the detection of SNP TSC0022281
ccaatatcactt

SEQ ID NO: 306980 - DNA, 12 bp, Artificial Sequence
  Oligonucleotide primer for the detection of SNP TSC0022281
gtttagtaataa

SEQ ID NO: 306981 - DNA, 12 bp, Artificial Sequence
  Oligonucleotide primer for the detection of SNP TSC0022282
ccattccaaaaa

SEQ ID NO: 306982 - DNA, 12 bp, Artificial Sequence
  Oligonucleotide primer for the detection of SNP TSC0022282
aaggtagtttgt

SEQ ID NO: 306983 - DNA, 12 bp, Artificial Sequence
  Oligonucleotide primer for the detection of SNP TSC0022282
aaggtagtttgc

SEQ ID NO: 306984 - DNA, 12 bp, Artificial Sequence
  Oligonucleotide primer for the detection of SNP TSC0022282
aaaaacaatcta

SEQ ID NO: 306985 - DNA, 12 bp, Artificial Sequence
  Oligonucleotide primer for the detection of SNP TSC0022282
ttattttaggga

SEQ ID NO: 306986 - DNA, 12 bp, Artificial Sequence
  Oligonucleotide primer for the detection of SNP TSC0022283
ataataacaacc

SEQ ID NO: 306987 - DNA, 12 bp, Artificial Sequence
  Oligonucleotide primer for the detection of SNP TSC0022283
gtataaatttga

SEQ ID NO: 306988 - DNA, 12 bp, Artificial Sequence
  Oligonucleotide primer for the detection of SNP TSC0022284
aataatacaaat

SEQ ID NO: 306989 - DNA, 12 bp, Artificial Sequence
  Oligonucleotide primer for the detection of SNP TSC0022284
ttaggaaggtaa

SEQ ID NO: 306990 - DNA, 12 bp, Artificial Sequence
  Oligonucleotide primer for the detection of SNP TSC0022284
ctaaaaaaataa

SEQ ID NO: 306991 - DNA, 12 bp, Artificial Sequence
  Oligonucleotide primer for the detection of SNP TSC0022284
aatggtataaat

SEQ ID NO: 306992 - DNA, 12 bp, Artificial Sequence
  Oligonucleotide primer for the detection of SNP TSC0022285
ccccttcaaact

SEQ ID NO: 306993 - DNA, 12 bp, Artificial Sequence
  Oligonucleotide primer for the detection of SNP TSC0022285
gggagttggtga

SEQ ID NO: 306994 - DNA, 12 bp, Artificial Sequence
  Oligonucleotide primer for the detection of SNP TSC0022289
catacaacctct

SEQ ID NO: 306995 - DNA, 12 bp, Artificial Sequence
  Oligonucleotide primer for the detection of SNP TSC0022290
caactccaaact

SEQ ID NO: 306996 - DNA, 12 bp, Artificial Sequence
  Oligonucleotide primer for the detection of SNP TSC0022290
tttatgtttaga

SEQ ID NO: 306997 - DNA, 12 bp, Artificial Sequence
  Oligonucleotide primer for the detection of SNP TSC0022290
tttacgtttaga

SEQ ID NO: 306998 - DNA, 12 bp, Artificial Sequence
  Oligonucleotide primer for the detection of SNP TSC0022290
ctcacactcaaa

SEQ ID NO: 306999 - DNA, 12 bp, Artificial Sequence
  Oligonukleotid-Primer
ctcacgctcaaa

SEQ ID NO: 307000 - DNA, 12 bp, Artificial Sequence
  Oligonucleotide primer for the detection of SNP TSC0022290
tagttttaggtt

SEQ ID NO: 307001 - DNA, 12 bp, Artificial Sequence
  Oligonucleotide primer for the detection of SNP TSC0022291
ccctctacaccc

SEQ ID NO: 307002 - DNA, 12 bp, Artificial Sequence
  Oligonucleotide primer for the detection of SNP TSC0022291
gagaattttagg

SEQ ID NO: 307003 - DNA, 12 bp, Artificial Sequence
  Oligonukleotid-Primer
actatactaaac

SEQ ID NO: 307004 - DNA, 12 bp, Artificial Sequence
  Oligonucleotide primer for the detection of SNP TSC0022292
ggaggtgatggg

SEQ ID NO: 307005 - DNA, 12 bp, Artificial Sequence
  Oligonucleotide primer for the detection of SNP TSC0022292
ggaggtgacggg

SEQ ID NO: 307006 - DNA, 12 bp, Artificial Sequence
  Oligonucleotide primer for the detection of SNP TSC0022293
tttatcttataa

SEQ ID NO: 307007 - DNA, 12 bp, Artificial Sequence
  Oligonucleotide primer for the detection of SNP TSC0022293
tttattttttaa

SEQ ID NO: 307008 - DNA, 12 bp, Artificial Sequence
  Oligonucleotide primer for the detection of SNP TSC0022293
tttatctctcaa

SEQ ID NO: 307009 - DNA, 12 bp, Artificial Sequence
  Oligonucleotide primer for the detection of SNP TSC0022293
tgttttatggtt

SEQ ID NO: 307010 - DNA, 12 bp, Artificial Sequence
  Oligonucleotide primer for the detection of SNP TSC0022294
tatatatatatc

SEQ ID NO: 307011 - DNA, 12 bp, Artificial Sequence
  Oligonucleotide primer for the detection of SNP TSC0022294
ttaaattatata

SEQ ID NO: 307012 - DNA, 12 bp, Artificial Sequence
  Oligonucleotide primer for the detection of SNP TSC0022295
acactcaaaata

SEQ ID NO: 307013 - DNA, 12 bp, Artificial Sequence
  Oligonucleotide primer for the detection of SNP TSC0022295
attatgtttttt

SEQ ID NO: 307014 - DNA, 12 bp, Artificial Sequence
  Oligonucleotide primer for the detection of SNP TSC0022295
accatatttccc

SEQ ID NO: 307015 - DNA, 12 bp, Artificial Sequence
  Oligonucleotide primer for the detection of SNP TSC0022295
gtatttaaagtg

SEQ ID NO: 307016 - DNA, 12 bp, Artificial Sequence
  Oligonucleotide primer for the detection of SNP TSC0022298
tatatataactc

SEQ ID NO: 307017 - DNA, 12 bp, Artificial Sequence
  Oligonucleotide primer for the detection of SNP TSC0022298
aaaatttgtagg

SEQ ID NO: 307018 - DNA, 12 bp, Artificial Sequence
  Oligonucleotide primer for the detection of SNP TSC0022298
aaaattcgtagg

SEQ ID NO: 307019 - DNA, 12 bp, Artificial Sequence
  Oligonucleotide primer for the detection of SNP TSC0022299
gtgtgtaaaata

SEQ ID NO: 307020 - DNA, 12 bp, Artificial Sequence
  Oligonucleotide primer for the detection of SNP TSC0022299
gtgcgtaaaata

SEQ ID NO: 307021 - DNA, 12 bp, Artificial Sequence
  Oligonucleotide primer for the detection of SNP TSC0022300
tcataaacaaaa

SEQ ID NO: 307022 - DNA, 12 bp, Artificial Sequence
  Oligonucleotide primer for the detection of SNP TSC0022300
taagtattattt

SEQ ID NO: 307023 - DNA, 12 bp, Artificial Sequence
  Oligonucleotide primer for the detection of SNP TSC0022300
caaatattatcc

SEQ ID NO: 307024 - DNA, 12 bp, Artificial Sequence
  Oligonucleotide primer for the detection of SNP TSC0022300
ttataaatagga

SEQ ID NO: 307025 - DNA, 12 bp, Artificial Sequence
  Oligonucleotide primer for the detection of SNP TSC0022304
caaattcatact

SEQ ID NO: 307026 - DNA, 12 bp, Artificial Sequence
  Oligonucleotide primer for the detection of SNP TSC0022304
caaattcgtact

SEQ ID NO: 307027 - DNA, 12 bp, Artificial Sequence
  Oligonucleotide primer for the detection of SNP TSC0022304
gttgttttggaa

SEQ ID NO: 307028 - DNA, 12 bp, Artificial Sequence
  Oligonucleotide primer for the detection of SNP TSC0022305
ccgctaatctaa

SEQ ID NO: 307029 - DNA, 12 bp, Artificial Sequence
  Oligonucleotide primer for the detection of SNP TSC0022305
aaagtagttatt

SEQ ID NO: 307030 - DNA, 12 bp, Artificial Sequence
  Oligonucleotide primer for the detection of SNP TSC0022305
aaaacaaccacc

SEQ ID NO: 307031 - DNA, 12 bp, Artificial Sequence
  Oligonucleotide primer for the detection of SNP TSC0022305
tcgttgatttga

SEQ ID NO: 307032 - DNA, 12 bp, Artificial Sequence
  Oligonucleotide primer for the detection of SNP TSC0022306
cacaaaaactac

SEQ ID NO: 307033 - DNA, 12 bp, Artificial Sequence
  Oligonucleotide primer for the detection of SNP TSC0022306
tgttgattagag

SEQ ID NO: 307034 - DNA, 12 bp, Artificial Sequence
  Oligonucleotide primer for the detection of SNP TSC0022307
aaacatttcttt

SEQ ID NO: 307035 - DNA, 12 bp, Artificial Sequence
  Oligonucleotide primer for the detection of SNP TSC0022307
tagagaaagaga

SEQ ID NO: 307036 - DNA, 12 bp, Artificial Sequence
  Oligonucleotide primer for the detection of SNP TSC0022308
tagttattagga

SEQ ID NO: 307037 - DNA, 12 bp, Artificial Sequence
  Oligonucleotide primer for the detection of SNP TSC0022308
taactaccaaaa

SEQ ID NO: 307038 - DNA, 12 bp, Artificial Sequence
  Oligonucleotide primer for the detection of SNP TSC0022308
gaggaatgaggc

SEQ ID NO: 307039 - DNA, 12 bp, Artificial Sequence
  Oligonucleotide primer for the detection of SNP TSC0022310
aacttaaacaca

SEQ ID NO: 307040 - DNA, 12 bp, Artificial Sequence
  Oligonucleotide primer for the detection of SNP TSC0022310
aacttaaacgca

SEQ ID NO: 307041 - DNA, 12 bp, Artificial Sequence
  Oligonucleotide primer for the detection of SNP TSC0022310
attgtagtttta

SEQ ID NO: 307042 - DNA, 12 bp, Artificial Sequence
  Oligonucleotide primer for the detection of SNP TSC0022311
aaaacttacact

SEQ ID NO: 307043 - DNA, 12 bp, Artificial Sequence
  Oligonucleotide primer for the detection of SNP TSC0022311
ggttagttagta

SEQ ID NO: 307044 - DNA, 12 bp, Artificial Sequence
  Oligonucleotide primer for the detection of SNP TSC0022312
aaactaatttcc

SEQ ID NO: 307045 - DNA, 12 bp, Artificial Sequence
  Oligonucleotide primer for the detection of SNP TSC0022312
taaggaatgaaa

SEQ ID NO: 307046 - DNA, 12 bp, Artificial Sequence
  Oligonucleotide primer for the detection of SNP TSC0022312
taaggaacgaaa

SEQ ID NO: 307047 - DNA, 12 bp, Artificial Sequence
  Oligonucleotide primer for the detection of SNP TSC0022313
ttctcaaaactc

SEQ ID NO: 307048 - DNA, 12 bp, Artificial Sequence
  Oligonucleotide primer for the detection of SNP TSC0022313
agttagagtgaa

SEQ ID NO: 307049 - DNA, 12 bp, Artificial Sequence
  Oligonucleotide primer for the detection of SNP TSC0022314
cacattttctcc

SEQ ID NO: 307050 - DNA, 12 bp, Artificial Sequence
  Oligonucleotide primer for the detection of SNP TSC0022316
acccaccttaac

SEQ ID NO: 307051 - DNA, 12 bp, Artificial Sequence
  Oligonucleotide primer for the detection of SNP TSC0022317
ttagggtggttt

SEQ ID NO: 307052 - DNA, 12 bp, Artificial Sequence
  Oligonucleotide primer for the detection of SNP TSC0022318
taaacctcaacc

SEQ ID NO: 307053 - DNA, 12 bp, Artificial Sequence
  Oligonucleotide primer for the detection of SNP TSC0022318
taaacctcgacc

SEQ ID NO: 307054 - DNA, 12 bp, Artificial Sequence
  Oligonucleotide primer for the detection of SNP TSC0022318
gattagtagtag

SEQ ID NO: 307055 - DNA, 12 bp, Artificial Sequence
  Oligonucleotide primer for the detection of SNP TSC0022318
aaccaacaacaa

SEQ ID NO: 307056 - DNA, 12 bp, Artificial Sequence
  Oligonucleotide primer for the detection of SNP TSC0022318
gggttttggttt

SEQ ID NO: 307057 - DNA, 12 bp, Artificial Sequence
  Oligonucleotide primer for the detection of SNP TSC0022318
gggtttcggttt

SEQ ID NO: 307058 - DNA, 12 bp, Artificial Sequence
  Oligonucleotide primer for the detection of SNP TSC0022319
attatatattac

SEQ ID NO: 307059 - DNA, 12 bp, Artificial Sequence
  Oligonucleotide primer for the detection of SNP TSC0022319
tattatatgtaa

SEQ ID NO: 307060 - DNA, 12 bp, Artificial Sequence
  Oligonucleotide primer for the detection of SNP TSC0022320
cacattacatat

SEQ ID NO: 307061 - DNA, 12 bp, Artificial Sequence
  Oligonucleotide primer for the detection of SNP TSC0022321
catataatatat

SEQ ID NO: 307062 - DNA, 12 bp, Artificial Sequence
  Oligonucleotide primer for the detection of SNP TSC0022321
tatataatatat

SEQ ID NO: 307063 - DNA, 12 bp, Artificial Sequence
  Oligonucleotide primer for the detection of SNP TSC0022322
aaaaacccacac

SEQ ID NO: 307064 - DNA, 12 bp, Artificial Sequence
  Oligonucleotide primer for the detection of SNP TSC0022322
agtatttattag

SEQ ID NO: 307065 - DNA, 12 bp, Artificial Sequence
  Oligonucleotide primer for the detection of SNP TSC0022322
aacacctatcaa

SEQ ID NO: 307066 - DNA, 12 bp, Artificial Sequence
  Oligonucleotide primer for the detection of SNP TSC0022322
ggagatttatat

SEQ ID NO: 307067 - DNA, 12 bp, Artificial Sequence
  Oligonucleotide primer for the detection of SNP TSC0022326
taaacaaacaac

SEQ ID NO: 307068 - DNA, 12 bp, Artificial Sequence
  Oligonucleotide primer for the detection of SNP TSC0022326
tatttaatgaag

SEQ ID NO: 307069 - DNA, 12 bp, Artificial Sequence
  Oligonucleotide primer for the detection of SNP TSC0022326
tatttaacgaag

SEQ ID NO: 307070 - DNA, 12 bp, Artificial Sequence
  Oligonucleotide primer for the detection of SNP TSC0022327
ctccactaaact

SEQ ID NO: 307071 - DNA, 12 bp, Artificial Sequence
  Oligonucleotide primer for the detection of SNP TSC0022327
ctccgctaaact

SEQ ID NO: 307072 - DNA, 12 bp, Artificial Sequence
  Oligonucleotide primer for the detection of SNP TSC0022327
agtatggaaggt

SEQ ID NO: 307073 - DNA, 12 bp, Artificial Sequence
  Oligonucleotide primer for the detection of SNP TSC0022327
ttttgttgggtt

SEQ ID NO: 307074 - DNA, 12 bp, Artificial Sequence
  Oligonucleotide primer for the detection of SNP TSC0022327
tttcgttgggtt

SEQ ID NO: 307075 - DNA, 12 bp, Artificial Sequence
  Oligonucleotide primer for the detection of SNP TSC0022331
cctaaaataccc

SEQ ID NO: 307076 - DNA, 12 bp, Artificial Sequence
  Oligonucleotide primer for the detection of SNP TSC0022331
ttattattagag

SEQ ID NO: 307077 - DNA, 12 bp, Artificial Sequence
  Oligonucleotide primer for the detection of SNP TSC0022332
aaagagtatggg

SEQ ID NO: 307078 - DNA, 12 bp, Artificial Sequence
  Oligonucleotide primer for the detection of SNP TSC0022336
taaccttttata

SEQ ID NO: 307079 - DNA, 12 bp, Artificial Sequence
  Oligonucleotide primer for the detection of SNP TSC0022336
tttagtaattta

SEQ ID NO: 307080 - DNA, 12 bp, Artificial Sequence
  Oligonucleotide primer for the detection of SNP TSC0022336
tccaacaattta

SEQ ID NO: 307081 - DNA, 12 bp, Artificial Sequence
  Oligonucleotide primer for the detection of SNP TSC0022336
tggttttttata

SEQ ID NO: 307082 - DNA, 12 bp, Artificial Sequence
  Oligonucleotide primer for the detection of SNP TSC0022337
aaccaaaaaacc

SEQ ID NO: 307083 - DNA, 12 bp, Artificial Sequence
  Oligonucleotide primer for the detection of SNP TSC0022337
tgtagaagtgaa

SEQ ID NO: 307084 - DNA, 12 bp, Artificial Sequence
  Oligonucleotide primer for the detection of SNP TSC0022337
tgtagaagcgaa

SEQ ID NO: 307085 - DNA, 12 bp, Artificial Sequence
  Oligonucleotide primer for the detection of SNP TSC0022337
tacaaaaacaaa

SEQ ID NO: 307086 - DNA, 12 bp, Artificial Sequence
  Oligonucleotide primer for the detection of SNP TSC0022337
tacaaaaacgaa

SEQ ID NO: 307087 - DNA, 12 bp, Artificial Sequence
  Oligonucleotide primer for the detection of SNP TSC0022337
agttagaaggtt

SEQ ID NO: 307088 - DNA, 12 bp, Artificial Sequence
  Oligonucleotide primer for the detection of SNP TSC0022339
caattttcaccc

SEQ ID NO: 307089 - DNA, 12 bp, Artificial Sequence
  Oligonucleotide primer for the detection of SNP TSC0022339
attgttttggag

SEQ ID NO: 307090 - DNA, 12 bp, Artificial Sequence
  Oligonucleotide primer for the detection of SNP TSC0022339
actatcttaaaa

SEQ ID NO: 307091 - DNA, 12 bp, Artificial Sequence
  Oligonucleotide primer for the detection of SNP TSC0022339
tagtttttattt

SEQ ID NO: 307092 - DNA, 12 bp, Artificial Sequence
  Oligonucleotide primer for the detection of SNP TSC0022339
tagtttttattc

SEQ ID NO: 307093 - DNA, 12 bp, Artificial Sequence
  Oligonucleotide primer for the detection of SNP TSC0022340
aaacccaactaa

SEQ ID NO: 307094 - DNA, 12 bp, Artificial Sequence
  Oligonucleotide primer for the detection of SNP TSC0022340
ttattaaaaatt

SEQ ID NO: 307095 - DNA, 12 bp, Artificial Sequence
  Oligonucleotide primer for the detection of SNP TSC0022340
tagttaattttt

SEQ ID NO: 307096 - DNA, 12 bp, Artificial Sequence
  Oligonucleotide primer for the detection of SNP TSC0022342
cccactacactt

SEQ ID NO: 307097 - DNA, 12 bp, Artificial Sequence
  Oligonucleotide primer for the detection of SNP TSC0022342
aaaaaaaaaatg

SEQ ID NO: 307098 - DNA, 12 bp, Artificial Sequence
  Oligonucleotide primer for the detection of SNP TSC0022343
taagtttagatt

SEQ ID NO: 307099 - DNA, 12 bp, Artificial Sequence
  Oligonucleotide primer for the detection of SNP TSC0022343
taaatccaaacc

SEQ ID NO: 307100 - DNA, 12 bp, Artificial Sequence
  Oligonucleotide primer for the detection of SNP TSC0022343
gtttagagtggg

SEQ ID NO: 307101 - DNA, 12 bp, Artificial Sequence
  Oligonucleotide primer for the detection of SNP TSC0022344
caaacccaactc

SEQ ID NO: 307102 - DNA, 12 bp, Artificial Sequence
  Oligonucleotide primer for the detection of SNP TSC0022344
cgaacccaactc

SEQ ID NO: 307103 - DNA, 12 bp, Artificial Sequence
  Oligonucleotide primer for the detection of SNP TSC0022344
gagtgttaattt

SEQ ID NO: 307104 - DNA, 12 bp, Artificial Sequence
  Oligonukleotid-Primer
gagtgttaattc

SEQ ID NO: 307105 - DNA, 12 bp, Artificial Sequence
  Oligonucleotide primer for the detection of SNP TSC0022344
aaatattaattc

SEQ ID NO: 307106 - DNA, 12 bp, Artificial Sequence
  Oligonucleotide primer for the detection of SNP TSC0022344
gaatttagtttt

SEQ ID NO: 307107 - DNA, 12 bp, Artificial Sequence
  Oligonucleotide primer for the detection of SNP TSC0022348
aatttatataat

SEQ ID NO: 307108 - DNA, 12 bp, Artificial Sequence
  Oligonucleotide primer for the detection of SNP TSC0022348
tttggtagtata

SEQ ID NO: 307109 - DNA, 12 bp, Artificial Sequence
  Oligonucleotide primer for the detection of SNP TSC0022353
aataaaacttta

SEQ ID NO: 307110 - DNA, 12 bp, Artificial Sequence
  Oligonucleotide primer for the detection of SNP TSC0022353
cctcaatacccc

SEQ ID NO: 307111 - DNA, 12 bp, Artificial Sequence
  Oligonucleotide primer for the detection of SNP TSC0022353
tggtgaggtttt

SEQ ID NO: 307112 - DNA, 12 bp, Artificial Sequence
  Oligonucleotide primer for the detection of SNP TSC0022354
ctccaatcccct

SEQ ID NO: 307113 - DNA, 12 bp, Artificial Sequence
  Oligonucleotide primer for the detection of SNP TSC0022354
ttttgtatgtgt

SEQ ID NO: 307114 - DNA, 12 bp, Artificial Sequence
  Oligonucleotide primer for the detection of SNP TSC0022354
ctctacatatat

SEQ ID NO: 307115 - DNA, 12 bp, Artificial Sequence
  Oligonucleotide primer for the detection of SNP TSC0022355
ccaccaccacca

SEQ ID NO: 307116 - DNA, 12 bp, Artificial Sequence
  Oligonucleotide primer for the detection of SNP TSC0022356
catccccacaac

SEQ ID NO: 307117 - DNA, 12 bp, Artificial Sequence
  Oligonucleotide primer for the detection of SNP TSC0022356
catccccgcaac

SEQ ID NO: 307118 - DNA, 12 bp, Artificial Sequence
  Oligonucleotide primer for the detection of SNP TSC0022356
cgtccccacaac

SEQ ID NO: 307119 - DNA, 12 bp, Artificial Sequence
  Oligonucleotide primer for the detection of SNP TSC0022356
cgtccccgcaac

SEQ ID NO: 307120 - DNA, 12 bp, Artificial Sequence
  Oligonucleotide primer for the detection of SNP TSC0022356
ggttttttgtgt

SEQ ID NO: 307121 - DNA, 12 bp, Artificial Sequence
  Oligonucleotide primer for the detection of SNP TSC0022356
ggtttttcgtgt

SEQ ID NO: 307122 - DNA, 12 bp, Artificial Sequence
  Oligonucleotide primer for the detection of SNP TSC0022356
ggttttttgcgt

SEQ ID NO: 307123 - DNA, 12 bp, Artificial Sequence
  Oligonucleotide primer for the detection of SNP TSC0022356
ggttttttgtgc

SEQ ID NO: 307124 - DNA, 12 bp, Artificial Sequence
  Oligonucleotide primer for the detection of SNP TSC0022356
ggtttttcgcgt

SEQ ID NO: 307125 - DNA, 12 bp, Artificial Sequence
  Oligonucleotide primer for the detection of SNP TSC0022356
ggtttttcgtgc

SEQ ID NO: 307126 - DNA, 12 bp, Artificial Sequence
  Oligonucleotide primer for the detection of SNP TSC0022356
ggttttttgcgc

SEQ ID NO: 307127 - DNA, 12 bp, Artificial Sequence
  Oligonucleotide primer for the detection of SNP TSC0022356
ggtttttcgcgc

SEQ ID NO: 307128 - DNA, 12 bp, Artificial Sequence
  Oligonucleotide primer for the detection of SNP TSC0022356
aaactctccaca

SEQ ID NO: 307129 - DNA, 12 bp, Artificial Sequence
  Oligonucleotide primer for the detection of SNP TSC0022356
aaactctccacg

SEQ ID NO: 307130 - DNA, 12 bp, Artificial Sequence
  Oligonucleotide primer for the detection of SNP TSC0022356
aaactctccgca

SEQ ID NO: 307131 - DNA, 12 bp, Artificial Sequence
  Oligonucleotide primer for the detection of SNP TSC0022356
aaactctccgcg

SEQ ID NO: 307132 - DNA, 12 bp, Artificial Sequence
  Oligonucleotide primer for the detection of SNP TSC0022356
tgtttttgtagt

SEQ ID NO: 307133 - DNA, 12 bp, Artificial Sequence
  Oligonucleotide primer for the detection of SNP TSC0022356
cgtttttgtagt

SEQ ID NO: 307134 - DNA, 12 bp, Artificial Sequence
  Oligonucleotide primer for the detection of SNP TSC0022356
tgttttcgtagt

SEQ ID NO: 307135 - DNA, 12 bp, Artificial Sequence
  Oligonucleotide primer for the detection of SNP TSC0022356
cgttttcgtagt

SEQ ID NO: 307136 - DNA, 12 bp, Artificial Sequence
  Oligonucleotide primer for the detection of SNP TSC0022357
tctacaacaaac

SEQ ID NO: 307137 - DNA, 12 bp, Artificial Sequence
  Oligonucleotide primer for the detection of SNP TSC0022357
gaggtggagagt

SEQ ID NO: 307138 - DNA, 12 bp, Artificial Sequence
  Oligonucleotide primer for the detection of SNP TSC0022357
gaggtggagagc

SEQ ID NO: 307139 - DNA, 12 bp, Artificial Sequence
  Oligonucleotide primer for the detection of SNP TSC0022357
tttgtagtaagt

SEQ ID NO: 307140 - DNA, 12 bp, Artificial Sequence
  Oligonucleotide primer for the detection of SNP TSC0022358
aattcctcaaaa

SEQ ID NO: 307141 - DNA, 12 bp, Artificial Sequence
  Oligonucleotide primer for the detection of SNP TSC0022358
agtaattgtatt

SEQ ID NO: 307142 - DNA, 12 bp, Artificial Sequence
  Oligonucleotide primer for the detection of SNP TSC0022358
aaacaattacat

SEQ ID NO: 307143 - DNA, 12 bp, Artificial Sequence
  Oligonucleotide primer for the detection of SNP TSC0022358
gattttttaaaa

SEQ ID NO: 307144 - DNA, 12 bp, Artificial Sequence
  Oligonucleotide primer for the detection of SNP TSC0022360
aaaatcttatta

SEQ ID NO: 307145 - DNA, 12 bp, Artificial Sequence
  Oligonucleotide primer for the detection of SNP TSC0022360
ttagtttttttc

SEQ ID NO: 307146 - DNA, 12 bp, Artificial Sequence
  Oligonucleotide primer for the detection of SNP TSC0022360
ccaacccctccc

SEQ ID NO: 307147 - DNA, 12 bp, Artificial Sequence
  Oligonucleotide primer for the detection of SNP TSC0022360
gagattttgttg

SEQ ID NO: 307148 - DNA, 12 bp, Artificial Sequence
  Oligonucleotide primer for the detection of SNP TSC0022361
ttttcttttttt

SEQ ID NO: 307149 - DNA, 12 bp, Artificial Sequence
  Oligonucleotide primer for the detection of SNP TSC0022362
acaaaatttaaa

SEQ ID NO: 307150 - DNA, 12 bp, Artificial Sequence
  Oligonucleotide primer for the detection of SNP TSC0022362
ttcacttctact

SEQ ID NO: 307151 - DNA, 12 bp, Artificial Sequence
  Oligonucleotide primer for the detection of SNP TSC0022362
ataaaatttaga

SEQ ID NO: 307152 - DNA, 12 bp, Artificial Sequence
  Oligonucleotide primer for the detection of SNP TSC0022363
tctcatatttct

SEQ ID NO: 307153 - DNA, 12 bp, Artificial Sequence
  Oligonucleotide primer for the detection of SNP TSC0022364
tacttcacccct

SEQ ID NO: 307154 - DNA, 12 bp, Artificial Sequence
  Oligonucleotide primer for the detection of SNP TSC0022364
gaaataggttta

SEQ ID NO: 307155 - DNA, 12 bp, Artificial Sequence
  Oligonucleotide primer for the detection of SNP TSC0022365
ttcaatcaatat

SEQ ID NO: 307156 - DNA, 12 bp, Artificial Sequence
  Oligonucleotide primer for the detection of SNP TSC0022365
gagtatttaata

SEQ ID NO: 307157 - DNA, 12 bp, Artificial Sequence
  Oligonucleotide primer for the detection of SNP TSC0022366
tctatcctaaca

SEQ ID NO: 307158 - DNA, 12 bp, Artificial Sequence
  Oligonucleotide primer for the detection of SNP TSC0022366
tggattatttta

SEQ ID NO: 307159 - DNA, 12 bp, Artificial Sequence
  Oligonucleotide primer for the detection of SNP TSC0022366
taaaccacccca

SEQ ID NO: 307160 - DNA, 12 bp, Artificial Sequence
  Oligonucleotide primer for the detection of SNP TSC0022366
tttgttttggta

SEQ ID NO: 307161 - DNA, 12 bp, Artificial Sequence
  Oligonucleotide primer for the detection of SNP TSC0022367
taaaatccattc

SEQ ID NO: 307162 - DNA, 12 bp, Artificial Sequence
  Oligonucleotide primer for the detection of SNP TSC0022367
taaaatccgttc

SEQ ID NO: 307163 - DNA, 12 bp, Artificial Sequence
  Oligonucleotide primer for the detection of SNP TSC0022367
ttggtagtgatt

SEQ ID NO: 307164 - DNA, 12 bp, Artificial Sequence
  Oligonucleotide primer for the detection of SNP TSC0022369
actcttatcacc

SEQ ID NO: 307165 - DNA, 12 bp, Artificial Sequence
  Oligonucleotide primer for the detection of SNP TSC0022369
gctcttatcacc

SEQ ID NO: 307166 - DNA, 12 bp, Artificial Sequence
  Oligonucleotide primer for the detection of SNP TSC0022370
ttaaaatcaaaa

SEQ ID NO: 307167 - DNA, 12 bp, Artificial Sequence
  Oligonucleotide primer for the detection of SNP TSC0022370
gttggttttaaa

SEQ ID NO: 307168 - DNA, 12 bp, Artificial Sequence
  Oligonucleotide primer for the detection of SNP TSC0022370
actaatctcaaa

SEQ ID NO: 307169 - DNA, 12 bp, Artificial Sequence
  Oligonucleotide primer for the detection of SNP TSC0022370
tttgagattaag

SEQ ID NO: 307170 - DNA, 12 bp, Artificial Sequence
  Oligonucleotide primer for the detection of SNP TSC0022373
tatccccatcac

SEQ ID NO: 307171 - DNA, 12 bp, Artificial Sequence
  Oligonucleotide primer for the detection of SNP TSC0022373
tatccccatcgc

SEQ ID NO: 307172 - DNA, 12 bp, Artificial Sequence
  Oligonucleotide primer for the detection of SNP TSC0022373
ccctccaatctc

SEQ ID NO: 307173 - DNA, 12 bp, Artificial Sequence
  Oligonukleotid-Primer
tgtttttatcgt

SEQ ID NO: 307174 - DNA, 12 bp, Artificial Sequence
  Oligonucleotide primer for the detection of SNP TSC0022373
tgtttttattgc

SEQ ID NO: 307175 - DNA, 12 bp, Artificial Sequence
  Oligonucleotide primer for the detection of SNP TSC0022373
tgtttttatcgc

SEQ ID NO: 307176 - DNA, 12 bp, Artificial Sequence
  Oligonucleotide primer for the detection of SNP TSC0022375
ttttacaaataa

SEQ ID NO: 307177 - DNA, 12 bp, Artificial Sequence
  Oligonucleotide primer for the detection of SNP TSC0022375
ttaaagagtaat

SEQ ID NO: 307178 - DNA, 12 bp, Artificial Sequence
  Oligonucleotide primer for the detection of SNP TSC0022375
ccaaaaaataat

SEQ ID NO: 307179 - DNA, 12 bp, Artificial Sequence
  Oligonucleotide primer for the detection of SNP TSC0022375
ttttgtagatga

SEQ ID NO: 307180 - DNA, 12 bp, Artificial Sequence
  Oligonucleotide primer for the detection of SNP TSC0022376
taataatttcca

SEQ ID NO: 307181 - DNA, 12 bp, Artificial Sequence
  Oligonucleotide primer for the detection of SNP TSC0022376
ttagaggatatt

SEQ ID NO: 307182 - DNA, 12 bp, Artificial Sequence
  Oligonucleotide primer for the detection of SNP TSC0022376
atagtgattttt

SEQ ID NO: 307183 - DNA, 12 bp, Artificial Sequence
  Oligonucleotide primer for the detection of SNP TSC0022377
tcaataaccaaa

SEQ ID NO: 307184 - DNA, 12 bp, Artificial Sequence
  Oligonucleotide primer for the detection of SNP TSC0022377
atttaaatccaa

SEQ ID NO: 307185 - DNA, 12 bp, Artificial Sequence
  Oligonucleotide primer for the detection of SNP TSC0022377
ttagtaattaag

SEQ ID NO: 307186 - DNA, 12 bp, Artificial Sequence
  Oligonucleotide primer for the detection of SNP TSC0022378
ccaaccttaatt

SEQ ID NO: 307187 - DNA, 12 bp, Artificial Sequence
  Oligonucleotide primer for the detection of SNP TSC0022378
aatagggattta

SEQ ID NO: 307188 - DNA, 12 bp, Artificial Sequence
  Oligonucleotide primer for the detection of SNP TSC0022379
aagaaaaaatgt

SEQ ID NO: 307189 - DNA, 12 bp, Artificial Sequence
  Oligonucleotide primer for the detection of SNP TSC0022379
ttattaagaaaa

SEQ ID NO: 307190 - DNA, 12 bp, Artificial Sequence
  Oligonucleotide primer for the detection of SNP TSC0022380
attcctttaaaa

SEQ ID NO: 307191 - DNA, 12 bp, Artificial Sequence
  Oligonucleotide primer for the detection of SNP TSC0022380
tacttttacttt

SEQ ID NO: 307192 - DNA, 12 bp, Artificial Sequence
  Oligonucleotide primer for the detection of SNP TSC0022381
tataaacaaaac

SEQ ID NO: 307193 - DNA, 12 bp, Artificial Sequence
  Oligonucleotide primer for the detection of SNP TSC0022381
aggtattttatg

SEQ ID NO: 307194 - DNA, 12 bp, Artificial Sequence
  Oligonucleotide primer for the detection of SNP TSC0022381
aggtattttacg

SEQ ID NO: 307195 - DNA, 12 bp, Artificial Sequence
  Oligonucleotide primer for the detection of SNP TSC0022385
ctcattcaaatt

SEQ ID NO: 307196 - DNA, 12 bp, Artificial Sequence
  Oligonucleotide primer for the detection of SNP TSC0022385
agttttattagg

SEQ ID NO: 307197 - DNA, 12 bp, Artificial Sequence
  Oligonucleotide primer for the detection of SNP TSC0022386
cattaacataaa

SEQ ID NO: 307198 - DNA, 12 bp, Artificial Sequence
  Oligonucleotide primer for the detection of SNP TSC0022386
agaatatttggt

SEQ ID NO: 307199 - DNA, 12 bp, Artificial Sequence
  Oligonucleotide primer for the detection of SNP TSC0022386
agaatattcggt

SEQ ID NO: 307200 - DNA, 12 bp, Artificial Sequence
  Oligonucleotide primer for the detection of SNP TSC0022386
agaatatttggc

SEQ ID NO: 307201 - DNA, 12 bp, Artificial Sequence
  Oligonucleotide primer for the detection of SNP TSC0022386
agaatattcggc

SEQ ID NO: 307202 - DNA, 12 bp, Artificial Sequence
  Oligonucleotide primer for the detection of SNP TSC0022386
aaaacattcaac

SEQ ID NO: 307203 - DNA, 12 bp, Artificial Sequence
  Oligonucleotide primer for the detection of SNP TSC0022386
aaaacattcgac

SEQ ID NO: 307204 - DNA, 12 bp, Artificial Sequence
  Oligonucleotide primer for the detection of SNP TSC0022386
gatattagtatg

SEQ ID NO: 307205 - DNA, 12 bp, Artificial Sequence
  Oligonucleotide primer for the detection of SNP TSC0022387
caatttaactta

SEQ ID NO: 307206 - DNA, 12 bp, Artificial Sequence
  Oligonucleotide primer for the detection of SNP TSC0022387
ggttatagtaat

SEQ ID NO: 307207 - DNA, 12 bp, Artificial Sequence
  Oligonucleotide primer for the detection of SNP TSC0022387
aactacaataac

SEQ ID NO: 307208 - DNA, 12 bp, Artificial Sequence
  Oligonucleotide primer for the detection of SNP TSC0022387
tagtttggttta

SEQ ID NO: 307209 - DNA, 12 bp, Artificial Sequence
  Oligonucleotide primer for the detection of SNP TSC0022388
cactaatcaata

SEQ ID NO: 307210 - DNA, 12 bp, Artificial Sequence
  Oligonucleotide primer for the detection of SNP TSC0022388
cactaatcgata

SEQ ID NO: 307211 - DNA, 12 bp, Artificial Sequence
  Oligonucleotide primer for the detection of SNP TSC0022388
ttagggaaggtt

SEQ ID NO: 307212 - DNA, 12 bp, Artificial Sequence
  Oligonucleotide primer for the detection of SNP TSC0022388
ttagggaaggtc

SEQ ID NO: 307213 - DNA, 12 bp, Artificial Sequence
  Oligonucleotide primer for the detection of SNP TSC0022388
ttattggttggt

SEQ ID NO: 307214 - DNA, 12 bp, Artificial Sequence
  Oligonucleotide primer for the detection of SNP TSC0022388
ttattggtcggt

SEQ ID NO: 307215 - DNA, 12 bp, Artificial Sequence
  Oligonucleotide primer for the detection of SNP TSC0022389
acaccaaccaat

SEQ ID NO: 307216 - DNA, 12 bp, Artificial Sequence
  Oligonucleotide primer for the detection of SNP TSC0022389
acaccgaccaat

SEQ ID NO: 307217 - DNA, 12 bp, Artificial Sequence
  Oligonucleotide primer for the detection of SNP TSC0022389
gcaccaaccaat

SEQ ID NO: 307218 - DNA, 12 bp, Artificial Sequence
  Oligonucleotide primer for the detection of SNP TSC0022389
gcaccgaccaat

SEQ ID NO: 307219 - DNA, 12 bp, Artificial Sequence
  Oligonucleotide primer for the detection of SNP TSC0022389
gttggttttgag

SEQ ID NO: 307220 - DNA, 12 bp, Artificial Sequence
  Oligonucleotide primer for the detection of SNP TSC0022390
ctcctacatccc

SEQ ID NO: 307221 - DNA, 12 bp, Artificial Sequence
  Oligonucleotide primer for the detection of SNP TSC0022390
ctcctacgtccc

SEQ ID NO: 307222 - DNA, 12 bp, Artificial Sequence
  Oligonucleotide primer for the detection of SNP TSC0022390
agaggtagggag

SEQ ID NO: 307223 - DNA, 12 bp, Artificial Sequence
  Oligonucleotide primer for the detection of SNP TSC0022391
aacaactcctac

SEQ ID NO: 307224 - DNA, 12 bp, Artificial Sequence
  Oligonucleotide primer for the detection of SNP TSC0022391
gacaactcctac

SEQ ID NO: 307225 - DNA, 12 bp, Artificial Sequence
  Oligonucleotide primer for the detection of SNP TSC0022391
gtagggagaggg

SEQ ID NO: 307226 - DNA, 12 bp, Artificial Sequence
  Oligonucleotide primer for the detection of SNP TSC0022391
ggtagtttttat

SEQ ID NO: 307227 - DNA, 12 bp, Artificial Sequence
  Oligonucleotide primer for the detection of SNP TSC0022391
ggtagtttttac

SEQ ID NO: 307228 - DNA, 12 bp, Artificial Sequence
  Oligonucleotide primer for the detection of SNP TSC0022392
tcataaattttc

SEQ ID NO: 307229 - DNA, 12 bp, Artificial Sequence
  Oligonucleotide primer for the detection of SNP TSC0022392
taattaaatata

SEQ ID NO: 307230 - DNA, 12 bp, Artificial Sequence
  Oligonucleotide primer for the detection of SNP TSC0022396
cctctccaacca

SEQ ID NO: 307231 - DNA, 12 bp, Artificial Sequence
  Oligonucleotide primer for the detection of SNP TSC0022396
atatgggttggt

SEQ ID NO: 307232 - DNA, 12 bp, Artificial Sequence
  Oligonucleotide primer for the detection of SNP TSC0022396
acataaactaac

SEQ ID NO: 307233 - DNA, 12 bp, Artificial Sequence
  Oligonucleotide primer for the detection of SNP TSC0022396
ttttttagttat

SEQ ID NO: 307234 - DNA, 12 bp, Artificial Sequence
  Oligonucleotide primer for the detection of SNP TSC0022396
ttttttagttac

SEQ ID NO: 307235 - DNA, 12 bp, Artificial Sequence
  Oligonucleotide primer for the detection of SNP TSC0022397
atattcaaactt

SEQ ID NO: 307236 - DNA, 12 bp, Artificial Sequence
  Oligonucleotide primer for the detection of SNP TSC0022398
taataataattt

SEQ ID NO: 307237 - DNA, 12 bp, Artificial Sequence
  Oligonucleotide primer for the detection of SNP TSC0022398
tattttagattt

SEQ ID NO: 307238 - DNA, 12 bp, Artificial Sequence
  Oligonucleotide primer for the detection of SNP TSC0022398
acacatctcaaa

SEQ ID NO: 307239 - DNA, 12 bp, Artificial Sequence
  Oligonucleotide primer for the detection of SNP TSC0022398
agtgatgatttt

SEQ ID NO: 307240 - DNA, 12 bp, Artificial Sequence
  Oligonucleotide primer for the detection of SNP TSC0022399
ctaaaatacaaa

SEQ ID NO: 307241 - DNA, 12 bp, Artificial Sequence
  Oligonucleotide primer for the detection of SNP TSC0022399
ttatagtaagtt

SEQ ID NO: 307242 - DNA, 12 bp, Artificial Sequence
  Oligonucleotide primer for the detection of SNP TSC0022399
tataacaaacta

SEQ ID NO: 307243 - DNA, 12 bp, Artificial Sequence
  Oligonucleotide primer for the detection of SNP TSC0022399
ggtttggagtat

SEQ ID NO: 307244 - DNA, 12 bp, Artificial Sequence
  Oligonucleotide primer for the detection of SNP TSC0022400
cacaaaaacttc

SEQ ID NO: 307245 - DNA, 12 bp, Artificial Sequence
  Oligonucleotide primer for the detection of SNP TSC0022400
tgattaaaattg

SEQ ID NO: 307246 - DNA, 12 bp, Artificial Sequence
  Oligonukleotid-Primer
tgattaaaatcg

SEQ ID NO: 307247 - DNA, 12 bp, Artificial Sequence
  Oligonucleotide primer for the detection of SNP TSC0022401
aatgaggtaatt

SEQ ID NO: 307248 - DNA, 12 bp, Artificial Sequence
  Oligonucleotide primer for the detection of SNP TSC0022401
aagttttaggtg

SEQ ID NO: 307249 - DNA, 12 bp, Artificial Sequence
  Oligonucleotide primer for the detection of SNP TSC0022402
tttagttgggag

SEQ ID NO: 307250 - DNA, 12 bp, Artificial Sequence
  Oligonukleotid-Primer
tttagtcgggag

SEQ ID NO: 307251 - DNA, 12 bp, Artificial Sequence
  Oligonucleotide primer for the detection of SNP TSC0022402
cccaatcaaaaa

SEQ ID NO: 307252 - DNA, 12 bp, Artificial Sequence
  Oligonucleotide primer for the detection of SNP TSC0022402
cccaatcgaaaa

SEQ ID NO: 307253 - DNA, 12 bp, Artificial Sequence
  Oligonucleotide primer for the detection of SNP TSC0022402
tgtgtgagttgt

SEQ ID NO: 307254 - DNA, 12 bp, Artificial Sequence
  Oligonucleotide primer for the detection of SNP TSC0022403
gattttatgttt

SEQ ID NO: 307255 - DNA, 12 bp, Artificial Sequence
  Oligonucleotide primer for the detection of SNP TSC0022403
gattttacgttt

SEQ ID NO: 307256 - DNA, 12 bp, Artificial Sequence
  Oligonucleotide primer for the detection of SNP TSC0022403
gattttatgttc

SEQ ID NO: 307257 - DNA, 12 bp, Artificial Sequence
  Oligonucleotide primer for the detection of SNP TSC0022403
gattttacgttc

SEQ ID NO: 307258 - DNA, 12 bp, Artificial Sequence
  Oligonucleotide primer for the detection of SNP TSC0022403
aatcttacattc

SEQ ID NO: 307259 - DNA, 12 bp, Artificial Sequence
  Oligonucleotide primer for the detection of SNP TSC0022403
aatcttacgttc

SEQ ID NO: 307260 - DNA, 12 bp, Artificial Sequence
  Oligonucleotide primer for the detection of SNP TSC0022403
attttaggaatt

SEQ ID NO: 307261 - DNA, 12 bp, Artificial Sequence
  Oligonucleotide primer for the detection of SNP TSC0022404
cttttaattcct

SEQ ID NO: 307262 - DNA, 12 bp, Artificial Sequence
  Oligonucleotide primer for the detection of SNP TSC0022404
ggagatatattt

SEQ ID NO: 307263 - DNA, 12 bp, Artificial Sequence
  Oligonucleotide primer for the detection of SNP TSC0022405
ctataacataaa

SEQ ID NO: 307264 - DNA, 12 bp, Artificial Sequence
  Oligonucleotide primer for the detection of SNP TSC0022405
tattttttagtt

SEQ ID NO: 307265 - DNA, 12 bp, Artificial Sequence
  Oligonucleotide primer for the detection of SNP TSC0022405
taccccccaacc

SEQ ID NO: 307266 - DNA, 12 bp, Artificial Sequence
  Oligonucleotide primer for the detection of SNP TSC0022405
ttgtaatatagg

SEQ ID NO: 307267 - DNA, 12 bp, Artificial Sequence
  Oligonucleotide primer for the detection of SNP TSC0022406
attcctaaacat

SEQ ID NO: 307268 - DNA, 12 bp, Artificial Sequence
  Oligonucleotide primer for the detection of SNP TSC0022406
taaaagggtata

SEQ ID NO: 307269 - DNA, 12 bp, Artificial Sequence
  Oligonucleotide primer for the detection of SNP TSC0022411
ctaaatacctaa

SEQ ID NO: 307270 - DNA, 12 bp, Artificial Sequence
  Oligonucleotide primer for the detection of SNP TSC0022411
tgtgtttgtaat

SEQ ID NO: 307271 - DNA, 12 bp, Artificial Sequence
  Oligonucleotide primer for the detection of SNP TSC0022411
tgcgtttgtaat

SEQ ID NO: 307272 - DNA, 12 bp, Artificial Sequence
  Oligonucleotide primer for the detection of SNP TSC0022411
atacacctataa

SEQ ID NO: 307273 - DNA, 12 bp, Artificial Sequence
  Oligonucleotide primer for the detection of SNP TSC0022411
atacgcctataa

SEQ ID NO: 307274 - DNA, 12 bp, Artificial Sequence
  Oligonucleotide primer for the detection of SNP TSC0022411
ttgagtatttgg

SEQ ID NO: 307275 - DNA, 12 bp, Artificial Sequence
  Oligonucleotide primer for the detection of SNP TSC0022412
ttaaaatcaatc

SEQ ID NO: 307276 - DNA, 12 bp, Artificial Sequence
  Oligonucleotide primer for the detection of SNP TSC0022412
gagaggaagggg

SEQ ID NO: 307277 - DNA, 12 bp, Artificial Sequence
  Oligonucleotide primer for the detection of SNP TSC0022412
taaaattagttt

SEQ ID NO: 307278 - DNA, 12 bp, Artificial Sequence
  Oligonucleotide primer for the detection of SNP TSC0022416
cccatctacaac

SEQ ID NO: 307279 - DNA, 12 bp, Artificial Sequence
  Oligonucleotide primer for the detection of SNP TSC0022416
agtagttttaaa

SEQ ID NO: 307280 - DNA, 12 bp, Artificial Sequence
  Oligonucleotide primer for the detection of SNP TSC0022417
atatcaaaacaa

SEQ ID NO: 307281 - DNA, 12 bp, Artificial Sequence
  Oligonucleotide primer for the detection of SNP TSC0022417
ttgaggttgttt

SEQ ID NO: 307282 - DNA, 12 bp, Artificial Sequence
  Oligonucleotide primer for the detection of SNP TSC0022417
ttaaaactactt

SEQ ID NO: 307283 - DNA, 12 bp, Artificial Sequence
  Oligonucleotide primer for the detection of SNP TSC0022417
gatgttagaata

SEQ ID NO: 307284 - DNA, 12 bp, Artificial Sequence
  Oligonucleotide primer for the detection of SNP TSC0022418
aaatttcaaaac

SEQ ID NO: 307285 - DNA, 12 bp, Artificial Sequence
  Oligonucleotide primer for the detection of SNP TSC0022418
atagtgttttat

SEQ ID NO: 307286 - DNA, 12 bp, Artificial Sequence
  Oligonucleotide primer for the detection of SNP TSC0022418
ataatatttcat

SEQ ID NO: 307287 - DNA, 12 bp, Artificial Sequence
  Oligonucleotide primer for the detection of SNP TSC0022418
aaattttaagat

SEQ ID NO: 307288 - DNA, 12 bp, Artificial Sequence
  Oligonucleotide primer for the detection of SNP TSC0022420
caaatcctacta

SEQ ID NO: 307289 - DNA, 12 bp, Artificial Sequence
  Oligonucleotide primer for the detection of SNP TSC0022420
atgggggaattt

SEQ ID NO: 307290 - DNA, 12 bp, Artificial Sequence
  Oligonucleotide primer for the detection of SNP TSC0022420
taaaaaaaccta

SEQ ID NO: 307291 - DNA, 12 bp, Artificial Sequence
  Oligonucleotide primer for the detection of SNP TSC0022421
cctatacttacc

SEQ ID NO: 307292 - DNA, 12 bp, Artificial Sequence
  Oligonucleotide primer for the detection of SNP TSC0022421
tgagtagggata

SEQ ID NO: 307293 - DNA, 12 bp, Artificial Sequence
  Oligonucleotide primer for the detection of SNP TSC0022421
cgagtagggata

SEQ ID NO: 307294 - DNA, 12 bp, Artificial Sequence
  Oligonucleotide primer for the detection of SNP TSC0022421
caaacaaaaaca

SEQ ID NO: 307295 - DNA, 12 bp, Artificial Sequence
  Oligonucleotide primer for the detection of SNP TSC0022421
cgaacaaaaaca

SEQ ID NO: 307296 - DNA, 12 bp, Artificial Sequence
  Oligonucleotide primer for the detection of SNP TSC0022421
tttgtgtttgtt

SEQ ID NO: 307297 - DNA, 12 bp, Artificial Sequence
  Oligonucleotide primer for the detection of SNP TSC0022422
aaaacctaactt

SEQ ID NO: 307298 - DNA, 12 bp, Artificial Sequence
  Oligonucleotide primer for the detection of SNP TSC0022422
ctcctctatcta

SEQ ID NO: 307299 - DNA, 12 bp, Artificial Sequence
  Oligonucleotide primer for the detection of SNP TSC0022422
ggagtttggttt

SEQ ID NO: 307300 - DNA, 12 bp, Artificial Sequence
  Oligonucleotide primer for the detection of SNP TSC0022423
aaaatctaacca

SEQ ID NO: 307301 - DNA, 12 bp, Artificial Sequence
  Oligonucleotide primer for the detection of SNP TSC0022423
aaaatctaaccg

SEQ ID NO: 307302 - DNA, 12 bp, Artificial Sequence
  Oligonucleotide primer for the detection of SNP TSC0022423
aatgaatgttgt

SEQ ID NO: 307303 - DNA, 12 bp, Artificial Sequence
  Oligonucleotide primer for the detection of SNP TSC0022423
aggatttggttg

SEQ ID NO: 307304 - DNA, 12 bp, Artificial Sequence
  Oligonucleotide primer for the detection of SNP TSC0022423
aggatttggtcg

SEQ ID NO: 307305 - DNA, 12 bp, Artificial Sequence
  Oligonucleotide primer for the detection of SNP TSC0022424
ccttcaacctaa

SEQ ID NO: 307306 - DNA, 12 bp, Artificial Sequence
  Oligonucleotide primer for the detection of SNP TSC0022424
atttgttaaagt

SEQ ID NO: 307307 - DNA, 12 bp, Artificial Sequence
  Oligonucleotide primer for the detection of SNP TSC0022424
aacctatcaaaa

SEQ ID NO: 307308 - DNA, 12 bp, Artificial Sequence
  Oligonucleotide primer for the detection of SNP TSC0022424
tttttaatttgg

SEQ ID NO: 307309 - DNA, 12 bp, Artificial Sequence
  Oligonucleotide primer for the detection of SNP TSC0022426
aaaaacaaaatc

SEQ ID NO: 307310 - DNA, 12 bp, Artificial Sequence
  Oligonucleotide primer for the detection of SNP TSC0022426
tgtagagttaaa

SEQ ID NO: 307311 - DNA, 12 bp, Artificial Sequence
  Oligonucleotide primer for the detection of SNP TSC0022427
cccacaaaataa

SEQ ID NO: 307312 - DNA, 12 bp, Artificial Sequence
  Oligonucleotide primer for the detection of SNP TSC0022427
gattttagataa

SEQ ID NO: 307313 - DNA, 12 bp, Artificial Sequence
  Oligonucleotide primer for the detection of SNP TSC0022427
ttataaaatagt

SEQ ID NO: 307314 - DNA, 12 bp, Artificial Sequence
  Oligonucleotide primer for the detection of SNP TSC0022427
ttataaaatagc

SEQ ID NO: 307315 - DNA, 12 bp, Artificial Sequence
  Oligonucleotide primer for the detection of SNP TSC0022428
atatatttgatt

SEQ ID NO: 307316 - DNA, 12 bp, Artificial Sequence
  Oligonucleotide primer for the detection of SNP TSC0022428
atatatttgatc

SEQ ID NO: 307317 - DNA, 12 bp, Artificial Sequence
  Oligonucleotide primer for the detection of SNP TSC0022428
atatatttaacc

SEQ ID NO: 307318 - DNA, 12 bp, Artificial Sequence
  Oligonucleotide primer for the detection of SNP TSC0022428
aaaaatggaaat

SEQ ID NO: 307319 - DNA, 12 bp, Artificial Sequence
  Oligonukleotid-Primer
ataaaatcatta

SEQ ID NO: 307320 - DNA, 12 bp, Artificial Sequence
  Oligonucleotide primer for the detection of SNP TSC0022429
gtttgaataatt

SEQ ID NO: 307321 - DNA, 12 bp, Artificial Sequence
  Oligonucleotide primer for the detection of SNP TSC0022429
acctaaacaact

SEQ ID NO: 307322 - DNA, 12 bp, Artificial Sequence
  Oligonucleotide primer for the detection of SNP TSC0022429
gtggggttatta

SEQ ID NO: 307323 - DNA, 12 bp, Artificial Sequence
  Oligonucleotide primer for the detection of SNP TSC0022432
aaaacttatttc

SEQ ID NO: 307324 - DNA, 12 bp, Artificial Sequence
  Oligonucleotide primer for the detection of SNP TSC0022432
tttatgaaaggg

SEQ ID NO: 307325 - DNA, 12 bp, Artificial Sequence
  Oligonucleotide primer for the detection of SNP TSC0022433
aaaattgattta

SEQ ID NO: 307326 - DNA, 12 bp, Artificial Sequence
  Oligonucleotide primer for the detection of SNP TSC0022435
aaactatccccc

SEQ ID NO: 307327 - DNA, 12 bp, Artificial Sequence
  Oligonukleotid-Primer
aacaccatccaa

SEQ ID NO: 307328 - DNA, 12 bp, Artificial Sequence
  Oligonucleotide primer for the detection of SNP TSC0022436
aacaccgtccaa

SEQ ID NO: 307329 - DNA, 12 bp, Artificial Sequence
  Oligonucleotide primer for the detection of SNP TSC0022436
ataggaagtttg

SEQ ID NO: 307330 - DNA, 12 bp, Artificial Sequence
  Oligonucleotide primer for the detection of SNP TSC0022436
ataggaagttcg

SEQ ID NO: 307331 - DNA, 12 bp, Artificial Sequence
  Oligonucleotide primer for the detection of SNP TSC0022436
caaaaaatccaa

SEQ ID NO: 307332 - DNA, 12 bp, Artificial Sequence
  Oligonucleotide primer for the detection of SNP TSC0022436
caaaaaatccga

SEQ ID NO: 307333 - DNA, 12 bp, Artificial Sequence
  Oligonucleotide primer for the detection of SNP TSC0022436
aagtattgttta

SEQ ID NO: 307334 - DNA, 12 bp, Artificial Sequence
  Oligonucleotide primer for the detection of SNP TSC0022436
aagtatcgttta

SEQ ID NO: 307335 - DNA, 12 bp, Artificial Sequence
  Oligonucleotide primer for the detection of SNP TSC0022437
ctcctaaacacc

SEQ ID NO: 307336 - DNA, 12 bp, Artificial Sequence
  Oligonucleotide primer for the detection of SNP TSC0022437
agtttgagttgg

SEQ ID NO: 307337 - DNA, 12 bp, Artificial Sequence
  Oligonucleotide primer for the detection of SNP TSC0022437
agttcgagttgg

SEQ ID NO: 307338 - DNA, 12 bp, Artificial Sequence
  Oligonucleotide primer for the detection of SNP TSC0022437
atccaaactaaa

SEQ ID NO: 307339 - DNA, 12 bp, Artificial Sequence
  Oligonucleotide primer for the detection of SNP TSC0022437
atccgaactaaa

SEQ ID NO: 307340 - DNA, 12 bp, Artificial Sequence
  Oligonucleotide primer for the detection of SNP TSC0022437
tttttaagtatt

SEQ ID NO: 307341 - DNA, 12 bp, Artificial Sequence
  Oligonucleotide primer for the detection of SNP TSC0022437
tttttaagtatc

SEQ ID NO: 307342 - DNA, 12 bp, Artificial Sequence
  Oligonucleotide primer for the detection of SNP TSC0022438
aactaaaaaata

SEQ ID NO: 307343 - DNA, 12 bp, Artificial Sequence
  Oligonucleotide primer for the detection of SNP TSC0022438
ttaggaggagta

SEQ ID NO: 307344 - DNA, 12 bp, Artificial Sequence
  Oligonucleotide primer for the detection of SNP TSC0022438
ggttggaggatg

SEQ ID NO: 307345 - DNA, 12 bp, Artificial Sequence
  Oligonucleotide primer for the detection of SNP TSC0022443
aactcccctatc

SEQ ID NO: 307346 - DNA, 12 bp, Artificial Sequence
  Oligonucleotide primer for the detection of SNP TSC0022443
aagaatatattg

SEQ ID NO: 307347 - DNA, 12 bp, Artificial Sequence
  Oligonucleotide primer for the detection of SNP TSC0022443
aagaatatatcg

SEQ ID NO: 307348 - DNA, 12 bp, Artificial Sequence
  Oligonucleotide primer for the detection of SNP TSC0022444
catcacaataaa

SEQ ID NO: 307349 - DNA, 12 bp, Artificial Sequence
  Oligonucleotide primer for the detection of SNP TSC0022444
tataatgggagt

SEQ ID NO: 307350 - DNA, 12 bp, Artificial Sequence
  Oligonucleotide primer for the detection of SNP TSC0022444
tacaataaaaat

SEQ ID NO: 307351 - DNA, 12 bp, Artificial Sequence
  Oligonucleotide primer for the detection of SNP TSC0022444
ttattataataa

SEQ ID NO: 307352 - DNA, 12 bp, Artificial Sequence
  Oligonucleotide primer for the detection of SNP TSC0022452
taaagattataa

SEQ ID NO: 307353 - DNA, 12 bp, Artificial Sequence
  Oligonucleotide primer for the detection of SNP TSC0022452
caaaaactacaa

SEQ ID NO: 307354 - DNA, 12 bp, Artificial Sequence
  Oligonucleotide primer for the detection of SNP TSC0022452
gaaaaattagat

SEQ ID NO: 307355 - DNA, 12 bp, Artificial Sequence
  Oligonucleotide primer for the detection of SNP TSC0022453
caaaaaaaactc

SEQ ID NO: 307356 - DNA, 12 bp, Artificial Sequence
  Oligonucleotide primer for the detection of SNP TSC0022453
gtttatagtagt

SEQ ID NO: 307357 - DNA, 12 bp, Artificial Sequence
  Oligonucleotide primer for the detection of SNP TSC0022453
atccataataat

SEQ ID NO: 307358 - DNA, 12 bp, Artificial Sequence
  Oligonucleotide primer for the detection of SNP TSC0022453
tagggagggttt

SEQ ID NO: 307359 - DNA, 12 bp, Artificial Sequence
  Oligonucleotide primer for the detection of SNP TSC0022456
caaaatctataa

SEQ ID NO: 307360 - DNA, 12 bp, Artificial Sequence
  Oligonucleotide primer for the detection of SNP TSC0022456
atagatttaggt

SEQ ID NO: 307361 - DNA, 12 bp, Artificial Sequence
  Oligonucleotide primer for the detection of SNP TSC0022456
aacaaatttaaa

SEQ ID NO: 307362 - DNA, 12 bp, Artificial Sequence
  Oligonucleotide primer for the detection of SNP TSC0022456
tagaatttatga

SEQ ID NO: 307363 - DNA, 12 bp, Artificial Sequence
  Oligonucleotide primer for the detection of SNP TSC0022461
acaataaataca

SEQ ID NO: 307364 - DNA, 12 bp, Artificial Sequence
  Oligonucleotide primer for the detection of SNP TSC0022461
acaataaatacg

SEQ ID NO: 307365 - DNA, 12 bp, Artificial Sequence
  Oligonucleotide primer for the detection of SNP TSC0022461
acgataaataca

SEQ ID NO: 307366 - DNA, 12 bp, Artificial Sequence
  Oligonucleotide primer for the detection of SNP TSC0022461
acgataaatacg

SEQ ID NO: 307367 - DNA, 12 bp, Artificial Sequence
  Oligonucleotide primer for the detection of SNP TSC0022461
atattaagtatt

SEQ ID NO: 307368 - DNA, 12 bp, Artificial Sequence
  Oligonucleotide primer for the detection of SNP TSC0022461
acaccaaatacc

SEQ ID NO: 307369 - DNA, 12 bp, Artificial Sequence
  Oligonucleotide primer for the detection of SNP TSC0022461
gtggtaggtatg

SEQ ID NO: 307370 - DNA, 12 bp, Artificial Sequence
  Oligonucleotide primer for the detection of SNP TSC0022461
gcggtaggtatg

SEQ ID NO: 307371 - DNA, 12 bp, Artificial Sequence
  Oligonucleotide primer for the detection of SNP TSC0022461
gtggtaggtacg

SEQ ID NO: 307372 - DNA, 12 bp, Artificial Sequence
  Oligonucleotide primer for the detection of SNP TSC0022461
gcggtaggtacg

SEQ ID NO: 307373 - DNA, 12 bp, Artificial Sequence
  Oligonucleotide primer for the detection of SNP TSC0022466
tcaatcaatccc

SEQ ID NO: 307374 - DNA, 12 bp, Artificial Sequence
  Oligonucleotide primer for the detection of SNP TSC0022466
agggagtgaatg

SEQ ID NO: 307375 - DNA, 12 bp, Artificial Sequence
  Oligonucleotide primer for the detection of SNP TSC0022467
atacatacatat

SEQ ID NO: 307376 - DNA, 12 bp, Artificial Sequence
  Oligonucleotide primer for the detection of SNP TSC0022467
tatgtatatata

SEQ ID NO: 307377 - DNA, 12 bp, Artificial Sequence
  Oligonucleotide primer for the detection of SNP TSC0022467
tatatacacaca

SEQ ID NO: 307378 - DNA, 12 bp, Artificial Sequence
  Oligonucleotide primer for the detection of SNP TSC0022467
atatatgtatgt

SEQ ID NO: 307379 - DNA, 12 bp, Artificial Sequence
  Oligonucleotide primer for the detection of SNP TSC0022468
atataaaatatt

SEQ ID NO: 307380 - DNA, 12 bp, Artificial Sequence
  Oligonucleotide primer for the detection of SNP TSC0022469
acaaaacatttt

SEQ ID NO: 307381 - DNA, 12 bp, Artificial Sequence
  Oligonucleotide primer for the detection of SNP TSC0022469
gtttatattttt

SEQ ID NO: 307382 - DNA, 12 bp, Artificial Sequence
  Oligonucleotide primer for the detection of SNP TSC0022469
atccatattttt

SEQ ID NO: 307383 - DNA, 12 bp, Artificial Sequence
  Oligonucleotide primer for the detection of SNP TSC0022469
gtaaagtatttt

SEQ ID NO: 307384 - DNA, 12 bp, Artificial Sequence
  Oligonucleotide primer for the detection of SNP TSC0022472
tagtatagttta

SEQ ID NO: 307385 - DNA, 12 bp, Artificial Sequence
  Oligonucleotide primer for the detection of SNP TSC0022476
tactcacaaaac

SEQ ID NO: 307386 - DNA, 12 bp, Artificial Sequence
  Oligonucleotide primer for the detection of SNP TSC0022476
ggaatagtgtgt

SEQ ID NO: 307387 - DNA, 12 bp, Artificial Sequence
  Oligonucleotide primer for the detection of SNP TSC0022476
aaacaatatata

SEQ ID NO: 307388 - DNA, 12 bp, Artificial Sequence
  Oligonukleotid-Primer
tgtttatagaat

SEQ ID NO: 307389 - DNA, 12 bp, Artificial Sequence
  Oligonucleotide primer for the detection of SNP TSC0022476
tgtttatagaac

SEQ ID NO: 307390 - DNA, 12 bp, Artificial Sequence
  Oligonucleotide primer for the detection of SNP TSC0022477
tccatccctaat

SEQ ID NO: 307391 - DNA, 12 bp, Artificial Sequence
  Oligonucleotide primer for the detection of SNP TSC0022477
gggtttaaagag

SEQ ID NO: 307392 - DNA, 12 bp, Artificial Sequence
  Oligonucleotide primer for the detection of SNP TSC0022477
aaattcaaaaaa

SEQ ID NO: 307393 - DNA, 12 bp, Artificial Sequence
  Oligonucleotide primer for the detection of SNP TSC0022478
aactccctccta

SEQ ID NO: 307394 - DNA, 12 bp, Artificial Sequence
  Oligonucleotide primer for the detection of SNP TSC0022478
agattatttttg

SEQ ID NO: 307395 - DNA, 12 bp, Artificial Sequence
  Oligonucleotide primer for the detection of SNP TSC0022478
aaccatccttaa

SEQ ID NO: 307396 - DNA, 12 bp, Artificial Sequence
  Oligonucleotide primer for the detection of SNP TSC0022479
aaaaattacaac

SEQ ID NO: 307397 - DNA, 12 bp, Artificial Sequence
  Oligonucleotide primer for the detection of SNP TSC0022479
atattagtttta

SEQ ID NO: 307398 - DNA, 12 bp, Artificial Sequence
  Oligonucleotide primer for the detection of SNP TSC0022479
atactaactcca

SEQ ID NO: 307399 - DNA, 12 bp, Artificial Sequence
  Oligonucleotide primer for the detection of SNP TSC0022479
aaagattatagt

SEQ ID NO: 307400 - DNA, 12 bp, Artificial Sequence
  Oligonucleotide primer for the detection of SNP TSC0022482
tatacaattcac

SEQ ID NO: 307401 - DNA, 12 bp, Artificial Sequence
  Oligonucleotide primer for the detection of SNP TSC0022482
agatgaatttat

SEQ ID NO: 307402 - DNA, 12 bp, Artificial Sequence
  Oligonucleotide primer for the detection of SNP TSC0022483
tcacatacatat

SEQ ID NO: 307403 - DNA, 12 bp, Artificial Sequence
  Oligonucleotide primer for the detection of SNP TSC0022483
atatggatatta

SEQ ID NO: 307404 - DNA, 12 bp, Artificial Sequence
  Oligonucleotide primer for the detection of SNP TSC0022484
gggttggaggat

SEQ ID NO: 307405 - DNA, 12 bp, Artificial Sequence
  Oligonucleotide primer for the detection of SNP TSC0022484
gggtcggaggat

SEQ ID NO: 307406 - DNA, 12 bp, Artificial Sequence
  Oligonucleotide primer for the detection of SNP TSC0022484
aaatcaaaaaat

SEQ ID NO: 307407 - DNA, 12 bp, Artificial Sequence
  Oligonucleotide primer for the detection of SNP TSC0022484
aaatcgaaaaat

SEQ ID NO: 307408 - DNA, 12 bp, Artificial Sequence
  Oligonucleotide primer for the detection of SNP TSC0022484
ttaggaaaggga

SEQ ID NO: 307409 - DNA, 12 bp, Artificial Sequence
  Oligonucleotide primer for the detection of SNP TSC0022485
cccaacacttta

SEQ ID NO: 307410 - DNA, 12 bp, Artificial Sequence
  Oligonucleotide primer for the detection of SNP TSC0022485
ttatttattttg

SEQ ID NO: 307411 - DNA, 12 bp, Artificial Sequence
  Oligonucleotide primer for the detection of SNP TSC0022485
ttatttatttcg

SEQ ID NO: 307412 - DNA, 12 bp, Artificial Sequence
  Oligonucleotide primer for the detection of SNP TSC0022489
actatctccaat

SEQ ID NO: 307413 - DNA, 12 bp, Artificial Sequence
  Oligonucleotide primer for the detection of SNP TSC0022489
tttatgttttag

SEQ ID NO: 307414 - DNA, 12 bp, Artificial Sequence
  Oligonucleotide primer for the detection of SNP TSC0022489
ttcatatcccaa

SEQ ID NO: 307415 - DNA, 12 bp, Artificial Sequence
  Oligonucleotide primer for the detection of SNP TSC0022489
attgtttttagt

SEQ ID NO: 307416 - DNA, 12 bp, Artificial Sequence
  Oligonucleotide primer for the detection of SNP TSC0022490
ataaaacaccta

SEQ ID NO: 307417 - DNA, 12 bp, Artificial Sequence
  Oligonucleotide primer for the detection of SNP TSC0022490
gtaggtgggtat

SEQ ID NO: 307418 - DNA, 12 bp, Artificial Sequence
  Oligonucleotide primer for the detection of SNP TSC0022490
gtaggcgggtat

SEQ ID NO: 307419 - DNA, 12 bp, Artificial Sequence
  Oligonucleotide primer for the detection of SNP TSC0022490
acaaacaaacac

SEQ ID NO: 307420 - DNA, 12 bp, Artificial Sequence
  Oligonucleotide primer for the detection of SNP TSC0022490
acaaacgaacac

SEQ ID NO: 307421 - DNA, 12 bp, Artificial Sequence
  Oligonucleotide primer for the detection of SNP TSC0022490
atggagtatttg

SEQ ID NO: 307422 - DNA, 12 bp, Artificial Sequence
  Oligonucleotide primer for the detection of SNP TSC0022491
ataccaaaaaaa

SEQ ID NO: 307423 - DNA, 12 bp, Artificial Sequence
  Oligonucleotide primer for the detection of SNP TSC0022491
ttagggattgag

SEQ ID NO: 307424 - DNA, 12 bp, Artificial Sequence
  Oligonucleotide primer for the detection of SNP TSC0022491
ttagggatcgag

SEQ ID NO: 307425 - DNA, 12 bp, Artificial Sequence
  Oligonucleotide primer for the detection of SNP TSC0022492
cccatataatcc

SEQ ID NO: 307426 - DNA, 12 bp, Artificial Sequence
  Oligonucleotide primer for the detection of SNP TSC0022492
tgatggggttgg

SEQ ID NO: 307427 - DNA, 12 bp, Artificial Sequence
  Oligonucleotide primer for the detection of SNP TSC0022492
tgatggggtcgg

SEQ ID NO: 307428 - DNA, 12 bp, Artificial Sequence
  Oligonucleotide primer for the detection of SNP TSC0022493
aattatttaata

SEQ ID NO: 307429 - DNA, 12 bp, Artificial Sequence
  Oligonucleotide primer for the detection of SNP TSC0022494
taaaaataacta

SEQ ID NO: 307430 - DNA, 12 bp, Artificial Sequence
  Oligonucleotide primer for the detection of SNP TSC0022494
tttttggtattt

SEQ ID NO: 307431 - DNA, 12 bp, Artificial Sequence
  Oligonucleotide primer for the detection of SNP TSC0022494
ttttcggtattt

SEQ ID NO: 307432 - DNA, 12 bp, Artificial Sequence
  Oligonucleotide primer for the detection of SNP TSC0022494
tccccaacactc

SEQ ID NO: 307433 - DNA, 12 bp, Artificial Sequence
  Oligonucleotide primer for the detection of SNP TSC0022494
tccccgacactc

SEQ ID NO: 307434 - DNA, 12 bp, Artificial Sequence
  Oligonucleotide primer for the detection of SNP TSC0022494
tgggagtagttg

SEQ ID NO: 307435 - DNA, 12 bp, Artificial Sequence
  Oligonucleotide primer for the detection of SNP TSC0022495
aaccccttccta

SEQ ID NO: 307436 - DNA, 12 bp, Artificial Sequence
  Oligonucleotide primer for the detection of SNP TSC0022495
tgattatgatgt

SEQ ID NO: 307437 - DNA, 12 bp, Artificial Sequence
  Oligonucleotide primer for the detection of SNP TSC0022495
tgattatgacgt

SEQ ID NO: 307438 - DNA, 12 bp, Artificial Sequence
  Oligonucleotide primer for the detection of SNP TSC0022495
taaccataacat

SEQ ID NO: 307439 - DNA, 12 bp, Artificial Sequence
  Oligonucleotide primer for the detection of SNP TSC0022495
taaccataacgt

SEQ ID NO: 307440 - DNA, 12 bp, Artificial Sequence
  Oligonucleotide primer for the detection of SNP TSC0022496
cacacatatatc

SEQ ID NO: 307441 - DNA, 12 bp, Artificial Sequence
  Oligonucleotide primer for the detection of SNP TSC0022496
tggtagtgtttg

SEQ ID NO: 307442 - DNA, 12 bp, Artificial Sequence
  Oligonucleotide primer for the detection of SNP TSC0022496
taacaataccta

SEQ ID NO: 307443 - DNA, 12 bp, Artificial Sequence
  Oligonucleotide primer for the detection of SNP TSC0022496
tatatatgtgtt

SEQ ID NO: 307444 - DNA, 12 bp, Artificial Sequence
  Oligonucleotide primer for the detection of SNP TSC0022497
tttaacaattat

SEQ ID NO: 307445 - DNA, 12 bp, Artificial Sequence
  Oligonucleotide primer for the detection of SNP TSC0022497
tggttaggagtt

SEQ ID NO: 307446 - DNA, 12 bp, Artificial Sequence
  Oligonucleotide primer for the detection of SNP TSC0022497
attaatcaaaaa

SEQ ID NO: 307447 - DNA, 12 bp, Artificial Sequence
  Oligonucleotide primer for the detection of SNP TSC0022497
tttaatagttat

SEQ ID NO: 307448 - DNA, 12 bp, Artificial Sequence
  Oligonucleotide primer for the detection of SNP TSC0022505
aatacctattta

SEQ ID NO: 307449 - DNA, 12 bp, Artificial Sequence
  Oligonucleotide primer for the detection of SNP TSC0022505
gggaaaaggatt

SEQ ID NO: 307450 - DNA, 12 bp, Artificial Sequence
  Oligonucleotide primer for the detection of SNP TSC0022505
tatttatttgtt

SEQ ID NO: 307451 - DNA, 12 bp, Artificial Sequence
  Oligonucleotide primer for the detection of SNP TSC0022506
cttattctaaac

SEQ ID NO: 307452 - DNA, 12 bp, Artificial Sequence
  Oligonucleotide primer for the detection of SNP TSC0022507
ttagaataagtt

SEQ ID NO: 307453 - DNA, 12 bp, Artificial Sequence
  Oligonucleotide primer for the detection of SNP TSC0022507
taaaataaatta

SEQ ID NO: 307454 - DNA, 12 bp, Artificial Sequence
  Oligonucleotide primer for the detection of SNP TSC0022507
aattttagagat

SEQ ID NO: 307455 - DNA, 12 bp, Artificial Sequence
  Oligonucleotide primer for the detection of SNP TSC0022508
aaataaataacc

SEQ ID NO: 307456 - DNA, 12 bp, Artificial Sequence
  Oligonucleotide primer for the detection of SNP TSC0022508
gatatgtgttag

SEQ ID NO: 307457 - DNA, 12 bp, Artificial Sequence
  Oligonucleotide primer for the detection of SNP TSC0022508
gatatgcgttag

SEQ ID NO: 307458 - DNA, 12 bp, Artificial Sequence
  Oligonucleotide primer for the detection of SNP TSC0022509
tccttcacaaaa

SEQ ID NO: 307459 - DNA, 12 bp, Artificial Sequence
  Oligonucleotide primer for the detection of SNP TSC0022509
ctcactccactc

SEQ ID NO: 307460 - DNA, 12 bp, Artificial Sequence
  Oligonucleotide primer for the detection of SNP TSC0022509
ttttttataggg

SEQ ID NO: 307461 - DNA, 12 bp, Artificial Sequence
  Oligonucleotide primer for the detection of SNP TSC0022510
tatacatatata

SEQ ID NO: 307462 - DNA, 12 bp, Artificial Sequence
  Oligonucleotide primer for the detection of SNP TSC0022510
gtgtatatatgt

SEQ ID NO: 307463 - DNA, 12 bp, Artificial Sequence
  Oligonucleotide primer for the detection of SNP TSC0022510
atacacacatac

SEQ ID NO: 307464 - DNA, 12 bp, Artificial Sequence
  Oligonucleotide primer for the detection of SNP TSC0022510
tgtgtatgtgta

SEQ ID NO: 307465 - DNA, 12 bp, Artificial Sequence
  Oligonucleotide primer for the detection of SNP TSC0022511
ccaccacacttc

SEQ ID NO: 307466 - DNA, 12 bp, Artificial Sequence
  Oligonucleotide primer for the detection of SNP TSC0022511
ttttaaggatta

SEQ ID NO: 307467 - DNA, 12 bp, Artificial Sequence
  Oligonucleotide primer for the detection of SNP TSC0022512
aattcaaacaat

SEQ ID NO: 307468 - DNA, 12 bp, Artificial Sequence
  Oligonucleotide primer for the detection of SNP TSC0022512
ttgattttaatg

SEQ ID NO: 307469 - DNA, 12 bp, Artificial Sequence
  Oligonucleotide primer for the detection of SNP TSC0022513
aattaaaattac

SEQ ID NO: 307470 - DNA, 12 bp, Artificial Sequence
  Oligonucleotide primer for the detection of SNP TSC0022513
gatagggtgata

SEQ ID NO: 307471 - DNA, 12 bp, Artificial Sequence
  Oligonucleotide primer for the detection of SNP TSC0022513
agttggaattgt

SEQ ID NO: 307472 - DNA, 12 bp, Artificial Sequence
  Oligonucleotide primer for the detection of SNP TSC0022514
tcaaacgattct

SEQ ID NO: 307473 - DNA, 12 bp, Artificial Sequence
  Oligonukleotid-Primer
aggttgagatag

SEQ ID NO: 307474 - DNA, 12 bp, Artificial Sequence
  Oligonucleotide primer for the detection of SNP TSC0022515
ctaaattcaaac

SEQ ID NO: 307475 - DNA, 12 bp, Artificial Sequence
  Oligonucleotide primer for the detection of SNP TSC0022515
agatagaagaat

SEQ ID NO: 307476 - DNA, 12 bp, Artificial Sequence
  Oligonucleotide primer for the detection of SNP TSC0022515
ttgggtttaagt

SEQ ID NO: 307477 - DNA, 12 bp, Artificial Sequence
  Oligonucleotide primer for the detection of SNP TSC0022515
ttgggtttaagc

SEQ ID NO: 307478 - DNA, 12 bp, Artificial Sequence
  Oligonucleotide primer for the detection of SNP TSC0022518
caacaaaaaaac

SEQ ID NO: 307479 - DNA, 12 bp, Artificial Sequence
  Oligonucleotide primer for the detection of SNP TSC0022519
tattgttgaatt

SEQ ID NO: 307480 - DNA, 12 bp, Artificial Sequence
  Oligonucleotide primer for the detection of SNP TSC0022519
cactactaaacc

SEQ ID NO: 307481 - DNA, 12 bp, Artificial Sequence
  Oligonukleotid-Primer
attaagggagaa

SEQ ID NO: 307482 - DNA, 12 bp, Artificial Sequence
  Oligonucleotide primer for the detection of SNP TSC0022520
tttaaaaacttt

SEQ ID NO: 307483 - DNA, 12 bp, Artificial Sequence
  Oligonucleotide primer for the detection of SNP TSC0022520
tttgtttttaag

SEQ ID NO: 307484 - DNA, 12 bp, Artificial Sequence
  Oligonucleotide primer for the detection of SNP TSC0022521
ctaaattactta

SEQ ID NO: 307485 - DNA, 12 bp, Artificial Sequence
  Oligonukleotid-Primer
ttagaatttttt

SEQ ID NO: 307486 - DNA, 12 bp, Artificial Sequence
  Oligonucleotide primer for the detection of SNP TSC0022521
aaccaaaatttc

SEQ ID NO: 307487 - DNA, 12 bp, Artificial Sequence
  Oligonucleotide primer for the detection of SNP TSC0022521
ttaaattatttg

SEQ ID NO: 307488 - DNA, 12 bp, Artificial Sequence
  Oligonucleotide primer for the detection of SNP TSC0022522
ttctcattccta

SEQ ID NO: 307489 - DNA, 12 bp, Artificial Sequence
  Oligonucleotide primer for the detection of SNP TSC0022522
attaagaaaatc

SEQ ID NO: 307490 - DNA, 12 bp, Artificial Sequence
  Oligonucleotide primer for the detection of SNP TSC0022522
atactaaaaaaa

SEQ ID NO: 307491 - DNA, 12 bp, Artificial Sequence
  Oligonucleotide primer for the detection of SNP TSC0022526
ctatctaaaaaa

SEQ ID NO: 307492 - DNA, 12 bp, Artificial Sequence
  Oligonucleotide primer for the detection of SNP TSC0022526
ggttaatatttt

SEQ ID NO: 307493 - DNA, 12 bp, Artificial Sequence
  Oligonucleotide primer for the detection of SNP TSC0022526
taaaaccaacat

SEQ ID NO: 307494 - DNA, 12 bp, Artificial Sequence
  Oligonucleotide primer for the detection of SNP TSC0022526
ttatttgggaaa

SEQ ID NO: 307495 - DNA, 12 bp, Artificial Sequence
  Oligonucleotide primer for the detection of SNP TSC0022527
tctttacacaac

SEQ ID NO: 307496 - DNA, 12 bp, Artificial Sequence
  Oligonucleotide primer for the detection of SNP TSC0022527
aaaggagtgtag

SEQ ID NO: 307497 - DNA, 12 bp, Artificial Sequence
  Oligonucleotide primer for the detection of SNP TSC0022528
tttattttactt

SEQ ID NO: 307498 - DNA, 12 bp, Artificial Sequence
  Oligonucleotide primer for the detection of SNP TSC0022528
taattttaagaa

SEQ ID NO: 307499 - DNA, 12 bp, Artificial Sequence
  Oligonucleotide primer for the detection of SNP TSC0022529
ctaaccttataa

SEQ ID NO: 307500 - DNA, 12 bp, Artificial Sequence
  Oligonucleotide primer for the detection of SNP TSC0022529
ggaggtcgaggt

SEQ ID NO: 307501 - DNA, 12 bp, Artificial Sequence
  Oligonucleotide primer for the detection of SNP TSC0022529
ttgattttgtga

SEQ ID NO: 307502 - DNA, 12 bp, Artificial Sequence
  Oligonucleotide primer for the detection of SNP TSC0022530
ttaaattccata

SEQ ID NO: 307503 - DNA, 12 bp, Artificial Sequence
  Oligonucleotide primer for the detection of SNP TSC0022530
aatagggttaat

SEQ ID NO: 307504 - DNA, 12 bp, Artificial Sequence
  Oligonucleotide primer for the detection of SNP TSC0022530
aaattaacaaaa

SEQ ID NO: 307505 - DNA, 12 bp, Artificial Sequence
  Oligonucleotide primer for the detection of SNP TSC0022530
attgaattttat

SEQ ID NO: 307506 - DNA, 12 bp, Artificial Sequence
  Oligonucleotide primer for the detection of SNP TSC0022531
acaacatataaa

SEQ ID NO: 307507 - DNA, 12 bp, Artificial Sequence
  Oligonucleotide primer for the detection of SNP TSC0022531
gaatttaatttt

SEQ ID NO: 307508 - DNA, 12 bp, Artificial Sequence
  Oligonucleotide primer for the detection of SNP TSC0022531
aaattcaattct

SEQ ID NO: 307509 - DNA, 12 bp, Artificial Sequence
  Oligonucleotide primer for the detection of SNP TSC0022531
gtagtatataaa

SEQ ID NO: 307510 - DNA, 12 bp, Artificial Sequence
  Oligonucleotide primer for the detection of SNP TSC0022534
tgatgttttttt

SEQ ID NO: 307511 - DNA, 12 bp, Artificial Sequence
  Oligonucleotide primer for the detection of SNP TSC0022534
taatacttcttc

SEQ ID NO: 307512 - DNA, 12 bp, Artificial Sequence
  Oligonucleotide primer for the detection of SNP TSC0022534
aaaaagttaaaa

SEQ ID NO: 307513 - DNA, 12 bp, Artificial Sequence
  Oligonucleotide primer for the detection of SNP TSC0022535
ctaactactaca

SEQ ID NO: 307514 - DNA, 12 bp, Artificial Sequence
  Oligonucleotide primer for the detection of SNP TSC0022535
ctttaaaaactc

SEQ ID NO: 307515 - DNA, 12 bp, Artificial Sequence
  Oligonucleotide primer for the detection of SNP TSC0022537
caaaatatatcc

SEQ ID NO: 307516 - DNA, 12 bp, Artificial Sequence
  Oligonucleotide primer for the detection of SNP TSC0022537
atttggttaata

SEQ ID NO: 307517 - DNA, 12 bp, Artificial Sequence
  Oligonucleotide primer for the detection of SNP TSC0022538
acaaattcaaac

SEQ ID NO: 307518 - DNA, 12 bp, Artificial Sequence
  Oligonucleotide primer for the detection of SNP TSC0022538
aaggtgggtttt

SEQ ID NO: 307519 - DNA, 12 bp, Artificial Sequence
  Oligonucleotide primer for the detection of SNP TSC0022538
aaggtgggtttc

SEQ ID NO: 307520 - DNA, 12 bp, Artificial Sequence
  Oligonucleotide primer for the detection of SNP TSC0022538
acaaaataaact

SEQ ID NO: 307521 - DNA, 12 bp, Artificial Sequence
  Oligonucleotide primer for the detection of SNP TSC0022538
gtaggtttagat

SEQ ID NO: 307522 - DNA, 12 bp, Artificial Sequence
  Oligonucleotide primer for the detection of SNP TSC0022540
ttaataaaaata

SEQ ID NO: 307523 - DNA, 12 bp, Artificial Sequence
  Oligonucleotide primer for the detection of SNP TSC0022540
ttggttttatgt

SEQ ID NO: 307524 - DNA, 12 bp, Artificial Sequence
  Oligonucleotide primer for the detection of SNP TSC0022540
tcggttttatgt

SEQ ID NO: 307525 - DNA, 12 bp, Artificial Sequence
  Oligonucleotide primer for the detection of SNP TSC0022540
ccaaccccatat

SEQ ID NO: 307526 - DNA, 12 bp, Artificial Sequence
  Oligonucleotide primer for the detection of SNP TSC0022540
ccgaccccatat

SEQ ID NO: 307527 - DNA, 12 bp, Artificial Sequence
  Oligonucleotide primer for the detection of SNP TSC0022540
ttggtaaggatg

SEQ ID NO: 307528 - DNA, 12 bp, Artificial Sequence
  Oligonucleotide primer for the detection of SNP TSC0022541
taataaaaatac

SEQ ID NO: 307529 - DNA, 12 bp, Artificial Sequence
  Oligonucleotide primer for the detection of SNP TSC0022541
gttttatgtggt

SEQ ID NO: 307530 - DNA, 12 bp, Artificial Sequence
  Oligonucleotide primer for the detection of SNP TSC0022541
gttttatgtggc

SEQ ID NO: 307531 - DNA, 12 bp, Artificial Sequence
  Oligonucleotide primer for the detection of SNP TSC0022541
aaccccatataa

SEQ ID NO: 307532 - DNA, 12 bp, Artificial Sequence
  Oligonucleotide primer for the detection of SNP TSC0022541
gaccccatataa

SEQ ID NO: 307533 - DNA, 12 bp, Artificial Sequence
  Oligonucleotide primer for the detection of SNP TSC0022541
tggtaaggatgt

SEQ ID NO: 307534 - DNA, 12 bp, Artificial Sequence
  Oligonucleotide primer for the detection of SNP TSC0022542
tcctatccaatc

SEQ ID NO: 307535 - DNA, 12 bp, Artificial Sequence
  Oligonucleotide primer for the detection of SNP TSC0022542
tcctatccgatc

SEQ ID NO: 307536 - DNA, 12 bp, Artificial Sequence
  Oligonucleotide primer for the detection of SNP TSC0022542
aaggatttttag

SEQ ID NO: 307537 - DNA, 12 bp, Artificial Sequence
  Oligonucleotide primer for the detection of SNP TSC0022543
accacaaacacc

SEQ ID NO: 307538 - DNA, 12 bp, Artificial Sequence
  Oligonucleotide primer for the detection of SNP TSC0022543
gggttttagggt

SEQ ID NO: 307539 - DNA, 12 bp, Artificial Sequence
  Oligonucleotide primer for the detection of SNP TSC0022543
aactccaaaaca

SEQ ID NO: 307540 - DNA, 12 bp, Artificial Sequence
  Oligonucleotide primer for the detection of SNP TSC0022543
gttatagatatt

SEQ ID NO: 307541 - DNA, 12 bp, Artificial Sequence
  Oligonucleotide primer for the detection of SNP TSC0022543
gttatagatatc

SEQ ID NO: 307542 - DNA, 12 bp, Artificial Sequence
  Oligonucleotide primer for the detection of SNP TSC0022544
aattaaaatcaa

SEQ ID NO: 307543 - DNA, 12 bp, Artificial Sequence
  Oligonucleotide primer for the detection of SNP TSC0022544
tattaataaatg

SEQ ID NO: 307544 - DNA, 12 bp, Artificial Sequence
  Oligonucleotide primer for the detection of SNP TSC0022544
cactaacaaata

SEQ ID NO: 307545 - DNA, 12 bp, Artificial Sequence
  Oligonucleotide primer for the detection of SNP TSC0022544
gttgaaattagt

SEQ ID NO: 307546 - DNA, 12 bp, Artificial Sequence
  Oligonucleotide primer for the detection of SNP TSC0022548
ttcatctaaaca

SEQ ID NO: 307547 - DNA, 12 bp, Artificial Sequence
  Oligonucleotide primer for the detection of SNP TSC0022548
tataggttttag

SEQ ID NO: 307548 - DNA, 12 bp, Artificial Sequence
  Oligonucleotide primer for the detection of SNP TSC0022550
aataaacctacc

SEQ ID NO: 307549 - DNA, 12 bp, Artificial Sequence
  Oligonucleotide primer for the detection of SNP TSC0022550
aatttttaagag

SEQ ID NO: 307550 - DNA, 12 bp, Artificial Sequence
  Oligonucleotide primer for the detection of SNP TSC0022559
tcctaacatcct

SEQ ID NO: 307551 - DNA, 12 bp, Artificial Sequence
  Oligonucleotide primer for the detection of SNP TSC0022559
tcatcctcacta

SEQ ID NO: 307552 - DNA, 12 bp, Artificial Sequence
  Oligonucleotide primer for the detection of SNP TSC0022559
ttttggtatttt

SEQ ID NO: 307553 - DNA, 12 bp, Artificial Sequence
  Oligonucleotide primer for the detection of SNP TSC0022560
acaaaaaacaac

SEQ ID NO: 307554 - DNA, 12 bp, Artificial Sequence
  Oligonucleotide primer for the detection of SNP TSC0022560
ttattgtgtagg

SEQ ID NO: 307555 - DNA, 12 bp, Artificial Sequence
  Oligonucleotide primer for the detection of SNP TSC0022560
ttatcgtgtagg

SEQ ID NO: 307556 - DNA, 12 bp, Artificial Sequence
  Oligonucleotide primer for the detection of SNP TSC0022560
ccatcatacaaa

SEQ ID NO: 307557 - DNA, 12 bp, Artificial Sequence
  Oligonucleotide primer for the detection of SNP TSC0022560
ccatcgtacaaa

SEQ ID NO: 307558 - DNA, 12 bp, Artificial Sequence
  Oligonucleotide primer for the detection of SNP TSC0022560
gtagaagatagt

SEQ ID NO: 307559 - DNA, 12 bp, Artificial Sequence
  Oligonucleotide primer for the detection of SNP TSC0022562
cttcctcaaaac

SEQ ID NO: 307560 - DNA, 12 bp, Artificial Sequence
  Oligonucleotide primer for the detection of SNP TSC0022562
cttcctcgaaac

SEQ ID NO: 307561 - DNA, 12 bp, Artificial Sequence
  Oligonucleotide primer for the detection of SNP TSC0022562
atagatatgtgg

SEQ ID NO: 307562 - DNA, 12 bp, Artificial Sequence
  Oligonucleotide primer for the detection of SNP TSC0022563
acattctacaac

SEQ ID NO: 307563 - DNA, 12 bp, Artificial Sequence
  Oligonucleotide primer for the detection of SNP TSC0022563
acattctacgac

SEQ ID NO: 307564 - DNA, 12 bp, Artificial Sequence
  Oligonucleotide primer for the detection of SNP TSC0022563
tgttaatgtgta

SEQ ID NO: 307565 - DNA, 12 bp, Artificial Sequence
  Oligonucleotide primer for the detection of SNP TSC0022563
tgttaatgcgta

SEQ ID NO: 307566 - DNA, 12 bp, Artificial Sequence
  Oligonukleotid-Primer
aaataaacaaat

SEQ ID NO: 307567 - DNA, 12 bp, Artificial Sequence
  Oligonucleotide primer for the detection of SNP TSC0022568
ttatgttgatag

SEQ ID NO: 307568 - DNA, 12 bp, Artificial Sequence
  Oligonucleotide primer for the detection of SNP TSC0022568
ttacgttgatag

SEQ ID NO: 307569 - DNA, 12 bp, Artificial Sequence
  Oligonucleotide primer for the detection of SNP TSC0022569
aatattttggga

SEQ ID NO: 307570 - DNA, 12 bp, Artificial Sequence
  Oligonucleotide primer for the detection of SNP TSC0022571
atcttaaataac

SEQ ID NO: 307571 - DNA, 12 bp, Artificial Sequence
  Oligonucleotide primer for the detection of SNP TSC0022571
tttgtttaggtg

SEQ ID NO: 307572 - DNA, 12 bp, Artificial Sequence
  Oligonucleotide primer for the detection of SNP TSC0022571
cctacccaaata

SEQ ID NO: 307573 - DNA, 12 bp, Artificial Sequence
  Oligonucleotide primer for the detection of SNP TSC0022571
attttaggtaat

SEQ ID NO: 307574 - DNA, 12 bp, Artificial Sequence
  Oligonukleotid-Primer
ttctattaaaaa

SEQ ID NO: 307575 - DNA, 12 bp, Artificial Sequence
  Oligonucleotide primer for the detection of SNP TSC0022572
gtaaatatatat

SEQ ID NO: 307576 - DNA, 12 bp, Artificial Sequence
  Oligonucleotide primer for the detection of SNP TSC0022572
ataaacacatac

SEQ ID NO: 307577 - DNA, 12 bp, Artificial Sequence
  Oligonucleotide primer for the detection of SNP TSC0022572
tttttgttaggg

SEQ ID NO: 307578 - DNA, 12 bp, Artificial Sequence
  Oligonucleotide primer for the detection of SNP TSC0022573
ctataatatttc

SEQ ID NO: 307579 - DNA, 12 bp, Artificial Sequence
  Oligonucleotide primer for the detection of SNP TSC0022575
tttagaaaatat

SEQ ID NO: 307580 - DNA, 12 bp, Artificial Sequence
  Oligonucleotide primer for the detection of SNP TSC0022575
cctaaaaaacat

SEQ ID NO: 307581 - DNA, 12 bp, Artificial Sequence
  Oligonucleotide primer for the detection of SNP TSC0022575
gagaaaaggtta

SEQ ID NO: 307582 - DNA, 12 bp, Artificial Sequence
  Oligonucleotide primer for the detection of SNP TSC0022578
ttttttacaatc

SEQ ID NO: 307583 - DNA, 12 bp, Artificial Sequence
  Oligonucleotide primer for the detection of SNP TSC0022578
agtgaagtgatg

SEQ ID NO: 307584 - DNA, 12 bp, Artificial Sequence
  Oligonucleotide primer for the detection of SNP TSC0022578
agtgaagtgacg

SEQ ID NO: 307585 - DNA, 12 bp, Artificial Sequence
  Oligonucleotide primer for the detection of SNP TSC0022579
aaccaaaaacac

SEQ ID NO: 307586 - DNA, 12 bp, Artificial Sequence
  Oligonucleotide primer for the detection of SNP TSC0022579
gaccaaaaacac

SEQ ID NO: 307587 - DNA, 12 bp, Artificial Sequence
  Oligonucleotide primer for the detection of SNP TSC0022579
ttggttttgtta

SEQ ID NO: 307588 - DNA, 12 bp, Artificial Sequence
  Oligonucleotide primer for the detection of SNP TSC0022579
ctaactctacca

SEQ ID NO: 307589 - DNA, 12 bp, Artificial Sequence
  Oligonucleotide primer for the detection of SNP TSC0022579
ggttaagagtat

SEQ ID NO: 307590 - DNA, 12 bp, Artificial Sequence
  Oligonucleotide primer for the detection of SNP TSC0022580
ttattacaatta

SEQ ID NO: 307591 - DNA, 12 bp, Artificial Sequence
  Oligonucleotide primer for the detection of SNP TSC0022580
ttattacgatta

SEQ ID NO: 307592 - DNA, 12 bp, Artificial Sequence
  Oligonucleotide primer for the detection of SNP TSC0022580
cctaaactcccc

SEQ ID NO: 307593 - DNA, 12 bp, Artificial Sequence
  Oligonucleotide primer for the detection of SNP TSC0022580
ttattatggttg

SEQ ID NO: 307594 - DNA, 12 bp, Artificial Sequence
  Oligonucleotide primer for the detection of SNP TSC0022580
ttattacggttg

SEQ ID NO: 307595 - DNA, 12 bp, Artificial Sequence
  Oligonucleotide primer for the detection of SNP TSC0022581
actcactaaact

SEQ ID NO: 307596 - DNA, 12 bp, Artificial Sequence
  Oligonucleotide primer for the detection of SNP TSC0022581
gctcactaaact

SEQ ID NO: 307597 - DNA, 12 bp, Artificial Sequence
  Oligonucleotide primer for the detection of SNP TSC0022581
tattgtttgtag

SEQ ID NO: 307598 - DNA, 12 bp, Artificial Sequence
  Oligonucleotide primer for the detection of SNP TSC0022581
tatcgtttgtag

SEQ ID NO: 307599 - DNA, 12 bp, Artificial Sequence
  Oligonucleotide primer for the detection of SNP TSC0022582
caccctatttaa

SEQ ID NO: 307600 - DNA, 12 bp, Artificial Sequence
  Oligonucleotide primer for the detection of SNP TSC0022582
aacctttacttc

SEQ ID NO: 307601 - DNA, 12 bp, Artificial Sequence
  Oligonucleotide primer for the detection of SNP TSC0022582
tattttgtttga

SEQ ID NO: 307602 - DNA, 12 bp, Artificial Sequence
  Oligonucleotide primer for the detection of SNP TSC0022583
ccctttacaaaa

SEQ ID NO: 307603 - DNA, 12 bp, Artificial Sequence
  Oligonucleotide primer for the detection of SNP TSC0022583
gggtggaggggt

SEQ ID NO: 307604 - DNA, 12 bp, Artificial Sequence
  Oligonucleotide primer for the detection of SNP TSC0022584
taaaaacaaaat

SEQ ID NO: 307605 - DNA, 12 bp, Artificial Sequence
  Oligonucleotide primer for the detection of SNP TSC0022585
cttaaaacaaaa

SEQ ID NO: 307606 - DNA, 12 bp, Artificial Sequence
  Oligonucleotide primer for the detection of SNP TSC0022585
gtgagtaatttt

SEQ ID NO: 307607 - DNA, 12 bp, Artificial Sequence
  Oligonucleotide primer for the detection of SNP TSC0022585
gtgagtaatttc

SEQ ID NO: 307608 - DNA, 12 bp, Artificial Sequence
  Oligonucleotide primer for the detection of SNP TSC0022585
gtttggaataga

SEQ ID NO: 307609 - DNA, 12 bp, Artificial Sequence
  Oligonucleotide primer for the detection of SNP TSC0022591
cccacataccta

SEQ ID NO: 307610 - DNA, 12 bp, Artificial Sequence
  Oligonucleotide primer for the detection of SNP TSC0022591
taggggtatagt

SEQ ID NO: 307611 - DNA, 12 bp, Artificial Sequence
  Oligonucleotide primer for the detection of SNP TSC0022593
caccacacccaa

SEQ ID NO: 307612 - DNA, 12 bp, Artificial Sequence
  Oligonucleotide primer for the detection of SNP TSC0022593
aaatataaaaat

SEQ ID NO: 307613 - DNA, 12 bp, Artificial Sequence
  Oligonucleotide primer for the detection of SNP TSC0022593
atacaaaaataa

SEQ ID NO: 307614 - DNA, 12 bp, Artificial Sequence
  Oligonucleotide primer for the detection of SNP TSC0022593
tattatatttag

SEQ ID NO: 307615 - DNA, 12 bp, Artificial Sequence
  Oligonucleotide primer for the detection of SNP TSC0022594
caccacaacaaa

SEQ ID NO: 307616 - DNA, 12 bp, Artificial Sequence
  Oligonucleotide primer for the detection of SNP TSC0022594
caccacgacaaa

SEQ ID NO: 307617 - DNA, 12 bp, Artificial Sequence
  Oligonucleotide primer for the detection of SNP TSC0022594
caccgcaacaaa

SEQ ID NO: 307618 - DNA, 12 bp, Artificial Sequence
  Oligonucleotide primer for the detection of SNP TSC0022594
caccgcgacaaa

SEQ ID NO: 307619 - DNA, 12 bp, Artificial Sequence
  Oligonucleotide primer for the detection of SNP TSC0022594
ttggaggtttgt

SEQ ID NO: 307620 - DNA, 12 bp, Artificial Sequence
  Oligonucleotide primer for the detection of SNP TSC0022594
taaaaacttaca

SEQ ID NO: 307621 - DNA, 12 bp, Artificial Sequence
  Oligonucleotide primer for the detection of SNP TSC0022594
tttattgtgata

SEQ ID NO: 307622 - DNA, 12 bp, Artificial Sequence
  Oligonucleotide primer for the detection of SNP TSC0022594
tttatcgtgata

SEQ ID NO: 307623 - DNA, 12 bp, Artificial Sequence
  Oligonucleotide primer for the detection of SNP TSC0022594
tttattgcgata

SEQ ID NO: 307624 - DNA, 12 bp, Artificial Sequence
  Oligonucleotide primer for the detection of SNP TSC0022594
tttatcgcgata

SEQ ID NO: 307625 - DNA, 12 bp, Artificial Sequence
  Oligonucleotide primer for the detection of SNP TSC0022597
taaaatcatacc

SEQ ID NO: 307626 - DNA, 12 bp, Artificial Sequence
  Oligonucleotide primer for the detection of SNP TSC0022597
taaaatcgtacc

SEQ ID NO: 307627 - DNA, 12 bp, Artificial Sequence
  Oligonucleotide primer for the detection of SNP TSC0022598
attataggtttt

SEQ ID NO: 307628 - DNA, 12 bp, Artificial Sequence
  Oligonucleotide primer for the detection of SNP TSC0022598
attacaaactcc

SEQ ID NO: 307629 - DNA, 12 bp, Artificial Sequence
  Oligonucleotide primer for the detection of SNP TSC0022598
taggtatggtgg

SEQ ID NO: 307630 - DNA, 12 bp, Artificial Sequence
  Oligonucleotide primer for the detection of SNP TSC0022599
ttataattatga

SEQ ID NO: 307631 - DNA, 12 bp, Artificial Sequence
  Oligonucleotide primer for the detection of SNP TSC0022599
ttataattacga

SEQ ID NO: 307632 - DNA, 12 bp, Artificial Sequence
  Oligonucleotide primer for the detection of SNP TSC0022599
ttacaactacaa

SEQ ID NO: 307633 - DNA, 12 bp, Artificial Sequence
  Oligonucleotide primer for the detection of SNP TSC0022599
ttacaactacga

SEQ ID NO: 307634 - DNA, 12 bp, Artificial Sequence
  Oligonucleotide primer for the detection of SNP TSC0022599
tgagtagaattt

SEQ ID NO: 307635 - DNA, 12 bp, Artificial Sequence
  Oligonucleotide primer for the detection of SNP TSC0022599
tgagtagaattc

SEQ ID NO: 307636 - DNA, 12 bp, Artificial Sequence
  Oligonucleotide primer for the detection of SNP TSC0022602
gggattagattt

SEQ ID NO: 307637 - DNA, 12 bp, Artificial Sequence
  Oligonucleotide primer for the detection of SNP TSC0022602
gggattagattc

SEQ ID NO: 307638 - DNA, 12 bp, Artificial Sequence
  Oligonucleotide primer for the detection of SNP TSC0022602
aaaaattaaatt

SEQ ID NO: 307639 - DNA, 12 bp, Artificial Sequence
  Oligonucleotide primer for the detection of SNP TSC0022602
agaggtttatat

SEQ ID NO: 307640 - DNA, 12 bp, Artificial Sequence
  Oligonucleotide primer for the detection of SNP TSC0022603
taaacctccaaa

SEQ ID NO: 307641 - DNA, 12 bp, Artificial Sequence
  Oligonucleotide primer for the detection of SNP TSC0022603
gatttttttagg

SEQ ID NO: 307642 - DNA, 12 bp, Artificial Sequence
  Oligonucleotide primer for the detection of SNP TSC0022603
actccttcaaaa

SEQ ID NO: 307643 - DNA, 12 bp, Artificial Sequence
  Oligonukleotid-Primer
aagtttttaagt

SEQ ID NO: 307644 - DNA, 12 bp, Artificial Sequence
  Oligonucleotide primer for the detection of SNP TSC0022606
ctcattacattt

SEQ ID NO: 307645 - DNA, 12 bp, Artificial Sequence
  Oligonucleotide primer for the detection of SNP TSC0022606
tttataaataag

SEQ ID NO: 307646 - DNA, 12 bp, Artificial Sequence
  Oligonucleotide primer for the detection of SNP TSC0022608
ttatatctctaa

SEQ ID NO: 307647 - DNA, 12 bp, Artificial Sequence
  Oligonukleotid-Primer
ttaagtatatag

SEQ ID NO: 307648 - DNA, 12 bp, Artificial Sequence
  Oligonucleotide primer for the detection of SNP TSC0022608
tcaaatacataa

SEQ ID NO: 307649 - DNA, 12 bp, Artificial Sequence
  Oligonucleotide primer for the detection of SNP TSC0022609
acaatcattcaa

SEQ ID NO: 307650 - DNA, 12 bp, Artificial Sequence
  Oligonucleotide primer for the detection of SNP TSC0022609
acgatcattcaa

SEQ ID NO: 307651 - DNA, 12 bp, Artificial Sequence
  Oligonucleotide primer for the detection of SNP TSC0022609
tgtgttttaaat

SEQ ID NO: 307652 - DNA, 12 bp, Artificial Sequence
  Oligonucleotide primer for the detection of SNP TSC0022609
atattccaaata

SEQ ID NO: 307653 - DNA, 12 bp, Artificial Sequence
  Oligonucleotide primer for the detection of SNP TSC0022609
atgattatttaa

SEQ ID NO: 307654 - DNA, 12 bp, Artificial Sequence
  Oligonucleotide primer for the detection of SNP TSC0022609
acgattatttaa

SEQ ID NO: 307655 - DNA, 12 bp, Artificial Sequence
  Oligonucleotide primer for the detection of SNP TSC0022610
ttaaaaataact

SEQ ID NO: 307656 - DNA, 12 bp, Artificial Sequence
  Oligonucleotide primer for the detection of SNP TSC0022610
ataattttagga

SEQ ID NO: 307657 - DNA, 12 bp, Artificial Sequence
  Oligonucleotide primer for the detection of SNP TSC0022613
cccaactaattt

SEQ ID NO: 307658 - DNA, 12 bp, Artificial Sequence
  Oligonucleotide primer for the detection of SNP TSC0022615
acaatccctatt

SEQ ID NO: 307659 - DNA, 12 bp, Artificial Sequence
  Oligonucleotide primer for the detection of SNP TSC0022615
gtttattgttta

SEQ ID NO: 307660 - DNA, 12 bp, Artificial Sequence
  Oligonucleotide primer for the detection of SNP TSC0022616
aaaaaatcatac

SEQ ID NO: 307661 - DNA, 12 bp, Artificial Sequence
  Oligonucleotide primer for the detection of SNP TSC0022616
aaaaaatcgtac

SEQ ID NO: 307662 - DNA, 12 bp, Artificial Sequence
  Oligonucleotide primer for the detection of SNP TSC0022616
aaaattttaata

SEQ ID NO: 307663 - DNA, 12 bp, Artificial Sequence
  Oligonucleotide primer for the detection of SNP TSC0022616
aaaacctcaata

SEQ ID NO: 307664 - DNA, 12 bp, Artificial Sequence
  Oligonucleotide primer for the detection of SNP TSC0022616
aaagggttgtgt

SEQ ID NO: 307665 - DNA, 12 bp, Artificial Sequence
  Oligonucleotide primer for the detection of SNP TSC0022616
aaagggtcgtgt

SEQ ID NO: 307666 - DNA, 12 bp, Artificial Sequence
  Oligonucleotide primer for the detection of SNP TSC0022617
ctacaataaata

SEQ ID NO: 307667 - DNA, 12 bp, Artificial Sequence
  Oligonucleotide primer for the detection of SNP TSC0022617
atttgtttgggt

SEQ ID NO: 307668 - DNA, 12 bp, Artificial Sequence
  Oligonucleotide primer for the detection of SNP TSC0022617
atttgttcgggt

SEQ ID NO: 307669 - DNA, 12 bp, Artificial Sequence
  Oligonucleotide primer for the detection of SNP TSC0022617
acttattcaaat

SEQ ID NO: 307670 - DNA, 12 bp, Artificial Sequence
  Oligonucleotide primer for the detection of SNP TSC0022617
acttattcgaat

SEQ ID NO: 307671 - DNA, 12 bp, Artificial Sequence
  Oligonucleotide primer for the detection of SNP TSC0022617
tgtaatggatgt

SEQ ID NO: 307672 - DNA, 12 bp, Artificial Sequence
  Oligonucleotide primer for the detection of SNP TSC0022618
ttgtttttggtc

SEQ ID NO: 307673 - DNA, 12 bp, Artificial Sequence
  Oligonucleotide primer for the detection of SNP TSC0022618
ctacctttaatc

SEQ ID NO: 307674 - DNA, 12 bp, Artificial Sequence
  Oligonucleotide primer for the detection of SNP TSC0022619
ttcccacaaaaa

SEQ ID NO: 307675 - DNA, 12 bp, Artificial Sequence
  Oligonucleotide primer for the detection of SNP TSC0022619
tatgtattatat

SEQ ID NO: 307676 - DNA, 12 bp, Artificial Sequence
  Oligonucleotide primer for the detection of SNP TSC0022619
catatattatat

SEQ ID NO: 307677 - DNA, 12 bp, Artificial Sequence
  Oligonucleotide primer for the detection of SNP TSC0022619
ttttataaaagt

SEQ ID NO: 307678 - DNA, 12 bp, Artificial Sequence
  Oligonucleotide primer for the detection of SNP TSC0022620
tcccctacctac

SEQ ID NO: 307679 - DNA, 12 bp, Artificial Sequence
  Oligonucleotide primer for the detection of SNP TSC0022620
tgttttgagttg

SEQ ID NO: 307680 - DNA, 12 bp, Artificial Sequence
  Oligonucleotide primer for the detection of SNP TSC0022624
tattaaataaac

SEQ ID NO: 307681 - DNA, 12 bp, Artificial Sequence
  Oligonucleotide primer for the detection of SNP TSC0022624
taagggtaatta

SEQ ID NO: 307682 - DNA, 12 bp, Artificial Sequence
  Oligonucleotide primer for the detection of SNP TSC0022625
tattactactac

SEQ ID NO: 307683 - DNA, 12 bp, Artificial Sequence
  Oligonucleotide primer for the detection of SNP TSC0022625
gtaaaattatat

SEQ ID NO: 307684 - DNA, 12 bp, Artificial Sequence
  Oligonucleotide primer for the detection of SNP TSC0022625
aataaaatcaca

SEQ ID NO: 307685 - DNA, 12 bp, Artificial Sequence
  Oligonucleotide primer for the detection of SNP TSC0022629
aaaagaaatatg

SEQ ID NO: 307686 - DNA, 12 bp, Artificial Sequence
  Oligonucleotide primer for the detection of SNP TSC0022632
aacctaactctt

SEQ ID NO: 307687 - DNA, 12 bp, Artificial Sequence
  Oligonucleotide primer for the detection of SNP TSC0022632
taggtattttgg

SEQ ID NO: 307688 - DNA, 12 bp, Artificial Sequence
  Oligonucleotide primer for the detection of SNP TSC0022637
actactcactat

SEQ ID NO: 307689 - DNA, 12 bp, Artificial Sequence
  Oligonucleotide primer for the detection of SNP TSC0022637
atttatgtaaga

SEQ ID NO: 307690 - DNA, 12 bp, Artificial Sequence
  Oligonucleotide primer for the detection of SNP TSC0022637
atttacgtaaga

SEQ ID NO: 307691 - DNA, 12 bp, Artificial Sequence
  Oligonucleotide primer for the detection of SNP TSC0022638
acaaaattccta

SEQ ID NO: 307692 - DNA, 12 bp, Artificial Sequence
  Oligonucleotide primer for the detection of SNP TSC0022638
atctcctaacta

SEQ ID NO: 307693 - DNA, 12 bp, Artificial Sequence
  Oligonucleotide primer for the detection of SNP TSC0022638
gtagaattttta

SEQ ID NO: 307694 - DNA, 12 bp, Artificial Sequence
  Oligonucleotide primer for the detection of SNP TSC0022643
ttatttaaggta

SEQ ID NO: 307695 - DNA, 12 bp, Artificial Sequence
  Oligonucleotide primer for the detection of SNP TSC0022645
ttccttctcctt

SEQ ID NO: 307696 - DNA, 12 bp, Artificial Sequence
  Oligonucleotide primer for the detection of SNP TSC0022645
atggagtttttg

SEQ ID NO: 307697 - DNA, 12 bp, Artificial Sequence
  Oligonucleotide primer for the detection of SNP TSC0022645
acggagtttttg

SEQ ID NO: 307698 - DNA, 12 bp, Artificial Sequence
  Oligonucleotide primer for the detection of SNP TSC0022646
aatataaaatat

SEQ ID NO: 307699 - DNA, 12 bp, Artificial Sequence
  Oligonucleotide primer for the detection of SNP TSC0022646
aattttagatta

SEQ ID NO: 307700 - DNA, 12 bp, Artificial Sequence
  Oligonucleotide primer for the detection of SNP TSC0022647
gatggagggttt

SEQ ID NO: 307701 - DNA, 12 bp, Artificial Sequence
  Oligonucleotide primer for the detection of SNP TSC0022647
ttttattttggt

SEQ ID NO: 307702 - DNA, 12 bp, Artificial Sequence
  Oligonucleotide primer for the detection of SNP TSC0022648
ttcccctacaat

SEQ ID NO: 307703 - DNA, 12 bp, Artificial Sequence
  Oligonucleotide primer for the detection of SNP TSC0022648
agtgtagagtaa

SEQ ID NO: 307704 - DNA, 12 bp, Artificial Sequence
  Oligonucleotide primer for the detection of SNP TSC0022649
gttagttaaaag

SEQ ID NO: 307705 - DNA, 12 bp, Artificial Sequence
  Oligonucleotide primer for the detection of SNP TSC0022649
atcaactaaaaa

SEQ ID NO: 307706 - DNA, 12 bp, Artificial Sequence
  Oligonucleotide primer for the detection of SNP TSC0022649
taggtataaaaa

SEQ ID NO: 307707 - DNA, 12 bp, Artificial Sequence
  Oligonucleotide primer for the detection of SNP TSC0022650
ctattaaaaaaa

SEQ ID NO: 307708 - DNA, 12 bp, Artificial Sequence
  Oligonucleotide primer for the detection of SNP TSC0022651
accaaatatacc

SEQ ID NO: 307709 - DNA, 12 bp, Artificial Sequence
  Oligonucleotide primer for the detection of SNP TSC0022651
tattgtttaaag

SEQ ID NO: 307710 - DNA, 12 bp, Artificial Sequence
  Oligonucleotide primer for the detection of SNP TSC0022651
tattacttaaaa

SEQ ID NO: 307711 - DNA, 12 bp, Artificial Sequence
  Oligonucleotide primer for the detection of SNP TSC0022651
gttaaatatgtt

SEQ ID NO: 307712 - DNA, 12 bp, Artificial Sequence
  Oligonucleotide primer for the detection of SNP TSC0022652
acctctaaataa

SEQ ID NO: 307713 - DNA, 12 bp, Artificial Sequence
  Oligonucleotide primer for the detection of SNP TSC0022652
ttgtgttaggat

SEQ ID NO: 307714 - DNA, 12 bp, Artificial Sequence
  Oligonucleotide primer for the detection of SNP TSC0022652
ttgtgttaggac

SEQ ID NO: 307715 - DNA, 12 bp, Artificial Sequence
  Oligonucleotide primer for the detection of SNP TSC0022652
ttatatcaaaac

SEQ ID NO: 307716 - DNA, 12 bp, Artificial Sequence
  Oligonucleotide primer for the detection of SNP TSC0022653
aaaaatatttaa

SEQ ID NO: 307717 - DNA, 12 bp, Artificial Sequence
  Oligonucleotide primer for the detection of SNP TSC0022653
atttgtttttat

SEQ ID NO: 307718 - DNA, 12 bp, Artificial Sequence
  Oligonucleotide primer for the detection of SNP TSC0022653
attcgtttttat

SEQ ID NO: 307719 - DNA, 12 bp, Artificial Sequence
  Oligonucleotide primer for the detection of SNP TSC0022653
atccacccccat

SEQ ID NO: 307720 - DNA, 12 bp, Artificial Sequence
  Oligonucleotide primer for the detection of SNP TSC0022653
atccgcccccat

SEQ ID NO: 307721 - DNA, 12 bp, Artificial Sequence
  Oligonucleotide primer for the detection of SNP TSC0022653
aggtgtttggtt

SEQ ID NO: 307722 - DNA, 12 bp, Artificial Sequence
  Oligonucleotide primer for the detection of SNP TSC0022654
taaatatttaac

SEQ ID NO: 307723 - DNA, 12 bp, Artificial Sequence
  Oligonucleotide primer for the detection of SNP TSC0022654
tgaggtttggag

SEQ ID NO: 307724 - DNA, 12 bp, Artificial Sequence
  Oligonucleotide primer for the detection of SNP TSC0022654
tgaggttcggag

SEQ ID NO: 307725 - DNA, 12 bp, Artificial Sequence
  Oligonucleotide primer for the detection of SNP TSC0022655
ggtttttgtatt

SEQ ID NO: 307726 - DNA, 12 bp, Artificial Sequence
  Oligonucleotide primer for the detection of SNP TSC0022655
aacctttacact

SEQ ID NO: 307727 - DNA, 12 bp, Artificial Sequence
  Oligonucleotide primer for the detection of SNP TSC0022655
gggggaagagtt

SEQ ID NO: 307728 - DNA, 12 bp, Artificial Sequence
  Oligonucleotide primer for the detection of SNP TSC0022656
acctttacacta

SEQ ID NO: 307729 - DNA, 12 bp, Artificial Sequence
  Oligonucleotide primer for the detection of SNP TSC0022656
tgggggaagagt

SEQ ID NO: 307730 - DNA, 12 bp, Artificial Sequence
  Oligonucleotide primer for the detection of SNP TSC0022657
caaacacaatac

SEQ ID NO: 307731 - DNA, 12 bp, Artificial Sequence
  Oligonucleotide primer for the detection of SNP TSC0022657
tattgtttttag

SEQ ID NO: 307732 - DNA, 12 bp, Artificial Sequence
  Oligonucleotide primer for the detection of SNP TSC0022657
tatcgtttttag

SEQ ID NO: 307733 - DNA, 12 bp, Artificial Sequence
  Oligonucleotide primer for the detection of SNP TSC0022657
tagatatagtgt

SEQ ID NO: 307734 - DNA, 12 bp, Artificial Sequence
  Oligonucleotide primer for the detection of SNP TSC0022657
tagatatagtgc

SEQ ID NO: 307735 - DNA, 12 bp, Artificial Sequence
  Oligonucleotide primer for the detection of SNP TSC0022658
atagttgtgttt

SEQ ID NO: 307736 - DNA, 12 bp, Artificial Sequence
  Oligonucleotide primer for the detection of SNP TSC0022658
acaattatacct

SEQ ID NO: 307737 - DNA, 12 bp, Artificial Sequence
  Oligonucleotide primer for the detection of SNP TSC0022658
aataagtaaata

SEQ ID NO: 307738 - DNA, 12 bp, Artificial Sequence
  Oligonucleotide primer for the detection of SNP TSC0022659
ataaatgatttt

SEQ ID NO: 307739 - DNA, 12 bp, Artificial Sequence
  Oligonucleotide primer for the detection of SNP TSC0022659
ataaataacttt

SEQ ID NO: 307740 - DNA, 12 bp, Artificial Sequence
  Oligonucleotide primer for the detection of SNP TSC0022659
ggagaaataaaa

SEQ ID NO: 307741 - DNA, 12 bp, Artificial Sequence
  Oligonucleotide primer for the detection of SNP TSC0022660
ccaaaacgaaac

SEQ ID NO: 307742 - DNA, 12 bp, Artificial Sequence
  Oligonucleotide primer for the detection of SNP TSC0022660
tcttctctctaa

SEQ ID NO: 307743 - DNA, 12 bp, Artificial Sequence
  Oligonucleotide primer for the detection of SNP TSC0022660
ttagagtgagat

SEQ ID NO: 307744 - DNA, 12 bp, Artificial Sequence
  Oligonukleotid-Primer
ttagagcgagat

SEQ ID NO: 307745 - DNA, 12 bp, Artificial Sequence
  Oligonucleotide primer for the detection of SNP TSC0022660
ttagagtgagac

SEQ ID NO: 307746 - DNA, 12 bp, Artificial Sequence
  Oligonucleotide primer for the detection of SNP TSC0022660
ttagagcgagac

SEQ ID NO: 307747 - DNA, 12 bp, Artificial Sequence
  Oligonucleotide primer for the detection of SNP TSC0022661
aaacatataact

SEQ ID NO: 307748 - DNA, 12 bp, Artificial Sequence
  Oligonucleotide primer for the detection of SNP TSC0022661
aaatgaatgaaa

SEQ ID NO: 307749 - DNA, 12 bp, Artificial Sequence
  Oligonucleotide primer for the detection of SNP TSC0022662
aacaatacctat

SEQ ID NO: 307750 - DNA, 12 bp, Artificial Sequence
  Oligonucleotide primer for the detection of SNP TSC0022662
tggtaatggtga

SEQ ID NO: 307751 - DNA, 12 bp, Artificial Sequence
  Oligonucleotide primer for the detection of SNP TSC0022662
cggtaatggtga

SEQ ID NO: 307752 - DNA, 12 bp, Artificial Sequence
  Oligonucleotide primer for the detection of SNP TSC0022662
tggtaatggcga

SEQ ID NO: 307753 - DNA, 12 bp, Artificial Sequence
  Oligonucleotide primer for the detection of SNP TSC0022662
cggtaatggcga

SEQ ID NO: 307754 - DNA, 12 bp, Artificial Sequence
  Oligonucleotide primer for the detection of SNP TSC0022662
caacaataacaa

SEQ ID NO: 307755 - DNA, 12 bp, Artificial Sequence
  Oligonucleotide primer for the detection of SNP TSC0022662
caacaataacga

SEQ ID NO: 307756 - DNA, 12 bp, Artificial Sequence
  Oligonucleotide primer for the detection of SNP TSC0022662
cgacaataacaa

SEQ ID NO: 307757 - DNA, 12 bp, Artificial Sequence
  Oligonucleotide primer for the detection of SNP TSC0022662
cgacaataacga

SEQ ID NO: 307758 - DNA, 12 bp, Artificial Sequence
  Oligonucleotide primer for the detection of SNP TSC0022662
ggtagtgtttgt

SEQ ID NO: 307759 - DNA, 12 bp, Artificial Sequence
  Oligonucleotide primer for the detection of SNP TSC0022670
atacattccctt

SEQ ID NO: 307760 - DNA, 12 bp, Artificial Sequence
  Oligonucleotide primer for the detection of SNP TSC0022672
aattataaactt

SEQ ID NO: 307761 - DNA, 12 bp, Artificial Sequence
  Oligonucleotide primer for the detection of SNP TSC0022672
tgttgtatttta

SEQ ID NO: 307762 - DNA, 12 bp, Artificial Sequence
  Oligonucleotide primer for the detection of SNP TSC0022672
cgttgtatttta

SEQ ID NO: 307763 - DNA, 12 bp, Artificial Sequence
  Oligonucleotide primer for the detection of SNP TSC0022674
ataaaatttaca

SEQ ID NO: 307764 - DNA, 12 bp, Artificial Sequence
  Oligonucleotide primer for the detection of SNP TSC0022674
gtttggtttgga

SEQ ID NO: 307765 - DNA, 12 bp, Artificial Sequence
  Oligonucleotide primer for the detection of SNP TSC0022674
cctaacctaaaa

SEQ ID NO: 307766 - DNA, 12 bp, Artificial Sequence
  Oligonucleotide primer for the detection of SNP TSC0022674
gtaagatttata

SEQ ID NO: 307767 - DNA, 12 bp, Artificial Sequence
  Oligonucleotide primer for the detection of SNP TSC0022676
ataaatatctac

SEQ ID NO: 307768 - DNA, 12 bp, Artificial Sequence
  Oligonucleotide primer for the detection of SNP TSC0022676
tagatgttagga

SEQ ID NO: 307769 - DNA, 12 bp, Artificial Sequence
  Oligonucleotide primer for the detection of SNP TSC0022679
ctcatactacct

SEQ ID NO: 307770 - DNA, 12 bp, Artificial Sequence
  Oligonucleotide primer for the detection of SNP TSC0022679
gtggttttttta

SEQ ID NO: 307771 - DNA, 12 bp, Artificial Sequence
  Oligonucleotide primer for the detection of SNP TSC0022680
ccccacaccccc

SEQ ID NO: 307772 - DNA, 12 bp, Artificial Sequence
  Oligonucleotide primer for the detection of SNP TSC0022680
gttggggaatta

SEQ ID NO: 307773 - DNA, 12 bp, Artificial Sequence
  Oligonucleotide primer for the detection of SNP TSC0022681
aacaatacaact

SEQ ID NO: 307774 - DNA, 12 bp, Artificial Sequence
  Oligonucleotide primer for the detection of SNP TSC0022681
gggtgtattatt

SEQ ID NO: 307775 - DNA, 12 bp, Artificial Sequence
  Oligonucleotide primer for the detection of SNP TSC0022681
aaaatacactat

SEQ ID NO: 307776 - DNA, 12 bp, Artificial Sequence
  Oligonucleotide primer for the detection of SNP TSC0022681
tagtgtaatttt

SEQ ID NO: 307777 - DNA, 12 bp, Artificial Sequence
  Oligonucleotide primer for the detection of SNP TSC0022684
cctctttaaccc

SEQ ID NO: 307778 - DNA, 12 bp, Artificial Sequence
  Oligonucleotide primer for the detection of SNP TSC0022684
tgttgtaggttg

SEQ ID NO: 307779 - DNA, 12 bp, Artificial Sequence
  Oligonucleotide primer for the detection of SNP TSC0022685
actccaaaaata

SEQ ID NO: 307780 - DNA, 12 bp, Artificial Sequence
  Oligonucleotide primer for the detection of SNP TSC0022685
actccgaaaata

SEQ ID NO: 307781 - DNA, 12 bp, Artificial Sequence
  Oligonucleotide primer for the detection of SNP TSC0022685
tttagtagttag

SEQ ID NO: 307782 - DNA, 12 bp, Artificial Sequence
  Oligonucleotide primer for the detection of SNP TSC0022685
cccaacaaccaa

SEQ ID NO: 307783 - DNA, 12 bp, Artificial Sequence
  Oligonucleotide primer for the detection of SNP TSC0022685
gttttggaggtg

SEQ ID NO: 307784 - DNA, 12 bp, Artificial Sequence
  Oligonucleotide primer for the detection of SNP TSC0022685
gtttcggaggtg

SEQ ID NO: 307785 - DNA, 12 bp, Artificial Sequence
  Oligonucleotide primer for the detection of SNP TSC0022686
acattataaaaa

SEQ ID NO: 307786 - DNA, 12 bp, Artificial Sequence
  Oligonucleotide primer for the detection of SNP TSC0022686
acccttcctact

SEQ ID NO: 307787 - DNA, 12 bp, Artificial Sequence
  Oligonucleotide primer for the detection of SNP TSC0022686
aatattatggga

SEQ ID NO: 307788 - DNA, 12 bp, Artificial Sequence
  Oligonucleotide primer for the detection of SNP TSC0022687
aactaaaaacat

SEQ ID NO: 307789 - DNA, 12 bp, Artificial Sequence
  Oligonucleotide primer for the detection of SNP TSC0022687
gatggttttttt

SEQ ID NO: 307790 - DNA, 12 bp, Artificial Sequence
  Oligonucleotide primer for the detection of SNP TSC0022688
cccgaaaaataa

SEQ ID NO: 307791 - DNA, 12 bp, Artificial Sequence
  Oligonucleotide primer for the detection of SNP TSC0022688
taaatattgagg

SEQ ID NO: 307792 - DNA, 12 bp, Artificial Sequence
  Oligonucleotide primer for the detection of SNP TSC0022688
caaacactaaaa

SEQ ID NO: 307793 - DNA, 12 bp, Artificial Sequence
  Oligonucleotide primer for the detection of SNP TSC0022688
tttgaagagtag

SEQ ID NO: 307794 - DNA, 12 bp, Artificial Sequence
  Oligonucleotide primer for the detection of SNP TSC0022688
ttcgaagagtag

SEQ ID NO: 307795 - DNA, 12 bp, Artificial Sequence
  Oligonucleotide primer for the detection of SNP TSC0022689
aaaactaatctc

SEQ ID NO: 307796 - DNA, 12 bp, Artificial Sequence
  Oligonucleotide primer for the detection of SNP TSC0022689
gatatattattt

SEQ ID NO: 307797 - DNA, 12 bp, Artificial Sequence
  Oligonucleotide primer for the detection of SNP TSC0022689
acacactattta

SEQ ID NO: 307798 - DNA, 12 bp, Artificial Sequence
  Oligonucleotide primer for the detection of SNP TSC0022689
gaggttggtttt

SEQ ID NO: 307799 - DNA, 12 bp, Artificial Sequence
  Oligonucleotide primer for the detection of SNP TSC0022689
gaggttggtttc

SEQ ID NO: 307800 - DNA, 12 bp, Artificial Sequence
  Oligonucleotide primer for the detection of SNP TSC0022690
tattttgtttta

SEQ ID NO: 307801 - DNA, 12 bp, Artificial Sequence
  Oligonucleotide primer for the detection of SNP TSC0022697
ctatcttattta

SEQ ID NO: 307802 - DNA, 12 bp, Artificial Sequence
  Oligonucleotide primer for the detection of SNP TSC0022697
gttggggtatgt

SEQ ID NO: 307803 - DNA, 12 bp, Artificial Sequence
  Oligonucleotide primer for the detection of SNP TSC0022697
attaaaatatat

SEQ ID NO: 307804 - DNA, 12 bp, Artificial Sequence
  Oligonucleotide primer for the detection of SNP TSC0022697
ttgttttattta

SEQ ID NO: 307805 - DNA, 12 bp, Artificial Sequence
  Oligonucleotide primer for the detection of SNP TSC0022698
attattcaaata

SEQ ID NO: 307806 - DNA, 12 bp, Artificial Sequence
  Oligonucleotide primer for the detection of SNP TSC0022698
gtataagtagtg

SEQ ID NO: 307807 - DNA, 12 bp, Artificial Sequence
  Oligonucleotide primer for the detection of SNP TSC0022698
acacaaataata

SEQ ID NO: 307808 - DNA, 12 bp, Artificial Sequence
  Oligonucleotide primer for the detection of SNP TSC0022698
atttaaatgttt

SEQ ID NO: 307809 - DNA, 12 bp, Artificial Sequence
  Oligonucleotide primer for the detection of SNP TSC0022699
ttatactttatt

SEQ ID NO: 307810 - DNA, 12 bp, Artificial Sequence
  Oligonucleotide primer for the detection of SNP TSC0022699
tgttgagggttg

SEQ ID NO: 307811 - DNA, 12 bp, Artificial Sequence
  Oligonucleotide primer for the detection of SNP TSC0022700
cccatacttcca

SEQ ID NO: 307812 - DNA, 12 bp, Artificial Sequence
  Oligonucleotide primer for the detection of SNP TSC0022700
cccgtacttcca

SEQ ID NO: 307813 - DNA, 12 bp, Artificial Sequence
  Oligonucleotide primer for the detection of SNP TSC0022700
taggttagtgat

SEQ ID NO: 307814 - DNA, 12 bp, Artificial Sequence
  Oligonucleotide primer for the detection of SNP TSC0022700
ttcgtattttta

SEQ ID NO: 307815 - DNA, 12 bp, Artificial Sequence
  Oligonucleotide primer for the detection of SNP TSC0022701
gaaaaatgagga

SEQ ID NO: 307816 - DNA, 12 bp, Artificial Sequence
  Oligonucleotide primer for the detection of SNP TSC0022702
tccatatttatc

SEQ ID NO: 307817 - DNA, 12 bp, Artificial Sequence
  Oligonucleotide primer for the detection of SNP TSC0022702
aagttattgaaa

SEQ ID NO: 307818 - DNA, 12 bp, Artificial Sequence
  Oligonucleotide primer for the detection of SNP TSC0022702
aaatcattaaaa

SEQ ID NO: 307819 - DNA, 12 bp, Artificial Sequence
  Oligonucleotide primer for the detection of SNP TSC0022704
aacacactacaa

SEQ ID NO: 307820 - DNA, 12 bp, Artificial Sequence
  Oligonucleotide primer for the detection of SNP TSC0022704
tgaggattattt

SEQ ID NO: 307821 - DNA, 12 bp, Artificial Sequence
  Oligonucleotide primer for the detection of SNP TSC0022704
taaaaaccacct

SEQ ID NO: 307822 - DNA, 12 bp, Artificial Sequence
  Oligonucleotide primer for the detection of SNP TSC0022704
gatatattgtaa

SEQ ID NO: 307823 - DNA, 12 bp, Artificial Sequence
  Oligonucleotide primer for the detection of SNP TSC0022705
ctcccactctac

SEQ ID NO: 307824 - DNA, 12 bp, Artificial Sequence
  Oligonucleotide primer for the detection of SNP TSC0022705
tttgttgggtta

SEQ ID NO: 307825 - DNA, 12 bp, Artificial Sequence
  Oligonucleotide primer for the detection of SNP TSC0022707
gaaagaaagaaa

SEQ ID NO: 307826 - DNA, 12 bp, Artificial Sequence
  Oligonucleotide primer for the detection of SNP TSC0022708
ttcttttttctt

SEQ ID NO: 307827 - DNA, 12 bp, Artificial Sequence
  Oligonucleotide primer for the detection of SNP TSC0022708
agaaagaaagaa

SEQ ID NO: 307828 - DNA, 12 bp, Artificial Sequence
  Oligonucleotide primer for the detection of SNP TSC0022709
ttttttcttctt

SEQ ID NO: 307829 - DNA, 12 bp, Artificial Sequence
  Oligonucleotide primer for the detection of SNP TSC0022709
aaaagaaagaaa

SEQ ID NO: 307830 - DNA, 12 bp, Artificial Sequence
  Oligonucleotide primer for the detection of SNP TSC0022710
ccacatccctcc

SEQ ID NO: 307831 - DNA, 12 bp, Artificial Sequence
  Oligonucleotide primer for the detection of SNP TSC0022710
agtagtgtagag

SEQ ID NO: 307832 - DNA, 12 bp, Artificial Sequence
  Oligonucleotide primer for the detection of SNP TSC0022710
aacaatacaaaa

SEQ ID NO: 307833 - DNA, 12 bp, Artificial Sequence
  Oligonucleotide primer for the detection of SNP TSC0022717
aattaactctct

SEQ ID NO: 307834 - DNA, 12 bp, Artificial Sequence
  Oligonucleotide primer for the detection of SNP TSC0022717
tgataaatgtta

SEQ ID NO: 307835 - DNA, 12 bp, Artificial Sequence
  Oligonucleotide primer for the detection of SNP TSC0022717
taataaatacca

SEQ ID NO: 307836 - DNA, 12 bp, Artificial Sequence
  Oligonucleotide primer for the detection of SNP TSC0022718
aagaaattttgg

SEQ ID NO: 307837 - DNA, 12 bp, Artificial Sequence
  Oligonucleotide primer for the detection of SNP TSC0022721
aaaaaatcaaca

SEQ ID NO: 307838 - DNA, 12 bp, Artificial Sequence
  Oligonucleotide primer for the detection of SNP TSC0022721
tattatttatag

SEQ ID NO: 307839 - DNA, 12 bp, Artificial Sequence
  Oligonucleotide primer for the detection of SNP TSC0022721
catcactcataa

SEQ ID NO: 307840 - DNA, 12 bp, Artificial Sequence
  Oligonucleotide primer for the detection of SNP TSC0022721
aaattagtattt

SEQ ID NO: 307841 - DNA, 12 bp, Artificial Sequence
  Oligonucleotide primer for the detection of SNP TSC0022723
caaaaacccctc

SEQ ID NO: 307842 - DNA, 12 bp, Artificial Sequence
  Oligonucleotide primer for the detection of SNP TSC0022723
tttggagaagga

SEQ ID NO: 307843 - DNA, 12 bp, Artificial Sequence
  Oligonucleotide primer for the detection of SNP TSC0022724
aaaacattctca

SEQ ID NO: 307844 - DNA, 12 bp, Artificial Sequence
  Oligonucleotide primer for the detection of SNP TSC0022724
atagaggttttt

SEQ ID NO: 307845 - DNA, 12 bp, Artificial Sequence
  Oligonukleotid-Primer
gaggatattttt

SEQ ID NO: 307846 - DNA, 12 bp, Artificial Sequence
  Oligonucleotide primer for the detection of SNP TSC0022725
acttatctaaca

SEQ ID NO: 307847 - DNA, 12 bp, Artificial Sequence
  Oligonucleotide primer for the detection of SNP TSC0022725
tatggaagaaat

SEQ ID NO: 307848 - DNA, 12 bp, Artificial Sequence
  Oligonucleotide primer for the detection of SNP TSC0022725
tacggaagaaat

SEQ ID NO: 307849 - DNA, 12 bp, Artificial Sequence
  Oligonucleotide primer for the detection of SNP TSC0022725
tacgaaaaaaat

SEQ ID NO: 307850 - DNA, 12 bp, Artificial Sequence
  Oligonucleotide primer for the detection of SNP TSC0022725
gtttatttaata

SEQ ID NO: 307851 - DNA, 12 bp, Artificial Sequence
  Oligonucleotide primer for the detection of SNP TSC0022726
aaaatacatatt

SEQ ID NO: 307852 - DNA, 12 bp, Artificial Sequence
  Oligonucleotide primer for the detection of SNP TSC0022726
gttaataagtta

SEQ ID NO: 307853 - DNA, 12 bp, Artificial Sequence
  Oligonucleotide primer for the detection of SNP TSC0022728
caacacaaaatt

SEQ ID NO: 307854 - DNA, 12 bp, Artificial Sequence
  Oligonucleotide primer for the detection of SNP TSC0022728
aattggaagaga

SEQ ID NO: 307855 - DNA, 12 bp, Artificial Sequence
  Oligonucleotide primer for the detection of SNP TSC0022735
cctacactaact

SEQ ID NO: 307856 - DNA, 12 bp, Artificial Sequence
  Oligonucleotide primer for the detection of SNP TSC0022735
tagggaggtttt

SEQ ID NO: 307857 - DNA, 12 bp, Artificial Sequence
  Oligonucleotide primer for the detection of SNP TSC0022735
tagggaggtttc

SEQ ID NO: 307858 - DNA, 12 bp, Artificial Sequence
  Oligonucleotide primer for the detection of SNP TSC0022735
tttgtattaatt

SEQ ID NO: 307859 - DNA, 12 bp, Artificial Sequence
  Oligonucleotide primer for the detection of SNP TSC0022736
ttactttaattc

SEQ ID NO: 307860 - DNA, 12 bp, Artificial Sequence
  Oligonucleotide primer for the detection of SNP TSC0022736
tttatttataaa

SEQ ID NO: 307861 - DNA, 12 bp, Artificial Sequence
  Oligonucleotide primer for the detection of SNP TSC0022737
atatacaaacta

SEQ ID NO: 307862 - DNA, 12 bp, Artificial Sequence
  Oligonucleotide primer for the detection of SNP TSC0022737
atatacgaacta

SEQ ID NO: 307863 - DNA, 12 bp, Artificial Sequence
  Oligonucleotide primer for the detection of SNP TSC0022737
gatttttgtttt

SEQ ID NO: 307864 - DNA, 12 bp, Artificial Sequence
  Oligonucleotide primer for the detection of SNP TSC0022737
gattttcgtttt

SEQ ID NO: 307865 - DNA, 12 bp, Artificial Sequence
  Oligonucleotide primer for the detection of SNP TSC0022737
aacctccatttc

SEQ ID NO: 307866 - DNA, 12 bp, Artificial Sequence
  Oligonucleotide primer for the detection of SNP TSC0022737
aacctccgtttc

SEQ ID NO: 307867 - DNA, 12 bp, Artificial Sequence
  Oligonucleotide primer for the detection of SNP TSC0022737
gtgtgtgagttg

SEQ ID NO: 307868 - DNA, 12 bp, Artificial Sequence
  Oligonucleotide primer for the detection of SNP TSC0022737
gtgtgcgagttg

SEQ ID NO: 307869 - DNA, 12 bp, Artificial Sequence
  Oligonucleotide primer for the detection of SNP TSC0022738
gaaaagtaggtt

SEQ ID NO: 307870 - DNA, 12 bp, Artificial Sequence
  Oligonucleotide primer for the detection of SNP TSC0022738
aaaaaacaaatt

SEQ ID NO: 307871 - DNA, 12 bp, Artificial Sequence
  Oligonucleotide primer for the detection of SNP TSC0022738
gtgggatagaag

SEQ ID NO: 307872 - DNA, 12 bp, Artificial Sequence
  Oligonucleotide primer for the detection of SNP TSC0022740
ccctaacataac

SEQ ID NO: 307873 - DNA, 12 bp, Artificial Sequence
  Oligonucleotide primer for the detection of SNP TSC0022741
gggtttttaatt

SEQ ID NO: 307874 - DNA, 12 bp, Artificial Sequence
  Oligonucleotide primer for the detection of SNP TSC0022741
aaatcttcaatt

SEQ ID NO: 307875 - DNA, 12 bp, Artificial Sequence
  Oligonucleotide primer for the detection of SNP TSC0022741
gagtagggggtt

SEQ ID NO: 307876 - DNA, 12 bp, Artificial Sequence
  Oligonucleotide primer for the detection of SNP TSC0022741
gagtagggggtc

SEQ ID NO: 307877 - DNA, 12 bp, Artificial Sequence
  Oligonucleotide primer for the detection of SNP TSC0022748
ccctaccatata

SEQ ID NO: 307878 - DNA, 12 bp, Artificial Sequence
  Oligonucleotide primer for the detection of SNP TSC0022748
gttgagttggaa

SEQ ID NO: 307879 - DNA, 12 bp, Artificial Sequence
  Oligonucleotide primer for the detection of SNP TSC0022748
attaaactaaaa

SEQ ID NO: 307880 - DNA, 12 bp, Artificial Sequence
  Oligonucleotide primer for the detection of SNP TSC0022750
cctatataaaac

SEQ ID NO: 307881 - DNA, 12 bp, Artificial Sequence
  Oligonucleotide primer for the detection of SNP TSC0022750
aaggtattagta

SEQ ID NO: 307882 - DNA, 12 bp, Artificial Sequence
  Oligonucleotide primer for the detection of SNP TSC0022750
aaaacaccaaca

SEQ ID NO: 307883 - DNA, 12 bp, Artificial Sequence
  Oligonucleotide primer for the detection of SNP TSC0022750
tttgtgtaggat

SEQ ID NO: 307884 - DNA, 12 bp, Artificial Sequence
  Oligonucleotide primer for the detection of SNP TSC0022751
tttatttactaa

SEQ ID NO: 307885 - DNA, 12 bp, Artificial Sequence
  Oligonucleotide primer for the detection of SNP TSC0022751
agaatttttaag

SEQ ID NO: 307886 - DNA, 12 bp, Artificial Sequence
  Oligonucleotide primer for the detection of SNP TSC0022751
aaaactttcaaa

SEQ ID NO: 307887 - DNA, 12 bp, Artificial Sequence
  Oligonucleotide primer for the detection of SNP TSC0022752
aatgtaaaattg

SEQ ID NO: 307888 - DNA, 12 bp, Artificial Sequence
  Oligonucleotide primer for the detection of SNP TSC0022756
aaacaaaaatct

SEQ ID NO: 307889 - DNA, 12 bp, Artificial Sequence
  Oligonucleotide primer for the detection of SNP TSC0022756
attgtagggtgg

SEQ ID NO: 307890 - DNA, 12 bp, Artificial Sequence
  Oligonucleotide primer for the detection of SNP TSC0022756
attgtagggcgg

SEQ ID NO: 307891 - DNA, 12 bp, Artificial Sequence
  Oligonucleotide primer for the detection of SNP TSC0022757
atatttaccaaa

SEQ ID NO: 307892 - DNA, 12 bp, Artificial Sequence
  Oligonucleotide primer for the detection of SNP TSC0022757
aggataaatagt

SEQ ID NO: 307893 - DNA, 12 bp, Artificial Sequence
  Oligonucleotide primer for the detection of SNP TSC0022757
taaaacaaacaa

SEQ ID NO: 307894 - DNA, 12 bp, Artificial Sequence
  Oligonucleotide primer for the detection of SNP TSC0022757
tatttgttaagt

SEQ ID NO: 307895 - DNA, 12 bp, Artificial Sequence
  Oligonucleotide primer for the detection of SNP TSC0022757
tatttgttaagc

SEQ ID NO: 307896 - DNA, 12 bp, Artificial Sequence
  Oligonucleotide primer for the detection of SNP TSC0022758
ttaaataataat

SEQ ID NO: 307897 - DNA, 12 bp, Artificial Sequence
  Oligonucleotide primer for the detection of SNP TSC0022758
atcaaatattct

SEQ ID NO: 307898 - DNA, 12 bp, Artificial Sequence
  Oligonucleotide primer for the detection of SNP TSC0022758
ttggatagtagt

SEQ ID NO: 307899 - DNA, 12 bp, Artificial Sequence
  Oligonucleotide primer for the detection of SNP TSC0022761
tagtggtattga

SEQ ID NO: 307900 - DNA, 12 bp, Artificial Sequence
  Oligonucleotide primer for the detection of SNP TSC0022762
cccaactcacta

SEQ ID NO: 307901 - DNA, 12 bp, Artificial Sequence
  Oligonucleotide primer for the detection of SNP TSC0022762
ttctatttactt

SEQ ID NO: 307902 - DNA, 12 bp, Artificial Sequence
  Oligonucleotide primer for the detection of SNP TSC0022762
tttagtttatta

SEQ ID NO: 307903 - DNA, 12 bp, Artificial Sequence
  Oligonucleotide primer for the detection of SNP TSC0022764
agagaggttaaa

SEQ ID NO: 307904 - DNA, 12 bp, Artificial Sequence
  Oligonucleotide primer for the detection of SNP TSC0022764
tttaggtaagtt

SEQ ID NO: 307905 - DNA, 12 bp, Artificial Sequence
  Oligonucleotide primer for the detection of SNP TSC0022770
gatttttgggtt

SEQ ID NO: 307906 - DNA, 12 bp, Artificial Sequence
  Oligonucleotide primer for the detection of SNP TSC0022770
aatccctaaatt

SEQ ID NO: 307907 - DNA, 12 bp, Artificial Sequence
  Oligonucleotide primer for the detection of SNP TSC0022770
tgtgaagagttt

SEQ ID NO: 307908 - DNA, 12 bp, Artificial Sequence
  Oligonucleotide primer for the detection of SNP TSC0022775
ttccttttttct

SEQ ID NO: 307909 - DNA, 12 bp, Artificial Sequence
  Oligonucleotide primer for the detection of SNP TSC0022775
atgtatttattg

SEQ ID NO: 307910 - DNA, 12 bp, Artificial Sequence
  Oligonucleotide primer for the detection of SNP TSC0022784
tataaccacaaa

SEQ ID NO: 307911 - DNA, 12 bp, Artificial Sequence
  Oligonucleotide primer for the detection of SNP TSC0022784
tataaccgcaaa

SEQ ID NO: 307912 - DNA, 12 bp, Artificial Sequence
  Oligonucleotide primer for the detection of SNP TSC0022784
gaggggagggag

SEQ ID NO: 307913 - DNA, 12 bp, Artificial Sequence
  Oligonucleotide primer for the detection of SNP TSC0022784
gtgtgtggttgt

SEQ ID NO: 307914 - DNA, 12 bp, Artificial Sequence
  Oligonucleotide primer for the detection of SNP TSC0022784
gtgtgtggtcgt

SEQ ID NO: 307915 - DNA, 12 bp, Artificial Sequence
  Oligonucleotide primer for the detection of SNP TSC0022785
ctaacctctcta

SEQ ID NO: 307916 - DNA, 12 bp, Artificial Sequence
  Oligonucleotide primer for the detection of SNP TSC0022785
tttggaggttat

SEQ ID NO: 307917 - DNA, 12 bp, Artificial Sequence
  Oligonucleotide primer for the detection of SNP TSC0022785
tttggaggttac

SEQ ID NO: 307918 - DNA, 12 bp, Artificial Sequence
  Oligonucleotide primer for the detection of SNP TSC0022785
aaaaccacaaaa

SEQ ID NO: 307919 - DNA, 12 bp, Artificial Sequence
  Oligonucleotide primer for the detection of SNP TSC0022785
aaaaccacgaaa

SEQ ID NO: 307920 - DNA, 12 bp, Artificial Sequence
  Oligonucleotide primer for the detection of SNP TSC0022785
ttggtttttttg

SEQ ID NO: 307921 - DNA, 12 bp, Artificial Sequence
  Oligonucleotide primer for the detection of SNP TSC0022788
acaaattttaac

SEQ ID NO: 307922 - DNA, 12 bp, Artificial Sequence
  Oligonucleotide primer for the detection of SNP TSC0022788
attaaaggatgg

SEQ ID NO: 307923 - DNA, 12 bp, Artificial Sequence
  Oligonucleotide primer for the detection of SNP TSC0022793
tacaaaaaaccc

SEQ ID NO: 307924 - DNA, 12 bp, Artificial Sequence
  Oligonucleotide primer for the detection of SNP TSC0022793
tattttgtgtaa

SEQ ID NO: 307925 - DNA, 12 bp, Artificial Sequence
  Oligonucleotide primer for the detection of SNP TSC0022794
ccaaatctcata

SEQ ID NO: 307926 - DNA, 12 bp, Artificial Sequence
  Oligonucleotide primer for the detection of SNP TSC0022794
ccgaatctcata

SEQ ID NO: 307927 - DNA, 12 bp, Artificial Sequence
  Oligonucleotide primer for the detection of SNP TSC0022794
tggtatagaagt

SEQ ID NO: 307928 - DNA, 12 bp, Artificial Sequence
  Oligonucleotide primer for the detection of SNP TSC0022794
aacacaaaaaca

SEQ ID NO: 307929 - DNA, 12 bp, Artificial Sequence
  Oligonucleotide primer for the detection of SNP TSC0022794
ttgaattttatg

SEQ ID NO: 307930 - DNA, 12 bp, Artificial Sequence
  Oligonukleotid-Primer
tcgaattttatg

SEQ ID NO: 307931 - DNA, 12 bp, Artificial Sequence
  Oligonucleotide primer for the detection of SNP TSC0022795
aataaaatacaa

SEQ ID NO: 307932 - DNA, 12 bp, Artificial Sequence
  Oligonucleotide primer for the detection of SNP TSC0022795
ggtgtagtgatt

SEQ ID NO: 307933 - DNA, 12 bp, Artificial Sequence
  Oligonucleotide primer for the detection of SNP TSC0022795
aatacaataatc

SEQ ID NO: 307934 - DNA, 12 bp, Artificial Sequence
  Oligonucleotide primer for the detection of SNP TSC0022795
agtggggtgtaa

SEQ ID NO: 307935 - DNA, 12 bp, Artificial Sequence
  Oligonucleotide primer for the detection of SNP TSC0022796
cctccaaaatcc

SEQ ID NO: 307936 - DNA, 12 bp, Artificial Sequence
  Oligonucleotide primer for the detection of SNP TSC0022796
attggggaaggg

SEQ ID NO: 307937 - DNA, 12 bp, Artificial Sequence
  Oligonucleotide primer for the detection of SNP TSC0022798
atacctataatc

SEQ ID NO: 307938 - DNA, 12 bp, Artificial Sequence
  Oligonucleotide primer for the detection of SNP TSC0022798
gtgtttataatt

SEQ ID NO: 307939 - DNA, 12 bp, Artificial Sequence
  Oligonucleotide primer for the detection of SNP TSC0022798
gtgtttataatc

SEQ ID NO: 307940 - DNA, 12 bp, Artificial Sequence
  Oligonucleotide primer for the detection of SNP TSC0022799
taagaagggatg

SEQ ID NO: 307941 - DNA, 12 bp, Artificial Sequence
  Oligonucleotide primer for the detection of SNP TSC0022801
ctataaaatcaa

SEQ ID NO: 307942 - DNA, 12 bp, Artificial Sequence
  Oligonukleotid-Primer
ccaaacccttat

SEQ ID NO: 307943 - DNA, 12 bp, Artificial Sequence
  Oligonucleotide primer for the detection of SNP TSC0022801
ttgtgaggttag

SEQ ID NO: 307944 - DNA, 12 bp, Artificial Sequence
  Oligonucleotide primer for the detection of SNP TSC0022802
acaaatatatac

SEQ ID NO: 307945 - DNA, 12 bp, Artificial Sequence
  Oligonucleotide primer for the detection of SNP TSC0022802
gtataaagtgta

SEQ ID NO: 307946 - DNA, 12 bp, Artificial Sequence
  Oligonukleotid-Primer
gaaggggaaata

SEQ ID NO: 307947 - DNA, 12 bp, Artificial Sequence
  Oligonucleotide primer for the detection of SNP TSC0022804
tacactttatac

SEQ ID NO: 307948 - DNA, 12 bp, Artificial Sequence
  Oligonucleotide primer for the detection of SNP TSC0022804
taagagtaaaag

SEQ ID NO: 307949 - DNA, 12 bp, Artificial Sequence
  Oligonucleotide primer for the detection of SNP TSC0022804
caaaaacaaaaa

SEQ ID NO: 307950 - DNA, 12 bp, Artificial Sequence
  Oligonucleotide primer for the detection of SNP TSC0022804
tgtattttgtgt

SEQ ID NO: 307951 - DNA, 12 bp, Artificial Sequence
  Oligonucleotide primer for the detection of SNP TSC0022805
atacttacactt

SEQ ID NO: 307952 - DNA, 12 bp, Artificial Sequence
  Oligonucleotide primer for the detection of SNP TSC0022805
taaaagtatgta

SEQ ID NO: 307953 - DNA, 12 bp, Artificial Sequence
  Oligonucleotide primer for the detection of SNP TSC0022805
caaaaacataca

SEQ ID NO: 307954 - DNA, 12 bp, Artificial Sequence
  Oligonucleotide primer for the detection of SNP TSC0022805
atgtttgtattt

SEQ ID NO: 307955 - DNA, 12 bp, Artificial Sequence
  Oligonucleotide primer for the detection of SNP TSC0022810
tccctatataaa

SEQ ID NO: 307956 - DNA, 12 bp, Artificial Sequence
  Oligonucleotide primer for the detection of SNP TSC0022810
caaatctaaata

SEQ ID NO: 307957 - DNA, 12 bp, Artificial Sequence
  Oligonucleotide primer for the detection of SNP TSC0022810
ttatttttatat

SEQ ID NO: 307958 - DNA, 12 bp, Artificial Sequence
  Oligonucleotide primer for the detection of SNP TSC0022811
aaaaccacctaa

SEQ ID NO: 307959 - DNA, 12 bp, Artificial Sequence
  Oligonucleotide primer for the detection of SNP TSC0022811
tagttagggagt

SEQ ID NO: 307960 - DNA, 12 bp, Artificial Sequence
  Oligonucleotide primer for the detection of SNP TSC0022811
gaagttatttgg

SEQ ID NO: 307961 - DNA, 12 bp, Artificial Sequence
  Oligonucleotide primer for the detection of SNP TSC0022815
aatcaaattact

SEQ ID NO: 307962 - DNA, 12 bp, Artificial Sequence
  Oligonucleotide primer for the detection of SNP TSC0022815
tgatagagaatt

SEQ ID NO: 307963 - DNA, 12 bp, Artificial Sequence
  Oligonucleotide primer for the detection of SNP TSC0022815
taacaaaaaatt

SEQ ID NO: 307964 - DNA, 12 bp, Artificial Sequence
  Oligonucleotide primer for the detection of SNP TSC0022815
ggttaagttgtt

SEQ ID NO: 307965 - DNA, 12 bp, Artificial Sequence
  Oligonucleotide primer for the detection of SNP TSC0022816
taaatctaaaca

SEQ ID NO: 307966 - DNA, 12 bp, Artificial Sequence
  Oligonucleotide primer for the detection of SNP TSC0022816
tgattttagagt

SEQ ID NO: 307967 - DNA, 12 bp, Artificial Sequence
  Oligonucleotide primer for the detection of SNP TSC0022816
taaccctaaaat

SEQ ID NO: 307968 - DNA, 12 bp, Artificial Sequence
  Oligonucleotide primer for the detection of SNP TSC0022816
taaatttaagta

SEQ ID NO: 307969 - DNA, 12 bp, Artificial Sequence
  Oligonucleotide primer for the detection of SNP TSC0022819
atttgtttattc

SEQ ID NO: 307970 - DNA, 12 bp, Artificial Sequence
  Oligonucleotide primer for the detection of SNP TSC0022819
caatctacctat

SEQ ID NO: 307971 - DNA, 12 bp, Artificial Sequence
  Oligonucleotide primer for the detection of SNP TSC0022819
ggggaagaataa

SEQ ID NO: 307972 - DNA, 12 bp, Artificial Sequence
  Oligonucleotide primer for the detection of SNP TSC0022820
aactattaataa

SEQ ID NO: 307973 - DNA, 12 bp, Artificial Sequence
  Oligonucleotide primer for the detection of SNP TSC0022820
atgagaatttgt

SEQ ID NO: 307974 - DNA, 12 bp, Artificial Sequence
  Oligonucleotide primer for the detection of SNP TSC0022820
ataaaaatctac

SEQ ID NO: 307975 - DNA, 12 bp, Artificial Sequence
  Oligonucleotide primer for the detection of SNP TSC0022820
gttgttgataat

SEQ ID NO: 307976 - DNA, 12 bp, Artificial Sequence
  Oligonucleotide primer for the detection of SNP TSC0022820
gttgttgataac

SEQ ID NO: 307977 - DNA, 12 bp, Artificial Sequence
  Oligonucleotide primer for the detection of SNP TSC0022821
caactcattact

SEQ ID NO: 307978 - DNA, 12 bp, Artificial Sequence
  Oligonucleotide primer for the detection of SNP TSC0022821
cgactcattact

SEQ ID NO: 307979 - DNA, 12 bp, Artificial Sequence
  Oligonucleotide primer for the detection of SNP TSC0022821
aaattgagaagg

SEQ ID NO: 307980 - DNA, 12 bp, Artificial Sequence
  Oligonucleotide primer for the detection of SNP TSC0022822
tatcattccaaa

SEQ ID NO: 307981 - DNA, 12 bp, Artificial Sequence
  Oligonucleotide primer for the detection of SNP TSC0022822
ttttgggttagt

SEQ ID NO: 307982 - DNA, 12 bp, Artificial Sequence
  Oligonucleotide primer for the detection of SNP TSC0022822
ctttaaatcaat

SEQ ID NO: 307983 - DNA, 12 bp, Artificial Sequence
  Oligonucleotide primer for the detection of SNP TSC0022825
aaaacatacacc

SEQ ID NO: 307984 - DNA, 12 bp, Artificial Sequence
  Oligonucleotide primer for the detection of SNP TSC0022825
gtaggtatttta

SEQ ID NO: 307985 - DNA, 12 bp, Artificial Sequence
  Oligonucleotide primer for the detection of SNP TSC0022826
taatcataacct

SEQ ID NO: 307986 - DNA, 12 bp, Artificial Sequence
  Oligonucleotide primer for the detection of SNP TSC0022826
ctcctatatcaa

SEQ ID NO: 307987 - DNA, 12 bp, Artificial Sequence
  Oligonucleotide primer for the detection of SNP TSC0022826
tgattatgattt

SEQ ID NO: 307988 - DNA, 12 bp, Artificial Sequence
  Oligonucleotide primer for the detection of SNP TSC0022827
aaattccactcc

SEQ ID NO: 307989 - DNA, 12 bp, Artificial Sequence
  Oligonucleotide primer for the detection of SNP TSC0022827
aggttttatttt

SEQ ID NO: 307990 - DNA, 12 bp, Artificial Sequence
  Oligonucleotide primer for the detection of SNP TSC0022828
tcattactaaaa

SEQ ID NO: 307991 - DNA, 12 bp, Artificial Sequence
  Oligonucleotide primer for the detection of SNP TSC0022828
tatattgtgtat

SEQ ID NO: 307992 - DNA, 12 bp, Artificial Sequence
  Oligonucleotide primer for the detection of SNP TSC0022828
tatattgtgtac

SEQ ID NO: 307993 - DNA, 12 bp, Artificial Sequence
  Oligonucleotide primer for the detection of SNP TSC0022828
catactatacac

SEQ ID NO: 307994 - DNA, 12 bp, Artificial Sequence
  Oligonucleotide primer for the detection of SNP TSC0022828
attgttgaagtt

SEQ ID NO: 307995 - DNA, 12 bp, Artificial Sequence
  Oligonucleotide primer for the detection of SNP TSC0022830
aataaccacaaa

SEQ ID NO: 307996 - DNA, 12 bp, Artificial Sequence
  Oligonucleotide primer for the detection of SNP TSC0022830
atttaattatta

SEQ ID NO: 307997 - DNA, 12 bp, Artificial Sequence
  Oligonucleotide primer for the detection of SNP TSC0022830
attcaaccacca

SEQ ID NO: 307998 - DNA, 12 bp, Artificial Sequence
  Oligonucleotide primer for the detection of SNP TSC0022830
aatgattataaa

SEQ ID NO: 307999 - DNA, 12 bp, Artificial Sequence
  Oligonucleotide primer for the detection of SNP TSC0022833
cattctatacat

SEQ ID NO: 308000 - DNA, 12 bp, Artificial Sequence
  Oligonucleotide primer for the detection of SNP TSC0022833
cattctatacgt

SEQ ID NO: 308001 - DNA, 12 bp, Artificial Sequence
  Oligonucleotide primer for the detection of SNP TSC0022833
tgtgtagttgaa

SEQ ID NO: 308002 - DNA, 12 bp, Artificial Sequence
  Oligonucleotide primer for the detection of SNP TSC0022833
tgtgtagtcgaa

SEQ ID NO: 308003 - DNA, 12 bp, Artificial Sequence
  Oligonucleotide primer for the detection of SNP TSC0022834
tatggtaaatgt

SEQ ID NO: 308004 - DNA, 12 bp, Artificial Sequence
  Oligonucleotide primer for the detection of SNP TSC0022834
tacggtaaatgt

SEQ ID NO: 308005 - DNA, 12 bp, Artificial Sequence
  Oligonucleotide primer for the detection of SNP TSC0022834
cacaacaaatac

SEQ ID NO: 308006 - DNA, 12 bp, Artificial Sequence
  Oligonucleotide primer for the detection of SNP TSC0022834
cacgacaaatac

SEQ ID NO: 308007 - DNA, 12 bp, Artificial Sequence
  Oligonucleotide primer for the detection of SNP TSC0022834
taggaagttagg

SEQ ID NO: 308008 - DNA, 12 bp, Artificial Sequence
  Oligonucleotide primer for the detection of SNP TSC0022835
tggttttttgaa

SEQ ID NO: 308009 - DNA, 12 bp, Artificial Sequence
  Oligonucleotide primer for the detection of SNP TSC0022836
ataaactataat

SEQ ID NO: 308010 - DNA, 12 bp, Artificial Sequence
  Oligonucleotide primer for the detection of SNP TSC0022836
ggatgtaatgat

SEQ ID NO: 308011 - DNA, 12 bp, Artificial Sequence
  Oligonucleotide primer for the detection of SNP TSC0022836
tgagttgtgatt

SEQ ID NO: 308012 - DNA, 12 bp, Artificial Sequence
  Oligonucleotide primer for the detection of SNP TSC0022837
tactaacaaata

SEQ ID NO: 308013 - DNA, 12 bp, Artificial Sequence
  Oligonucleotide primer for the detection of SNP TSC0022837
gaggtttttgtt

SEQ ID NO: 308014 - DNA, 12 bp, Artificial Sequence
  Oligonucleotide primer for the detection of SNP TSC0022837
aaaacctctatc

SEQ ID NO: 308015 - DNA, 12 bp, Artificial Sequence
  Oligonucleotide primer for the detection of SNP TSC0022837
tgttggtagatg

SEQ ID NO: 308016 - DNA, 12 bp, Artificial Sequence
  Oligonucleotide primer for the detection of SNP TSC0022838
atccacccatct

SEQ ID NO: 308017 - DNA, 12 bp, Artificial Sequence
  Oligonucleotide primer for the detection of SNP TSC0022838
ttgtgtttagta

SEQ ID NO: 308018 - DNA, 12 bp, Artificial Sequence
  Oligonucleotide primer for the detection of SNP TSC0022838
ctatacttaaca

SEQ ID NO: 308019 - DNA, 12 bp, Artificial Sequence
  Oligonucleotide primer for the detection of SNP TSC0022843
gtatagtggttt

SEQ ID NO: 308020 - DNA, 12 bp, Artificial Sequence
  Oligonucleotide primer for the detection of SNP TSC0022844
accactcttctt

SEQ ID NO: 308021 - DNA, 12 bp, Artificial Sequence
  Oligonucleotide primer for the detection of SNP TSC0022845
cacattctatat

SEQ ID NO: 308022 - DNA, 12 bp, Artificial Sequence
  Oligonucleotide primer for the detection of SNP TSC0022846
caacaacaaaac

SEQ ID NO: 308023 - DNA, 12 bp, Artificial Sequence
  Oligonucleotide primer for the detection of SNP TSC0022846
gtatgtggtggg

SEQ ID NO: 308024 - DNA, 12 bp, Artificial Sequence
  Oligonucleotide primer for the detection of SNP TSC0022847
tatatcaacaaa

SEQ ID NO: 308025 - DNA, 12 bp, Artificial Sequence
  Oligonucleotide primer for the detection of SNP TSC0022847
ttaacctcaccc

SEQ ID NO: 308026 - DNA, 12 bp, Artificial Sequence
  Oligonucleotide primer for the detection of SNP TSC0022847
tgtattagtagg

SEQ ID NO: 308027 - DNA, 12 bp, Artificial Sequence
  Oligonucleotide primer for the detection of SNP TSC0022848
atcccctaaaaa

SEQ ID NO: 308028 - DNA, 12 bp, Artificial Sequence
  Oligonucleotide primer for the detection of SNP TSC0022848
tgtggttttggt

SEQ ID NO: 308029 - DNA, 12 bp, Artificial Sequence
  Oligonucleotide primer for the detection of SNP TSC0022848
cgtggttttggt

SEQ ID NO: 308030 - DNA, 12 bp, Artificial Sequence
  Oligonucleotide primer for the detection of SNP TSC0022848
cataatcctaac

SEQ ID NO: 308031 - DNA, 12 bp, Artificial Sequence
  Oligonucleotide primer for the detection of SNP TSC0022848
cgtaatcctaac

SEQ ID NO: 308032 - DNA, 12 bp, Artificial Sequence
  Oligonucleotide primer for the detection of SNP TSC0022848
gttttttggggg

SEQ ID NO: 308033 - DNA, 12 bp, Artificial Sequence
  Oligonucleotide primer for the detection of SNP TSC0022849
aatttaaaccct

SEQ ID NO: 308034 - DNA, 12 bp, Artificial Sequence
  Oligonucleotide primer for the detection of SNP TSC0022849
gttttgggtttt

SEQ ID NO: 308035 - DNA, 12 bp, Artificial Sequence
  Oligonukleotid-Primer
ctctaaactcta

SEQ ID NO: 308036 - DNA, 12 bp, Artificial Sequence
  Oligonucleotide primer for the detection of SNP TSC0022849
aatttgaatttt

SEQ ID NO: 308037 - DNA, 12 bp, Artificial Sequence
  Oligonucleotide primer for the detection of SNP TSC0022850
ctaaatactttc

SEQ ID NO: 308038 - DNA, 12 bp, Artificial Sequence
  Oligonucleotide primer for the detection of SNP TSC0022850
attaaaagtata

SEQ ID NO: 308039 - DNA, 12 bp, Artificial Sequence
  Oligonukleotid-Primer
aaacacataaac

SEQ ID NO: 308040 - DNA, 12 bp, Artificial Sequence
  Oligonucleotide primer for the detection of SNP TSC0022851
aaacacgtaaac

SEQ ID NO: 308041 - DNA, 12 bp, Artificial Sequence
  Oligonucleotide primer for the detection of SNP TSC0022851
gatgttttttat

SEQ ID NO: 308042 - DNA, 12 bp, Artificial Sequence
  Oligonucleotide primer for the detection of SNP TSC0022851
aatacctcccac

SEQ ID NO: 308043 - DNA, 12 bp, Artificial Sequence
  Oligonucleotide primer for the detection of SNP TSC0022851
ggatatgtaggt

SEQ ID NO: 308044 - DNA, 12 bp, Artificial Sequence
  Oligonucleotide primer for the detection of SNP TSC0022851
ggatacgtaggt

SEQ ID NO: 308045 - DNA, 12 bp, Artificial Sequence
  Oligonucleotide primer for the detection of SNP TSC0022855
tcaaaaaaacca

SEQ ID NO: 308046 - DNA, 12 bp, Artificial Sequence
  Oligonucleotide primer for the detection of SNP TSC0022855
tcaaaaaaaccg

SEQ ID NO: 308047 - DNA, 12 bp, Artificial Sequence
  Oligonucleotide primer for the detection of SNP TSC0022855
taattatattat

SEQ ID NO: 308048 - DNA, 12 bp, Artificial Sequence
  Oligonucleotide primer for the detection of SNP TSC0022855
taattatattac

SEQ ID NO: 308049 - DNA, 12 bp, Artificial Sequence
  Oligonucleotide primer for the detection of SNP TSC0022855
taaccacaccac

SEQ ID NO: 308050 - DNA, 12 bp, Artificial Sequence
  Oligonucleotide primer for the detection of SNP TSC0022855
ttagaggggttg

SEQ ID NO: 308051 - DNA, 12 bp, Artificial Sequence
  Oligonucleotide primer for the detection of SNP TSC0022855
ttagaggggtcg

SEQ ID NO: 308052 - DNA, 12 bp, Artificial Sequence
  Oligonucleotide primer for the detection of SNP TSC0022856
gtttgtttggtt

SEQ ID NO: 308053 - DNA, 12 bp, Artificial Sequence
  Oligonucleotide primer for the detection of SNP TSC0022857
tcactacattac

SEQ ID NO: 308054 - DNA, 12 bp, Artificial Sequence
  Oligonucleotide primer for the detection of SNP TSC0022857
tcactacgttac

SEQ ID NO: 308055 - DNA, 12 bp, Artificial Sequence
  Oligonucleotide primer for the detection of SNP TSC0022857
ggagagattggg

SEQ ID NO: 308056 - DNA, 12 bp, Artificial Sequence
  Oligonucleotide primer for the detection of SNP TSC0022857
tattgtgttatt

SEQ ID NO: 308057 - DNA, 12 bp, Artificial Sequence
  Oligonucleotide primer for the detection of SNP TSC0022857
tattgcgttatt

SEQ ID NO: 308058 - DNA, 12 bp, Artificial Sequence
  Oligonucleotide primer for the detection of SNP TSC0022858
actctcaaaata

SEQ ID NO: 308059 - DNA, 12 bp, Artificial Sequence
  Oligonucleotide primer for the detection of SNP TSC0022858
ttgttgaaattt

SEQ ID NO: 308060 - DNA, 12 bp, Artificial Sequence
  Oligonucleotide primer for the detection of SNP TSC0022858
tcgttgaaattt

SEQ ID NO: 308061 - DNA, 12 bp, Artificial Sequence
  Oligonucleotide primer for the detection of SNP TSC0022858
ccactaaaatct

SEQ ID NO: 308062 - DNA, 12 bp, Artificial Sequence
  Oligonucleotide primer for the detection of SNP TSC0022858
ccgctaaaatct

SEQ ID NO: 308063 - DNA, 12 bp, Artificial Sequence
  Oligonucleotide primer for the detection of SNP TSC0022858
atttttaaaata

SEQ ID NO: 308064 - DNA, 12 bp, Artificial Sequence
  Oligonucleotide primer for the detection of SNP TSC0022861
gttatgttttta

SEQ ID NO: 308065 - DNA, 12 bp, Artificial Sequence
  Oligonucleotide primer for the detection of SNP TSC0022863
actatcctaaac

SEQ ID NO: 308066 - DNA, 12 bp, Artificial Sequence
  Oligonucleotide primer for the detection of SNP TSC0022863
aaattgatttta

SEQ ID NO: 308067 - DNA, 12 bp, Artificial Sequence
  Oligonucleotide primer for the detection of SNP TSC0022864
tttgagatttat

SEQ ID NO: 308068 - DNA, 12 bp, Artificial Sequence
  Oligonucleotide primer for the detection of SNP TSC0022864
tctaaaacccat

SEQ ID NO: 308069 - DNA, 12 bp, Artificial Sequence
  Oligonucleotide primer for the detection of SNP TSC0022864
taaggggttttt

SEQ ID NO: 308070 - DNA, 12 bp, Artificial Sequence
  Oligonucleotide primer for the detection of SNP TSC0022865
acaacattactt

SEQ ID NO: 308071 - DNA, 12 bp, Artificial Sequence
  Oligonucleotide primer for the detection of SNP TSC0022865
acaacgttactt

SEQ ID NO: 308072 - DNA, 12 bp, Artificial Sequence
  Oligonucleotide primer for the detection of SNP TSC0022865
agtagtttattg

SEQ ID NO: 308073 - DNA, 12 bp, Artificial Sequence
  Oligonucleotide primer for the detection of SNP TSC0022865
aataatctatta

SEQ ID NO: 308074 - DNA, 12 bp, Artificial Sequence
  Oligonucleotide primer for the detection of SNP TSC0022865
gtagtgttattt

SEQ ID NO: 308075 - DNA, 12 bp, Artificial Sequence
  Oligonucleotide primer for the detection of SNP TSC0022865
gtagcgttattt

SEQ ID NO: 308076 - DNA, 12 bp, Artificial Sequence
  Oligonucleotide primer for the detection of SNP TSC0022866
ccctaatctata

SEQ ID NO: 308077 - DNA, 12 bp, Artificial Sequence
  Oligonucleotide primer for the detection of SNP TSC0022866
aagaattggtat

SEQ ID NO: 308078 - DNA, 12 bp, Artificial Sequence
  Oligonucleotide primer for the detection of SNP TSC0022866
aaaaattaacac

SEQ ID NO: 308079 - DNA, 12 bp, Artificial Sequence
  Oligonucleotide primer for the detection of SNP TSC0022866
ttttgatttgtg

SEQ ID NO: 308080 - DNA, 12 bp, Artificial Sequence
  Oligonucleotide primer for the detection of SNP TSC0022867
aacacttattct

SEQ ID NO: 308081 - DNA, 12 bp, Artificial Sequence
  Oligonucleotide primer for the detection of SNP TSC0022867
tttaaataagga

SEQ ID NO: 308082 - DNA, 12 bp, Artificial Sequence
  Oligonucleotide primer for the detection of SNP TSC0022867
tccaaacaaaaa

SEQ ID NO: 308083 - DNA, 12 bp, Artificial Sequence
  Oligonucleotide primer for the detection of SNP TSC0022867
aatatttgtttt

SEQ ID NO: 308084 - DNA, 12 bp, Artificial Sequence
  Oligonucleotide primer for the detection of SNP TSC0022868
taaccttttttt

SEQ ID NO: 308085 - DNA, 12 bp, Artificial Sequence
  Oligonucleotide primer for the detection of SNP TSC0022868
tgtgtagagtgg

SEQ ID NO: 308086 - DNA, 12 bp, Artificial Sequence
  Oligonucleotide primer for the detection of SNP TSC0022869
tgggttttatgg

SEQ ID NO: 308087 - DNA, 12 bp, Artificial Sequence
  Oligonucleotide primer for the detection of SNP TSC0022869
cgggttttatgg

SEQ ID NO: 308088 - DNA, 12 bp, Artificial Sequence
  Oligonucleotide primer for the detection of SNP TSC0022869
tgggttttacgg

SEQ ID NO: 308089 - DNA, 12 bp, Artificial Sequence
  Oligonucleotide primer for the detection of SNP TSC0022869
cgggttttacgg

SEQ ID NO: 308090 - DNA, 12 bp, Artificial Sequence
  Oligonucleotide primer for the detection of SNP TSC0022869
aaatcccacaaa

SEQ ID NO: 308091 - DNA, 12 bp, Artificial Sequence
  Oligonucleotide primer for the detection of SNP TSC0022869
aaatcccacgaa

SEQ ID NO: 308092 - DNA, 12 bp, Artificial Sequence
  Oligonucleotide primer for the detection of SNP TSC0022869
gaatcccacaaa

SEQ ID NO: 308093 - DNA, 12 bp, Artificial Sequence
  Oligonucleotide primer for the detection of SNP TSC0022869
gaatcccacgaa

SEQ ID NO: 308094 - DNA, 12 bp, Artificial Sequence
  Oligonucleotide primer for the detection of SNP TSC0022869
tttggtttggga

SEQ ID NO: 308095 - DNA, 12 bp, Artificial Sequence
  Oligonucleotide primer for the detection of SNP TSC0022870
aatattaatatt

SEQ ID NO: 308096 - DNA, 12 bp, Artificial Sequence
  Oligonucleotide primer for the detection of SNP TSC0022870
tgtttattttta

SEQ ID NO: 308097 - DNA, 12 bp, Artificial Sequence
  Oligonucleotide primer for the detection of SNP TSC0022871
acttctctcccc

SEQ ID NO: 308098 - DNA, 12 bp, Artificial Sequence
  Oligonucleotide primer for the detection of SNP TSC0022871
taattatgaaag

SEQ ID NO: 308099 - DNA, 12 bp, Artificial Sequence
  Oligonucleotide primer for the detection of SNP TSC0022873
gtgatttggtag

SEQ ID NO: 308100 - DNA, 12 bp, Artificial Sequence
  Oligonucleotide primer for the detection of SNP TSC0022873
gggaggagatgt

SEQ ID NO: 308101 - DNA, 12 bp, Artificial Sequence
  Oligonucleotide primer for the detection of SNP TSC0022877
acacttcaaaaa

SEQ ID NO: 308102 - DNA, 12 bp, Artificial Sequence
  Oligonucleotide primer for the detection of SNP TSC0022877
acacttcgaaaa

SEQ ID NO: 308103 - DNA, 12 bp, Artificial Sequence
  Oligonucleotide primer for the detection of SNP TSC0022877
cacccaccttaa

SEQ ID NO: 308104 - DNA, 12 bp, Artificial Sequence
  Oligonukleotid-Primer
cacccgccttaa

SEQ ID NO: 308105 - DNA, 12 bp, Artificial Sequence
  Oligonucleotide primer for the detection of SNP TSC0022877
gtattttggggg

SEQ ID NO: 308106 - DNA, 12 bp, Artificial Sequence
  Oligonucleotide primer for the detection of SNP TSC0022877
gtatttcggggg

SEQ ID NO: 308107 - DNA, 12 bp, Artificial Sequence
  Oligonucleotide primer for the detection of SNP TSC0022878
aaatctaccaaa

SEQ ID NO: 308108 - DNA, 12 bp, Artificial Sequence
  Oligonucleotide primer for the detection of SNP TSC0022878
aaatctaccgaa

SEQ ID NO: 308109 - DNA, 12 bp, Artificial Sequence
  Oligonucleotide primer for the detection of SNP TSC0022878
gtatgagttatt

SEQ ID NO: 308110 - DNA, 12 bp, Artificial Sequence
  Oligonucleotide primer for the detection of SNP TSC0022878
gtatgagttatc

SEQ ID NO: 308111 - DNA, 12 bp, Artificial Sequence
  Oligonucleotide primer for the detection of SNP TSC0022878
aaatttgttggg

SEQ ID NO: 308112 - DNA, 12 bp, Artificial Sequence
  Oligonucleotide primer for the detection of SNP TSC0022878
aaatttgtcggg

SEQ ID NO: 308113 - DNA, 12 bp, Artificial Sequence
  Oligonucleotide primer for the detection of SNP TSC0022879
tcttatatcaat

SEQ ID NO: 308114 - DNA, 12 bp, Artificial Sequence
  Oligonucleotide primer for the detection of SNP TSC0022879
tgtgtttgataa

SEQ ID NO: 308115 - DNA, 12 bp, Artificial Sequence
  Oligonucleotide primer for the detection of SNP TSC0022880
tttattttttac

SEQ ID NO: 308116 - DNA, 12 bp, Artificial Sequence
  Oligonucleotide primer for the detection of SNP TSC0022880
tatctctcacaa

SEQ ID NO: 308117 - DNA, 12 bp, Artificial Sequence
  Oligonucleotide primer for the detection of SNP TSC0022880
tatctctcacga

SEQ ID NO: 308118 - DNA, 12 bp, Artificial Sequence
  Oligonucleotide primer for the detection of SNP TSC0022880
agagtagaggta

SEQ ID NO: 308119 - DNA, 12 bp, Artificial Sequence
  Oligonucleotide primer for the detection of SNP TSC0022881
aaaaaatccaac

SEQ ID NO: 308120 - DNA, 12 bp, Artificial Sequence
  Oligonucleotide primer for the detection of SNP TSC0022881
agtagttagttt

SEQ ID NO: 308121 - DNA, 12 bp, Artificial Sequence
  Oligonucleotide primer for the detection of SNP TSC0022881
acaataactaac

SEQ ID NO: 308122 - DNA, 12 bp, Artificial Sequence
  Oligonucleotide primer for the detection of SNP TSC0022881
aaggatttaatt

SEQ ID NO: 308123 - DNA, 12 bp, Artificial Sequence
  Oligonucleotide primer for the detection of SNP TSC0022882
acacacaaaaac

SEQ ID NO: 308124 - DNA, 12 bp, Artificial Sequence
  Oligonucleotide primer for the detection of SNP TSC0022882
atttattgttta

SEQ ID NO: 308125 - DNA, 12 bp, Artificial Sequence
  Oligonucleotide primer for the detection of SNP TSC0022882
atttactattta

SEQ ID NO: 308126 - DNA, 12 bp, Artificial Sequence
  Oligonucleotide primer for the detection of SNP TSC0022882
atatataaaagt

SEQ ID NO: 308127 - DNA, 12 bp, Artificial Sequence
  Oligonucleotide primer for the detection of SNP TSC0022883
tatccctctata

SEQ ID NO: 308128 - DNA, 12 bp, Artificial Sequence
  Oligonucleotide primer for the detection of SNP TSC0022883
gatatggtattt

SEQ ID NO: 308129 - DNA, 12 bp, Artificial Sequence
  Oligonucleotide primer for the detection of SNP TSC0022883
aacataacactt

SEQ ID NO: 308130 - DNA, 12 bp, Artificial Sequence
  Oligonucleotide primer for the detection of SNP TSC0022884
ctaaaaaataat

SEQ ID NO: 308131 - DNA, 12 bp, Artificial Sequence
  Oligonucleotide primer for the detection of SNP TSC0022884
ttttcgtttttg

SEQ ID NO: 308132 - DNA, 12 bp, Artificial Sequence
  Oligonucleotide primer for the detection of SNP TSC0022884
ttttcgttttcg

SEQ ID NO: 308133 - DNA, 12 bp, Artificial Sequence
  Oligonucleotide primer for the detection of SNP TSC0022885
ccccccaccccc

SEQ ID NO: 308134 - DNA, 12 bp, Artificial Sequence
  Oligonucleotide primer for the detection of SNP TSC0022885
ccccccgccccc

SEQ ID NO: 308135 - DNA, 12 bp, Artificial Sequence
  Oligonucleotide primer for the detection of SNP TSC0022885
aaatggtggggt

SEQ ID NO: 308136 - DNA, 12 bp, Artificial Sequence
  Oligonucleotide primer for the detection of SNP TSC0022885
aaatggtggggc

SEQ ID NO: 308137 - DNA, 12 bp, Artificial Sequence
  Oligonucleotide primer for the detection of SNP TSC0022885
aaataataaaac

SEQ ID NO: 308138 - DNA, 12 bp, Artificial Sequence
  Oligonucleotide primer for the detection of SNP TSC0022885
tttttcgttttt

SEQ ID NO: 308139 - DNA, 12 bp, Artificial Sequence
  Oligonucleotide primer for the detection of SNP TSC0022885
tttttcgttttc

SEQ ID NO: 308140 - DNA, 12 bp, Artificial Sequence
  Oligonucleotide primer for the detection of SNP TSC0022886
caaaaccccccc

SEQ ID NO: 308141 - DNA, 12 bp, Artificial Sequence
  Oligonucleotide primer for the detection of SNP TSC0022886
tggggttggggg

SEQ ID NO: 308142 - DNA, 12 bp, Artificial Sequence
  Oligonucleotide primer for the detection of SNP TSC0022886
tggggtcggggg

SEQ ID NO: 308143 - DNA, 12 bp, Artificial Sequence
  Oligonucleotide primer for the detection of SNP TSC0022886
taaaaccaaaaa

SEQ ID NO: 308144 - DNA, 12 bp, Artificial Sequence
  Oligonucleotide primer for the detection of SNP TSC0022886
taaaaccgaaaa

SEQ ID NO: 308145 - DNA, 12 bp, Artificial Sequence
  Oligonucleotide primer for the detection of SNP TSC0022886
tagagttttttt

SEQ ID NO: 308146 - DNA, 12 bp, Artificial Sequence
  Oligonucleotide primer for the detection of SNP TSC0022886
tagagttttttc

SEQ ID NO: 308147 - DNA, 12 bp, Artificial Sequence
  Oligonucleotide primer for the detection of SNP TSC0022887
acaaaccttaaa

SEQ ID NO: 308148 - DNA, 12 bp, Artificial Sequence
  Oligonucleotide primer for the detection of SNP TSC0022887
acgaaccttaaa

SEQ ID NO: 308149 - DNA, 12 bp, Artificial Sequence
  Oligonucleotide primer for the detection of SNP TSC0022887
gatagtaagttt

SEQ ID NO: 308150 - DNA, 12 bp, Artificial Sequence
  Oligonucleotide primer for the detection of SNP TSC0022887
gatagtaagttc

SEQ ID NO: 308151 - DNA, 12 bp, Artificial Sequence
  Oligonucleotide primer for the detection of SNP TSC0022887
aacaacaaaccc

SEQ ID NO: 308152 - DNA, 12 bp, Artificial Sequence
  Oligonucleotide primer for the detection of SNP TSC0022887
gtggattttgaa

SEQ ID NO: 308153 - DNA, 12 bp, Artificial Sequence
  Oligonucleotide primer for the detection of SNP TSC0022887
gcggattttgaa

SEQ ID NO: 308154 - DNA, 12 bp, Artificial Sequence
  Oligonucleotide primer for the detection of SNP TSC0022889
taaaaaacccca

SEQ ID NO: 308155 - DNA, 12 bp, Artificial Sequence
  Oligonucleotide primer for the detection of SNP TSC0022889
ttgaggtatatt

SEQ ID NO: 308156 - DNA, 12 bp, Artificial Sequence
  Oligonucleotide primer for the detection of SNP TSC0022889
taaaacatacca

SEQ ID NO: 308157 - DNA, 12 bp, Artificial Sequence
  Oligonucleotide primer for the detection of SNP TSC0022889
ggggggttttat

SEQ ID NO: 308158 - DNA, 12 bp, Artificial Sequence
  Oligonucleotide primer for the detection of SNP TSC0022890
cataatcaaccc

SEQ ID NO: 308159 - DNA, 12 bp, Artificial Sequence
  Oligonucleotide primer for the detection of SNP TSC0022890
gtaggaggtgag

SEQ ID NO: 308160 - DNA, 12 bp, Artificial Sequence
  Oligonucleotide primer for the detection of SNP TSC0022891
tataaatttctc

SEQ ID NO: 308161 - DNA, 12 bp, Artificial Sequence
  Oligonucleotide primer for the detection of SNP TSC0022891
gaaatgtataga

SEQ ID NO: 308162 - DNA, 12 bp, Artificial Sequence
  Oligonucleotide primer for the detection of SNP TSC0022893
atttaatctatt

SEQ ID NO: 308163 - DNA, 12 bp, Artificial Sequence
  Oligonucleotide primer for the detection of SNP TSC0022893
attaatattgta

SEQ ID NO: 308164 - DNA, 12 bp, Artificial Sequence
  Oligonucleotide primer for the detection of SNP TSC0022893
attaatatcgta

SEQ ID NO: 308165 - DNA, 12 bp, Artificial Sequence
  Oligonucleotide primer for the detection of SNP TSC0022894
ataataaattac

SEQ ID NO: 308166 - DNA, 12 bp, Artificial Sequence
  Oligonucleotide primer for the detection of SNP TSC0022894
atgagatattag

SEQ ID NO: 308167 - DNA, 12 bp, Artificial Sequence
  Oligonucleotide primer for the detection of SNP TSC0022895
ataaacttaaaa

SEQ ID NO: 308168 - DNA, 12 bp, Artificial Sequence
  Oligonucleotide primer for the detection of SNP TSC0022895
attaatttattt

SEQ ID NO: 308169 - DNA, 12 bp, Artificial Sequence
  Oligonukleotid-Primer
accaacctacct

SEQ ID NO: 308170 - DNA, 12 bp, Artificial Sequence
  Oligonucleotide primer for the detection of SNP TSC0022895
gatagatttaga

SEQ ID NO: 308171 - DNA, 12 bp, Artificial Sequence
  Oligonucleotide primer for the detection of SNP TSC0022896
cctttaaattcc

SEQ ID NO: 308172 - DNA, 12 bp, Artificial Sequence
  Oligonucleotide primer for the detection of SNP TSC0022896
gtgtgtatatag

SEQ ID NO: 308173 - DNA, 12 bp, Artificial Sequence
  Oligonucleotide primer for the detection of SNP TSC0022896
atatatatacaa

SEQ ID NO: 308174 - DNA, 12 bp, Artificial Sequence
  Oligonucleotide primer for the detection of SNP TSC0022898
attgaaaaaatg

SEQ ID NO: 308175 - DNA, 12 bp, Artificial Sequence
  Oligonucleotide primer for the detection of SNP TSC0022899
aaatacaactaa

SEQ ID NO: 308176 - DNA, 12 bp, Artificial Sequence
  Oligonucleotide primer for the detection of SNP TSC0022899
tgtttttggttt

SEQ ID NO: 308177 - DNA, 12 bp, Artificial Sequence
  Oligonucleotide primer for the detection of SNP TSC0022899
tacccttaatct

SEQ ID NO: 308178 - DNA, 12 bp, Artificial Sequence
  Oligonucleotide primer for the detection of SNP TSC0022899
agatataattga

SEQ ID NO: 308179 - DNA, 12 bp, Artificial Sequence
  Oligonucleotide primer for the detection of SNP TSC0022900
ctaatataaatt

SEQ ID NO: 308180 - DNA, 12 bp, Artificial Sequence
  Oligonucleotide primer for the detection of SNP TSC0022900
ttattatattta

SEQ ID NO: 308181 - DNA, 12 bp, Artificial Sequence
  Oligonucleotide primer for the detection of SNP TSC0022901
aatacttataac

SEQ ID NO: 308182 - DNA, 12 bp, Artificial Sequence
  Oligonucleotide primer for the detection of SNP TSC0022901
tgtttttatgtt

SEQ ID NO: 308183 - DNA, 12 bp, Artificial Sequence
  Oligonucleotide primer for the detection of SNP TSC0022901
tatctttatact

SEQ ID NO: 308184 - DNA, 12 bp, Artificial Sequence
  Oligonucleotide primer for the detection of SNP TSC0022901
ggtgtttatggt

SEQ ID NO: 308185 - DNA, 12 bp, Artificial Sequence
  Oligonucleotide primer for the detection of SNP TSC0022902
gcttttaaaaca

SEQ ID NO: 308186 - DNA, 12 bp, Artificial Sequence
  Oligonucleotide primer for the detection of SNP TSC0022902
atgataggtgtt

SEQ ID NO: 308187 - DNA, 12 bp, Artificial Sequence
  Oligonucleotide primer for the detection of SNP TSC0022902
acgataggtgtt

SEQ ID NO: 308188 - DNA, 12 bp, Artificial Sequence
  Oligonucleotide primer for the detection of SNP TSC0022902
acaataaatacc

SEQ ID NO: 308189 - DNA, 12 bp, Artificial Sequence
  Oligonucleotide primer for the detection of SNP TSC0022902
acgataaatacc

SEQ ID NO: 308190 - DNA, 12 bp, Artificial Sequence
  Oligonucleotide primer for the detection of SNP TSC0022905
atataccacttt

SEQ ID NO: 308191 - DNA, 12 bp, Artificial Sequence
  Oligonucleotide primer for the detection of SNP TSC0022905
ttttttgattta

SEQ ID NO: 308192 - DNA, 12 bp, Artificial Sequence
  Oligonucleotide primer for the detection of SNP TSC0022906
acccaactctat

SEQ ID NO: 308193 - DNA, 12 bp, Artificial Sequence
  Oligonucleotide primer for the detection of SNP TSC0022906
gttgtttaaggg

SEQ ID NO: 308194 - DNA, 12 bp, Artificial Sequence
  Oligonucleotide primer for the detection of SNP TSC0022907
tattcaatactt

SEQ ID NO: 308195 - DNA, 12 bp, Artificial Sequence
  Oligonucleotide primer for the detection of SNP TSC0022907
ttttagtaaaaa

SEQ ID NO: 308196 - DNA, 12 bp, Artificial Sequence
  Oligonucleotide primer for the detection of SNP TSC0022909
ttatgtggtaat

SEQ ID NO: 308197 - DNA, 12 bp, Artificial Sequence
  Oligonucleotide primer for the detection of SNP TSC0022909
tccatataacaa

SEQ ID NO: 308198 - DNA, 12 bp, Artificial Sequence
  Oligonucleotide primer for the detection of SNP TSC0022909
tagggtgaaggg

SEQ ID NO: 308199 - DNA, 12 bp, Artificial Sequence
  Oligonucleotide primer for the detection of SNP TSC0022910
tcaacatataac

SEQ ID NO: 308200 - DNA, 12 bp, Artificial Sequence
  Oligonucleotide primer for the detection of SNP TSC0022910
atgttgaattag

SEQ ID NO: 308201 - DNA, 12 bp, Artificial Sequence
  Oligonucleotide primer for the detection of SNP TSC0022910
atattaaatcaa

SEQ ID NO: 308202 - DNA, 12 bp, Artificial Sequence
  Oligonucleotide primer for the detection of SNP TSC0022910
ttagtatgtggt

SEQ ID NO: 308203 - DNA, 12 bp, Artificial Sequence
  Oligonucleotide primer for the detection of SNP TSC0022911
ctaattacttct

SEQ ID NO: 308204 - DNA, 12 bp, Artificial Sequence
  Oligonucleotide primer for the detection of SNP TSC0022911
gttttggataga

SEQ ID NO: 308205 - DNA, 12 bp, Artificial Sequence
  Oligonucleotide primer for the detection of SNP TSC0022912
ataaacaaaccc

SEQ ID NO: 308206 - DNA, 12 bp, Artificial Sequence
  Oligonucleotide primer for the detection of SNP TSC0022912
atgatgttattg

SEQ ID NO: 308207 - DNA, 12 bp, Artificial Sequence
  Oligonucleotide primer for the detection of SNP TSC0022912
acgatgttattg

SEQ ID NO: 308208 - DNA, 12 bp, Artificial Sequence
  Oligonucleotide primer for the detection of SNP TSC0022912
atgatgttatcg

SEQ ID NO: 308209 - DNA, 12 bp, Artificial Sequence
  Oligonucleotide primer for the detection of SNP TSC0022912
acgatgttatcg

SEQ ID NO: 308210 - DNA, 12 bp, Artificial Sequence
  Oligonucleotide primer for the detection of SNP TSC0022912
acaatattatca

SEQ ID NO: 308211 - DNA, 12 bp, Artificial Sequence
  Oligonucleotide primer for the detection of SNP TSC0022912
acaatattatcg

SEQ ID NO: 308212 - DNA, 12 bp, Artificial Sequence
  Oligonucleotide primer for the detection of SNP TSC0022912
acgatattatca

SEQ ID NO: 308213 - DNA, 12 bp, Artificial Sequence
  Oligonucleotide primer for the detection of SNP TSC0022912
acgatattatcg

SEQ ID NO: 308214 - DNA, 12 bp, Artificial Sequence
  Oligonucleotide primer for the detection of SNP TSC0022912
gtagataggttt

SEQ ID NO: 308215 - DNA, 12 bp, Artificial Sequence
  Oligonucleotide primer for the detection of SNP TSC0022912
gtagataggttc

SEQ ID NO: 308216 - DNA, 12 bp, Artificial Sequence
  Oligonucleotide primer for the detection of SNP TSC0022913
gtgggttattga

SEQ ID NO: 308217 - DNA, 12 bp, Artificial Sequence
  Oligonucleotide primer for the detection of SNP TSC0022913
ataaactactaa

SEQ ID NO: 308218 - DNA, 12 bp, Artificial Sequence
  Oligonucleotide primer for the detection of SNP TSC0022913
gtaaactactaa

SEQ ID NO: 308219 - DNA, 12 bp, Artificial Sequence
  Oligonucleotide primer for the detection of SNP TSC0022914
ctatcaacacca

SEQ ID NO: 308220 - DNA, 12 bp, Artificial Sequence
  Oligonucleotide primer for the detection of SNP TSC0022914
ctatcgacacca

SEQ ID NO: 308221 - DNA, 12 bp, Artificial Sequence
  Oligonucleotide primer for the detection of SNP TSC0022914
tgataggtgttt

SEQ ID NO: 308222 - DNA, 12 bp, Artificial Sequence
  Oligonucleotide primer for the detection of SNP TSC0022914
taacaaatacct

SEQ ID NO: 308223 - DNA, 12 bp, Artificial Sequence
  Oligonucleotide primer for the detection of SNP TSC0022914
ttgttggtatta

SEQ ID NO: 308224 - DNA, 12 bp, Artificial Sequence
  Oligonucleotide primer for the detection of SNP TSC0022914
ttgtcggtatta

SEQ ID NO: 308225 - DNA, 12 bp, Artificial Sequence
  Oligonucleotide primer for the detection of SNP TSC0022915
cttcccccatac

SEQ ID NO: 308226 - DNA, 12 bp, Artificial Sequence
  Oligonucleotide primer for the detection of SNP TSC0022915
gagttaaggtag

SEQ ID NO: 308227 - DNA, 12 bp, Artificial Sequence
  Oligonucleotide primer for the detection of SNP TSC0022917
ccatcttaacaa

SEQ ID NO: 308228 - DNA, 12 bp, Artificial Sequence
  Oligonucleotide primer for the detection of SNP TSC0022917
gtaaataagttt

SEQ ID NO: 308229 - DNA, 12 bp, Artificial Sequence
  Oligonucleotide primer for the detection of SNP TSC0022918
ctactcaacctc

SEQ ID NO: 308230 - DNA, 12 bp, Artificial Sequence
  Oligonucleotide primer for the detection of SNP TSC0022918
ctactcgacctc

SEQ ID NO: 308231 - DNA, 12 bp, Artificial Sequence
  Oligonucleotide primer for the detection of SNP TSC0022918
gttataggtttg

SEQ ID NO: 308232 - DNA, 12 bp, Artificial Sequence
  Oligonucleotide primer for the detection of SNP TSC0022919
attacatttctt

SEQ ID NO: 308233 - DNA, 12 bp, Artificial Sequence
  Oligonucleotide primer for the detection of SNP TSC0022919
ttgtgtaggtta

SEQ ID NO: 308234 - DNA, 12 bp, Artificial Sequence
  Oligonucleotide primer for the detection of SNP TSC0022919
ttatacaaatta

SEQ ID NO: 308235 - DNA, 12 bp, Artificial Sequence
  Oligonucleotide primer for the detection of SNP TSC0022919
gttgtatttttt

SEQ ID NO: 308236 - DNA, 12 bp, Artificial Sequence
  Oligonucleotide primer for the detection of SNP TSC0022920
aacctaaaacta

SEQ ID NO: 308237 - DNA, 12 bp, Artificial Sequence
  Oligonucleotide primer for the detection of SNP TSC0022920
taatttgaaatg

SEQ ID NO: 308238 - DNA, 12 bp, Artificial Sequence
  Oligonucleotide primer for the detection of SNP TSC0022920
caacttaaaata

SEQ ID NO: 308239 - DNA, 12 bp, Artificial Sequence
  Oligonucleotide primer for the detection of SNP TSC0022920
gatttgggattg

SEQ ID NO: 308240 - DNA, 12 bp, Artificial Sequence
  Oligonucleotide primer for the detection of SNP TSC0022922
aatctcctcttc

SEQ ID NO: 308241 - DNA, 12 bp, Artificial Sequence
  Oligonucleotide primer for the detection of SNP TSC0022922
agggtggggtgg

SEQ ID NO: 308242 - DNA, 12 bp, Artificial Sequence
  Oligonucleotide primer for the detection of SNP TSC0022923
aaacatatacca

SEQ ID NO: 308243 - DNA, 12 bp, Artificial Sequence
  Oligonucleotide primer for the detection of SNP TSC0022923
aaacatataccg

SEQ ID NO: 308244 - DNA, 12 bp, Artificial Sequence
  Oligonucleotide primer for the detection of SNP TSC0022923
aaacgtatacca

SEQ ID NO: 308245 - DNA, 12 bp, Artificial Sequence
  Oligonucleotide primer for the detection of SNP TSC0022923
aaacgtataccg

SEQ ID NO: 308246 - DNA, 12 bp, Artificial Sequence
  Oligonukleotid-Primer
agtgtttggtat

SEQ ID NO: 308247 - DNA, 12 bp, Artificial Sequence
  Oligonucleotide primer for the detection of SNP TSC0022923
aatacctaatac

SEQ ID NO: 308248 - DNA, 12 bp, Artificial Sequence
  Oligonucleotide primer for the detection of SNP TSC0022923
ggatgtgtgttg

SEQ ID NO: 308249 - DNA, 12 bp, Artificial Sequence
  Oligonucleotide primer for the detection of SNP TSC0022923
ggacgtgtgttg

SEQ ID NO: 308250 - DNA, 12 bp, Artificial Sequence
  Oligonucleotide primer for the detection of SNP TSC0022923
ggatgtgtgtcg

SEQ ID NO: 308251 - DNA, 12 bp, Artificial Sequence
  Oligonucleotide primer for the detection of SNP TSC0022923
ggacgtgtgtcg

SEQ ID NO: 308252 - DNA, 12 bp, Artificial Sequence
  Oligonucleotide primer for the detection of SNP TSC0022924
ttaaacatatac

SEQ ID NO: 308253 - DNA, 12 bp, Artificial Sequence
  Oligonucleotide primer for the detection of SNP TSC0022924
ttaaacgtatac

SEQ ID NO: 308254 - DNA, 12 bp, Artificial Sequence
  Oligonucleotide primer for the detection of SNP TSC0022924
ggtattgggaat

SEQ ID NO: 308255 - DNA, 12 bp, Artificial Sequence
  Oligonucleotide primer for the detection of SNP TSC0022924
ggtatcgggaat

SEQ ID NO: 308256 - DNA, 12 bp, Artificial Sequence
  Oligonucleotide primer for the detection of SNP TSC0022924
ggtattgggaac

SEQ ID NO: 308257 - DNA, 12 bp, Artificial Sequence
  Oligonucleotide primer for the detection of SNP TSC0022924
ggtatcgggaac

SEQ ID NO: 308258 - DNA, 12 bp, Artificial Sequence
  Oligonucleotide primer for the detection of SNP TSC0022924
taataccgaaaa

SEQ ID NO: 308259 - DNA, 12 bp, Artificial Sequence
  Oligonucleotide primer for the detection of SNP TSC0022924
ttggatgtgtgt

SEQ ID NO: 308260 - DNA, 12 bp, Artificial Sequence
  Oligonucleotide primer for the detection of SNP TSC0022924
ttggacgtgtgt

SEQ ID NO: 308261 - DNA, 12 bp, Artificial Sequence
  Oligonucleotide primer for the detection of SNP TSC0022926
attaaaactaac

SEQ ID NO: 308262 - DNA, 12 bp, Artificial Sequence
  Oligonucleotide primer for the detection of SNP TSC0022926
agtattttgggg

SEQ ID NO: 308263 - DNA, 12 bp, Artificial Sequence
  Oligonucleotide primer for the detection of SNP TSC0022927
ttatatcctatt

SEQ ID NO: 308264 - DNA, 12 bp, Artificial Sequence
  Oligonucleotide primer for the detection of SNP TSC0022927
tatttgtatttg

SEQ ID NO: 308265 - DNA, 12 bp, Artificial Sequence
  Oligonucleotide primer for the detection of SNP TSC0022927
tatttacatcta

SEQ ID NO: 308266 - DNA, 12 bp, Artificial Sequence
  Oligonucleotide primer for the detection of SNP TSC0022927
ttgtgttttatt

SEQ ID NO: 308267 - DNA, 12 bp, Artificial Sequence
  Oligonucleotide primer for the detection of SNP TSC0022930
caaatccttccc

SEQ ID NO: 308268 - DNA, 12 bp, Artificial Sequence
  Oligonucleotide primer for the detection of SNP TSC0022930
tgttaggttggg

SEQ ID NO: 308269 - DNA, 12 bp, Artificial Sequence
  Oligonucleotide primer for the detection of SNP TSC0022931
cctcatcctcac

SEQ ID NO: 308270 - DNA, 12 bp, Artificial Sequence
  Oligonucleotide primer for the detection of SNP TSC0022931
aaaggaagggaa

SEQ ID NO: 308271 - DNA, 12 bp, Artificial Sequence
  Oligonucleotide primer for the detection of SNP TSC0022934
taatctcaacta

SEQ ID NO: 308272 - DNA, 12 bp, Artificial Sequence
  Oligonucleotide primer for the detection of SNP TSC0022935
taatactctttc

SEQ ID NO: 308273 - DNA, 12 bp, Artificial Sequence
  Oligonucleotide primer for the detection of SNP TSC0022935
ttaatattagag

SEQ ID NO: 308274 - DNA, 12 bp, Artificial Sequence
  Oligonucleotide primer for the detection of SNP TSC0022937
aaaaaaatttac

SEQ ID NO: 308275 - DNA, 12 bp, Artificial Sequence
  Oligonucleotide primer for the detection of SNP TSC0022938
cttcatccacat

SEQ ID NO: 308276 - DNA, 12 bp, Artificial Sequence
  Oligonucleotide primer for the detection of SNP TSC0022938
cttcatccacgt

SEQ ID NO: 308277 - DNA, 12 bp, Artificial Sequence
  Oligonucleotide primer for the detection of SNP TSC0022938
gggttttggaag

SEQ ID NO: 308278 - DNA, 12 bp, Artificial Sequence
  Oligonucleotide primer for the detection of SNP TSC0022938
aaactctaaaaa

SEQ ID NO: 308279 - DNA, 12 bp, Artificial Sequence
  Oligonucleotide primer for the detection of SNP TSC0022938
ttttatttatgt

SEQ ID NO: 308280 - DNA, 12 bp, Artificial Sequence
  Oligonucleotide primer for the detection of SNP TSC0022938
ttttatttacgt

SEQ ID NO: 308281 - DNA, 12 bp, Artificial Sequence
  Oligonucleotide primer for the detection of SNP TSC0022939
aaaaaattccta

SEQ ID NO: 308282 - DNA, 12 bp, Artificial Sequence
  Oligonucleotide primer for the detection of SNP TSC0022939
gaaaaattccta

SEQ ID NO: 308283 - DNA, 12 bp, Artificial Sequence
  Oligonucleotide primer for the detection of SNP TSC0022939
gatgaaggtgtt

SEQ ID NO: 308284 - DNA, 12 bp, Artificial Sequence
  Oligonucleotide primer for the detection of SNP TSC0022939
gatgaaggcgtt

SEQ ID NO: 308285 - DNA, 12 bp, Artificial Sequence
  Oligonucleotide primer for the detection of SNP TSC0022939
gatgaaggtgtc

SEQ ID NO: 308286 - DNA, 12 bp, Artificial Sequence
  Oligonucleotide primer for the detection of SNP TSC0022939
gatgaaggcgtc

SEQ ID NO: 308287 - DNA, 12 bp, Artificial Sequence
  Oligonucleotide primer for the detection of SNP TSC0022939
aataaaaacatc

SEQ ID NO: 308288 - DNA, 12 bp, Artificial Sequence
  Oligonucleotide primer for the detection of SNP TSC0022939
aataaaaacgtc

SEQ ID NO: 308289 - DNA, 12 bp, Artificial Sequence
  Oligonucleotide primer for the detection of SNP TSC0022939
gagaggtttttg

SEQ ID NO: 308290 - DNA, 12 bp, Artificial Sequence
  Oligonucleotide primer for the detection of SNP TSC0022940
taacaaaatcaa

SEQ ID NO: 308291 - DNA, 12 bp, Artificial Sequence
  Oligonucleotide primer for the detection of SNP TSC0022940
tcgttttatttt

SEQ ID NO: 308292 - DNA, 12 bp, Artificial Sequence
  Oligonucleotide primer for the detection of SNP TSC0022940
cccaccccaccc

SEQ ID NO: 308293 - DNA, 12 bp, Artificial Sequence
  Oligonucleotide primer for the detection of SNP TSC0022940
cccgccccaccc

SEQ ID NO: 308294 - DNA, 12 bp, Artificial Sequence
  Oligonucleotide primer for the detection of SNP TSC0022940
tagtaggattag

SEQ ID NO: 308295 - DNA, 12 bp, Artificial Sequence
  Oligonucleotide primer for the detection of SNP TSC0022941
caacactctaac

SEQ ID NO: 308296 - DNA, 12 bp, Artificial Sequence
  Oligonucleotide primer for the detection of SNP TSC0022941
gttgtttttgtg

SEQ ID NO: 308297 - DNA, 12 bp, Artificial Sequence
  Oligonucleotide primer for the detection of SNP TSC0022941
gttgtttttgcg

SEQ ID NO: 308298 - DNA, 12 bp, Artificial Sequence
  Oligonucleotide primer for the detection of SNP TSC0022942
tccatatttaaa

SEQ ID NO: 308299 - DNA, 12 bp, Artificial Sequence
  Oligonucleotide primer for the detection of SNP TSC0022942
ttatatattttt

SEQ ID NO: 308300 - DNA, 12 bp, Artificial Sequence
  Oligonucleotide primer for the detection of SNP TSC0022942
tataatcacata

SEQ ID NO: 308301 - DNA, 12 bp, Artificial Sequence
  Oligonucleotide primer for the detection of SNP TSC0022942
tttatgtttagg

SEQ ID NO: 308302 - DNA, 12 bp, Artificial Sequence
  Oligonucleotide primer for the detection of SNP TSC0022943
tcaacaattact

SEQ ID NO: 308303 - DNA, 12 bp, Artificial Sequence
  Oligonucleotide primer for the detection of SNP TSC0022943
atgaaggattta

SEQ ID NO: 308304 - DNA, 12 bp, Artificial Sequence
  Oligonucleotide primer for the detection of SNP TSC0022944
aatcttttatac

SEQ ID NO: 308305 - DNA, 12 bp, Artificial Sequence
  Oligonucleotide primer for the detection of SNP TSC0022944
tgaattgaaagg

SEQ ID NO: 308306 - DNA, 12 bp, Artificial Sequence
  Oligonucleotide primer for the detection of SNP TSC0022946
tatcactaaaat

SEQ ID NO: 308307 - DNA, 12 bp, Artificial Sequence
  Oligonucleotide primer for the detection of SNP TSC0022946
tatttataagtg

SEQ ID NO: 308308 - DNA, 12 bp, Artificial Sequence
  Oligonucleotide primer for the detection of SNP TSC0022946
tacctacaaata

SEQ ID NO: 308309 - DNA, 12 bp, Artificial Sequence
  Oligonucleotide primer for the detection of SNP TSC0022946
tgttattaagat

SEQ ID NO: 308310 - DNA, 12 bp, Artificial Sequence
  Oligonucleotide primer for the detection of SNP TSC0022947
caataaaattta

SEQ ID NO: 308311 - DNA, 12 bp, Artificial Sequence
  Oligonucleotide primer for the detection of SNP TSC0022947
ttagattttcgt

SEQ ID NO: 308312 - DNA, 12 bp, Artificial Sequence
  Oligonucleotide primer for the detection of SNP TSC0022947
ttaaattctcat

SEQ ID NO: 308313 - DNA, 12 bp, Artificial Sequence
  Oligonucleotide primer for the detection of SNP TSC0022947
ttaaattctcgt

SEQ ID NO: 308314 - DNA, 12 bp, Artificial Sequence
  Oligonucleotide primer for the detection of SNP TSC0022947
taatagggtttg

SEQ ID NO: 308315 - DNA, 12 bp, Artificial Sequence
  Oligonukleotid-Primer
aaacacaataca

SEQ ID NO: 308316 - DNA, 12 bp, Artificial Sequence
  Oligonucleotide primer for the detection of SNP TSC0022949
aaacacgataca

SEQ ID NO: 308317 - DNA, 12 bp, Artificial Sequence
  Oligonucleotide primer for the detection of SNP TSC0022949
gtggggagtggt

SEQ ID NO: 308318 - DNA, 12 bp, Artificial Sequence
  Oligonucleotide primer for the detection of SNP TSC0022949
aggtatggtata

SEQ ID NO: 308319 - DNA, 12 bp, Artificial Sequence
  Oligonucleotide primer for the detection of SNP TSC0022949
aggtacggtata

SEQ ID NO: 308320 - DNA, 12 bp, Artificial Sequence
  Oligonucleotide primer for the detection of SNP TSC0022950
aataaactaaat

SEQ ID NO: 308321 - DNA, 12 bp, Artificial Sequence
  Oligonucleotide primer for the detection of SNP TSC0022950
tattttgtatta

SEQ ID NO: 308322 - DNA, 12 bp, Artificial Sequence
  Oligonucleotide primer for the detection of SNP TSC0022951
taataatccctt

SEQ ID NO: 308323 - DNA, 12 bp, Artificial Sequence
  Oligonucleotide primer for the detection of SNP TSC0022951
gaaattaataaa

SEQ ID NO: 308324 - DNA, 12 bp, Artificial Sequence
  Oligonucleotide primer for the detection of SNP TSC0022954
taaaaaatccaa

SEQ ID NO: 308325 - DNA, 12 bp, Artificial Sequence
  Oligonucleotide primer for the detection of SNP TSC0022954
aaacatctttaa

SEQ ID NO: 308326 - DNA, 12 bp, Artificial Sequence
  Oligonucleotide primer for the detection of SNP TSC0022954
gagaagtttagt

SEQ ID NO: 308327 - DNA, 12 bp, Artificial Sequence
  Oligonucleotide primer for the detection of SNP TSC0022955
aatgttgaaata

SEQ ID NO: 308328 - DNA, 12 bp, Artificial Sequence
  Oligonucleotide primer for the detection of SNP TSC0022955
aagggaaggaaa

SEQ ID NO: 308329 - DNA, 12 bp, Artificial Sequence
  Oligonucleotide primer for the detection of SNP TSC0022956
gataaaattagt

SEQ ID NO: 308330 - DNA, 12 bp, Artificial Sequence
  Oligonucleotide primer for the detection of SNP TSC0022956
gataaaattagc

SEQ ID NO: 308331 - DNA, 12 bp, Artificial Sequence
  Oligonucleotide primer for the detection of SNP TSC0022956
ataaaaccaaca

SEQ ID NO: 308332 - DNA, 12 bp, Artificial Sequence
  Oligonucleotide primer for the detection of SNP TSC0022956
ataaaaccaacg

SEQ ID NO: 308333 - DNA, 12 bp, Artificial Sequence
  Oligonucleotide primer for the detection of SNP TSC0022957
ctcacttaatac

SEQ ID NO: 308334 - DNA, 12 bp, Artificial Sequence
  Oligonucleotide primer for the detection of SNP TSC0022957
tgtggaataatg

SEQ ID NO: 308335 - DNA, 12 bp, Artificial Sequence
  Oligonucleotide primer for the detection of SNP TSC0022957
tataaaacaata

SEQ ID NO: 308336 - DNA, 12 bp, Artificial Sequence
  Oligonucleotide primer for the detection of SNP TSC0022958
ttttacttactt

SEQ ID NO: 308337 - DNA, 12 bp, Artificial Sequence
  Oligonucleotide primer for the detection of SNP TSC0022958
aagaagtaataa

SEQ ID NO: 308338 - DNA, 12 bp, Artificial Sequence
  Oligonucleotide primer for the detection of SNP TSC0022962
tctcatttcaca

SEQ ID NO: 308339 - DNA, 12 bp, Artificial Sequence
  Oligonucleotide primer for the detection of SNP TSC0022962
atatgttttttt

SEQ ID NO: 308340 - DNA, 12 bp, Artificial Sequence
  Oligonucleotide primer for the detection of SNP TSC0022962
atatatttcctt

SEQ ID NO: 308341 - DNA, 12 bp, Artificial Sequence
  Oligonucleotide primer for the detection of SNP TSC0022963
caaaacaatcct

SEQ ID NO: 308342 - DNA, 12 bp, Artificial Sequence
  Oligonucleotide primer for the detection of SNP TSC0022963
agtttattatta

SEQ ID NO: 308343 - DNA, 12 bp, Artificial Sequence
  Oligonucleotide primer for the detection of SNP TSC0022963
aactcatcatca

SEQ ID NO: 308344 - DNA, 12 bp, Artificial Sequence
  Oligonucleotide primer for the detection of SNP TSC0022964
gttgtatgtttg

SEQ ID NO: 308345 - DNA, 12 bp, Artificial Sequence
  Oligonucleotide primer for the detection of SNP TSC0022964
attatatattta

SEQ ID NO: 308346 - DNA, 12 bp, Artificial Sequence
  Oligonucleotide primer for the detection of SNP TSC0022965
acaaacatcacc

SEQ ID NO: 308347 - DNA, 12 bp, Artificial Sequence
  Oligonucleotide primer for the detection of SNP TSC0022965
tagagagtgtag

SEQ ID NO: 308348 - DNA, 12 bp, Artificial Sequence
  Oligonucleotide primer for the detection of SNP TSC0022966
acccaaatctca

SEQ ID NO: 308349 - DNA, 12 bp, Artificial Sequence
  Oligonucleotide primer for the detection of SNP TSC0022966
gtttgtttagtt

SEQ ID NO: 308350 - DNA, 12 bp, Artificial Sequence
  Oligonucleotide primer for the detection of SNP TSC0022966
gtttgtttagtc

SEQ ID NO: 308351 - DNA, 12 bp, Artificial Sequence
  Oligonucleotide primer for the detection of SNP TSC0022966
ctacctactcaa

SEQ ID NO: 308352 - DNA, 12 bp, Artificial Sequence
  Oligonucleotide primer for the detection of SNP TSC0022966
gtttaagtttta

SEQ ID NO: 308353 - DNA, 12 bp, Artificial Sequence
  Oligonucleotide primer for the detection of SNP TSC0022968
ttatattttgta

SEQ ID NO: 308354 - DNA, 12 bp, Artificial Sequence
  Oligonucleotide primer for the detection of SNP TSC0022969
aaaatcacaatt

SEQ ID NO: 308355 - DNA, 12 bp, Artificial Sequence
  Oligonucleotide primer for the detection of SNP TSC0022969
gggattataatt

SEQ ID NO: 308356 - DNA, 12 bp, Artificial Sequence
  Oligonucleotide primer for the detection of SNP TSC0022970
cttttaaacaac

SEQ ID NO: 308357 - DNA, 12 bp, Artificial Sequence
  Oligonucleotide primer for the detection of SNP TSC0022970
tttataagttat

SEQ ID NO: 308358 - DNA, 12 bp, Artificial Sequence
  Oligonucleotide primer for the detection of SNP TSC0022970
ctcacaaattat

SEQ ID NO: 308359 - DNA, 12 bp, Artificial Sequence
  Oligonucleotide primer for the detection of SNP TSC0022970
tttttaaatagt

SEQ ID NO: 308360 - DNA, 12 bp, Artificial Sequence
  Oligonucleotide primer for the detection of SNP TSC0022971
ttctttttatta

SEQ ID NO: 308361 - DNA, 12 bp, Artificial Sequence
  Oligonucleotide primer for the detection of SNP TSC0022971
tttaaattaaaa

SEQ ID NO: 308362 - DNA, 12 bp, Artificial Sequence
  Oligonucleotide primer for the detection of SNP TSC0022972
tcttacgaaaaa

SEQ ID NO: 308363 - DNA, 12 bp, Artificial Sequence
  Oligonucleotide primer for the detection of SNP TSC0022972
gttttagttatt

SEQ ID NO: 308364 - DNA, 12 bp, Artificial Sequence
  Oligonucleotide primer for the detection of SNP TSC0022972
actccaactacc

SEQ ID NO: 308365 - DNA, 12 bp, Artificial Sequence
  Oligonucleotide primer for the detection of SNP TSC0022972
gctccaactacc

SEQ ID NO: 308366 - DNA, 12 bp, Artificial Sequence
  Oligonucleotide primer for the detection of SNP TSC0022972
ttttgtgggagg

SEQ ID NO: 308367 - DNA, 12 bp, Artificial Sequence
  Oligonucleotide primer for the detection of SNP TSC0022972
ttttgcgggagg

SEQ ID NO: 308368 - DNA, 12 bp, Artificial Sequence
  Oligonucleotide primer for the detection of SNP TSC0022975
cataaaacacaa

SEQ ID NO: 308369 - DNA, 12 bp, Artificial Sequence
  Oligonucleotide primer for the detection of SNP TSC0022975
tggtaatatgta

SEQ ID NO: 308370 - DNA, 12 bp, Artificial Sequence
  Oligonucleotide primer for the detection of SNP TSC0022975
tggtaatacgta

SEQ ID NO: 308371 - DNA, 12 bp, Artificial Sequence
  Oligonucleotide primer for the detection of SNP TSC0022975
taataacacgca

SEQ ID NO: 308372 - DNA, 12 bp, Artificial Sequence
  Oligonucleotide primer for the detection of SNP TSC0022975
atggaatatagt

SEQ ID NO: 308373 - DNA, 12 bp, Artificial Sequence
  Oligonucleotide primer for the detection of SNP TSC0022981
aacaaaatctac

SEQ ID NO: 308374 - DNA, 12 bp, Artificial Sequence
  Oligonucleotide primer for the detection of SNP TSC0022982
aaaaaatttcaa

SEQ ID NO: 308375 - DNA, 12 bp, Artificial Sequence
  Oligonucleotide primer for the detection of SNP TSC0022982
ttttaaattagt

SEQ ID NO: 308376 - DNA, 12 bp, Artificial Sequence
  Oligonucleotide primer for the detection of SNP TSC0022982
ttttaaattagc

SEQ ID NO: 308377 - DNA, 12 bp, Artificial Sequence
  Oligonucleotide primer for the detection of SNP TSC0022982
ccccaaatcaac

SEQ ID NO: 308378 - DNA, 12 bp, Artificial Sequence
  Oligonucleotide primer for the detection of SNP TSC0022982
aggaattttaat

SEQ ID NO: 308379 - DNA, 12 bp, Artificial Sequence
  Oligonucleotide primer for the detection of SNP TSC0022983
tttaaattagtt

SEQ ID NO: 308380 - DNA, 12 bp, Artificial Sequence
  Oligonucleotide primer for the detection of SNP TSC0022983
tccccaaatcaa

SEQ ID NO: 308381 - DNA, 12 bp, Artificial Sequence
  Oligonucleotide primer for the detection of SNP TSC0022983
aaggaattttaa

SEQ ID NO: 308382 - DNA, 12 bp, Artificial Sequence
  Oligonucleotide primer for the detection of SNP TSC0022986
aaaaatacttta

SEQ ID NO: 308383 - DNA, 12 bp, Artificial Sequence
  Oligonucleotide primer for the detection of SNP TSC0022986
aattctcccttt

SEQ ID NO: 308384 - DNA, 12 bp, Artificial Sequence
  Oligonucleotide primer for the detection of SNP TSC0022986
gagaagtatttt

SEQ ID NO: 308385 - DNA, 12 bp, Artificial Sequence
  Oligonucleotide primer for the detection of SNP TSC0022987
atactcccactt

SEQ ID NO: 308386 - DNA, 12 bp, Artificial Sequence
  Oligonucleotide primer for the detection of SNP TSC0022987
tcactactcaaa

SEQ ID NO: 308387 - DNA, 12 bp, Artificial Sequence
  Oligonucleotide primer for the detection of SNP TSC0022987
atgtttttattt

SEQ ID NO: 308388 - DNA, 12 bp, Artificial Sequence
  Oligonucleotide primer for the detection of SNP TSC0022988
aaacatactaac

SEQ ID NO: 308389 - DNA, 12 bp, Artificial Sequence
  Oligonucleotide primer for the detection of SNP TSC0022988
atggtttttgta

SEQ ID NO: 308390 - DNA, 12 bp, Artificial Sequence
  Oligonucleotide primer for the detection of SNP TSC0022989
aataattacaaa

SEQ ID NO: 308391 - DNA, 12 bp, Artificial Sequence
  Oligonucleotide primer for the detection of SNP TSC0022989
gtatttaggggt

SEQ ID NO: 308392 - DNA, 12 bp, Artificial Sequence
  Oligonucleotide primer for the detection of SNP TSC0022989
agtagttataga

SEQ ID NO: 308393 - DNA, 12 bp, Artificial Sequence
  Oligonucleotide primer for the detection of SNP TSC0022994
ccacacaccata

SEQ ID NO: 308394 - DNA, 12 bp, Artificial Sequence
  Oligonucleotide primer for the detection of SNP TSC0022994
gtgtttaaatta

SEQ ID NO: 308395 - DNA, 12 bp, Artificial Sequence
  Oligonucleotide primer for the detection of SNP TSC0022994
atatccaaacca

SEQ ID NO: 308396 - DNA, 12 bp, Artificial Sequence
  Oligonucleotide primer for the detection of SNP TSC0022994
ttatatattatg

SEQ ID NO: 308397 - DNA, 12 bp, Artificial Sequence
  Oligonucleotide primer for the detection of SNP TSC0022996
ataaaattccaa

SEQ ID NO: 308398 - DNA, 12 bp, Artificial Sequence
  Oligonucleotide primer for the detection of SNP TSC0022996
tggggattgttt

SEQ ID NO: 308399 - DNA, 12 bp, Artificial Sequence
  Oligonucleotide primer for the detection of SNP TSC0022996
tggggattgttc

SEQ ID NO: 308400 - DNA, 12 bp, Artificial Sequence
  Oligonucleotide primer for the detection of SNP TSC0022996
taaaaactaccc

SEQ ID NO: 308401 - DNA, 12 bp, Artificial Sequence
  Oligonucleotide primer for the detection of SNP TSC0022996
tgggattttaat

SEQ ID NO: 308402 - DNA, 12 bp, Artificial Sequence
  Oligonucleotide primer for the detection of SNP TSC0022998
atttattaatat

SEQ ID NO: 308403 - DNA, 12 bp, Artificial Sequence
  Oligonucleotide primer for the detection of SNP TSC0022999
ttataaataaca

SEQ ID NO: 308404 - DNA, 12 bp, Artificial Sequence
  Oligonucleotide primer for the detection of SNP TSC0022999
gaggatttggtt

SEQ ID NO: 308405 - DNA, 12 bp, Artificial Sequence
  Oligonucleotide primer for the detection of SNP TSC0022999
taaaaacttaac

SEQ ID NO: 308406 - DNA, 12 bp, Artificial Sequence
  Oligonucleotide primer for the detection of SNP TSC0022999
tttgtaaataat

SEQ ID NO: 308407 - DNA, 12 bp, Artificial Sequence
  Oligonucleotide primer for the detection of SNP TSC0023001
taaatattactt

SEQ ID NO: 308408 - DNA, 12 bp, Artificial Sequence
  Oligonukleotid-Primer
tccatatttcta

SEQ ID NO: 308409 - DNA, 12 bp, Artificial Sequence
  Oligonucleotide primer for the detection of SNP TSC0023001
taaatgttattt

SEQ ID NO: 308410 - DNA, 12 bp, Artificial Sequence
  Oligonucleotide primer for the detection of SNP TSC0023002
tttactcttacc

SEQ ID NO: 308411 - DNA, 12 bp, Artificial Sequence
  Oligonucleotide primer for the detection of SNP TSC0023002
atagtttttgaa

SEQ ID NO: 308412 - DNA, 12 bp, Artificial Sequence
  Oligonukleotid-Primer
aaaaaaccctct

SEQ ID NO: 308413 - DNA, 12 bp, Artificial Sequence
  Oligonucleotide primer for the detection of SNP TSC0023003
atttaattaagg

SEQ ID NO: 308414 - DNA, 12 bp, Artificial Sequence
  Oligonucleotide primer for the detection of SNP TSC0023007
taatcaaaaaaa

SEQ ID NO: 308415 - DNA, 12 bp, Artificial Sequence
  Oligonucleotide primer for the detection of SNP TSC0023007
gtttcgtttttt

SEQ ID NO: 308416 - DNA, 12 bp, Artificial Sequence
  Oligonukleotid-Primer
atcccattctcc

SEQ ID NO: 308417 - DNA, 12 bp, Artificial Sequence
  Oligonucleotide primer for the detection of SNP TSC0023007
atcccgttctcc

SEQ ID NO: 308418 - DNA, 12 bp, Artificial Sequence
  Oligonucleotide primer for the detection of SNP TSC0023007
gtcccattctcc

SEQ ID NO: 308419 - DNA, 12 bp, Artificial Sequence
  Oligonucleotide primer for the detection of SNP TSC0023007
gtcccgttctcc

SEQ ID NO: 308420 - DNA, 12 bp, Artificial Sequence
  Oligonucleotide primer for the detection of SNP TSC0023007
tggttaggaagg

SEQ ID NO: 308421 - DNA, 12 bp, Artificial Sequence
  Oligonucleotide primer for the detection of SNP TSC0023008
aaaacaaataca

SEQ ID NO: 308422 - DNA, 12 bp, Artificial Sequence
  Oligonucleotide primer for the detection of SNP TSC0023008
aaaacaaatacg

SEQ ID NO: 308423 - DNA, 12 bp, Artificial Sequence
  Oligonucleotide primer for the detection of SNP TSC0023008
gtatatttattt

SEQ ID NO: 308424 - DNA, 12 bp, Artificial Sequence
  Oligonucleotide primer for the detection of SNP TSC0023008
acacatttatct

SEQ ID NO: 308425 - DNA, 12 bp, Artificial Sequence
  Oligonucleotide primer for the detection of SNP TSC0023008
aaaatagatatg

SEQ ID NO: 308426 - DNA, 12 bp, Artificial Sequence
  Oligonucleotide primer for the detection of SNP TSC0023008
aaaatagatacg

SEQ ID NO: 308427 - DNA, 12 bp, Artificial Sequence
  Oligonucleotide primer for the detection of SNP TSC0023009
ggggttatagag

SEQ ID NO: 308428 - DNA, 12 bp, Artificial Sequence
  Oligonucleotide primer for the detection of SNP TSC0023009
aaaactacaaaa

SEQ ID NO: 308429 - DNA, 12 bp, Artificial Sequence
  Oligonucleotide primer for the detection of SNP TSC0023009
agaagatatagg

SEQ ID NO: 308430 - DNA, 12 bp, Artificial Sequence
  Oligonucleotide primer for the detection of SNP TSC0023011
atctatactctt

SEQ ID NO: 308431 - DNA, 12 bp, Artificial Sequence
  Oligonucleotide primer for the detection of SNP TSC0023011
tgtagtgtgatg

SEQ ID NO: 308432 - DNA, 12 bp, Artificial Sequence
  Oligonucleotide primer for the detection of SNP TSC0023011
tacaatataata

SEQ ID NO: 308433 - DNA, 12 bp, Artificial Sequence
  Oligonucleotide primer for the detection of SNP TSC0023013
cccatcactaaa

SEQ ID NO: 308434 - DNA, 12 bp, Artificial Sequence
  Oligonucleotide primer for the detection of SNP TSC0023013
atgttagttatt

SEQ ID NO: 308435 - DNA, 12 bp, Artificial Sequence
  Oligonucleotide primer for the detection of SNP TSC0023013
atattaatcatt

SEQ ID NO: 308436 - DNA, 12 bp, Artificial Sequence
  Oligonucleotide primer for the detection of SNP TSC0023013
tttattattggg

SEQ ID NO: 308437 - DNA, 12 bp, Artificial Sequence
  Oligonucleotide primer for the detection of SNP TSC0023015
aaataaaccctc

SEQ ID NO: 308438 - DNA, 12 bp, Artificial Sequence
  Oligonucleotide primer for the detection of SNP TSC0023015
gtagtttgattg

SEQ ID NO: 308439 - DNA, 12 bp, Artificial Sequence
  Oligonucleotide primer for the detection of SNP TSC0023015
aacttaattaaa

SEQ ID NO: 308440 - DNA, 12 bp, Artificial Sequence
  Oligonucleotide primer for the detection of SNP TSC0023015
aaataagttttt

SEQ ID NO: 308441 - DNA, 12 bp, Artificial Sequence
  Oligonucleotide primer for the detection of SNP TSC0023016
cccttccaactc

SEQ ID NO: 308442 - DNA, 12 bp, Artificial Sequence
  Oligonucleotide primer for the detection of SNP TSC0023018
tactaactaacc

SEQ ID NO: 308443 - DNA, 12 bp, Artificial Sequence
  Oligonucleotide primer for the detection of SNP TSC0023018
gtggggttgaaa

SEQ ID NO: 308444 - DNA, 12 bp, Artificial Sequence
  Oligonucleotide primer for the detection of SNP TSC0023019
aaccatacatac

SEQ ID NO: 308445 - DNA, 12 bp, Artificial Sequence
  Oligonucleotide primer for the detection of SNP TSC0023019
gtggttttaatg

SEQ ID NO: 308446 - DNA, 12 bp, Artificial Sequence
  Oligonucleotide primer for the detection of SNP TSC0023019
ataattttaata

SEQ ID NO: 308447 - DNA, 12 bp, Artificial Sequence
  Oligonucleotide primer for the detection of SNP TSC0023019
agttatatatat

SEQ ID NO: 308448 - DNA, 12 bp, Artificial Sequence
  Oligonucleotide primer for the detection of SNP TSC0023020
tcctaaaaatta

SEQ ID NO: 308449 - DNA, 12 bp, Artificial Sequence
  Oligonucleotide primer for the detection of SNP TSC0023020
aagggttttagt

SEQ ID NO: 308450 - DNA, 12 bp, Artificial Sequence
  Oligonucleotide primer for the detection of SNP TSC0023020
taagaattgttt

SEQ ID NO: 308451 - DNA, 12 bp, Artificial Sequence
  Oligonucleotide primer for the detection of SNP TSC0023021
aaatcatcaaac

SEQ ID NO: 308452 - DNA, 12 bp, Artificial Sequence
  Oligonucleotide primer for the detection of SNP TSC0023021
agaatttaatta

SEQ ID NO: 308453 - DNA, 12 bp, Artificial Sequence
  Oligonucleotide primer for the detection of SNP TSC0023022
cttacccaccct

SEQ ID NO: 308454 - DNA, 12 bp, Artificial Sequence
  Oligonucleotide primer for the detection of SNP TSC0023022
tgtttttatgga

SEQ ID NO: 308455 - DNA, 12 bp, Artificial Sequence
  Oligonucleotide primer for the detection of SNP TSC0023023
taatataaacta

SEQ ID NO: 308456 - DNA, 12 bp, Artificial Sequence
  Oligonucleotide primer for the detection of SNP TSC0023023
tacacattaaac

SEQ ID NO: 308457 - DNA, 12 bp, Artificial Sequence
  Oligonucleotide primer for the detection of SNP TSC0023023
taatataaattg

SEQ ID NO: 308458 - DNA, 12 bp, Artificial Sequence
  Oligonucleotide primer for the detection of SNP TSC0023031
agagaattttta

SEQ ID NO: 308459 - DNA, 12 bp, Artificial Sequence
  Oligonucleotide primer for the detection of SNP TSC0023031
aaaaaatttcca

SEQ ID NO: 308460 - DNA, 12 bp, Artificial Sequence
  Oligonucleotide primer for the detection of SNP TSC0023031
gagtttataatt

SEQ ID NO: 308461 - DNA, 12 bp, Artificial Sequence
  Oligonucleotide primer for the detection of SNP TSC0023032
atctaaatatcc

SEQ ID NO: 308462 - DNA, 12 bp, Artificial Sequence
  Oligonucleotide primer for the detection of SNP TSC0023032
ttataggtttag

SEQ ID NO: 308463 - DNA, 12 bp, Artificial Sequence
  Oligonucleotide primer for the detection of SNP TSC0023033
tctcacatatac

SEQ ID NO: 308464 - DNA, 12 bp, Artificial Sequence
  Oligonucleotide primer for the detection of SNP TSC0023034
tctaatatatat

SEQ ID NO: 308465 - DNA, 12 bp, Artificial Sequence
  Oligonucleotide primer for the detection of SNP TSC0023034
tgattatgatgg

SEQ ID NO: 308466 - DNA, 12 bp, Artificial Sequence
  Oligonucleotide primer for the detection of SNP TSC0023036
tgatgttgaaaa

SEQ ID NO: 308467 - DNA, 12 bp, Artificial Sequence
  Oligonucleotide primer for the detection of SNP TSC0023037
aattaatttttt

SEQ ID NO: 308468 - DNA, 12 bp, Artificial Sequence
  Oligonucleotide primer for the detection of SNP TSC0023039
gtttaaattgga

SEQ ID NO: 308469 - DNA, 12 bp, Artificial Sequence
  Oligonucleotide primer for the detection of SNP TSC0023040
tcataatcttct

SEQ ID NO: 308470 - DNA, 12 bp, Artificial Sequence
  Oligonucleotide primer for the detection of SNP TSC0023040
tcgtaatcttct

SEQ ID NO: 308471 - DNA, 12 bp, Artificial Sequence
  Oligonucleotide primer for the detection of SNP TSC0023040
aatataaactct

SEQ ID NO: 308472 - DNA, 12 bp, Artificial Sequence
  Oligonucleotide primer for the detection of SNP TSC0023040
tcgtggtttttt

SEQ ID NO: 308473 - DNA, 12 bp, Artificial Sequence
  Oligonucleotide primer for the detection of SNP TSC0023041
aaactaattaac

SEQ ID NO: 308474 - DNA, 12 bp, Artificial Sequence
  Oligonucleotide primer for the detection of SNP TSC0023041
ttatgtaagaag

SEQ ID NO: 308475 - DNA, 12 bp, Artificial Sequence
  Oligonucleotide primer for the detection of SNP TSC0023043
aaaccccattca

SEQ ID NO: 308476 - DNA, 12 bp, Artificial Sequence
  Oligonucleotide primer for the detection of SNP TSC0023043
aaaccccattcg

SEQ ID NO: 308477 - DNA, 12 bp, Artificial Sequence
  Oligonucleotide primer for the detection of SNP TSC0023043
gtggtttttggg

SEQ ID NO: 308478 - DNA, 12 bp, Artificial Sequence
  Oligonucleotide primer for the detection of SNP TSC0023043
acccctaaaaaa

SEQ ID NO: 308479 - DNA, 12 bp, Artificial Sequence
  Oligonucleotide primer for the detection of SNP TSC0023043
gttttatttgtt

SEQ ID NO: 308480 - DNA, 12 bp, Artificial Sequence
  Oligonucleotide primer for the detection of SNP TSC0023043
gttttattcgtt

SEQ ID NO: 308481 - DNA, 12 bp, Artificial Sequence
  Oligonucleotide primer for the detection of SNP TSC0023044
aatactataact

SEQ ID NO: 308482 - DNA, 12 bp, Artificial Sequence
  Oligonucleotide primer for the detection of SNP TSC0023044
agttttttaatt

SEQ ID NO: 308483 - DNA, 12 bp, Artificial Sequence
  Oligonucleotide primer for the detection of SNP TSC0023045
gtttggggatag

SEQ ID NO: 308484 - DNA, 12 bp, Artificial Sequence
  Oligonucleotide primer for the detection of SNP TSC0023047
taaaacatctat

SEQ ID NO: 308485 - DNA, 12 bp, Artificial Sequence
  Oligonucleotide primer for the detection of SNP TSC0023047
atgggagttagg

SEQ ID NO: 308486 - DNA, 12 bp, Artificial Sequence
  Oligonucleotide primer for the detection of SNP TSC0023047
tagagtatttgt

SEQ ID NO: 308487 - DNA, 12 bp, Artificial Sequence
  Oligonucleotide primer for the detection of SNP TSC0023048
tacaacctcaaa

SEQ ID NO: 308488 - DNA, 12 bp, Artificial Sequence
  Oligonucleotide primer for the detection of SNP TSC0023048
tgtatttttatt

SEQ ID NO: 308489 - DNA, 12 bp, Artificial Sequence
  Oligonucleotide primer for the detection of SNP TSC0023048
tgtatttttatc

SEQ ID NO: 308490 - DNA, 12 bp, Artificial Sequence
  Oligonucleotide primer for the detection of SNP TSC0023048
tacactcttatc

SEQ ID NO: 308491 - DNA, 12 bp, Artificial Sequence
  Oligonucleotide primer for the detection of SNP TSC0023048
atttgtagtttt

SEQ ID NO: 308492 - DNA, 12 bp, Artificial Sequence
  Oligonucleotide primer for the detection of SNP TSC0023049
taccaaaaacat

SEQ ID NO: 308493 - DNA, 12 bp, Artificial Sequence
  Oligonucleotide primer for the detection of SNP TSC0023049
gttgtaatggaa

SEQ ID NO: 308494 - DNA, 12 bp, Artificial Sequence
  Oligonucleotide primer for the detection of SNP TSC0023052
cttttaatttta

SEQ ID NO: 308495 - DNA, 12 bp, Artificial Sequence
  Oligonucleotide primer for the detection of SNP TSC0023052
atttgaaaaaat

SEQ ID NO: 308496 - DNA, 12 bp, Artificial Sequence
  Oligonucleotide primer for the detection of SNP TSC0023052
atttgaaaaaac

SEQ ID NO: 308497 - DNA, 12 bp, Artificial Sequence
  Oligonucleotide primer for the detection of SNP TSC0023052
atttaaaaaaac

SEQ ID NO: 308498 - DNA, 12 bp, Artificial Sequence
  Oligonucleotide primer for the detection of SNP TSC0023053
tatattttatgg

SEQ ID NO: 308499 - DNA, 12 bp, Artificial Sequence
  Oligonucleotide primer for the detection of SNP TSC0023053
cacatcccataa

SEQ ID NO: 308500 - DNA, 12 bp, Artificial Sequence
  Oligonucleotide primer for the detection of SNP TSC0023053
aggaggagtgtt

SEQ ID NO: 308501 - DNA, 12 bp, Artificial Sequence
  Oligonucleotide primer for the detection of SNP TSC0023054
acaataatacaa

SEQ ID NO: 308502 - DNA, 12 bp, Artificial Sequence
  Oligonucleotide primer for the detection of SNP TSC0023054
ccctattatcca

SEQ ID NO: 308503 - DNA, 12 bp, Artificial Sequence
  Oligonucleotide primer for the detection of SNP TSC0023054
ttgtaatggtat

SEQ ID NO: 308504 - DNA, 12 bp, Artificial Sequence
  Oligonucleotide primer for the detection of SNP TSC0023055
ttgaaggttgaa

SEQ ID NO: 308505 - DNA, 12 bp, Artificial Sequence
  Oligonucleotide primer for the detection of SNP TSC0023056
atgtttagttaa

SEQ ID NO: 308506 - DNA, 12 bp, Artificial Sequence
  Oligonucleotide primer for the detection of SNP TSC0023056
atacccaattaa

SEQ ID NO: 308507 - DNA, 12 bp, Artificial Sequence
  Oligonucleotide primer for the detection of SNP TSC0023057
cccacccctccc

SEQ ID NO: 308508 - DNA, 12 bp, Artificial Sequence
  Oligonucleotide primer for the detection of SNP TSC0023057
gaggaggagagg

SEQ ID NO: 308509 - DNA, 12 bp, Artificial Sequence
  Oligonucleotide primer for the detection of SNP TSC0023058
aaccattatttc

SEQ ID NO: 308510 - DNA, 12 bp, Artificial Sequence
  Oligonucleotide primer for the detection of SNP TSC0023058
aatgggataaga

SEQ ID NO: 308511 - DNA, 12 bp, Artificial Sequence
  Oligonucleotide primer for the detection of SNP TSC0023059
tttctacttaat

SEQ ID NO: 308512 - DNA, 12 bp, Artificial Sequence
  Oligonucleotide primer for the detection of SNP TSC0023059
gaagtagtaaat

SEQ ID NO: 308513 - DNA, 12 bp, Artificial Sequence
  Oligonucleotide primer for the detection of SNP TSC0023059
tttttatttgat

SEQ ID NO: 308514 - DNA, 12 bp, Artificial Sequence
  Oligonucleotide primer for the detection of SNP TSC0023060
aacaaatatctc

SEQ ID NO: 308515 - DNA, 12 bp, Artificial Sequence
  Oligonucleotide primer for the detection of SNP TSC0023060
gttttattatta

SEQ ID NO: 308516 - DNA, 12 bp, Artificial Sequence
  Oligonucleotide primer for the detection of SNP TSC0023060
atcttatcacca

SEQ ID NO: 308517 - DNA, 12 bp, Artificial Sequence
  Oligonucleotide primer for the detection of SNP TSC0023060
agtagatatttt

SEQ ID NO: 308518 - DNA, 12 bp, Artificial Sequence
  Oligonucleotide primer for the detection of SNP TSC0023064
aataataattta

SEQ ID NO: 308519 - DNA, 12 bp, Artificial Sequence
  Oligonucleotide primer for the detection of SNP TSC0023064
aacaacaactta

SEQ ID NO: 308520 - DNA, 12 bp, Artificial Sequence
  Oligonucleotide primer for the detection of SNP TSC0023064
aaaggagtgaga

SEQ ID NO: 308521 - DNA, 12 bp, Artificial Sequence
  Oligonucleotide primer for the detection of SNP TSC0023065
attttaatatac

SEQ ID NO: 308522 - DNA, 12 bp, Artificial Sequence
  Oligonucleotide primer for the detection of SNP TSC0023065
tttatagagttg

SEQ ID NO: 308523 - DNA, 12 bp, Artificial Sequence
  Oligonucleotide primer for the detection of SNP TSC0023066
ttattatttacc

SEQ ID NO: 308524 - DNA, 12 bp, Artificial Sequence
  Oligonucleotide primer for the detection of SNP TSC0023066
cttaacctatta

SEQ ID NO: 308525 - DNA, 12 bp, Artificial Sequence
  Oligonucleotide primer for the detection of SNP TSC0023067
ccttcttttatt

SEQ ID NO: 308526 - DNA, 12 bp, Artificial Sequence
  Oligonucleotide primer for the detection of SNP TSC0023067
tagagttagatt

SEQ ID NO: 308527 - DNA, 12 bp, Artificial Sequence
  Oligonucleotide primer for the detection of SNP TSC0023067
caaaaccaaatc

SEQ ID NO: 308528 - DNA, 12 bp, Artificial Sequence
  Oligonucleotide primer for the detection of SNP TSC0023068
aaagggagggaa

SEQ ID NO: 308529 - DNA, 12 bp, Artificial Sequence
  Oligonucleotide primer for the detection of SNP TSC0023069
aaatcaaaaccc

SEQ ID NO: 308530 - DNA, 12 bp, Artificial Sequence
  Oligonucleotide primer for the detection of SNP TSC0023069
tatattatttaa

SEQ ID NO: 308531 - DNA, 12 bp, Artificial Sequence
  Oligonucleotide primer for the detection of SNP TSC0023070
acctccataaca

SEQ ID NO: 308532 - DNA, 12 bp, Artificial Sequence
  Oligonucleotide primer for the detection of SNP TSC0023070
aatttggaaggt

SEQ ID NO: 308533 - DNA, 12 bp, Artificial Sequence
  Oligonucleotide primer for the detection of SNP TSC0023070
aatttggaaggc

SEQ ID NO: 308534 - DNA, 12 bp, Artificial Sequence
  Oligonucleotide primer for the detection of SNP TSC0023071
taactcctcccc

SEQ ID NO: 308535 - DNA, 12 bp, Artificial Sequence
  Oligonucleotide primer for the detection of SNP TSC0023071
tggggttgagat

SEQ ID NO: 308536 - DNA, 12 bp, Artificial Sequence
  Oligonucleotide primer for the detection of SNP TSC0023071
ttaaaactaaaa

SEQ ID NO: 308537 - DNA, 12 bp, Artificial Sequence
  Oligonukleotid-Primer
tggttttttttc

SEQ ID NO: 308538 - DNA, 12 bp, Artificial Sequence
  Oligonucleotide primer for the detection of SNP TSC0023072
aaataaacttac

SEQ ID NO: 308539 - DNA, 12 bp, Artificial Sequence
  Oligonucleotide primer for the detection of SNP TSC0023072
gaataaacttac

SEQ ID NO: 308540 - DNA, 12 bp, Artificial Sequence
  Oligonucleotide primer for the detection of SNP TSC0023072
ttaaagaggtga

SEQ ID NO: 308541 - DNA, 12 bp, Artificial Sequence
  Oligonukleotid-Primer
cttccccaaaaa

SEQ ID NO: 308542 - DNA, 12 bp, Artificial Sequence
  Oligonucleotide primer for the detection of SNP TSC0023073
tttagaaattgt

SEQ ID NO: 308543 - DNA, 12 bp, Artificial Sequence
  Oligonucleotide primer for the detection of SNP TSC0023073
ttaaaaattata

SEQ ID NO: 308544 - DNA, 12 bp, Artificial Sequence
  Oligonucleotide primer for the detection of SNP TSC0023073
tttttttaaaag

SEQ ID NO: 308545 - DNA, 12 bp, Artificial Sequence
  Oligonucleotide primer for the detection of SNP TSC0023074
aacataaaaatc

SEQ ID NO: 308546 - DNA, 12 bp, Artificial Sequence
  Oligonucleotide primer for the detection of SNP TSC0023074
aagagttggatg

SEQ ID NO: 308547 - DNA, 12 bp, Artificial Sequence
  Oligonucleotide primer for the detection of SNP TSC0023077
tggattaaagaa

SEQ ID NO: 308548 - DNA, 12 bp, Artificial Sequence
  Oligonucleotide primer for the detection of SNP TSC0023077
ggagttaagaat

SEQ ID NO: 308549 - DNA, 12 bp, Artificial Sequence
  Oligonucleotide primer for the detection of SNP TSC0023078
aaaaaaaacgaa

SEQ ID NO: 308550 - DNA, 12 bp, Artificial Sequence
  Oligonucleotide primer for the detection of SNP TSC0023078
gaagaaggtgaa

SEQ ID NO: 308551 - DNA, 12 bp, Artificial Sequence
  Oligonucleotide primer for the detection of SNP TSC0023078
gaagaaggcgaa

SEQ ID NO: 308552 - DNA, 12 bp, Artificial Sequence
  Oligonucleotide primer for the detection of SNP TSC0023080
aaaaatttctca

SEQ ID NO: 308553 - DNA, 12 bp, Artificial Sequence
  Oligonucleotide primer for the detection of SNP TSC0023080
ggtgttatatac

SEQ ID NO: 308554 - DNA, 12 bp, Artificial Sequence
  Oligonucleotide primer for the detection of SNP TSC0023080
tattatatacaa

SEQ ID NO: 308555 - DNA, 12 bp, Artificial Sequence
  Oligonucleotide primer for the detection of SNP TSC0023080
tattatatacga

SEQ ID NO: 308556 - DNA, 12 bp, Artificial Sequence
  Oligonucleotide primer for the detection of SNP TSC0023081
atagtgttttag

SEQ ID NO: 308557 - DNA, 12 bp, Artificial Sequence
  Oligonucleotide primer for the detection of SNP TSC0023082
atacactctaac

SEQ ID NO: 308558 - DNA, 12 bp, Artificial Sequence
  Oligonucleotide primer for the detection of SNP TSC0023082
tgataggattta

SEQ ID NO: 308559 - DNA, 12 bp, Artificial Sequence
  Oligonucleotide primer for the detection of SNP TSC0023085
aaaatatcaaac

SEQ ID NO: 308560 - DNA, 12 bp, Artificial Sequence
  Oligonucleotide primer for the detection of SNP TSC0023085
tttatttggaaa

SEQ ID NO: 308561 - DNA, 12 bp, Artificial Sequence
  Oligonucleotide primer for the detection of SNP TSC0023086
aatcataccaaa

SEQ ID NO: 308562 - DNA, 12 bp, Artificial Sequence
  Oligonucleotide primer for the detection of SNP TSC0023086
tttggggtagat

SEQ ID NO: 308563 - DNA, 12 bp, Artificial Sequence
  Oligonucleotide primer for the detection of SNP TSC0023086
agttatgttaga

SEQ ID NO: 308564 - DNA, 12 bp, Artificial Sequence
  Oligonucleotide primer for the detection of SNP TSC0023087
caaaaaacccat

SEQ ID NO: 308565 - DNA, 12 bp, Artificial Sequence
  Oligonucleotide primer for the detection of SNP TSC0023087
caaaaaacccgt

SEQ ID NO: 308566 - DNA, 12 bp, Artificial Sequence
  Oligonucleotide primer for the detection of SNP TSC0023090
ataaaactccca

SEQ ID NO: 308567 - DNA, 12 bp, Artificial Sequence
  Oligonucleotide primer for the detection of SNP TSC0023090
tgggaatggggt

SEQ ID NO: 308568 - DNA, 12 bp, Artificial Sequence
  Oligonucleotide primer for the detection of SNP TSC0023090
ataagattttta

SEQ ID NO: 308569 - DNA, 12 bp, Artificial Sequence
  Oligonucleotide primer for the detection of SNP TSC0023093
tccatctattat

SEQ ID NO: 308570 - DNA, 12 bp, Artificial Sequence
  Oligonucleotide primer for the detection of SNP TSC0023093
agatataattta

SEQ ID NO: 308571 - DNA, 12 bp, Artificial Sequence
  Oligonucleotide primer for the detection of SNP TSC0023094
aaattactcact

SEQ ID NO: 308572 - DNA, 12 bp, Artificial Sequence
  Oligonucleotide primer for the detection of SNP TSC0023094
ttgtttgttttg

SEQ ID NO: 308573 - DNA, 12 bp, Artificial Sequence
  Oligonucleotide primer for the detection of SNP TSC0023094
ttgtttgtttcg

SEQ ID NO: 308574 - DNA, 12 bp, Artificial Sequence
  Oligonucleotide primer for the detection of SNP TSC0023095
acaacttatcta

SEQ ID NO: 308575 - DNA, 12 bp, Artificial Sequence
  Oligonucleotide primer for the detection of SNP TSC0023095
aattatttattt

SEQ ID NO: 308576 - DNA, 12 bp, Artificial Sequence
  Oligonucleotide primer for the detection of SNP TSC0023095
aattactcactc

SEQ ID NO: 308577 - DNA, 12 bp, Artificial Sequence
  Oligonucleotide primer for the detection of SNP TSC0023095
gtagtttgtttg

SEQ ID NO: 308578 - DNA, 12 bp, Artificial Sequence
  Oligonucleotide primer for the detection of SNP TSC0023096
aaaaaactacat

SEQ ID NO: 308579 - DNA, 12 bp, Artificial Sequence
  Oligonucleotide primer for the detection of SNP TSC0023096
aggttgaaagaa

SEQ ID NO: 308580 - DNA, 12 bp, Artificial Sequence
  Oligonucleotide primer for the detection of SNP TSC0023100
tttaatatgata

SEQ ID NO: 308581 - DNA, 12 bp, Artificial Sequence
  Oligonucleotide primer for the detection of SNP TSC0023104
cctctacctcca

SEQ ID NO: 308582 - DNA, 12 bp, Artificial Sequence
  Oligonucleotide primer for the detection of SNP TSC0023104
ggagatgtgttt

SEQ ID NO: 308583 - DNA, 12 bp, Artificial Sequence
  Oligonucleotide primer for the detection of SNP TSC0023105
actatactctaa

SEQ ID NO: 308584 - DNA, 12 bp, Artificial Sequence
  Oligonucleotide primer for the detection of SNP TSC0023105
tattttgggggg

SEQ ID NO: 308585 - DNA, 12 bp, Artificial Sequence
  Oligonucleotide primer for the detection of SNP TSC0023106
tatccaccttaa

SEQ ID NO: 308586 - DNA, 12 bp, Artificial Sequence
  Oligonucleotide primer for the detection of SNP TSC0023106
tatccgccttaa

SEQ ID NO: 308587 - DNA, 12 bp, Artificial Sequence
  Oligonucleotide primer for the detection of SNP TSC0023106
ttgttggtgatt

SEQ ID NO: 308588 - DNA, 12 bp, Artificial Sequence
  Oligonucleotide primer for the detection of SNP TSC0023106
ttgtcggtgatt

SEQ ID NO: 308589 - DNA, 12 bp, Artificial Sequence
  Oligonucleotide primer for the detection of SNP TSC0023106
tttatcaataac

SEQ ID NO: 308590 - DNA, 12 bp, Artificial Sequence
  Oligonucleotide primer for the detection of SNP TSC0023106
tttatcgataac

SEQ ID NO: 308591 - DNA, 12 bp, Artificial Sequence
  Oligonucleotide primer for the detection of SNP TSC0023106
atgttcgttttg

SEQ ID NO: 308592 - DNA, 12 bp, Artificial Sequence
  Oligonucleotide primer for the detection of SNP TSC0023107
aatatcctctac

SEQ ID NO: 308593 - DNA, 12 bp, Artificial Sequence
  Oligonucleotide primer for the detection of SNP TSC0023107
ggggtaggaagg

SEQ ID NO: 308594 - DNA, 12 bp, Artificial Sequence
  Oligonucleotide primer for the detection of SNP TSC0023109
ttatacattcta

SEQ ID NO: 308595 - DNA, 12 bp, Artificial Sequence
  Oligonucleotide primer for the detection of SNP TSC0023109
tataaagatggt

SEQ ID NO: 308596 - DNA, 12 bp, Artificial Sequence
  Oligonucleotide primer for the detection of SNP TSC0023109
cacaaaaataac

SEQ ID NO: 308597 - DNA, 12 bp, Artificial Sequence
  Oligonucleotide primer for the detection of SNP TSC0023109
ttgtgtattttg

SEQ ID NO: 308598 - DNA, 12 bp, Artificial Sequence
  Oligonucleotide primer for the detection of SNP TSC0023111
tatatttatttt

SEQ ID NO: 308599 - DNA, 12 bp, Artificial Sequence
  Oligonucleotide primer for the detection of SNP TSC0023111
cacacccacccc

SEQ ID NO: 308600 - DNA, 12 bp, Artificial Sequence
  Oligonucleotide primer for the detection of SNP TSC0023111
tagggaaatgag

SEQ ID NO: 308601 - DNA, 12 bp, Artificial Sequence
  Oligonucleotide primer for the detection of SNP TSC0023112
acttaaaatcta

SEQ ID NO: 308602 - DNA, 12 bp, Artificial Sequence
  Oligonucleotide primer for the detection of SNP TSC0023112
aaaggtattttt

SEQ ID NO: 308603 - DNA, 12 bp, Artificial Sequence
  Oligonucleotide primer for the detection of SNP TSC0023112
aaaaacattcct

SEQ ID NO: 308604 - DNA, 12 bp, Artificial Sequence
  Oligonucleotide primer for the detection of SNP TSC0023112
gtttgaaattta

SEQ ID NO: 308605 - DNA, 12 bp, Artificial Sequence
  Oligonucleotide primer for the detection of SNP TSC0023115
aatatacattta

SEQ ID NO: 308606 - DNA, 12 bp, Artificial Sequence
  Oligonucleotide primer for the detection of SNP TSC0023115
tttatatatttt

SEQ ID NO: 308607 - DNA, 12 bp, Artificial Sequence
  Oligonucleotide primer for the detection of SNP TSC0023115
tctacatatccc

SEQ ID NO: 308608 - DNA, 12 bp, Artificial Sequence
  Oligonucleotide primer for the detection of SNP TSC0023115
aatgtgtatttg

SEQ ID NO: 308609 - DNA, 12 bp, Artificial Sequence
  Oligonucleotide primer for the detection of SNP TSC0023117
aaatacaaacta

SEQ ID NO: 308610 - DNA, 12 bp, Artificial Sequence
  Oligonucleotide primer for the detection of SNP TSC0023117
tagtaggaatgt

SEQ ID NO: 308611 - DNA, 12 bp, Artificial Sequence
  Oligonucleotide primer for the detection of SNP TSC0023117
caacaaaaatac

SEQ ID NO: 308612 - DNA, 12 bp, Artificial Sequence
  Oligonucleotide primer for the detection of SNP TSC0023117
gggtataggttg

SEQ ID NO: 308613 - DNA, 12 bp, Artificial Sequence
  Oligonucleotide primer for the detection of SNP TSC0023118
tgtggtggtagg

SEQ ID NO: 308614 - DNA, 12 bp, Artificial Sequence
  Oligonucleotide primer for the detection of SNP TSC0023118
cgtggtggtagg

SEQ ID NO: 308615 - DNA, 12 bp, Artificial Sequence
  Oligonucleotide primer for the detection of SNP TSC0023118
tgcggtggtagg

SEQ ID NO: 308616 - DNA, 12 bp, Artificial Sequence
  Oligonucleotide primer for the detection of SNP TSC0023118
cgcggtggtagg

SEQ ID NO: 308617 - DNA, 12 bp, Artificial Sequence
  Oligonucleotide primer for the detection of SNP TSC0023118
cacaataacaaa

SEQ ID NO: 308618 - DNA, 12 bp, Artificial Sequence
  Oligonucleotide primer for the detection of SNP TSC0023118
cacgataacaaa

SEQ ID NO: 308619 - DNA, 12 bp, Artificial Sequence
  Oligonucleotide primer for the detection of SNP TSC0023118
cgcaataacaaa

SEQ ID NO: 308620 - DNA, 12 bp, Artificial Sequence
  Oligonucleotide primer for the detection of SNP TSC0023118
cgcgataacaaa

SEQ ID NO: 308621 - DNA, 12 bp, Artificial Sequence
  Oligonucleotide primer for the detection of SNP TSC0023119
tcccaacacaaa

SEQ ID NO: 308622 - DNA, 12 bp, Artificial Sequence
  Oligonucleotide primer for the detection of SNP TSC0023119
tttgtatagttt

SEQ ID NO: 308623 - DNA, 12 bp, Artificial Sequence
  Oligonucleotide primer for the detection of SNP TSC0023119
ttacacaatcta

SEQ ID NO: 308624 - DNA, 12 bp, Artificial Sequence
  Oligonucleotide primer for the detection of SNP TSC0023119
tttagtataagt

SEQ ID NO: 308625 - DNA, 12 bp, Artificial Sequence
  Oligonucleotide primer for the detection of SNP TSC0023124
atatatacaatc

SEQ ID NO: 308626 - DNA, 12 bp, Artificial Sequence
  Oligonucleotide primer for the detection of SNP TSC0023125
taactataatca

SEQ ID NO: 308627 - DNA, 12 bp, Artificial Sequence
  Oligonucleotide primer for the detection of SNP TSC0023125
ttgtatagtatg

SEQ ID NO: 308628 - DNA, 12 bp, Artificial Sequence
  Oligonucleotide primer for the detection of SNP TSC0023125
ttacacaacata

SEQ ID NO: 308629 - DNA, 12 bp, Artificial Sequence
  Oligonucleotide primer for the detection of SNP TSC0023125
taattgtagtta

SEQ ID NO: 308630 - DNA, 12 bp, Artificial Sequence
  Oligonucleotide primer for the detection of SNP TSC0023130
ttacaaacacat

SEQ ID NO: 308631 - DNA, 12 bp, Artificial Sequence
  Oligonucleotide primer for the detection of SNP TSC0023130
ttacaaacgcat

SEQ ID NO: 308632 - DNA, 12 bp, Artificial Sequence
  Oligonucleotide primer for the detection of SNP TSC0023130
ttagatatggtg

SEQ ID NO: 308633 - DNA, 12 bp, Artificial Sequence
  Oligonucleotide primer for the detection of SNP TSC0023131
acatattatttt

SEQ ID NO: 308634 - DNA, 12 bp, Artificial Sequence
  Oligonucleotide primer for the detection of SNP TSC0023137
aatccctcctct

SEQ ID NO: 308635 - DNA, 12 bp, Artificial Sequence
  Oligonucleotide primer for the detection of SNP TSC0023137
gatccctcctct

SEQ ID NO: 308636 - DNA, 12 bp, Artificial Sequence
  Oligonucleotide primer for the detection of SNP TSC0023137
ggttttgggtgg

SEQ ID NO: 308637 - DNA, 12 bp, Artificial Sequence
  Oligonucleotide primer for the detection of SNP TSC0023137
ggttttgggcgg

SEQ ID NO: 308638 - DNA, 12 bp, Artificial Sequence
  Oligonukleotid-Primer
aacaaacctcat

SEQ ID NO: 308639 - DNA, 12 bp, Artificial Sequence
  Oligonucleotide primer for the detection of SNP TSC0023138
aacgaacctcat

SEQ ID NO: 308640 - DNA, 12 bp, Artificial Sequence
  Oligonucleotide primer for the detection of SNP TSC0023138
gacaaacctcat

SEQ ID NO: 308641 - DNA, 12 bp, Artificial Sequence
  Oligonucleotide primer for the detection of SNP TSC0023138
gacgaacctcat

SEQ ID NO: 308642 - DNA, 12 bp, Artificial Sequence
  Oligonucleotide primer for the detection of SNP TSC0023138
ttagtgggtagg

SEQ ID NO: 308643 - DNA, 12 bp, Artificial Sequence
  Oligonucleotide primer for the detection of SNP TSC0023139
ctcatacaaatt

SEQ ID NO: 308644 - DNA, 12 bp, Artificial Sequence
  Oligonucleotide primer for the detection of SNP TSC0023139
tattttagatga

SEQ ID NO: 308645 - DNA, 12 bp, Artificial Sequence
  Oligonucleotide primer for the detection of SNP TSC0023139
tacctcaaataa

SEQ ID NO: 308646 - DNA, 12 bp, Artificial Sequence
  Oligonucleotide primer for the detection of SNP TSC0023139
tttatgtaagtt

SEQ ID NO: 308647 - DNA, 12 bp, Artificial Sequence
  Oligonucleotide primer for the detection of SNP TSC0023140
ttactaataaaa

SEQ ID NO: 308648 - DNA, 12 bp, Artificial Sequence
  Oligonucleotide primer for the detection of SNP TSC0023140
gaggggaggttt

SEQ ID NO: 308649 - DNA, 12 bp, Artificial Sequence
  Oligonucleotide primer for the detection of SNP TSC0023140
ttgttggtgagg

SEQ ID NO: 308650 - DNA, 12 bp, Artificial Sequence
  Oligonucleotide primer for the detection of SNP TSC0023141
ttaataaataca

SEQ ID NO: 308651 - DNA, 12 bp, Artificial Sequence
  Oligonucleotide primer for the detection of SNP TSC0023141
taaggtaatatt

SEQ ID NO: 308652 - DNA, 12 bp, Artificial Sequence
  Oligonucleotide primer for the detection of SNP TSC0023141
acaaaacaatac

SEQ ID NO: 308653 - DNA, 12 bp, Artificial Sequence
  Oligonucleotide primer for the detection of SNP TSC0023141
tttaataagtat

SEQ ID NO: 308654 - DNA, 12 bp, Artificial Sequence
  Oligonucleotide primer for the detection of SNP TSC0023142
cttattttatcc

SEQ ID NO: 308655 - DNA, 12 bp, Artificial Sequence
  Oligonucleotide primer for the detection of SNP TSC0023142
taattgttttta

SEQ ID NO: 308656 - DNA, 12 bp, Artificial Sequence
  Oligonucleotide primer for the detection of SNP TSC0023142
caattactctta

SEQ ID NO: 308657 - DNA, 12 bp, Artificial Sequence
  Oligonucleotide primer for the detection of SNP TSC0023143
atatcaaacact

SEQ ID NO: 308658 - DNA, 12 bp, Artificial Sequence
  Oligonucleotide primer for the detection of SNP TSC0023143
tatgtattttta

SEQ ID NO: 308659 - DNA, 12 bp, Artificial Sequence
  Oligonucleotide primer for the detection of SNP TSC0023145
agttatagtatt

SEQ ID NO: 308660 - DNA, 12 bp, Artificial Sequence
  Oligonucleotide primer for the detection of SNP TSC0023145
aaccacaacacc

SEQ ID NO: 308661 - DNA, 12 bp, Artificial Sequence
  Oligonucleotide primer for the detection of SNP TSC0023145
gatgatttgtgg

SEQ ID NO: 308662 - DNA, 12 bp, Artificial Sequence
  Oligonucleotide primer for the detection of SNP TSC0023146
tactctattacc

SEQ ID NO: 308663 - DNA, 12 bp, Artificial Sequence
  Oligonucleotide primer for the detection of SNP TSC0023147
attcattccttc

SEQ ID NO: 308664 - DNA, 12 bp, Artificial Sequence
  Oligonucleotide primer for the detection of SNP TSC0023147
atgaatgagtga

SEQ ID NO: 308665 - DNA, 12 bp, Artificial Sequence
  Oligonucleotide primer for the detection of SNP TSC0023147
atgaatgagcga

SEQ ID NO: 308666 - DNA, 12 bp, Artificial Sequence
  Oligonucleotide primer for the detection of SNP TSC0023148
ctccctatcctc

SEQ ID NO: 308667 - DNA, 12 bp, Artificial Sequence
  Oligonucleotide primer for the detection of SNP TSC0023148
gggttaatgtaa

SEQ ID NO: 308668 - DNA, 12 bp, Artificial Sequence
  Oligonucleotide primer for the detection of SNP TSC0023149
attaaacactac

SEQ ID NO: 308669 - DNA, 12 bp, Artificial Sequence
  Oligonucleotide primer for the detection of SNP TSC0023149
aagatattattg

SEQ ID NO: 308670 - DNA, 12 bp, Artificial Sequence
  Oligonucleotide primer for the detection of SNP TSC0023149
gttgagtattgt

SEQ ID NO: 308671 - DNA, 12 bp, Artificial Sequence
  Oligonucleotide primer for the detection of SNP TSC0023152
aaaactaaaatt

SEQ ID NO: 308672 - DNA, 12 bp, Artificial Sequence
  Oligonucleotide primer for the detection of SNP TSC0023152
aagaagtagtaa

SEQ ID NO: 308673 - DNA, 12 bp, Artificial Sequence
  Oligonucleotide primer for the detection of SNP TSC0023153
tttacaacttct

SEQ ID NO: 308674 - DNA, 12 bp, Artificial Sequence
  Oligonucleotide primer for the detection of SNP TSC0023153
ggaattgaggga

SEQ ID NO: 308675 - DNA, 12 bp, Artificial Sequence
  Oligonucleotide primer for the detection of SNP TSC0023154
cttccataaata

SEQ ID NO: 308676 - DNA, 12 bp, Artificial Sequence
  Oligonucleotide primer for the detection of SNP TSC0023154
atctcttaccaa

SEQ ID NO: 308677 - DNA, 12 bp, Artificial Sequence
  Oligonucleotide primer for the detection of SNP TSC0023154
tttttatgggta

SEQ ID NO: 308678 - DNA, 12 bp, Artificial Sequence
  Oligonucleotide primer for the detection of SNP TSC0023156
ataaaacttttt

SEQ ID NO: 308679 - DNA, 12 bp, Artificial Sequence
  Oligonucleotide primer for the detection of SNP TSC0023156
atgattttgatt

SEQ ID NO: 308680 - DNA, 12 bp, Artificial Sequence
  Oligonucleotide primer for the detection of SNP TSC0023156
ataactttaatt

SEQ ID NO: 308681 - DNA, 12 bp, Artificial Sequence
  Oligonucleotide primer for the detection of SNP TSC0023156
gtaaaatttttt

SEQ ID NO: 308682 - DNA, 12 bp, Artificial Sequence
  Oligonucleotide primer for the detection of SNP TSC0023160
atacacacaaaa

SEQ ID NO: 308683 - DNA, 12 bp, Artificial Sequence
  Oligonucleotide primer for the detection of SNP TSC0023160
taaataataaat

SEQ ID NO: 308684 - DNA, 12 bp, Artificial Sequence
  Oligonucleotide primer for the detection of SNP TSC0023160
ataaataataaa

SEQ ID NO: 308685 - DNA, 12 bp, Artificial Sequence
  Oligonucleotide primer for the detection of SNP TSC0023160
aaatgtatatag

SEQ ID NO: 308686 - DNA, 12 bp, Artificial Sequence
  Oligonucleotide primer for the detection of SNP TSC0023163
atttcgttttta

SEQ ID NO: 308687 - DNA, 12 bp, Artificial Sequence
  Oligonucleotide primer for the detection of SNP TSC0023164
atacaaaatcca

SEQ ID NO: 308688 - DNA, 12 bp, Artificial Sequence
  Oligonucleotide primer for the detection of SNP TSC0023164
tggatagtatgt

SEQ ID NO: 308689 - DNA, 12 bp, Artificial Sequence
  Oligonucleotide primer for the detection of SNP TSC0023164
acaatatataaa

SEQ ID NO: 308690 - DNA, 12 bp, Artificial Sequence
  Oligonucleotide primer for the detection of SNP TSC0023164
tatatagaattt

SEQ ID NO: 308691 - DNA, 12 bp, Artificial Sequence
  Oligonucleotide primer for the detection of SNP TSC0023165
ttcaacctatac

SEQ ID NO: 308692 - DNA, 12 bp, Artificial Sequence
  Oligonucleotide primer for the detection of SNP TSC0023165
tatatttttgag

SEQ ID NO: 308693 - DNA, 12 bp, Artificial Sequence
  Oligonucleotide primer for the detection of SNP TSC0023166
ggttggtagagg

SEQ ID NO: 308694 - DNA, 12 bp, Artificial Sequence
  Oligonucleotide primer for the detection of SNP TSC0023167
ccaaaaaataaa

SEQ ID NO: 308695 - DNA, 12 bp, Artificial Sequence
  Oligonucleotide primer for the detection of SNP TSC0023167
tttgattagttt

SEQ ID NO: 308696 - DNA, 12 bp, Artificial Sequence
  Oligonucleotide primer for the detection of SNP TSC0023167
cctaactaacct

SEQ ID NO: 308697 - DNA, 12 bp, Artificial Sequence
  Oligonucleotide primer for the detection of SNP TSC0023167
ttagaaagtaga

SEQ ID NO: 308698 - DNA, 12 bp, Artificial Sequence
  Oligonucleotide primer for the detection of SNP TSC0023168
gtttataagtaa

SEQ ID NO: 308699 - DNA, 12 bp, Artificial Sequence
  Oligonucleotide primer for the detection of SNP TSC0023170
gttatttgggag

SEQ ID NO: 308700 - DNA, 12 bp, Artificial Sequence
  Oligonucleotide primer for the detection of SNP TSC0023170
gttattcgggag

SEQ ID NO: 308701 - DNA, 12 bp, Artificial Sequence
  Oligonucleotide primer for the detection of SNP TSC0023170
actactcaaaaa

SEQ ID NO: 308702 - DNA, 12 bp, Artificial Sequence
  Oligonucleotide primer for the detection of SNP TSC0023170
actactcgaaaa

SEQ ID NO: 308703 - DNA, 12 bp, Artificial Sequence
  Oligonucleotide primer for the detection of SNP TSC0023171
ctttcactatat

SEQ ID NO: 308704 - DNA, 12 bp, Artificial Sequence
  Oligonucleotide primer for the detection of SNP TSC0023171
ctttcgctatat

SEQ ID NO: 308705 - DNA, 12 bp, Artificial Sequence
  Oligonucleotide primer for the detection of SNP TSC0023173
cctcaaaccaca

SEQ ID NO: 308706 - DNA, 12 bp, Artificial Sequence
  Oligonucleotide primer for the detection of SNP TSC0023173
tattagggggtt

SEQ ID NO: 308707 - DNA, 12 bp, Artificial Sequence
  Oligonucleotide primer for the detection of SNP TSC0023173
catcaaaaaact

SEQ ID NO: 308708 - DNA, 12 bp, Artificial Sequence
  Oligonucleotide primer for the detection of SNP TSC0023174
agatatttgtag

SEQ ID NO: 308709 - DNA, 12 bp, Artificial Sequence
  Oligonucleotide primer for the detection of SNP TSC0023175
atttctatcttt

SEQ ID NO: 308710 - DNA, 12 bp, Artificial Sequence
  Oligonucleotide primer for the detection of SNP TSC0023175
tgtattttaagg

SEQ ID NO: 308711 - DNA, 12 bp, Artificial Sequence
  Oligonucleotide primer for the detection of SNP TSC0023176
atacctccttta

SEQ ID NO: 308712 - DNA, 12 bp, Artificial Sequence
  Oligonucleotide primer for the detection of SNP TSC0023176
agaaatgtattt

SEQ ID NO: 308713 - DNA, 12 bp, Artificial Sequence
  Oligonucleotide primer for the detection of SNP TSC0023176
agaaacgtattt

SEQ ID NO: 308714 - DNA, 12 bp, Artificial Sequence
  Oligonucleotide primer for the detection of SNP TSC0023176
aaaaacatactc

SEQ ID NO: 308715 - DNA, 12 bp, Artificial Sequence
  Oligonucleotide primer for the detection of SNP TSC0023176
aaaaacgtactc

SEQ ID NO: 308716 - DNA, 12 bp, Artificial Sequence
  Oligonucleotide primer for the detection of SNP TSC0023176
gtattttttttg

SEQ ID NO: 308717 - DNA, 12 bp, Artificial Sequence
  Oligonucleotide primer for the detection of SNP TSC0023177
aacctaacaata

SEQ ID NO: 308718 - DNA, 12 bp, Artificial Sequence
  Oligonucleotide primer for the detection of SNP TSC0023177
ttttcgtttgtc

SEQ ID NO: 308719 - DNA, 12 bp, Artificial Sequence
  Oligonucleotide primer for the detection of SNP TSC0023177
cctccacctacc

SEQ ID NO: 308720 - DNA, 12 bp, Artificial Sequence
  Oligonucleotide primer for the detection of SNP TSC0023177
cctccgcctacc

SEQ ID NO: 308721 - DNA, 12 bp, Artificial Sequence
  Oligonucleotide primer for the detection of SNP TSC0023177
ggtttggtagtg

SEQ ID NO: 308722 - DNA, 12 bp, Artificial Sequence
  Oligonucleotide primer for the detection of SNP TSC0023179
tactatcctcac

SEQ ID NO: 308723 - DNA, 12 bp, Artificial Sequence
  Oligonucleotide primer for the detection of SNP TSC0023179
atttggggtagg

SEQ ID NO: 308724 - DNA, 12 bp, Artificial Sequence
  Oligonucleotide primer for the detection of SNP TSC0023179
tgttgtttttat

SEQ ID NO: 308725 - DNA, 12 bp, Artificial Sequence
  Oligonucleotide primer for the detection of SNP TSC0023180
tatattacatat

SEQ ID NO: 308726 - DNA, 12 bp, Artificial Sequence
  Oligonucleotide primer for the detection of SNP TSC0023180
ttacaaatatta

SEQ ID NO: 308727 - DNA, 12 bp, Artificial Sequence
  Oligonucleotide primer for the detection of SNP TSC0023180
tgtattatatat

SEQ ID NO: 308728 - DNA, 12 bp, Artificial Sequence
  Oligonucleotide primer for the detection of SNP TSC0023181
tattacaaatat

SEQ ID NO: 308729 - DNA, 12 bp, Artificial Sequence
  Oligonucleotide primer for the detection of SNP TSC0023182
caaaaaatacct

SEQ ID NO: 308730 - DNA, 12 bp, Artificial Sequence
  Oligonucleotide primer for the detection of SNP TSC0023182
cgaaaaatacct

SEQ ID NO: 308731 - DNA, 12 bp, Artificial Sequence
  Oligonucleotide primer for the detection of SNP TSC0023182
agatgtttatag

SEQ ID NO: 308732 - DNA, 12 bp, Artificial Sequence
  Oligonucleotide primer for the detection of SNP TSC0023183
ttcccttatctt

SEQ ID NO: 308733 - DNA, 12 bp, Artificial Sequence
  Oligonucleotide primer for the detection of SNP TSC0023183
tttttataggaa

SEQ ID NO: 308734 - DNA, 12 bp, Artificial Sequence
  Oligonucleotide primer for the detection of SNP TSC0023185
caatacatccca

SEQ ID NO: 308735 - DNA, 12 bp, Artificial Sequence
  Oligonucleotide primer for the detection of SNP TSC0023185
ttggaagatttg

SEQ ID NO: 308736 - DNA, 12 bp, Artificial Sequence
  Oligonucleotide primer for the detection of SNP TSC0023185
ctaaaaaactta

SEQ ID NO: 308737 - DNA, 12 bp, Artificial Sequence
  Oligonucleotide primer for the detection of SNP TSC0023185
tagtatatttta

SEQ ID NO: 308738 - DNA, 12 bp, Artificial Sequence
  Oligonucleotide primer for the detection of SNP TSC0023187
tgagtatttatt

SEQ ID NO: 308739 - DNA, 12 bp, Artificial Sequence
  Oligonucleotide primer for the detection of SNP TSC0023187
taaacatttact

SEQ ID NO: 308740 - DNA, 12 bp, Artificial Sequence
  Oligonucleotide primer for the detection of SNP TSC0023187
aaaagtgtttgg

SEQ ID NO: 308741 - DNA, 12 bp, Artificial Sequence
  Oligonucleotide primer for the detection of SNP TSC0023189
aaaccttaaaac

SEQ ID NO: 308742 - DNA, 12 bp, Artificial Sequence
  Oligonucleotide primer for the detection of SNP TSC0023189
ttgtattttatg

SEQ ID NO: 308743 - DNA, 12 bp, Artificial Sequence
  Oligonucleotide primer for the detection of SNP TSC0023190
acacccattctt

SEQ ID NO: 308744 - DNA, 12 bp, Artificial Sequence
  Oligonucleotide primer for the detection of SNP TSC0023190
aaaagattttaa

SEQ ID NO: 308745 - DNA, 12 bp, Artificial Sequence
  Oligonucleotide primer for the detection of SNP TSC0023190
gtatttattttt

SEQ ID NO: 308746 - DNA, 12 bp, Artificial Sequence
  Oligonucleotide primer for the detection of SNP TSC0023196
aaaactccccct

SEQ ID NO: 308747 - DNA, 12 bp, Artificial Sequence
  Oligonucleotide primer for the detection of SNP TSC0023196
taaatattttcc

SEQ ID NO: 308748 - DNA, 12 bp, Artificial Sequence
  Oligonucleotide primer for the detection of SNP TSC0023196
gagatttttttt

SEQ ID NO: 308749 - DNA, 12 bp, Artificial Sequence
  Oligonucleotide primer for the detection of SNP TSC0023197
ccaaataacttt

SEQ ID NO: 308750 - DNA, 12 bp, Artificial Sequence
  Oligonucleotide primer for the detection of SNP TSC0023197
tatgtgaggaag

SEQ ID NO: 308751 - DNA, 12 bp, Artificial Sequence
  Oligonucleotide primer for the detection of SNP TSC0023198
aaaatatttatt

SEQ ID NO: 308752 - DNA, 12 bp, Artificial Sequence
  Oligonucleotide primer for the detection of SNP TSC0023198
agttagtaaata

SEQ ID NO: 308753 - DNA, 12 bp, Artificial Sequence
  Oligonucleotide primer for the detection of SNP TSC0023199
gtttaatttatg

SEQ ID NO: 308754 - DNA, 12 bp, Artificial Sequence
  Oligonucleotide primer for the detection of SNP TSC0023200
tattatatctat

SEQ ID NO: 308755 - DNA, 12 bp, Artificial Sequence
  Oligonucleotide primer for the detection of SNP TSC0023200
tagattgagtag

SEQ ID NO: 308756 - DNA, 12 bp, Artificial Sequence
  Oligonucleotide primer for the detection of SNP TSC0023204
tttagtgtagtt

SEQ ID NO: 308757 - DNA, 12 bp, Artificial Sequence
  Oligonucleotide primer for the detection of SNP TSC0023204
attcaatacaat

SEQ ID NO: 308758 - DNA, 12 bp, Artificial Sequence
  Oligonucleotide primer for the detection of SNP TSC0023204
aaggaatagttt

SEQ ID NO: 308759 - DNA, 12 bp, Artificial Sequence
  Oligonucleotide primer for the detection of SNP TSC0023206
ctcaataaaaat

SEQ ID NO: 308760 - DNA, 12 bp, Artificial Sequence
  Oligonucleotide primer for the detection of SNP TSC0023206
cacttatttatt

SEQ ID NO: 308761 - DNA, 12 bp, Artificial Sequence
  Oligonucleotide primer for the detection of SNP TSC0023206
tttagtaagaat

SEQ ID NO: 308762 - DNA, 12 bp, Artificial Sequence
  Oligonucleotide primer for the detection of SNP TSC0023209
tatacctctaaa

SEQ ID NO: 308763 - DNA, 12 bp, Artificial Sequence
  Oligonukleotid-Primer
aaggggggtgtt

SEQ ID NO: 308764 - DNA, 12 bp, Artificial Sequence
  Oligonucleotide primer for the detection of SNP TSC0023209
aaggggggtgtc

SEQ ID NO: 308765 - DNA, 12 bp, Artificial Sequence
  Oligonucleotide primer for the detection of SNP TSC0023209
tgtgtttttggg

SEQ ID NO: 308766 - DNA, 12 bp, Artificial Sequence
  Oligonucleotide primer for the detection of SNP TSC0023210
ctactaaatata

SEQ ID NO: 308767 - DNA, 12 bp, Artificial Sequence
  Oligonucleotide primer for the detection of SNP TSC0023210
gttaattttgtt

SEQ ID NO: 308768 - DNA, 12 bp, Artificial Sequence
  Oligonucleotide primer for the detection of SNP TSC0023210
accaattctatt

SEQ ID NO: 308769 - DNA, 12 bp, Artificial Sequence
  Oligonucleotide primer for the detection of SNP TSC0023210
ttattaaatata

SEQ ID NO: 308770 - DNA, 12 bp, Artificial Sequence
  Oligonucleotide primer for the detection of SNP TSC0023211
attctacatatt

SEQ ID NO: 308771 - DNA, 12 bp, Artificial Sequence
  Oligonucleotide primer for the detection of SNP TSC0023211
atatgaaggttt

SEQ ID NO: 308772 - DNA, 12 bp, Artificial Sequence
  Oligonucleotide primer for the detection of SNP TSC0023211
atataaaaattc

SEQ ID NO: 308773 - DNA, 12 bp, Artificial Sequence
  Oligonucleotide primer for the detection of SNP TSC0023211
gttttatatgtt

SEQ ID NO: 308774 - DNA, 12 bp, Artificial Sequence
  Oligonucleotide primer for the detection of SNP TSC0023212
aaaactcaaaat

SEQ ID NO: 308775 - DNA, 12 bp, Artificial Sequence
  Oligonucleotide primer for the detection of SNP TSC0023214
tttaaaaaatcc

SEQ ID NO: 308776 - DNA, 12 bp, Artificial Sequence
  Oligonucleotide primer for the detection of SNP TSC0023215
acctaaaaccct

SEQ ID NO: 308777 - DNA, 12 bp, Artificial Sequence
  Oligonucleotide primer for the detection of SNP TSC0023215
tagagagggtag

SEQ ID NO: 308778 - DNA, 12 bp, Artificial Sequence
  Oligonucleotide primer for the detection of SNP TSC0023216
taatttaaaatt

SEQ ID NO: 308779 - DNA, 12 bp, Artificial Sequence
  Oligonucleotide primer for the detection of SNP TSC0023216
taggtttttatg

SEQ ID NO: 308780 - DNA, 12 bp, Artificial Sequence
  Oligonucleotide primer for the detection of SNP TSC0023217
acaacccaaaat

SEQ ID NO: 308781 - DNA, 12 bp, Artificial Sequence
  Oligonucleotide primer for the detection of SNP TSC0023217
ttatactaccta

SEQ ID NO: 308782 - DNA, 12 bp, Artificial Sequence
  Oligonucleotide primer for the detection of SNP TSC0023217
gtagtttaaggt

SEQ ID NO: 308783 - DNA, 12 bp, Artificial Sequence
  Oligonucleotide primer for the detection of SNP TSC0023218
ttcttccttaat

SEQ ID NO: 308784 - DNA, 12 bp, Artificial Sequence
  Oligonucleotide primer for the detection of SNP TSC0023218
ataggaattatt

SEQ ID NO: 308785 - DNA, 12 bp, Artificial Sequence
  Oligonucleotide primer for the detection of SNP TSC0023218
tttttttttgat

SEQ ID NO: 308786 - DNA, 12 bp, Artificial Sequence
  Oligonucleotide primer for the detection of SNP TSC0023219
cacaattaaaaa

SEQ ID NO: 308787 - DNA, 12 bp, Artificial Sequence
  Oligonucleotide primer for the detection of SNP TSC0023219
agttgatttttt

SEQ ID NO: 308788 - DNA, 12 bp, Artificial Sequence
  Oligonucleotide primer for the detection of SNP TSC0023219
aattaattcccc

SEQ ID NO: 308789 - DNA, 12 bp, Artificial Sequence
  Oligonucleotide primer for the detection of SNP TSC0023219
tatagttaaaaa

SEQ ID NO: 308790 - DNA, 12 bp, Artificial Sequence
  Oligonucleotide primer for the detection of SNP TSC0023221
taaattctacaa

SEQ ID NO: 308791 - DNA, 12 bp, Artificial Sequence
  Oligonucleotide primer for the detection of SNP TSC0023221
gatttagggaaa

SEQ ID NO: 308792 - DNA, 12 bp, Artificial Sequence
  Oligonucleotide primer for the detection of SNP TSC0023221
aacccaaaaaaa

SEQ ID NO: 308793 - DNA, 12 bp, Artificial Sequence
  Oligonucleotide primer for the detection of SNP TSC0023221
gtgaattttgta

SEQ ID NO: 308794 - DNA, 12 bp, Artificial Sequence
  Oligonucleotide primer for the detection of SNP TSC0023222
acaaccgaatta

SEQ ID NO: 308795 - DNA, 12 bp, Artificial Sequence
  Oligonucleotide primer for the detection of SNP TSC0023222
acgaccaaatta

SEQ ID NO: 308796 - DNA, 12 bp, Artificial Sequence
  Oligonucleotide primer for the detection of SNP TSC0023222
acgaccgaatta

SEQ ID NO: 308797 - DNA, 12 bp, Artificial Sequence
  Oligonucleotide primer for the detection of SNP TSC0023222
aattttttattt

SEQ ID NO: 308798 - DNA, 12 bp, Artificial Sequence
  Oligonucleotide primer for the detection of SNP TSC0023222
aattttttattc

SEQ ID NO: 308799 - DNA, 12 bp, Artificial Sequence
  Oligonucleotide primer for the detection of SNP TSC0023222
aatctcttaccc

SEQ ID NO: 308800 - DNA, 12 bp, Artificial Sequence
  Oligonucleotide primer for the detection of SNP TSC0023222
gtgattgggttg

SEQ ID NO: 308801 - DNA, 12 bp, Artificial Sequence
  Oligonucleotide primer for the detection of SNP TSC0023222
gcgattgggttg

SEQ ID NO: 308802 - DNA, 12 bp, Artificial Sequence
  Oligonucleotide primer for the detection of SNP TSC0023222
gtgatcgggttg

SEQ ID NO: 308803 - DNA, 12 bp, Artificial Sequence
  Oligonucleotide primer for the detection of SNP TSC0023222
gcgatcgggttg

SEQ ID NO: 308804 - DNA, 12 bp, Artificial Sequence
  Oligonucleotide primer for the detection of SNP TSC0023223
cctctcctttaa

SEQ ID NO: 308805 - DNA, 12 bp, Artificial Sequence
  Oligonucleotide primer for the detection of SNP TSC0023223
attggatatttt

SEQ ID NO: 308806 - DNA, 12 bp, Artificial Sequence
  Oligonucleotide primer for the detection of SNP TSC0023223
attggatatttc

SEQ ID NO: 308807 - DNA, 12 bp, Artificial Sequence
  Oligonucleotide primer for the detection of SNP TSC0023223
aacactaaacat

SEQ ID NO: 308808 - DNA, 12 bp, Artificial Sequence
  Oligonucleotide primer for the detection of SNP TSC0023224
taataacccctc

SEQ ID NO: 308809 - DNA, 12 bp, Artificial Sequence
  Oligonucleotide primer for the detection of SNP TSC0023224
tttgaatgttgg

SEQ ID NO: 308810 - DNA, 12 bp, Artificial Sequence
  Oligonucleotide primer for the detection of SNP TSC0023224
cctaaatattaa

SEQ ID NO: 308811 - DNA, 12 bp, Artificial Sequence
  Oligonucleotide primer for the detection of SNP TSC0023226
aataatacatcc

SEQ ID NO: 308812 - DNA, 12 bp, Artificial Sequence
  Oligonucleotide primer for the detection of SNP TSC0023229
cttaaactttat

SEQ ID NO: 308813 - DNA, 12 bp, Artificial Sequence
  Oligonucleotide primer for the detection of SNP TSC0023229
tttgtagggtaa

SEQ ID NO: 308814 - DNA, 12 bp, Artificial Sequence
  Oligonucleotide primer for the detection of SNP TSC0023234
ctactttcctaa

SEQ ID NO: 308815 - DNA, 12 bp, Artificial Sequence
  Oligonucleotide primer for the detection of SNP TSC0023234
tttttatattgt

SEQ ID NO: 308816 - DNA, 12 bp, Artificial Sequence
  Oligonucleotide primer for the detection of SNP TSC0023234
tttttatatcgt

SEQ ID NO: 308817 - DNA, 12 bp, Artificial Sequence
  Oligonucleotide primer for the detection of SNP TSC0023234
tttttatattgc

SEQ ID NO: 308818 - DNA, 12 bp, Artificial Sequence
  Oligonucleotide primer for the detection of SNP TSC0023234
tttttatatcgc

SEQ ID NO: 308819 - DNA, 12 bp, Artificial Sequence
  Oligonucleotide primer for the detection of SNP TSC0023234
tccttcacacca

SEQ ID NO: 308820 - DNA, 12 bp, Artificial Sequence
  Oligonucleotide primer for the detection of SNP TSC0023234
tccttcacaccg

SEQ ID NO: 308821 - DNA, 12 bp, Artificial Sequence
  Oligonucleotide primer for the detection of SNP TSC0023234
ttgtttttttga

SEQ ID NO: 308822 - DNA, 12 bp, Artificial Sequence
  Oligonucleotide primer for the detection of SNP TSC0023235
accccctcacac

SEQ ID NO: 308823 - DNA, 12 bp, Artificial Sequence
  Oligonucleotide primer for the detection of SNP TSC0023235
tttttgggtggg

SEQ ID NO: 308824 - DNA, 12 bp, Artificial Sequence
  Oligonucleotide primer for the detection of SNP TSC0023238
cataaaaaatcc

SEQ ID NO: 308825 - DNA, 12 bp, Artificial Sequence
  Oligonucleotide primer for the detection of SNP TSC0023238
tagaaggttgga

SEQ ID NO: 308826 - DNA, 12 bp, Artificial Sequence
  Oligonucleotide primer for the detection of SNP TSC0023242
tattatactaac

SEQ ID NO: 308827 - DNA, 12 bp, Artificial Sequence
  Oligonucleotide primer for the detection of SNP TSC0023242
tatatttgtata

SEQ ID NO: 308828 - DNA, 12 bp, Artificial Sequence
  Oligonucleotide primer for the detection of SNP TSC0023243
ttacaaaatacc

SEQ ID NO: 308829 - DNA, 12 bp, Artificial Sequence
  Oligonucleotide primer for the detection of SNP TSC0023243
atataatatttg

SEQ ID NO: 308830 - DNA, 12 bp, Artificial Sequence
  Oligonucleotide primer for the detection of SNP TSC0023243
acataatattta

SEQ ID NO: 308831 - DNA, 12 bp, Artificial Sequence
  Oligonucleotide primer for the detection of SNP TSC0023244
aatattatataa

SEQ ID NO: 308832 - DNA, 12 bp, Artificial Sequence
  Oligonucleotide primer for the detection of SNP TSC0023244
gatagagggatg

SEQ ID NO: 308833 - DNA, 12 bp, Artificial Sequence
  Oligonucleotide primer for the detection of SNP TSC0023244
atgttatgtaat

SEQ ID NO: 308834 - DNA, 12 bp, Artificial Sequence
  Oligonucleotide primer for the detection of SNP TSC0023245
gttaaattatta

SEQ ID NO: 308835 - DNA, 12 bp, Artificial Sequence
  Oligonucleotide primer for the detection of SNP TSC0023250
aaacttctcaca

SEQ ID NO: 308836 - DNA, 12 bp, Artificial Sequence
  Oligonucleotide primer for the detection of SNP TSC0023250
gagattattatg

SEQ ID NO: 308837 - DNA, 12 bp, Artificial Sequence
  Oligonucleotide primer for the detection of SNP TSC0023250
aaaaccaccata

SEQ ID NO: 308838 - DNA, 12 bp, Artificial Sequence
  Oligonucleotide primer for the detection of SNP TSC0023250
taggttttttat

SEQ ID NO: 308839 - DNA, 12 bp, Artificial Sequence
  Oligonucleotide primer for the detection of SNP TSC0023251
gtataaatttta

SEQ ID NO: 308840 - DNA, 12 bp, Artificial Sequence
  Oligonucleotide primer for the detection of SNP TSC0023251
tatatgatatgt

SEQ ID NO: 308841 - DNA, 12 bp, Artificial Sequence
  Oligonucleotide primer for the detection of SNP TSC0023251
tatatgatacgt

SEQ ID NO: 308842 - DNA, 12 bp, Artificial Sequence
  Oligonucleotide primer for the detection of SNP TSC0023251
ccacataacaca

SEQ ID NO: 308843 - DNA, 12 bp, Artificial Sequence
  Oligonucleotide primer for the detection of SNP TSC0023251
ccacataacacg

SEQ ID NO: 308844 - DNA, 12 bp, Artificial Sequence
  Oligonukleotid-Primer
tgtatgagtttt

SEQ ID NO: 308845 - DNA, 12 bp, Artificial Sequence
  Oligonucleotide primer for the detection of SNP TSC0023251
cgtatgagtttt

SEQ ID NO: 308846 - DNA, 12 bp, Artificial Sequence
  Oligonucleotide primer for the detection of SNP TSC0023253
catataaaaaaa

SEQ ID NO: 308847 - DNA, 12 bp, Artificial Sequence
  Oligonucleotide primer for the detection of SNP TSC0023253
cgtataaaaaaa

SEQ ID NO: 308848 - DNA, 12 bp, Artificial Sequence
  Oligonucleotide primer for the detection of SNP TSC0023253
gtatattggtat

SEQ ID NO: 308849 - DNA, 12 bp, Artificial Sequence
  Oligonucleotide primer for the detection of SNP TSC0023253
acacactaacac

SEQ ID NO: 308850 - DNA, 12 bp, Artificial Sequence
  Oligonucleotide primer for the detection of SNP TSC0023253
tgtgtagggaag

SEQ ID NO: 308851 - DNA, 12 bp, Artificial Sequence
  Oligonucleotide primer for the detection of SNP TSC0023253
cgtgtagggaag

SEQ ID NO: 308852 - DNA, 12 bp, Artificial Sequence
  Oligonucleotide primer for the detection of SNP TSC0023254
ccctaaaataca

SEQ ID NO: 308853 - DNA, 12 bp, Artificial Sequence
  Oligonucleotide primer for the detection of SNP TSC0023254
tgggttgggtgt

SEQ ID NO: 308854 - DNA, 12 bp, Artificial Sequence
  Oligonucleotide primer for the detection of SNP TSC0023254
cgggttgggtgt

SEQ ID NO: 308855 - DNA, 12 bp, Artificial Sequence
  Oligonucleotide primer for the detection of SNP TSC0023254
tgggttgggtgc

SEQ ID NO: 308856 - DNA, 12 bp, Artificial Sequence
  Oligonucleotide primer for the detection of SNP TSC0023254
cgggttgggtgc

SEQ ID NO: 308857 - DNA, 12 bp, Artificial Sequence
  Oligonucleotide primer for the detection of SNP TSC0023254
acaaactaaata

SEQ ID NO: 308858 - DNA, 12 bp, Artificial Sequence
  Oligonucleotide primer for the detection of SNP TSC0023254
acgaactaaata

SEQ ID NO: 308859 - DNA, 12 bp, Artificial Sequence
  Oligonucleotide primer for the detection of SNP TSC0023254
ttttgagatgta

SEQ ID NO: 308860 - DNA, 12 bp, Artificial Sequence
  Oligonucleotide primer for the detection of SNP TSC0023255
ataatctactca

SEQ ID NO: 308861 - DNA, 12 bp, Artificial Sequence
  Oligonucleotide primer for the detection of SNP TSC0023255
ataatctactcg

SEQ ID NO: 308862 - DNA, 12 bp, Artificial Sequence
  Oligonucleotide primer for the detection of SNP TSC0023256
caaccacaccta

SEQ ID NO: 308863 - DNA, 12 bp, Artificial Sequence
  Oligonucleotide primer for the detection of SNP TSC0023256
caaccacgccta

SEQ ID NO: 308864 - DNA, 12 bp, Artificial Sequence
  Oligonucleotide primer for the detection of SNP TSC0023256
cgaccacaccta

SEQ ID NO: 308865 - DNA, 12 bp, Artificial Sequence
  Oligonucleotide primer for the detection of SNP TSC0023256
cgaccacgccta

SEQ ID NO: 308866 - DNA, 12 bp, Artificial Sequence
  Oligonucleotide primer for the detection of SNP TSC0023256
attatgtttgtt

SEQ ID NO: 308867 - DNA, 12 bp, Artificial Sequence
  Oligonucleotide primer for the detection of SNP TSC0023256
attacgtttgtt

SEQ ID NO: 308868 - DNA, 12 bp, Artificial Sequence
  Oligonucleotide primer for the detection of SNP TSC0023257
aaatctaaattt

SEQ ID NO: 308869 - DNA, 12 bp, Artificial Sequence
  Oligonucleotide primer for the detection of SNP TSC0023257
ggaggttaggga

SEQ ID NO: 308870 - DNA, 12 bp, Artificial Sequence
  Oligonucleotide primer for the detection of SNP TSC0023258
caaacacataca

SEQ ID NO: 308871 - DNA, 12 bp, Artificial Sequence
  Oligonucleotide primer for the detection of SNP TSC0023258
ttttgtgtgtgt

SEQ ID NO: 308872 - DNA, 12 bp, Artificial Sequence
  Oligonucleotide primer for the detection of SNP TSC0023258
ctttatatatat

SEQ ID NO: 308873 - DNA, 12 bp, Artificial Sequence
  Oligonucleotide primer for the detection of SNP TSC0023258
taggtatatgta

SEQ ID NO: 308874 - DNA, 12 bp, Artificial Sequence
  Oligonucleotide primer for the detection of SNP TSC0023259
taaacattttaa

SEQ ID NO: 308875 - DNA, 12 bp, Artificial Sequence
  Oligonucleotide primer for the detection of SNP TSC0023259
ttttgggttttg

SEQ ID NO: 308876 - DNA, 12 bp, Artificial Sequence
  Oligonucleotide primer for the detection of SNP TSC0023259
tcttaaattcta

SEQ ID NO: 308877 - DNA, 12 bp, Artificial Sequence
  Oligonucleotide primer for the detection of SNP TSC0023260
agatgaaagatg

SEQ ID NO: 308878 - DNA, 12 bp, Artificial Sequence
  Oligonucleotide primer for the detection of SNP TSC0023260
aagttaagggga

SEQ ID NO: 308879 - DNA, 12 bp, Artificial Sequence
  Oligonucleotide primer for the detection of SNP TSC0023261
aaaactcaataa

SEQ ID NO: 308880 - DNA, 12 bp, Artificial Sequence
  Oligonucleotide primer for the detection of SNP TSC0023261
ttttctatctaa

SEQ ID NO: 308881 - DNA, 12 bp, Artificial Sequence
  Oligonucleotide primer for the detection of SNP TSC0023261
gaaatttagtgg

SEQ ID NO: 308882 - DNA, 12 bp, Artificial Sequence
  Oligonucleotide primer for the detection of SNP TSC0023263
ataatttccttc

SEQ ID NO: 308883 - DNA, 12 bp, Artificial Sequence
  Oligonucleotide primer for the detection of SNP TSC0023263
ataagtaattaa

SEQ ID NO: 308884 - DNA, 12 bp, Artificial Sequence
  Oligonucleotide primer for the detection of SNP TSC0023264
taaacaatccat

SEQ ID NO: 308885 - DNA, 12 bp, Artificial Sequence
  Oligonucleotide primer for the detection of SNP TSC0023264
taaaagaattaa

SEQ ID NO: 308886 - DNA, 12 bp, Artificial Sequence
  Oligonucleotide primer for the detection of SNP TSC0023265
atataataaata

SEQ ID NO: 308887 - DNA, 12 bp, Artificial Sequence
  Oligonucleotide primer for the detection of SNP TSC0023265
aattggaatttt

SEQ ID NO: 308888 - DNA, 12 bp, Artificial Sequence
  Oligonucleotide primer for the detection of SNP TSC0023265
tatataataggt

SEQ ID NO: 308889 - DNA, 12 bp, Artificial Sequence
  Oligonucleotide primer for the detection of SNP TSC0023268
tataacctccat

SEQ ID NO: 308890 - DNA, 12 bp, Artificial Sequence
  Oligonucleotide primer for the detection of SNP TSC0023268
gttagaagataa

SEQ ID NO: 308891 - DNA, 12 bp, Artificial Sequence
  Oligonucleotide primer for the detection of SNP TSC0023269
tccattactaaa

SEQ ID NO: 308892 - DNA, 12 bp, Artificial Sequence
  Oligonucleotide primer for the detection of SNP TSC0023269
tttgggggaagg

SEQ ID NO: 308893 - DNA, 12 bp, Artificial Sequence
  Oligonucleotide primer for the detection of SNP TSC0023269
ttattattaggt

SEQ ID NO: 308894 - DNA, 12 bp, Artificial Sequence
  Oligonucleotide primer for the detection of SNP TSC0023270
aaacactatttc

SEQ ID NO: 308895 - DNA, 12 bp, Artificial Sequence
  Oligonucleotide primer for the detection of SNP TSC0023270
aaacgctatttc

SEQ ID NO: 308896 - DNA, 12 bp, Artificial Sequence
  Oligonucleotide primer for the detection of SNP TSC0023270
attgttttttag

SEQ ID NO: 308897 - DNA, 12 bp, Artificial Sequence
  Oligonucleotide primer for the detection of SNP TSC0023271
acaaatactata

SEQ ID NO: 308898 - DNA, 12 bp, Artificial Sequence
  Oligonucleotide primer for the detection of SNP TSC0023271
gcaaatactata

SEQ ID NO: 308899 - DNA, 12 bp, Artificial Sequence
  Oligonucleotide primer for the detection of SNP TSC0023271
ttagagttgagt

SEQ ID NO: 308900 - DNA, 12 bp, Artificial Sequence
  Oligonucleotide primer for the detection of SNP TSC0023271
ccaaaactaaac

SEQ ID NO: 308901 - DNA, 12 bp, Artificial Sequence
  Oligonucleotide primer for the detection of SNP TSC0023271
gtaggtattata

SEQ ID NO: 308902 - DNA, 12 bp, Artificial Sequence
  Oligonucleotide primer for the detection of SNP TSC0023274
ctaactaatata

SEQ ID NO: 308903 - DNA, 12 bp, Artificial Sequence
  Oligonucleotide primer for the detection of SNP TSC0023274
aaatggggtttt

SEQ ID NO: 308904 - DNA, 12 bp, Artificial Sequence
  Oligonucleotide primer for the detection of SNP TSC0023274
aataaaatttca

SEQ ID NO: 308905 - DNA, 12 bp, Artificial Sequence
  Oligonucleotide primer for the detection of SNP TSC0023275
tcccaaacaaaa

SEQ ID NO: 308906 - DNA, 12 bp, Artificial Sequence
  Oligonucleotide primer for the detection of SNP TSC0023275
agagagtgggta

SEQ ID NO: 308907 - DNA, 12 bp, Artificial Sequence
  Oligonucleotide primer for the detection of SNP TSC0023275
agagagcgggta

SEQ ID NO: 308908 - DNA, 12 bp, Artificial Sequence
  Oligonucleotide primer for the detection of SNP TSC0023276
taaaacaaaaaa

SEQ ID NO: 308909 - DNA, 12 bp, Artificial Sequence
  Oligonucleotide primer for the detection of SNP TSC0023276
taggtttaagtg

SEQ ID NO: 308910 - DNA, 12 bp, Artificial Sequence
  Oligonucleotide primer for the detection of SNP TSC0023276
taggtttaagcg

SEQ ID NO: 308911 - DNA, 12 bp, Artificial Sequence
  Oligonucleotide primer for the detection of SNP TSC0023276
aaattcaaacga

SEQ ID NO: 308912 - DNA, 12 bp, Artificial Sequence
  Oligonucleotide primer for the detection of SNP TSC0023276
tgagatagaaga

SEQ ID NO: 308913 - DNA, 12 bp, Artificial Sequence
  Oligonucleotide primer for the detection of SNP TSC0023277
ttttgttttagc

SEQ ID NO: 308914 - DNA, 12 bp, Artificial Sequence
  Oligonucleotide primer for the detection of SNP TSC0023277
ccttaccccaac

SEQ ID NO: 308915 - DNA, 12 bp, Artificial Sequence
  Oligonucleotide primer for the detection of SNP TSC0023277
taggtagggagg

SEQ ID NO: 308916 - DNA, 12 bp, Artificial Sequence
  Oligonucleotide primer for the detection of SNP TSC0023278
caaaaatctaac

SEQ ID NO: 308917 - DNA, 12 bp, Artificial Sequence
  Oligonucleotide primer for the detection of SNP TSC0023278
tttgtttggttg

SEQ ID NO: 308918 - DNA, 12 bp, Artificial Sequence
  Oligonucleotide primer for the detection of SNP TSC0023278
cctacctaacta

SEQ ID NO: 308919 - DNA, 12 bp, Artificial Sequence
  Oligonucleotide primer for the detection of SNP TSC0023278
tagggatttagt

SEQ ID NO: 308920 - DNA, 12 bp, Artificial Sequence
  Oligonucleotide primer for the detection of SNP TSC0023280
aatacatatatc

SEQ ID NO: 308921 - DNA, 12 bp, Artificial Sequence
  Oligonukleotid-Primer
taatattatatt

SEQ ID NO: 308922 - DNA, 12 bp, Artificial Sequence
  Oligonucleotide primer for the detection of SNP TSC0023280
caatattatatt

SEQ ID NO: 308923 - DNA, 12 bp, Artificial Sequence
  Oligonucleotide primer for the detection of SNP TSC0023280
atgtatatattt

SEQ ID NO: 308924 - DNA, 12 bp, Artificial Sequence
  Oligonucleotide primer for the detection of SNP TSC0023281
ttctttaactta

SEQ ID NO: 308925 - DNA, 12 bp, Artificial Sequence
  Oligonucleotide primer for the detection of SNP TSC0023281
gttatttatagt

SEQ ID NO: 308926 - DNA, 12 bp, Artificial Sequence
  Oligonucleotide primer for the detection of SNP TSC0023281
actacttacaac

SEQ ID NO: 308927 - DNA, 12 bp, Artificial Sequence
  Oligonucleotide primer for the detection of SNP TSC0023282
acaacaaatcaa

SEQ ID NO: 308928 - DNA, 12 bp, Artificial Sequence
  Oligonucleotide primer for the detection of SNP TSC0023282
acgacaaatcaa

SEQ ID NO: 308929 - DNA, 12 bp, Artificial Sequence
  Oligonucleotide primer for the detection of SNP TSC0023282
taggaatgtgta

SEQ ID NO: 308930 - DNA, 12 bp, Artificial Sequence
  Oligonucleotide primer for the detection of SNP TSC0023283
ttccaaaaactt

SEQ ID NO: 308931 - DNA, 12 bp, Artificial Sequence
  Oligonucleotide primer for the detection of SNP TSC0023283
agtagatatagg

SEQ ID NO: 308932 - DNA, 12 bp, Artificial Sequence
  Oligonucleotide primer for the detection of SNP TSC0023284
atataataataa

SEQ ID NO: 308933 - DNA, 12 bp, Artificial Sequence
  Oligonucleotide primer for the detection of SNP TSC0023284
acactatattct

SEQ ID NO: 308934 - DNA, 12 bp, Artificial Sequence
  Oligonucleotide primer for the detection of SNP TSC0023284
aatgtaatgata

SEQ ID NO: 308935 - DNA, 12 bp, Artificial Sequence
  Oligonucleotide primer for the detection of SNP TSC0023285
tcttcaaataat

SEQ ID NO: 308936 - DNA, 12 bp, Artificial Sequence
  Oligonucleotide primer for the detection of SNP TSC0023285
gtaaaattagtg

SEQ ID NO: 308937 - DNA, 12 bp, Artificial Sequence
  Oligonucleotide primer for the detection of SNP TSC0023286
aatactctctaa

SEQ ID NO: 308938 - DNA, 12 bp, Artificial Sequence
  Oligonucleotide primer for the detection of SNP TSC0023286
ttgtttaagttt

SEQ ID NO: 308939 - DNA, 12 bp, Artificial Sequence
  Oligonucleotide primer for the detection of SNP TSC0023286
tacctaaaccca

SEQ ID NO: 308940 - DNA, 12 bp, Artificial Sequence
  Oligonucleotide primer for the detection of SNP TSC0023286
aggtatttttta

SEQ ID NO: 308941 - DNA, 12 bp, Artificial Sequence
  Oligonucleotide primer for the detection of SNP TSC0023288
attaagtgtatt

SEQ ID NO: 308942 - DNA, 12 bp, Artificial Sequence
  Oligonucleotide primer for the detection of SNP TSC0023288
attaagcgtatt

SEQ ID NO: 308943 - DNA, 12 bp, Artificial Sequence
  Oligonucleotide primer for the detection of SNP TSC0023288
accaaacacact

SEQ ID NO: 308944 - DNA, 12 bp, Artificial Sequence
  Oligonucleotide primer for the detection of SNP TSC0023288
accaaacgcact

SEQ ID NO: 308945 - DNA, 12 bp, Artificial Sequence
  Oligonucleotide primer for the detection of SNP TSC0023288
aaattaaaagtg

SEQ ID NO: 308946 - DNA, 12 bp, Artificial Sequence
  Oligonucleotide primer for the detection of SNP TSC0023289
ccttttcttttt

SEQ ID NO: 308947 - DNA, 12 bp, Artificial Sequence
  Oligonucleotide primer for the detection of SNP TSC0023289
ttttaatgagta

SEQ ID NO: 308948 - DNA, 12 bp, Artificial Sequence
  Oligonucleotide primer for the detection of SNP TSC0023289
ttttaacgagta

SEQ ID NO: 308949 - DNA, 12 bp, Artificial Sequence
  Oligonucleotide primer for the detection of SNP TSC0023289
ctttaacgaaca

SEQ ID NO: 308950 - DNA, 12 bp, Artificial Sequence
  Oligonucleotide primer for the detection of SNP TSC0023290
tatctatattac

SEQ ID NO: 308951 - DNA, 12 bp, Artificial Sequence
  Oligonucleotide primer for the detection of SNP TSC0023290
ataaatttaata

SEQ ID NO: 308952 - DNA, 12 bp, Artificial Sequence
  Oligonucleotide primer for the detection of SNP TSC0023292
taaatttactat

SEQ ID NO: 308953 - DNA, 12 bp, Artificial Sequence
  Oligonucleotide primer for the detection of SNP TSC0023292
agtagtttttta

SEQ ID NO: 308954 - DNA, 12 bp, Artificial Sequence
  Oligonucleotide primer for the detection of SNP TSC0023293
aatacaaatcct

SEQ ID NO: 308955 - DNA, 12 bp, Artificial Sequence
  Oligonucleotide primer for the detection of SNP TSC0023293
agttttagggaa

SEQ ID NO: 308956 - DNA, 12 bp, Artificial Sequence
  Oligonucleotide primer for the detection of SNP TSC0023294
ttctctttatcc

SEQ ID NO: 308957 - DNA, 12 bp, Artificial Sequence
  Oligonucleotide primer for the detection of SNP TSC0023294
gtagagtagggg

SEQ ID NO: 308958 - DNA, 12 bp, Artificial Sequence
  Oligonucleotide primer for the detection of SNP TSC0023295
tataatataatc

SEQ ID NO: 308959 - DNA, 12 bp, Artificial Sequence
  Oligonucleotide primer for the detection of SNP TSC0023295
tatatagagtgg

SEQ ID NO: 308960 - DNA, 12 bp, Artificial Sequence
  Oligonucleotide primer for the detection of SNP TSC0023296
attaaactaaca

SEQ ID NO: 308961 - DNA, 12 bp, Artificial Sequence
  Oligonucleotide primer for the detection of SNP TSC0023296
taatccatttta

SEQ ID NO: 308962 - DNA, 12 bp, Artificial Sequence
  Oligonucleotide primer for the detection of SNP TSC0023296
agttgagttgat

SEQ ID NO: 308963 - DNA, 12 bp, Artificial Sequence
  Oligonucleotide primer for the detection of SNP TSC0023297
tttaaactaaac

SEQ ID NO: 308964 - DNA, 12 bp, Artificial Sequence
  Oligonucleotide primer for the detection of SNP TSC0023297
ttaatatagtta

SEQ ID NO: 308965 - DNA, 12 bp, Artificial Sequence
  Oligonucleotide primer for the detection of SNP TSC0023298
aaaatcaatata

SEQ ID NO: 308966 - DNA, 12 bp, Artificial Sequence
  Oligonucleotide primer for the detection of SNP TSC0023298
agaagattaaat

SEQ ID NO: 308967 - DNA, 12 bp, Artificial Sequence
  Oligonucleotide primer for the detection of SNP TSC0023298
tgaaattaatat

SEQ ID NO: 308968 - DNA, 12 bp, Artificial Sequence
  Oligonucleotide primer for the detection of SNP TSC0023301
aaacccatcaat

SEQ ID NO: 308969 - DNA, 12 bp, Artificial Sequence
  Oligonucleotide primer for the detection of SNP TSC0023301
atttttggaggt

SEQ ID NO: 308970 - DNA, 12 bp, Artificial Sequence
  Oligonucleotide primer for the detection of SNP TSC0023302
attttttctatt

SEQ ID NO: 308971 - DNA, 12 bp, Artificial Sequence
  Oligonucleotide primer for the detection of SNP TSC0023302
ataaaaaatata

SEQ ID NO: 308972 - DNA, 12 bp, Artificial Sequence
  Oligonucleotide primer for the detection of SNP TSC0023303
cattaaaattat

SEQ ID NO: 308973 - DNA, 12 bp, Artificial Sequence
  Oligonucleotide primer for the detection of SNP TSC0023303
tgtagtggttta

SEQ ID NO: 308974 - DNA, 12 bp, Artificial Sequence
  Oligonucleotide primer for the detection of SNP TSC0023303
tattagaattat

SEQ ID NO: 308975 - DNA, 12 bp, Artificial Sequence
  Oligonucleotide primer for the detection of SNP TSC0023306
cctcttaaataa

SEQ ID NO: 308976 - DNA, 12 bp, Artificial Sequence
  Oligonucleotide primer for the detection of SNP TSC0023306
gtttgtgatttt

SEQ ID NO: 308977 - DNA, 12 bp, Artificial Sequence
  Oligonucleotide primer for the detection of SNP TSC0023306
cctataatccca

SEQ ID NO: 308978 - DNA, 12 bp, Artificial Sequence
  Oligonucleotide primer for the detection of SNP TSC0023307
taaatcaaataa

SEQ ID NO: 308979 - DNA, 12 bp, Artificial Sequence
  Oligonucleotide primer for the detection of SNP TSC0023307
ggtgggatattt

SEQ ID NO: 308980 - DNA, 12 bp, Artificial Sequence
  Oligonucleotide primer for the detection of SNP TSC0023307
aataaaacatct

SEQ ID NO: 308981 - DNA, 12 bp, Artificial Sequence
  Oligonucleotide primer for the detection of SNP TSC0023307
tagattaagtaa

SEQ ID NO: 308982 - DNA, 12 bp, Artificial Sequence
  Oligonucleotide primer for the detection of SNP TSC0023308
accacccaaaac

SEQ ID NO: 308983 - DNA, 12 bp, Artificial Sequence
  Oligonucleotide primer for the detection of SNP TSC0023308
tgggtggttata

SEQ ID NO: 308984 - DNA, 12 bp, Artificial Sequence
  Oligonucleotide primer for the detection of SNP TSC0023310
atttatggggta

SEQ ID NO: 308985 - DNA, 12 bp, Artificial Sequence
  Oligonucleotide primer for the detection of SNP TSC0023310
actcataaaaca

SEQ ID NO: 308986 - DNA, 12 bp, Artificial Sequence
  Oligonucleotide primer for the detection of SNP TSC0023310
ttagaagttgag

SEQ ID NO: 308987 - DNA, 12 bp, Artificial Sequence
  Oligonucleotide primer for the detection of SNP TSC0023311
gtatggggttta

SEQ ID NO: 308988 - DNA, 12 bp, Artificial Sequence
  Oligonucleotide primer for the detection of SNP TSC0023311
acataaaattca

SEQ ID NO: 308989 - DNA, 12 bp, Artificial Sequence
  Oligonucleotide primer for the detection of SNP TSC0023311
ttgtagaatagt

SEQ ID NO: 308990 - DNA, 12 bp, Artificial Sequence
  Oligonucleotide primer for the detection of SNP TSC0023312
ttattgtatagt

SEQ ID NO: 308991 - DNA, 12 bp, Artificial Sequence
  Oligonucleotide primer for the detection of SNP TSC0023312
cactatataata

SEQ ID NO: 308992 - DNA, 12 bp, Artificial Sequence
  Oligonucleotide primer for the detection of SNP TSC0023312
aataggataata

SEQ ID NO: 308993 - DNA, 12 bp, Artificial Sequence
  Oligonucleotide primer for the detection of SNP TSC0023313
aaacccatatta

SEQ ID NO: 308994 - DNA, 12 bp, Artificial Sequence
  Oligonucleotide primer for the detection of SNP TSC0023313
atgggttaaggt

SEQ ID NO: 308995 - DNA, 12 bp, Artificial Sequence
  Oligonucleotide primer for the detection of SNP TSC0023313
gagtttatattg

SEQ ID NO: 308996 - DNA, 12 bp, Artificial Sequence
  Oligonucleotide primer for the detection of SNP TSC0023314
ttaatcctcaaa

SEQ ID NO: 308997 - DNA, 12 bp, Artificial Sequence
  Oligonucleotide primer for the detection of SNP TSC0023314
tttagttggttg

SEQ ID NO: 308998 - DNA, 12 bp, Artificial Sequence
  Oligonucleotide primer for the detection of SNP TSC0023314
ttcaattaacta

SEQ ID NO: 308999 - DNA, 12 bp, Artificial Sequence
  Oligonucleotide primer for the detection of SNP TSC0023314
ttaatttttaga

SEQ ID NO: 309000 - DNA, 12 bp, Artificial Sequence
  Oligonucleotide primer for the detection of SNP TSC0023317
taacacattccc

SEQ ID NO: 309001 - DNA, 12 bp, Artificial Sequence
  Oligonucleotide primer for the detection of SNP TSC0023317
tttatgaagttt

SEQ ID NO: 309002 - DNA, 12 bp, Artificial Sequence
  Oligonucleotide primer for the detection of SNP TSC0023317
tttacgaagttt

SEQ ID NO: 309003 - DNA, 12 bp, Artificial Sequence
  Oligonucleotide primer for the detection of SNP TSC0023317
actcacaaaacc

SEQ ID NO: 309004 - DNA, 12 bp, Artificial Sequence
  Oligonucleotide primer for the detection of SNP TSC0023317
actcacgaaacc

SEQ ID NO: 309005 - DNA, 12 bp, Artificial Sequence
  Oligonucleotide primer for the detection of SNP TSC0023317
tggtatattttt

SEQ ID NO: 309006 - DNA, 12 bp, Artificial Sequence
  Oligonucleotide primer for the detection of SNP TSC0023317
tggtatattttc

SEQ ID NO: 309007 - DNA, 12 bp, Artificial Sequence
  Oligonucleotide primer for the detection of SNP TSC0023321
taattacaaaca

SEQ ID NO: 309008 - DNA, 12 bp, Artificial Sequence
  Oligonucleotide primer for the detection of SNP TSC0023321
ggtgtggtggtt

SEQ ID NO: 309009 - DNA, 12 bp, Artificial Sequence
  Oligonucleotide primer for the detection of SNP TSC0023321
ggcgtggtggtt

SEQ ID NO: 309010 - DNA, 12 bp, Artificial Sequence
  Oligonucleotide primer for the detection of SNP TSC0023321
ggtgcggtggtt

SEQ ID NO: 309011 - DNA, 12 bp, Artificial Sequence
  Oligonucleotide primer for the detection of SNP TSC0023321
ggcgcggtggtt

SEQ ID NO: 309012 - DNA, 12 bp, Artificial Sequence
  Oligonucleotide primer for the detection of SNP TSC0023321
tgattataggta

SEQ ID NO: 309013 - DNA, 12 bp, Artificial Sequence
  Oligonucleotide primer for the detection of SNP TSC0023322
ctaaactatttt

SEQ ID NO: 309014 - DNA, 12 bp, Artificial Sequence
  Oligonukleotid-Primer
aattagatatga

SEQ ID NO: 309015 - DNA, 12 bp, Artificial Sequence
  Oligonucleotide primer for the detection of SNP TSC0023323
gggatttaaaag

SEQ ID NO: 309016 - DNA, 12 bp, Artificial Sequence
  Oligonucleotide primer for the detection of SNP TSC0023323
aaaacccaaaaa

SEQ ID NO: 309017 - DNA, 12 bp, Artificial Sequence
  Oligonucleotide primer for the detection of SNP TSC0023323
gggaaggaggaa

SEQ ID NO: 309018 - DNA, 12 bp, Artificial Sequence
  Oligonukleotid-Primer
aaactctatttt

SEQ ID NO: 309019 - DNA, 12 bp, Artificial Sequence
  Oligonucleotide primer for the detection of SNP TSC0023324
gtaatgataata

SEQ ID NO: 309020 - DNA, 12 bp, Artificial Sequence
  Oligonucleotide primer for the detection of SNP TSC0023324
aggttttgtttt

SEQ ID NO: 309021 - DNA, 12 bp, Artificial Sequence
  Oligonucleotide primer for the detection of SNP TSC0023325
atctccaaaaat

SEQ ID NO: 309022 - DNA, 12 bp, Artificial Sequence
  Oligonukleotid-Primer
aaactaaaaata

SEQ ID NO: 309023 - DNA, 12 bp, Artificial Sequence
  Oligonucleotide primer for the detection of SNP TSC0023326
tttgttgtggta

SEQ ID NO: 309024 - DNA, 12 bp, Artificial Sequence
  Oligonucleotide primer for the detection of SNP TSC0023326
tttgtcgtggta

SEQ ID NO: 309025 - DNA, 12 bp, Artificial Sequence
  Oligonucleotide primer for the detection of SNP TSC0023326
cctaccataaca

SEQ ID NO: 309026 - DNA, 12 bp, Artificial Sequence
  Oligonucleotide primer for the detection of SNP TSC0023326
cctaccgtaaca

SEQ ID NO: 309027 - DNA, 12 bp, Artificial Sequence
  Oligonucleotide primer for the detection of SNP TSC0023326
ggattggggatg

SEQ ID NO: 309028 - DNA, 12 bp, Artificial Sequence
  Oligonucleotide primer for the detection of SNP TSC0023327
gagtgttatgaa

SEQ ID NO: 309029 - DNA, 12 bp, Artificial Sequence
  Oligonucleotide primer for the detection of SNP TSC0023329
actcataccctt

SEQ ID NO: 309030 - DNA, 12 bp, Artificial Sequence
  Oligonucleotide primer for the detection of SNP TSC0023329
tgatgggatgga

SEQ ID NO: 309031 - DNA, 12 bp, Artificial Sequence
  Oligonucleotide primer for the detection of SNP TSC0023331
acacacttctcc

SEQ ID NO: 309032 - DNA, 12 bp, Artificial Sequence
  Oligonucleotide primer for the detection of SNP TSC0023331
acacgcttctcc

SEQ ID NO: 309033 - DNA, 12 bp, Artificial Sequence
  Oligonucleotide primer for the detection of SNP TSC0023331
attatatttttg

SEQ ID NO: 309034 - DNA, 12 bp, Artificial Sequence
  Oligonucleotide primer for the detection of SNP TSC0023331
attacactccta

SEQ ID NO: 309035 - DNA, 12 bp, Artificial Sequence
  Oligonucleotide primer for the detection of SNP TSC0023331
atacgttttttt

SEQ ID NO: 309036 - DNA, 12 bp, Artificial Sequence
  Oligonucleotide primer for the detection of SNP TSC0023333
taaaaacctaac

SEQ ID NO: 309037 - DNA, 12 bp, Artificial Sequence
  Oligonucleotide primer for the detection of SNP TSC0023333
tggggtttgttg

SEQ ID NO: 309038 - DNA, 12 bp, Artificial Sequence
  Oligonucleotide primer for the detection of SNP TSC0023333
tggggttcgttg

SEQ ID NO: 309039 - DNA, 12 bp, Artificial Sequence
  Oligonucleotide primer for the detection of SNP TSC0023333
taaaacccacta

SEQ ID NO: 309040 - DNA, 12 bp, Artificial Sequence
  Oligonucleotide primer for the detection of SNP TSC0023333
taaaacccgcta

SEQ ID NO: 309041 - DNA, 12 bp, Artificial Sequence
  Oligonucleotide primer for the detection of SNP TSC0023333
tggagatttggt

SEQ ID NO: 309042 - DNA, 12 bp, Artificial Sequence
  Oligonucleotide primer for the detection of SNP TSC0023334
ttaacccctaaa

SEQ ID NO: 309043 - DNA, 12 bp, Artificial Sequence
  Oligonucleotide primer for the detection of SNP TSC0023334
aaaaacctttct

SEQ ID NO: 309044 - DNA, 12 bp, Artificial Sequence
  Oligonucleotide primer for the detection of SNP TSC0023334
ttagtttttgaa

SEQ ID NO: 309045 - DNA, 12 bp, Artificial Sequence
  Oligonucleotide primer for the detection of SNP TSC0023335
tctaataactat

SEQ ID NO: 309046 - DNA, 12 bp, Artificial Sequence
  Oligonucleotide primer for the detection of SNP TSC0023336
aaatatctttcc

SEQ ID NO: 309047 - DNA, 12 bp, Artificial Sequence
  Oligonucleotide primer for the detection of SNP TSC0023336
tagttattagag

SEQ ID NO: 309048 - DNA, 12 bp, Artificial Sequence
  Oligonucleotide primer for the detection of SNP TSC0023336
ggatattttttt

SEQ ID NO: 309049 - DNA, 12 bp, Artificial Sequence
  Oligonucleotide primer for the detection of SNP TSC0023336
ggatattttttc

SEQ ID NO: 309050 - DNA, 12 bp, Artificial Sequence
  Oligonucleotide primer for the detection of SNP TSC0023337
aaaacaaaccaa

SEQ ID NO: 309051 - DNA, 12 bp, Artificial Sequence
  Oligonucleotide primer for the detection of SNP TSC0023337
gatgttggtttg

SEQ ID NO: 309052 - DNA, 12 bp, Artificial Sequence
  Oligonucleotide primer for the detection of SNP TSC0023337
gacgttggtttg

SEQ ID NO: 309053 - DNA, 12 bp, Artificial Sequence
  Oligonucleotide primer for the detection of SNP TSC0023337
aacattaatcta

SEQ ID NO: 309054 - DNA, 12 bp, Artificial Sequence
  Oligonucleotide primer for the detection of SNP TSC0023337
aacgttaatcta

SEQ ID NO: 309055 - DNA, 12 bp, Artificial Sequence
  Oligonucleotide primer for the detection of SNP TSC0023337
ttagggtaggtt

SEQ ID NO: 309056 - DNA, 12 bp, Artificial Sequence
  Oligonucleotide primer for the detection of SNP TSC0023338
tcaaataattac

SEQ ID NO: 309057 - DNA, 12 bp, Artificial Sequence
  Oligonucleotide primer for the detection of SNP TSC0023338
tcgaataattac

SEQ ID NO: 309058 - DNA, 12 bp, Artificial Sequence
  Oligonucleotide primer for the detection of SNP TSC0023338
agggttgtaggg

SEQ ID NO: 309059 - DNA, 12 bp, Artificial Sequence
  Oligonucleotide primer for the detection of SNP TSC0023338
ttgagtgattgt

SEQ ID NO: 309060 - DNA, 12 bp, Artificial Sequence
  Oligonucleotide primer for the detection of SNP TSC0023338
tcgagtgattgt

SEQ ID NO: 309061 - DNA, 12 bp, Artificial Sequence
  Oligonucleotide primer for the detection of SNP TSC0023338
ttgagtgattgc

SEQ ID NO: 309062 - DNA, 12 bp, Artificial Sequence
  Oligonucleotide primer for the detection of SNP TSC0023338
tcgagtgattgc

SEQ ID NO: 309063 - DNA, 12 bp, Artificial Sequence
  Oligonucleotide primer for the detection of SNP TSC0023340
aaacccaaaaat

SEQ ID NO: 309064 - DNA, 12 bp, Artificial Sequence
  Oligonucleotide primer for the detection of SNP TSC0023340
agtttggtttta

SEQ ID NO: 309065 - DNA, 12 bp, Artificial Sequence
  Oligonucleotide primer for the detection of SNP TSC0023341
cttccctacaat

SEQ ID NO: 309066 - DNA, 12 bp, Artificial Sequence
  Oligonucleotide primer for the detection of SNP TSC0023341
cttccctacgat

SEQ ID NO: 309067 - DNA, 12 bp, Artificial Sequence
  Oligonucleotide primer for the detection of SNP TSC0023342
aacaaatctaaa

SEQ ID NO: 309068 - DNA, 12 bp, Artificial Sequence
  Oligonucleotide primer for the detection of SNP TSC0023342
taaatctccccc

SEQ ID NO: 309069 - DNA, 12 bp, Artificial Sequence
  Oligonucleotide primer for the detection of SNP TSC0023342
ttgataggtttg

SEQ ID NO: 309070 - DNA, 12 bp, Artificial Sequence
  Oligonucleotide primer for the detection of SNP TSC0023344
attttaaaaaca

SEQ ID NO: 309071 - DNA, 12 bp, Artificial Sequence
  Oligonucleotide primer for the detection of SNP TSC0023344
ttttttaagggt

SEQ ID NO: 309072 - DNA, 12 bp, Artificial Sequence
  Oligonucleotide primer for the detection of SNP TSC0023344
attttagagata

SEQ ID NO: 309073 - DNA, 12 bp, Artificial Sequence
  Oligonucleotide primer for the detection of SNP TSC0023345
tatatcttaaat

SEQ ID NO: 309074 - DNA, 12 bp, Artificial Sequence
  Oligonucleotide primer for the detection of SNP TSC0023345
ttttaaataaag

SEQ ID NO: 309075 - DNA, 12 bp, Artificial Sequence
  Oligonucleotide primer for the detection of SNP TSC0023346
ttaaatattaaa

SEQ ID NO: 309076 - DNA, 12 bp, Artificial Sequence
  Oligonucleotide primer for the detection of SNP TSC0023346
tattagttttgt

SEQ ID NO: 309077 - DNA, 12 bp, Artificial Sequence
  Oligonucleotide primer for the detection of SNP TSC0023346
taattttacaaa

SEQ ID NO: 309078 - DNA, 12 bp, Artificial Sequence
  Oligonucleotide primer for the detection of SNP TSC0023346
tgttgggttttt

SEQ ID NO: 309079 - DNA, 12 bp, Artificial Sequence
  Oligonucleotide primer for the detection of SNP TSC0023347
taactaaaaaac

SEQ ID NO: 309080 - DNA, 12 bp, Artificial Sequence
  Oligonucleotide primer for the detection of SNP TSC0023347
gtgagtggttta

SEQ ID NO: 309081 - DNA, 12 bp, Artificial Sequence
  Oligonucleotide primer for the detection of SNP TSC0023347
gtgagcggttta

SEQ ID NO: 309082 - DNA, 12 bp, Artificial Sequence
  Oligonucleotide primer for the detection of SNP TSC0023348
taataccaccca

SEQ ID NO: 309083 - DNA, 12 bp, Artificial Sequence
  Oligonucleotide primer for the detection of SNP TSC0023348
taggatggtttt

SEQ ID NO: 309084 - DNA, 12 bp, Artificial Sequence
  Oligonucleotide primer for the detection of SNP TSC0023348
caaaataatccc

SEQ ID NO: 309085 - DNA, 12 bp, Artificial Sequence
  Oligonucleotide primer for the detection of SNP TSC0023348
tagtgttattta

SEQ ID NO: 309086 - DNA, 12 bp, Artificial Sequence
  Oligonucleotide primer for the detection of SNP TSC0023350
atatactctact

SEQ ID NO: 309087 - DNA, 12 bp, Artificial Sequence
  Oligonucleotide primer for the detection of SNP TSC0023350
aattttagagaa

SEQ ID NO: 309088 - DNA, 12 bp, Artificial Sequence
  Oligonucleotide primer for the detection of SNP TSC0023351
ttctccattatt

SEQ ID NO: 309089 - DNA, 12 bp, Artificial Sequence
  Oligonucleotide primer for the detection of SNP TSC0023351
ttgttaatttga

SEQ ID NO: 309090 - DNA, 12 bp, Artificial Sequence
  Oligonucleotide primer for the detection of SNP TSC0023352
ataaataccaat

SEQ ID NO: 309091 - DNA, 12 bp, Artificial Sequence
  Oligonucleotide primer for the detection of SNP TSC0023354
ataatacaatct

SEQ ID NO: 309092 - DNA, 12 bp, Artificial Sequence
  Oligonucleotide primer for the detection of SNP TSC0023354
ttgtagtaagta

SEQ ID NO: 309093 - DNA, 12 bp, Artificial Sequence
  Oligonucleotide primer for the detection of SNP TSC0023358
attcatcctatc

SEQ ID NO: 309094 - DNA, 12 bp, Artificial Sequence
  Oligonucleotide primer for the detection of SNP TSC0023358
agttattggttt

SEQ ID NO: 309095 - DNA, 12 bp, Artificial Sequence
  Oligonucleotide primer for the detection of SNP TSC0023358
aatcactaacct

SEQ ID NO: 309096 - DNA, 12 bp, Artificial Sequence
  Oligonucleotide primer for the detection of SNP TSC0023360
cactaaaactta

SEQ ID NO: 309097 - DNA, 12 bp, Artificial Sequence
  Oligonucleotide primer for the detection of SNP TSC0023360
attgtggggttt

SEQ ID NO: 309098 - DNA, 12 bp, Artificial Sequence
  Oligonucleotide primer for the detection of SNP TSC0023360
ttataaaatcca

SEQ ID NO: 309099 - DNA, 12 bp, Artificial Sequence
  Oligonucleotide primer for the detection of SNP TSC0023360
ttattagggttt

SEQ ID NO: 309100 - DNA, 12 bp, Artificial Sequence
  Oligonucleotide primer for the detection of SNP TSC0023367
aacctcatctct

SEQ ID NO: 309101 - DNA, 12 bp, Artificial Sequence
  Oligonucleotide primer for the detection of SNP TSC0023367
aacctcgtctct

SEQ ID NO: 309102 - DNA, 12 bp, Artificial Sequence
  Oligonucleotide primer for the detection of SNP TSC0023367
attttttattta

SEQ ID NO: 309103 - DNA, 12 bp, Artificial Sequence
  Oligonucleotide primer for the detection of SNP TSC0023368
tcaaaatactac

SEQ ID NO: 309104 - DNA, 12 bp, Artificial Sequence
  Oligonucleotide primer for the detection of SNP TSC0023368
ttttaatatatg

SEQ ID NO: 309105 - DNA, 12 bp, Artificial Sequence
  Oligonucleotide primer for the detection of SNP TSC0023368
ctttaacacata

SEQ ID NO: 309106 - DNA, 12 bp, Artificial Sequence
  Oligonucleotide primer for the detection of SNP TSC0023368
ttaaagtattgt

SEQ ID NO: 309107 - DNA, 12 bp, Artificial Sequence
  Oligonukleotid-Primer
taatttttaatt

SEQ ID NO: 309108 - DNA, 12 bp, Artificial Sequence
  Oligonucleotide primer for the detection of SNP TSC0023369
aatattttagta

SEQ ID NO: 309109 - DNA, 12 bp, Artificial Sequence
  Oligonucleotide primer for the detection of SNP TSC0023369
aatattttaata

SEQ ID NO: 309110 - DNA, 12 bp, Artificial Sequence
  Oligonucleotide primer for the detection of SNP TSC0023370
agaatgaaatta

SEQ ID NO: 309111 - DNA, 12 bp, Artificial Sequence
  Oligonukleotid-Primer
aaaatacaattt

SEQ ID NO: 309112 - DNA, 12 bp, Artificial Sequence
  Oligonucleotide primer for the detection of SNP TSC0023371
gagatgtagttt

SEQ ID NO: 309113 - DNA, 12 bp, Artificial Sequence
  Oligonucleotide primer for the detection of SNP TSC0023372
cttaactcacta

SEQ ID NO: 309114 - DNA, 12 bp, Artificial Sequence
  Oligonucleotide primer for the detection of SNP TSC0023372
gaggcggaggtt

SEQ ID NO: 309115 - DNA, 12 bp, Artificial Sequence
  Oligonukleotid-Primer
aaaatcctacca

SEQ ID NO: 309116 - DNA, 12 bp, Artificial Sequence
  Oligonucleotide primer for the detection of SNP TSC0023373
atctattaccta

SEQ ID NO: 309117 - DNA, 12 bp, Artificial Sequence
  Oligonucleotide primer for the detection of SNP TSC0023373
aaattttattat

SEQ ID NO: 309118 - DNA, 12 bp, Artificial Sequence
  Oligonucleotide primer for the detection of SNP TSC0023373
aaattttattac

SEQ ID NO: 309119 - DNA, 12 bp, Artificial Sequence
  Oligonucleotide primer for the detection of SNP TSC0023374
tactaaaacctt

SEQ ID NO: 309120 - DNA, 12 bp, Artificial Sequence
  Oligonucleotide primer for the detection of SNP TSC0023374
attgtttaagat

SEQ ID NO: 309121 - DNA, 12 bp, Artificial Sequence
  Oligonucleotide primer for the detection of SNP TSC0023374
actactcaaaat

SEQ ID NO: 309122 - DNA, 12 bp, Artificial Sequence
  Oligonucleotide primer for the detection of SNP TSC0023375
ataatacgatct

SEQ ID NO: 309123 - DNA, 12 bp, Artificial Sequence
  Oligonucleotide primer for the detection of SNP TSC0023375
ggttgaagtgag

SEQ ID NO: 309124 - DNA, 12 bp, Artificial Sequence
  Oligonucleotide primer for the detection of SNP TSC0023376
gattttggttta

SEQ ID NO: 309125 - DNA, 12 bp, Artificial Sequence
  Oligonucleotide primer for the detection of SNP TSC0023376
gatttcggttta

SEQ ID NO: 309126 - DNA, 12 bp, Artificial Sequence
  Oligonucleotide primer for the detection of SNP TSC0023376
aatctcaactca

SEQ ID NO: 309127 - DNA, 12 bp, Artificial Sequence
  Oligonucleotide primer for the detection of SNP TSC0023376
aatctcgactca

SEQ ID NO: 309128 - DNA, 12 bp, Artificial Sequence
  Oligonucleotide primer for the detection of SNP TSC0023376
gatctcaactca

SEQ ID NO: 309129 - DNA, 12 bp, Artificial Sequence
  Oligonucleotide primer for the detection of SNP TSC0023376
gatctcgactca

SEQ ID NO: 309130 - DNA, 12 bp, Artificial Sequence
  Oligonucleotide primer for the detection of SNP TSC0023379
tacaaaaaacaa

SEQ ID NO: 309131 - DNA, 12 bp, Artificial Sequence
  Oligonucleotide primer for the detection of SNP TSC0023379
tacaaaaaacga

SEQ ID NO: 309132 - DNA, 12 bp, Artificial Sequence
  Oligonucleotide primer for the detection of SNP TSC0023379
gagtattgaggg

SEQ ID NO: 309133 - DNA, 12 bp, Artificial Sequence
  Oligonucleotide primer for the detection of SNP TSC0023379
gagtatcgaggg

SEQ ID NO: 309134 - DNA, 12 bp, Artificial Sequence
  Oligonucleotide primer for the detection of SNP TSC0023379
aaacatcgaaaa

SEQ ID NO: 309135 - DNA, 12 bp, Artificial Sequence
  Oligonucleotide primer for the detection of SNP TSC0023379
tatagaaagtgg

SEQ ID NO: 309136 - DNA, 12 bp, Artificial Sequence
  Oligonucleotide primer for the detection of SNP TSC0023379
tatagaaagcgg

SEQ ID NO: 309137 - DNA, 12 bp, Artificial Sequence
  Oligonucleotide primer for the detection of SNP TSC0023380
aacactcaatat

SEQ ID NO: 309138 - DNA, 12 bp, Artificial Sequence
  Oligonucleotide primer for the detection of SNP TSC0023380
ttgttgagatgg

SEQ ID NO: 309139 - DNA, 12 bp, Artificial Sequence
  Oligonucleotide primer for the detection of SNP TSC0023381
atcaaccatctc

SEQ ID NO: 309140 - DNA, 12 bp, Artificial Sequence
  Oligonucleotide primer for the detection of SNP TSC0023381
aatatgaagaag

SEQ ID NO: 309141 - DNA, 12 bp, Artificial Sequence
  Oligonucleotide primer for the detection of SNP TSC0023381
aatacgaagaag

SEQ ID NO: 309142 - DNA, 12 bp, Artificial Sequence
  Oligonucleotide primer for the detection of SNP TSC0023382
tcttacaattct

SEQ ID NO: 309143 - DNA, 12 bp, Artificial Sequence
  Oligonucleotide primer for the detection of SNP TSC0023382
tcttacgattct

SEQ ID NO: 309144 - DNA, 12 bp, Artificial Sequence
  Oligonucleotide primer for the detection of SNP TSC0023382
tagtttagtttg

SEQ ID NO: 309145 - DNA, 12 bp, Artificial Sequence
  Oligonucleotide primer for the detection of SNP TSC0023382
tagtttagttcg

SEQ ID NO: 309146 - DNA, 12 bp, Artificial Sequence
  Oligonucleotide primer for the detection of SNP TSC0023383
aaacacaaaccc

SEQ ID NO: 309147 - DNA, 12 bp, Artificial Sequence
  Oligonucleotide primer for the detection of SNP TSC0023383
taggttgtggga

SEQ ID NO: 309148 - DNA, 12 bp, Artificial Sequence
  Oligonucleotide primer for the detection of SNP TSC0023383
taggttgcggga

SEQ ID NO: 309149 - DNA, 12 bp, Artificial Sequence
  Oligonucleotide primer for the detection of SNP TSC0023387
taaaacttattt

SEQ ID NO: 309150 - DNA, 12 bp, Artificial Sequence
  Oligonucleotide primer for the detection of SNP TSC0023387
tacctcatatac

SEQ ID NO: 309151 - DNA, 12 bp, Artificial Sequence
  Oligonucleotide primer for the detection of SNP TSC0023387
agggtttatttc

SEQ ID NO: 309152 - DNA, 12 bp, Artificial Sequence
  Oligonucleotide primer for the detection of SNP TSC0023388
caaaaccacctc

SEQ ID NO: 309153 - DNA, 12 bp, Artificial Sequence
  Oligonucleotide primer for the detection of SNP TSC0023388
cgaaaccacctc

SEQ ID NO: 309154 - DNA, 12 bp, Artificial Sequence
  Oligonucleotide primer for the detection of SNP TSC0023388
gaaggttttgtg

SEQ ID NO: 309155 - DNA, 12 bp, Artificial Sequence
  Oligonucleotide primer for the detection of SNP TSC0023388
aaaaattctata

SEQ ID NO: 309156 - DNA, 12 bp, Artificial Sequence
  Oligonucleotide primer for the detection of SNP TSC0023388
tgaggttatttt

SEQ ID NO: 309157 - DNA, 12 bp, Artificial Sequence
  Oligonucleotide primer for the detection of SNP TSC0023388
cgaggttatttt

SEQ ID NO: 309158 - DNA, 12 bp, Artificial Sequence
  Oligonucleotide primer for the detection of SNP TSC0023389
tctatttcccca

SEQ ID NO: 309159 - DNA, 12 bp, Artificial Sequence
  Oligonucleotide primer for the detection of SNP TSC0023389
tacttttttcta

SEQ ID NO: 309160 - DNA, 12 bp, Artificial Sequence
  Oligonucleotide primer for the detection of SNP TSC0023390
catttcaactat

SEQ ID NO: 309161 - DNA, 12 bp, Artificial Sequence
  Oligonucleotide primer for the detection of SNP TSC0023390
gaattattgaaa

SEQ ID NO: 309162 - DNA, 12 bp, Artificial Sequence
  Oligonucleotide primer for the detection of SNP TSC0023391
tctaaataaata

SEQ ID NO: 309163 - DNA, 12 bp, Artificial Sequence
  Oligonucleotide primer for the detection of SNP TSC0023391
ttatggtgtaag

SEQ ID NO: 309164 - DNA, 12 bp, Artificial Sequence
  Oligonucleotide primer for the detection of SNP TSC0023391
tcataatataaa

SEQ ID NO: 309165 - DNA, 12 bp, Artificial Sequence
  Oligonucleotide primer for the detection of SNP TSC0023391
tttaagtgagtg

SEQ ID NO: 309166 - DNA, 12 bp, Artificial Sequence
  Oligonucleotide primer for the detection of SNP TSC0023393
taaaattcctat

SEQ ID NO: 309167 - DNA, 12 bp, Artificial Sequence
  Oligonucleotide primer for the detection of SNP TSC0023393
ttttgttgttta

SEQ ID NO: 309168 - DNA, 12 bp, Artificial Sequence
  Oligonucleotide primer for the detection of SNP TSC0023394
aacttacctcta

SEQ ID NO: 309169 - DNA, 12 bp, Artificial Sequence
  Oligonucleotide primer for the detection of SNP TSC0023394
ctaactttccca

SEQ ID NO: 309170 - DNA, 12 bp, Artificial Sequence
  Oligonucleotide primer for the detection of SNP TSC0023394
gatttgtttttg

SEQ ID NO: 309171 - DNA, 12 bp, Artificial Sequence
  Oligonucleotide primer for the detection of SNP TSC0023398
ttaatctattat

SEQ ID NO: 309172 - DNA, 12 bp, Artificial Sequence
  Oligonucleotide primer for the detection of SNP TSC0023398
ataggatgatga

SEQ ID NO: 309173 - DNA, 12 bp, Artificial Sequence
  Oligonucleotide primer for the detection of SNP TSC0023398
ataggacgatga

SEQ ID NO: 309174 - DNA, 12 bp, Artificial Sequence
  Oligonucleotide primer for the detection of SNP TSC0023398
acaaaacgataa

SEQ ID NO: 309175 - DNA, 12 bp, Artificial Sequence
  Oligonucleotide primer for the detection of SNP TSC0023398
ttagtttattgt

SEQ ID NO: 309176 - DNA, 12 bp, Artificial Sequence
  Oligonucleotide primer for the detection of SNP TSC0023399
accttccaaaac

SEQ ID NO: 309177 - DNA, 12 bp, Artificial Sequence
  Oligonucleotide primer for the detection of SNP TSC0023399
atagttgaaggt

SEQ ID NO: 309178 - DNA, 12 bp, Artificial Sequence
  Oligonucleotide primer for the detection of SNP TSC0023399
taattaaaaata

SEQ ID NO: 309179 - DNA, 12 bp, Artificial Sequence
  Oligonucleotide primer for the detection of SNP TSC0023400
tttaacactctt

SEQ ID NO: 309180 - DNA, 12 bp, Artificial Sequence
  Oligonucleotide primer for the detection of SNP TSC0023400
ggagaaaatata

SEQ ID NO: 309181 - DNA, 12 bp, Artificial Sequence
  Oligonucleotide primer for the detection of SNP TSC0023400
tttggtattttt

SEQ ID NO: 309182 - DNA, 12 bp, Artificial Sequence
  Oligonucleotide primer for the detection of SNP TSC0023401
acccgccttaac

SEQ ID NO: 309183 - DNA, 12 bp, Artificial Sequence
  Oligonucleotide primer for the detection of SNP TSC0023401
gcccaccttaac

SEQ ID NO: 309184 - DNA, 12 bp, Artificial Sequence
  Oligonucleotide primer for the detection of SNP TSC0023401
gcccgccttaac

SEQ ID NO: 309185 - DNA, 12 bp, Artificial Sequence
  Oligonucleotide primer for the detection of SNP TSC0023401
gttcgttttggt

SEQ ID NO: 309186 - DNA, 12 bp, Artificial Sequence
  Oligonucleotide primer for the detection of SNP TSC0023405
atataaataatt

SEQ ID NO: 309187 - DNA, 12 bp, Artificial Sequence
  Oligonucleotide primer for the detection of SNP TSC0023405
gaagataatgtg

SEQ ID NO: 309188 - DNA, 12 bp, Artificial Sequence
  Oligonucleotide primer for the detection of SNP TSC0023406
tgttttatttgt

SEQ ID NO: 309189 - DNA, 12 bp, Artificial Sequence
  Oligonucleotide primer for the detection of SNP TSC0023406
taccctacttac

SEQ ID NO: 309190 - DNA, 12 bp, Artificial Sequence
  Oligonucleotide primer for the detection of SNP TSC0023406
ggtagtagggag

SEQ ID NO: 309191 - DNA, 12 bp, Artificial Sequence
  Oligonucleotide primer for the detection of SNP TSC0023408
aaaatctatatt

SEQ ID NO: 309192 - DNA, 12 bp, Artificial Sequence
  Oligonukleotid-Primer
gtgtggtgatta

SEQ ID NO: 309193 - DNA, 12 bp, Artificial Sequence
  Oligonucleotide primer for the detection of SNP TSC0023409
accaccccctcc

SEQ ID NO: 309194 - DNA, 12 bp, Artificial Sequence
  Oligonucleotide primer for the detection of SNP TSC0023409
gccaccccctcc

SEQ ID NO: 309195 - DNA, 12 bp, Artificial Sequence
  Oligonucleotide primer for the detection of SNP TSC0023409
tgggtgagtttg

SEQ ID NO: 309196 - DNA, 12 bp, Artificial Sequence
  Oligonucleotide primer for the detection of SNP TSC0023409
cgggtgagtttg

SEQ ID NO: 309197 - DNA, 12 bp, Artificial Sequence
  Oligonucleotide primer for the detection of SNP TSC0023409
tgggcgagtttg

SEQ ID NO: 309198 - DNA, 12 bp, Artificial Sequence
  Oligonucleotide primer for the detection of SNP TSC0023409
cgggcgagtttg

SEQ ID NO: 309199 - DNA, 12 bp, Artificial Sequence
  Oligonucleotide primer for the detection of SNP TSC0023411
ataatctaccca

SEQ ID NO: 309200 - DNA, 12 bp, Artificial Sequence
  Oligonucleotide primer for the detection of SNP TSC0023411
gtgatttgttta

SEQ ID NO: 309201 - DNA, 12 bp, Artificial Sequence
  Oligonucleotide primer for the detection of SNP TSC0023412
tgggagtggtgg

SEQ ID NO: 309202 - DNA, 12 bp, Artificial Sequence
  Oligonucleotide primer for the detection of SNP TSC0023412
cgggagtggtgg

SEQ ID NO: 309203 - DNA, 12 bp, Artificial Sequence
  Oligonucleotide primer for the detection of SNP TSC0023412
cgaaaataataa

SEQ ID NO: 309204 - DNA, 12 bp, Artificial Sequence
  Oligonucleotide primer for the detection of SNP TSC0023413
cacctttatcaa

SEQ ID NO: 309205 - DNA, 12 bp, Artificial Sequence
  Oligonucleotide primer for the detection of SNP TSC0023413
ttttgattatta

SEQ ID NO: 309206 - DNA, 12 bp, Artificial Sequence
  Oligonucleotide primer for the detection of SNP TSC0023413
ttctaaccatca

SEQ ID NO: 309207 - DNA, 12 bp, Artificial Sequence
  Oligonucleotide primer for the detection of SNP TSC0023413
tatttttgttag

SEQ ID NO: 309208 - DNA, 12 bp, Artificial Sequence
  Oligonucleotide primer for the detection of SNP TSC0023414
attttaaaatag

SEQ ID NO: 309209 - DNA, 12 bp, Artificial Sequence
  Oligonucleotide primer for the detection of SNP TSC0023414
atcctaaaataa

SEQ ID NO: 309210 - DNA, 12 bp, Artificial Sequence
  Oligonucleotide primer for the detection of SNP TSC0023415
ttctaccccaac

SEQ ID NO: 309211 - DNA, 12 bp, Artificial Sequence
  Oligonucleotide primer for the detection of SNP TSC0023415
cactaaccatca

SEQ ID NO: 309212 - DNA, 12 bp, Artificial Sequence
  Oligonucleotide primer for the detection of SNP TSC0023416
tcatacatttct

SEQ ID NO: 309213 - DNA, 12 bp, Artificial Sequence
  Oligonucleotide primer for the detection of SNP TSC0023416
tcatacgtttct

SEQ ID NO: 309214 - DNA, 12 bp, Artificial Sequence
  Oligonucleotide primer for the detection of SNP TSC0023416
tttttttaatta

SEQ ID NO: 309215 - DNA, 12 bp, Artificial Sequence
  Oligonucleotide primer for the detection of SNP TSC0023418
aaaataaaaccc

SEQ ID NO: 309216 - DNA, 12 bp, Artificial Sequence
  Oligonucleotide primer for the detection of SNP TSC0023420
cccaacccaaac

SEQ ID NO: 309217 - DNA, 12 bp, Artificial Sequence
  Oligonucleotide primer for the detection of SNP TSC0023420
ggggtttaaggg

SEQ ID NO: 309218 - DNA, 12 bp, Artificial Sequence
  Oligonucleotide primer for the detection of SNP TSC0023420
tttagtttagat

SEQ ID NO: 309219 - DNA, 12 bp, Artificial Sequence
  Oligonucleotide primer for the detection of SNP TSC0023421
atcatctctctc

SEQ ID NO: 309220 - DNA, 12 bp, Artificial Sequence
  Oligonucleotide primer for the detection of SNP TSC0023421
aaattgaattag

SEQ ID NO: 309221 - DNA, 12 bp, Artificial Sequence
  Oligonucleotide primer for the detection of SNP TSC0023422
tctctctaccct

SEQ ID NO: 309222 - DNA, 12 bp, Artificial Sequence
  Oligonucleotide primer for the detection of SNP TSC0023422
tgtgtttttgga

SEQ ID NO: 309223 - DNA, 12 bp, Artificial Sequence
  Oligonucleotide primer for the detection of SNP TSC0023426
aaaaaccctaaa

SEQ ID NO: 309224 - DNA, 12 bp, Artificial Sequence
  Oligonucleotide primer for the detection of SNP TSC0023426
gggtagaaaggg

SEQ ID NO: 309225 - DNA, 12 bp, Artificial Sequence
  Oligonucleotide primer for the detection of SNP TSC0023427
cactaaccaaaa

SEQ ID NO: 309226 - DNA, 12 bp, Artificial Sequence
  Oligonucleotide primer for the detection of SNP TSC0023427
cgctaaccaaaa

SEQ ID NO: 309227 - DNA, 12 bp, Artificial Sequence
  Oligonucleotide primer for the detection of SNP TSC0023427
ttttttttggat

SEQ ID NO: 309228 - DNA, 12 bp, Artificial Sequence
  Oligonucleotide primer for the detection of SNP TSC0023427
ttttttttggac

SEQ ID NO: 309229 - DNA, 12 bp, Artificial Sequence
  Oligonucleotide primer for the detection of SNP TSC0023427
tgttgattaaga

SEQ ID NO: 309230 - DNA, 12 bp, Artificial Sequence
  Oligonucleotide primer for the detection of SNP TSC0023427
cgttgattaaga

SEQ ID NO: 309231 - DNA, 12 bp, Artificial Sequence
  Oligonucleotide primer for the detection of SNP TSC0023429
caaaaaaaccta

SEQ ID NO: 309232 - DNA, 12 bp, Artificial Sequence
  Oligonucleotide primer for the detection of SNP TSC0023429
tgttttggttta

SEQ ID NO: 309233 - DNA, 12 bp, Artificial Sequence
  Oligonucleotide primer for the detection of SNP TSC0023429
cgttttggttta

SEQ ID NO: 309234 - DNA, 12 bp, Artificial Sequence
  Oligonucleotide primer for the detection of SNP TSC0023429
cactctaaccca

SEQ ID NO: 309235 - DNA, 12 bp, Artificial Sequence
  Oligonucleotide primer for the detection of SNP TSC0023429
cgctctaaccca

SEQ ID NO: 309236 - DNA, 12 bp, Artificial Sequence
  Oligonucleotide primer for the detection of SNP TSC0023429
tagggggattta

SEQ ID NO: 309237 - DNA, 12 bp, Artificial Sequence
  Oligonucleotide primer for the detection of SNP TSC0023431
aacataaaaatt

SEQ ID NO: 309238 - DNA, 12 bp, Artificial Sequence
  Oligonucleotide primer for the detection of SNP TSC0023431
aacgtaaaaatt

SEQ ID NO: 309239 - DNA, 12 bp, Artificial Sequence
  Oligonucleotide primer for the detection of SNP TSC0023432
taaccaccataa

SEQ ID NO: 309240 - DNA, 12 bp, Artificial Sequence
  Oligonucleotide primer for the detection of SNP TSC0023432
tttttggaaatt

SEQ ID NO: 309241 - DNA, 12 bp, Artificial Sequence
  Oligonucleotide primer for the detection of SNP TSC0023432
tctttaaaaatc

SEQ ID NO: 309242 - DNA, 12 bp, Artificial Sequence
  Oligonucleotide primer for the detection of SNP TSC0023432
tagttattatga

SEQ ID NO: 309243 - DNA, 12 bp, Artificial Sequence
  Oligonucleotide primer for the detection of SNP TSC0023434
tactattatttc

SEQ ID NO: 309244 - DNA, 12 bp, Artificial Sequence
  Oligonucleotide primer for the detection of SNP TSC0023434
tttaagtgttgg

SEQ ID NO: 309245 - DNA, 12 bp, Artificial Sequence
  Oligonucleotide primer for the detection of SNP TSC0023436
tatatgggttag

SEQ ID NO: 309246 - DNA, 12 bp, Artificial Sequence
  Oligonucleotide primer for the detection of SNP TSC0023436
cacataaatcaa

SEQ ID NO: 309247 - DNA, 12 bp, Artificial Sequence
  Oligonucleotide primer for the detection of SNP TSC0023436
aaggttgggagt

SEQ ID NO: 309248 - DNA, 12 bp, Artificial Sequence
  Oligonucleotide primer for the detection of SNP TSC0023437
acttaccaataa

SEQ ID NO: 309249 - DNA, 12 bp, Artificial Sequence
  Oligonucleotide primer for the detection of SNP TSC0023437
atgatttgtgtt

SEQ ID NO: 309250 - DNA, 12 bp, Artificial Sequence
  Oligonucleotide primer for the detection of SNP TSC0023437
ataacctatatt

SEQ ID NO: 309251 - DNA, 12 bp, Artificial Sequence
  Oligonucleotide primer for the detection of SNP TSC0023437
gtttattaatga

SEQ ID NO: 309252 - DNA, 12 bp, Artificial Sequence
  Oligonucleotide primer for the detection of SNP TSC0023441
aaactccataaa

SEQ ID NO: 309253 - DNA, 12 bp, Artificial Sequence
  Oligonucleotide primer for the detection of SNP TSC0023441
aattttagtgtt

SEQ ID NO: 309254 - DNA, 12 bp, Artificial Sequence
  Oligonucleotide primer for the detection of SNP TSC0023441
aatttcaatact

SEQ ID NO: 309255 - DNA, 12 bp, Artificial Sequence
  Oligonucleotide primer for the detection of SNP TSC0023441
aaaaattttata

SEQ ID NO: 309256 - DNA, 12 bp, Artificial Sequence
  Oligonucleotide primer for the detection of SNP TSC0023442
tctcataaacat

SEQ ID NO: 309257 - DNA, 12 bp, Artificial Sequence
  Oligonucleotide primer for the detection of SNP TSC0023442
taaggttatgaa

SEQ ID NO: 309258 - DNA, 12 bp, Artificial Sequence
  Oligonucleotide primer for the detection of SNP TSC0023444
taaataaacaat

SEQ ID NO: 309259 - DNA, 12 bp, Artificial Sequence
  Oligonucleotide primer for the detection of SNP TSC0023444
tagttttaaatg

SEQ ID NO: 309260 - DNA, 12 bp, Artificial Sequence
  Oligonucleotide primer for the detection of SNP TSC0023445
acaataaaatat

SEQ ID NO: 309261 - DNA, 12 bp, Artificial Sequence
  Oligonucleotide primer for the detection of SNP TSC0023445
ggaaattgatgg

SEQ ID NO: 309262 - DNA, 12 bp, Artificial Sequence
  Oligonucleotide primer for the detection of SNP TSC0023445
ggaaatcgatgg

SEQ ID NO: 309263 - DNA, 12 bp, Artificial Sequence
  Oligonucleotide primer for the detection of SNP TSC0023445
aaaaaccaataa

SEQ ID NO: 309264 - DNA, 12 bp, Artificial Sequence
  Oligonucleotide primer for the detection of SNP TSC0023445
aaaaaccgataa

SEQ ID NO: 309265 - DNA, 12 bp, Artificial Sequence
  Oligonucleotide primer for the detection of SNP TSC0023445
atagtgagatat

SEQ ID NO: 309266 - DNA, 12 bp, Artificial Sequence
  Oligonucleotide primer for the detection of SNP TSC0023447
gtataaaatagt

SEQ ID NO: 309267 - DNA, 12 bp, Artificial Sequence
  Oligonucleotide primer for the detection of SNP TSC0023447
acataaaacaac

SEQ ID NO: 309268 - DNA, 12 bp, Artificial Sequence
  Oligonucleotide primer for the detection of SNP TSC0023447
taggaagaaaaa

SEQ ID NO: 309269 - DNA, 12 bp, Artificial Sequence
  Oligonucleotide primer for the detection of SNP TSC0023448
aataacttaaat

SEQ ID NO: 309270 - DNA, 12 bp, Artificial Sequence
  Oligonucleotide primer for the detection of SNP TSC0023453
attaaaatatta

SEQ ID NO: 309271 - DNA, 12 bp, Artificial Sequence
  Oligonucleotide primer for the detection of SNP TSC0023453
taaccaaaccct

SEQ ID NO: 309272 - DNA, 12 bp, Artificial Sequence
  Oligonucleotide primer for the detection of SNP TSC0023453
attagaatgtta

SEQ ID NO: 309273 - DNA, 12 bp, Artificial Sequence
  Oligonucleotide primer for the detection of SNP TSC0023454
ataatatttcta

SEQ ID NO: 309274 - DNA, 12 bp, Artificial Sequence
  Oligonucleotide primer for the detection of SNP TSC0023454
aatgtatttttt

SEQ ID NO: 309275 - DNA, 12 bp, Artificial Sequence
  Oligonucleotide primer for the detection of SNP TSC0023454
tacaccctctaa

SEQ ID NO: 309276 - DNA, 12 bp, Artificial Sequence
  Oligonucleotide primer for the detection of SNP TSC0023454
taatgtttttat

SEQ ID NO: 309277 - DNA, 12 bp, Artificial Sequence
  Oligonucleotide primer for the detection of SNP TSC0023455
tcctatctcaac

SEQ ID NO: 309278 - DNA, 12 bp, Artificial Sequence
  Oligonucleotide primer for the detection of SNP TSC0023455
atcccaattact

SEQ ID NO: 309279 - DNA, 12 bp, Artificial Sequence
  Oligonucleotide primer for the detection of SNP TSC0023456
aaacataattcc

SEQ ID NO: 309280 - DNA, 12 bp, Artificial Sequence
  Oligonucleotide primer for the detection of SNP TSC0023456
atatattaaaag

SEQ ID NO: 309281 - DNA, 12 bp, Artificial Sequence
  Oligonucleotide primer for the detection of SNP TSC0023458
ccaaactatccc

SEQ ID NO: 309282 - DNA, 12 bp, Artificial Sequence
  Oligonucleotide primer for the detection of SNP TSC0023458
tattaatttttg

SEQ ID NO: 309283 - DNA, 12 bp, Artificial Sequence
  Oligonucleotide primer for the detection of SNP TSC0023460
cacaaataaaac

SEQ ID NO: 309284 - DNA, 12 bp, Artificial Sequence
  Oligonucleotide primer for the detection of SNP TSC0023460
ttgtgtgattta

SEQ ID NO: 309285 - DNA, 12 bp, Artificial Sequence
  Oligonucleotide primer for the detection of SNP TSC0023460
ttatataattta

SEQ ID NO: 309286 - DNA, 12 bp, Artificial Sequence
  Oligonucleotide primer for the detection of SNP TSC0023460
tataagtgaagt

SEQ ID NO: 309287 - DNA, 12 bp, Artificial Sequence
  Oligonucleotide primer for the detection of SNP TSC0023461
ctccttaccccc

SEQ ID NO: 309288 - DNA, 12 bp, Artificial Sequence
  Oligonucleotide primer for the detection of SNP TSC0023461
gtgtttggtttg

SEQ ID NO: 309289 - DNA, 12 bp, Artificial Sequence
  Oligonukleotid-Primer
gtgttcggtttg

SEQ ID NO: 309290 - DNA, 12 bp, Artificial Sequence
  Oligonucleotide primer for the detection of SNP TSC0023461
atactcaaccta

SEQ ID NO: 309291 - DNA, 12 bp, Artificial Sequence
  Oligonucleotide primer for the detection of SNP TSC0023461
atactcgaccta

SEQ ID NO: 309292 - DNA, 12 bp, Artificial Sequence
  Oligonucleotide primer for the detection of SNP TSC0023465
cctaacattcaa

SEQ ID NO: 309293 - DNA, 12 bp, Artificial Sequence
  Oligonucleotide primer for the detection of SNP TSC0023465
tgtggaggaggt

SEQ ID NO: 309294 - DNA, 12 bp, Artificial Sequence
  Oligonucleotide primer for the detection of SNP TSC0023465
tataaaaaaaac

SEQ ID NO: 309295 - DNA, 12 bp, Artificial Sequence
  Oligonucleotide primer for the detection of SNP TSC0023465
tttggtatttag

SEQ ID NO: 309296 - DNA, 12 bp, Artificial Sequence
  Oligonucleotide primer for the detection of SNP TSC0023469
aaccctccaacc

SEQ ID NO: 309297 - DNA, 12 bp, Artificial Sequence
  Oligonucleotide primer for the detection of SNP TSC0023469
gaccctccaacc

SEQ ID NO: 309298 - DNA, 12 bp, Artificial Sequence
  Oligonucleotide primer for the detection of SNP TSC0023469
aggagaagaagt

SEQ ID NO: 309299 - DNA, 12 bp, Artificial Sequence
  Oligonucleotide primer for the detection of SNP TSC0023469
aggagaagaagc

SEQ ID NO: 309300 - DNA, 12 bp, Artificial Sequence
  Oligonucleotide primer for the detection of SNP TSC0023470
taataactatta

SEQ ID NO: 309301 - DNA, 12 bp, Artificial Sequence
  Oligonucleotide primer for the detection of SNP TSC0023470
tagagtataata

SEQ ID NO: 309302 - DNA, 12 bp, Artificial Sequence
  Oligonucleotide primer for the detection of SNP TSC0023470
caaaacacaata

SEQ ID NO: 309303 - DNA, 12 bp, Artificial Sequence
  Oligonucleotide primer for the detection of SNP TSC0023470
tggtagttattg

SEQ ID NO: 309304 - DNA, 12 bp, Artificial Sequence
  Oligonucleotide primer for the detection of SNP TSC0023471
cacataattaaa

SEQ ID NO: 309305 - DNA, 12 bp, Artificial Sequence
  Oligonucleotide primer for the detection of SNP TSC0023471
ttttaataatag

SEQ ID NO: 309306 - DNA, 12 bp, Artificial Sequence
  Oligonucleotide primer for the detection of SNP TSC0023471
ttttaacaataa

SEQ ID NO: 309307 - DNA, 12 bp, Artificial Sequence
  Oligonucleotide primer for the detection of SNP TSC0023471
tatataattaaa

SEQ ID NO: 309308 - DNA, 12 bp, Artificial Sequence
  Oligonucleotide primer for the detection of SNP TSC0023472
aatagaaaaaaa

SEQ ID NO: 309309 - DNA, 12 bp, Artificial Sequence
  Oligonucleotide primer for the detection of SNP TSC0023472
tgtttttttggg

SEQ ID NO: 309310 - DNA, 12 bp, Artificial Sequence
  Oligonucleotide primer for the detection of SNP TSC0023473
cccaccaaacat

SEQ ID NO: 309311 - DNA, 12 bp, Artificial Sequence
  Oligonucleotide primer for the detection of SNP TSC0023473
tttgaaggatag

SEQ ID NO: 309312 - DNA, 12 bp, Artificial Sequence
  Oligonucleotide primer for the detection of SNP TSC0023474
aaaaaaacgtaa

SEQ ID NO: 309313 - DNA, 12 bp, Artificial Sequence
  Oligonucleotide primer for the detection of SNP TSC0023474
gggtgttatttt

SEQ ID NO: 309314 - DNA, 12 bp, Artificial Sequence
  Oligonucleotide primer for the detection of SNP TSC0023474
aaatactacctc

SEQ ID NO: 309315 - DNA, 12 bp, Artificial Sequence
  Oligonucleotide primer for the detection of SNP TSC0023474
agaagagtgtga

SEQ ID NO: 309316 - DNA, 12 bp, Artificial Sequence
  Oligonucleotide primer for the detection of SNP TSC0023474
agaagagcgtga

SEQ ID NO: 309317 - DNA, 12 bp, Artificial Sequence
  Oligonucleotide primer for the detection of SNP TSC0023477
gtatgggtatag

SEQ ID NO: 309318 - DNA, 12 bp, Artificial Sequence
  Oligonucleotide primer for the detection of SNP TSC0023477
acataaacacaa

SEQ ID NO: 309319 - DNA, 12 bp, Artificial Sequence
  Oligonucleotide primer for the detection of SNP TSC0023477
agttggggttgt

SEQ ID NO: 309320 - DNA, 12 bp, Artificial Sequence
  Oligonucleotide primer for the detection of SNP TSC0023480
cacaaactatct

SEQ ID NO: 309321 - DNA, 12 bp, Artificial Sequence
  Oligonucleotide primer for the detection of SNP TSC0023480
tgtgttgtttaa

SEQ ID NO: 309322 - DNA, 12 bp, Artificial Sequence
  Oligonucleotide primer for the detection of SNP TSC0023480
tgtgtcgtttaa

SEQ ID NO: 309323 - DNA, 12 bp, Artificial Sequence
  Oligonucleotide primer for the detection of SNP TSC0023481
tttcttccataa

SEQ ID NO: 309324 - DNA, 12 bp, Artificial Sequence
  Oligonucleotide primer for the detection of SNP TSC0023481
acacactaatat

SEQ ID NO: 309325 - DNA, 12 bp, Artificial Sequence
  Oligonucleotide primer for the detection of SNP TSC0023482
accaaccttaac

SEQ ID NO: 309326 - DNA, 12 bp, Artificial Sequence
  Oligonucleotide primer for the detection of SNP TSC0023482
gtttagatttgg

SEQ ID NO: 309327 - DNA, 12 bp, Artificial Sequence
  Oligonucleotide primer for the detection of SNP TSC0023483
tcctaattaata

SEQ ID NO: 309328 - DNA, 12 bp, Artificial Sequence
  Oligonucleotide primer for the detection of SNP TSC0023483
ataatatttggg

SEQ ID NO: 309329 - DNA, 12 bp, Artificial Sequence
  Oligonucleotide primer for the detection of SNP TSC0023483
ataatacctaaa

SEQ ID NO: 309330 - DNA, 12 bp, Artificial Sequence
  Oligonucleotide primer for the detection of SNP TSC0023483
ttttagttggtg

SEQ ID NO: 309331 - DNA, 12 bp, Artificial Sequence
  Oligonucleotide primer for the detection of SNP TSC0023486
tttatcaaaact

SEQ ID NO: 309332 - DNA, 12 bp, Artificial Sequence
  Oligonucleotide primer for the detection of SNP TSC0023487
tatcaaatacat

SEQ ID NO: 309333 - DNA, 12 bp, Artificial Sequence
  Oligonucleotide primer for the detection of SNP TSC0023487
ttatttgagata

SEQ ID NO: 309334 - DNA, 12 bp, Artificial Sequence
  Oligonucleotide primer for the detection of SNP TSC0023487
tattaaatgtat

SEQ ID NO: 309335 - DNA, 12 bp, Artificial Sequence
  Oligonucleotide primer for the detection of SNP TSC0023488
actttaaaaatc

SEQ ID NO: 309336 - DNA, 12 bp, Artificial Sequence
  Oligonucleotide primer for the detection of SNP TSC0023488
ttttgtaagtga

SEQ ID NO: 309337 - DNA, 12 bp, Artificial Sequence
  Oligonucleotide primer for the detection of SNP TSC0023489
aaaaaaatacct

SEQ ID NO: 309338 - DNA, 12 bp, Artificial Sequence
  Oligonucleotide primer for the detection of SNP TSC0023489
ttattttttata

SEQ ID NO: 309339 - DNA, 12 bp, Artificial Sequence
  Oligonucleotide primer for the detection of SNP TSC0023491
acaaacttccta

SEQ ID NO: 309340 - DNA, 12 bp, Artificial Sequence
  Oligonucleotide primer for the detection of SNP TSC0023491
tagagtggagat

SEQ ID NO: 309341 - DNA, 12 bp, Artificial Sequence
  Oligonucleotide primer for the detection of SNP TSC0023491
tagagcggagat

SEQ ID NO: 309342 - DNA, 12 bp, Artificial Sequence
  Oligonucleotide primer for the detection of SNP TSC0023491
caaaacaaaaac

SEQ ID NO: 309343 - DNA, 12 bp, Artificial Sequence
  Oligonucleotide primer for the detection of SNP TSC0023491
caaaacgaaaac

SEQ ID NO: 309344 - DNA, 12 bp, Artificial Sequence
  Oligonucleotide primer for the detection of SNP TSC0023491
ataagttttttg

SEQ ID NO: 309345 - DNA, 12 bp, Artificial Sequence
  Oligonucleotide primer for the detection of SNP TSC0023493
caccaaactcca

SEQ ID NO: 309346 - DNA, 12 bp, Artificial Sequence
  Oligonucleotide primer for the detection of SNP TSC0023493
caccaaactccg

SEQ ID NO: 309347 - DNA, 12 bp, Artificial Sequence
  Oligonucleotide primer for the detection of SNP TSC0023493
aggaggttgtat

SEQ ID NO: 309348 - DNA, 12 bp, Artificial Sequence
  Oligonucleotide primer for the detection of SNP TSC0023493
aaaaaactacac

SEQ ID NO: 309349 - DNA, 12 bp, Artificial Sequence
  Oligonucleotide primer for the detection of SNP TSC0023493
tattaagttttg

SEQ ID NO: 309350 - DNA, 12 bp, Artificial Sequence
  Oligonucleotide primer for the detection of SNP TSC0023493
tattaagtttcg

SEQ ID NO: 309351 - DNA, 12 bp, Artificial Sequence
  Oligonucleotide primer for the detection of SNP TSC0023494
aaaacattaaaa

SEQ ID NO: 309352 - DNA, 12 bp, Artificial Sequence
  Oligonucleotide primer for the detection of SNP TSC0023494
gaaaattttggt

SEQ ID NO: 309353 - DNA, 12 bp, Artificial Sequence
  Oligonucleotide primer for the detection of SNP TSC0023494
gaaaattttggc

SEQ ID NO: 309354 - DNA, 12 bp, Artificial Sequence
  Oligonucleotide primer for the detection of SNP TSC0023494
gaatattgaggt

SEQ ID NO: 309355 - DNA, 12 bp, Artificial Sequence
  Oligonucleotide primer for the detection of SNP TSC0023495
ccaattctaaat

SEQ ID NO: 309356 - DNA, 12 bp, Artificial Sequence
  Oligonucleotide primer for the detection of SNP TSC0023495
ccgattctaaat

SEQ ID NO: 309357 - DNA, 12 bp, Artificial Sequence
  Oligonucleotide primer for the detection of SNP TSC0023495
gtaattggtgtg

SEQ ID NO: 309358 - DNA, 12 bp, Artificial Sequence
  Oligonucleotide primer for the detection of SNP TSC0023495
gtaattggcgtg

SEQ ID NO: 309359 - DNA, 12 bp, Artificial Sequence
  Oligonucleotide primer for the detection of SNP TSC0023496
aaaattcactaa

SEQ ID NO: 309360 - DNA, 12 bp, Artificial Sequence
  Oligonucleotide primer for the detection of SNP TSC0023496
aaaattcgctaa

SEQ ID NO: 309361 - DNA, 12 bp, Artificial Sequence
  Oligonucleotide primer for the detection of SNP TSC0023496
tgaatttagaat

SEQ ID NO: 309362 - DNA, 12 bp, Artificial Sequence
  Oligonucleotide primer for the detection of SNP TSC0023496
taaatccaaaac

SEQ ID NO: 309363 - DNA, 12 bp, Artificial Sequence
  Oligonucleotide primer for the detection of SNP TSC0023496
gggatttgttga

SEQ ID NO: 309364 - DNA, 12 bp, Artificial Sequence
  Oligonucleotide primer for the detection of SNP TSC0023496
gggattcgttga

SEQ ID NO: 309365 - DNA, 12 bp, Artificial Sequence
  Oligonucleotide primer for the detection of SNP TSC0023497
taatgaataaat

SEQ ID NO: 309366 - DNA, 12 bp, Artificial Sequence
  Oligonucleotide primer for the detection of SNP TSC0023497
taataaataaat

SEQ ID NO: 309367 - DNA, 12 bp, Artificial Sequence
  Oligonucleotide primer for the detection of SNP TSC0023497
atgatttttatg

SEQ ID NO: 309368 - DNA, 12 bp, Artificial Sequence
  Oligonucleotide primer for the detection of SNP TSC0023499
tacaaatacata

SEQ ID NO: 309369 - DNA, 12 bp, Artificial Sequence
  Oligonucleotide primer for the detection of SNP TSC0023499
ttaaccaaacat

SEQ ID NO: 309370 - DNA, 12 bp, Artificial Sequence
  Oligonucleotide primer for the detection of SNP TSC0023500
atcctttataat

SEQ ID NO: 309371 - DNA, 12 bp, Artificial Sequence
  Oligonucleotide primer for the detection of SNP TSC0023500
ggaatatattta

SEQ ID NO: 309372 - DNA, 12 bp, Artificial Sequence
  Oligonucleotide primer for the detection of SNP TSC0023500
aaaacacattta

SEQ ID NO: 309373 - DNA, 12 bp, Artificial Sequence
  Oligonucleotide primer for the detection of SNP TSC0023500
attttttgtaat

SEQ ID NO: 309374 - DNA, 12 bp, Artificial Sequence
  Oligonukleotid-Primer
tctaatacacac

SEQ ID NO: 309375 - DNA, 12 bp, Artificial Sequence
  Oligonucleotide primer for the detection of SNP TSC0023501
tctaatacacgc

SEQ ID NO: 309376 - DNA, 12 bp, Artificial Sequence
  Oligonucleotide primer for the detection of SNP TSC0023501
tttttatattta

SEQ ID NO: 309377 - DNA, 12 bp, Artificial Sequence
  Oligonucleotide primer for the detection of SNP TSC0023502
atttctaataca

SEQ ID NO: 309378 - DNA, 12 bp, Artificial Sequence
  Oligonucleotide primer for the detection of SNP TSC0023502
gtttttatattt

SEQ ID NO: 309379 - DNA, 12 bp, Artificial Sequence
  Oligonucleotide primer for the detection of SNP TSC0023502
attctcacactc

SEQ ID NO: 309380 - DNA, 12 bp, Artificial Sequence
  Oligonucleotide primer for the detection of SNP TSC0023502
gtttttgatgta

SEQ ID NO: 309381 - DNA, 12 bp, Artificial Sequence
  Oligonucleotide primer for the detection of SNP TSC0023503
ctcattccctca

SEQ ID NO: 309382 - DNA, 12 bp, Artificial Sequence
  Oligonucleotide primer for the detection of SNP TSC0023503
gaaatttttgtt

SEQ ID NO: 309383 - DNA, 12 bp, Artificial Sequence
  Oligonucleotide primer for the detection of SNP TSC0023504
tctcattccctc

SEQ ID NO: 309384 - DNA, 12 bp, Artificial Sequence
  Oligonucleotide primer for the detection of SNP TSC0023504
agtggatagaaa

SEQ ID NO: 309385 - DNA, 12 bp, Artificial Sequence
  Oligonucleotide primer for the detection of SNP TSC0023505
tcttaacaacat

SEQ ID NO: 309386 - DNA, 12 bp, Artificial Sequence
  Oligonucleotide primer for the detection of SNP TSC0023505
tttgggatgata

SEQ ID NO: 309387 - DNA, 12 bp, Artificial Sequence
  Oligonucleotide primer for the detection of SNP TSC0023506
atattttaaaac

SEQ ID NO: 309388 - DNA, 12 bp, Artificial Sequence
  Oligonucleotide primer for the detection of SNP TSC0023506
taaagttaatga

SEQ ID NO: 309389 - DNA, 12 bp, Artificial Sequence
  Oligonucleotide primer for the detection of SNP TSC0023506
caaaactaataa

SEQ ID NO: 309390 - DNA, 12 bp, Artificial Sequence
  Oligonucleotide primer for the detection of SNP TSC0023506
gtattttgggat

SEQ ID NO: 309391 - DNA, 12 bp, Artificial Sequence
  Oligonucleotide primer for the detection of SNP TSC0023507
actttccaaccc

SEQ ID NO: 309392 - DNA, 12 bp, Artificial Sequence
  Oligonucleotide primer for the detection of SNP TSC0023507
actttccgaccc

SEQ ID NO: 309393 - DNA, 12 bp, Artificial Sequence
  Oligonucleotide primer for the detection of SNP TSC0023507
tagtattggtaa

SEQ ID NO: 309394 - DNA, 12 bp, Artificial Sequence
  Oligonucleotide primer for the detection of SNP TSC0023508
catcccataaat

SEQ ID NO: 309395 - DNA, 12 bp, Artificial Sequence
  Oligonucleotide primer for the detection of SNP TSC0023508
tttattaggtta

SEQ ID NO: 309396 - DNA, 12 bp, Artificial Sequence
  Oligonucleotide primer for the detection of SNP TSC0023508
ctactaaatcaa

SEQ ID NO: 309397 - DNA, 12 bp, Artificial Sequence
  Oligonucleotide primer for the detection of SNP TSC0023509
aactccaaatcc

SEQ ID NO: 309398 - DNA, 12 bp, Artificial Sequence
  Oligonucleotide primer for the detection of SNP TSC0023509
gactccaaatcc

SEQ ID NO: 309399 - DNA, 12 bp, Artificial Sequence
  Oligonucleotide primer for the detection of SNP TSC0023509
gtttgtgttttg

SEQ ID NO: 309400 - DNA, 12 bp, Artificial Sequence
  Oligonucleotide primer for the detection of SNP TSC0023509
gtttgtgtttcg

SEQ ID NO: 309401 - DNA, 12 bp, Artificial Sequence
  Oligonucleotide primer for the detection of SNP TSC0023509
atctatattcca

SEQ ID NO: 309402 - DNA, 12 bp, Artificial Sequence
  Oligonucleotide primer for the detection of SNP TSC0023509
atctatattccg

SEQ ID NO: 309403 - DNA, 12 bp, Artificial Sequence
  Oligonucleotide primer for the detection of SNP TSC0023509
gattttagattt

SEQ ID NO: 309404 - DNA, 12 bp, Artificial Sequence
  Oligonucleotide primer for the detection of SNP TSC0023509
gattttagattc

SEQ ID NO: 309405 - DNA, 12 bp, Artificial Sequence
  Oligonucleotide primer for the detection of SNP TSC0023510
caactcccctcc

SEQ ID NO: 309406 - DNA, 12 bp, Artificial Sequence
  Oligonucleotide primer for the detection of SNP TSC0023510
cgactcccctcc

SEQ ID NO: 309407 - DNA, 12 bp, Artificial Sequence
  Oligonucleotide primer for the detection of SNP TSC0023510
tatttttagaag

SEQ ID NO: 309408 - DNA, 12 bp, Artificial Sequence
  Oligonucleotide primer for the detection of SNP TSC0023510
cattttcaaaaa

SEQ ID NO: 309409 - DNA, 12 bp, Artificial Sequence
  Oligonucleotide primer for the detection of SNP TSC0023511
aatgttataggt

SEQ ID NO: 309410 - DNA, 12 bp, Artificial Sequence
  Oligonucleotide primer for the detection of SNP TSC0023511
aatattataaat

SEQ ID NO: 309411 - DNA, 12 bp, Artificial Sequence
  Oligonucleotide primer for the detection of SNP TSC0023511
gtaataaagata

SEQ ID NO: 309412 - DNA, 12 bp, Artificial Sequence
  Oligonucleotide primer for the detection of SNP TSC0023517
aaaaacaaatac

SEQ ID NO: 309413 - DNA, 12 bp, Artificial Sequence
  Oligonucleotide primer for the detection of SNP TSC0023517
tgtgttttgtga

SEQ ID NO: 309414 - DNA, 12 bp, Artificial Sequence
  Oligonucleotide primer for the detection of SNP TSC0023518
accccctccaac

SEQ ID NO: 309415 - DNA, 12 bp, Artificial Sequence
  Oligonucleotide primer for the detection of SNP TSC0023518
tagtaggagatg

SEQ ID NO: 309416 - DNA, 12 bp, Artificial Sequence
  Oligonucleotide primer for the detection of SNP TSC0023518
caacaaaaaata

SEQ ID NO: 309417 - DNA, 12 bp, Artificial Sequence
  Oligonucleotide primer for the detection of SNP TSC0023519
ataacttaataa

SEQ ID NO: 309418 - DNA, 12 bp, Artificial Sequence
  Oligonucleotide primer for the detection of SNP TSC0023519
aaattagttagt

SEQ ID NO: 309419 - DNA, 12 bp, Artificial Sequence
  Oligonucleotide primer for the detection of SNP TSC0023519
aaatcaattaac

SEQ ID NO: 309420 - DNA, 12 bp, Artificial Sequence
  Oligonucleotide primer for the detection of SNP TSC0023519
gtagtttaatga

SEQ ID NO: 309421 - DNA, 12 bp, Artificial Sequence
  Oligonucleotide primer for the detection of SNP TSC0023520
agttagtagtga

SEQ ID NO: 309422 - DNA, 12 bp, Artificial Sequence
  Oligonucleotide primer for the detection of SNP TSC0023520
agttagtagcga

SEQ ID NO: 309423 - DNA, 12 bp, Artificial Sequence
  Oligonucleotide primer for the detection of SNP TSC0023522
cctttctaataa

SEQ ID NO: 309424 - DNA, 12 bp, Artificial Sequence
  Oligonucleotide primer for the detection of SNP TSC0023522
atggttatattt

SEQ ID NO: 309425 - DNA, 12 bp, Artificial Sequence
  Oligonucleotide primer for the detection of SNP TSC0023522
ataatcacactt

SEQ ID NO: 309426 - DNA, 12 bp, Artificial Sequence
  Oligonucleotide primer for the detection of SNP TSC0023522
tttttttggtgg

SEQ ID NO: 309427 - DNA, 12 bp, Artificial Sequence
  Oligonucleotide primer for the detection of SNP TSC0023525
ttttaggcgatt

SEQ ID NO: 309428 - DNA, 12 bp, Artificial Sequence
  Oligonucleotide primer for the detection of SNP TSC0023525
ctccaaacaacc

SEQ ID NO: 309429 - DNA, 12 bp, Artificial Sequence
  Oligonucleotide primer for the detection of SNP TSC0023525
ctccaaacgacc

SEQ ID NO: 309430 - DNA, 12 bp, Artificial Sequence
  Oligonucleotide primer for the detection of SNP TSC0023525
ggagaagaattt

SEQ ID NO: 309431 - DNA, 12 bp, Artificial Sequence
  Oligonucleotide primer for the detection of SNP TSC0023525
ggagaagaattc

SEQ ID NO: 309432 - DNA, 12 bp, Artificial Sequence
  Oligonucleotide primer for the detection of SNP TSC0023527
tcaattctacct

SEQ ID NO: 309433 - DNA, 12 bp, Artificial Sequence
  Oligonucleotide primer for the detection of SNP TSC0023527
atttgttttgag

SEQ ID NO: 309434 - DNA, 12 bp, Artificial Sequence
  Oligonucleotide primer for the detection of SNP TSC0023527
attcgttttgag

SEQ ID NO: 309435 - DNA, 12 bp, Artificial Sequence
  Oligonucleotide primer for the detection of SNP TSC0023528
caactaattttc

SEQ ID NO: 309436 - DNA, 12 bp, Artificial Sequence
  Oligonucleotide primer for the detection of SNP TSC0023530
cttctttattac

SEQ ID NO: 309437 - DNA, 12 bp, Artificial Sequence
  Oligonucleotide primer for the detection of SNP TSC0023530
cattttctaaaa

SEQ ID NO: 309438 - DNA, 12 bp, Artificial Sequence
  Oligonucleotide primer for the detection of SNP TSC0023530
tttttttgttac

SEQ ID NO: 309439 - DNA, 12 bp, Artificial Sequence
  Oligonucleotide primer for the detection of SNP TSC0023531
aatccaatctca

SEQ ID NO: 309440 - DNA, 12 bp, Artificial Sequence
  Oligonucleotide primer for the detection of SNP TSC0023531
atgagatagttt

SEQ ID NO: 309441 - DNA, 12 bp, Artificial Sequence
  Oligonucleotide primer for the detection of SNP TSC0023531
ataaaacaaccc

SEQ ID NO: 309442 - DNA, 12 bp, Artificial Sequence
  Oligonucleotide primer for the detection of SNP TSC0023532
actaaaaaataa

SEQ ID NO: 309443 - DNA, 12 bp, Artificial Sequence
  Oligonucleotide primer for the detection of SNP TSC0023532
atagtgataatg

SEQ ID NO: 309444 - DNA, 12 bp, Artificial Sequence
  Oligonucleotide primer for the detection of SNP TSC0023532
caataataataa

SEQ ID NO: 309445 - DNA, 12 bp, Artificial Sequence
  Oligonucleotide primer for the detection of SNP TSC0023532
ttaaaaggtggt

SEQ ID NO: 309446 - DNA, 12 bp, Artificial Sequence
  Oligonucleotide primer for the detection of SNP TSC0023533
tatttatttata

SEQ ID NO: 309447 - DNA, 12 bp, Artificial Sequence
  Oligonucleotide primer for the detection of SNP TSC0023533
cacctatctata

SEQ ID NO: 309448 - DNA, 12 bp, Artificial Sequence
  Oligonucleotide primer for the detection of SNP TSC0023533
atagaatttata

SEQ ID NO: 309449 - DNA, 12 bp, Artificial Sequence
  Oligonucleotide primer for the detection of SNP TSC0023534
ctccccaatctt

SEQ ID NO: 309450 - DNA, 12 bp, Artificial Sequence
  Oligonucleotide primer for the detection of SNP TSC0023534
ctccccgatctt

SEQ ID NO: 309451 - DNA, 12 bp, Artificial Sequence
  Oligonucleotide primer for the detection of SNP TSC0023534
gatttagtagag

SEQ ID NO: 309452 - DNA, 12 bp, Artificial Sequence
  Oligonucleotide primer for the detection of SNP TSC0023535
taaggtaatttt

SEQ ID NO: 309453 - DNA, 12 bp, Artificial Sequence
  Oligonucleotide primer for the detection of SNP TSC0023535
attaaaacaatt

SEQ ID NO: 309454 - DNA, 12 bp, Artificial Sequence
  Oligonucleotide primer for the detection of SNP TSC0023535
agagaaagatgt

SEQ ID NO: 309455 - DNA, 12 bp, Artificial Sequence
  Oligonucleotide primer for the detection of SNP TSC0023536
attaatcatata

SEQ ID NO: 309456 - DNA, 12 bp, Artificial Sequence
  Oligonucleotide primer for the detection of SNP TSC0023536
attatctcttac

SEQ ID NO: 309457 - DNA, 12 bp, Artificial Sequence
  Oligonucleotide primer for the detection of SNP TSC0023536
aattgattatat

SEQ ID NO: 309458 - DNA, 12 bp, Artificial Sequence
  Oligonucleotide primer for the detection of SNP TSC0023537
aaacttaattct

SEQ ID NO: 309459 - DNA, 12 bp, Artificial Sequence
  Oligonukleotid-Primer
ttttgggattag

SEQ ID NO: 309460 - DNA, 12 bp, Artificial Sequence
  Oligonucleotide primer for the detection of SNP TSC0023541
ttcacttcaaac

SEQ ID NO: 309461 - DNA, 12 bp, Artificial Sequence
  Oligonucleotide primer for the detection of SNP TSC0023541
aattagaggtga

SEQ ID NO: 309462 - DNA, 12 bp, Artificial Sequence
  Oligonucleotide primer for the detection of SNP TSC0023541
tttattttaagt

SEQ ID NO: 309463 - DNA, 12 bp, Artificial Sequence
  Oligonukleotid-Primer
cacaaaaattct

SEQ ID NO: 309464 - DNA, 12 bp, Artificial Sequence
  Oligonucleotide primer for the detection of SNP TSC0023542
gggtaaaaaaga

SEQ ID NO: 309465 - DNA, 12 bp, Artificial Sequence
  Oligonucleotide primer for the detection of SNP TSC0023543
aaaacttaaatc

SEQ ID NO: 309466 - DNA, 12 bp, Artificial Sequence
  Oligonucleotide primer for the detection of SNP TSC0023543
tatctctcccct

SEQ ID NO: 309467 - DNA, 12 bp, Artificial Sequence
  Oligonucleotide primer for the detection of SNP TSC0023543
ggagtttaaatt

SEQ ID NO: 309468 - DNA, 12 bp, Artificial Sequence
  Oligonucleotide primer for the detection of SNP TSC0023546
aatctctcattc

SEQ ID NO: 309469 - DNA, 12 bp, Artificial Sequence
  Oligonucleotide primer for the detection of SNP TSC0023546
gaaattatttat

SEQ ID NO: 309470 - DNA, 12 bp, Artificial Sequence
  Oligonucleotide primer for the detection of SNP TSC0023550
ccctccaaaatt

SEQ ID NO: 309471 - DNA, 12 bp, Artificial Sequence
  Oligonucleotide primer for the detection of SNP TSC0023550
ccctccgaaatt

SEQ ID NO: 309472 - DNA, 12 bp, Artificial Sequence
  Oligonucleotide primer for the detection of SNP TSC0023550
gggtagtggtag

SEQ ID NO: 309473 - DNA, 12 bp, Artificial Sequence
  Oligonucleotide primer for the detection of SNP TSC0023551
actaaaaccaaa

SEQ ID NO: 309474 - DNA, 12 bp, Artificial Sequence
  Oligonucleotide primer for the detection of SNP TSC0023551
atgaggtttggg

SEQ ID NO: 309475 - DNA, 12 bp, Artificial Sequence
  Oligonucleotide primer for the detection of SNP TSC0023551
acgaggtttggg

SEQ ID NO: 309476 - DNA, 12 bp, Artificial Sequence
  Oligonucleotide primer for the detection of SNP TSC0023551
acgaaacctaaa

SEQ ID NO: 309477 - DNA, 12 bp, Artificial Sequence
  Oligonucleotide primer for the detection of SNP TSC0023551
tggggttaaatt

SEQ ID NO: 309478 - DNA, 12 bp, Artificial Sequence
  Oligonucleotide primer for the detection of SNP TSC0023554
tttcctttataa

SEQ ID NO: 309479 - DNA, 12 bp, Artificial Sequence
  Oligonucleotide primer for the detection of SNP TSC0023554
gaaaagttaatt

SEQ ID NO: 309480 - DNA, 12 bp, Artificial Sequence
  Oligonucleotide primer for the detection of SNP TSC0023554
aaaaaatcaatc

SEQ ID NO: 309481 - DNA, 12 bp, Artificial Sequence
  Oligonucleotide primer for the detection of SNP TSC0023554
tttttttgtgat

SEQ ID NO: 309482 - DNA, 12 bp, Artificial Sequence
  Oligonucleotide primer for the detection of SNP TSC0023554
tttttttgtgac

SEQ ID NO: 309483 - DNA, 12 bp, Artificial Sequence
  Oligonucleotide primer for the detection of SNP TSC0023555
ctacaaccacac

SEQ ID NO: 309484 - DNA, 12 bp, Artificial Sequence
  Oligonucleotide primer for the detection of SNP TSC0023555
ctacaaccacgc

SEQ ID NO: 309485 - DNA, 12 bp, Artificial Sequence
  Oligonucleotide primer for the detection of SNP TSC0023555
ctacgaccacac

SEQ ID NO: 309486 - DNA, 12 bp, Artificial Sequence
  Oligonucleotide primer for the detection of SNP TSC0023555
ctacgaccacgc

SEQ ID NO: 309487 - DNA, 12 bp, Artificial Sequence
  Oligonucleotide primer for the detection of SNP TSC0023555
aaaaattagtcg

SEQ ID NO: 309488 - DNA, 12 bp, Artificial Sequence
  Oligonucleotide primer for the detection of SNP TSC0023556
acaaacacctac

SEQ ID NO: 309489 - DNA, 12 bp, Artificial Sequence
  Oligonucleotide primer for the detection of SNP TSC0023556
acaaacgcctac

SEQ ID NO: 309490 - DNA, 12 bp, Artificial Sequence
  Oligonucleotide primer for the detection of SNP TSC0023556
gttgagtgtggt

SEQ ID NO: 309491 - DNA, 12 bp, Artificial Sequence
  Oligonucleotide primer for the detection of SNP TSC0023556
gtcgagtgtggt

SEQ ID NO: 309492 - DNA, 12 bp, Artificial Sequence
  Oligonucleotide primer for the detection of SNP TSC0023556
gttgagcgtggt

SEQ ID NO: 309493 - DNA, 12 bp, Artificial Sequence
  Oligonucleotide primer for the detection of SNP TSC0023556
gtcgagcgtggt

SEQ ID NO: 309494 - DNA, 12 bp, Artificial Sequence
  Oligonucleotide primer for the detection of SNP TSC0023556
aaccaaacataa

SEQ ID NO: 309495 - DNA, 12 bp, Artificial Sequence
  Oligonucleotide primer for the detection of SNP TSC0023556
aaccaaacgtaa

SEQ ID NO: 309496 - DNA, 12 bp, Artificial Sequence
  Oligonucleotide primer for the detection of SNP TSC0023556
aaccgaacataa

SEQ ID NO: 309497 - DNA, 12 bp, Artificial Sequence
  Oligonucleotide primer for the detection of SNP TSC0023556
aaccgaacgtaa

SEQ ID NO: 309498 - DNA, 12 bp, Artificial Sequence
  Oligonucleotide primer for the detection of SNP TSC0023556
ataggcgtttgt

SEQ ID NO: 309499 - DNA, 12 bp, Artificial Sequence
  Oligonucleotide primer for the detection of SNP TSC0023556
ataggtgtttgc

SEQ ID NO: 309500 - DNA, 12 bp, Artificial Sequence
  Oligonucleotide primer for the detection of SNP TSC0023556
ataggcgtttgc

SEQ ID NO: 309501 - DNA, 12 bp, Artificial Sequence
  Oligonucleotide primer for the detection of SNP TSC0023557
tgagtgtggttg

SEQ ID NO: 309502 - DNA, 12 bp, Artificial Sequence
  Oligonucleotide primer for the detection of SNP TSC0023557
cgagtgtggttg

SEQ ID NO: 309503 - DNA, 12 bp, Artificial Sequence
  Oligonucleotide primer for the detection of SNP TSC0023557
tgagcgtggttg

SEQ ID NO: 309504 - DNA, 12 bp, Artificial Sequence
  Oligonucleotide primer for the detection of SNP TSC0023557
tgagtgtggtcg

SEQ ID NO: 309505 - DNA, 12 bp, Artificial Sequence
  Oligonucleotide primer for the detection of SNP TSC0023557
cgagcgtggttg

SEQ ID NO: 309506 - DNA, 12 bp, Artificial Sequence
  Oligonucleotide primer for the detection of SNP TSC0023557
cgagtgtggtcg

SEQ ID NO: 309507 - DNA, 12 bp, Artificial Sequence
  Oligonucleotide primer for the detection of SNP TSC0023557
tgagcgtggtcg

SEQ ID NO: 309508 - DNA, 12 bp, Artificial Sequence
  Oligonucleotide primer for the detection of SNP TSC0023557
cgagcgtggtcg

SEQ ID NO: 309509 - DNA, 12 bp, Artificial Sequence
  Oligonucleotide primer for the detection of SNP TSC0023557
caaacataatca

SEQ ID NO: 309510 - DNA, 12 bp, Artificial Sequence
  Oligonucleotide primer for the detection of SNP TSC0023557
caaacataatcg

SEQ ID NO: 309511 - DNA, 12 bp, Artificial Sequence
  Oligonucleotide primer for the detection of SNP TSC0023557
caaacgtaatca

SEQ ID NO: 309512 - DNA, 12 bp, Artificial Sequence
  Oligonukleotid-Primer
cgaacataatca

SEQ ID NO: 309513 - DNA, 12 bp, Artificial Sequence
  Oligonucleotide primer for the detection of SNP TSC0023557
caaacgtaatcg

SEQ ID NO: 309514 - DNA, 12 bp, Artificial Sequence
  Oligonucleotide primer for the detection of SNP TSC0023557
cgaacataatcg

SEQ ID NO: 309515 - DNA, 12 bp, Artificial Sequence
  Oligonucleotide primer for the detection of SNP TSC0023557
cgaacgtaatca

SEQ ID NO: 309516 - DNA, 12 bp, Artificial Sequence
  Oligonucleotide primer for the detection of SNP TSC0023557
cgaacgtaatcg

SEQ ID NO: 309517 - DNA, 12 bp, Artificial Sequence
  Oligonucleotide primer for the detection of SNP TSC0023558
ccaacaataata

SEQ ID NO: 309518 - DNA, 12 bp, Artificial Sequence
  Oligonucleotide primer for the detection of SNP TSC0023558
aagtatggtgtt

SEQ ID NO: 309519 - DNA, 12 bp, Artificial Sequence
  Oligonucleotide primer for the detection of SNP TSC0023558
aagtatggcgtt

SEQ ID NO: 309520 - DNA, 12 bp, Artificial Sequence
  Oligonucleotide primer for the detection of SNP TSC0023558
aaacataacact

SEQ ID NO: 309521 - DNA, 12 bp, Artificial Sequence
  Oligonucleotide primer for the detection of SNP TSC0023558
aaacataacgct

SEQ ID NO: 309522 - DNA, 12 bp, Artificial Sequence
  Oligonucleotide primer for the detection of SNP TSC0023558
ttagtagtggtg

SEQ ID NO: 309523 - DNA, 12 bp, Artificial Sequence
  Oligonucleotide primer for the detection of SNP TSC0023559
acacctttcaac

SEQ ID NO: 309524 - DNA, 12 bp, Artificial Sequence
  Oligonucleotide primer for the detection of SNP TSC0023559
tgttgggagtag

SEQ ID NO: 309525 - DNA, 12 bp, Artificial Sequence
  Oligonucleotide primer for the detection of SNP TSC0023560
cctcaaaaaact

SEQ ID NO: 309526 - DNA, 12 bp, Artificial Sequence
  Oligonucleotide primer for the detection of SNP TSC0023560
cctctcaatttc

SEQ ID NO: 309527 - DNA, 12 bp, Artificial Sequence
  Oligonucleotide primer for the detection of SNP TSC0023560
ttttagaaggtt

SEQ ID NO: 309528 - DNA, 12 bp, Artificial Sequence
  Oligonucleotide primer for the detection of SNP TSC0023561
aatacatttata

SEQ ID NO: 309529 - DNA, 12 bp, Artificial Sequence
  Oligonucleotide primer for the detection of SNP TSC0023561
gaaaagtattat

SEQ ID NO: 309530 - DNA, 12 bp, Artificial Sequence
  Oligonucleotide primer for the detection of SNP TSC0023561
aaaaaaatacta

SEQ ID NO: 309531 - DNA, 12 bp, Artificial Sequence
  Oligonucleotide primer for the detection of SNP TSC0023561
gaatgtatttat

SEQ ID NO: 309532 - DNA, 12 bp, Artificial Sequence
  Oligonucleotide primer for the detection of SNP TSC0023562
taaagtgtttga

SEQ ID NO: 309533 - DNA, 12 bp, Artificial Sequence
  Oligonucleotide primer for the detection of SNP TSC0023562
taaagcgtttga

SEQ ID NO: 309534 - DNA, 12 bp, Artificial Sequence
  Oligonucleotide primer for the detection of SNP TSC0023563
atcaatatcata

SEQ ID NO: 309535 - DNA, 12 bp, Artificial Sequence
  Oligonucleotide primer for the detection of SNP TSC0023563
taattagtatgg

SEQ ID NO: 309536 - DNA, 12 bp, Artificial Sequence
  Oligonucleotide primer for the detection of SNP TSC0023563
caaccaacataa

SEQ ID NO: 309537 - DNA, 12 bp, Artificial Sequence
  Oligonucleotide primer for the detection of SNP TSC0023564
gttaattagtat

SEQ ID NO: 309538 - DNA, 12 bp, Artificial Sequence
  Oligonucleotide primer for the detection of SNP TSC0023564
aaccaacataaa

SEQ ID NO: 309539 - DNA, 12 bp, Artificial Sequence
  Oligonucleotide primer for the detection of SNP TSC0023564
gttagtattatg

SEQ ID NO: 309540 - DNA, 12 bp, Artificial Sequence
  Oligonucleotide primer for the detection of SNP TSC0023565
gtagggtggttt

SEQ ID NO: 309541 - DNA, 12 bp, Artificial Sequence
  Oligonucleotide primer for the detection of SNP TSC0023565
gtagggcggttt

SEQ ID NO: 309542 - DNA, 12 bp, Artificial Sequence
  Oligonucleotide primer for the detection of SNP TSC0023565
acaaaacaactc

SEQ ID NO: 309543 - DNA, 12 bp, Artificial Sequence
  Oligonucleotide primer for the detection of SNP TSC0023565
acaaaacgactc

SEQ ID NO: 309544 - DNA, 12 bp, Artificial Sequence
  Oligonucleotide primer for the detection of SNP TSC0023565
tggaattataga

SEQ ID NO: 309545 - DNA, 12 bp, Artificial Sequence
  Oligonucleotide primer for the detection of SNP TSC0023566
attctatacaaa

SEQ ID NO: 309546 - DNA, 12 bp, Artificial Sequence
  Oligonucleotide primer for the detection of SNP TSC0023566
gtaatttgtata

SEQ ID NO: 309547 - DNA, 12 bp, Artificial Sequence
  Oligonucleotide primer for the detection of SNP TSC0023566
ataatttacata

SEQ ID NO: 309548 - DNA, 12 bp, Artificial Sequence
  Oligonucleotide primer for the detection of SNP TSC0023566
aattttgtgtaa

SEQ ID NO: 309549 - DNA, 12 bp, Artificial Sequence
  Oligonucleotide primer for the detection of SNP TSC0023567
atttaaaattct

SEQ ID NO: 309550 - DNA, 12 bp, Artificial Sequence
  Oligonucleotide primer for the detection of SNP TSC0023567
gtttaaaattct

SEQ ID NO: 309551 - DNA, 12 bp, Artificial Sequence
  Oligonucleotide primer for the detection of SNP TSC0023567
ttgtataatttg

SEQ ID NO: 309552 - DNA, 12 bp, Artificial Sequence
  Oligonucleotide primer for the detection of SNP TSC0023567
ttacataactta

SEQ ID NO: 309553 - DNA, 12 bp, Artificial Sequence
  Oligonucleotide primer for the detection of SNP TSC0023567
gtttaaaatttt

SEQ ID NO: 309554 - DNA, 12 bp, Artificial Sequence
  Oligonucleotide primer for the detection of SNP TSC0023568
gatataaaattt

SEQ ID NO: 309555 - DNA, 12 bp, Artificial Sequence
  Oligonucleotide primer for the detection of SNP TSC0023568
gagtatgtttgg

SEQ ID NO: 309556 - DNA, 12 bp, Artificial Sequence
  Oligonucleotide primer for the detection of SNP TSC0023570
cactacccttct

SEQ ID NO: 309557 - DNA, 12 bp, Artificial Sequence
  Oligonucleotide primer for the detection of SNP TSC0023570
aggtaaagtaag

SEQ ID NO: 309558 - DNA, 12 bp, Artificial Sequence
  Oligonucleotide primer for the detection of SNP TSC0023571
aactaaaaatct

SEQ ID NO: 309559 - DNA, 12 bp, Artificial Sequence
  Oligonucleotide primer for the detection of SNP TSC0023571
atagagtttatg

SEQ ID NO: 309560 - DNA, 12 bp, Artificial Sequence
  Oligonucleotide primer for the detection of SNP TSC0023572
ttcaaaattaat

SEQ ID NO: 309561 - DNA, 12 bp, Artificial Sequence
  Oligonucleotide primer for the detection of SNP TSC0023572
ttaaattttagg

SEQ ID NO: 309562 - DNA, 12 bp, Artificial Sequence
  Oligonucleotide primer for the detection of SNP TSC0023573
aattcttacatt

SEQ ID NO: 309563 - DNA, 12 bp, Artificial Sequence
  Oligonucleotide primer for the detection of SNP TSC0023573
ttttaaagattt

SEQ ID NO: 309564 - DNA, 12 bp, Artificial Sequence
  Oligonucleotide primer for the detection of SNP TSC0023573
agtttttatatt

SEQ ID NO: 309565 - DNA, 12 bp, Artificial Sequence
  Oligonucleotide primer for the detection of SNP TSC0023574
taattaaatccc

SEQ ID NO: 309566 - DNA, 12 bp, Artificial Sequence
  Oligonucleotide primer for the detection of SNP TSC0023574
aaaaattgataa

SEQ ID NO: 309567 - DNA, 12 bp, Artificial Sequence
  Oligonucleotide primer for the detection of SNP TSC0023575
acccacctcccc

SEQ ID NO: 309568 - DNA, 12 bp, Artificial Sequence
  Oligonucleotide primer for the detection of SNP TSC0023575
acccgcctcccc

SEQ ID NO: 309569 - DNA, 12 bp, Artificial Sequence
  Oligonucleotide primer for the detection of SNP TSC0023575
gcccacctcccc

SEQ ID NO: 309570 - DNA, 12 bp, Artificial Sequence
  Oligonucleotide primer for the detection of SNP TSC0023575
gcccgcctcccc

SEQ ID NO: 309571 - DNA, 12 bp, Artificial Sequence
  Oligonucleotide primer for the detection of SNP TSC0023575
gtttgtgtgtgg

SEQ ID NO: 309572 - DNA, 12 bp, Artificial Sequence
  Oligonucleotide primer for the detection of SNP TSC0023575
gtttgcgtgtgg

SEQ ID NO: 309573 - DNA, 12 bp, Artificial Sequence
  Oligonucleotide primer for the detection of SNP TSC0023575
gtttgtgcgtgg

SEQ ID NO: 309574 - DNA, 12 bp, Artificial Sequence
  Oligonucleotide primer for the detection of SNP TSC0023575
gtttgtgtgcgg

SEQ ID NO: 309575 - DNA, 12 bp, Artificial Sequence
  Oligonucleotide primer for the detection of SNP TSC0023575
gtttgcgcgtgg

SEQ ID NO: 309576 - DNA, 12 bp, Artificial Sequence
  Oligonucleotide primer for the detection of SNP TSC0023575
gtttgcgtgcgg

SEQ ID NO: 309577 - DNA, 12 bp, Artificial Sequence
  Oligonucleotide primer for the detection of SNP TSC0023575
gtttgtgcgcgg

SEQ ID NO: 309578 - DNA, 12 bp, Artificial Sequence
  Oligonucleotide primer for the detection of SNP TSC0023575
gtttgcgcgcgg

SEQ ID NO: 309579 - DNA, 12 bp, Artificial Sequence
  Oligonucleotide primer for the detection of SNP TSC0023575
atctacacacaa

SEQ ID NO: 309580 - DNA, 12 bp, Artificial Sequence
  Oligonucleotide primer for the detection of SNP TSC0023575
atctacacacga

SEQ ID NO: 309581 - DNA, 12 bp, Artificial Sequence
  Oligonucleotide primer for the detection of SNP TSC0023575
atctacacgcaa

SEQ ID NO: 309582 - DNA, 12 bp, Artificial Sequence
  Oligonucleotide primer for the detection of SNP TSC0023575
atctacgcacaa

SEQ ID NO: 309583 - DNA, 12 bp, Artificial Sequence
  Oligonucleotide primer for the detection of SNP TSC0023575
atctacacgcga

SEQ ID NO: 309584 - DNA, 12 bp, Artificial Sequence
  Oligonucleotide primer for the detection of SNP TSC0023575
atctacgcacga

SEQ ID NO: 309585 - DNA, 12 bp, Artificial Sequence
  Oligonucleotide primer for the detection of SNP TSC0023575
atctacgcgcaa

SEQ ID NO: 309586 - DNA, 12 bp, Artificial Sequence
  Oligonucleotide primer for the detection of SNP TSC0023575
atctacgcgcga

SEQ ID NO: 309587 - DNA, 12 bp, Artificial Sequence
  Oligonucleotide primer for the detection of SNP TSC0023575
gttcgttttttt

SEQ ID NO: 309588 - DNA, 12 bp, Artificial Sequence
  Oligonucleotide primer for the detection of SNP TSC0023576
ttagataggata

SEQ ID NO: 309589 - DNA, 12 bp, Artificial Sequence
  Oligonucleotide primer for the detection of SNP TSC0023577
tcatattctaac

SEQ ID NO: 309590 - DNA, 12 bp, Artificial Sequence
  Oligonucleotide primer for the detection of SNP TSC0023577
ttgttatttgga

SEQ ID NO: 309591 - DNA, 12 bp, Artificial Sequence
  Oligonucleotide primer for the detection of SNP TSC0023581
cactccataatt

SEQ ID NO: 309592 - DNA, 12 bp, Artificial Sequence
  Oligonucleotide primer for the detection of SNP TSC0023581
ttaagaggttta

SEQ ID NO: 309593 - DNA, 12 bp, Artificial Sequence
  Oligonucleotide primer for the detection of SNP TSC0023582
aaattaacccaa

SEQ ID NO: 309594 - DNA, 12 bp, Artificial Sequence
  Oligonucleotide primer for the detection of SNP TSC0023582
tttgagataagt

SEQ ID NO: 309595 - DNA, 12 bp, Artificial Sequence
  Oligonucleotide primer for the detection of SNP TSC0023582
agattgatttag

SEQ ID NO: 309596 - DNA, 12 bp, Artificial Sequence
  Oligonucleotide primer for the detection of SNP TSC0023583
acctaaacaacc

SEQ ID NO: 309597 - DNA, 12 bp, Artificial Sequence
  Oligonucleotide primer for the detection of SNP TSC0023583
gatagaggattt

SEQ ID NO: 309598 - DNA, 12 bp, Artificial Sequence
  Oligonucleotide primer for the detection of SNP TSC0023583
gatagaggattc

SEQ ID NO: 309599 - DNA, 12 bp, Artificial Sequence
  Oligonucleotide primer for the detection of SNP TSC0023583
aataaaaaaccc

SEQ ID NO: 309600 - DNA, 12 bp, Artificial Sequence
  Oligonucleotide primer for the detection of SNP TSC0023583
tttaggtagttt

SEQ ID NO: 309601 - DNA, 12 bp, Artificial Sequence
  Oligonucleotide primer for the detection of SNP TSC0023586
aatcttcattta

SEQ ID NO: 309602 - DNA, 12 bp, Artificial Sequence
  Oligonucleotide primer for the detection of SNP TSC0023586
tttgggtaaagg

SEQ ID NO: 309603 - DNA, 12 bp, Artificial Sequence
  Oligonucleotide primer for the detection of SNP TSC0023586
gatttttatttg

SEQ ID NO: 309604 - DNA, 12 bp, Artificial Sequence
  Oligonucleotide primer for the detection of SNP TSC0023587
tactataatatt

SEQ ID NO: 309605 - DNA, 12 bp, Artificial Sequence
  Oligonucleotide primer for the detection of SNP TSC0023587
tgattttggggg

SEQ ID NO: 309606 - DNA, 12 bp, Artificial Sequence
  Oligonucleotide primer for the detection of SNP TSC0023587
taattttaaaaa

SEQ ID NO: 309607 - DNA, 12 bp, Artificial Sequence
  Oligonucleotide primer for the detection of SNP TSC0023587
tgttgtaatatt

SEQ ID NO: 309608 - DNA, 12 bp, Artificial Sequence
  Oligonucleotide primer for the detection of SNP TSC0023588
aataacaaatcc

SEQ ID NO: 309609 - DNA, 12 bp, Artificial Sequence
  Oligonucleotide primer for the detection of SNP TSC0023588
atatttagaatt

SEQ ID NO: 309610 - DNA, 12 bp, Artificial Sequence
  Oligonucleotide primer for the detection of SNP TSC0023588
acattcaaaact

SEQ ID NO: 309611 - DNA, 12 bp, Artificial Sequence
  Oligonucleotide primer for the detection of SNP TSC0023588
agtgatagattt

SEQ ID NO: 309612 - DNA, 12 bp, Artificial Sequence
  Oligonucleotide primer for the detection of SNP TSC0023589
acaattactctt

SEQ ID NO: 309613 - DNA, 12 bp, Artificial Sequence
  Oligonucleotide primer for the detection of SNP TSC0023589
atgtattaggaa

SEQ ID NO: 309614 - DNA, 12 bp, Artificial Sequence
  Oligonucleotide primer for the detection of SNP TSC0023590
aaacctaacata

SEQ ID NO: 309615 - DNA, 12 bp, Artificial Sequence
  Oligonucleotide primer for the detection of SNP TSC0023590
tggggattgggg

SEQ ID NO: 309616 - DNA, 12 bp, Artificial Sequence
  Oligonucleotide primer for the detection of SNP TSC0023590
ggtttggtatat

SEQ ID NO: 309617 - DNA, 12 bp, Artificial Sequence
  Oligonucleotide primer for the detection of SNP TSC0023591
aaaaaaaatttt

SEQ ID NO: 309618 - DNA, 12 bp, Artificial Sequence
  Oligonucleotide primer for the detection of SNP TSC0023591
aaagtgttgata

SEQ ID NO: 309619 - DNA, 12 bp, Artificial Sequence
  Oligonucleotide primer for the detection of SNP TSC0023592
cctatctcaaaa

SEQ ID NO: 309620 - DNA, 12 bp, Artificial Sequence
  Oligonucleotide primer for the detection of SNP TSC0023592
cctatctcgaaa

SEQ ID NO: 309621 - DNA, 12 bp, Artificial Sequence
  Oligonucleotide primer for the detection of SNP TSC0023592
taggtaaaaagt

SEQ ID NO: 309622 - DNA, 12 bp, Artificial Sequence
  Oligonucleotide primer for the detection of SNP TSC0023592
tttattttgaag

SEQ ID NO: 309623 - DNA, 12 bp, Artificial Sequence
  Oligonucleotide primer for the detection of SNP TSC0023592
tttatttcgaag

SEQ ID NO: 309624 - DNA, 12 bp, Artificial Sequence
  Oligonucleotide primer for the detection of SNP TSC0023593
tgatatgtatta

SEQ ID NO: 309625 - DNA, 12 bp, Artificial Sequence
  Oligonucleotide primer for the detection of SNP TSC0023593
taacatatatta

SEQ ID NO: 309626 - DNA, 12 bp, Artificial Sequence
  Oligonucleotide primer for the detection of SNP TSC0023593
tgttagaaaaag

SEQ ID NO: 309627 - DNA, 12 bp, Artificial Sequence
  Oligonucleotide primer for the detection of SNP TSC0023594
acaaaaacatct

SEQ ID NO: 309628 - DNA, 12 bp, Artificial Sequence
  Oligonucleotide primer for the detection of SNP TSC0023594
gtagttaaaatg

SEQ ID NO: 309629 - DNA, 12 bp, Artificial Sequence
  Oligonucleotide primer for the detection of SNP TSC0023595
acattcataaaa

SEQ ID NO: 309630 - DNA, 12 bp, Artificial Sequence
  Oligonucleotide primer for the detection of SNP TSC0023595
acattcgtaaaa

SEQ ID NO: 309631 - DNA, 12 bp, Artificial Sequence
  Oligonucleotide primer for the detection of SNP TSC0023595
tatggttgtgtt

SEQ ID NO: 309632 - DNA, 12 bp, Artificial Sequence
  Oligonucleotide primer for the detection of SNP TSC0023595
tacggttgtgtt

SEQ ID NO: 309633 - DNA, 12 bp, Artificial Sequence
  Oligonucleotide primer for the detection of SNP TSC0023595
cacaactatatt

SEQ ID NO: 309634 - DNA, 12 bp, Artificial Sequence
  Oligonucleotide primer for the detection of SNP TSC0023595
cacgactatatt

SEQ ID NO: 309635 - DNA, 12 bp, Artificial Sequence
  Oligonucleotide primer for the detection of SNP TSC0023595
tatatttgtgga

SEQ ID NO: 309636 - DNA, 12 bp, Artificial Sequence
  Oligonucleotide primer for the detection of SNP TSC0023595
tatattcgtgga

SEQ ID NO: 309637 - DNA, 12 bp, Artificial Sequence
  Oligonucleotide primer for the detection of SNP TSC0023596
aatatggcgaaa

SEQ ID NO: 309638 - DNA, 12 bp, Artificial Sequence
  Oligonucleotide primer for the detection of SNP TSC0023600
ataaaatattat

SEQ ID NO: 309639 - DNA, 12 bp, Artificial Sequence
  Oligonucleotide primer for the detection of SNP TSC0023600
aagaaagataat

SEQ ID NO: 309640 - DNA, 12 bp, Artificial Sequence
  Oligonucleotide primer for the detection of SNP TSC0023600
tggggtgttgtt

SEQ ID NO: 309641 - DNA, 12 bp, Artificial Sequence
  Oligonucleotide primer for the detection of SNP TSC0023601
cctcaaatatca

SEQ ID NO: 309642 - DNA, 12 bp, Artificial Sequence
  Oligonucleotide primer for the detection of SNP TSC0023601
tagtggaatttt

SEQ ID NO: 309643 - DNA, 12 bp, Artificial Sequence
  Oligonucleotide primer for the detection of SNP TSC0023601
caataaaatccc

SEQ ID NO: 309644 - DNA, 12 bp, Artificial Sequence
  Oligonucleotide primer for the detection of SNP TSC0023601
ttttagatatta

SEQ ID NO: 309645 - DNA, 12 bp, Artificial Sequence
  Oligonucleotide primer for the detection of SNP TSC0023602
atacaatctcga

SEQ ID NO: 309646 - DNA, 12 bp, Artificial Sequence
  Oligonucleotide primer for the detection of SNP TSC0023602
gttggaggttgt

SEQ ID NO: 309647 - DNA, 12 bp, Artificial Sequence
  Oligonucleotide primer for the detection of SNP TSC0023602
actaaaaattac

SEQ ID NO: 309648 - DNA, 12 bp, Artificial Sequence
  Oligonucleotide primer for the detection of SNP TSC0023602
gtgtaattttgg

SEQ ID NO: 309649 - DNA, 12 bp, Artificial Sequence
  Oligonucleotide primer for the detection of SNP TSC0023602
gtgtaatttcgg

SEQ ID NO: 309650 - DNA, 12 bp, Artificial Sequence
  Oligonucleotide primer for the detection of SNP TSC0023603
aaccacttcact

SEQ ID NO: 309651 - DNA, 12 bp, Artificial Sequence
  Oligonucleotide primer for the detection of SNP TSC0023604
taaaataaacac

SEQ ID NO: 309652 - DNA, 12 bp, Artificial Sequence
  Oligonucleotide primer for the detection of SNP TSC0023604
attagttatgga

SEQ ID NO: 309653 - DNA, 12 bp, Artificial Sequence
  Oligonucleotide primer for the detection of SNP TSC0023604
actaatcataaa

SEQ ID NO: 309654 - DNA, 12 bp, Artificial Sequence
  Oligonucleotide primer for the detection of SNP TSC0023604
tggggtagatat

SEQ ID NO: 309655 - DNA, 12 bp, Artificial Sequence
  Oligonucleotide primer for the detection of SNP TSC0023605
aaccaataaaat

SEQ ID NO: 309656 - DNA, 12 bp, Artificial Sequence
  Oligonucleotide primer for the detection of SNP TSC0023605
aaccgataaaat

SEQ ID NO: 309657 - DNA, 12 bp, Artificial Sequence
  Oligonucleotide primer for the detection of SNP TSC0023605
gaatgttatgta

SEQ ID NO: 309658 - DNA, 12 bp, Artificial Sequence
  Oligonucleotide primer for the detection of SNP TSC0023606
atgtggaaaatt

SEQ ID NO: 309659 - DNA, 12 bp, Artificial Sequence
  Oligonucleotide primer for the detection of SNP TSC0023606
atataaaaaatt

SEQ ID NO: 309660 - DNA, 12 bp, Artificial Sequence
  Oligonucleotide primer for the detection of SNP TSC0023606
aaaaaggagtta

SEQ ID NO: 309661 - DNA, 12 bp, Artificial Sequence
  Oligonucleotide primer for the detection of SNP TSC0023609
aaatcaaatcat

SEQ ID NO: 309662 - DNA, 12 bp, Artificial Sequence
  Oligonucleotide primer for the detection of SNP TSC0023610
tttttaaaacac

SEQ ID NO: 309663 - DNA, 12 bp, Artificial Sequence
  Oligonucleotide primer for the detection of SNP TSC0023610
tgtgtaaaaatt

SEQ ID NO: 309664 - DNA, 12 bp, Artificial Sequence
  Oligonucleotide primer for the detection of SNP TSC0023610
tatacaaaaact

SEQ ID NO: 309665 - DNA, 12 bp, Artificial Sequence
  Oligonucleotide primer for the detection of SNP TSC0023612
acaaacatatta

SEQ ID NO: 309666 - DNA, 12 bp, Artificial Sequence
  Oligonukleotid-Primer
ggtgatatgtat

SEQ ID NO: 309667 - DNA, 12 bp, Artificial Sequence
  Oligonucleotide primer for the detection of SNP TSC0023612
ggcgatatgtat

SEQ ID NO: 309668 - DNA, 12 bp, Artificial Sequence
  Oligonucleotide primer for the detection of SNP TSC0023612
ggtgatacgtat

SEQ ID NO: 309669 - DNA, 12 bp, Artificial Sequence
  Oligonucleotide primer for the detection of SNP TSC0023612
ggcgatacgtat

SEQ ID NO: 309670 - DNA, 12 bp, Artificial Sequence
  Oligonucleotide primer for the detection of SNP TSC0023612
acaacacatata

SEQ ID NO: 309671 - DNA, 12 bp, Artificial Sequence
  Oligonucleotide primer for the detection of SNP TSC0023612
acaacacgtata

SEQ ID NO: 309672 - DNA, 12 bp, Artificial Sequence
  Oligonucleotide primer for the detection of SNP TSC0023612
acgacacatata

SEQ ID NO: 309673 - DNA, 12 bp, Artificial Sequence
  Oligonucleotide primer for the detection of SNP TSC0023612
acgacacgtata

SEQ ID NO: 309674 - DNA, 12 bp, Artificial Sequence
  Oligonucleotide primer for the detection of SNP TSC0023612
aataaatatgtt

SEQ ID NO: 309675 - DNA, 12 bp, Artificial Sequence
  Oligonucleotide primer for the detection of SNP TSC0023615
acctaacactcc

SEQ ID NO: 309676 - DNA, 12 bp, Artificial Sequence
  Oligonucleotide primer for the detection of SNP TSC0023615
ttttggtagatg

SEQ ID NO: 309677 - DNA, 12 bp, Artificial Sequence
  Oligonucleotide primer for the detection of SNP TSC0023617
aattcacaaata

SEQ ID NO: 309678 - DNA, 12 bp, Artificial Sequence
  Oligonucleotide primer for the detection of SNP TSC0023617
gtataaattagt

SEQ ID NO: 309679 - DNA, 12 bp, Artificial Sequence
  Oligonucleotide primer for the detection of SNP TSC0023617
acacaaattaac

SEQ ID NO: 309680 - DNA, 12 bp, Artificial Sequence
  Oligonucleotide primer for the detection of SNP TSC0023617
tagtttataggt

SEQ ID NO: 309681 - DNA, 12 bp, Artificial Sequence
  Oligonucleotide primer for the detection of SNP TSC0023618
taactctcccat

SEQ ID NO: 309682 - DNA, 12 bp, Artificial Sequence
  Oligonucleotide primer for the detection of SNP TSC0023618
aaaaataattag

SEQ ID NO: 309683 - DNA, 12 bp, Artificial Sequence
  Oligonucleotide primer for the detection of SNP TSC0023619
aggtggggaaga

SEQ ID NO: 309684 - DNA, 12 bp, Artificial Sequence
  Oligonucleotide primer for the detection of SNP TSC0023619
aggcggggaaga

SEQ ID NO: 309685 - DNA, 12 bp, Artificial Sequence
  Oligonucleotide primer for the detection of SNP TSC0023619
ttgtgaggaggt

SEQ ID NO: 309686 - DNA, 12 bp, Artificial Sequence
  Oligonucleotide primer for the detection of SNP TSC0023620
caaattatatat

SEQ ID NO: 309687 - DNA, 12 bp, Artificial Sequence
  Oligonucleotide primer for the detection of SNP TSC0023620
aggtttagaaag

SEQ ID NO: 309688 - DNA, 12 bp, Artificial Sequence
  Oligonucleotide primer for the detection of SNP TSC0023621
tcaccctcaaat

SEQ ID NO: 309689 - DNA, 12 bp, Artificial Sequence
  Oligonucleotide primer for the detection of SNP TSC0023621
tattatgtagtt

SEQ ID NO: 309690 - DNA, 12 bp, Artificial Sequence
  Oligonucleotide primer for the detection of SNP TSC0023621
tattacgtagtt

SEQ ID NO: 309691 - DNA, 12 bp, Artificial Sequence
  Oligonucleotide primer for the detection of SNP TSC0023621
acactacacaac

SEQ ID NO: 309692 - DNA, 12 bp, Artificial Sequence
  Oligonucleotide primer for the detection of SNP TSC0023621
acactacgcaac

SEQ ID NO: 309693 - DNA, 12 bp, Artificial Sequence
  Oligonucleotide primer for the detection of SNP TSC0023621
ttatttttagat

SEQ ID NO: 309694 - DNA, 12 bp, Artificial Sequence
  Oligonucleotide primer for the detection of SNP TSC0023622
aaattttcacac

SEQ ID NO: 309695 - DNA, 12 bp, Artificial Sequence
  Oligonucleotide primer for the detection of SNP TSC0023622
ataaatttgtga

SEQ ID NO: 309696 - DNA, 12 bp, Artificial Sequence
  Oligonucleotide primer for the detection of SNP TSC0023623
aaaaacctaatt

SEQ ID NO: 309697 - DNA, 12 bp, Artificial Sequence
  Oligonucleotide primer for the detection of SNP TSC0023623
atttttgattta

SEQ ID NO: 309698 - DNA, 12 bp, Artificial Sequence
  Oligonucleotide primer for the detection of SNP TSC0023624
aaaccctttaca

SEQ ID NO: 309699 - DNA, 12 bp, Artificial Sequence
  Oligonucleotide primer for the detection of SNP TSC0023624
tcctcccaaact

SEQ ID NO: 309700 - DNA, 12 bp, Artificial Sequence
  Oligonucleotide primer for the detection of SNP TSC0023624
agttttttgtat

SEQ ID NO: 309701 - DNA, 12 bp, Artificial Sequence
  Oligonucleotide primer for the detection of SNP TSC0023625
aatatcttttat

SEQ ID NO: 309702 - DNA, 12 bp, Artificial Sequence
  Oligonucleotide primer for the detection of SNP TSC0023625
gatatcttttat

SEQ ID NO: 309703 - DNA, 12 bp, Artificial Sequence
  Oligonucleotide primer for the detection of SNP TSC0023625
ttattaaatatg

SEQ ID NO: 309704 - DNA, 12 bp, Artificial Sequence
  Oligonucleotide primer for the detection of SNP TSC0023625
ttatcaaacata

SEQ ID NO: 309705 - DNA, 12 bp, Artificial Sequence
  Oligonucleotide primer for the detection of SNP TSC0023625
ggtattttttgt

SEQ ID NO: 309706 - DNA, 12 bp, Artificial Sequence
  Oligonucleotide primer for the detection of SNP TSC0023627
tgtatggagtag

SEQ ID NO: 309707 - DNA, 12 bp, Artificial Sequence
  Oligonucleotide primer for the detection of SNP TSC0023627
tacataaaataa

SEQ ID NO: 309708 - DNA, 12 bp, Artificial Sequence
  Oligonucleotide primer for the detection of SNP TSC0023627
gagaaaaatgtt

SEQ ID NO: 309709 - DNA, 12 bp, Artificial Sequence
  Oligonucleotide primer for the detection of SNP TSC0023628
gttggagaggaa

SEQ ID NO: 309710 - DNA, 12 bp, Artificial Sequence
  Oligonucleotide primer for the detection of SNP TSC0023629
tgtttggttaaa

SEQ ID NO: 309711 - DNA, 12 bp, Artificial Sequence
  Oligonucleotide primer for the detection of SNP TSC0023629
cgtttggttaaa

SEQ ID NO: 309712 - DNA, 12 bp, Artificial Sequence
  Oligonucleotide primer for the detection of SNP TSC0023629
tgttcggttaaa

SEQ ID NO: 309713 - DNA, 12 bp, Artificial Sequence
  Oligonucleotide primer for the detection of SNP TSC0023629
cgttcggttaaa

SEQ ID NO: 309714 - DNA, 12 bp, Artificial Sequence
  Oligonucleotide primer for the detection of SNP TSC0023632
cttaaaactccc

SEQ ID NO: 309715 - DNA, 12 bp, Artificial Sequence
  Oligonucleotide primer for the detection of SNP TSC0023632
tgagtttttttg

SEQ ID NO: 309716 - DNA, 12 bp, Artificial Sequence
  Oligonucleotide primer for the detection of SNP TSC0023636
cccactctaacc

SEQ ID NO: 309717 - DNA, 12 bp, Artificial Sequence
  Oligonucleotide primer for the detection of SNP TSC0023636
cccgctctaacc

SEQ ID NO: 309718 - DNA, 12 bp, Artificial Sequence
  Oligonucleotide primer for the detection of SNP TSC0023636
ggattttatgat

SEQ ID NO: 309719 - DNA, 12 bp, Artificial Sequence
  Oligonucleotide primer for the detection of SNP TSC0023636
ggattttatgac

SEQ ID NO: 309720 - DNA, 12 bp, Artificial Sequence
  Oligonucleotide primer for the detection of SNP TSC0023636
tcgttttgattt

SEQ ID NO: 309721 - DNA, 12 bp, Artificial Sequence
  Oligonucleotide primer for the detection of SNP TSC0023637
gggggtttagaa

SEQ ID NO: 309722 - DNA, 12 bp, Artificial Sequence
  Oligonucleotide primer for the detection of SNP TSC0023638
ccaaaaaacaac

SEQ ID NO: 309723 - DNA, 12 bp, Artificial Sequence
  Oligonucleotide primer for the detection of SNP TSC0023639
aacatcctacaa

SEQ ID NO: 309724 - DNA, 12 bp, Artificial Sequence
  Oligonucleotide primer for the detection of SNP TSC0023639
aacatcctacga

SEQ ID NO: 309725 - DNA, 12 bp, Artificial Sequence
  Oligonucleotide primer for the detection of SNP TSC0023639
cacctccttccc

SEQ ID NO: 309726 - DNA, 12 bp, Artificial Sequence
  Oligonucleotide primer for the detection of SNP TSC0023639
cgcctccttccc

SEQ ID NO: 309727 - DNA, 12 bp, Artificial Sequence
  Oligonucleotide primer for the detection of SNP TSC0023639
gatattttgtgg

SEQ ID NO: 309728 - DNA, 12 bp, Artificial Sequence
  Oligonucleotide primer for the detection of SNP TSC0023639
gatattttgcgg

SEQ ID NO: 309729 - DNA, 12 bp, Artificial Sequence
  Oligonucleotide primer for the detection of SNP TSC0023640
gaaaggtttaag

SEQ ID NO: 309730 - DNA, 12 bp, Artificial Sequence
  Oligonucleotide primer for the detection of SNP TSC0023640
aaaaaacccaaa

SEQ ID NO: 309731 - DNA, 12 bp, Artificial Sequence
  Oligonucleotide primer for the detection of SNP TSC0023640
ttagattgggga

SEQ ID NO: 309732 - DNA, 12 bp, Artificial Sequence
  Oligonucleotide primer for the detection of SNP TSC0023644
tccaaattccca

SEQ ID NO: 309733 - DNA, 12 bp, Artificial Sequence
  Oligonucleotide primer for the detection of SNP TSC0023644
tccgaattccca

SEQ ID NO: 309734 - DNA, 12 bp, Artificial Sequence
  Oligonucleotide primer for the detection of SNP TSC0023644
caatttcatccc

SEQ ID NO: 309735 - DNA, 12 bp, Artificial Sequence
  Oligonucleotide primer for the detection of SNP TSC0023644
ttcgggttttta

SEQ ID NO: 309736 - DNA, 12 bp, Artificial Sequence
  Oligonucleotide primer for the detection of SNP TSC0023645
acctccaattta

SEQ ID NO: 309737 - DNA, 12 bp, Artificial Sequence
  Oligonucleotide primer for the detection of SNP TSC0023645
ggatataattgt

SEQ ID NO: 309738 - DNA, 12 bp, Artificial Sequence
  Oligonucleotide primer for the detection of SNP TSC0023645
acacaactacaa

SEQ ID NO: 309739 - DNA, 12 bp, Artificial Sequence
  Oligonucleotide primer for the detection of SNP TSC0023645
ttttagtttgtt

SEQ ID NO: 309740 - DNA, 12 bp, Artificial Sequence
  Oligonucleotide primer for the detection of SNP TSC0023646
catatatatcca

SEQ ID NO: 309741 - DNA, 12 bp, Artificial Sequence
  Oligonucleotide primer for the detection of SNP TSC0023646
acacacaaacat

SEQ ID NO: 309742 - DNA, 12 bp, Artificial Sequence
  Oligonucleotide primer for the detection of SNP TSC0023646
tatgtgtgttta

SEQ ID NO: 309743 - DNA, 12 bp, Artificial Sequence
  Oligonucleotide primer for the detection of SNP TSC0023648
acaaaaacgact

SEQ ID NO: 309744 - DNA, 12 bp, Artificial Sequence
  Oligonucleotide primer for the detection of SNP TSC0023648
ataaagatggtt

SEQ ID NO: 309745 - DNA, 12 bp, Artificial Sequence
  Oligonucleotide primer for the detection of SNP TSC0023648
ataaagacggtt

SEQ ID NO: 309746 - DNA, 12 bp, Artificial Sequence
  Oligonucleotide primer for the detection of SNP TSC0023649
ccaaatattttc

SEQ ID NO: 309747 - DNA, 12 bp, Artificial Sequence
  Oligonukleotid-Primer
ccgaatattttc

SEQ ID NO: 309748 - DNA, 12 bp, Artificial Sequence
  Oligonucleotide primer for the detection of SNP TSC0023649
agatgttatggg

SEQ ID NO: 309749 - DNA, 12 bp, Artificial Sequence
  Oligonucleotide primer for the detection of SNP TSC0023649
agacgttatggg

SEQ ID NO: 309750 - DNA, 12 bp, Artificial Sequence
  Oligonucleotide primer for the detection of SNP TSC0023654
tcaaaatcaaac

SEQ ID NO: 309751 - DNA, 12 bp, Artificial Sequence
  Oligonucleotide primer for the detection of SNP TSC0023654
gtgtgaaaggga

SEQ ID NO: 309752 - DNA, 12 bp, Artificial Sequence
  Oligonucleotide primer for the detection of SNP TSC0023654
ttagagttaggt

SEQ ID NO: 309753 - DNA, 12 bp, Artificial Sequence
  Oligonucleotide primer for the detection of SNP TSC0023656
aacaattctccc

SEQ ID NO: 309754 - DNA, 12 bp, Artificial Sequence
  Oligonucleotide primer for the detection of SNP TSC0023656
ttaaaataattg

SEQ ID NO: 309755 - DNA, 12 bp, Artificial Sequence
  Oligonucleotide primer for the detection of SNP TSC0023656
ttaaaacaacta

SEQ ID NO: 309756 - DNA, 12 bp, Artificial Sequence
  Oligonucleotide primer for the detection of SNP TSC0023657
aaaaacacaaat

SEQ ID NO: 309757 - DNA, 12 bp, Artificial Sequence
  Oligonucleotide primer for the detection of SNP TSC0023657
atttagggttta

SEQ ID NO: 309758 - DNA, 12 bp, Artificial Sequence
  Oligonucleotide primer for the detection of SNP TSC0023661
taaaatccctac

SEQ ID NO: 309759 - DNA, 12 bp, Artificial Sequence
  Oligonucleotide primer for the detection of SNP TSC0023661
gggggtggggta

SEQ ID NO: 309760 - DNA, 12 bp, Artificial Sequence
  Oligonucleotide primer for the detection of SNP TSC0023662
tcccaacctaaa

SEQ ID NO: 309761 - DNA, 12 bp, Artificial Sequence
  Oligonucleotide primer for the detection of SNP TSC0023663
cactcaaatatc

SEQ ID NO: 309762 - DNA, 12 bp, Artificial Sequence
  Oligonucleotide primer for the detection of SNP TSC0023663
cactcgaatatc

SEQ ID NO: 309763 - DNA, 12 bp, Artificial Sequence
  Oligonucleotide primer for the detection of SNP TSC0023663
tttttatggagt

SEQ ID NO: 309764 - DNA, 12 bp, Artificial Sequence
  Oligonucleotide primer for the detection of SNP TSC0023663
tttttatggagc

SEQ ID NO: 309765 - DNA, 12 bp, Artificial Sequence
  Oligonucleotide primer for the detection of SNP TSC0023663
accttcataaaa

SEQ ID NO: 309766 - DNA, 12 bp, Artificial Sequence
  Oligonucleotide primer for the detection of SNP TSC0023663
tatttggatgtt

SEQ ID NO: 309767 - DNA, 12 bp, Artificial Sequence
  Oligonucleotide primer for the detection of SNP TSC0023663
tattcggatgtt

SEQ ID NO: 309768 - DNA, 12 bp, Artificial Sequence
  Oligonucleotide primer for the detection of SNP TSC0023664
acacttaaacct

SEQ ID NO: 309769 - DNA, 12 bp, Artificial Sequence
  Oligonucleotide primer for the detection of SNP TSC0023664
ttgtaatttttg

SEQ ID NO: 309770 - DNA, 12 bp, Artificial Sequence
  Oligonucleotide primer for the detection of SNP TSC0023665
atagagatgtag

SEQ ID NO: 309771 - DNA, 12 bp, Artificial Sequence
  Oligonucleotide primer for the detection of SNP TSC0023665
gttaatatggtg

SEQ ID NO: 309772 - DNA, 12 bp, Artificial Sequence
  Oligonucleotide primer for the detection of SNP TSC0023666
aatccccataac

SEQ ID NO: 309773 - DNA, 12 bp, Artificial Sequence
  Oligonucleotide primer for the detection of SNP TSC0023666
tttattatttgt

SEQ ID NO: 309774 - DNA, 12 bp, Artificial Sequence
  Oligonucleotide primer for the detection of SNP TSC0023666
ttcatcatttat

SEQ ID NO: 309775 - DNA, 12 bp, Artificial Sequence
  Oligonucleotide primer for the detection of SNP TSC0023666
gatttttatggt

SEQ ID NO: 309776 - DNA, 12 bp, Artificial Sequence
  Oligonucleotide primer for the detection of SNP TSC0023667
taattaaaactc

SEQ ID NO: 309777 - DNA, 12 bp, Artificial Sequence
  Oligonucleotide primer for the detection of SNP TSC0023667
gtttggaagttg

SEQ ID NO: 309778 - DNA, 12 bp, Artificial Sequence
  Oligonucleotide primer for the detection of SNP TSC0023668
ccaaaaccctct

SEQ ID NO: 309779 - DNA, 12 bp, Artificial Sequence
  Oligonucleotide primer for the detection of SNP TSC0023674
taaaacacccct

SEQ ID NO: 309780 - DNA, 12 bp, Artificial Sequence
  Oligonucleotide primer for the detection of SNP TSC0023674
tagtattaaaag

SEQ ID NO: 309781 - DNA, 12 bp, Artificial Sequence
  Oligonucleotide primer for the detection of SNP TSC0023675
ggttaaataggt

SEQ ID NO: 309782 - DNA, 12 bp, Artificial Sequence
  Oligonucleotide primer for the detection of SNP TSC0023675
gggtaagatgat

SEQ ID NO: 309783 - DNA, 12 bp, Artificial Sequence
  Oligonucleotide primer for the detection of SNP TSC0023676
ttttagggaagg

SEQ ID NO: 309784 - DNA, 12 bp, Artificial Sequence
  Oligonucleotide primer for the detection of SNP TSC0023677
aaactacctcct

SEQ ID NO: 309785 - DNA, 12 bp, Artificial Sequence
  Oligonucleotide primer for the detection of SNP TSC0023677
tggttagaggtg

SEQ ID NO: 309786 - DNA, 12 bp, Artificial Sequence
  Oligonucleotide primer for the detection of SNP TSC0023678
ccaaacccacaa

SEQ ID NO: 309787 - DNA, 12 bp, Artificial Sequence
  Oligonucleotide primer for the detection of SNP TSC0023678
tttagaagtttt

SEQ ID NO: 309788 - DNA, 12 bp, Artificial Sequence
  Oligonucleotide primer for the detection of SNP TSC0023678
aacccaaaaacc

SEQ ID NO: 309789 - DNA, 12 bp, Artificial Sequence
  Oligonucleotide primer for the detection of SNP TSC0023678
ttaaatttatag

SEQ ID NO: 309790 - DNA, 12 bp, Artificial Sequence
  Oligonucleotide primer for the detection of SNP TSC0023679
aactcaaatatt

SEQ ID NO: 309791 - DNA, 12 bp, Artificial Sequence
  Oligonucleotide primer for the detection of SNP TSC0023679
gactcaaatatt

SEQ ID NO: 309792 - DNA, 12 bp, Artificial Sequence
  Oligonucleotide primer for the detection of SNP TSC0023681
aaaatttcacca

SEQ ID NO: 309793 - DNA, 12 bp, Artificial Sequence
  Oligonucleotide primer for the detection of SNP TSC0023681
aaaatttcgcca

SEQ ID NO: 309794 - DNA, 12 bp, Artificial Sequence
  Oligonucleotide primer for the detection of SNP TSC0023681
agtttggttaat

SEQ ID NO: 309795 - DNA, 12 bp, Artificial Sequence
  Oligonucleotide primer for the detection of SNP TSC0023682
caaaataaaaca

SEQ ID NO: 309796 - DNA, 12 bp, Artificial Sequence
  Oligonucleotide primer for the detection of SNP TSC0023682
aatttaggaatt

SEQ ID NO: 309797 - DNA, 12 bp, Artificial Sequence
  Oligonucleotide primer for the detection of SNP TSC0023682
taggatgaagta

SEQ ID NO: 309798 - DNA, 12 bp, Artificial Sequence
  Oligonucleotide primer for the detection of SNP TSC0023683
actaaaaaacac

SEQ ID NO: 309799 - DNA, 12 bp, Artificial Sequence
  Oligonucleotide primer for the detection of SNP TSC0023683
actaaaaaacgc

SEQ ID NO: 309800 - DNA, 12 bp, Artificial Sequence
  Oligonucleotide primer for the detection of SNP TSC0023683
gtttttttatgg

SEQ ID NO: 309801 - DNA, 12 bp, Artificial Sequence
  Oligonucleotide primer for the detection of SNP TSC0023683
gtttttttacgg

SEQ ID NO: 309802 - DNA, 12 bp, Artificial Sequence
  Oligonucleotide primer for the detection of SNP TSC0023684
aaaatataaata

SEQ ID NO: 309803 - DNA, 12 bp, Artificial Sequence
  Oligonucleotide primer for the detection of SNP TSC0023684
attaaataaagg

SEQ ID NO: 309804 - DNA, 12 bp, Artificial Sequence
  Oligonucleotide primer for the detection of SNP TSC0023684
agaatatgaata

SEQ ID NO: 309805 - DNA, 12 bp, Artificial Sequence
  Oligonucleotide primer for the detection of SNP TSC0023685
ctaacttccaaa

SEQ ID NO: 309806 - DNA, 12 bp, Artificial Sequence
  Oligonucleotide primer for the detection of SNP TSC0023685
atatcctcaccc

SEQ ID NO: 309807 - DNA, 12 bp, Artificial Sequence
  Oligonucleotide primer for the detection of SNP TSC0023685
gtatcctcaccc

SEQ ID NO: 309808 - DNA, 12 bp, Artificial Sequence
  Oligonucleotide primer for the detection of SNP TSC0023685
ttggtttttagg

SEQ ID NO: 309809 - DNA, 12 bp, Artificial Sequence
  Oligonucleotide primer for the detection of SNP TSC0023686
taataaaaaacc

SEQ ID NO: 309810 - DNA, 12 bp, Artificial Sequence
  Oligonucleotide primer for the detection of SNP TSC0023686
attggttattgg

SEQ ID NO: 309811 - DNA, 12 bp, Artificial Sequence
  Oligonucleotide primer for the detection of SNP TSC0023686
attaaccattaa

SEQ ID NO: 309812 - DNA, 12 bp, Artificial Sequence
  Oligonucleotide primer for the detection of SNP TSC0023686
tggtggaaggtt

SEQ ID NO: 309813 - DNA, 12 bp, Artificial Sequence
  Oligonucleotide primer for the detection of SNP TSC0023690
aaaattcctctc

SEQ ID NO: 309814 - DNA, 12 bp, Artificial Sequence
  Oligonucleotide primer for the detection of SNP TSC0023690
tgagtgtaattg

SEQ ID NO: 309815 - DNA, 12 bp, Artificial Sequence
  Oligonucleotide primer for the detection of SNP TSC0023690
tgagtgtaatcg

SEQ ID NO: 309816 - DNA, 12 bp, Artificial Sequence
  Oligonucleotide primer for the detection of SNP TSC0023690
taaatacaacca

SEQ ID NO: 309817 - DNA, 12 bp, Artificial Sequence
  Oligonucleotide primer for the detection of SNP TSC0023690
taaatacaaccg

SEQ ID NO: 309818 - DNA, 12 bp, Artificial Sequence
  Oligonucleotide primer for the detection of SNP TSC0023691
tttaatctacta

SEQ ID NO: 309819 - DNA, 12 bp, Artificial Sequence
  Oligonucleotide primer for the detection of SNP TSC0023691
attattgtaagt

SEQ ID NO: 309820 - DNA, 12 bp, Artificial Sequence
  Oligonucleotide primer for the detection of SNP TSC0023692
tctaaccccacc

SEQ ID NO: 309821 - DNA, 12 bp, Artificial Sequence
  Oligonucleotide primer for the detection of SNP TSC0023692
gagttagggaag

SEQ ID NO: 309822 - DNA, 12 bp, Artificial Sequence
  Oligonucleotide primer for the detection of SNP TSC0023693
aaaacatcaccc

SEQ ID NO: 309823 - DNA, 12 bp, Artificial Sequence
  Oligonucleotide primer for the detection of SNP TSC0023693
aaaacatcgccc

SEQ ID NO: 309824 - DNA, 12 bp, Artificial Sequence
  Oligonucleotide primer for the detection of SNP TSC0023693
aaaacgtcaccc

SEQ ID NO: 309825 - DNA, 12 bp, Artificial Sequence
  Oligonucleotide primer for the detection of SNP TSC0023693
aaaacgtcgccc

SEQ ID NO: 309826 - DNA, 12 bp, Artificial Sequence
  Oligonucleotide primer for the detection of SNP TSC0023693
gtagtatgttaa

SEQ ID NO: 309827 - DNA, 12 bp, Artificial Sequence
  Oligonucleotide primer for the detection of SNP TSC0023693
acaacatactaa

SEQ ID NO: 309828 - DNA, 12 bp, Artificial Sequence
  Oligonucleotide primer for the detection of SNP TSC0023693
aggatgttgttt

SEQ ID NO: 309829 - DNA, 12 bp, Artificial Sequence
  Oligonucleotide primer for the detection of SNP TSC0023693
aggacgttgttt

SEQ ID NO: 309830 - DNA, 12 bp, Artificial Sequence
  Oligonucleotide primer for the detection of SNP TSC0023693
aggatgtcgttt

SEQ ID NO: 309831 - DNA, 12 bp, Artificial Sequence
  Oligonucleotide primer for the detection of SNP TSC0023693
aggacgtcgttt

SEQ ID NO: 309832 - DNA, 12 bp, Artificial Sequence
  Oligonucleotide primer for the detection of SNP TSC0023694
caacaaaaaacc

SEQ ID NO: 309833 - DNA, 12 bp, Artificial Sequence
  Oligonucleotide primer for the detection of SNP TSC0023694
ttggagtttatg

SEQ ID NO: 309834 - DNA, 12 bp, Artificial Sequence
  Oligonucleotide primer for the detection of SNP TSC0023694
ttaaaactcata

SEQ ID NO: 309835 - DNA, 12 bp, Artificial Sequence
  Oligonucleotide primer for the detection of SNP TSC0023694
tagtaggaagtt

SEQ ID NO: 309836 - DNA, 12 bp, Artificial Sequence
  Oligonucleotide primer for the detection of SNP TSC0023694
tagtaggaagtc

SEQ ID NO: 309837 - DNA, 12 bp, Artificial Sequence
  Oligonucleotide primer for the detection of SNP TSC0023695
ctacaaattaac

SEQ ID NO: 309838 - DNA, 12 bp, Artificial Sequence
  Oligonucleotide primer for the detection of SNP TSC0023695
tgaagttgttta

SEQ ID NO: 309839 - DNA, 12 bp, Artificial Sequence
  Oligonucleotide primer for the detection of SNP TSC0023697
tttaatacccaa

SEQ ID NO: 309840 - DNA, 12 bp, Artificial Sequence
  Oligonucleotide primer for the detection of SNP TSC0023697
tcaccatttaat

SEQ ID NO: 309841 - DNA, 12 bp, Artificial Sequence
  Oligonucleotide primer for the detection of SNP TSC0023697
tttaatatttaa

SEQ ID NO: 309842 - DNA, 12 bp, Artificial Sequence
  Oligonucleotide primer for the detection of SNP TSC0023700
tctaacctaaaa

SEQ ID NO: 309843 - DNA, 12 bp, Artificial Sequence
  Oligonucleotide primer for the detection of SNP TSC0023700
ggataataattg

SEQ ID NO: 309844 - DNA, 12 bp, Artificial Sequence
  Oligonukleotid-Primer
aaacaataacta

SEQ ID NO: 309845 - DNA, 12 bp, Artificial Sequence
  Oligonucleotide primer for the detection of SNP TSC0023701
atctatatcata

SEQ ID NO: 309846 - DNA, 12 bp, Artificial Sequence
  Oligonucleotide primer for the detection of SNP TSC0023701
gttgggggagtt

SEQ ID NO: 309847 - DNA, 12 bp, Artificial Sequence
  Oligonucleotide primer for the detection of SNP TSC0023701
atttgtgttata

SEQ ID NO: 309848 - DNA, 12 bp, Artificial Sequence
  Oligonukleotid-Primer
cccacatacatc

SEQ ID NO: 309849 - DNA, 12 bp, Artificial Sequence
  Oligonucleotide primer for the detection of SNP TSC0023702
tatattaataat

SEQ ID NO: 309850 - DNA, 12 bp, Artificial Sequence
  Oligonucleotide primer for the detection of SNP TSC0023702
acatatcaataa

SEQ ID NO: 309851 - DNA, 12 bp, Artificial Sequence
  Oligonucleotide primer for the detection of SNP TSC0023706
tcccaaatacta

SEQ ID NO: 309852 - DNA, 12 bp, Artificial Sequence
  Oligonukleotid-Primer
ttacttaataat

SEQ ID NO: 309853 - DNA, 12 bp, Artificial Sequence
  Oligonucleotide primer for the detection of SNP TSC0023707
attaatatgtga

SEQ ID NO: 309854 - DNA, 12 bp, Artificial Sequence
  Oligonucleotide primer for the detection of SNP TSC0023708
ctccaaaactta

SEQ ID NO: 309855 - DNA, 12 bp, Artificial Sequence
  Oligonucleotide primer for the detection of SNP TSC0023708
ttagaggttata

SEQ ID NO: 309856 - DNA, 12 bp, Artificial Sequence
  Oligonukleotid-Primer
acacccaacact

SEQ ID NO: 309857 - DNA, 12 bp, Artificial Sequence
  Oligonucleotide primer for the detection of SNP TSC0023709
atagggaagaat

SEQ ID NO: 309858 - DNA, 12 bp, Artificial Sequence
  Oligonucleotide primer for the detection of SNP TSC0023709
atttagtatttc

SEQ ID NO: 309859 - DNA, 12 bp, Artificial Sequence
  Oligonucleotide primer for the detection of SNP TSC0023710
ttttatcaccta

SEQ ID NO: 309860 - DNA, 12 bp, Artificial Sequence
  Oligonucleotide primer for the detection of SNP TSC0023710
atatgaatttat

SEQ ID NO: 309861 - DNA, 12 bp, Artificial Sequence
  Oligonucleotide primer for the detection of SNP TSC0023710
atacgaatttat

SEQ ID NO: 309862 - DNA, 12 bp, Artificial Sequence
  Oligonucleotide primer for the detection of SNP TSC0023710
acacaaacctat

SEQ ID NO: 309863 - DNA, 12 bp, Artificial Sequence
  Oligonucleotide primer for the detection of SNP TSC0023710
acacgaacctat

SEQ ID NO: 309864 - DNA, 12 bp, Artificial Sequence
  Oligonucleotide primer for the detection of SNP TSC0023711
catttatacaca

SEQ ID NO: 309865 - DNA, 12 bp, Artificial Sequence
  Oligonucleotide primer for the detection of SNP TSC0023711
cttaatatacac

SEQ ID NO: 309866 - DNA, 12 bp, Artificial Sequence
  Oligonucleotide primer for the detection of SNP TSC0023711
tatttgtgtata

SEQ ID NO: 309867 - DNA, 12 bp, Artificial Sequence
  Oligonucleotide primer for the detection of SNP TSC0023712
tccctattacta

SEQ ID NO: 309868 - DNA, 12 bp, Artificial Sequence
  Oligonucleotide primer for the detection of SNP TSC0023712
gtgatgttggag

SEQ ID NO: 309869 - DNA, 12 bp, Artificial Sequence
  Oligonucleotide primer for the detection of SNP TSC0023712
taatactaaaaa

SEQ ID NO: 309870 - DNA, 12 bp, Artificial Sequence
  Oligonucleotide primer for the detection of SNP TSC0023713
tatcatcaccct

SEQ ID NO: 309871 - DNA, 12 bp, Artificial Sequence
  Oligonucleotide primer for the detection of SNP TSC0023713
tagttttggggg

SEQ ID NO: 309872 - DNA, 12 bp, Artificial Sequence
  Oligonucleotide primer for the detection of SNP TSC0023714
aaactttaacca

SEQ ID NO: 309873 - DNA, 12 bp, Artificial Sequence
  Oligonucleotide primer for the detection of SNP TSC0023714
ttatatttattt

SEQ ID NO: 309874 - DNA, 12 bp, Artificial Sequence
  Oligonucleotide primer for the detection of SNP TSC0023714
tatattcaccca

SEQ ID NO: 309875 - DNA, 12 bp, Artificial Sequence
  Oligonucleotide primer for the detection of SNP TSC0023714
agattttggtta

SEQ ID NO: 309876 - DNA, 12 bp, Artificial Sequence
  Oligonucleotide primer for the detection of SNP TSC0023715
atctacccacca

SEQ ID NO: 309877 - DNA, 12 bp, Artificial Sequence
  Oligonucleotide primer for the detection of SNP TSC0023715
agatttttgggt

SEQ ID NO: 309878 - DNA, 12 bp, Artificial Sequence
  Oligonucleotide primer for the detection of SNP TSC0023715
aaattcttaaat

SEQ ID NO: 309879 - DNA, 12 bp, Artificial Sequence
  Oligonucleotide primer for the detection of SNP TSC0023715
atttatttatta

SEQ ID NO: 309880 - DNA, 12 bp, Artificial Sequence
  Oligonucleotide primer for the detection of SNP TSC0023716
gaagttaaaaat

SEQ ID NO: 309881 - DNA, 12 bp, Artificial Sequence
  Oligonucleotide primer for the detection of SNP TSC0023717
tagtggtttatg

SEQ ID NO: 309882 - DNA, 12 bp, Artificial Sequence
  Oligonucleotide primer for the detection of SNP TSC0023717
tagtggtttacg

SEQ ID NO: 309883 - DNA, 12 bp, Artificial Sequence
  Oligonucleotide primer for the detection of SNP TSC0023718
catacatacttc

SEQ ID NO: 309884 - DNA, 12 bp, Artificial Sequence
  Oligonucleotide primer for the detection of SNP TSC0023718
aataataataag

SEQ ID NO: 309885 - DNA, 12 bp, Artificial Sequence
  Oligonucleotide primer for the detection of SNP TSC0023718
tgtatgtttttt

SEQ ID NO: 309886 - DNA, 12 bp, Artificial Sequence
  Oligonucleotide primer for the detection of SNP TSC0023719
cctcaataaccc

SEQ ID NO: 309887 - DNA, 12 bp, Artificial Sequence
  Oligonucleotide primer for the detection of SNP TSC0023719
tttaagggtatt

SEQ ID NO: 309888 - DNA, 12 bp, Artificial Sequence
  Oligonucleotide primer for the detection of SNP TSC0023719
ttaaaaacatca

SEQ ID NO: 309889 - DNA, 12 bp, Artificial Sequence
  Oligonucleotide primer for the detection of SNP TSC0023719
tttagtggtttt

SEQ ID NO: 309890 - DNA, 12 bp, Artificial Sequence
  Oligonucleotide primer for the detection of SNP TSC0023720
tgagtttttgtt

SEQ ID NO: 309891 - DNA, 12 bp, Artificial Sequence
  Oligonucleotide primer for the detection of SNP TSC0023721
aaaaatcttata

SEQ ID NO: 309892 - DNA, 12 bp, Artificial Sequence
  Oligonucleotide primer for the detection of SNP TSC0023721
atatttttttat

SEQ ID NO: 309893 - DNA, 12 bp, Artificial Sequence
  Oligonucleotide primer for the detection of SNP TSC0023721
catctctccaca

SEQ ID NO: 309894 - DNA, 12 bp, Artificial Sequence
  Oligonucleotide primer for the detection of SNP TSC0023721
ggattttatgtt

SEQ ID NO: 309895 - DNA, 12 bp, Artificial Sequence
  Oligonucleotide primer for the detection of SNP TSC0023724
ctaactaacaaa

SEQ ID NO: 309896 - DNA, 12 bp, Artificial Sequence
  Oligonucleotide primer for the detection of SNP TSC0023724
ctaactaacgaa

SEQ ID NO: 309897 - DNA, 12 bp, Artificial Sequence
  Oligonucleotide primer for the detection of SNP TSC0023724
atgttggttttt

SEQ ID NO: 309898 - DNA, 12 bp, Artificial Sequence
  Oligonucleotide primer for the detection of SNP TSC0023724
atgtcggttttt

SEQ ID NO: 309899 - DNA, 12 bp, Artificial Sequence
  Oligonucleotide primer for the detection of SNP TSC0023724
ctcccataccaa

SEQ ID NO: 309900 - DNA, 12 bp, Artificial Sequence
  Oligonucleotide primer for the detection of SNP TSC0023724
ctcccataccga

SEQ ID NO: 309901 - DNA, 12 bp, Artificial Sequence
  Oligonucleotide primer for the detection of SNP TSC0023724
atattggttggt

SEQ ID NO: 309902 - DNA, 12 bp, Artificial Sequence
  Oligonucleotide primer for the detection of SNP TSC0023724
atattggttggc

SEQ ID NO: 309903 - DNA, 12 bp, Artificial Sequence
  Oligonucleotide primer for the detection of SNP TSC0023725
ttggtttatgtg

SEQ ID NO: 309904 - DNA, 12 bp, Artificial Sequence
  Oligonucleotide primer for the detection of SNP TSC0023725
ttggtttacgtg

SEQ ID NO: 309905 - DNA, 12 bp, Artificial Sequence
  Oligonucleotide primer for the detection of SNP TSC0023726
tttggagggtag

SEQ ID NO: 309906 - DNA, 12 bp, Artificial Sequence
  Oligonucleotide primer for the detection of SNP TSC0023726
cctaaaaaacaa

SEQ ID NO: 309907 - DNA, 12 bp, Artificial Sequence
  Oligonucleotide primer for the detection of SNP TSC0023726
agatattggttt

SEQ ID NO: 309908 - DNA, 12 bp, Artificial Sequence
  Oligonucleotide primer for the detection of SNP TSC0023727
atataatcttaa

SEQ ID NO: 309909 - DNA, 12 bp, Artificial Sequence
  Oligonucleotide primer for the detection of SNP TSC0023727
taagtttttgat

SEQ ID NO: 309910 - DNA, 12 bp, Artificial Sequence
  Oligonucleotide primer for the detection of SNP TSC0023727
ctaaacccctaa

SEQ ID NO: 309911 - DNA, 12 bp, Artificial Sequence
  Oligonucleotide primer for the detection of SNP TSC0023727
atatgattttgg

SEQ ID NO: 309912 - DNA, 12 bp, Artificial Sequence
  Oligonucleotide primer for the detection of SNP TSC0023728
ctccctaaccct

SEQ ID NO: 309913 - DNA, 12 bp, Artificial Sequence
  Oligonucleotide primer for the detection of SNP TSC0023728
tgttaagtaggg

SEQ ID NO: 309914 - DNA, 12 bp, Artificial Sequence
  Oligonucleotide primer for the detection of SNP TSC0023728
tatcaaacaaaa

SEQ ID NO: 309915 - DNA, 12 bp, Artificial Sequence
  Oligonucleotide primer for the detection of SNP TSC0023732
aacacatataat

SEQ ID NO: 309916 - DNA, 12 bp, Artificial Sequence
  Oligonucleotide primer for the detection of SNP TSC0023732
tatgtattttag

SEQ ID NO: 309917 - DNA, 12 bp, Artificial Sequence
  Oligonucleotide primer for the detection of SNP TSC0023732
tatacactctaa

SEQ ID NO: 309918 - DNA, 12 bp, Artificial Sequence
  Oligonucleotide primer for the detection of SNP TSC0023732
gatatatatagt

SEQ ID NO: 309919 - DNA, 12 bp, Artificial Sequence
  Oligonucleotide primer for the detection of SNP TSC0023734
ccaaatccaact

SEQ ID NO: 309920 - DNA, 12 bp, Artificial Sequence
  Oligonucleotide primer for the detection of SNP TSC0023734
gggaggataggg

SEQ ID NO: 309921 - DNA, 12 bp, Artificial Sequence
  Oligonucleotide primer for the detection of SNP TSC0023735
tggttttgtgtt

SEQ ID NO: 309922 - DNA, 12 bp, Artificial Sequence
  Oligonucleotide primer for the detection of SNP TSC0023735
taactctatacc

SEQ ID NO: 309923 - DNA, 12 bp, Artificial Sequence
  Oligonucleotide primer for the detection of SNP TSC0023736
aaaacaattcca

SEQ ID NO: 309924 - DNA, 12 bp, Artificial Sequence
  Oligonucleotide primer for the detection of SNP TSC0023736
ttggatattttt

SEQ ID NO: 309925 - DNA, 12 bp, Artificial Sequence
  Oligonucleotide primer for the detection of SNP TSC0023736
ttaaatactctt

SEQ ID NO: 309926 - DNA, 12 bp, Artificial Sequence
  Oligonucleotide primer for the detection of SNP TSC0023737
ttaaattcttcc

SEQ ID NO: 309927 - DNA, 12 bp, Artificial Sequence
  Oligonucleotide primer for the detection of SNP TSC0023737
agattgtattat

SEQ ID NO: 309928 - DNA, 12 bp, Artificial Sequence
  Oligonucleotide primer for the detection of SNP TSC0023737
actacattataa

SEQ ID NO: 309929 - DNA, 12 bp, Artificial Sequence
  Oligonucleotide primer for the detection of SNP TSC0023740
caaccataatat

SEQ ID NO: 309930 - DNA, 12 bp, Artificial Sequence
  Oligonucleotide primer for the detection of SNP TSC0023740
caaccgtaatat

SEQ ID NO: 309931 - DNA, 12 bp, Artificial Sequence
  Oligonucleotide primer for the detection of SNP TSC0023740
tgttgtgttgga

SEQ ID NO: 309932 - DNA, 12 bp, Artificial Sequence
  Oligonucleotide primer for the detection of SNP TSC0023740
tgttgtgtcgga

SEQ ID NO: 309933 - DNA, 12 bp, Artificial Sequence
  Oligonucleotide primer for the detection of SNP TSC0023741
aatcttattaca

SEQ ID NO: 309934 - DNA, 12 bp, Artificial Sequence
  Oligonucleotide primer for the detection of SNP TSC0023741
gttttttatatt

SEQ ID NO: 309935 - DNA, 12 bp, Artificial Sequence
  Oligonucleotide primer for the detection of SNP TSC0023741
gttttttatatc

SEQ ID NO: 309936 - DNA, 12 bp, Artificial Sequence
  Oligonucleotide primer for the detection of SNP TSC0023741
attttctacatc

SEQ ID NO: 309937 - DNA, 12 bp, Artificial Sequence
  Oligonukleotid-Primer
tggttttattat

SEQ ID NO: 309938 - DNA, 12 bp, Artificial Sequence
  Oligonucleotide primer for the detection of SNP TSC0023742
attccaaaaatc

SEQ ID NO: 309939 - DNA, 12 bp, Artificial Sequence
  Oligonucleotide primer for the detection of SNP TSC0023742
attccgaaaatc

SEQ ID NO: 309940 - DNA, 12 bp, Artificial Sequence
  Oligonucleotide primer for the detection of SNP TSC0023742
tttaggttggat

SEQ ID NO: 309941 - DNA, 12 bp, Artificial Sequence
  Oligonucleotide primer for the detection of SNP TSC0023742
tccaaattaaat

SEQ ID NO: 309942 - DNA, 12 bp, Artificial Sequence
  Oligonucleotide primer for the detection of SNP TSC0023742
gttttgggagtt

SEQ ID NO: 309943 - DNA, 12 bp, Artificial Sequence
  Oligonucleotide primer for the detection of SNP TSC0023742
gtttcgggagtt

SEQ ID NO: 309944 - DNA, 12 bp, Artificial Sequence
  Oligonucleotide primer for the detection of SNP TSC0023746
cacccaactttc

SEQ ID NO: 309945 - DNA, 12 bp, Artificial Sequence
  Oligonucleotide primer for the detection of SNP TSC0023746
tgtatagttgga

SEQ ID NO: 309946 - DNA, 12 bp, Artificial Sequence
  Oligonucleotide primer for the detection of SNP TSC0023746
cgtatagttgga

SEQ ID NO: 309947 - DNA, 12 bp, Artificial Sequence
  Oligonucleotide primer for the detection of SNP TSC0023750
tattattctaac

SEQ ID NO: 309948 - DNA, 12 bp, Artificial Sequence
  Oligonucleotide primer for the detection of SNP TSC0023750
ttggggaattag

SEQ ID NO: 309949 - DNA, 12 bp, Artificial Sequence
  Oligonucleotide primer for the detection of SNP TSC0023752
tttttctcaatc

SEQ ID NO: 309950 - DNA, 12 bp, Artificial Sequence
  Oligonucleotide primer for the detection of SNP TSC0023752
gtgagattatga

SEQ ID NO: 309951 - DNA, 12 bp, Artificial Sequence
  Oligonucleotide primer for the detection of SNP TSC0023753
ctccattttcct

SEQ ID NO: 309952 - DNA, 12 bp, Artificial Sequence
  Oligonucleotide primer for the detection of SNP TSC0023753
gatttatagtgg

SEQ ID NO: 309953 - DNA, 12 bp, Artificial Sequence
  Oligonucleotide primer for the detection of SNP TSC0023753
aatctataataa

SEQ ID NO: 309954 - DNA, 12 bp, Artificial Sequence
  Oligonucleotide primer for the detection of SNP TSC0023754
taattaaaaccc

SEQ ID NO: 309955 - DNA, 12 bp, Artificial Sequence
  Oligonucleotide primer for the detection of SNP TSC0023755
ccaaatcactta

SEQ ID NO: 309956 - DNA, 12 bp, Artificial Sequence
  Oligonucleotide primer for the detection of SNP TSC0023755
ccaaatcgctta

SEQ ID NO: 309957 - DNA, 12 bp, Artificial Sequence
  Oligonucleotide primer for the detection of SNP TSC0023755
gaggttataggt

SEQ ID NO: 309958 - DNA, 12 bp, Artificial Sequence
  Oligonucleotide primer for the detection of SNP TSC0023755
gaggttataggc

SEQ ID NO: 309959 - DNA, 12 bp, Artificial Sequence
  Oligonucleotide primer for the detection of SNP TSC0023755
aaatcacaaaca

SEQ ID NO: 309960 - DNA, 12 bp, Artificial Sequence
  Oligonucleotide primer for the detection of SNP TSC0023755
aaatcacaaacg

SEQ ID NO: 309961 - DNA, 12 bp, Artificial Sequence
  Oligonucleotide primer for the detection of SNP TSC0023755
taggttgtttgt

SEQ ID NO: 309962 - DNA, 12 bp, Artificial Sequence
  Oligonucleotide primer for the detection of SNP TSC0023755
taggtcgtttgt

SEQ ID NO: 309963 - DNA, 12 bp, Artificial Sequence
  Oligonucleotide primer for the detection of SNP TSC0023755
taggttgtttgc

SEQ ID NO: 309964 - DNA, 12 bp, Artificial Sequence
  Oligonucleotide primer for the detection of SNP TSC0023755
taggtcgtttgc

SEQ ID NO: 309965 - DNA, 12 bp, Artificial Sequence
  Oligonucleotide primer for the detection of SNP TSC0023756
caacaaaaataa

SEQ ID NO: 309966 - DNA, 12 bp, Artificial Sequence
  Oligonucleotide primer for the detection of SNP TSC0023756
cgacaaaaataa

SEQ ID NO: 309967 - DNA, 12 bp, Artificial Sequence
  Oligonucleotide primer for the detection of SNP TSC0023756
tttttatcgttt

SEQ ID NO: 309968 - DNA, 12 bp, Artificial Sequence
  Oligonucleotide primer for the detection of SNP TSC0023756
ttcccatcaccc

SEQ ID NO: 309969 - DNA, 12 bp, Artificial Sequence
  Oligonucleotide primer for the detection of SNP TSC0023756
ttcccatcgccc

SEQ ID NO: 309970 - DNA, 12 bp, Artificial Sequence
  Oligonucleotide primer for the detection of SNP TSC0023756
tggtaaaagtga

SEQ ID NO: 309971 - DNA, 12 bp, Artificial Sequence
  Oligonucleotide primer for the detection of SNP TSC0023756
cggtaaaagtga

SEQ ID NO: 309972 - DNA, 12 bp, Artificial Sequence
  Oligonucleotide primer for the detection of SNP TSC0023757
acaaaaacacaa

SEQ ID NO: 309973 - DNA, 12 bp, Artificial Sequence
  Oligonucleotide primer for the detection of SNP TSC0023757
tactttacacct

SEQ ID NO: 309974 - DNA, 12 bp, Artificial Sequence
  Oligonucleotide primer for the detection of SNP TSC0023757
gtaggagtatag

SEQ ID NO: 309975 - DNA, 12 bp, Artificial Sequence
  Oligonucleotide primer for the detection of SNP TSC0023760
cttaaactcttc

SEQ ID NO: 309976 - DNA, 12 bp, Artificial Sequence
  Oligonucleotide primer for the detection of SNP TSC0023760
gggttataggag

SEQ ID NO: 309977 - DNA, 12 bp, Artificial Sequence
  Oligonucleotide primer for the detection of SNP TSC0023760
aaactataaaaa

SEQ ID NO: 309978 - DNA, 12 bp, Artificial Sequence
  Oligonucleotide primer for the detection of SNP TSC0023761
aatcaatacacc

SEQ ID NO: 309979 - DNA, 12 bp, Artificial Sequence
  Oligonucleotide primer for the detection of SNP TSC0023761
tagtttaaagaa

SEQ ID NO: 309980 - DNA, 12 bp, Artificial Sequence
  Oligonucleotide primer for the detection of SNP TSC0023763
ttccaaacaaca

SEQ ID NO: 309981 - DNA, 12 bp, Artificial Sequence
  Oligonucleotide primer for the detection of SNP TSC0023763
ctcccactccaa

SEQ ID NO: 309982 - DNA, 12 bp, Artificial Sequence
  Oligonucleotide primer for the detection of SNP TSC0023763
attttaagtaat

SEQ ID NO: 309983 - DNA, 12 bp, Artificial Sequence
  Oligonucleotide primer for the detection of SNP TSC0023764
atttccaaactc

SEQ ID NO: 309984 - DNA, 12 bp, Artificial Sequence
  Oligonucleotide primer for the detection of SNP TSC0023764
ttaggaaattag

SEQ ID NO: 309985 - DNA, 12 bp, Artificial Sequence
  Oligonucleotide primer for the detection of SNP TSC0023765
atacaaactaac

SEQ ID NO: 309986 - DNA, 12 bp, Artificial Sequence
  Oligonucleotide primer for the detection of SNP TSC0023765
cctctatctaaa

SEQ ID NO: 309987 - DNA, 12 bp, Artificial Sequence
  Oligonucleotide primer for the detection of SNP TSC0023765
gtataggttggt

SEQ ID NO: 309988 - DNA, 12 bp, Artificial Sequence
  Oligonucleotide primer for the detection of SNP TSC0023766
gttttatttgat

SEQ ID NO: 309989 - DNA, 12 bp, Artificial Sequence
  Oligonucleotide primer for the detection of SNP TSC0023766
atcccacttaat

SEQ ID NO: 309990 - DNA, 12 bp, Artificial Sequence
  Oligonucleotide primer for the detection of SNP TSC0023766
tgggtgtttagg

SEQ ID NO: 309991 - DNA, 12 bp, Artificial Sequence
  Oligonucleotide primer for the detection of SNP TSC0023767
tttctaattatc

SEQ ID NO: 309992 - DNA, 12 bp, Artificial Sequence
  Oligonucleotide primer for the detection of SNP TSC0023768
atcaataactac

SEQ ID NO: 309993 - DNA, 12 bp, Artificial Sequence
  Oligonucleotide primer for the detection of SNP TSC0023768
tttttagtttga

SEQ ID NO: 309994 - DNA, 12 bp, Artificial Sequence
  Oligonucleotide primer for the detection of SNP TSC0023769
tacctataatcc

SEQ ID NO: 309995 - DNA, 12 bp, Artificial Sequence
  Oligonucleotide primer for the detection of SNP TSC0023770
acctcaaataaa

SEQ ID NO: 309996 - DNA, 12 bp, Artificial Sequence
  Oligonucleotide primer for the detection of SNP TSC0023770
aaggtttaggta

SEQ ID NO: 309997 - DNA, 12 bp, Artificial Sequence
  Oligonucleotide primer for the detection of SNP TSC0023770
aacctaaacaaa

SEQ ID NO: 309998 - DNA, 12 bp, Artificial Sequence
  Oligonucleotide primer for the detection of SNP TSC0023770
tttaggtgagtt

SEQ ID NO: 309999 - DNA, 12 bp, Artificial Sequence
  Oligonucleotide primer for the detection of SNP TSC0023771
ccctaacactaa

SEQ ID NO: 310000 - DNA, 12 bp, Artificial Sequence
  Oligonucleotide primer for the detection of SNP TSC0023771
tagattagtttt

SEQ ID NO: 310001 - DNA, 12 bp, Artificial Sequence
  Oligonucleotide primer for the detection of SNP TSC0023771
aaattaattcca

SEQ ID NO: 310002 - DNA, 12 bp, Artificial Sequence
  Oligonucleotide primer for the detection of SNP TSC0023771
ttttttggtatt

SEQ ID NO: 310003 - DNA, 12 bp, Artificial Sequence
  Oligonucleotide primer for the detection of SNP TSC0023772
taactactaact

SEQ ID NO: 310004 - DNA, 12 bp, Artificial Sequence
  Oligonucleotide primer for the detection of SNP TSC0023772
agggaaatttag

SEQ ID NO: 310005 - DNA, 12 bp, Artificial Sequence
  Oligonucleotide primer for the detection of SNP TSC0023775
aaggttaagaga

SEQ ID NO: 310006 - DNA, 12 bp, Artificial Sequence
  Oligonucleotide primer for the detection of SNP TSC0023776
cacacgaaaaat

SEQ ID NO: 310007 - DNA, 12 bp, Artificial Sequence
  Oligonucleotide primer for the detection of SNP TSC0023776
cacgcaaaaaat

SEQ ID NO: 310008 - DNA, 12 bp, Artificial Sequence
  Oligonucleotide primer for the detection of SNP TSC0023776
cacgcgaaaaat

SEQ ID NO: 310009 - DNA, 12 bp, Artificial Sequence
  Oligonucleotide primer for the detection of SNP TSC0023776
cgcacgaaaaat

SEQ ID NO: 310010 - DNA, 12 bp, Artificial Sequence
  Oligonucleotide primer for the detection of SNP TSC0023776
cgcgcaaaaaat

SEQ ID NO: 310011 - DNA, 12 bp, Artificial Sequence
  Oligonucleotide primer for the detection of SNP TSC0023776
cgcgcgaaaaat

SEQ ID NO: 310012 - DNA, 12 bp, Artificial Sequence
  Oligonucleotide primer for the detection of SNP TSC0023776
attgaagttggg

SEQ ID NO: 310013 - DNA, 12 bp, Artificial Sequence
  Oligonucleotide primer for the detection of SNP TSC0023776
atcgaagttggg

SEQ ID NO: 310014 - DNA, 12 bp, Artificial Sequence
  Oligonucleotide primer for the detection of SNP TSC0023776
attgaagtcggg

SEQ ID NO: 310015 - DNA, 12 bp, Artificial Sequence
  Oligonucleotide primer for the detection of SNP TSC0023776
atcgaagtcggg

SEQ ID NO: 310016 - DNA, 12 bp, Artificial Sequence
  Oligonucleotide primer for the detection of SNP TSC0023776
accaaaaccaaa

SEQ ID NO: 310017 - DNA, 12 bp, Artificial Sequence
  Oligonucleotide primer for the detection of SNP TSC0023776
accaaaaccgaa

SEQ ID NO: 310018 - DNA, 12 bp, Artificial Sequence
  Oligonucleotide primer for the detection of SNP TSC0023776
accgaaaccaaa

SEQ ID NO: 310019 - DNA, 12 bp, Artificial Sequence
  Oligonucleotide primer for the detection of SNP TSC0023776
accgaaaccgaa

SEQ ID NO: 310020 - DNA, 12 bp, Artificial Sequence
  Oligonucleotide primer for the detection of SNP TSC0023776
tgtgtgggggat

SEQ ID NO: 310021 - DNA, 12 bp, Artificial Sequence
  Oligonucleotide primer for the detection of SNP TSC0023776
cgtgtgggggat

SEQ ID NO: 310022 - DNA, 12 bp, Artificial Sequence
  Oligonucleotide primer for the detection of SNP TSC0023776
tgcgtgggggat

SEQ ID NO: 310023 - DNA, 12 bp, Artificial Sequence
  Oligonucleotide primer for the detection of SNP TSC0023776
tgtgcgggggat

SEQ ID NO: 310024 - DNA, 12 bp, Artificial Sequence
  Oligonucleotide primer for the detection of SNP TSC0023776
cgcgtgggggat

SEQ ID NO: 310025 - DNA, 12 bp, Artificial Sequence
  Oligonucleotide primer for the detection of SNP TSC0023776
cgtgcgggggat

SEQ ID NO: 310026 - DNA, 12 bp, Artificial Sequence
  Oligonucleotide primer for the detection of SNP TSC0023776
tgcgcgggggat

SEQ ID NO: 310027 - DNA, 12 bp, Artificial Sequence
  Oligonucleotide primer for the detection of SNP TSC0023776
cgcgcgggggat

SEQ ID NO: 310028 - DNA, 12 bp, Artificial Sequence
  Oligonucleotide primer for the detection of SNP TSC0023777
ataaacacctat

SEQ ID NO: 310029 - DNA, 12 bp, Artificial Sequence
  Oligonucleotide primer for the detection of SNP TSC0023777
tagggtgggtaa

SEQ ID NO: 310030 - DNA, 12 bp, Artificial Sequence
  Oligonucleotide primer for the detection of SNP TSC0023777
tagggcgggtaa

SEQ ID NO: 310031 - DNA, 12 bp, Artificial Sequence
  Oligonucleotide primer for the detection of SNP TSC0023777
aaaacgaataaa

SEQ ID NO: 310032 - DNA, 12 bp, Artificial Sequence
  Oligonucleotide primer for the detection of SNP TSC0023777
tggatatttgtt

SEQ ID NO: 310033 - DNA, 12 bp, Artificial Sequence
  Oligonucleotide primer for the detection of SNP TSC0023777
tggatatttgtc

SEQ ID NO: 310034 - DNA, 12 bp, Artificial Sequence
  Oligonucleotide primer for the detection of SNP TSC0023778
ccaacctaaact

SEQ ID NO: 310035 - DNA, 12 bp, Artificial Sequence
  Oligonucleotide primer for the detection of SNP TSC0023778
ataataaattaa

SEQ ID NO: 310036 - DNA, 12 bp, Artificial Sequence
  Oligonucleotide primer for the detection of SNP TSC0023779
aaatatgttata

SEQ ID NO: 310037 - DNA, 12 bp, Artificial Sequence
  Oligonucleotide primer for the detection of SNP TSC0023779
aaatatactaca

SEQ ID NO: 310038 - DNA, 12 bp, Artificial Sequence
  Oligonucleotide primer for the detection of SNP TSC0023779
gtgatagttttt

SEQ ID NO: 310039 - DNA, 12 bp, Artificial Sequence
  Oligonucleotide primer for the detection of SNP TSC0023783
aaaaacctaacc

SEQ ID NO: 310040 - DNA, 12 bp, Artificial Sequence
  Oligonucleotide primer for the detection of SNP TSC0023783
ttatagggtggg

SEQ ID NO: 310041 - DNA, 12 bp, Artificial Sequence
  Oligonucleotide primer for the detection of SNP TSC0023784
catattttaaaa

SEQ ID NO: 310042 - DNA, 12 bp, Artificial Sequence
  Oligonucleotide primer for the detection of SNP TSC0023784
gtgtataatatt

SEQ ID NO: 310043 - DNA, 12 bp, Artificial Sequence
  Oligonucleotide primer for the detection of SNP TSC0023784
atacataacatt

SEQ ID NO: 310044 - DNA, 12 bp, Artificial Sequence
  Oligonucleotide primer for the detection of SNP TSC0023785
atttttatatat

SEQ ID NO: 310045 - DNA, 12 bp, Artificial Sequence
  Oligonucleotide primer for the detection of SNP TSC0023785
tatttttatata

SEQ ID NO: 310046 - DNA, 12 bp, Artificial Sequence
  Oligonucleotide primer for the detection of SNP TSC0023786
attttctaacat

SEQ ID NO: 310047 - DNA, 12 bp, Artificial Sequence
  Oligonucleotide primer for the detection of SNP TSC0023786
ataaatgttaaa

SEQ ID NO: 310048 - DNA, 12 bp, Artificial Sequence
  Oligonucleotide primer for the detection of SNP TSC0023786
attttttaatat

SEQ ID NO: 310049 - DNA, 12 bp, Artificial Sequence
  Oligonucleotide primer for the detection of SNP TSC0023788
aattcctataat

SEQ ID NO: 310050 - DNA, 12 bp, Artificial Sequence
  Oligonucleotide primer for the detection of SNP TSC0023788
atttagaggagg

SEQ ID NO: 310051 - DNA, 12 bp, Artificial Sequence
  Oligonucleotide primer for the detection of SNP TSC0023789
tccaaaaaccca

SEQ ID NO: 310052 - DNA, 12 bp, Artificial Sequence
  Oligonucleotide primer for the detection of SNP TSC0023789
gtttttcgtatt

SEQ ID NO: 310053 - DNA, 12 bp, Artificial Sequence
  Oligonucleotide primer for the detection of SNP TSC0023789
ttatctcccata

SEQ ID NO: 310054 - DNA, 12 bp, Artificial Sequence
  Oligonucleotide primer for the detection of SNP TSC0023789
ttatctcccgta

SEQ ID NO: 310055 - DNA, 12 bp, Artificial Sequence
  Oligonucleotide primer for the detection of SNP TSC0023789
ttttagaaattt

SEQ ID NO: 310056 - DNA, 12 bp, Artificial Sequence
  Oligonucleotide primer for the detection of SNP TSC0023790
caaacatcaaat

SEQ ID NO: 310057 - DNA, 12 bp, Artificial Sequence
  Oligonucleotide primer for the detection of SNP TSC0023790
tagataatttta

SEQ ID NO: 310058 - DNA, 12 bp, Artificial Sequence
  Oligonucleotide primer for the detection of SNP TSC0023791
tatcttaaactc

SEQ ID NO: 310059 - DNA, 12 bp, Artificial Sequence
  Oligonucleotide primer for the detection of SNP TSC0023791
ggtattagtaaa

SEQ ID NO: 310060 - DNA, 12 bp, Artificial Sequence
  Oligonucleotide primer for the detection of SNP TSC0023793
cacacacatact

SEQ ID NO: 310061 - DNA, 12 bp, Artificial Sequence
  Oligonucleotide primer for the detection of SNP TSC0023793
tatgtgtttgta

SEQ ID NO: 310062 - DNA, 12 bp, Artificial Sequence
  Oligonucleotide primer for the detection of SNP TSC0023794
attatcttatca

SEQ ID NO: 310063 - DNA, 12 bp, Artificial Sequence
  Oligonucleotide primer for the detection of SNP TSC0023794
ttttttgtatgt

SEQ ID NO: 310064 - DNA, 12 bp, Artificial Sequence
  Oligonucleotide primer for the detection of SNP TSC0023794
tcttttacatac

SEQ ID NO: 310065 - DNA, 12 bp, Artificial Sequence
  Oligonucleotide primer for the detection of SNP TSC0023794
gttattttatta

SEQ ID NO: 310066 - DNA, 12 bp, Artificial Sequence
  Oligonucleotide primer for the detection of SNP TSC0023795
aaaaaattcctt

SEQ ID NO: 310067 - DNA, 12 bp, Artificial Sequence
  Oligonucleotide primer for the detection of SNP TSC0023795
tttttatgagaa

SEQ ID NO: 310068 - DNA, 12 bp, Artificial Sequence
  Oligonucleotide primer for the detection of SNP TSC0023795
tttctataaaaa

SEQ ID NO: 310069 - DNA, 12 bp, Artificial Sequence
  Oligonucleotide primer for the detection of SNP TSC0023795
ggggagtttttt

SEQ ID NO: 310070 - DNA, 12 bp, Artificial Sequence
  Oligonucleotide primer for the detection of SNP TSC0023796
tataccaaaatt

SEQ ID NO: 310071 - DNA, 12 bp, Artificial Sequence
  Oligonucleotide primer for the detection of SNP TSC0023797
aactaaaatcat

SEQ ID NO: 310072 - DNA, 12 bp, Artificial Sequence
  Oligonucleotide primer for the detection of SNP TSC0023797
aactaaaatcgt

SEQ ID NO: 310073 - DNA, 12 bp, Artificial Sequence
  Oligonucleotide primer for the detection of SNP TSC0023797
tttagattatta

SEQ ID NO: 310074 - DNA, 12 bp, Artificial Sequence
  Oligonucleotide primer for the detection of SNP TSC0023798
gtttgggagttg

SEQ ID NO: 310075 - DNA, 12 bp, Artificial Sequence
  Oligonucleotide primer for the detection of SNP TSC0023799
aaccttccaacc

SEQ ID NO: 310076 - DNA, 12 bp, Artificial Sequence
  Oligonucleotide primer for the detection of SNP TSC0023799
tttagagttagg

SEQ ID NO: 310077 - DNA, 12 bp, Artificial Sequence
  Oligonucleotide primer for the detection of SNP TSC0023801
aaatcaaaacaa

SEQ ID NO: 310078 - DNA, 12 bp, Artificial Sequence
  Oligonucleotide primer for the detection of SNP TSC0023801
ttttggtataag

SEQ ID NO: 310079 - DNA, 12 bp, Artificial Sequence
  Oligonucleotide primer for the detection of SNP TSC0023801
ctttaacataaa

SEQ ID NO: 310080 - DNA, 12 bp, Artificial Sequence
  Oligonucleotide primer for the detection of SNP TSC0023801
aattaaaataat

SEQ ID NO: 310081 - DNA, 12 bp, Artificial Sequence
  Oligonucleotide primer for the detection of SNP TSC0023802
aacataaatttc

SEQ ID NO: 310082 - DNA, 12 bp, Artificial Sequence
  Oligonucleotide primer for the detection of SNP TSC0023803
acataaatttcc

SEQ ID NO: 310083 - DNA, 12 bp, Artificial Sequence
  Oligonucleotide primer for the detection of SNP TSC0023803
taaatttttaaa

SEQ ID NO: 310084 - DNA, 12 bp, Artificial Sequence
  Oligonucleotide primer for the detection of SNP TSC0023804
aatgtagggtaa

SEQ ID NO: 310085 - DNA, 12 bp, Artificial Sequence
  Oligonucleotide primer for the detection of SNP TSC0023807
tctccttttctt

SEQ ID NO: 310086 - DNA, 12 bp, Artificial Sequence
  Oligonucleotide primer for the detection of SNP TSC0023807
ttttggaagaga

SEQ ID NO: 310087 - DNA, 12 bp, Artificial Sequence
  Oligonucleotide primer for the detection of SNP TSC0023808
aaaatacatcaa

SEQ ID NO: 310088 - DNA, 12 bp, Artificial Sequence
  Oligonucleotide primer for the detection of SNP TSC0023808
ttgaatattaat

SEQ ID NO: 310089 - DNA, 12 bp, Artificial Sequence
  Oligonucleotide primer for the detection of SNP TSC0023808
gagaagtgtatt

SEQ ID NO: 310090 - DNA, 12 bp, Artificial Sequence
  Oligonucleotide primer for the detection of SNP TSC0023809
acctaatcttta

SEQ ID NO: 310091 - DNA, 12 bp, Artificial Sequence
  Oligonucleotide primer for the detection of SNP TSC0023809
tttagggttgtt

SEQ ID NO: 310092 - DNA, 12 bp, Artificial Sequence
  Oligonucleotide primer for the detection of SNP TSC0023809
ttttaaaactat

SEQ ID NO: 310093 - DNA, 12 bp, Artificial Sequence
  Oligonucleotide primer for the detection of SNP TSC0023809
tatttggttttt

SEQ ID NO: 310094 - DNA, 12 bp, Artificial Sequence
  Oligonucleotide primer for the detection of SNP TSC0023810
aaactaaactcc

SEQ ID NO: 310095 - DNA, 12 bp, Artificial Sequence
  Oligonucleotide primer for the detection of SNP TSC0023810
ttgtggtttagg

SEQ ID NO: 310096 - DNA, 12 bp, Artificial Sequence
  Oligonucleotide primer for the detection of SNP TSC0023810
tcgtggtttagg

SEQ ID NO: 310097 - DNA, 12 bp, Artificial Sequence
  Oligonucleotide primer for the detection of SNP TSC0023810
ccataactcaaa

SEQ ID NO: 310098 - DNA, 12 bp, Artificial Sequence
  Oligonucleotide primer for the detection of SNP TSC0023810
ccgtaactcaaa

SEQ ID NO: 310099 - DNA, 12 bp, Artificial Sequence
  Oligonucleotide primer for the detection of SNP TSC0023810
aggttgggtttt

SEQ ID NO: 310100 - DNA, 12 bp, Artificial Sequence
  Oligonucleotide primer for the detection of SNP TSC0023811
ttcttcccttcc

SEQ ID NO: 310101 - DNA, 12 bp, Artificial Sequence
  Oligonucleotide primer for the detection of SNP TSC0023811
agtatatttagg

SEQ ID NO: 310102 - DNA, 12 bp, Artificial Sequence
  Oligonucleotide primer for the detection of SNP TSC0023812
tttcttcccttc

SEQ ID NO: 310103 - DNA, 12 bp, Artificial Sequence
  Oligonucleotide primer for the detection of SNP TSC0023812
acacatccaaaa

SEQ ID NO: 310104 - DNA, 12 bp, Artificial Sequence
  Oligonucleotide primer for the detection of SNP TSC0023813
aaattagaagga

SEQ ID NO: 310105 - DNA, 12 bp, Artificial Sequence
  Oligonucleotide primer for the detection of SNP TSC0023814
taattagtggtt

SEQ ID NO: 310106 - DNA, 12 bp, Artificial Sequence
  Oligonucleotide primer for the detection of SNP TSC0023814
cttaaccaataa

SEQ ID NO: 310107 - DNA, 12 bp, Artificial Sequence
  Oligonucleotide primer for the detection of SNP TSC0023814
aagaataggttt

SEQ ID NO: 310108 - DNA, 12 bp, Artificial Sequence
  Oligonucleotide primer for the detection of SNP TSC0023816
taaaaacttctc

SEQ ID NO: 310109 - DNA, 12 bp, Artificial Sequence
  Oligonucleotide primer for the detection of SNP TSC0023816
ttggagtttttg

SEQ ID NO: 310110 - DNA, 12 bp, Artificial Sequence
  Oligonucleotide primer for the detection of SNP TSC0023819
gaaattgtgaaa

SEQ ID NO: 310111 - DNA, 12 bp, Artificial Sequence
  Oligonucleotide primer for the detection of SNP TSC0023820
ttatcttaaaat

SEQ ID NO: 310112 - DNA, 12 bp, Artificial Sequence
  Oligonucleotide primer for the detection of SNP TSC0023820
atgaaatttgta

SEQ ID NO: 310113 - DNA, 12 bp, Artificial Sequence
  Oligonucleotide primer for the detection of SNP TSC0023821
atctacccacct

SEQ ID NO: 310114 - DNA, 12 bp, Artificial Sequence
  Oligonucleotide primer for the detection of SNP TSC0023823
aaactaaaatta

SEQ ID NO: 310115 - DNA, 12 bp, Artificial Sequence
  Oligonucleotide primer for the detection of SNP TSC0023823
tttatatgattt

SEQ ID NO: 310116 - DNA, 12 bp, Artificial Sequence
  Oligonucleotide primer for the detection of SNP TSC0023823
ccatataaccca

SEQ ID NO: 310117 - DNA, 12 bp, Artificial Sequence
  Oligonucleotide primer for the detection of SNP TSC0023823
aggattggaatt

SEQ ID NO: 310118 - DNA, 12 bp, Artificial Sequence
  Oligonucleotide primer for the detection of SNP TSC0023824
tccatataaccc

SEQ ID NO: 310119 - DNA, 12 bp, Artificial Sequence
  Oligonucleotide primer for the detection of SNP TSC0023824
ttaggattggaa

SEQ ID NO: 310120 - DNA, 12 bp, Artificial Sequence
  Oligonucleotide primer for the detection of SNP TSC0023825
tctacttcacca

SEQ ID NO: 310121 - DNA, 12 bp, Artificial Sequence
  Oligonucleotide primer for the detection of SNP TSC0023825
tctacttcaccg

SEQ ID NO: 310122 - DNA, 12 bp, Artificial Sequence
  Oligonucleotide primer for the detection of SNP TSC0023825
tctacttcgcca

SEQ ID NO: 310123 - DNA, 12 bp, Artificial Sequence
  Oligonukleotid-Primer
tctacttcgccg

SEQ ID NO: 310124 - DNA, 12 bp, Artificial Sequence
  Oligonucleotide primer for the detection of SNP TSC0023825
agttaggagaat

SEQ ID NO: 310125 - DNA, 12 bp, Artificial Sequence
  Oligonucleotide primer for the detection of SNP TSC0023825
tttgttttgttg

SEQ ID NO: 310126 - DNA, 12 bp, Artificial Sequence
  Oligonucleotide primer for the detection of SNP TSC0023825
tttgtttcgttg

SEQ ID NO: 310127 - DNA, 12 bp, Artificial Sequence
  Oligonucleotide primer for the detection of SNP TSC0023825
tttgttttgtcg

SEQ ID NO: 310128 - DNA, 12 bp, Artificial Sequence
  Oligonucleotide primer for the detection of SNP TSC0023825
tttgtttcgtcg

SEQ ID NO: 310129 - DNA, 12 bp, Artificial Sequence
  Oligonucleotide primer for the detection of SNP TSC0023826
aagataaattaa

SEQ ID NO: 310130 - DNA, 12 bp, Artificial Sequence
  Oligonucleotide primer for the detection of SNP TSC0023827
ccttttaattac

SEQ ID NO: 310131 - DNA, 12 bp, Artificial Sequence
  Oligonucleotide primer for the detection of SNP TSC0023827
taaaaatgttag

SEQ ID NO: 310132 - DNA, 12 bp, Artificial Sequence
  Oligonucleotide primer for the detection of SNP TSC0023827
caaaaatatcaa

SEQ ID NO: 310133 - DNA, 12 bp, Artificial Sequence
  Oligonucleotide primer for the detection of SNP TSC0023828
cataaatacctt

SEQ ID NO: 310134 - DNA, 12 bp, Artificial Sequence
  Oligonucleotide primer for the detection of SNP TSC0023828
tagtagtaatta

SEQ ID NO: 310135 - DNA, 12 bp, Artificial Sequence
  Oligonucleotide primer for the detection of SNP TSC0023830
aaaaaatccctc

SEQ ID NO: 310136 - DNA, 12 bp, Artificial Sequence
  Oligonucleotide primer for the detection of SNP TSC0023830
tttagaaggtgg

SEQ ID NO: 310137 - DNA, 12 bp, Artificial Sequence
  Oligonucleotide primer for the detection of SNP TSC0023830
ttcaaaaaataa

SEQ ID NO: 310138 - DNA, 12 bp, Artificial Sequence
  Oligonucleotide primer for the detection of SNP TSC0023830
aggaagtttttt

SEQ ID NO: 310139 - DNA, 12 bp, Artificial Sequence
  Oligonucleotide primer for the detection of SNP TSC0023831
tttatcttatat

SEQ ID NO: 310140 - DNA, 12 bp, Artificial Sequence
  Oligonucleotide primer for the detection of SNP TSC0023831
taaaagtaaata

SEQ ID NO: 310141 - DNA, 12 bp, Artificial Sequence
  Oligonucleotide primer for the detection of SNP TSC0023832
tttattttacat

SEQ ID NO: 310142 - DNA, 12 bp, Artificial Sequence
  Oligonucleotide primer for the detection of SNP TSC0023832
ttatttttgaaa

SEQ ID NO: 310143 - DNA, 12 bp, Artificial Sequence
  Oligonucleotide primer for the detection of SNP TSC0023833
actaaaaaaccc

SEQ ID NO: 310144 - DNA, 12 bp, Artificial Sequence
  Oligonucleotide primer for the detection of SNP TSC0023833
tttttagggatg

SEQ ID NO: 310145 - DNA, 12 bp, Artificial Sequence
  Oligonucleotide primer for the detection of SNP TSC0023833
tttcaaaaataa

SEQ ID NO: 310146 - DNA, 12 bp, Artificial Sequence
  Oligonucleotide primer for the detection of SNP TSC0023833
ttgagggatttt

SEQ ID NO: 310147 - DNA, 12 bp, Artificial Sequence
  Oligonucleotide primer for the detection of SNP TSC0023834
cactaaaataat

SEQ ID NO: 310148 - DNA, 12 bp, Artificial Sequence
  Oligonucleotide primer for the detection of SNP TSC0023834
gtagtgagttaa

SEQ ID NO: 310149 - DNA, 12 bp, Artificial Sequence
  Oligonucleotide primer for the detection of SNP TSC0023836
aaaccaacaatt

SEQ ID NO: 310150 - DNA, 12 bp, Artificial Sequence
  Oligonucleotide primer for the detection of SNP TSC0023836
aaaccaacgatt

SEQ ID NO: 310151 - DNA, 12 bp, Artificial Sequence
  Oligonucleotide primer for the detection of SNP TSC0023836
ttggaaatgtag

SEQ ID NO: 310152 - DNA, 12 bp, Artificial Sequence
  Oligonucleotide primer for the detection of SNP TSC0023839
aaacgaaatctt

SEQ ID NO: 310153 - DNA, 12 bp, Artificial Sequence
  Oligonucleotide primer for the detection of SNP TSC0023839
taagtttaagta

SEQ ID NO: 310154 - DNA, 12 bp, Artificial Sequence
  Oligonucleotide primer for the detection of SNP TSC0023840
taataaaaccaa

SEQ ID NO: 310155 - DNA, 12 bp, Artificial Sequence
  Oligonucleotide primer for the detection of SNP TSC0023840
tgataattttgt

SEQ ID NO: 310156 - DNA, 12 bp, Artificial Sequence
  Oligonucleotide primer for the detection of SNP TSC0023840
taataactttat

SEQ ID NO: 310157 - DNA, 12 bp, Artificial Sequence
  Oligonucleotide primer for the detection of SNP TSC0023840
gtggtgaagtta

SEQ ID NO: 310158 - DNA, 12 bp, Artificial Sequence
  Oligonucleotide primer for the detection of SNP TSC0023841
aactaacctaat

SEQ ID NO: 310159 - DNA, 12 bp, Artificial Sequence
  Oligonucleotide primer for the detection of SNP TSC0023841
taaagtatagaa

SEQ ID NO: 310160 - DNA, 12 bp, Artificial Sequence
  Oligonucleotide primer for the detection of SNP TSC0023842
cctataaccatt

SEQ ID NO: 310161 - DNA, 12 bp, Artificial Sequence
  Oligonucleotide primer for the detection of SNP TSC0023842
cctataaccgtt

SEQ ID NO: 310162 - DNA, 12 bp, Artificial Sequence
  Oligonucleotide primer for the detection of SNP TSC0023842
tgttgtttttcg

SEQ ID NO: 310163 - DNA, 12 bp, Artificial Sequence
  Oligonucleotide primer for the detection of SNP TSC0023844
actaaaaactat

SEQ ID NO: 310164 - DNA, 12 bp, Artificial Sequence
  Oligonucleotide primer for the detection of SNP TSC0023844
attatttggttg

SEQ ID NO: 310165 - DNA, 12 bp, Artificial Sequence
  Oligonucleotide primer for the detection of SNP TSC0023844
attatctaatta

SEQ ID NO: 310166 - DNA, 12 bp, Artificial Sequence
  Oligonucleotide primer for the detection of SNP TSC0023844
attgggggttgt

SEQ ID NO: 310167 - DNA, 12 bp, Artificial Sequence
  Oligonucleotide primer for the detection of SNP TSC0023845
aaactttccttc

SEQ ID NO: 310168 - DNA, 12 bp, Artificial Sequence
  Oligonucleotide primer for the detection of SNP TSC0023846
tggttttgagag

SEQ ID NO: 310169 - DNA, 12 bp, Artificial Sequence
  Oligonucleotide primer for the detection of SNP TSC0023846
tggtttcgagag

SEQ ID NO: 310170 - DNA, 12 bp, Artificial Sequence
  Oligonucleotide primer for the detection of SNP TSC0023849
aacttaactctc

SEQ ID NO: 310171 - DNA, 12 bp, Artificial Sequence
  Oligonucleotide primer for the detection of SNP TSC0023849
atttgggtttag

SEQ ID NO: 310172 - DNA, 12 bp, Artificial Sequence
  Oligonucleotide primer for the detection of SNP TSC0023849
attcgggtttag

SEQ ID NO: 310173 - DNA, 12 bp, Artificial Sequence
  Oligonucleotide primer for the detection of SNP TSC0023850
ttggagtttaag

SEQ ID NO: 310174 - DNA, 12 bp, Artificial Sequence
  Oligonucleotide primer for the detection of SNP TSC0023851
tacataataaat

SEQ ID NO: 310175 - DNA, 12 bp, Artificial Sequence
  Oligonucleotide primer for the detection of SNP TSC0023851
ggtttttcgaga

SEQ ID NO: 310176 - DNA, 12 bp, Artificial Sequence
  Oligonucleotide primer for the detection of SNP TSC0023852
accctactttcc

SEQ ID NO: 310177 - DNA, 12 bp, Artificial Sequence
  Oligonucleotide primer for the detection of SNP TSC0023852
ccaaactcacta

SEQ ID NO: 310178 - DNA, 12 bp, Artificial Sequence
  Oligonucleotide primer for the detection of SNP TSC0023856
tttcaaataaac

SEQ ID NO: 310179 - DNA, 12 bp, Artificial Sequence
  Oligonucleotide primer for the detection of SNP TSC0023856
gataggttgtaa

SEQ ID NO: 310180 - DNA, 12 bp, Artificial Sequence
  Oligonucleotide primer for the detection of SNP TSC0023856
aataaactataa

SEQ ID NO: 310181 - DNA, 12 bp, Artificial Sequence
  Oligonucleotide primer for the detection of SNP TSC0023856
ttttaaatagat

SEQ ID NO: 310182 - DNA, 12 bp, Artificial Sequence
  Oligonucleotide primer for the detection of SNP TSC0023857
ttttaatgtttg

SEQ ID NO: 310183 - DNA, 12 bp, Artificial Sequence
  Oligonucleotide primer for the detection of SNP TSC0023858
aaaaccccttac

SEQ ID NO: 310184 - DNA, 12 bp, Artificial Sequence
  Oligonucleotide primer for the detection of SNP TSC0023858
ttttaatgatga

SEQ ID NO: 310185 - DNA, 12 bp, Artificial Sequence
  Oligonucleotide primer for the detection of SNP TSC0023859
aattaaaacaac

SEQ ID NO: 310186 - DNA, 12 bp, Artificial Sequence
  Oligonucleotide primer for the detection of SNP TSC0023859
gaaggttagaaa

SEQ ID NO: 310187 - DNA, 12 bp, Artificial Sequence
  Oligonucleotide primer for the detection of SNP TSC0023860
ttagtagatggt

SEQ ID NO: 310188 - DNA, 12 bp, Artificial Sequence
  Oligonucleotide primer for the detection of SNP TSC0023860
ccaacaaataac

SEQ ID NO: 310189 - DNA, 12 bp, Artificial Sequence
  Oligonucleotide primer for the detection of SNP TSC0023860
tgttgaatgtgg

SEQ ID NO: 310190 - DNA, 12 bp, Artificial Sequence
  Oligonucleotide primer for the detection of SNP TSC0023861
aaatcaaaattc

SEQ ID NO: 310191 - DNA, 12 bp, Artificial Sequence
  Oligonucleotide primer for the detection of SNP TSC0023861
atgtttgttgta

SEQ ID NO: 310192 - DNA, 12 bp, Artificial Sequence
  Oligonucleotide primer for the detection of SNP TSC0023862
aaataaaaaaca

SEQ ID NO: 310193 - DNA, 12 bp, Artificial Sequence
  Oligonucleotide primer for the detection of SNP TSC0023862
ttttagtaattg

SEQ ID NO: 310194 - DNA, 12 bp, Artificial Sequence
  Oligonucleotide primer for the detection of SNP TSC0023862
ttcaacaactaa

SEQ ID NO: 310195 - DNA, 12 bp, Artificial Sequence
  Oligonucleotide primer for the detection of SNP TSC0023862
agataaaagata

SEQ ID NO: 310196 - DNA, 12 bp, Artificial Sequence
  Oligonucleotide primer for the detection of SNP TSC0023863
tatcaaaaccac

SEQ ID NO: 310197 - DNA, 12 bp, Artificial Sequence
  Oligonucleotide primer for the detection of SNP TSC0023863
tatcaaaaccgc

SEQ ID NO: 310198 - DNA, 12 bp, Artificial Sequence
  Oligonucleotide primer for the detection of SNP TSC0023863
tatcgaaaccac

SEQ ID NO: 310199 - DNA, 12 bp, Artificial Sequence
  Oligonucleotide primer for the detection of SNP TSC0023863
tatcgaaaccgc

SEQ ID NO: 310200 - DNA, 12 bp, Artificial Sequence
  Oligonucleotide primer for the detection of SNP TSC0023863
gttttgttattg

SEQ ID NO: 310201 - DNA, 12 bp, Artificial Sequence
  Oligonucleotide primer for the detection of SNP TSC0023863
gtttcgttattg

SEQ ID NO: 310202 - DNA, 12 bp, Artificial Sequence
  Oligonucleotide primer for the detection of SNP TSC0023863
gttttgttatcg

SEQ ID NO: 310203 - DNA, 12 bp, Artificial Sequence
  Oligonucleotide primer for the detection of SNP TSC0023863
gtttcgttatcg

SEQ ID NO: 310204 - DNA, 12 bp, Artificial Sequence
  Oligonucleotide primer for the detection of SNP TSC0023863
accccaccacca

SEQ ID NO: 310205 - DNA, 12 bp, Artificial Sequence
  Oligonucleotide primer for the detection of SNP TSC0023863
accccaccaccg

SEQ ID NO: 310206 - DNA, 12 bp, Artificial Sequence
  Oligonucleotide primer for the detection of SNP TSC0023863
accccgccacca

SEQ ID NO: 310207 - DNA, 12 bp, Artificial Sequence
  Oligonucleotide primer for the detection of SNP TSC0023863
accccgccaccg

SEQ ID NO: 310208 - DNA, 12 bp, Artificial Sequence
  Oligonucleotide primer for the detection of SNP TSC0023863
gttgaagttgtt

SEQ ID NO: 310209 - DNA, 12 bp, Artificial Sequence
  Oligonucleotide primer for the detection of SNP TSC0023863
gtcgaagttgtt

SEQ ID NO: 310210 - DNA, 12 bp, Artificial Sequence
  Oligonucleotide primer for the detection of SNP TSC0023863
gttgaagtcgtt

SEQ ID NO: 310211 - DNA, 12 bp, Artificial Sequence
  Oligonucleotide primer for the detection of SNP TSC0023863
gtcgaagtcgtt

SEQ ID NO: 310212 - DNA, 12 bp, Artificial Sequence
  Oligonucleotide primer for the detection of SNP TSC0023864
aacaaccatcat

SEQ ID NO: 310213 - DNA, 12 bp, Artificial Sequence
  Oligonucleotide primer for the detection of SNP TSC0023864
agtttttttgtt

SEQ ID NO: 310214 - DNA, 12 bp, Artificial Sequence
  Oligonucleotide primer for the detection of SNP TSC0023864
taactctcttac

SEQ ID NO: 310215 - DNA, 12 bp, Artificial Sequence
  Oligonucleotide primer for the detection of SNP TSC0023864
aatagttattat

SEQ ID NO: 310216 - DNA, 12 bp, Artificial Sequence
  Oligonukleotid-Primer
ggggagttttta

SEQ ID NO: 310217 - DNA, 12 bp, Artificial Sequence
  Oligonucleotide primer for the detection of SNP TSC0023870
atataaaaaact

SEQ ID NO: 310218 - DNA, 12 bp, Artificial Sequence
  Oligonucleotide primer for the detection of SNP TSC0023870
ggtgtttattta

SEQ ID NO: 310219 - DNA, 12 bp, Artificial Sequence
  Oligonucleotide primer for the detection of SNP TSC0023871
aaatacaaacac

SEQ ID NO: 310220 - DNA, 12 bp, Artificial Sequence
  Oligonukleotid-Primer
aaatacgaacac

SEQ ID NO: 310221 - DNA, 12 bp, Artificial Sequence
  Oligonucleotide primer for the detection of SNP TSC0023871
gtataaaaagta

SEQ ID NO: 310222 - DNA, 12 bp, Artificial Sequence
  Oligonucleotide primer for the detection of SNP TSC0023874
aactaaataact

SEQ ID NO: 310223 - DNA, 12 bp, Artificial Sequence
  Oligonucleotide primer for the detection of SNP TSC0023874
gggttatgtaga

SEQ ID NO: 310224 - DNA, 12 bp, Artificial Sequence
  Oligonucleotide primer for the detection of SNP TSC0023874
aaaccatacaaa

SEQ ID NO: 310225 - DNA, 12 bp, Artificial Sequence
  Oligonucleotide primer for the detection of SNP TSC0023874
gattgagtgatt

SEQ ID NO: 310226 - DNA, 12 bp, Artificial Sequence
  Oligonucleotide primer for the detection of SNP TSC0023875
ttaaaataaaat

SEQ ID NO: 310227 - DNA, 12 bp, Artificial Sequence
  Oligonucleotide primer for the detection of SNP TSC0023876
actttcaacata

SEQ ID NO: 310228 - DNA, 12 bp, Artificial Sequence
  Oligonucleotide primer for the detection of SNP TSC0023876
actttcgacata

SEQ ID NO: 310229 - DNA, 12 bp, Artificial Sequence
  Oligonucleotide primer for the detection of SNP TSC0023876
attttttgtagt

SEQ ID NO: 310230 - DNA, 12 bp, Artificial Sequence
  Oligonucleotide primer for the detection of SNP TSC0023876
atttttcgtagt

SEQ ID NO: 310231 - DNA, 12 bp, Artificial Sequence
  Oligonucleotide primer for the detection of SNP TSC0023876
cattccccacaa

SEQ ID NO: 310232 - DNA, 12 bp, Artificial Sequence
  Oligonucleotide primer for the detection of SNP TSC0023876
cattccccgcaa

SEQ ID NO: 310233 - DNA, 12 bp, Artificial Sequence
  Oligonucleotide primer for the detection of SNP TSC0023876
gtttttggtatg

SEQ ID NO: 310234 - DNA, 12 bp, Artificial Sequence
  Oligonucleotide primer for the detection of SNP TSC0023876
gttttcggtatg

SEQ ID NO: 310235 - DNA, 12 bp, Artificial Sequence
  Oligonucleotide primer for the detection of SNP TSC0023878
aaaaaattttac

SEQ ID NO: 310236 - DNA, 12 bp, Artificial Sequence
  Oligonucleotide primer for the detection of SNP TSC0023878
gttggggattaa

SEQ ID NO: 310237 - DNA, 12 bp, Artificial Sequence
  Oligonucleotide primer for the detection of SNP TSC0023879
caaaccaaattc

SEQ ID NO: 310238 - DNA, 12 bp, Artificial Sequence
  Oligonucleotide primer for the detection of SNP TSC0023879
aatttgtgtagg

SEQ ID NO: 310239 - DNA, 12 bp, Artificial Sequence
  Oligonucleotide primer for the detection of SNP TSC0023880
tgatatttttgt

SEQ ID NO: 310240 - DNA, 12 bp, Artificial Sequence
  Oligonucleotide primer for the detection of SNP TSC0023881
taaaacatataa

SEQ ID NO: 310241 - DNA, 12 bp, Artificial Sequence
  Oligonucleotide primer for the detection of SNP TSC0023881
gaaaaggataat

SEQ ID NO: 310242 - DNA, 12 bp, Artificial Sequence
  Oligonucleotide primer for the detection of SNP TSC0023881
aaaaaaaacaac

SEQ ID NO: 310243 - DNA, 12 bp, Artificial Sequence
  Oligonucleotide primer for the detection of SNP TSC0023881
tggaatatatgg

SEQ ID NO: 310244 - DNA, 12 bp, Artificial Sequence
  Oligonucleotide primer for the detection of SNP TSC0023882
cctcacactcct

SEQ ID NO: 310245 - DNA, 12 bp, Artificial Sequence
  Oligonucleotide primer for the detection of SNP TSC0023882
tttattttataa

SEQ ID NO: 310246 - DNA, 12 bp, Artificial Sequence
  Oligonucleotide primer for the detection of SNP TSC0023883
ctcacccccccc

SEQ ID NO: 310247 - DNA, 12 bp, Artificial Sequence
  Oligonucleotide primer for the detection of SNP TSC0023884
attaatattatt

SEQ ID NO: 310248 - DNA, 12 bp, Artificial Sequence
  Oligonucleotide primer for the detection of SNP TSC0023884
gaggttttggat

SEQ ID NO: 310249 - DNA, 12 bp, Artificial Sequence
  Oligonucleotide primer for the detection of SNP TSC0023884
gttaatattatt

SEQ ID NO: 310250 - DNA, 12 bp, Artificial Sequence
  Oligonucleotide primer for the detection of SNP TSC0023885
ctcctcccttcc

SEQ ID NO: 310251 - DNA, 12 bp, Artificial Sequence
  Oligonucleotide primer for the detection of SNP TSC0023885
agggaaagggag

SEQ ID NO: 310252 - DNA, 12 bp, Artificial Sequence
  Oligonucleotide primer for the detection of SNP TSC0023886
acaactctatat

SEQ ID NO: 310253 - DNA, 12 bp, Artificial Sequence
  Oligonucleotide primer for the detection of SNP TSC0023886
acgactctatat

SEQ ID NO: 310254 - DNA, 12 bp, Artificial Sequence
  Oligonucleotide primer for the detection of SNP TSC0023886
atgtggggttaa

SEQ ID NO: 310255 - DNA, 12 bp, Artificial Sequence
  Oligonucleotide primer for the detection of SNP TSC0023886
acgtggggttaa

SEQ ID NO: 310256 - DNA, 12 bp, Artificial Sequence
  Oligonucleotide primer for the detection of SNP TSC0023887
acaaaaaaacct

SEQ ID NO: 310257 - DNA, 12 bp, Artificial Sequence
  Oligonucleotide primer for the detection of SNP TSC0023887
agtgttttagga

SEQ ID NO: 310258 - DNA, 12 bp, Artificial Sequence
  Oligonucleotide primer for the detection of SNP TSC0023887
agcgttttagga

SEQ ID NO: 310259 - DNA, 12 bp, Artificial Sequence
  Oligonucleotide primer for the detection of SNP TSC0023890
ctaaaaaacacc

SEQ ID NO: 310260 - DNA, 12 bp, Artificial Sequence
  Oligonucleotide primer for the detection of SNP TSC0023890
ctaaaaaacgcc

SEQ ID NO: 310261 - DNA, 12 bp, Artificial Sequence
  Oligonucleotide primer for the detection of SNP TSC0023890
tttttagaaata

SEQ ID NO: 310262 - DNA, 12 bp, Artificial Sequence
  Oligonucleotide primer for the detection of SNP TSC0023890
ctcccaaaaaca

SEQ ID NO: 310263 - DNA, 12 bp, Artificial Sequence
  Oligonucleotide primer for the detection of SNP TSC0023890
ttgggaagtgtt

SEQ ID NO: 310264 - DNA, 12 bp, Artificial Sequence
  Oligonucleotide primer for the detection of SNP TSC0023890
ttgggaagcgtt

SEQ ID NO: 310265 - DNA, 12 bp, Artificial Sequence
  Oligonucleotide primer for the detection of SNP TSC0023891
agtgttttgggt

SEQ ID NO: 310266 - DNA, 12 bp, Artificial Sequence
  Oligonucleotide primer for the detection of SNP TSC0023891
agtgttttgggc

SEQ ID NO: 310267 - DNA, 12 bp, Artificial Sequence
  Oligonucleotide primer for the detection of SNP TSC0023891
gaaaaggtaaat

SEQ ID NO: 310268 - DNA, 12 bp, Artificial Sequence
  Oligonucleotide primer for the detection of SNP TSC0023892
acccgaaaacaa

SEQ ID NO: 310269 - DNA, 12 bp, Artificial Sequence
  Oligonucleotide primer for the detection of SNP TSC0023892
tgggtatttggt

SEQ ID NO: 310270 - DNA, 12 bp, Artificial Sequence
  Oligonucleotide primer for the detection of SNP TSC0023892
ataaatatctaa

SEQ ID NO: 310271 - DNA, 12 bp, Artificial Sequence
  Oligonucleotide primer for the detection of SNP TSC0023892
gtttgggagtag

SEQ ID NO: 310272 - DNA, 12 bp, Artificial Sequence
  Oligonucleotide primer for the detection of SNP TSC0023892
gttcgggagtag

SEQ ID NO: 310273 - DNA, 12 bp, Artificial Sequence
  Oligonucleotide primer for the detection of SNP TSC0023893
ccctcaccttcc

SEQ ID NO: 310274 - DNA, 12 bp, Artificial Sequence
  Oligonucleotide primer for the detection of SNP TSC0023893
gttttggtattg

SEQ ID NO: 310275 - DNA, 12 bp, Artificial Sequence
  Oligonucleotide primer for the detection of SNP TSC0023893
atcctaacacta

SEQ ID NO: 310276 - DNA, 12 bp, Artificial Sequence
  Oligonucleotide primer for the detection of SNP TSC0023894
acaaaaattaat

SEQ ID NO: 310277 - DNA, 12 bp, Artificial Sequence
  Oligonucleotide primer for the detection of SNP TSC0023894
tgtgttattata

SEQ ID NO: 310278 - DNA, 12 bp, Artificial Sequence
  Oligonucleotide primer for the detection of SNP TSC0023894
tataccaccaca

SEQ ID NO: 310279 - DNA, 12 bp, Artificial Sequence
  Oligonucleotide primer for the detection of SNP TSC0023894
ataaaaattagt

SEQ ID NO: 310280 - DNA, 12 bp, Artificial Sequence
  Oligonucleotide primer for the detection of SNP TSC0023895
ctctaaaaaaac

SEQ ID NO: 310281 - DNA, 12 bp, Artificial Sequence
  Oligonucleotide primer for the detection of SNP TSC0023895
tatatggatttt

SEQ ID NO: 310282 - DNA, 12 bp, Artificial Sequence
  Oligonucleotide primer for the detection of SNP TSC0023895
cacataaaccct

SEQ ID NO: 310283 - DNA, 12 bp, Artificial Sequence
  Oligonucleotide primer for the detection of SNP TSC0023895
ttttaaaaaaat

SEQ ID NO: 310284 - DNA, 12 bp, Artificial Sequence
  Oligonucleotide primer for the detection of SNP TSC0023896
caaataatccac

SEQ ID NO: 310285 - DNA, 12 bp, Artificial Sequence
  Oligonucleotide primer for the detection of SNP TSC0023898
aacctcaataac

SEQ ID NO: 310286 - DNA, 12 bp, Artificial Sequence
  Oligonucleotide primer for the detection of SNP TSC0023898
ccattttacaaa

SEQ ID NO: 310287 - DNA, 12 bp, Artificial Sequence
  Oligonucleotide primer for the detection of SNP TSC0023898
gttttagtgatt

SEQ ID NO: 310288 - DNA, 12 bp, Artificial Sequence
  Oligonucleotide primer for the detection of SNP TSC0023899
ttcttctaatcc

SEQ ID NO: 310289 - DNA, 12 bp, Artificial Sequence
  Oligonucleotide primer for the detection of SNP TSC0023899
tttttagagtaa

SEQ ID NO: 310290 - DNA, 12 bp, Artificial Sequence
  Oligonucleotide primer for the detection of SNP TSC0023901
tttatttttatt

SEQ ID NO: 310291 - DNA, 12 bp, Artificial Sequence
  Oligonucleotide primer for the detection of SNP TSC0023901
aaataacaacaa

SEQ ID NO: 310292 - DNA, 12 bp, Artificial Sequence
  Oligonucleotide primer for the detection of SNP TSC0023902
accaacttctaa

SEQ ID NO: 310293 - DNA, 12 bp, Artificial Sequence
  Oligonucleotide primer for the detection of SNP TSC0023902
gttagtttttgg

SEQ ID NO: 310294 - DNA, 12 bp, Artificial Sequence
  Oligonucleotide primer for the detection of SNP TSC0023903
gtgttgaggaag

SEQ ID NO: 310295 - DNA, 12 bp, Artificial Sequence
  Oligonucleotide primer for the detection of SNP TSC0023903
gcgttgaggaag

SEQ ID NO: 310296 - DNA, 12 bp, Artificial Sequence
  Oligonucleotide primer for the detection of SNP TSC0023904
aaacaaaacatt

SEQ ID NO: 310297 - DNA, 12 bp, Artificial Sequence
  Oligonucleotide primer for the detection of SNP TSC0023904
atgtattaaatg

SEQ ID NO: 310298 - DNA, 12 bp, Artificial Sequence
  Oligonucleotide primer for the detection of SNP TSC0023905
attctcctcaac

SEQ ID NO: 310299 - DNA, 12 bp, Artificial Sequence
  Oligonucleotide primer for the detection of SNP TSC0023905
gttttttgggag

SEQ ID NO: 310300 - DNA, 12 bp, Artificial Sequence
  Oligonucleotide primer for the detection of SNP TSC0023908
attcaatatctt

SEQ ID NO: 310301 - DNA, 12 bp, Artificial Sequence
  Oligonucleotide primer for the detection of SNP TSC0023908
gttgttggggag

SEQ ID NO: 310302 - DNA, 12 bp, Artificial Sequence
  Oligonucleotide primer for the detection of SNP TSC0023909
ctcctcaataaa

SEQ ID NO: 310303 - DNA, 12 bp, Artificial Sequence
  Oligonucleotide primer for the detection of SNP TSC0023909
ttgttgggaagt

SEQ ID NO: 310304 - DNA, 12 bp, Artificial Sequence
  Oligonucleotide primer for the detection of SNP TSC0023909
ttgttgggaagc

SEQ ID NO: 310305 - DNA, 12 bp, Artificial Sequence
  Oligonucleotide primer for the detection of SNP TSC0023909
ttactaaaaaac

SEQ ID NO: 310306 - DNA, 12 bp, Artificial Sequence
  Oligonucleotide primer for the detection of SNP TSC0023909
ttttttagtgag

SEQ ID NO: 310307 - DNA, 12 bp, Artificial Sequence
  Oligonucleotide primer for the detection of SNP TSC0023910
atcattttcttc

SEQ ID NO: 310308 - DNA, 12 bp, Artificial Sequence
  Oligonucleotide primer for the detection of SNP TSC0023910
ttggggagttag

SEQ ID NO: 310309 - DNA, 12 bp, Artificial Sequence
  Oligonucleotide primer for the detection of SNP TSC0023910
ctaaaaaaccaa

SEQ ID NO: 310310 - DNA, 12 bp, Artificial Sequence
  Oligonucleotide primer for the detection of SNP TSC0023912
aagattgttggt

SEQ ID NO: 310311 - DNA, 12 bp, Artificial Sequence
  Oligonucleotide primer for the detection of SNP TSC0023912
tgagttattgta

SEQ ID NO: 310312 - DNA, 12 bp, Artificial Sequence
  Oligonucleotide primer for the detection of SNP TSC0023916
taggattgagat

SEQ ID NO: 310313 - DNA, 12 bp, Artificial Sequence
  Oligonucleotide primer for the detection of SNP TSC0023916
acaaaattaaaa

SEQ ID NO: 310314 - DNA, 12 bp, Artificial Sequence
  Oligonucleotide primer for the detection of SNP TSC0023916
taagtgttttag

SEQ ID NO: 310315 - DNA, 12 bp, Artificial Sequence
  Oligonucleotide primer for the detection of SNP TSC0023917
tataaataataa

SEQ ID NO: 310316 - DNA, 12 bp, Artificial Sequence
  Oligonucleotide primer for the detection of SNP TSC0023917
taatagtgttat

SEQ ID NO: 310317 - DNA, 12 bp, Artificial Sequence
  Oligonucleotide primer for the detection of SNP TSC0023917
caacaatactac

SEQ ID NO: 310318 - DNA, 12 bp, Artificial Sequence
  Oligonucleotide primer for the detection of SNP TSC0023917
tgtgagtgatgg

SEQ ID NO: 310319 - DNA, 12 bp, Artificial Sequence
  Oligonucleotide primer for the detection of SNP TSC0023918
taactcacctca

SEQ ID NO: 310320 - DNA, 12 bp, Artificial Sequence
  Oligonucleotide primer for the detection of SNP TSC0023918
ttgttaattagt

SEQ ID NO: 310321 - DNA, 12 bp, Artificial Sequence
  Oligonukleotid-Primer
ctaccaaccaat

SEQ ID NO: 310322 - DNA, 12 bp, Artificial Sequence
  Oligonucleotide primer for the detection of SNP TSC0023919
tactaaacccaa

SEQ ID NO: 310323 - DNA, 12 bp, Artificial Sequence
  Oligonucleotide primer for the detection of SNP TSC0023919
tactaaacccga

SEQ ID NO: 310324 - DNA, 12 bp, Artificial Sequence
  Oligonucleotide primer for the detection of SNP TSC0023919
ttgttatttgtt

SEQ ID NO: 310325 - DNA, 12 bp, Artificial Sequence
  Oligonucleotide primer for the detection of SNP TSC0023919
ttgttattcgtt

SEQ ID NO: 310326 - DNA, 12 bp, Artificial Sequence
  Oligonucleotide primer for the detection of SNP TSC0023919
ttaccacccacc

SEQ ID NO: 310327 - DNA, 12 bp, Artificial Sequence
  Oligonucleotide primer for the detection of SNP TSC0023919
ttaccacccgcc

SEQ ID NO: 310328 - DNA, 12 bp, Artificial Sequence
  Oligonucleotide primer for the detection of SNP TSC0023919
tgttggatttgg

SEQ ID NO: 310329 - DNA, 12 bp, Artificial Sequence
  Oligonucleotide primer for the detection of SNP TSC0023919
tgttggattcgg

SEQ ID NO: 310330 - DNA, 12 bp, Artificial Sequence
  Oligonucleotide primer for the detection of SNP TSC0023920
atattgtttttg

SEQ ID NO: 310331 - DNA, 12 bp, Artificial Sequence
  Oligonucleotide primer for the detection of SNP TSC0023920
atattacctcta

SEQ ID NO: 310332 - DNA, 12 bp, Artificial Sequence
  Oligonucleotide primer for the detection of SNP TSC0023920
agagagaaaggg

SEQ ID NO: 310333 - DNA, 12 bp, Artificial Sequence
  Oligonucleotide primer for the detection of SNP TSC0023921
caatattctcac

SEQ ID NO: 310334 - DNA, 12 bp, Artificial Sequence
  Oligonucleotide primer for the detection of SNP TSC0023921
tattattttatg

SEQ ID NO: 310335 - DNA, 12 bp, Artificial Sequence
  Oligonucleotide primer for the detection of SNP TSC0023921
tattattttacg

SEQ ID NO: 310336 - DNA, 12 bp, Artificial Sequence
  Oligonucleotide primer for the detection of SNP TSC0023922
accatctcacac

SEQ ID NO: 310337 - DNA, 12 bp, Artificial Sequence
  Oligonucleotide primer for the detection of SNP TSC0023922
accatctcacgc

SEQ ID NO: 310338 - DNA, 12 bp, Artificial Sequence
  Oligonucleotide primer for the detection of SNP TSC0023922
aatattctcaca

SEQ ID NO: 310339 - DNA, 12 bp, Artificial Sequence
  Oligonucleotide primer for the detection of SNP TSC0023922
attattttatgt

SEQ ID NO: 310340 - DNA, 12 bp, Artificial Sequence
  Oligonucleotide primer for the detection of SNP TSC0023922
attattttacgt

SEQ ID NO: 310341 - DNA, 12 bp, Artificial Sequence
  Oligonucleotide primer for the detection of SNP TSC0023923
aaacccattaaa

SEQ ID NO: 310342 - DNA, 12 bp, Artificial Sequence
  Oligonucleotide primer for the detection of SNP TSC0023923
aaacccgttaaa

SEQ ID NO: 310343 - DNA, 12 bp, Artificial Sequence
  Oligonucleotide primer for the detection of SNP TSC0023923
gattttttatga

SEQ ID NO: 310344 - DNA, 12 bp, Artificial Sequence
  Oligonucleotide primer for the detection of SNP TSC0023923
aattttccataa

SEQ ID NO: 310345 - DNA, 12 bp, Artificial Sequence
  Oligonucleotide primer for the detection of SNP TSC0023923
agtttgttgggt

SEQ ID NO: 310346 - DNA, 12 bp, Artificial Sequence
  Oligonucleotide primer for the detection of SNP TSC0023923
agttcgttgggt

SEQ ID NO: 310347 - DNA, 12 bp, Artificial Sequence
  Oligonucleotide primer for the detection of SNP TSC0023923
agtttgttgggc

SEQ ID NO: 310348 - DNA, 12 bp, Artificial Sequence
  Oligonucleotide primer for the detection of SNP TSC0023923
agttcgttgggc

SEQ ID NO: 310349 - DNA, 12 bp, Artificial Sequence
  Oligonucleotide primer for the detection of SNP TSC0023926
attatagtatgg

SEQ ID NO: 310350 - DNA, 12 bp, Artificial Sequence
  Oligonucleotide primer for the detection of SNP TSC0023931
aattctattttt

SEQ ID NO: 310351 - DNA, 12 bp, Artificial Sequence
  Oligonucleotide primer for the detection of SNP TSC0023931
atagaaatttta

SEQ ID NO: 310352 - DNA, 12 bp, Artificial Sequence
  Oligonucleotide primer for the detection of SNP TSC0023933
ttttggatgagg

SEQ ID NO: 310353 - DNA, 12 bp, Artificial Sequence
  Oligonucleotide primer for the detection of SNP TSC0023933
ccttaaataaaa

SEQ ID NO: 310354 - DNA, 12 bp, Artificial Sequence
  Oligonucleotide primer for the detection of SNP TSC0023933
tagaaagtatat

SEQ ID NO: 310355 - DNA, 12 bp, Artificial Sequence
  Oligonucleotide primer for the detection of SNP TSC0023934
acttaaaaacca

SEQ ID NO: 310356 - DNA, 12 bp, Artificial Sequence
  Oligonucleotide primer for the detection of SNP TSC0023934
ttggtttatggg

SEQ ID NO: 310357 - DNA, 12 bp, Artificial Sequence
  Oligonucleotide primer for the detection of SNP TSC0023938
cactaacaattt

SEQ ID NO: 310358 - DNA, 12 bp, Artificial Sequence
  Oligonucleotide primer for the detection of SNP TSC0023938
tgtgaataatga

SEQ ID NO: 310359 - DNA, 12 bp, Artificial Sequence
  Oligonucleotide primer for the detection of SNP TSC0023938
tataaacaataa

SEQ ID NO: 310360 - DNA, 12 bp, Artificial Sequence
  Oligonucleotide primer for the detection of SNP TSC0023938
tattgatagttt

SEQ ID NO: 310361 - DNA, 12 bp, Artificial Sequence
  Oligonucleotide primer for the detection of SNP TSC0023945
cccaaccaactc

SEQ ID NO: 310362 - DNA, 12 bp, Artificial Sequence
  Oligonucleotide primer for the detection of SNP TSC0023945
ttttgatgattg

SEQ ID NO: 310363 - DNA, 12 bp, Artificial Sequence
  Oligonucleotide primer for the detection of SNP TSC0023946
tttggtagtatg

SEQ ID NO: 310364 - DNA, 12 bp, Artificial Sequence
  Oligonucleotide primer for the detection of SNP TSC0023946
tttaacaacata

SEQ ID NO: 310365 - DNA, 12 bp, Artificial Sequence
  Oligonucleotide primer for the detection of SNP TSC0023946
ttaattaggatt

SEQ ID NO: 310366 - DNA, 12 bp, Artificial Sequence
  Oligonucleotide primer for the detection of SNP TSC0023948
aaaaactaaacc

SEQ ID NO: 310367 - DNA, 12 bp, Artificial Sequence
  Oligonucleotide primer for the detection of SNP TSC0023948
ataatattagag

SEQ ID NO: 310368 - DNA, 12 bp, Artificial Sequence
  Oligonucleotide primer for the detection of SNP TSC0023948
acaacatcaaaa

SEQ ID NO: 310369 - DNA, 12 bp, Artificial Sequence
  Oligonucleotide primer for the detection of SNP TSC0023948
agaaattaaatt

SEQ ID NO: 310370 - DNA, 12 bp, Artificial Sequence
  Oligonucleotide primer for the detection of SNP TSC0023949
aataacttataa

SEQ ID NO: 310371 - DNA, 12 bp, Artificial Sequence
  Oligonucleotide primer for the detection of SNP TSC0023949
aagatataagtt

SEQ ID NO: 310372 - DNA, 12 bp, Artificial Sequence
  Oligonucleotide primer for the detection of SNP TSC0023949
aaaacacaaatt

SEQ ID NO: 310373 - DNA, 12 bp, Artificial Sequence
  Oligonucleotide primer for the detection of SNP TSC0023949
agtggtttatga

SEQ ID NO: 310374 - DNA, 12 bp, Artificial Sequence
  Oligonucleotide primer for the detection of SNP TSC0023950
caaactctattc

SEQ ID NO: 310375 - DNA, 12 bp, Artificial Sequence
  Oligonucleotide primer for the detection of SNP TSC0023950
cgaactctattc

SEQ ID NO: 310376 - DNA, 12 bp, Artificial Sequence
  Oligonucleotide primer for the detection of SNP TSC0023950
agtttggggttg

SEQ ID NO: 310377 - DNA, 12 bp, Artificial Sequence
  Oligonucleotide primer for the detection of SNP TSC0023950
agttcggggttg

SEQ ID NO: 310378 - DNA, 12 bp, Artificial Sequence
  Oligonucleotide primer for the detection of SNP TSC0023950
agtttggggtcg

SEQ ID NO: 310379 - DNA, 12 bp, Artificial Sequence
  Oligonucleotide primer for the detection of SNP TSC0023950
agttcggggtcg

SEQ ID NO: 310380 - DNA, 12 bp, Artificial Sequence
  Oligonucleotide primer for the detection of SNP TSC0023950
aacccaaaacca

SEQ ID NO: 310381 - DNA, 12 bp, Artificial Sequence
  Oligonucleotide primer for the detection of SNP TSC0023950
aacccaaaaccg

SEQ ID NO: 310382 - DNA, 12 bp, Artificial Sequence
  Oligonucleotide primer for the detection of SNP TSC0023950
aacccgaaacca

SEQ ID NO: 310383 - DNA, 12 bp, Artificial Sequence
  Oligonucleotide primer for the detection of SNP TSC0023950
aacccgaaaccg

SEQ ID NO: 310384 - DNA, 12 bp, Artificial Sequence
  Oligonucleotide primer for the detection of SNP TSC0023950
tggattttgttt

SEQ ID NO: 310385 - DNA, 12 bp, Artificial Sequence
  Oligonucleotide primer for the detection of SNP TSC0023950
cggattttgttt

SEQ ID NO: 310386 - DNA, 12 bp, Artificial Sequence
  Oligonukleotid-Primer
tataaccaaact

SEQ ID NO: 310387 - DNA, 12 bp, Artificial Sequence
  Oligonucleotide primer for the detection of SNP TSC0023951
tataaccgaact

SEQ ID NO: 310388 - DNA, 12 bp, Artificial Sequence
  Oligonucleotide primer for the detection of SNP TSC0023951
gggttgtagaat

SEQ ID NO: 310389 - DNA, 12 bp, Artificial Sequence
  Oligonucleotide primer for the detection of SNP TSC0023951
gggtcgtagaat

SEQ ID NO: 310390 - DNA, 12 bp, Artificial Sequence
  Oligonucleotide primer for the detection of SNP TSC0023951
aaaccgcaaaac

SEQ ID NO: 310391 - DNA, 12 bp, Artificial Sequence
  Oligonucleotide primer for the detection of SNP TSC0023951
gtggttggattt

SEQ ID NO: 310392 - DNA, 12 bp, Artificial Sequence
  Oligonucleotide primer for the detection of SNP TSC0023951
gtggtcggattt

SEQ ID NO: 310393 - DNA, 12 bp, Artificial Sequence
  Oligonucleotide primer for the detection of SNP TSC0023951
gtggttggattc

SEQ ID NO: 310394 - DNA, 12 bp, Artificial Sequence
  Oligonucleotide primer for the detection of SNP TSC0023951
gtggtcggattc

SEQ ID NO: 310395 - DNA, 12 bp, Artificial Sequence
  Oligonucleotide primer for the detection of SNP TSC0023952
tagggtgataga

SEQ ID NO: 310396 - DNA, 12 bp, Artificial Sequence
  Oligonucleotide primer for the detection of SNP TSC0023955
cactacactcta

SEQ ID NO: 310397 - DNA, 12 bp, Artificial Sequence
  Oligonucleotide primer for the detection of SNP TSC0023955
ttgttatttagg

SEQ ID NO: 310398 - DNA, 12 bp, Artificial Sequence
  Oligonucleotide primer for the detection of SNP TSC0023956
caatcctacaac

SEQ ID NO: 310399 - DNA, 12 bp, Artificial Sequence
  Oligonucleotide primer for the detection of SNP TSC0023956
caatcctacgac

SEQ ID NO: 310400 - DNA, 12 bp, Artificial Sequence
  Oligonucleotide primer for the detection of SNP TSC0023956
tggtagttgttt

SEQ ID NO: 310401 - DNA, 12 bp, Artificial Sequence
  Oligonucleotide primer for the detection of SNP TSC0023957
ctcaactaaaaa

SEQ ID NO: 310402 - DNA, 12 bp, Artificial Sequence
  Oligonucleotide primer for the detection of SNP TSC0023957
ctcgactaaaaa

SEQ ID NO: 310403 - DNA, 12 bp, Artificial Sequence
  Oligonucleotide primer for the detection of SNP TSC0023957
aactccatatca

SEQ ID NO: 310404 - DNA, 12 bp, Artificial Sequence
  Oligonucleotide primer for the detection of SNP TSC0023957
aactccatatcg

SEQ ID NO: 310405 - DNA, 12 bp, Artificial Sequence
  Oligonucleotide primer for the detection of SNP TSC0023957
ttttgattggag

SEQ ID NO: 310406 - DNA, 12 bp, Artificial Sequence
  Oligonucleotide primer for the detection of SNP TSC0023957
tttcgattggag

SEQ ID NO: 310407 - DNA, 12 bp, Artificial Sequence
  Oligonucleotide primer for the detection of SNP TSC0023963
tctttccaatac

SEQ ID NO: 310408 - DNA, 12 bp, Artificial Sequence
  Oligonucleotide primer for the detection of SNP TSC0023963
tattggggatgg

SEQ ID NO: 310409 - DNA, 12 bp, Artificial Sequence
  Oligonucleotide primer for the detection of SNP TSC0023963
tattggggacgg

SEQ ID NO: 310410 - DNA, 12 bp, Artificial Sequence
  Oligonucleotide primer for the detection of SNP TSC0023964
acccaacctccc

SEQ ID NO: 310411 - DNA, 12 bp, Artificial Sequence
  Oligonucleotide primer for the detection of SNP TSC0023964
acccgacctccc

SEQ ID NO: 310412 - DNA, 12 bp, Artificial Sequence
  Oligonucleotide primer for the detection of SNP TSC0023964
ggtaatagagtg

SEQ ID NO: 310413 - DNA, 12 bp, Artificial Sequence
  Oligonucleotide primer for the detection of SNP TSC0023965
aaacacctatca

SEQ ID NO: 310414 - DNA, 12 bp, Artificial Sequence
  Oligonucleotide primer for the detection of SNP TSC0023965
ttaattattgag

SEQ ID NO: 310415 - DNA, 12 bp, Artificial Sequence
  Oligonucleotide primer for the detection of SNP TSC0023965
ttaattactaaa

SEQ ID NO: 310416 - DNA, 12 bp, Artificial Sequence
  Oligonucleotide primer for the detection of SNP TSC0023966
aaaatatactat

SEQ ID NO: 310417 - DNA, 12 bp, Artificial Sequence
  Oligonucleotide primer for the detection of SNP TSC0023966
gaaggataagaa

SEQ ID NO: 310418 - DNA, 12 bp, Artificial Sequence
  Oligonucleotide primer for the detection of SNP TSC0023966
ggatgtgttatt

SEQ ID NO: 310419 - DNA, 12 bp, Artificial Sequence
  Oligonucleotide primer for the detection of SNP TSC0023968
ttaccataaaca

SEQ ID NO: 310420 - DNA, 12 bp, Artificial Sequence
  Oligonucleotide primer for the detection of SNP TSC0023968
tatttgttaatt

SEQ ID NO: 310421 - DNA, 12 bp, Artificial Sequence
  Oligonucleotide primer for the detection of SNP TSC0023968
gttatgaatatt

SEQ ID NO: 310422 - DNA, 12 bp, Artificial Sequence
  Oligonucleotide primer for the detection of SNP TSC0023969
aatttttaaatt

SEQ ID NO: 310423 - DNA, 12 bp, Artificial Sequence
  Oligonucleotide primer for the detection of SNP TSC0023969
ttattagttgag

SEQ ID NO: 310424 - DNA, 12 bp, Artificial Sequence
  Oligonucleotide primer for the detection of SNP TSC0023969
ttatcaattaaa

SEQ ID NO: 310425 - DNA, 12 bp, Artificial Sequence
  Oligonucleotide primer for the detection of SNP TSC0023969
gatttttggatt

SEQ ID NO: 310426 - DNA, 12 bp, Artificial Sequence
  Oligonucleotide primer for the detection of SNP TSC0023970
taaataaaaatt

SEQ ID NO: 310427 - DNA, 12 bp, Artificial Sequence
  Oligonucleotide primer for the detection of SNP TSC0023970
gttagagttggg

SEQ ID NO: 310428 - DNA, 12 bp, Artificial Sequence
  Oligonucleotide primer for the detection of SNP TSC0023971
acaatctaccca

SEQ ID NO: 310429 - DNA, 12 bp, Artificial Sequence
  Oligonucleotide primer for the detection of SNP TSC0023971
acgatctaccca

SEQ ID NO: 310430 - DNA, 12 bp, Artificial Sequence
  Oligonucleotide primer for the detection of SNP TSC0023971
ttaggaggttga

SEQ ID NO: 310431 - DNA, 12 bp, Artificial Sequence
  Oligonucleotide primer for the detection of SNP TSC0023971
ttaggaggtcga

SEQ ID NO: 310432 - DNA, 12 bp, Artificial Sequence
  Oligonucleotide primer for the detection of SNP TSC0023971
caaaaaaccgaa

SEQ ID NO: 310433 - DNA, 12 bp, Artificial Sequence
  Oligonucleotide primer for the detection of SNP TSC0023971
gcgatttgttta

SEQ ID NO: 310434 - DNA, 12 bp, Artificial Sequence
  Oligonucleotide primer for the detection of SNP TSC0023973
aggtttattttt

SEQ ID NO: 310435 - DNA, 12 bp, Artificial Sequence
  Oligonucleotide primer for the detection of SNP TSC0023973
aaatttaccctc

SEQ ID NO: 310436 - DNA, 12 bp, Artificial Sequence
  Oligonucleotide primer for the detection of SNP TSC0023973
atttaaattata

SEQ ID NO: 310437 - DNA, 12 bp, Artificial Sequence
  Oligonucleotide primer for the detection of SNP TSC0023975
actctaacaaca

SEQ ID NO: 310438 - DNA, 12 bp, Artificial Sequence
  Oligonucleotide primer for the detection of SNP TSC0023975
ttgagttgttat

SEQ ID NO: 310439 - DNA, 12 bp, Artificial Sequence
  Oligonucleotide primer for the detection of SNP TSC0023975
ctaaactatcac

SEQ ID NO: 310440 - DNA, 12 bp, Artificial Sequence
  Oligonucleotide primer for the detection of SNP TSC0023975
attttagtagta

SEQ ID NO: 310441 - DNA, 12 bp, Artificial Sequence
  Oligonucleotide primer for the detection of SNP TSC0023977
ctacactaatat

SEQ ID NO: 310442 - DNA, 12 bp, Artificial Sequence
  Oligonucleotide primer for the detection of SNP TSC0023978
atataatttttt

SEQ ID NO: 310443 - DNA, 12 bp, Artificial Sequence
  Oligonucleotide primer for the detection of SNP TSC0023978
acataatttttt

SEQ ID NO: 310444 - DNA, 12 bp, Artificial Sequence
  Oligonucleotide primer for the detection of SNP TSC0023978
ggaaatggatat

SEQ ID NO: 310445 - DNA, 12 bp, Artificial Sequence
  Oligonucleotide primer for the detection of SNP TSC0023979
agttttgaattg

SEQ ID NO: 310446 - DNA, 12 bp, Artificial Sequence
  Oligonucleotide primer for the detection of SNP TSC0023979
aattctaaacta

SEQ ID NO: 310447 - DNA, 12 bp, Artificial Sequence
  Oligonucleotide primer for the detection of SNP TSC0023979
ataggttaatgt

SEQ ID NO: 310448 - DNA, 12 bp, Artificial Sequence
  Oligonucleotide primer for the detection of SNP TSC0023980
aaaattatctaa

SEQ ID NO: 310449 - DNA, 12 bp, Artificial Sequence
  Oligonucleotide primer for the detection of SNP TSC0023980
attcccttttta

SEQ ID NO: 310450 - DNA, 12 bp, Artificial Sequence
  Oligonucleotide primer for the detection of SNP TSC0023980
gaaattatttgg

SEQ ID NO: 310451 - DNA, 12 bp, Artificial Sequence
  Oligonucleotide primer for the detection of SNP TSC0023981
cctcctttcccc

SEQ ID NO: 310452 - DNA, 12 bp, Artificial Sequence
  Oligonucleotide primer for the detection of SNP TSC0023981
aatgagtgtttt

SEQ ID NO: 310453 - DNA, 12 bp, Artificial Sequence
  Oligonucleotide primer for the detection of SNP TSC0023981
aatgagtgtttc

SEQ ID NO: 310454 - DNA, 12 bp, Artificial Sequence
  Oligonucleotide primer for the detection of SNP TSC0023981
aataaatacctc

SEQ ID NO: 310455 - DNA, 12 bp, Artificial Sequence
  Oligonucleotide primer for the detection of SNP TSC0023984
gtttttgttagt

SEQ ID NO: 310456 - DNA, 12 bp, Artificial Sequence
  Oligonucleotide primer for the detection of SNP TSC0023984
gttttcgttagt

SEQ ID NO: 310457 - DNA, 12 bp, Artificial Sequence
  Oligonucleotide primer for the detection of SNP TSC0023984
gtttttgttagc

SEQ ID NO: 310458 - DNA, 12 bp, Artificial Sequence
  Oligonucleotide primer for the detection of SNP TSC0023984
gttttcgttagc

SEQ ID NO: 310459 - DNA, 12 bp, Artificial Sequence
  Oligonukleotid-Primer
actctcactaac

SEQ ID NO: 310460 - DNA, 12 bp, Artificial Sequence
  Oligonucleotide primer for the detection of SNP TSC0023984
actctcgctaac

SEQ ID NO: 310461 - DNA, 12 bp, Artificial Sequence
  Oligonucleotide primer for the detection of SNP TSC0023984
gtgaaagaatgt

SEQ ID NO: 310462 - DNA, 12 bp, Artificial Sequence
  Oligonucleotide primer for the detection of SNP TSC0023984
gtgaaagaatgc

SEQ ID NO: 310463 - DNA, 12 bp, Artificial Sequence
  Oligonucleotide primer for the detection of SNP TSC0023990
taggttggtgag

SEQ ID NO: 310464 - DNA, 12 bp, Artificial Sequence
  Oligonucleotide primer for the detection of SNP TSC0023990
tgaaatttaaag

SEQ ID NO: 310465 - DNA, 12 bp, Artificial Sequence
  Oligonucleotide primer for the detection of SNP TSC0023992
tggtagggatag

SEQ ID NO: 310466 - DNA, 12 bp, Artificial Sequence
  Oligonucleotide primer for the detection of SNP TSC0023993
cccttttctcta

SEQ ID NO: 310467 - DNA, 12 bp, Artificial Sequence
  Oligonucleotide primer for the detection of SNP TSC0023993
aatttattattg

SEQ ID NO: 310468 - DNA, 12 bp, Artificial Sequence
  Oligonucleotide primer for the detection of SNP TSC0023993
acttattattaa

SEQ ID NO: 310469 - DNA, 12 bp, Artificial Sequence
  Oligonucleotide primer for the detection of SNP TSC0023994
acatatatccta

SEQ ID NO: 310470 - DNA, 12 bp, Artificial Sequence
  Oligonucleotide primer for the detection of SNP TSC0023994
attttatttaaa

SEQ ID NO: 310471 - DNA, 12 bp, Artificial Sequence
  Oligonucleotide primer for the detection of SNP TSC0023996
ctttcctcccta

SEQ ID NO: 310472 - DNA, 12 bp, Artificial Sequence
  Oligonucleotide primer for the detection of SNP TSC0023996
agtgggaagtaa

SEQ ID NO: 310473 - DNA, 12 bp, Artificial Sequence
  Oligonucleotide primer for the detection of SNP TSC0023997
ctaacttttctc

SEQ ID NO: 310474 - DNA, 12 bp, Artificial Sequence
  Oligonucleotide primer for the detection of SNP TSC0023997
atggtgataaag

SEQ ID NO: 310475 - DNA, 12 bp, Artificial Sequence
  Oligonucleotide primer for the detection of SNP TSC0023998
ttgaaataatag

SEQ ID NO: 310476 - DNA, 12 bp, Artificial Sequence
  Oligonucleotide primer for the detection of SNP TSC0023999
gttttaaattta

SEQ ID NO: 310477 - DNA, 12 bp, Artificial Sequence
  Oligonucleotide primer for the detection of SNP TSC0024000
cctacttattta

SEQ ID NO: 310478 - DNA, 12 bp, Artificial Sequence
  Oligonucleotide primer for the detection of SNP TSC0024000
aggtttttttgg

SEQ ID NO: 310479 - DNA, 12 bp, Artificial Sequence
  Oligonucleotide primer for the detection of SNP TSC0024000
aaacctctctaa

SEQ ID NO: 310480 - DNA, 12 bp, Artificial Sequence
  Oligonucleotide primer for the detection of SNP TSC0024001
acattaccaaaa

SEQ ID NO: 310481 - DNA, 12 bp, Artificial Sequence
  Oligonucleotide primer for the detection of SNP TSC0024001
ggggattttgtt

SEQ ID NO: 310482 - DNA, 12 bp, Artificial Sequence
  Oligonucleotide primer for the detection of SNP TSC0024001
aaaaatcctatc

SEQ ID NO: 310483 - DNA, 12 bp, Artificial Sequence
  Oligonucleotide primer for the detection of SNP TSC0024001
gtattgttagga

SEQ ID NO: 310484 - DNA, 12 bp, Artificial Sequence
  Oligonucleotide primer for the detection of SNP TSC0024002
ttaattgaaaga

SEQ ID NO: 310485 - DNA, 12 bp, Artificial Sequence
  Oligonucleotide primer for the detection of SNP TSC0024002
tggtggaatggt

SEQ ID NO: 310486 - DNA, 12 bp, Artificial Sequence
  Oligonucleotide primer for the detection of SNP TSC0024003
ttaataaaataa

SEQ ID NO: 310487 - DNA, 12 bp, Artificial Sequence
  Oligonucleotide primer for the detection of SNP TSC0024003
aattgaaagaga

SEQ ID NO: 310488 - DNA, 12 bp, Artificial Sequence
  Oligonucleotide primer for the detection of SNP TSC0024003
ttggtggaatgg

SEQ ID NO: 310489 - DNA, 12 bp, Artificial Sequence
  Oligonucleotide primer for the detection of SNP TSC0024006
atccctccaaat

SEQ ID NO: 310490 - DNA, 12 bp, Artificial Sequence
  Oligonucleotide primer for the detection of SNP TSC0024006
agaaagagggga

SEQ ID NO: 310491 - DNA, 12 bp, Artificial Sequence
  Oligonucleotide primer for the detection of SNP TSC0024009
ggatttatagga

SEQ ID NO: 310492 - DNA, 12 bp, Artificial Sequence
  Oligonucleotide primer for the detection of SNP TSC0024010
ctccccaaatac

SEQ ID NO: 310493 - DNA, 12 bp, Artificial Sequence
  Oligonucleotide primer for the detection of SNP TSC0024010
agtaattgggtt

SEQ ID NO: 310494 - DNA, 12 bp, Artificial Sequence
  Oligonucleotide primer for the detection of SNP TSC0024010
agtaattgggtc

SEQ ID NO: 310495 - DNA, 12 bp, Artificial Sequence
  Oligonucleotide primer for the detection of SNP TSC0024010
ttaataactaaa

SEQ ID NO: 310496 - DNA, 12 bp, Artificial Sequence
  Oligonucleotide primer for the detection of SNP TSC0024011
taaaatcgaaaa

SEQ ID NO: 310497 - DNA, 12 bp, Artificial Sequence
  Oligonucleotide primer for the detection of SNP TSC0024011
tgaggttgggag

SEQ ID NO: 310498 - DNA, 12 bp, Artificial Sequence
  Oligonucleotide primer for the detection of SNP TSC0024011
tgaggtcgggag

SEQ ID NO: 310499 - DNA, 12 bp, Artificial Sequence
  Oligonucleotide primer for the detection of SNP TSC0024012
gtaggttttggg

SEQ ID NO: 310500 - DNA, 12 bp, Artificial Sequence
  Oligonucleotide primer for the detection of SNP TSC0024012
ataaatcttaaa

SEQ ID NO: 310501 - DNA, 12 bp, Artificial Sequence
  Oligonucleotide primer for the detection of SNP TSC0024012
gaatgggataat

SEQ ID NO: 310502 - DNA, 12 bp, Artificial Sequence
  Oligonucleotide primer for the detection of SNP TSC0024013
aaaccaaactct

SEQ ID NO: 310503 - DNA, 12 bp, Artificial Sequence
  Oligonucleotide primer for the detection of SNP TSC0024013
gttttatatgtg

SEQ ID NO: 310504 - DNA, 12 bp, Artificial Sequence
  Oligonucleotide primer for the detection of SNP TSC0024015
actaatcttatt

SEQ ID NO: 310505 - DNA, 12 bp, Artificial Sequence
  Oligonucleotide primer for the detection of SNP TSC0024015
gtgttgagattg

SEQ ID NO: 310506 - DNA, 12 bp, Artificial Sequence
  Oligonucleotide primer for the detection of SNP TSC0024016
cttaacaaaaac

SEQ ID NO: 310507 - DNA, 12 bp, Artificial Sequence
  Oligonucleotide primer for the detection of SNP TSC0024016
attgaaataaga

SEQ ID NO: 310508 - DNA, 12 bp, Artificial Sequence
  Oligonucleotide primer for the detection of SNP TSC0024017
taaatctacaat

SEQ ID NO: 310509 - DNA, 12 bp, Artificial Sequence
  Oligonucleotide primer for the detection of SNP TSC0024017
tattgtagttag

SEQ ID NO: 310510 - DNA, 12 bp, Artificial Sequence
  Oligonucleotide primer for the detection of SNP TSC0024017
tatcgtagttag

SEQ ID NO: 310511 - DNA, 12 bp, Artificial Sequence
  Oligonucleotide primer for the detection of SNP TSC0024018
ggtttttttgga

SEQ ID NO: 310512 - DNA, 12 bp, Artificial Sequence
  Oligonucleotide primer for the detection of SNP TSC0024019
caaaaaacacaa

SEQ ID NO: 310513 - DNA, 12 bp, Artificial Sequence
  Oligonucleotide primer for the detection of SNP TSC0024019
ggtgtttgtttt

SEQ ID NO: 310514 - DNA, 12 bp, Artificial Sequence
  Oligonucleotide primer for the detection of SNP TSC0024019
ggcgtttgtttt

SEQ ID NO: 310515 - DNA, 12 bp, Artificial Sequence
  Oligonucleotide primer for the detection of SNP TSC0024019
ggtgtttgtttc

SEQ ID NO: 310516 - DNA, 12 bp, Artificial Sequence
  Oligonucleotide primer for the detection of SNP TSC0024019
ggcgtttgtttc

SEQ ID NO: 310517 - DNA, 12 bp, Artificial Sequence
  Oligonucleotide primer for the detection of SNP TSC0024019
aacacctactcc

SEQ ID NO: 310518 - DNA, 12 bp, Artificial Sequence
  Oligonucleotide primer for the detection of SNP TSC0024019
aacgcctactcc

SEQ ID NO: 310519 - DNA, 12 bp, Artificial Sequence
  Oligonucleotide primer for the detection of SNP TSC0024019
tagggagtatag

SEQ ID NO: 310520 - DNA, 12 bp, Artificial Sequence
  Oligonucleotide primer for the detection of SNP TSC0024020
cccaaccctatc

SEQ ID NO: 310521 - DNA, 12 bp, Artificial Sequence
  Oligonucleotide primer for the detection of SNP TSC0024020
gtgtgggggttg

SEQ ID NO: 310522 - DNA, 12 bp, Artificial Sequence
  Oligonucleotide primer for the detection of SNP TSC0024021
gatattgtaatg

SEQ ID NO: 310523 - DNA, 12 bp, Artificial Sequence
  Oligonucleotide primer for the detection of SNP TSC0024021
aatattacaata

SEQ ID NO: 310524 - DNA, 12 bp, Artificial Sequence
  Oligonucleotide primer for the detection of SNP TSC0024021
agatatatgttt

SEQ ID NO: 310525 - DNA, 12 bp, Artificial Sequence
  Oligonucleotide primer for the detection of SNP TSC0024023
taaaccaccaca

SEQ ID NO: 310526 - DNA, 12 bp, Artificial Sequence
  Oligonucleotide primer for the detection of SNP TSC0024023
taaaccaccacg

SEQ ID NO: 310527 - DNA, 12 bp, Artificial Sequence
  Oligonucleotide primer for the detection of SNP TSC0024023
tagatattggtt

SEQ ID NO: 310528 - DNA, 12 bp, Artificial Sequence
  Oligonucleotide primer for the detection of SNP TSC0024023
caaatattaacc

SEQ ID NO: 310529 - DNA, 12 bp, Artificial Sequence
  Oligonucleotide primer for the detection of SNP TSC0024023
agttattatgtt

SEQ ID NO: 310530 - DNA, 12 bp, Artificial Sequence
  Oligonucleotide primer for the detection of SNP TSC0024023
agttattacgtt

SEQ ID NO: 310531 - DNA, 12 bp, Artificial Sequence
  Oligonucleotide primer for the detection of SNP TSC0024023
agttattatgtc

SEQ ID NO: 310532 - DNA, 12 bp, Artificial Sequence
  Oligonucleotide primer for the detection of SNP TSC0024023
agttattacgtc

SEQ ID NO: 310533 - DNA, 12 bp, Artificial Sequence
  Oligonucleotide primer for the detection of SNP TSC0024024
acacacacacgt

SEQ ID NO: 310534 - DNA, 12 bp, Artificial Sequence
  Oligonucleotide primer for the detection of SNP TSC0024024
acacacacgcat

SEQ ID NO: 310535 - DNA, 12 bp, Artificial Sequence
  Oligonucleotide primer for the detection of SNP TSC0024024
acacacgcacat

SEQ ID NO: 310536 - DNA, 12 bp, Artificial Sequence
  Oligonucleotide primer for the detection of SNP TSC0024024
acacgcacacat

SEQ ID NO: 310537 - DNA, 12 bp, Artificial Sequence
  Oligonucleotide primer for the detection of SNP TSC0024024
acgcacacacat

SEQ ID NO: 310538 - DNA, 12 bp, Artificial Sequence
  Oligonucleotide primer for the detection of SNP TSC0024024
acacacacgcgt

SEQ ID NO: 310539 - DNA, 12 bp, Artificial Sequence
  Oligonucleotide primer for the detection of SNP TSC0024024
acacacgcacgt

SEQ ID NO: 310540 - DNA, 12 bp, Artificial Sequence
  Oligonucleotide primer for the detection of SNP TSC0024024
acacgcacacgt

SEQ ID NO: 310541 - DNA, 12 bp, Artificial Sequence
  Oligonucleotide primer for the detection of SNP TSC0024024
acgcacacacgt

SEQ ID NO: 310542 - DNA, 12 bp, Artificial Sequence
  Oligonucleotide primer for the detection of SNP TSC0024024
acacacgcgcat

SEQ ID NO: 310543 - DNA, 12 bp, Artificial Sequence
  Oligonucleotide primer for the detection of SNP TSC0024024
acacgcacgcat

SEQ ID NO: 310544 - DNA, 12 bp, Artificial Sequence
  Oligonucleotide primer for the detection of SNP TSC0024024
acgcacacgcat

SEQ ID NO: 310545 - DNA, 12 bp, Artificial Sequence
  Oligonucleotide primer for the detection of SNP TSC0024024
acacgcgcacat

SEQ ID NO: 310546 - DNA, 12 bp, Artificial Sequence
  Oligonucleotide primer for the detection of SNP TSC0024024
acgcacgcacat

SEQ ID NO: 310547 - DNA, 12 bp, Artificial Sequence
  Oligonucleotide primer for the detection of SNP TSC0024024
acgcgcacacat

SEQ ID NO: 310548 - DNA, 12 bp, Artificial Sequence
  Oligonucleotide primer for the detection of SNP TSC0024024
acacacgcgcgt

SEQ ID NO: 310549 - DNA, 12 bp, Artificial Sequence
  Oligonucleotide primer for the detection of SNP TSC0024024
acacgcacgcgt

SEQ ID NO: 310550 - DNA, 12 bp, Artificial Sequence
  Oligonucleotide primer for the detection of SNP TSC0024024
acgcacacgcgt

SEQ ID NO: 310551 - DNA, 12 bp, Artificial Sequence
  Oligonucleotide primer for the detection of SNP TSC0024024
acacgcgcacgt

SEQ ID NO: 310552 - DNA, 12 bp, Artificial Sequence
  Oligonucleotide primer for the detection of SNP TSC0024024
acgcacgcacgt

SEQ ID NO: 310553 - DNA, 12 bp, Artificial Sequence
  Oligonucleotide primer for the detection of SNP TSC0024024
acgcgcacacgt

SEQ ID NO: 310554 - DNA, 12 bp, Artificial Sequence
  Oligonucleotide primer for the detection of SNP TSC0024024
acacgcgcgcat

SEQ ID NO: 310555 - DNA, 12 bp, Artificial Sequence
  Oligonucleotide primer for the detection of SNP TSC0024024
acgcacgcgcat

SEQ ID NO: 310556 - DNA, 12 bp, Artificial Sequence
  Oligonucleotide primer for the detection of SNP TSC0024024
acgcgcacgcat

SEQ ID NO: 310557 - DNA, 12 bp, Artificial Sequence
  Oligonucleotide primer for the detection of SNP TSC0024024
acgcgcgcacat

SEQ ID NO: 310558 - DNA, 12 bp, Artificial Sequence
  Oligonucleotide primer for the detection of SNP TSC0024024
acacgcgcgcgt

SEQ ID NO: 310559 - DNA, 12 bp, Artificial Sequence
  Oligonucleotide primer for the detection of SNP TSC0024024
acgcacgcgcgt

SEQ ID NO: 310560 - DNA, 12 bp, Artificial Sequence
  Oligonucleotide primer for the detection of SNP TSC0024024
acgcgcacgcgt

SEQ ID NO: 310561 - DNA, 12 bp, Artificial Sequence
  Oligonucleotide primer for the detection of SNP TSC0024024
acgcgcgcacgt

SEQ ID NO: 310562 - DNA, 12 bp, Artificial Sequence
  Oligonucleotide primer for the detection of SNP TSC0024024
acgcgcgcgcat

SEQ ID NO: 310563 - DNA, 12 bp, Artificial Sequence
  Oligonucleotide primer for the detection of SNP TSC0024024
acgcgcgcgcgt

SEQ ID NO: 310564 - DNA, 12 bp, Artificial Sequence
  Oligonucleotide primer for the detection of SNP TSC0024024
gcgtgtgtgtgt

SEQ ID NO: 310565 - DNA, 12 bp, Artificial Sequence
  Oligonucleotide primer for the detection of SNP TSC0024024
gtgcgtgtgtgt

SEQ ID NO: 310566 - DNA, 12 bp, Artificial Sequence
  Oligonucleotide primer for the detection of SNP TSC0024024
gtgtgcgtgtgt

SEQ ID NO: 310567 - DNA, 12 bp, Artificial Sequence
  Oligonucleotide primer for the detection of SNP TSC0024024
gtgtgtgcgtgt

SEQ ID NO: 310568 - DNA, 12 bp, Artificial Sequence
  Oligonucleotide primer for the detection of SNP TSC0024024
gcgcgtgtgtgt

SEQ ID NO: 310569 - DNA, 12 bp, Artificial Sequence
  Oligonucleotide primer for the detection of SNP TSC0024024
gcgtgcgtgtgt

SEQ ID NO: 310570 - DNA, 12 bp, Artificial Sequence
  Oligonucleotide primer for the detection of SNP TSC0024024
gcgtgtgcgtgt

SEQ ID NO: 310571 - DNA, 12 bp, Artificial Sequence
  Oligonucleotide primer for the detection of SNP TSC0024024
gcgtgtgtgcgt

SEQ ID NO: 310572 - DNA, 12 bp, Artificial Sequence
  Oligonucleotide primer for the detection of SNP TSC0024024
gtgcgcgtgtgt

SEQ ID NO: 310573 - DNA, 12 bp, Artificial Sequence
  Oligonucleotide primer for the detection of SNP TSC0024024
gtgcgtgcgtgt

SEQ ID NO: 310574 - DNA, 12 bp, Artificial Sequence
  Oligonucleotide primer for the detection of SNP TSC0024024
gtgcgtgtgcgt

SEQ ID NO: 310575 - DNA, 12 bp, Artificial Sequence
  Oligonucleotide primer for the detection of SNP TSC0024024
gtgtgcgcgtgt

SEQ ID NO: 310576 - DNA, 12 bp, Artificial Sequence
  Oligonucleotide primer for the detection of SNP TSC0024024
gtgtgcgtgcgt

SEQ ID NO: 310577 - DNA, 12 bp, Artificial Sequence
  Oligonucleotide primer for the detection of SNP TSC0024024
gtgtgtgcgcgt

SEQ ID NO: 310578 - DNA, 12 bp, Artificial Sequence
  Oligonucleotide primer for the detection of SNP TSC0024024
gcgcgcgtgtgt

SEQ ID NO: 310579 - DNA, 12 bp, Artificial Sequence
  Oligonucleotide primer for the detection of SNP TSC0024024
gcgcgtgcgtgt

SEQ ID NO: 310580 - DNA, 12 bp, Artificial Sequence
  Oligonucleotide primer for the detection of SNP TSC0024024
gcgcgtgtgcgt

SEQ ID NO: 310581 - DNA, 12 bp, Artificial Sequence
  Oligonucleotide primer for the detection of SNP TSC0024024
gcgtgcgcgtgt

SEQ ID NO: 310582 - DNA, 12 bp, Artificial Sequence
  Oligonucleotide primer for the detection of SNP TSC0024024
gcgtgcgtgcgt

SEQ ID NO: 310583 - DNA, 12 bp, Artificial Sequence
  Oligonucleotide primer for the detection of SNP TSC0024024
gcgtgtgcgcgt

SEQ ID NO: 310584 - DNA, 12 bp, Artificial Sequence
  Oligonucleotide primer for the detection of SNP TSC0024024
gtgcgcgcgtgt

SEQ ID NO: 310585 - DNA, 12 bp, Artificial Sequence
  Oligonucleotide primer for the detection of SNP TSC0024024
gtgcgcgtgcgt

SEQ ID NO: 310586 - DNA, 12 bp, Artificial Sequence
  Oligonucleotide primer for the detection of SNP TSC0024024
gtgcgtgcgcgt

SEQ ID NO: 310587 - DNA, 12 bp, Artificial Sequence
  Oligonucleotide primer for the detection of SNP TSC0024024
gtgtgcgcgcgt

SEQ ID NO: 310588 - DNA, 12 bp, Artificial Sequence
  Oligonucleotide primer for the detection of SNP TSC0024024
gcgcgcgcgtgt

SEQ ID NO: 310589 - DNA, 12 bp, Artificial Sequence
  Oligonucleotide primer for the detection of SNP TSC0024024
gcgcgcgtgcgt

SEQ ID NO: 310590 - DNA, 12 bp, Artificial Sequence
  Oligonucleotide primer for the detection of SNP TSC0024024
gcgcgtgcgcgt

SEQ ID NO: 310591 - DNA, 12 bp, Artificial Sequence
  Oligonucleotide primer for the detection of SNP TSC0024024
gcgtgcgcgcgt

SEQ ID NO: 310592 - DNA, 12 bp, Artificial Sequence
  Oligonucleotide primer for the detection of SNP TSC0024024
gtgcgcgcgcgt

SEQ ID NO: 310593 - DNA, 12 bp, Artificial Sequence
  Oligonucleotide primer for the detection of SNP TSC0024024
gcgcgcgcgcgt

SEQ ID NO: 310594 - DNA, 12 bp, Artificial Sequence
  Oligonucleotide primer for the detection of SNP TSC0024025
atacacacacac

SEQ ID NO: 310595 - DNA, 12 bp, Artificial Sequence
  Oligonucleotide primer for the detection of SNP TSC0024025
atacacacacgc

SEQ ID NO: 310596 - DNA, 12 bp, Artificial Sequence
  Oligonucleotide primer for the detection of SNP TSC0024025
atacacacgcac

SEQ ID NO: 310597 - DNA, 12 bp, Artificial Sequence
  Oligonucleotide primer for the detection of SNP TSC0024025
atacacgcacac

SEQ ID NO: 310598 - DNA, 12 bp, Artificial Sequence
  Oligonucleotide primer for the detection of SNP TSC0024025
atacgcacacac

SEQ ID NO: 310599 - DNA, 12 bp, Artificial Sequence
  Oligonucleotide primer for the detection of SNP TSC0024025
atacacacgcgc

SEQ ID NO: 310600 - DNA, 12 bp, Artificial Sequence
  Oligonucleotide primer for the detection of SNP TSC0024025
atacacgcacgc

SEQ ID NO: 310601 - DNA, 12 bp, Artificial Sequence
  Oligonucleotide primer for the detection of SNP TSC0024025
atacgcacacgc

SEQ ID NO: 310602 - DNA, 12 bp, Artificial Sequence
  Oligonucleotide primer for the detection of SNP TSC0024025
atacacgcgcac

SEQ ID NO: 310603 - DNA, 12 bp, Artificial Sequence
  Oligonucleotide primer for the detection of SNP TSC0024025
atacgcacgcac

SEQ ID NO: 310604 - DNA, 12 bp, Artificial Sequence
  Oligonucleotide primer for the detection of SNP TSC0024025
atacgcgcacac

SEQ ID NO: 310605 - DNA, 12 bp, Artificial Sequence
  Oligonucleotide primer for the detection of SNP TSC0024025
atacacgcgcgc

SEQ ID NO: 310606 - DNA, 12 bp, Artificial Sequence
  Oligonucleotide primer for the detection of SNP TSC0024025
atacgcacgcgc

SEQ ID NO: 310607 - DNA, 12 bp, Artificial Sequence
  Oligonucleotide primer for the detection of SNP TSC0024025
atacgcgcacgc

SEQ ID NO: 310608 - DNA, 12 bp, Artificial Sequence
  Oligonucleotide primer for the detection of SNP TSC0024025
atacgcgcgcac

SEQ ID NO: 310609 - DNA, 12 bp, Artificial Sequence
  Oligonucleotide primer for the detection of SNP TSC0024025
atacgcgcgcgc

SEQ ID NO: 310610 - DNA, 12 bp, Artificial Sequence
  Oligonucleotide primer for the detection of SNP TSC0024025
gtgcgtgtgtgc

SEQ ID NO: 310611 - DNA, 12 bp, Artificial Sequence
  Oligonucleotide primer for the detection of SNP TSC0024025
gtgtgcgtgtgc

SEQ ID NO: 310612 - DNA, 12 bp, Artificial Sequence
  Oligonucleotide primer for the detection of SNP TSC0024025
gtgtgtgcgtgc

SEQ ID NO: 310613 - DNA, 12 bp, Artificial Sequence
  Oligonucleotide primer for the detection of SNP TSC0024025
gtgcgcgtgtgc

SEQ ID NO: 310614 - DNA, 12 bp, Artificial Sequence
  Oligonukleotid-Primer
gtgcgtgcgtgc

SEQ ID NO: 310615 - DNA, 12 bp, Artificial Sequence
  Oligonucleotide primer for the detection of SNP TSC0024025
gtgcgtgtgcgc

SEQ ID NO: 310616 - DNA, 12 bp, Artificial Sequence
  Oligonucleotide primer for the detection of SNP TSC0024025
gtgtgcgcgtgc

SEQ ID NO: 310617 - DNA, 12 bp, Artificial Sequence
  Oligonucleotide primer for the detection of SNP TSC0024025
gtgtgcgtgcgc

SEQ ID NO: 310618 - DNA, 12 bp, Artificial Sequence
  Oligonucleotide primer for the detection of SNP TSC0024025
gtgtgtgcgcgc

SEQ ID NO: 310619 - DNA, 12 bp, Artificial Sequence
  Oligonucleotide primer for the detection of SNP TSC0024025
gtgcgcgcgtgc

SEQ ID NO: 310620 - DNA, 12 bp, Artificial Sequence
  Oligonucleotide primer for the detection of SNP TSC0024025
gtgcgcgtgcgc

SEQ ID NO: 310621 - DNA, 12 bp, Artificial Sequence
  Oligonucleotide primer for the detection of SNP TSC0024025
gtgcgtgcgcgc

SEQ ID NO: 310622 - DNA, 12 bp, Artificial Sequence
  Oligonucleotide primer for the detection of SNP TSC0024025
gtgtgcgcgcgc

SEQ ID NO: 310623 - DNA, 12 bp, Artificial Sequence
  Oligonucleotide primer for the detection of SNP TSC0024025
gtgcgcgcgcgc

SEQ ID NO: 310624 - DNA, 12 bp, Artificial Sequence
  Oligonucleotide primer for the detection of SNP TSC0024026
aataaataaaca

SEQ ID NO: 310625 - DNA, 12 bp, Artificial Sequence
  Oligonucleotide primer for the detection of SNP TSC0024026
aataaataaacg

SEQ ID NO: 310626 - DNA, 12 bp, Artificial Sequence
  Oligonucleotide primer for the detection of SNP TSC0024026
acttaatcaccc

SEQ ID NO: 310627 - DNA, 12 bp, Artificial Sequence
  Oligonucleotide primer for the detection of SNP TSC0024026
agtaaataaatg

SEQ ID NO: 310628 - DNA, 12 bp, Artificial Sequence
  Oligonucleotide primer for the detection of SNP TSC0024026
agtaaataaacg

SEQ ID NO: 310629 - DNA, 12 bp, Artificial Sequence
  Oligonucleotide primer for the detection of SNP TSC0024027
aaaaaccatcaa

SEQ ID NO: 310630 - DNA, 12 bp, Artificial Sequence
  Oligonucleotide primer for the detection of SNP TSC0024027
ggttgtgggtaa

SEQ ID NO: 310631 - DNA, 12 bp, Artificial Sequence
  Oligonucleotide primer for the detection of SNP TSC0024027
ggtcgtgggtaa

SEQ ID NO: 310632 - DNA, 12 bp, Artificial Sequence
  Oligonucleotide primer for the detection of SNP TSC0024027
aaccataaacaa

SEQ ID NO: 310633 - DNA, 12 bp, Artificial Sequence
  Oligonucleotide primer for the detection of SNP TSC0024027
aaccgtaaacaa

SEQ ID NO: 310634 - DNA, 12 bp, Artificial Sequence
  Oligonucleotide primer for the detection of SNP TSC0024027
aaaaagttatta

SEQ ID NO: 310635 - DNA, 12 bp, Artificial Sequence
  Oligonucleotide primer for the detection of SNP TSC0024028
atcaaaaaaaaa

SEQ ID NO: 310636 - DNA, 12 bp, Artificial Sequence
  Oligonucleotide primer for the detection of SNP TSC0024028
atcgaaaaaaaa

SEQ ID NO: 310637 - DNA, 12 bp, Artificial Sequence
  Oligonucleotide primer for the detection of SNP TSC0024028
ctccccccaacc

SEQ ID NO: 310638 - DNA, 12 bp, Artificial Sequence
  Oligonucleotide primer for the detection of SNP TSC0024028
gttggggggggg

SEQ ID NO: 310639 - DNA, 12 bp, Artificial Sequence
  Oligonucleotide primer for the detection of SNP TSC0024028
gtcggggggggg

SEQ ID NO: 310640 - DNA, 12 bp, Artificial Sequence
  Oligonucleotide primer for the detection of SNP TSC0024031
aaccttatctac

SEQ ID NO: 310641 - DNA, 12 bp, Artificial Sequence
  Oligonucleotide primer for the detection of SNP TSC0024031
ggtattgtatgt

SEQ ID NO: 310642 - DNA, 12 bp, Artificial Sequence
  Oligonucleotide primer for the detection of SNP TSC0024031
aaatattatata

SEQ ID NO: 310643 - DNA, 12 bp, Artificial Sequence
  Oligonucleotide primer for the detection of SNP TSC0024031
aattttgtttgt

SEQ ID NO: 310644 - DNA, 12 bp, Artificial Sequence
  Oligonucleotide primer for the detection of SNP TSC0024031
aattttgtttgc

SEQ ID NO: 310645 - DNA, 12 bp, Artificial Sequence
  Oligonucleotide primer for the detection of SNP TSC0024032
accttaaacctt

SEQ ID NO: 310646 - DNA, 12 bp, Artificial Sequence
  Oligonucleotide primer for the detection of SNP TSC0024032
tgtatgttgtag

SEQ ID NO: 310647 - DNA, 12 bp, Artificial Sequence
  Oligonucleotide primer for the detection of SNP TSC0024032
tgtatgtcgtag

SEQ ID NO: 310648 - DNA, 12 bp, Artificial Sequence
  Oligonucleotide primer for the detection of SNP TSC0024034
atatacaccatc

SEQ ID NO: 310649 - DNA, 12 bp, Artificial Sequence
  Oligonucleotide primer for the detection of SNP TSC0024034
agttagaatgta

SEQ ID NO: 310650 - DNA, 12 bp, Artificial Sequence
  Oligonucleotide primer for the detection of SNP TSC0024036
atcaacaataaa

SEQ ID NO: 310651 - DNA, 12 bp, Artificial Sequence
  Oligonucleotide primer for the detection of SNP TSC0024036
gttaagtattaa

SEQ ID NO: 310652 - DNA, 12 bp, Artificial Sequence
  Oligonucleotide primer for the detection of SNP TSC0024036
attaaatactaa

SEQ ID NO: 310653 - DNA, 12 bp, Artificial Sequence
  Oligonucleotide primer for the detection of SNP TSC0024036
tattagtagtga

SEQ ID NO: 310654 - DNA, 12 bp, Artificial Sequence
  Oligonucleotide primer for the detection of SNP TSC0024041
atcttcctcata

SEQ ID NO: 310655 - DNA, 12 bp, Artificial Sequence
  Oligonucleotide primer for the detection of SNP TSC0024041
aagtagtttgta

SEQ ID NO: 310656 - DNA, 12 bp, Artificial Sequence
  Oligonucleotide primer for the detection of SNP TSC0024041
ataacttacaaa

SEQ ID NO: 310657 - DNA, 12 bp, Artificial Sequence
  Oligonucleotide primer for the detection of SNP TSC0024042
aaatagaggaag

SEQ ID NO: 310658 - DNA, 12 bp, Artificial Sequence
  Oligonucleotide primer for the detection of SNP TSC0024046
aaataattactt

SEQ ID NO: 310659 - DNA, 12 bp, Artificial Sequence
  Oligonucleotide primer for the detection of SNP TSC0024047
taaaacaaaatc

SEQ ID NO: 310660 - DNA, 12 bp, Artificial Sequence
  Oligonucleotide primer for the detection of SNP TSC0024047
ttagtgattaaa

SEQ ID NO: 310661 - DNA, 12 bp, Artificial Sequence
  Oligonucleotide primer for the detection of SNP TSC0024047
ttagcgattaaa

SEQ ID NO: 310662 - DNA, 12 bp, Artificial Sequence
  Oligonucleotide primer for the detection of SNP TSC0024047
tcaacaatcaaa

SEQ ID NO: 310663 - DNA, 12 bp, Artificial Sequence
  Oligonucleotide primer for the detection of SNP TSC0024047
tcaacgatcaaa

SEQ ID NO: 310664 - DNA, 12 bp, Artificial Sequence
  Oligonucleotide primer for the detection of SNP TSC0024047
tgagatagagtt

SEQ ID NO: 310665 - DNA, 12 bp, Artificial Sequence
  Oligonucleotide primer for the detection of SNP TSC0024048
aaacacacctac

SEQ ID NO: 310666 - DNA, 12 bp, Artificial Sequence
  Oligonucleotide primer for the detection of SNP TSC0024048
ttgttttttttg

SEQ ID NO: 310667 - DNA, 12 bp, Artificial Sequence
  Oligonucleotide primer for the detection of SNP TSC0024048
tcgttttttttg

SEQ ID NO: 310668 - DNA, 12 bp, Artificial Sequence
  Oligonucleotide primer for the detection of SNP TSC0024048
ttgtttttttcg

SEQ ID NO: 310669 - DNA, 12 bp, Artificial Sequence
  Oligonucleotide primer for the detection of SNP TSC0024048
tcgtttttttcg

SEQ ID NO: 310670 - DNA, 12 bp, Artificial Sequence
  Oligonucleotide primer for the detection of SNP TSC0024048
ccatccctccca

SEQ ID NO: 310671 - DNA, 12 bp, Artificial Sequence
  Oligonukleotid-Primer
ccatccctcccg

SEQ ID NO: 310672 - DNA, 12 bp, Artificial Sequence
  Oligonucleotide primer for the detection of SNP TSC0024048
ccgtccctccca

SEQ ID NO: 310673 - DNA, 12 bp, Artificial Sequence
  Oligonucleotide primer for the detection of SNP TSC0024048
ccgtccctcccg

SEQ ID NO: 310674 - DNA, 12 bp, Artificial Sequence
  Oligonucleotide primer for the detection of SNP TSC0024048
gagtatatttgt

SEQ ID NO: 310675 - DNA, 12 bp, Artificial Sequence
  Oligonucleotide primer for the detection of SNP TSC0024049
acctacacatat

SEQ ID NO: 310676 - DNA, 12 bp, Artificial Sequence
  Oligonucleotide primer for the detection of SNP TSC0024049
acctacacgtat

SEQ ID NO: 310677 - DNA, 12 bp, Artificial Sequence
  Oligonucleotide primer for the detection of SNP TSC0024049
acctacgcatat

SEQ ID NO: 310678 - DNA, 12 bp, Artificial Sequence
  Oligonucleotide primer for the detection of SNP TSC0024049
acctacgcgtat

SEQ ID NO: 310679 - DNA, 12 bp, Artificial Sequence
  Oligonucleotide primer for the detection of SNP TSC0024049
ttggtttgggaa

SEQ ID NO: 310680 - DNA, 12 bp, Artificial Sequence
  Oligonucleotide primer for the detection of SNP TSC0024052
ttcccctcatcc

SEQ ID NO: 310681 - DNA, 12 bp, Artificial Sequence
  Oligonucleotide primer for the detection of SNP TSC0024052
aagtatttgtag

SEQ ID NO: 310682 - DNA, 12 bp, Artificial Sequence
  Oligonucleotide primer for the detection of SNP TSC0024052
aaatacttacaa

SEQ ID NO: 310683 - DNA, 12 bp, Artificial Sequence
  Oligonucleotide primer for the detection of SNP TSC0024053
aactacaaaaaa

SEQ ID NO: 310684 - DNA, 12 bp, Artificial Sequence
  Oligonucleotide primer for the detection of SNP TSC0024053
aactacgaaaaa

SEQ ID NO: 310685 - DNA, 12 bp, Artificial Sequence
  Oligonucleotide primer for the detection of SNP TSC0024053
gatgttaatatt

SEQ ID NO: 310686 - DNA, 12 bp, Artificial Sequence
  Oligonucleotide primer for the detection of SNP TSC0024053
caaataccaaca

SEQ ID NO: 310687 - DNA, 12 bp, Artificial Sequence
  Oligonucleotide primer for the detection of SNP TSC0024053
aagttgtggaaa

SEQ ID NO: 310688 - DNA, 12 bp, Artificial Sequence
  Oligonucleotide primer for the detection of SNP TSC0024053
aagttgcggaaa

SEQ ID NO: 310689 - DNA, 12 bp, Artificial Sequence
  Oligonucleotide primer for the detection of SNP TSC0024054
acaacataaaac

SEQ ID NO: 310690 - DNA, 12 bp, Artificial Sequence
  Oligonucleotide primer for the detection of SNP TSC0024054
tattattttttg

SEQ ID NO: 310691 - DNA, 12 bp, Artificial Sequence
  Oligonucleotide primer for the detection of SNP TSC0024054
tattatttttcg

SEQ ID NO: 310692 - DNA, 12 bp, Artificial Sequence
  Oligonucleotide primer for the detection of SNP TSC0024054
caccactttcca

SEQ ID NO: 310693 - DNA, 12 bp, Artificial Sequence
  Oligonucleotide primer for the detection of SNP TSC0024054
caccactttccg

SEQ ID NO: 310694 - DNA, 12 bp, Artificial Sequence
  Oligonucleotide primer for the detection of SNP TSC0024054
gtagtatgaagt

SEQ ID NO: 310695 - DNA, 12 bp, Artificial Sequence
  Oligonucleotide primer for the detection of SNP TSC0024055
ttaatcctcctc

SEQ ID NO: 310696 - DNA, 12 bp, Artificial Sequence
  Oligonucleotide primer for the detection of SNP TSC0024055
atatggtaattt

SEQ ID NO: 310697 - DNA, 12 bp, Artificial Sequence
  Oligonucleotide primer for the detection of SNP TSC0024057
cctaataatcac

SEQ ID NO: 310698 - DNA, 12 bp, Artificial Sequence
  Oligonucleotide primer for the detection of SNP TSC0024057
cctaataatcgc

SEQ ID NO: 310699 - DNA, 12 bp, Artificial Sequence
  Oligonucleotide primer for the detection of SNP TSC0024057
ttaggaatgtta

SEQ ID NO: 310700 - DNA, 12 bp, Artificial Sequence
  Oligonucleotide primer for the detection of SNP TSC0024059
tcatctaatatc

SEQ ID NO: 310701 - DNA, 12 bp, Artificial Sequence
  Oligonucleotide primer for the detection of SNP TSC0024059
gatggagtgtga

SEQ ID NO: 310702 - DNA, 12 bp, Artificial Sequence
  Oligonucleotide primer for the detection of SNP TSC0024061
accccatacaac

SEQ ID NO: 310703 - DNA, 12 bp, Artificial Sequence
  Oligonucleotide primer for the detection of SNP TSC0024061
tgtatgtatttg

SEQ ID NO: 310704 - DNA, 12 bp, Artificial Sequence
  Oligonucleotide primer for the detection of SNP TSC0024062
tatacctcccct

SEQ ID NO: 310705 - DNA, 12 bp, Artificial Sequence
  Oligonucleotide primer for the detection of SNP TSC0024062
ttgttagtttta

SEQ ID NO: 310706 - DNA, 12 bp, Artificial Sequence
  Oligonucleotide primer for the detection of SNP TSC0024062
ctatcaacttca

SEQ ID NO: 310707 - DNA, 12 bp, Artificial Sequence
  Oligonucleotide primer for the detection of SNP TSC0024064
aatctccttaat

SEQ ID NO: 310708 - DNA, 12 bp, Artificial Sequence
  Oligonucleotide primer for the detection of SNP TSC0024064
tggattgaatta

SEQ ID NO: 310709 - DNA, 12 bp, Artificial Sequence
  Oligonucleotide primer for the detection of SNP TSC0024064
cggattgaatta

SEQ ID NO: 310710 - DNA, 12 bp, Artificial Sequence
  Oligonucleotide primer for the detection of SNP TSC0024064
caaactaaatta

SEQ ID NO: 310711 - DNA, 12 bp, Artificial Sequence
  Oligonucleotide primer for the detection of SNP TSC0024064
cgaactaaatta

SEQ ID NO: 310712 - DNA, 12 bp, Artificial Sequence
  Oligonucleotide primer for the detection of SNP TSC0024065
tataatcaataa

SEQ ID NO: 310713 - DNA, 12 bp, Artificial Sequence
  Oligonucleotide primer for the detection of SNP TSC0024065
acttcataattc

SEQ ID NO: 310714 - DNA, 12 bp, Artificial Sequence
  Oligonucleotide primer for the detection of SNP TSC0024065
tgtggttagtga

SEQ ID NO: 310715 - DNA, 12 bp, Artificial Sequence
  Oligonucleotide primer for the detection of SNP TSC0024066
ccccttataaaa

SEQ ID NO: 310716 - DNA, 12 bp, Artificial Sequence
  Oligonucleotide primer for the detection of SNP TSC0024066
ttattttgaagt

SEQ ID NO: 310717 - DNA, 12 bp, Artificial Sequence
  Oligonucleotide primer for the detection of SNP TSC0024066
ttattctaaaac

SEQ ID NO: 310718 - DNA, 12 bp, Artificial Sequence
  Oligonucleotide primer for the detection of SNP TSC0024066
ttttttatgaag

SEQ ID NO: 310719 - DNA, 12 bp, Artificial Sequence
  Oligonucleotide primer for the detection of SNP TSC0024067
gggagatatatg

SEQ ID NO: 310720 - DNA, 12 bp, Artificial Sequence
  Oligonucleotide primer for the detection of SNP TSC0024070
ttatacatatat

SEQ ID NO: 310721 - DNA, 12 bp, Artificial Sequence
  Oligonucleotide primer for the detection of SNP TSC0024070
ttatacgtatat

SEQ ID NO: 310722 - DNA, 12 bp, Artificial Sequence
  Oligonucleotide primer for the detection of SNP TSC0024070
tatgtatataaa

SEQ ID NO: 310723 - DNA, 12 bp, Artificial Sequence
  Oligonucleotide primer for the detection of SNP TSC0024070
tacgtatataaa

SEQ ID NO: 310724 - DNA, 12 bp, Artificial Sequence
  Oligonucleotide primer for the detection of SNP TSC0024070
cacacacacaaa

SEQ ID NO: 310725 - DNA, 12 bp, Artificial Sequence
  Oligonucleotide primer for the detection of SNP TSC0024070
cacgcacacaaa

SEQ ID NO: 310726 - DNA, 12 bp, Artificial Sequence
  Oligonucleotide primer for the detection of SNP TSC0024070
ttgtgtgtgtgt

SEQ ID NO: 310727 - DNA, 12 bp, Artificial Sequence
  Oligonucleotide primer for the detection of SNP TSC0024070
ttgtgcgtgtgt

SEQ ID NO: 310728 - DNA, 12 bp, Artificial Sequence
  Oligonucleotide primer for the detection of SNP TSC0024071
aatacaattact

SEQ ID NO: 310729 - DNA, 12 bp, Artificial Sequence
  Oligonucleotide primer for the detection of SNP TSC0024071
tataattgaaaa

SEQ ID NO: 310730 - DNA, 12 bp, Artificial Sequence
  Oligonucleotide primer for the detection of SNP TSC0024076
ttatagtgtgga

SEQ ID NO: 310731 - DNA, 12 bp, Artificial Sequence
  Oligonucleotide primer for the detection of SNP TSC0024077
actacctatcat

SEQ ID NO: 310732 - DNA, 12 bp, Artificial Sequence
  Oligonucleotide primer for the detection of SNP TSC0024077
gtgatggtttta

SEQ ID NO: 310733 - DNA, 12 bp, Artificial Sequence
  Oligonucleotide primer for the detection of SNP TSC0024077
gcgatggtttta

SEQ ID NO: 310734 - DNA, 12 bp, Artificial Sequence
  Oligonucleotide primer for the detection of SNP TSC0024078
ttttaattcaat

SEQ ID NO: 310735 - DNA, 12 bp, Artificial Sequence
  Oligonucleotide primer for the detection of SNP TSC0024078
agttattattaa

SEQ ID NO: 310736 - DNA, 12 bp, Artificial Sequence
  Oligonucleotide primer for the detection of SNP TSC0024079
gttttaagaaaa

SEQ ID NO: 310737 - DNA, 12 bp, Artificial Sequence
  Oligonucleotide primer for the detection of SNP TSC0024080
tactaaaaaata

SEQ ID NO: 310738 - DNA, 12 bp, Artificial Sequence
  Oligonucleotide primer for the detection of SNP TSC0024080
tattcttttcat

SEQ ID NO: 310739 - DNA, 12 bp, Artificial Sequence
  Oligonucleotide primer for the detection of SNP TSC0024080
tattgaggagta

SEQ ID NO: 310740 - DNA, 12 bp, Artificial Sequence
  Oligonucleotide primer for the detection of SNP TSC0024083
taaacgtaaaaa

SEQ ID NO: 310741 - DNA, 12 bp, Artificial Sequence
  Oligonucleotide primer for the detection of SNP TSC0024083
atttgtttattg

SEQ ID NO: 310742 - DNA, 12 bp, Artificial Sequence
  Oligonucleotide primer for the detection of SNP TSC0024083
attcgtttattg

SEQ ID NO: 310743 - DNA, 12 bp, Artificial Sequence
  Oligonucleotide primer for the detection of SNP TSC0024083
acccacccacta

SEQ ID NO: 310744 - DNA, 12 bp, Artificial Sequence
  Oligonucleotide primer for the detection of SNP TSC0024083
acccgcccacta

SEQ ID NO: 310745 - DNA, 12 bp, Artificial Sequence
  Oligonucleotide primer for the detection of SNP TSC0024083
aaatgtgagggt

SEQ ID NO: 310746 - DNA, 12 bp, Artificial Sequence
  Oligonucleotide primer for the detection of SNP TSC0024083
aaacgtgagggt

SEQ ID NO: 310747 - DNA, 12 bp, Artificial Sequence
  Oligonucleotide primer for the detection of SNP TSC0024085
tattattaaaat

SEQ ID NO: 310748 - DNA, 12 bp, Artificial Sequence
  Oligonukleotid-Primer
tttggatgggga

SEQ ID NO: 310749 - DNA, 12 bp, Artificial Sequence
  Oligonucleotide primer for the detection of SNP TSC0024085
tttggacgggga

SEQ ID NO: 310750 - DNA, 12 bp, Artificial Sequence
  Oligonucleotide primer for the detection of SNP TSC0024092
tttgttttgtga

SEQ ID NO: 310751 - DNA, 12 bp, Artificial Sequence
  Oligonucleotide primer for the detection of SNP TSC0024092
cttattctataa

SEQ ID NO: 310752 - DNA, 12 bp, Artificial Sequence
  Oligonukleotid-Primer
tgggggtggggg

SEQ ID NO: 310753 - DNA, 12 bp, Artificial Sequence
  Oligonucleotide primer for the detection of SNP TSC0024093
cttaaatccgaa

SEQ ID NO: 310754 - DNA, 12 bp, Artificial Sequence
  Oligonucleotide primer for the detection of SNP TSC0024093
tataatttttgt

SEQ ID NO: 310755 - DNA, 12 bp, Artificial Sequence
  Oligonucleotide primer for the detection of SNP TSC0024093
tataattttcgt

SEQ ID NO: 310756 - DNA, 12 bp, Artificial Sequence
  Oligonucleotide primer for the detection of SNP TSC0024093
tttgaatttggg

SEQ ID NO: 310757 - DNA, 12 bp, Artificial Sequence
  Oligonucleotide primer for the detection of SNP TSC0024093
tttgaattcggg

SEQ ID NO: 310758 - DNA, 12 bp, Artificial Sequence
  Oligonucleotide primer for the detection of SNP TSC0024099
taaacacacaaa

SEQ ID NO: 310759 - DNA, 12 bp, Artificial Sequence
  Oligonucleotide primer for the detection of SNP TSC0024099
atttttgttgat

SEQ ID NO: 310760 - DNA, 12 bp, Artificial Sequence
  Oligonucleotide primer for the detection of SNP TSC0024099
atttttgtcgat

SEQ ID NO: 310761 - DNA, 12 bp, Artificial Sequence
  Oligonucleotide primer for the detection of SNP TSC0024099
acccctaccaat

SEQ ID NO: 310762 - DNA, 12 bp, Artificial Sequence
  Oligonucleotide primer for the detection of SNP TSC0024099
acccctaccgat

SEQ ID NO: 310763 - DNA, 12 bp, Artificial Sequence
  Oligonucleotide primer for the detection of SNP TSC0024099
tggatatataga

SEQ ID NO: 310764 - DNA, 12 bp, Artificial Sequence
  Oligonucleotide primer for the detection of SNP TSC0024101
taatctatatac

SEQ ID NO: 310765 - DNA, 12 bp, Artificial Sequence
  Oligonucleotide primer for the detection of SNP TSC0024101
tattgtttttaa

SEQ ID NO: 310766 - DNA, 12 bp, Artificial Sequence
  Oligonucleotide primer for the detection of SNP TSC0024102
tattaaaagatg

SEQ ID NO: 310767 - DNA, 12 bp, Artificial Sequence
  Oligonucleotide primer for the detection of SNP TSC0024102
cattaaaaaata

SEQ ID NO: 310768 - DNA, 12 bp, Artificial Sequence
  Oligonucleotide primer for the detection of SNP TSC0024102
aaggaatgtttt

SEQ ID NO: 310769 - DNA, 12 bp, Artificial Sequence
  Oligonucleotide primer for the detection of SNP TSC0024103
aaagatggagga

SEQ ID NO: 310770 - DNA, 12 bp, Artificial Sequence
  Oligonucleotide primer for the detection of SNP TSC0024103
aaataagaaaga

SEQ ID NO: 310771 - DNA, 12 bp, Artificial Sequence
  Oligonucleotide primer for the detection of SNP TSC0024106
aaaataaacacc

SEQ ID NO: 310772 - DNA, 12 bp, Artificial Sequence
  Oligonucleotide primer for the detection of SNP TSC0024106
atatggttatgt

SEQ ID NO: 310773 - DNA, 12 bp, Artificial Sequence
  Oligonucleotide primer for the detection of SNP TSC0024106
atatggttatgc

SEQ ID NO: 310774 - DNA, 12 bp, Artificial Sequence
  Oligonucleotide primer for the detection of SNP TSC0024106
cacataaccata

SEQ ID NO: 310775 - DNA, 12 bp, Artificial Sequence
  Oligonucleotide primer for the detection of SNP TSC0024106
aaatgaatattt

SEQ ID NO: 310776 - DNA, 12 bp, Artificial Sequence
  Oligonucleotide primer for the detection of SNP TSC0024107
aagattttgaaa

SEQ ID NO: 310777 - DNA, 12 bp, Artificial Sequence
  Oligonucleotide primer for the detection of SNP TSC0024107
aaaattctaaaa

SEQ ID NO: 310778 - DNA, 12 bp, Artificial Sequence
  Oligonucleotide primer for the detection of SNP TSC0024107
gttagatgtagg

SEQ ID NO: 310779 - DNA, 12 bp, Artificial Sequence
  Oligonucleotide primer for the detection of SNP TSC0024108
tcaactaataaa

SEQ ID NO: 310780 - DNA, 12 bp, Artificial Sequence
  Oligonucleotide primer for the detection of SNP TSC0024108
gtgggtattaaa

SEQ ID NO: 310781 - DNA, 12 bp, Artificial Sequence
  Oligonucleotide primer for the detection of SNP TSC0024108
ttaattggtaaa

SEQ ID NO: 310782 - DNA, 12 bp, Artificial Sequence
  Oligonucleotide primer for the detection of SNP TSC0024109
ccaattaatctt

SEQ ID NO: 310783 - DNA, 12 bp, Artificial Sequence
  Oligonucleotide primer for the detection of SNP TSC0024109
agaaaattaaaa

SEQ ID NO: 310784 - DNA, 12 bp, Artificial Sequence
  Oligonucleotide primer for the detection of SNP TSC0024114
tataaactaaac

SEQ ID NO: 310785 - DNA, 12 bp, Artificial Sequence
  Oligonucleotide primer for the detection of SNP TSC0024114
tgagttgtgggg

SEQ ID NO: 310786 - DNA, 12 bp, Artificial Sequence
  Oligonucleotide primer for the detection of SNP TSC0024115
tatccccttaac

SEQ ID NO: 310787 - DNA, 12 bp, Artificial Sequence
  Oligonucleotide primer for the detection of SNP TSC0024115
gagttttgtgta

SEQ ID NO: 310788 - DNA, 12 bp, Artificial Sequence
  Oligonucleotide primer for the detection of SNP TSC0024115
gagtttcgtgta

SEQ ID NO: 310789 - DNA, 12 bp, Artificial Sequence
  Oligonucleotide primer for the detection of SNP TSC0024115
aaattccataca

SEQ ID NO: 310790 - DNA, 12 bp, Artificial Sequence
  Oligonucleotide primer for the detection of SNP TSC0024115
aaattccgtaca

SEQ ID NO: 310791 - DNA, 12 bp, Artificial Sequence
  Oligonucleotide primer for the detection of SNP TSC0024115
tgtttttttgat

SEQ ID NO: 310792 - DNA, 12 bp, Artificial Sequence
  Oligonucleotide primer for the detection of SNP TSC0024116
ctctaaacaatc

SEQ ID NO: 310793 - DNA, 12 bp, Artificial Sequence
  Oligonucleotide primer for the detection of SNP TSC0024116
atgttgtttgta

SEQ ID NO: 310794 - DNA, 12 bp, Artificial Sequence
  Oligonucleotide primer for the detection of SNP TSC0024117
aaaacaaacata

SEQ ID NO: 310795 - DNA, 12 bp, Artificial Sequence
  Oligonucleotide primer for the detection of SNP TSC0024117
aaaacaaacgta

SEQ ID NO: 310796 - DNA, 12 bp, Artificial Sequence
  Oligonucleotide primer for the detection of SNP TSC0024117
ttgagaaatttt

SEQ ID NO: 310797 - DNA, 12 bp, Artificial Sequence
  Oligonucleotide primer for the detection of SNP TSC0024117
ctaaaaaactcc

SEQ ID NO: 310798 - DNA, 12 bp, Artificial Sequence
  Oligonucleotide primer for the detection of SNP TSC0024117
gaggtaaatgtg

SEQ ID NO: 310799 - DNA, 12 bp, Artificial Sequence
  Oligonucleotide primer for the detection of SNP TSC0024117
gaggtaaacgtg

SEQ ID NO: 310800 - DNA, 12 bp, Artificial Sequence
  Oligonucleotide primer for the detection of SNP TSC0024119
aactaatataaa

SEQ ID NO: 310801 - DNA, 12 bp, Artificial Sequence
  Oligonucleotide primer for the detection of SNP TSC0024119
gggtttgttatt

SEQ ID NO: 310802 - DNA, 12 bp, Artificial Sequence
  Oligonucleotide primer for the detection of SNP TSC0024119
gggtttgttatc

SEQ ID NO: 310803 - DNA, 12 bp, Artificial Sequence
  Oligonucleotide primer for the detection of SNP TSC0024119
aattggtataaa

SEQ ID NO: 310804 - DNA, 12 bp, Artificial Sequence
  Oligonucleotide primer for the detection of SNP TSC0024120
atcttaaaaaca

SEQ ID NO: 310805 - DNA, 12 bp, Artificial Sequence
  Oligonucleotide primer for the detection of SNP TSC0024120
agggtgtttgat

SEQ ID NO: 310806 - DNA, 12 bp, Artificial Sequence
  Oligonucleotide primer for the detection of SNP TSC0024120
agggtgttcgat

SEQ ID NO: 310807 - DNA, 12 bp, Artificial Sequence
  Oligonucleotide primer for the detection of SNP TSC0024120
aaatatccaata

SEQ ID NO: 310808 - DNA, 12 bp, Artificial Sequence
  Oligonucleotide primer for the detection of SNP TSC0024120
aaatatccgata

SEQ ID NO: 310809 - DNA, 12 bp, Artificial Sequence
  Oligonucleotide primer for the detection of SNP TSC0024120
gttttgaaagta

SEQ ID NO: 310810 - DNA, 12 bp, Artificial Sequence
  Oligonucleotide primer for the detection of SNP TSC0024125
aaaaccctccac

SEQ ID NO: 310811 - DNA, 12 bp, Artificial Sequence
  Oligonucleotide primer for the detection of SNP TSC0024125
gttttgtatttg

SEQ ID NO: 310812 - DNA, 12 bp, Artificial Sequence
  Oligonucleotide primer for the detection of SNP TSC0024125
attctacatcta

SEQ ID NO: 310813 - DNA, 12 bp, Artificial Sequence
  Oligonucleotide primer for the detection of SNP TSC0024125
gggattttttat

SEQ ID NO: 310814 - DNA, 12 bp, Artificial Sequence
  Oligonucleotide primer for the detection of SNP TSC0024126
atttctttattt

SEQ ID NO: 310815 - DNA, 12 bp, Artificial Sequence
  Oligonucleotide primer for the detection of SNP TSC0024126
tgggaaataatg

SEQ ID NO: 310816 - DNA, 12 bp, Artificial Sequence
  Oligonucleotide primer for the detection of SNP TSC0024128
aacactattatt

SEQ ID NO: 310817 - DNA, 12 bp, Artificial Sequence
  Oligonucleotide primer for the detection of SNP TSC0024128
ttgtaattgagt

SEQ ID NO: 310818 - DNA, 12 bp, Artificial Sequence
  Oligonucleotide primer for the detection of SNP TSC0024128
ttataactaaat

SEQ ID NO: 310819 - DNA, 12 bp, Artificial Sequence
  Oligonucleotide primer for the detection of SNP TSC0024130
ccaactttcctc

SEQ ID NO: 310820 - DNA, 12 bp, Artificial Sequence
  Oligonucleotide primer for the detection of SNP TSC0024130
agattgagtggg

SEQ ID NO: 310821 - DNA, 12 bp, Artificial Sequence
  Oligonucleotide primer for the detection of SNP TSC0024131
aaacatctcact

SEQ ID NO: 310822 - DNA, 12 bp, Artificial Sequence
  Oligonucleotide primer for the detection of SNP TSC0024131
aatggggagtgg

SEQ ID NO: 310823 - DNA, 12 bp, Artificial Sequence
  Oligonucleotide primer for the detection of SNP TSC0024133
tctaaaaatatc

SEQ ID NO: 310824 - DNA, 12 bp, Artificial Sequence
  Oligonucleotide primer for the detection of SNP TSC0024133
gtgtggaatttt

SEQ ID NO: 310825 - DNA, 12 bp, Artificial Sequence
  Oligonucleotide primer for the detection of SNP TSC0024133
atataaaactct

SEQ ID NO: 310826 - DNA, 12 bp, Artificial Sequence
  Oligonucleotide primer for the detection of SNP TSC0024133
tttaaagatatt

SEQ ID NO: 310827 - DNA, 12 bp, Artificial Sequence
  Oligonucleotide primer for the detection of SNP TSC0024134
ctccctatatac

SEQ ID NO: 310828 - DNA, 12 bp, Artificial Sequence
  Oligonucleotide primer for the detection of SNP TSC0024134
tgtataaagtgg

SEQ ID NO: 310829 - DNA, 12 bp, Artificial Sequence
  Oligonucleotide primer for the detection of SNP TSC0024134
ttttttatgtgt

SEQ ID NO: 310830 - DNA, 12 bp, Artificial Sequence
  Oligonucleotide primer for the detection of SNP TSC0024139
gtttgtttttgg

SEQ ID NO: 310831 - DNA, 12 bp, Artificial Sequence
  Oligonucleotide primer for the detection of SNP TSC0024141
tccctcacccct

SEQ ID NO: 310832 - DNA, 12 bp, Artificial Sequence
  Oligonucleotide primer for the detection of SNP TSC0024141
aatagtatttgg

SEQ ID NO: 310833 - DNA, 12 bp, Artificial Sequence
  Oligonucleotide primer for the detection of SNP TSC0024142
cacaattctact

SEQ ID NO: 310834 - DNA, 12 bp, Artificial Sequence
  Oligonucleotide primer for the detection of SNP TSC0024142
aggattgggtat

SEQ ID NO: 310835 - DNA, 12 bp, Artificial Sequence
  Oligonucleotide primer for the detection of SNP TSC0024142
tatagttttatt

SEQ ID NO: 310836 - DNA, 12 bp, Artificial Sequence
  Oligonucleotide primer for the detection of SNP TSC0024151
ctctctactttc

SEQ ID NO: 310837 - DNA, 12 bp, Artificial Sequence
  Oligonucleotide primer for the detection of SNP TSC0024151
tttgggaaggtt

SEQ ID NO: 310838 - DNA, 12 bp, Artificial Sequence
  Oligonucleotide primer for the detection of SNP TSC0024151
tctaaaaaaatt

SEQ ID NO: 310839 - DNA, 12 bp, Artificial Sequence
  Oligonucleotide primer for the detection of SNP TSC0024152
tatcactcttct

SEQ ID NO: 310840 - DNA, 12 bp, Artificial Sequence
  Oligonucleotide primer for the detection of SNP TSC0024152
ttgtaataggga

SEQ ID NO: 310841 - DNA, 12 bp, Artificial Sequence
  Oligonucleotide primer for the detection of SNP TSC0024158
ctataaaaattt

SEQ ID NO: 310842 - DNA, 12 bp, Artificial Sequence
  Oligonucleotide primer for the detection of SNP TSC0024158
caattcactcat

SEQ ID NO: 310843 - DNA, 12 bp, Artificial Sequence
  Oligonucleotide primer for the detection of SNP TSC0024158
ttatgggaattt

SEQ ID NO: 310844 - DNA, 12 bp, Artificial Sequence
  Oligonucleotide primer for the detection of SNP TSC0024159
aaaccatttctt

SEQ ID NO: 310845 - DNA, 12 bp, Artificial Sequence
  Oligonucleotide primer for the detection of SNP TSC0024159
ttttagtgtagg

SEQ ID NO: 310846 - DNA, 12 bp, Artificial Sequence
  Oligonucleotide primer for the detection of SNP TSC0024159
gagttatttttt

SEQ ID NO: 310847 - DNA, 12 bp, Artificial Sequence
  Oligonucleotide primer for the detection of SNP TSC0024162
actctcaataac

SEQ ID NO: 310848 - DNA, 12 bp, Artificial Sequence
  Oligonucleotide primer for the detection of SNP TSC0024164
atatttatttat

SEQ ID NO: 310849 - DNA, 12 bp, Artificial Sequence
  Oligonucleotide primer for the detection of SNP TSC0024164
atgagtttagat

SEQ ID NO: 310850 - DNA, 12 bp, Artificial Sequence
  Oligonucleotide primer for the detection of SNP TSC0024164
ataaatttaaac

SEQ ID NO: 310851 - DNA, 12 bp, Artificial Sequence
  Oligonucleotide primer for the detection of SNP TSC0024167
aattaaacttta

SEQ ID NO: 310852 - DNA, 12 bp, Artificial Sequence
  Oligonucleotide primer for the detection of SNP TSC0024167
gattttttttat

SEQ ID NO: 310853 - DNA, 12 bp, Artificial Sequence
  Oligonukleotid-Primer
aaacttcttcca

SEQ ID NO: 310854 - DNA, 12 bp, Artificial Sequence
  Oligonucleotide primer for the detection of SNP TSC0024167
agattgagtttt

SEQ ID NO: 310855 - DNA, 12 bp, Artificial Sequence
  Oligonucleotide primer for the detection of SNP TSC0024170
attcctactctc

SEQ ID NO: 310856 - DNA, 12 bp, Artificial Sequence
  Oligonucleotide primer for the detection of SNP TSC0024170
ttaaggaatata

SEQ ID NO: 310857 - DNA, 12 bp, Artificial Sequence
  Oligonukleotid-Primer
aaaatttcctat

SEQ ID NO: 310858 - DNA, 12 bp, Artificial Sequence
  Oligonucleotide primer for the detection of SNP TSC0024171
tttaaggtgaaa

SEQ ID NO: 310859 - DNA, 12 bp, Artificial Sequence
  Oligonucleotide primer for the detection of SNP TSC0024172
ctataatacctt

SEQ ID NO: 310860 - DNA, 12 bp, Artificial Sequence
  Oligonucleotide primer for the detection of SNP TSC0024173
tgttagtgtgtg

SEQ ID NO: 310861 - DNA, 12 bp, Artificial Sequence
  Oligonukleotid-Primer
tgttagtgcgtg

SEQ ID NO: 310862 - DNA, 12 bp, Artificial Sequence
  Oligonucleotide primer for the detection of SNP TSC0024173
tgttagtgtgcg

SEQ ID NO: 310863 - DNA, 12 bp, Artificial Sequence
  Oligonucleotide primer for the detection of SNP TSC0024173
tgttagtgcgcg

SEQ ID NO: 310864 - DNA, 12 bp, Artificial Sequence
  Oligonucleotide primer for the detection of SNP TSC0024174
ataaactaatca

SEQ ID NO: 310865 - DNA, 12 bp, Artificial Sequence
  Oligonucleotide primer for the detection of SNP TSC0024174
attgaggtttat

SEQ ID NO: 310866 - DNA, 12 bp, Artificial Sequence
  Oligonucleotide primer for the detection of SNP TSC0024174
actaaaacccac

SEQ ID NO: 310867 - DNA, 12 bp, Artificial Sequence
  Oligonucleotide primer for the detection of SNP TSC0024174
gtgggttggtta

SEQ ID NO: 310868 - DNA, 12 bp, Artificial Sequence
  Oligonucleotide primer for the detection of SNP TSC0024177
ccccataactat

SEQ ID NO: 310869 - DNA, 12 bp, Artificial Sequence
  Oligonucleotide primer for the detection of SNP TSC0024177
atttttttaagg

SEQ ID NO: 310870 - DNA, 12 bp, Artificial Sequence
  Oligonucleotide primer for the detection of SNP TSC0024179
taaccctactac

SEQ ID NO: 310871 - DNA, 12 bp, Artificial Sequence
  Oligonucleotide primer for the detection of SNP TSC0024179
ggagtagatatt

SEQ ID NO: 310872 - DNA, 12 bp, Artificial Sequence
  Oligonucleotide primer for the detection of SNP TSC0024179
aaaacaaatact

SEQ ID NO: 310873 - DNA, 12 bp, Artificial Sequence
  Oligonucleotide primer for the detection of SNP TSC0024179
tggttttgttgt

SEQ ID NO: 310874 - DNA, 12 bp, Artificial Sequence
  Oligonucleotide primer for the detection of SNP TSC0024183
ataaactattac

SEQ ID NO: 310875 - DNA, 12 bp, Artificial Sequence
  Oligonucleotide primer for the detection of SNP TSC0024183
tatattattgtg

SEQ ID NO: 310876 - DNA, 12 bp, Artificial Sequence
  Oligonucleotide primer for the detection of SNP TSC0024187
accacctccact

SEQ ID NO: 310877 - DNA, 12 bp, Artificial Sequence
  Oligonucleotide primer for the detection of SNP TSC0024187
gtataaagtaga

SEQ ID NO: 310878 - DNA, 12 bp, Artificial Sequence
  Oligonucleotide primer for the detection of SNP TSC0024193
ataatcttaaat

SEQ ID NO: 310879 - DNA, 12 bp, Artificial Sequence
  Oligonucleotide primer for the detection of SNP TSC0024193
gatgttataata

SEQ ID NO: 310880 - DNA, 12 bp, Artificial Sequence
  Oligonucleotide primer for the detection of SNP TSC0024194
taacttaaccta

SEQ ID NO: 310881 - DNA, 12 bp, Artificial Sequence
  Oligonucleotide primer for the detection of SNP TSC0024194
taataagatagt

SEQ ID NO: 310882 - DNA, 12 bp, Artificial Sequence
  Oligonucleotide primer for the detection of SNP TSC0024194
aatttaatttgt

SEQ ID NO: 310883 - DNA, 12 bp, Artificial Sequence
  Oligonucleotide primer for the detection of SNP TSC0024195
ctatatcatcaa

SEQ ID NO: 310884 - DNA, 12 bp, Artificial Sequence
  Oligonucleotide primer for the detection of SNP TSC0024195
ctatatcatcga

SEQ ID NO: 310885 - DNA, 12 bp, Artificial Sequence
  Oligonucleotide primer for the detection of SNP TSC0024195
ttatttggtttt

SEQ ID NO: 310886 - DNA, 12 bp, Artificial Sequence
  Oligonucleotide primer for the detection of SNP TSC0024195
ccacctaacttc

SEQ ID NO: 310887 - DNA, 12 bp, Artificial Sequence
  Oligonucleotide primer for the detection of SNP TSC0024195
attgtgttattg

SEQ ID NO: 310888 - DNA, 12 bp, Artificial Sequence
  Oligonucleotide primer for the detection of SNP TSC0024195
attgtgttatcg

SEQ ID NO: 310889 - DNA, 12 bp, Artificial Sequence
  Oligonucleotide primer for the detection of SNP TSC0024196
acaaacccccaa

SEQ ID NO: 310890 - DNA, 12 bp, Artificial Sequence
  Oligonucleotide primer for the detection of SNP TSC0024196
ggattgatagag

SEQ ID NO: 310891 - DNA, 12 bp, Artificial Sequence
  Oligonucleotide primer for the detection of SNP TSC0024196
ggatcgatagag

SEQ ID NO: 310892 - DNA, 12 bp, Artificial Sequence
  Oligonucleotide primer for the detection of SNP TSC0024196
aaccgacaaaaa

SEQ ID NO: 310893 - DNA, 12 bp, Artificial Sequence
  Oligonucleotide primer for the detection of SNP TSC0024196
tatagattttta

SEQ ID NO: 310894 - DNA, 12 bp, Artificial Sequence
  Oligonucleotide primer for the detection of SNP TSC0024198
cacctaaaaacc

SEQ ID NO: 310895 - DNA, 12 bp, Artificial Sequence
  Oligonucleotide primer for the detection of SNP TSC0024198
cgcctaaaaacc

SEQ ID NO: 310896 - DNA, 12 bp, Artificial Sequence
  Oligonucleotide primer for the detection of SNP TSC0024198
tttgatgttata

SEQ ID NO: 310897 - DNA, 12 bp, Artificial Sequence
  Oligonucleotide primer for the detection of SNP TSC0024198
cttaatattaca

SEQ ID NO: 310898 - DNA, 12 bp, Artificial Sequence
  Oligonucleotide primer for the detection of SNP TSC0024198
tgtttggaaatt

SEQ ID NO: 310899 - DNA, 12 bp, Artificial Sequence
  Oligonucleotide primer for the detection of SNP TSC0024198
cgtttggaaatt

SEQ ID NO: 310900 - DNA, 12 bp, Artificial Sequence
  Oligonucleotide primer for the detection of SNP TSC0024199
aacattacccta

SEQ ID NO: 310901 - DNA, 12 bp, Artificial Sequence
  Oligonucleotide primer for the detection of SNP TSC0024199
atgttgttaatt

SEQ ID NO: 310902 - DNA, 12 bp, Artificial Sequence
  Oligonucleotide primer for the detection of SNP TSC0024199
atattaccaatt

SEQ ID NO: 310903 - DNA, 12 bp, Artificial Sequence
  Oligonucleotide primer for the detection of SNP TSC0024199
ggtattatttta

SEQ ID NO: 310904 - DNA, 12 bp, Artificial Sequence
  Oligonucleotide primer for the detection of SNP TSC0024201
tccaccaaaaca

SEQ ID NO: 310905 - DNA, 12 bp, Artificial Sequence
  Oligonucleotide primer for the detection of SNP TSC0024201
tagtagagtttt

SEQ ID NO: 310906 - DNA, 12 bp, Artificial Sequence
  Oligonucleotide primer for the detection of SNP TSC0024201
caacaaaatctt

SEQ ID NO: 310907 - DNA, 12 bp, Artificial Sequence
  Oligonucleotide primer for the detection of SNP TSC0024208
atcaaattcaaa

SEQ ID NO: 310908 - DNA, 12 bp, Artificial Sequence
  Oligonucleotide primer for the detection of SNP TSC0024208
tttattatagta

SEQ ID NO: 310909 - DNA, 12 bp, Artificial Sequence
  Oligonucleotide primer for the detection of SNP TSC0024209
tctatacttact

SEQ ID NO: 310910 - DNA, 12 bp, Artificial Sequence
  Oligonucleotide primer for the detection of SNP TSC0024209
aggtggtttttt

SEQ ID NO: 310911 - DNA, 12 bp, Artificial Sequence
  Oligonucleotide primer for the detection of SNP TSC0024209
aataactttcta

SEQ ID NO: 310912 - DNA, 12 bp, Artificial Sequence
  Oligonucleotide primer for the detection of SNP TSC0024209
tttgtatttgtt

SEQ ID NO: 310913 - DNA, 12 bp, Artificial Sequence
  Oligonucleotide primer for the detection of SNP TSC0024210
gtaaaatattta

SEQ ID NO: 310914 - DNA, 12 bp, Artificial Sequence
  Oligonucleotide primer for the detection of SNP TSC0024211
tcgttatttttt

SEQ ID NO: 310915 - DNA, 12 bp, Artificial Sequence
  Oligonucleotide primer for the detection of SNP TSC0024211
cattacttccta

SEQ ID NO: 310916 - DNA, 12 bp, Artificial Sequence
  Oligonucleotide primer for the detection of SNP TSC0024211
cgttacttccta

SEQ ID NO: 310917 - DNA, 12 bp, Artificial Sequence
  Oligonucleotide primer for the detection of SNP TSC0024211
ggattttgggat

SEQ ID NO: 310918 - DNA, 12 bp, Artificial Sequence
  Oligonucleotide primer for the detection of SNP TSC0024212
tcattcataccc

SEQ ID NO: 310919 - DNA, 12 bp, Artificial Sequence
  Oligonucleotide primer for the detection of SNP TSC0024212
tattgagagaga

SEQ ID NO: 310920 - DNA, 12 bp, Artificial Sequence
  Oligonucleotide primer for the detection of SNP TSC0024213
taaaaccaaatc

SEQ ID NO: 310921 - DNA, 12 bp, Artificial Sequence
  Oligonucleotide primer for the detection of SNP TSC0024213
tagtttattttc

SEQ ID NO: 310922 - DNA, 12 bp, Artificial Sequence
  Oligonucleotide primer for the detection of SNP TSC0024213
caacccatcccc

SEQ ID NO: 310923 - DNA, 12 bp, Artificial Sequence
  Oligonucleotide primer for the detection of SNP TSC0024213
tgggattaagtt

SEQ ID NO: 310924 - DNA, 12 bp, Artificial Sequence
  Oligonucleotide primer for the detection of SNP TSC0024213
tgggattaagtc

SEQ ID NO: 310925 - DNA, 12 bp, Artificial Sequence
  Oligonucleotide primer for the detection of SNP TSC0024219
tccccactaccc

SEQ ID NO: 310926 - DNA, 12 bp, Artificial Sequence
  Oligonucleotide primer for the detection of SNP TSC0024219
ttttaggggtag

SEQ ID NO: 310927 - DNA, 12 bp, Artificial Sequence
  Oligonucleotide primer for the detection of SNP TSC0024220
ccttaacctccc

SEQ ID NO: 310928 - DNA, 12 bp, Artificial Sequence
  Oligonucleotide primer for the detection of SNP TSC0024220
ttgtaatttgag

SEQ ID NO: 310929 - DNA, 12 bp, Artificial Sequence
  Oligonucleotide primer for the detection of SNP TSC0024220
tcgtaatttgag

SEQ ID NO: 310930 - DNA, 12 bp, Artificial Sequence
  Oligonucleotide primer for the detection of SNP TSC0024220
ccataatctaaa

SEQ ID NO: 310931 - DNA, 12 bp, Artificial Sequence
  Oligonucleotide primer for the detection of SNP TSC0024220
ccgtaatctaaa

SEQ ID NO: 310932 - DNA, 12 bp, Artificial Sequence
  Oligonucleotide primer for the detection of SNP TSC0024221
cttcaacctccc

SEQ ID NO: 310933 - DNA, 12 bp, Artificial Sequence
  Oligonucleotide primer for the detection of SNP TSC0024223
aataactaaccc

SEQ ID NO: 310934 - DNA, 12 bp, Artificial Sequence
  Oligonucleotide primer for the detection of SNP TSC0024223
ggtaggagtttg

SEQ ID NO: 310935 - DNA, 12 bp, Artificial Sequence
  Oligonucleotide primer for the detection of SNP TSC0024223
ggtaggagttcg

SEQ ID NO: 310936 - DNA, 12 bp, Artificial Sequence
  Oligonucleotide primer for the detection of SNP TSC0024223
aacaaaaaccca

SEQ ID NO: 310937 - DNA, 12 bp, Artificial Sequence
  Oligonucleotide primer for the detection of SNP TSC0024223
aacaaaaacccg

SEQ ID NO: 310938 - DNA, 12 bp, Artificial Sequence
  Oligonukleotid-Primer
agtgattggttt

SEQ ID NO: 310939 - DNA, 12 bp, Artificial Sequence
  Oligonucleotide primer for the detection of SNP TSC0024224
ctctaaaaaact

SEQ ID NO: 310940 - DNA, 12 bp, Artificial Sequence
  Oligonucleotide primer for the detection of SNP TSC0024226
tctataaccctc

SEQ ID NO: 310941 - DNA, 12 bp, Artificial Sequence
  Oligonucleotide primer for the detection of SNP TSC0024226
aatttgagtgta

SEQ ID NO: 310942 - DNA, 12 bp, Artificial Sequence
  Oligonucleotide primer for the detection of SNP TSC0024237
ccaaaattctat

SEQ ID NO: 310943 - DNA, 12 bp, Artificial Sequence
  Oligonucleotide primer for the detection of SNP TSC0024237
ccgaaattctat

SEQ ID NO: 310944 - DNA, 12 bp, Artificial Sequence
  Oligonucleotide primer for the detection of SNP TSC0024237
gtgtttttttga

SEQ ID NO: 310945 - DNA, 12 bp, Artificial Sequence
  Oligonucleotide primer for the detection of SNP TSC0024237
atatccccttaa

SEQ ID NO: 310946 - DNA, 12 bp, Artificial Sequence
  Oligonucleotide primer for the detection of SNP TSC0024237
ttggggttttgt

SEQ ID NO: 310947 - DNA, 12 bp, Artificial Sequence
  Oligonucleotide primer for the detection of SNP TSC0024237
tcggggttttgt

SEQ ID NO: 310948 - DNA, 12 bp, Artificial Sequence
  Oligonucleotide primer for the detection of SNP TSC0024238
cactcacaaaac

SEQ ID NO: 310949 - DNA, 12 bp, Artificial Sequence
  Oligonucleotide primer for the detection of SNP TSC0024238
tagttttttcgg

SEQ ID NO: 310950 - DNA, 12 bp, Artificial Sequence
  Oligonucleotide primer for the detection of SNP TSC0024239
tcctacaaaata

SEQ ID NO: 310951 - DNA, 12 bp, Artificial Sequence
  Oligonucleotide primer for the detection of SNP TSC0024239
tcctacgaaata

SEQ ID NO: 310952 - DNA, 12 bp, Artificial Sequence
  Oligonucleotide primer for the detection of SNP TSC0024240
tctcaataataa

SEQ ID NO: 310953 - DNA, 12 bp, Artificial Sequence
  Oligonucleotide primer for the detection of SNP TSC0024240
gtggtggttaat

SEQ ID NO: 310954 - DNA, 12 bp, Artificial Sequence
  Oligonucleotide primer for the detection of SNP TSC0024240
ataataatcaac

SEQ ID NO: 310955 - DNA, 12 bp, Artificial Sequence
  Oligonucleotide primer for the detection of SNP TSC0024240
ttttagtggtga

SEQ ID NO: 310956 - DNA, 12 bp, Artificial Sequence
  Oligonucleotide primer for the detection of SNP TSC0024241
taaacctttttt

SEQ ID NO: 310957 - DNA, 12 bp, Artificial Sequence
  Oligonucleotide primer for the detection of SNP TSC0024241
gtagtttatgaa

SEQ ID NO: 310958 - DNA, 12 bp, Artificial Sequence
  Oligonucleotide primer for the detection of SNP TSC0024242
caccatataaaa

SEQ ID NO: 310959 - DNA, 12 bp, Artificial Sequence
  Oligonucleotide primer for the detection of SNP TSC0024242
gagtaaagttat

SEQ ID NO: 310960 - DNA, 12 bp, Artificial Sequence
  Oligonucleotide primer for the detection of SNP TSC0024242
aaacaaaatcac

SEQ ID NO: 310961 - DNA, 12 bp, Artificial Sequence
  Oligonucleotide primer for the detection of SNP TSC0024242
tattatgtaaga

SEQ ID NO: 310962 - DNA, 12 bp, Artificial Sequence
  Oligonucleotide primer for the detection of SNP TSC0024243
aaaaacatattc

SEQ ID NO: 310963 - DNA, 12 bp, Artificial Sequence
  Oligonucleotide primer for the detection of SNP TSC0024244
atcccctttatt

SEQ ID NO: 310964 - DNA, 12 bp, Artificial Sequence
  Oligonucleotide primer for the detection of SNP TSC0024244
aaagagagagtg

SEQ ID NO: 310965 - DNA, 12 bp, Artificial Sequence
  Oligonucleotide primer for the detection of SNP TSC0024245
tttaaaactttt

SEQ ID NO: 310966 - DNA, 12 bp, Artificial Sequence
  Oligonucleotide primer for the detection of SNP TSC0024245
agttatattatg

SEQ ID NO: 310967 - DNA, 12 bp, Artificial Sequence
  Oligonucleotide primer for the detection of SNP TSC0024245
agttatattacg

SEQ ID NO: 310968 - DNA, 12 bp, Artificial Sequence
  Oligonucleotide primer for the detection of SNP TSC0024247
ttaccctataaa

SEQ ID NO: 310969 - DNA, 12 bp, Artificial Sequence
  Oligonucleotide primer for the detection of SNP TSC0024247
gggggattgggg

SEQ ID NO: 310970 - DNA, 12 bp, Artificial Sequence
  Oligonucleotide primer for the detection of SNP TSC0024247
ttgttttgtgga

SEQ ID NO: 310971 - DNA, 12 bp, Artificial Sequence
  Oligonucleotide primer for the detection of SNP TSC0024248
ccatttctcaaa

SEQ ID NO: 310972 - DNA, 12 bp, Artificial Sequence
  Oligonucleotide primer for the detection of SNP TSC0024248
aatttttgtggg

SEQ ID NO: 310973 - DNA, 12 bp, Artificial Sequence
  Oligonucleotide primer for the detection of SNP TSC0024248
aattttcgtggg

SEQ ID NO: 310974 - DNA, 12 bp, Artificial Sequence
  Oligonucleotide primer for the detection of SNP TSC0024248
aactctcataaa

SEQ ID NO: 310975 - DNA, 12 bp, Artificial Sequence
  Oligonucleotide primer for the detection of SNP TSC0024248
aactctcgtaaa

SEQ ID NO: 310976 - DNA, 12 bp, Artificial Sequence
  Oligonucleotide primer for the detection of SNP TSC0024249
gatagttgaaaa

SEQ ID NO: 310977 - DNA, 12 bp, Artificial Sequence
  Oligonucleotide primer for the detection of SNP TSC0024250
aaaaataaatac

SEQ ID NO: 310978 - DNA, 12 bp, Artificial Sequence
  Oligonucleotide primer for the detection of SNP TSC0024250
tttatttttata

SEQ ID NO: 310979 - DNA, 12 bp, Artificial Sequence
  Oligonucleotide primer for the detection of SNP TSC0024251
catcctacatcc

SEQ ID NO: 310980 - DNA, 12 bp, Artificial Sequence
  Oligonucleotide primer for the detection of SNP TSC0024251
cgtcctacatcc

SEQ ID NO: 310981 - DNA, 12 bp, Artificial Sequence
  Oligonucleotide primer for the detection of SNP TSC0024251
aaaaacctctat

SEQ ID NO: 310982 - DNA, 12 bp, Artificial Sequence
  Oligonucleotide primer for the detection of SNP TSC0024251
gaaaacctctat

SEQ ID NO: 310983 - DNA, 12 bp, Artificial Sequence
  Oligonucleotide primer for the detection of SNP TSC0024251
cgttttgtattt

SEQ ID NO: 310984 - DNA, 12 bp, Artificial Sequence
  Oligonucleotide primer for the detection of SNP TSC0024252
aatcctacaact

SEQ ID NO: 310985 - DNA, 12 bp, Artificial Sequence
  Oligonucleotide primer for the detection of SNP TSC0024252
tggattaggttg

SEQ ID NO: 310986 - DNA, 12 bp, Artificial Sequence
  Oligonucleotide primer for the detection of SNP TSC0024254
ccccataaaaaa

SEQ ID NO: 310987 - DNA, 12 bp, Artificial Sequence
  Oligonucleotide primer for the detection of SNP TSC0024254
aatgttttggtt

SEQ ID NO: 310988 - DNA, 12 bp, Artificial Sequence
  Oligonucleotide primer for the detection of SNP TSC0024254
caatatcctaac

SEQ ID NO: 310989 - DNA, 12 bp, Artificial Sequence
  Oligonucleotide primer for the detection of SNP TSC0024256
aacaaccttctc

SEQ ID NO: 310990 - DNA, 12 bp, Artificial Sequence
  Oligonucleotide primer for the detection of SNP TSC0024256
gtataaagaatg

SEQ ID NO: 310991 - DNA, 12 bp, Artificial Sequence
  Oligonucleotide primer for the detection of SNP TSC0024259
catacatcatat

SEQ ID NO: 310992 - DNA, 12 bp, Artificial Sequence
  Oligonucleotide primer for the detection of SNP TSC0024259
catacgtcatat

SEQ ID NO: 310993 - DNA, 12 bp, Artificial Sequence
  Oligonucleotide primer for the detection of SNP TSC0024259
cgtacatcatat

SEQ ID NO: 310994 - DNA, 12 bp, Artificial Sequence
  Oligonucleotide primer for the detection of SNP TSC0024259
cgtacgtcatat

SEQ ID NO: 310995 - DNA, 12 bp, Artificial Sequence
  Oligonucleotide primer for the detection of SNP TSC0024259
ttaaggaggtgg

SEQ ID NO: 310996 - DNA, 12 bp, Artificial Sequence
  Oligonucleotide primer for the detection of SNP TSC0024259
tgtatgttatgt

SEQ ID NO: 310997 - DNA, 12 bp, Artificial Sequence
  Oligonucleotide primer for the detection of SNP TSC0024259
cgtatgttatgt

SEQ ID NO: 310998 - DNA, 12 bp, Artificial Sequence
  Oligonucleotide primer for the detection of SNP TSC0024259
tgtacgttatgt

SEQ ID NO: 310999 - DNA, 12 bp, Artificial Sequence
  Oligonucleotide primer for the detection of SNP TSC0024259
cgtacgttatgt

SEQ ID NO: 311000 - DNA, 12 bp, Artificial Sequence
  Oligonucleotide primer for the detection of SNP TSC0024261
acccctaaactc

SEQ ID NO: 311001 - DNA, 12 bp, Artificial Sequence
  Oligonucleotide primer for the detection of SNP TSC0024261
taggtaggtaga

SEQ ID NO: 311002 - DNA, 12 bp, Artificial Sequence
  Oligonucleotide primer for the detection of SNP TSC0024261
caaacaaataaa

SEQ ID NO: 311003 - DNA, 12 bp, Artificial Sequence
  Oligonucleotide primer for the detection of SNP TSC0024262
taatataacacc

SEQ ID NO: 311004 - DNA, 12 bp, Artificial Sequence
  Oligonucleotide primer for the detection of SNP TSC0024262
taagttattaag

SEQ ID NO: 311005 - DNA, 12 bp, Artificial Sequence
  Oligonucleotide primer for the detection of SNP TSC0024262
taaaccactaaa

SEQ ID NO: 311006 - DNA, 12 bp, Artificial Sequence
  Oligonucleotide primer for the detection of SNP TSC0024262
tagtgtaatatt

SEQ ID NO: 311007 - DNA, 12 bp, Artificial Sequence
  Oligonucleotide primer for the detection of SNP TSC0024263
atttctattacc

SEQ ID NO: 311008 - DNA, 12 bp, Artificial Sequence
  Oligonucleotide primer for the detection of SNP TSC0024263
attagttagtaa

SEQ ID NO: 311009 - DNA, 12 bp, Artificial Sequence
  Oligonucleotide primer for the detection of SNP TSC0024264
tatacttctatc

SEQ ID NO: 311010 - DNA, 12 bp, Artificial Sequence
  Oligonucleotide primer for the detection of SNP TSC0024265
ctaaataaacat

SEQ ID NO: 311011 - DNA, 12 bp, Artificial Sequence
  Oligonucleotide primer for the detection of SNP TSC0024265
ctaaataaacgt

SEQ ID NO: 311012 - DNA, 12 bp, Artificial Sequence
  Oligonucleotide primer for the detection of SNP TSC0024265
gttgtattgttg

SEQ ID NO: 311013 - DNA, 12 bp, Artificial Sequence
  Oligonucleotide primer for the detection of SNP TSC0024270
aaaaaaaatctt

SEQ ID NO: 311014 - DNA, 12 bp, Artificial Sequence
  Oligonucleotide primer for the detection of SNP TSC0024270
atttattaagtt

SEQ ID NO: 311015 - DNA, 12 bp, Artificial Sequence
  Oligonucleotide primer for the detection of SNP TSC0024273
tgggtttatttt

SEQ ID NO: 311016 - DNA, 12 bp, Artificial Sequence
  Oligonucleotide primer for the detection of SNP TSC0024273
cgggtttatttt

SEQ ID NO: 311017 - DNA, 12 bp, Artificial Sequence
  Oligonucleotide primer for the detection of SNP TSC0024273
caaattcattct

SEQ ID NO: 311018 - DNA, 12 bp, Artificial Sequence
  Oligonucleotide primer for the detection of SNP TSC0024273
cgaattcattct

SEQ ID NO: 311019 - DNA, 12 bp, Artificial Sequence
  Oligonucleotide primer for the detection of SNP TSC0024277
aaatatacaatt

SEQ ID NO: 311020 - DNA, 12 bp, Artificial Sequence
  Oligonucleotide primer for the detection of SNP TSC0024277
aggatttagatt

SEQ ID NO: 311021 - DNA, 12 bp, Artificial Sequence
  Oligonucleotide primer for the detection of SNP TSC0024277
aaaaattcaaac

SEQ ID NO: 311022 - DNA, 12 bp, Artificial Sequence
  Oligonucleotide primer for the detection of SNP TSC0024277
ggatgtgtagtt

SEQ ID NO: 311023 - DNA, 12 bp, Artificial Sequence
  Oligonucleotide primer for the detection of SNP TSC0024278
attaataacaaa

SEQ ID NO: 311024 - DNA, 12 bp, Artificial Sequence
  Oligonucleotide primer for the detection of SNP TSC0024278
tgaagtagattt

SEQ ID NO: 311025 - DNA, 12 bp, Artificial Sequence
  Oligonucleotide primer for the detection of SNP TSC0024278
tgaagtagattc

SEQ ID NO: 311026 - DNA, 12 bp, Artificial Sequence
  Oligonucleotide primer for the detection of SNP TSC0024278
taaaacaaattc

SEQ ID NO: 311027 - DNA, 12 bp, Artificial Sequence
  Oligonucleotide primer for the detection of SNP TSC0024278
attaatggtagg

SEQ ID NO: 311028 - DNA, 12 bp, Artificial Sequence
  Oligonucleotide primer for the detection of SNP TSC0024279
acaaccaatcaa

SEQ ID NO: 311029 - DNA, 12 bp, Artificial Sequence
  Oligonucleotide primer for the detection of SNP TSC0024279
acaaccaatcga

SEQ ID NO: 311030 - DNA, 12 bp, Artificial Sequence
  Oligonucleotide primer for the detection of SNP TSC0024279
agaggatgttta

SEQ ID NO: 311031 - DNA, 12 bp, Artificial Sequence
  Oligonukleotid-Primer
aaaaaatattta

SEQ ID NO: 311032 - DNA, 12 bp, Artificial Sequence
  Oligonucleotide primer for the detection of SNP TSC0024279
atagttagttga

SEQ ID NO: 311033 - DNA, 12 bp, Artificial Sequence
  Oligonucleotide primer for the detection of SNP TSC0024279
atagttagtcga

SEQ ID NO: 311034 - DNA, 12 bp, Artificial Sequence
  Oligonucleotide primer for the detection of SNP TSC0024280
attatataccct

SEQ ID NO: 311035 - DNA, 12 bp, Artificial Sequence
  Oligonucleotide primer for the detection of SNP TSC0024280
gaggttttttgt

SEQ ID NO: 311036 - DNA, 12 bp, Artificial Sequence
  Oligonucleotide primer for the detection of SNP TSC0024280
gaggtttttcgt

SEQ ID NO: 311037 - DNA, 12 bp, Artificial Sequence
  Oligonucleotide primer for the detection of SNP TSC0024280
aaaactcttcat

SEQ ID NO: 311038 - DNA, 12 bp, Artificial Sequence
  Oligonucleotide primer for the detection of SNP TSC0024280
aaaactcttcgt

SEQ ID NO: 311039 - DNA, 12 bp, Artificial Sequence
  Oligonucleotide primer for the detection of SNP TSC0024280
attgtgtgtttt

SEQ ID NO: 311040 - DNA, 12 bp, Artificial Sequence
  Oligonucleotide primer for the detection of SNP TSC0024281
aaataattaact

SEQ ID NO: 311041 - DNA, 12 bp, Artificial Sequence
  Oligonucleotide primer for the detection of SNP TSC0024281
ggtaggggttta

SEQ ID NO: 311042 - DNA, 12 bp, Artificial Sequence
  Oligonucleotide primer for the detection of SNP TSC0024284
aactttccctaa

SEQ ID NO: 311043 - DNA, 12 bp, Artificial Sequence
  Oligonucleotide primer for the detection of SNP TSC0024284
ttgatttgaggt

SEQ ID NO: 311044 - DNA, 12 bp, Artificial Sequence
  Oligonucleotide primer for the detection of SNP TSC0024284
ctaatttaaaac

SEQ ID NO: 311045 - DNA, 12 bp, Artificial Sequence
  Oligonucleotide primer for the detection of SNP TSC0024284
aattttttttga

SEQ ID NO: 311046 - DNA, 12 bp, Artificial Sequence
  Oligonucleotide primer for the detection of SNP TSC0024285
ctaaaataacta

SEQ ID NO: 311047 - DNA, 12 bp, Artificial Sequence
  Oligonucleotide primer for the detection of SNP TSC0024285
ttcacttaattc

SEQ ID NO: 311048 - DNA, 12 bp, Artificial Sequence
  Oligonucleotide primer for the detection of SNP TSC0024285
tttaggatggtt

SEQ ID NO: 311049 - DNA, 12 bp, Artificial Sequence
  Oligonucleotide primer for the detection of SNP TSC0024286
actcaactacat

SEQ ID NO: 311050 - DNA, 12 bp, Artificial Sequence
  Oligonucleotide primer for the detection of SNP TSC0024286
tttttggaataa

SEQ ID NO: 311051 - DNA, 12 bp, Artificial Sequence
  Oligonucleotide primer for the detection of SNP TSC0024287
aacacctttctc

SEQ ID NO: 311052 - DNA, 12 bp, Artificial Sequence
  Oligonucleotide primer for the detection of SNP TSC0024287
gacacctttctc

SEQ ID NO: 311053 - DNA, 12 bp, Artificial Sequence
  Oligonucleotide primer for the detection of SNP TSC0024287
tttgttgtagga

SEQ ID NO: 311054 - DNA, 12 bp, Artificial Sequence
  Oligonucleotide primer for the detection of SNP TSC0024288
ctatcattacct

SEQ ID NO: 311055 - DNA, 12 bp, Artificial Sequence
  Oligonucleotide primer for the detection of SNP TSC0024288
aaaagtgggtgg

SEQ ID NO: 311056 - DNA, 12 bp, Artificial Sequence
  Oligonucleotide primer for the detection of SNP TSC0024289
accaaaactcca

SEQ ID NO: 311057 - DNA, 12 bp, Artificial Sequence
  Oligonucleotide primer for the detection of SNP TSC0024289
acaatacttacc

SEQ ID NO: 311058 - DNA, 12 bp, Artificial Sequence
  Oligonucleotide primer for the detection of SNP TSC0024289
attagaatttta

SEQ ID NO: 311059 - DNA, 12 bp, Artificial Sequence
  Oligonucleotide primer for the detection of SNP TSC0024292
accaatataaaa

SEQ ID NO: 311060 - DNA, 12 bp, Artificial Sequence
  Oligonucleotide primer for the detection of SNP TSC0024292
accgatataaaa

SEQ ID NO: 311061 - DNA, 12 bp, Artificial Sequence
  Oligonucleotide primer for the detection of SNP TSC0024292
tattttgtgtag

SEQ ID NO: 311062 - DNA, 12 bp, Artificial Sequence
  Oligonucleotide primer for the detection of SNP TSC0024292
tattttgcgtag

SEQ ID NO: 311063 - DNA, 12 bp, Artificial Sequence
  Oligonucleotide primer for the detection of SNP TSC0024292
catcctacacaa

SEQ ID NO: 311064 - DNA, 12 bp, Artificial Sequence
  Oligonucleotide primer for the detection of SNP TSC0024292
catcctacgcaa

SEQ ID NO: 311065 - DNA, 12 bp, Artificial Sequence
  Oligonucleotide primer for the detection of SNP TSC0024292
gagggttgatgt

SEQ ID NO: 311066 - DNA, 12 bp, Artificial Sequence
  Oligonucleotide primer for the detection of SNP TSC0024292
gagggtcgatgt

SEQ ID NO: 311067 - DNA, 12 bp, Artificial Sequence
  Oligonucleotide primer for the detection of SNP TSC0024293
caaacacacaca

SEQ ID NO: 311068 - DNA, 12 bp, Artificial Sequence
  Oligonucleotide primer for the detection of SNP TSC0024293
gagaaagagaga

SEQ ID NO: 311069 - DNA, 12 bp, Artificial Sequence
  Oligonucleotide primer for the detection of SNP TSC0024293
agatatatatat

SEQ ID NO: 311070 - DNA, 12 bp, Artificial Sequence
  Oligonucleotide primer for the detection of SNP TSC0024295
tattaaccaatt

SEQ ID NO: 311071 - DNA, 12 bp, Artificial Sequence
  Oligonucleotide primer for the detection of SNP TSC0024295
tttgagtaagaa

SEQ ID NO: 311072 - DNA, 12 bp, Artificial Sequence
  Oligonucleotide primer for the detection of SNP TSC0024295
tgttgattagtt

SEQ ID NO: 311073 - DNA, 12 bp, Artificial Sequence
  Oligonucleotide primer for the detection of SNP TSC0024296
catttctaccat

SEQ ID NO: 311074 - DNA, 12 bp, Artificial Sequence
  Oligonucleotide primer for the detection of SNP TSC0024296
ggtaagtagaag

SEQ ID NO: 311075 - DNA, 12 bp, Artificial Sequence
  Oligonucleotide primer for the detection of SNP TSC0024298
cactataaacac

SEQ ID NO: 311076 - DNA, 12 bp, Artificial Sequence
  Oligonucleotide primer for the detection of SNP TSC0024298
cgctataaacac

SEQ ID NO: 311077 - DNA, 12 bp, Artificial Sequence
  Oligonucleotide primer for the detection of SNP TSC0024298
tagatgggttta

SEQ ID NO: 311078 - DNA, 12 bp, Artificial Sequence
  Oligonucleotide primer for the detection of SNP TSC0024298
tagacgggttta

SEQ ID NO: 311079 - DNA, 12 bp, Artificial Sequence
  Oligonucleotide primer for the detection of SNP TSC0024298
caaacaaaccca

SEQ ID NO: 311080 - DNA, 12 bp, Artificial Sequence
  Oligonucleotide primer for the detection of SNP TSC0024298
caaacgaaccca

SEQ ID NO: 311081 - DNA, 12 bp, Artificial Sequence
  Oligonucleotide primer for the detection of SNP TSC0024298
tgttgtggatat

SEQ ID NO: 311082 - DNA, 12 bp, Artificial Sequence
  Oligonucleotide primer for the detection of SNP TSC0024298
cgttgtggatat

SEQ ID NO: 311083 - DNA, 12 bp, Artificial Sequence
  Oligonucleotide primer for the detection of SNP TSC0024298
tgttgtggatac

SEQ ID NO: 311084 - DNA, 12 bp, Artificial Sequence
  Oligonucleotide primer for the detection of SNP TSC0024298
cgttgtggatac

SEQ ID NO: 311085 - DNA, 12 bp, Artificial Sequence
  Oligonucleotide primer for the detection of SNP TSC0024299
cccacaatcaca

SEQ ID NO: 311086 - DNA, 12 bp, Artificial Sequence
  Oligonucleotide primer for the detection of SNP TSC0024299
cccacaatcacg

SEQ ID NO: 311087 - DNA, 12 bp, Artificial Sequence
  Oligonucleotide primer for the detection of SNP TSC0024299
cccacgatcaca

SEQ ID NO: 311088 - DNA, 12 bp, Artificial Sequence
  Oligonucleotide primer for the detection of SNP TSC0024299
cccacgatcacg

SEQ ID NO: 311089 - DNA, 12 bp, Artificial Sequence
  Oligonucleotide primer for the detection of SNP TSC0024299
accacttcctac

SEQ ID NO: 311090 - DNA, 12 bp, Artificial Sequence
  Oligonucleotide primer for the detection of SNP TSC0024299
tttatggttatg

SEQ ID NO: 311091 - DNA, 12 bp, Artificial Sequence
  Oligonucleotide primer for the detection of SNP TSC0024299
tttacggttatg

SEQ ID NO: 311092 - DNA, 12 bp, Artificial Sequence
  Oligonucleotide primer for the detection of SNP TSC0024299
tttatggttacg

SEQ ID NO: 311093 - DNA, 12 bp, Artificial Sequence
  Oligonucleotide primer for the detection of SNP TSC0024299
tttacggttacg

SEQ ID NO: 311094 - DNA, 12 bp, Artificial Sequence
  Oligonucleotide primer for the detection of SNP TSC0024301
ccaataactaaa

SEQ ID NO: 311095 - DNA, 12 bp, Artificial Sequence
  Oligonucleotide primer for the detection of SNP TSC0024301
ctattcctcttc

SEQ ID NO: 311096 - DNA, 12 bp, Artificial Sequence
  Oligonucleotide primer for the detection of SNP TSC0024301
ttaatggttggg

SEQ ID NO: 311097 - DNA, 12 bp, Artificial Sequence
  Oligonucleotide primer for the detection of SNP TSC0024306
ctcaaccataca

SEQ ID NO: 311098 - DNA, 12 bp, Artificial Sequence
  Oligonucleotide primer for the detection of SNP TSC0024306
caaatttctaaa

SEQ ID NO: 311099 - DNA, 12 bp, Artificial Sequence
  Oligonucleotide primer for the detection of SNP TSC0024306
ttttagttatat

SEQ ID NO: 311100 - DNA, 12 bp, Artificial Sequence
  Oligonucleotide primer for the detection of SNP TSC0024307
tttaattactta

SEQ ID NO: 311101 - DNA, 12 bp, Artificial Sequence
  Oligonucleotide primer for the detection of SNP TSC0024307
ttgttggattat

SEQ ID NO: 311102 - DNA, 12 bp, Artificial Sequence
  Oligonucleotide primer for the detection of SNP TSC0024307
ttgtcggattat

SEQ ID NO: 311103 - DNA, 12 bp, Artificial Sequence
  Oligonucleotide primer for the detection of SNP TSC0024307
ttatcaaaccat

SEQ ID NO: 311104 - DNA, 12 bp, Artificial Sequence
  Oligonucleotide primer for the detection of SNP TSC0024307
ttatcgaaccat

SEQ ID NO: 311105 - DNA, 12 bp, Artificial Sequence
  Oligonucleotide primer for the detection of SNP TSC0024311
ccaataatattc

SEQ ID NO: 311106 - DNA, 12 bp, Artificial Sequence
  Oligonucleotide primer for the detection of SNP TSC0024311
tatttttgtata

SEQ ID NO: 311107 - DNA, 12 bp, Artificial Sequence
  Oligonucleotide primer for the detection of SNP TSC0024312
aacttataaaac

SEQ ID NO: 311108 - DNA, 12 bp, Artificial Sequence
  Oligonucleotide primer for the detection of SNP TSC0024312
agttaatgttag

SEQ ID NO: 311109 - DNA, 12 bp, Artificial Sequence
  Oligonucleotide primer for the detection of SNP TSC0024314
ggagggagggag

SEQ ID NO: 311110 - DNA, 12 bp, Artificial Sequence
  Oligonucleotide primer for the detection of SNP TSC0024315
cctatataacaa

SEQ ID NO: 311111 - DNA, 12 bp, Artificial Sequence
  Oligonucleotide primer for the detection of SNP TSC0024315
gggtgtgtgagt

SEQ ID NO: 311112 - DNA, 12 bp, Artificial Sequence
  Oligonucleotide primer for the detection of SNP TSC0024315
gggcgtgtgagt

SEQ ID NO: 311113 - DNA, 12 bp, Artificial Sequence
  Oligonucleotide primer for the detection of SNP TSC0024315
gggtgcgtgagt

SEQ ID NO: 311114 - DNA, 12 bp, Artificial Sequence
  Oligonucleotide primer for the detection of SNP TSC0024315
gggcgcgtgagt

SEQ ID NO: 311115 - DNA, 12 bp, Artificial Sequence
  Oligonucleotide primer for the detection of SNP TSC0024315
aaacgcataaac

SEQ ID NO: 311116 - DNA, 12 bp, Artificial Sequence
  Oligonucleotide primer for the detection of SNP TSC0024315
aaacgcgtaaac

SEQ ID NO: 311117 - DNA, 12 bp, Artificial Sequence
  Oligonucleotide primer for the detection of SNP TSC0024315
tttgtgtggtag

SEQ ID NO: 311118 - DNA, 12 bp, Artificial Sequence
  Oligonucleotide primer for the detection of SNP TSC0024316
tcataaccatct

SEQ ID NO: 311119 - DNA, 12 bp, Artificial Sequence
  Oligonucleotide primer for the detection of SNP TSC0024316
tatggttttttg

SEQ ID NO: 311120 - DNA, 12 bp, Artificial Sequence
  Oligonucleotide primer for the detection of SNP TSC0024319
aaataaacactt

SEQ ID NO: 311121 - DNA, 12 bp, Artificial Sequence
  Oligonucleotide primer for the detection of SNP TSC0024319
attttgtttttg

SEQ ID NO: 311122 - DNA, 12 bp, Artificial Sequence
  Oligonucleotide primer for the detection of SNP TSC0024322
ttgttaagatat

SEQ ID NO: 311123 - DNA, 12 bp, Artificial Sequence
  Oligonucleotide primer for the detection of SNP TSC0024322
tcgttaagatat

SEQ ID NO: 311124 - DNA, 12 bp, Artificial Sequence
  Oligonucleotide primer for the detection of SNP TSC0024322
tcaccaaaacat

SEQ ID NO: 311125 - DNA, 12 bp, Artificial Sequence
  Oligonucleotide primer for the detection of SNP TSC0024322
tcgccaaaacat

SEQ ID NO: 311126 - DNA, 12 bp, Artificial Sequence
  Oligonucleotide primer for the detection of SNP TSC0024322
agagagtagata

SEQ ID NO: 311127 - DNA, 12 bp, Artificial Sequence
  Oligonucleotide primer for the detection of SNP TSC0024323
cgaaaatcaaaa

SEQ ID NO: 311128 - DNA, 12 bp, Artificial Sequence
  Oligonucleotide primer for the detection of SNP TSC0024323
ttagttaggatg

SEQ ID NO: 311129 - DNA, 12 bp, Artificial Sequence
  Oligonucleotide primer for the detection of SNP TSC0024323
ttaaccaaaata

SEQ ID NO: 311130 - DNA, 12 bp, Artificial Sequence
  Oligonucleotide primer for the detection of SNP TSC0024323
tggagattaaga

SEQ ID NO: 311131 - DNA, 12 bp, Artificial Sequence
  Oligonucleotide primer for the detection of SNP TSC0024323
cggagattaaga

SEQ ID NO: 311132 - DNA, 12 bp, Artificial Sequence
  Oligonucleotide primer for the detection of SNP TSC0024324
tggttaatgagt

SEQ ID NO: 311133 - DNA, 12 bp, Artificial Sequence
  Oligonucleotide primer for the detection of SNP TSC0024324
tggttaacgagt

SEQ ID NO: 311134 - DNA, 12 bp, Artificial Sequence
  Oligonucleotide primer for the detection of SNP TSC0024324
taattaacaaac

SEQ ID NO: 311135 - DNA, 12 bp, Artificial Sequence
  Oligonucleotide primer for the detection of SNP TSC0024324
taattaacgaac

SEQ ID NO: 311136 - DNA, 12 bp, Artificial Sequence
  Oligonucleotide primer for the detection of SNP TSC0024324
tgtttgggaagt

SEQ ID NO: 311137 - DNA, 12 bp, Artificial Sequence
  Oligonucleotide primer for the detection of SNP TSC0024324
cgtttgggaagt

SEQ ID NO: 311138 - DNA, 12 bp, Artificial Sequence
  Oligonucleotide primer for the detection of SNP TSC0024326
ctatataataaa

SEQ ID NO: 311139 - DNA, 12 bp, Artificial Sequence
  Oligonucleotide primer for the detection of SNP TSC0024326
ttatgttatgtg

SEQ ID NO: 311140 - DNA, 12 bp, Artificial Sequence
  Oligonucleotide primer for the detection of SNP TSC0024326
ccataccatata

SEQ ID NO: 311141 - DNA, 12 bp, Artificial Sequence
  Oligonucleotide primer for the detection of SNP TSC0024326
ttgtatagtgag

SEQ ID NO: 311142 - DNA, 12 bp, Artificial Sequence
  Oligonucleotide primer for the detection of SNP TSC0024328
aactccaaaact

SEQ ID NO: 311143 - DNA, 12 bp, Artificial Sequence
  Oligonucleotide primer for the detection of SNP TSC0024328
gaaaattttaga

SEQ ID NO: 311144 - DNA, 12 bp, Artificial Sequence
  Oligonucleotide primer for the detection of SNP TSC0024331
cctaaacacttc

SEQ ID NO: 311145 - DNA, 12 bp, Artificial Sequence
  Oligonucleotide primer for the detection of SNP TSC0024331
gggatttattta

SEQ ID NO: 311146 - DNA, 12 bp, Artificial Sequence
  Oligonucleotide primer for the detection of SNP TSC0024331
aaaacttaccta

SEQ ID NO: 311147 - DNA, 12 bp, Artificial Sequence
  Oligonucleotide primer for the detection of SNP TSC0024332
taaccaataaat

SEQ ID NO: 311148 - DNA, 12 bp, Artificial Sequence
  Oligonucleotide primer for the detection of SNP TSC0024332
tgattaataggt

SEQ ID NO: 311149 - DNA, 12 bp, Artificial Sequence
  Oligonucleotide primer for the detection of SNP TSC0024335
tttaattaagtg

SEQ ID NO: 311150 - DNA, 12 bp, Artificial Sequence
  Oligonucleotide primer for the detection of SNP TSC0024337
tttatttcattt

SEQ ID NO: 311151 - DNA, 12 bp, Artificial Sequence
  Oligonucleotide primer for the detection of SNP TSC0024337
tttatttcgttt

SEQ ID NO: 311152 - DNA, 12 bp, Artificial Sequence
  Oligonucleotide primer for the detection of SNP TSC0024337
tttgtttcgttt

SEQ ID NO: 311153 - DNA, 12 bp, Artificial Sequence
  Oligonucleotide primer for the detection of SNP TSC0024339
caataaccttcc

SEQ ID NO: 311154 - DNA, 12 bp, Artificial Sequence
  Oligonucleotide primer for the detection of SNP TSC0024339
tttttgagtgtg

SEQ ID NO: 311155 - DNA, 12 bp, Artificial Sequence
  Oligonucleotide primer for the detection of SNP TSC0024339
tttttgagcgtg

SEQ ID NO: 311156 - DNA, 12 bp, Artificial Sequence
  Oligonucleotide primer for the detection of SNP TSC0024340
accaaaactcta

SEQ ID NO: 311157 - DNA, 12 bp, Artificial Sequence
  Oligonucleotide primer for the detection of SNP TSC0024340
accgaaactcta

SEQ ID NO: 311158 - DNA, 12 bp, Artificial Sequence
  Oligonucleotide primer for the detection of SNP TSC0024340
gccaaaactcta

SEQ ID NO: 311159 - DNA, 12 bp, Artificial Sequence
  Oligonucleotide primer for the detection of SNP TSC0024340
gccgaaactcta

SEQ ID NO: 311160 - DNA, 12 bp, Artificial Sequence
  Oligonucleotide primer for the detection of SNP TSC0024340
tttgttgttagt

SEQ ID NO: 311161 - DNA, 12 bp, Artificial Sequence
  Oligonucleotide primer for the detection of SNP TSC0024340
tttgtcgttagt

SEQ ID NO: 311162 - DNA, 12 bp, Artificial Sequence
  Oligonucleotide primer for the detection of SNP TSC0024340
tttgttgttagc

SEQ ID NO: 311163 - DNA, 12 bp, Artificial Sequence
  Oligonucleotide primer for the detection of SNP TSC0024340
tttgtcgttagc

SEQ ID NO: 311164 - DNA, 12 bp, Artificial Sequence
  Oligonucleotide primer for the detection of SNP TSC0024340
ctaccaccaaca

SEQ ID NO: 311165 - DNA, 12 bp, Artificial Sequence
  Oligonucleotide primer for the detection of SNP TSC0024340
ctaccaccaacg

SEQ ID NO: 311166 - DNA, 12 bp, Artificial Sequence
  Oligonucleotide primer for the detection of SNP TSC0024340
ctaccgccaaca

SEQ ID NO: 311167 - DNA, 12 bp, Artificial Sequence
  Oligonucleotide primer for the detection of SNP TSC0024340
ctaccgccaacg

SEQ ID NO: 311168 - DNA, 12 bp, Artificial Sequence
  Oligonucleotide primer for the detection of SNP TSC0024340
tgttgaggtttt

SEQ ID NO: 311169 - DNA, 12 bp, Artificial Sequence
  Oligonukleotid-Primer
cgttgaggtttt

SEQ ID NO: 311170 - DNA, 12 bp, Artificial Sequence
  Oligonucleotide primer for the detection of SNP TSC0024340
tgtcgaggtttt

SEQ ID NO: 311171 - DNA, 12 bp, Artificial Sequence
  Oligonucleotide primer for the detection of SNP TSC0024340
cgtcgaggtttt

SEQ ID NO: 311172 - DNA, 12 bp, Artificial Sequence
  Oligonucleotide primer for the detection of SNP TSC0024341
acccacacaccc

SEQ ID NO: 311173 - DNA, 12 bp, Artificial Sequence
  Oligonucleotide primer for the detection of SNP TSC0024341
acccacacgccc

SEQ ID NO: 311174 - DNA, 12 bp, Artificial Sequence
  Oligonucleotide primer for the detection of SNP TSC0024341
acccacgcaccc

SEQ ID NO: 311175 - DNA, 12 bp, Artificial Sequence
  Oligonucleotide primer for the detection of SNP TSC0024341
acccgcacaccc

SEQ ID NO: 311176 - DNA, 12 bp, Artificial Sequence
  Oligonucleotide primer for the detection of SNP TSC0024341
acccacgcgccc

SEQ ID NO: 311177 - DNA, 12 bp, Artificial Sequence
  Oligonucleotide primer for the detection of SNP TSC0024341
acccgcacgccc

SEQ ID NO: 311178 - DNA, 12 bp, Artificial Sequence
  Oligonucleotide primer for the detection of SNP TSC0024341
acccgcgcaccc

SEQ ID NO: 311179 - DNA, 12 bp, Artificial Sequence
  Oligonucleotide primer for the detection of SNP TSC0024341
acccgcgcgccc

SEQ ID NO: 311180 - DNA, 12 bp, Artificial Sequence
  Oligonucleotide primer for the detection of SNP TSC0024341
gtagtgggaagg

SEQ ID NO: 311181 - DNA, 12 bp, Artificial Sequence
  Oligonucleotide primer for the detection of SNP TSC0024345
atatactccact

SEQ ID NO: 311182 - DNA, 12 bp, Artificial Sequence
  Oligonucleotide primer for the detection of SNP TSC0024345
atatactccgct

SEQ ID NO: 311183 - DNA, 12 bp, Artificial Sequence
  Oligonucleotide primer for the detection of SNP TSC0024345
taattttattgt

SEQ ID NO: 311184 - DNA, 12 bp, Artificial Sequence
  Oligonucleotide primer for the detection of SNP TSC0024345
taatcccattac

SEQ ID NO: 311185 - DNA, 12 bp, Artificial Sequence
  Oligonucleotide primer for the detection of SNP TSC0024345
gtgtttcgtttt

SEQ ID NO: 311186 - DNA, 12 bp, Artificial Sequence
  Oligonucleotide primer for the detection of SNP TSC0024345
gtgtttcgtttc

SEQ ID NO: 311187 - DNA, 12 bp, Artificial Sequence
  Oligonucleotide primer for the detection of SNP TSC0024346
ctttccttatca

SEQ ID NO: 311188 - DNA, 12 bp, Artificial Sequence
  Oligonucleotide primer for the detection of SNP TSC0024346
tgtttatgaaat

SEQ ID NO: 311189 - DNA, 12 bp, Artificial Sequence
  Oligonucleotide primer for the detection of SNP TSC0024346
tactcataaaac

SEQ ID NO: 311190 - DNA, 12 bp, Artificial Sequence
  Oligonucleotide primer for the detection of SNP TSC0024351
aaatttaacaaa

SEQ ID NO: 311191 - DNA, 12 bp, Artificial Sequence
  Oligonucleotide primer for the detection of SNP TSC0024351
taaagatttttt

SEQ ID NO: 311192 - DNA, 12 bp, Artificial Sequence
  Oligonucleotide primer for the detection of SNP TSC0024351
aaaatttgatag

SEQ ID NO: 311193 - DNA, 12 bp, Artificial Sequence
  Oligonucleotide primer for the detection of SNP TSC0024352
taaattagtatt

SEQ ID NO: 311194 - DNA, 12 bp, Artificial Sequence
  Oligonucleotide primer for the detection of SNP TSC0024352
tttgagaatttt

SEQ ID NO: 311195 - DNA, 12 bp, Artificial Sequence
  Oligonucleotide primer for the detection of SNP TSC0024356
gattttgagtag

SEQ ID NO: 311196 - DNA, 12 bp, Artificial Sequence
  Oligonucleotide primer for the detection of SNP TSC0024356
aatcctaaacaa

SEQ ID NO: 311197 - DNA, 12 bp, Artificial Sequence
  Oligonucleotide primer for the detection of SNP TSC0024356
atagggaatgtt

SEQ ID NO: 311198 - DNA, 12 bp, Artificial Sequence
  Oligonucleotide primer for the detection of SNP TSC0024357
atattacctaaa

SEQ ID NO: 311199 - DNA, 12 bp, Artificial Sequence
  Oligonucleotide primer for the detection of SNP TSC0024357
atattgtgtggg

SEQ ID NO: 311200 - DNA, 12 bp, Artificial Sequence
  Oligonucleotide primer for the detection of SNP TSC0024357
atattgcgtggg

SEQ ID NO: 311201 - DNA, 12 bp, Artificial Sequence
  Oligonucleotide primer for the detection of SNP TSC0024357
atattgtgcggg

SEQ ID NO: 311202 - DNA, 12 bp, Artificial Sequence
  Oligonucleotide primer for the detection of SNP TSC0024357
atattgcgcggg

SEQ ID NO: 311203 - DNA, 12 bp, Artificial Sequence
  Oligonucleotide primer for the detection of SNP TSC0024357
acactacacaaa

SEQ ID NO: 311204 - DNA, 12 bp, Artificial Sequence
  Oligonucleotide primer for the detection of SNP TSC0024357
acactacacgaa

SEQ ID NO: 311205 - DNA, 12 bp, Artificial Sequence
  Oligonucleotide primer for the detection of SNP TSC0024357
acactacgcaaa

SEQ ID NO: 311206 - DNA, 12 bp, Artificial Sequence
  Oligonucleotide primer for the detection of SNP TSC0024357
acactacgcgaa

SEQ ID NO: 311207 - DNA, 12 bp, Artificial Sequence
  Oligonucleotide primer for the detection of SNP TSC0024357
tagtattgtttg

SEQ ID NO: 311208 - DNA, 12 bp, Artificial Sequence
  Oligonucleotide primer for the detection of SNP TSC0024358
tatgcgtgtgtg

SEQ ID NO: 311209 - DNA, 12 bp, Artificial Sequence
  Oligonucleotide primer for the detection of SNP TSC0024358
tatgtgcgtgtg

SEQ ID NO: 311210 - DNA, 12 bp, Artificial Sequence
  Oligonucleotide primer for the detection of SNP TSC0024358
tatgtgtgcgtg

SEQ ID NO: 311211 - DNA, 12 bp, Artificial Sequence
  Oligonucleotide primer for the detection of SNP TSC0024358
tatgtgtgtgcg

SEQ ID NO: 311212 - DNA, 12 bp, Artificial Sequence
  Oligonucleotide primer for the detection of SNP TSC0024358
tatgcgcgtgtg

SEQ ID NO: 311213 - DNA, 12 bp, Artificial Sequence
  Oligonucleotide primer for the detection of SNP TSC0024358
tatgcgtgcgtg

SEQ ID NO: 311214 - DNA, 12 bp, Artificial Sequence
  Oligonucleotide primer for the detection of SNP TSC0024358
tatgcgtgtgcg

SEQ ID NO: 311215 - DNA, 12 bp, Artificial Sequence
  Oligonucleotide primer for the detection of SNP TSC0024358
tatgtgcgcgtg

SEQ ID NO: 311216 - DNA, 12 bp, Artificial Sequence
  Oligonucleotide primer for the detection of SNP TSC0024358
tatgtgcgtgcg

SEQ ID NO: 311217 - DNA, 12 bp, Artificial Sequence
  Oligonucleotide primer for the detection of SNP TSC0024358
tatgtgtgcgcg

SEQ ID NO: 311218 - DNA, 12 bp, Artificial Sequence
  Oligonukleotid-Primer
tatgcgcgcgtg

SEQ ID NO: 311219 - DNA, 12 bp, Artificial Sequence
  Oligonucleotide primer for the detection of SNP TSC0024358
tatgcgcgtgcg

SEQ ID NO: 311220 - DNA, 12 bp, Artificial Sequence
  Oligonucleotide primer for the detection of SNP TSC0024358
tatgcgtgcgcg

SEQ ID NO: 311221 - DNA, 12 bp, Artificial Sequence
  Oligonucleotide primer for the detection of SNP TSC0024358
tatgtgcgcgcg

SEQ ID NO: 311222 - DNA, 12 bp, Artificial Sequence
  Oligonucleotide primer for the detection of SNP TSC0024358
tatgcgcgcgcg

SEQ ID NO: 311223 - DNA, 12 bp, Artificial Sequence
  Oligonucleotide primer for the detection of SNP TSC0024358
catacacacgca

SEQ ID NO: 311224 - DNA, 12 bp, Artificial Sequence
  Oligonucleotide primer for the detection of SNP TSC0024358
catacacgcaca

SEQ ID NO: 311225 - DNA, 12 bp, Artificial Sequence
  Oligonucleotide primer for the detection of SNP TSC0024358
catacgcacaca

SEQ ID NO: 311226 - DNA, 12 bp, Artificial Sequence
  Oligonucleotide primer for the detection of SNP TSC0024358
catacacacgcg

SEQ ID NO: 311227 - DNA, 12 bp, Artificial Sequence
  Oligonucleotide primer for the detection of SNP TSC0024358
catacacgcacg

SEQ ID NO: 311228 - DNA, 12 bp, Artificial Sequence
  Oligonucleotide primer for the detection of SNP TSC0024358
catacgcacacg

SEQ ID NO: 311229 - DNA, 12 bp, Artificial Sequence
  Oligonucleotide primer for the detection of SNP TSC0024358
catacacgcgca

SEQ ID NO: 311230 - DNA, 12 bp, Artificial Sequence
  Oligonucleotide primer for the detection of SNP TSC0024358
catacgcacgca

SEQ ID NO: 311231 - DNA, 12 bp, Artificial Sequence
  Oligonucleotide primer for the detection of SNP TSC0024358
catacgcgcaca

SEQ ID NO: 311232 - DNA, 12 bp, Artificial Sequence
  Oligonucleotide primer for the detection of SNP TSC0024358
catacacgcgcg

SEQ ID NO: 311233 - DNA, 12 bp, Artificial Sequence
  Oligonucleotide primer for the detection of SNP TSC0024358
catacgcacgcg

SEQ ID NO: 311234 - DNA, 12 bp, Artificial Sequence
  Oligonucleotide primer for the detection of SNP TSC0024358
catacgcgcacg

SEQ ID NO: 311235 - DNA, 12 bp, Artificial Sequence
  Oligonucleotide primer for the detection of SNP TSC0024358
catacgcgcgca

SEQ ID NO: 311236 - DNA, 12 bp, Artificial Sequence
  Oligonucleotide primer for the detection of SNP TSC0024358
catacgcgcgcg

SEQ ID NO: 311237 - DNA, 12 bp, Artificial Sequence
  Oligonucleotide primer for the detection of SNP TSC0024367
cccatatacccc

SEQ ID NO: 311238 - DNA, 12 bp, Artificial Sequence
  Oligonucleotide primer for the detection of SNP TSC0024367
taggggagttag

SEQ ID NO: 311239 - DNA, 12 bp, Artificial Sequence
  Oligonucleotide primer for the detection of SNP TSC0024367
caaaaaaatcaa

SEQ ID NO: 311240 - DNA, 12 bp, Artificial Sequence
  Oligonucleotide primer for the detection of SNP TSC0024369
attttataattc

SEQ ID NO: 311241 - DNA, 12 bp, Artificial Sequence
  Oligonucleotide primer for the detection of SNP TSC0024369
tttaatatttga

SEQ ID NO: 311242 - DNA, 12 bp, Artificial Sequence
  Oligonucleotide primer for the detection of SNP TSC0024370
aatatatacata

SEQ ID NO: 311243 - DNA, 12 bp, Artificial Sequence
  Oligonucleotide primer for the detection of SNP TSC0024370
ttagttaaatat

SEQ ID NO: 311244 - DNA, 12 bp, Artificial Sequence
  Oligonucleotide primer for the detection of SNP TSC0024370
taaccaaataca

SEQ ID NO: 311245 - DNA, 12 bp, Artificial Sequence
  Oligonucleotide primer for the detection of SNP TSC0024370
atatatatatgt

SEQ ID NO: 311246 - DNA, 12 bp, Artificial Sequence
  Oligonucleotide primer for the detection of SNP TSC0024371
tttatcaaaaat

SEQ ID NO: 311247 - DNA, 12 bp, Artificial Sequence
  Oligonucleotide primer for the detection of SNP TSC0024371
agttagtggtaa

SEQ ID NO: 311248 - DNA, 12 bp, Artificial Sequence
  Oligonucleotide primer for the detection of SNP TSC0024372
aaaatacttacc

SEQ ID NO: 311249 - DNA, 12 bp, Artificial Sequence
  Oligonucleotide primer for the detection of SNP TSC0024372
attgggaagtta

SEQ ID NO: 311250 - DNA, 12 bp, Artificial Sequence
  Oligonucleotide primer for the detection of SNP TSC0024373
ccaatacctaac

SEQ ID NO: 311251 - DNA, 12 bp, Artificial Sequence
  Oligonucleotide primer for the detection of SNP TSC0024373
attttgtgttag

SEQ ID NO: 311252 - DNA, 12 bp, Artificial Sequence
  Oligonucleotide primer for the detection of SNP TSC0024374
aaactttatttc

SEQ ID NO: 311253 - DNA, 12 bp, Artificial Sequence
  Oligonucleotide primer for the detection of SNP TSC0024374
ggaagattgtta

SEQ ID NO: 311254 - DNA, 12 bp, Artificial Sequence
  Oligonucleotide primer for the detection of SNP TSC0024375
atttttcaattc

SEQ ID NO: 311255 - DNA, 12 bp, Artificial Sequence
  Oligonucleotide primer for the detection of SNP TSC0024375
atgaaataaata

SEQ ID NO: 311256 - DNA, 12 bp, Artificial Sequence
  Oligonucleotide primer for the detection of SNP TSC0024376
atttctattttt

SEQ ID NO: 311257 - DNA, 12 bp, Artificial Sequence
  Oligonucleotide primer for the detection of SNP TSC0024377
taaatctatatc

SEQ ID NO: 311258 - DNA, 12 bp, Artificial Sequence
  Oligonucleotide primer for the detection of SNP TSC0024377
taatgttataaa

SEQ ID NO: 311259 - DNA, 12 bp, Artificial Sequence
  Oligonucleotide primer for the detection of SNP TSC0024378
aattagattata

SEQ ID NO: 311260 - DNA, 12 bp, Artificial Sequence
  Oligonucleotide primer for the detection of SNP TSC0024378
aaccaaactaca

SEQ ID NO: 311261 - DNA, 12 bp, Artificial Sequence
  Oligonucleotide primer for the detection of SNP TSC0024378
gaaaattttgat

SEQ ID NO: 311262 - DNA, 12 bp, Artificial Sequence
  Oligonucleotide primer for the detection of SNP TSC0024379
taaggtttttat

SEQ ID NO: 311263 - DNA, 12 bp, Artificial Sequence
  Oligonucleotide primer for the detection of SNP TSC0024379
aaaaccctcaca

SEQ ID NO: 311264 - DNA, 12 bp, Artificial Sequence
  Oligonucleotide primer for the detection of SNP TSC0024379
taggatgaggga

SEQ ID NO: 311265 - DNA, 12 bp, Artificial Sequence
  Oligonucleotide primer for the detection of SNP TSC0024382
aataccacccct

SEQ ID NO: 311266 - DNA, 12 bp, Artificial Sequence
  Oligonucleotide primer for the detection of SNP TSC0024383
ataactaaacaa

SEQ ID NO: 311267 - DNA, 12 bp, Artificial Sequence
  Oligonucleotide primer for the detection of SNP TSC0024383
ataactaaacga

SEQ ID NO: 311268 - DNA, 12 bp, Artificial Sequence
  Oligonucleotide primer for the detection of SNP TSC0024383
gttttggaggaa

SEQ ID NO: 311269 - DNA, 12 bp, Artificial Sequence
  Oligonucleotide primer for the detection of SNP TSC0024385
atactccctcat

SEQ ID NO: 311270 - DNA, 12 bp, Artificial Sequence
  Oligonucleotide primer for the detection of SNP TSC0024385
ttttgagtatag

SEQ ID NO: 311271 - DNA, 12 bp, Artificial Sequence
  Oligonucleotide primer for the detection of SNP TSC0024385
ccttaaacacaa

SEQ ID NO: 311272 - DNA, 12 bp, Artificial Sequence
  Oligonucleotide primer for the detection of SNP TSC0024386
aaatactaatca

SEQ ID NO: 311273 - DNA, 12 bp, Artificial Sequence
  Oligonucleotide primer for the detection of SNP TSC0024386
atatatgatata

SEQ ID NO: 311274 - DNA, 12 bp, Artificial Sequence
  Oligonucleotide primer for the detection of SNP TSC0024386
atatacgatata

SEQ ID NO: 311275 - DNA, 12 bp, Artificial Sequence
  Oligonucleotide primer for the detection of SNP TSC0024387
cactttctttac

SEQ ID NO: 311276 - DNA, 12 bp, Artificial Sequence
  Oligonucleotide primer for the detection of SNP TSC0024387
aagaatatttag

SEQ ID NO: 311277 - DNA, 12 bp, Artificial Sequence
  Oligonucleotide primer for the detection of SNP TSC0024393
ccccaaataatt

SEQ ID NO: 311278 - DNA, 12 bp, Artificial Sequence
  Oligonucleotide primer for the detection of SNP TSC0024393
tagggtgtatta

SEQ ID NO: 311279 - DNA, 12 bp, Artificial Sequence
  Oligonucleotide primer for the detection of SNP TSC0024395
atggtgtaattt

SEQ ID NO: 311280 - DNA, 12 bp, Artificial Sequence
  Oligonucleotide primer for the detection of SNP TSC0024395
atggcgtaattt

SEQ ID NO: 311281 - DNA, 12 bp, Artificial Sequence
  Oligonucleotide primer for the detection of SNP TSC0024396
ttgcgttattgt

SEQ ID NO: 311282 - DNA, 12 bp, Artificial Sequence
  Oligonucleotide primer for the detection of SNP TSC0024396
ttacaccattac

SEQ ID NO: 311283 - DNA, 12 bp, Artificial Sequence
  Oligonucleotide primer for the detection of SNP TSC0024396
ttacgccattac

SEQ ID NO: 311284 - DNA, 12 bp, Artificial Sequence
  Oligonucleotide primer for the detection of SNP TSC0024396
tttaggttggag

SEQ ID NO: 311285 - DNA, 12 bp, Artificial Sequence
  Oligonucleotide primer for the detection of SNP TSC0024397
aatctatcctct

SEQ ID NO: 311286 - DNA, 12 bp, Artificial Sequence
  Oligonucleotide primer for the detection of SNP TSC0024397
gtagggtgggag

SEQ ID NO: 311287 - DNA, 12 bp, Artificial Sequence
  Oligonucleotide primer for the detection of SNP TSC0024398
gtttgttttttg

SEQ ID NO: 311288 - DNA, 12 bp, Artificial Sequence
  Oligonucleotide primer for the detection of SNP TSC0024398
atctatcctcta

SEQ ID NO: 311289 - DNA, 12 bp, Artificial Sequence
  Oligonucleotide primer for the detection of SNP TSC0024398
gggtgggagttt

SEQ ID NO: 311290 - DNA, 12 bp, Artificial Sequence
  Oligonucleotide primer for the detection of SNP TSC0024402
ttatatttgagt

SEQ ID NO: 311291 - DNA, 12 bp, Artificial Sequence
  Oligonucleotide primer for the detection of SNP TSC0024402
ctacacttaaat

SEQ ID NO: 311292 - DNA, 12 bp, Artificial Sequence
  Oligonucleotide primer for the detection of SNP TSC0024402
tgaatgaggtga

SEQ ID NO: 311293 - DNA, 12 bp, Artificial Sequence
  Oligonucleotide primer for the detection of SNP TSC0024403
ttttatgtatat

SEQ ID NO: 311294 - DNA, 12 bp, Artificial Sequence
  Oligonucleotide primer for the detection of SNP TSC0024403
ttttacgtatat

SEQ ID NO: 311295 - DNA, 12 bp, Artificial Sequence
  Oligonucleotide primer for the detection of SNP TSC0024403
tccacacacaca

SEQ ID NO: 311296 - DNA, 12 bp, Artificial Sequence
  Oligonucleotide primer for the detection of SNP TSC0024403
tccacgcacaca

SEQ ID NO: 311297 - DNA, 12 bp, Artificial Sequence
  Oligonucleotide primer for the detection of SNP TSC0024403
gtaaagttaggt

SEQ ID NO: 311298 - DNA, 12 bp, Artificial Sequence
  Oligonucleotide primer for the detection of SNP TSC0024404
ctctaaattaat

SEQ ID NO: 311299 - DNA, 12 bp, Artificial Sequence
  Oligonucleotide primer for the detection of SNP TSC0024404
aaatgattttaa

SEQ ID NO: 311300 - DNA, 12 bp, Artificial Sequence
  Oligonucleotide primer for the detection of SNP TSC0024404
aaataatcccaa

SEQ ID NO: 311301 - DNA, 12 bp, Artificial Sequence
  Oligonucleotide primer for the detection of SNP TSC0024404
ttttaaattgat

SEQ ID NO: 311302 - DNA, 12 bp, Artificial Sequence
  Oligonucleotide primer for the detection of SNP TSC0024407
aatactaatatt

SEQ ID NO: 311303 - DNA, 12 bp, Artificial Sequence
  Oligonucleotide primer for the detection of SNP TSC0024407
tgttattggtaa

SEQ ID NO: 311304 - DNA, 12 bp, Artificial Sequence
  Oligonucleotide primer for the detection of SNP TSC0024407
cgttattggtaa

SEQ ID NO: 311305 - DNA, 12 bp, Artificial Sequence
  Oligonucleotide primer for the detection of SNP TSC0024411
tttaccaactat

SEQ ID NO: 311306 - DNA, 12 bp, Artificial Sequence
  Oligonucleotide primer for the detection of SNP TSC0024414
atagttattata

SEQ ID NO: 311307 - DNA, 12 bp, Artificial Sequence
  Oligonucleotide primer for the detection of SNP TSC0024417
ttttattataaa

SEQ ID NO: 311308 - DNA, 12 bp, Artificial Sequence
  Oligonucleotide primer for the detection of SNP TSC0024418
atatcctaaata

SEQ ID NO: 311309 - DNA, 12 bp, Artificial Sequence
  Oligonucleotide primer for the detection of SNP TSC0024418
tttttaagttat

SEQ ID NO: 311310 - DNA, 12 bp, Artificial Sequence
  Oligonucleotide primer for the detection of SNP TSC0024418
cctctaaattat

SEQ ID NO: 311311 - DNA, 12 bp, Artificial Sequence
  Oligonucleotide primer for the detection of SNP TSC0024418
atgttttaaatg

SEQ ID NO: 311312 - DNA, 12 bp, Artificial Sequence
  Oligonucleotide primer for the detection of SNP TSC0024419
acaaacacacat

SEQ ID NO: 311313 - DNA, 12 bp, Artificial Sequence
  Oligonucleotide primer for the detection of SNP TSC0024419
gtgggaaatgtg

SEQ ID NO: 311314 - DNA, 12 bp, Artificial Sequence
  Oligonucleotide primer for the detection of SNP TSC0024419
gcgggaaatgtg

SEQ ID NO: 311315 - DNA, 12 bp, Artificial Sequence
  Oligonucleotide primer for the detection of SNP TSC0024420
catatatacaca

SEQ ID NO: 311316 - DNA, 12 bp, Artificial Sequence
  Oligonucleotide primer for the detection of SNP TSC0024420
atgtgtatgtgt

SEQ ID NO: 311317 - DNA, 12 bp, Artificial Sequence
  Oligonucleotide primer for the detection of SNP TSC0024420
catatatatata

SEQ ID NO: 311318 - DNA, 12 bp, Artificial Sequence
  Oligonucleotide primer for the detection of SNP TSC0024420
gtatatgtgtat

SEQ ID NO: 311319 - DNA, 12 bp, Artificial Sequence
  Oligonukleotid-Primer
tgttagaatagt

SEQ ID NO: 311320 - DNA, 12 bp, Artificial Sequence
  Oligonucleotide primer for the detection of SNP TSC0024425
cgttagaatagt

SEQ ID NO: 311321 - DNA, 12 bp, Artificial Sequence
  Oligonucleotide primer for the detection of SNP TSC0024425
cattaaaataat

SEQ ID NO: 311322 - DNA, 12 bp, Artificial Sequence
  Oligonucleotide primer for the detection of SNP TSC0024425
cgttaaaataat

SEQ ID NO: 311323 - DNA, 12 bp, Artificial Sequence
  Oligonucleotide primer for the detection of SNP TSC0024425
ttgatgaagggg

SEQ ID NO: 311324 - DNA, 12 bp, Artificial Sequence
  Oligonucleotide primer for the detection of SNP TSC0024427
aaacgtaaacca

SEQ ID NO: 311325 - DNA, 12 bp, Artificial Sequence
  Oligonucleotide primer for the detection of SNP TSC0024427
atgaggttgggt

SEQ ID NO: 311326 - DNA, 12 bp, Artificial Sequence
  Oligonucleotide primer for the detection of SNP TSC0024427
acgaggttgggt

SEQ ID NO: 311327 - DNA, 12 bp, Artificial Sequence
  Oligonucleotide primer for the detection of SNP TSC0024427
atgaggtcgggt

SEQ ID NO: 311328 - DNA, 12 bp, Artificial Sequence
  Oligonucleotide primer for the detection of SNP TSC0024427
acgaggtcgggt

SEQ ID NO: 311329 - DNA, 12 bp, Artificial Sequence
  Oligonucleotide primer for the detection of SNP TSC0024427
acaaaaccaaat

SEQ ID NO: 311330 - DNA, 12 bp, Artificial Sequence
  Oligonucleotide primer for the detection of SNP TSC0024427
acaaaaccgaat

SEQ ID NO: 311331 - DNA, 12 bp, Artificial Sequence
  Oligonucleotide primer for the detection of SNP TSC0024427
acgaaaccaaat

SEQ ID NO: 311332 - DNA, 12 bp, Artificial Sequence
  Oligonucleotide primer for the detection of SNP TSC0024427
acgaaaccgaat

SEQ ID NO: 311333 - DNA, 12 bp, Artificial Sequence
  Oligonucleotide primer for the detection of SNP TSC0024427
aggcgtgagtta

SEQ ID NO: 311334 - DNA, 12 bp, Artificial Sequence
  Oligonucleotide primer for the detection of SNP TSC0024428
aaaggggttggg

SEQ ID NO: 311335 - DNA, 12 bp, Artificial Sequence
  Oligonucleotide primer for the detection of SNP TSC0024430
atctcatttcat

SEQ ID NO: 311336 - DNA, 12 bp, Artificial Sequence
  Oligonucleotide primer for the detection of SNP TSC0024430
tataaatttgtg

SEQ ID NO: 311337 - DNA, 12 bp, Artificial Sequence
  Oligonucleotide primer for the detection of SNP TSC0024432
ctataatatttt

SEQ ID NO: 311338 - DNA, 12 bp, Artificial Sequence
  Oligonucleotide primer for the detection of SNP TSC0024432
aatagaaataga

SEQ ID NO: 311339 - DNA, 12 bp, Artificial Sequence
  Oligonucleotide primer for the detection of SNP TSC0024433
taaacctccctt

SEQ ID NO: 311340 - DNA, 12 bp, Artificial Sequence
  Oligonucleotide primer for the detection of SNP TSC0024433
tggatatatgta

SEQ ID NO: 311341 - DNA, 12 bp, Artificial Sequence
  Oligonucleotide primer for the detection of SNP TSC0024434
caccctatccat

SEQ ID NO: 311342 - DNA, 12 bp, Artificial Sequence
  Oligonucleotide primer for the detection of SNP TSC0024434
gagtattggtag

SEQ ID NO: 311343 - DNA, 12 bp, Artificial Sequence
  Oligonucleotide primer for the detection of SNP TSC0024434
aaacattaataa

SEQ ID NO: 311344 - DNA, 12 bp, Artificial Sequence
  Oligonucleotide primer for the detection of SNP TSC0024434
tattttgtttat

SEQ ID NO: 311345 - DNA, 12 bp, Artificial Sequence
  Oligonucleotide primer for the detection of SNP TSC0024436
gtattggtagtg

SEQ ID NO: 311346 - DNA, 12 bp, Artificial Sequence
  Oligonucleotide primer for the detection of SNP TSC0024436
gtattggtagcg

SEQ ID NO: 311347 - DNA, 12 bp, Artificial Sequence
  Oligonucleotide primer for the detection of SNP TSC0024439
aaaacaattaaa

SEQ ID NO: 311348 - DNA, 12 bp, Artificial Sequence
  Oligonucleotide primer for the detection of SNP TSC0024439
tgatgatggttt

SEQ ID NO: 311349 - DNA, 12 bp, Artificial Sequence
  Oligonucleotide primer for the detection of SNP TSC0024439
aggatagttaaa

SEQ ID NO: 311350 - DNA, 12 bp, Artificial Sequence
  Oligonucleotide primer for the detection of SNP TSC0024441
actattaaaaat

SEQ ID NO: 311351 - DNA, 12 bp, Artificial Sequence
  Oligonucleotide primer for the detection of SNP TSC0024441
gctattaaaaat

SEQ ID NO: 311352 - DNA, 12 bp, Artificial Sequence
  Oligonucleotide primer for the detection of SNP TSC0024441
tcctaatacccc

SEQ ID NO: 311353 - DNA, 12 bp, Artificial Sequence
  Oligonucleotide primer for the detection of SNP TSC0024441
gttgttgggagt

SEQ ID NO: 311354 - DNA, 12 bp, Artificial Sequence
  Oligonucleotide primer for the detection of SNP TSC0024443
ttactacaaatt

SEQ ID NO: 311355 - DNA, 12 bp, Artificial Sequence
  Oligonucleotide primer for the detection of SNP TSC0024444
aaacatatatct

SEQ ID NO: 311356 - DNA, 12 bp, Artificial Sequence
  Oligonucleotide primer for the detection of SNP TSC0024444
gatagtgggaaa

SEQ ID NO: 311357 - DNA, 12 bp, Artificial Sequence
  Oligonucleotide primer for the detection of SNP TSC0024445
taatttttgatt

SEQ ID NO: 311358 - DNA, 12 bp, Artificial Sequence
  Oligonucleotide primer for the detection of SNP TSC0024445
taattcctaatt

SEQ ID NO: 311359 - DNA, 12 bp, Artificial Sequence
  Oligonucleotide primer for the detection of SNP TSC0024445
agagaagtataa

SEQ ID NO: 311360 - DNA, 12 bp, Artificial Sequence
  Oligonucleotide primer for the detection of SNP TSC0024446
ttaaacaaaaac

SEQ ID NO: 311361 - DNA, 12 bp, Artificial Sequence
  Oligonucleotide primer for the detection of SNP TSC0024446
gaaagaagtaaa

SEQ ID NO: 311362 - DNA, 12 bp, Artificial Sequence
  Oligonucleotide primer for the detection of SNP TSC0024447
tttgagtaagga

SEQ ID NO: 311363 - DNA, 12 bp, Artificial Sequence
  Oligonucleotide primer for the detection of SNP TSC0024447
ttggaaagaagt

SEQ ID NO: 311364 - DNA, 12 bp, Artificial Sequence
  Oligonucleotide primer for the detection of SNP TSC0024448
atcccaattccc

SEQ ID NO: 311365 - DNA, 12 bp, Artificial Sequence
  Oligonucleotide primer for the detection of SNP TSC0024448
tttaagatgttg

SEQ ID NO: 311366 - DNA, 12 bp, Artificial Sequence
  Oligonucleotide primer for the detection of SNP TSC0024449
atatacttttta

SEQ ID NO: 311367 - DNA, 12 bp, Artificial Sequence
  Oligonucleotide primer for the detection of SNP TSC0024449
ttagataaatta

SEQ ID NO: 311368 - DNA, 12 bp, Artificial Sequence
  Oligonucleotide primer for the detection of SNP TSC0024449
aaacaaatcaaa

SEQ ID NO: 311369 - DNA, 12 bp, Artificial Sequence
  Oligonucleotide primer for the detection of SNP TSC0024449
gatgtgtttttt

SEQ ID NO: 311370 - DNA, 12 bp, Artificial Sequence
  Oligonucleotide primer for the detection of SNP TSC0024451
atatttaaaatc

SEQ ID NO: 311371 - DNA, 12 bp, Artificial Sequence
  Oligonucleotide primer for the detection of SNP TSC0024451
aggtatatggat

SEQ ID NO: 311372 - DNA, 12 bp, Artificial Sequence
  Oligonucleotide primer for the detection of SNP TSC0024451
aacacataaata

SEQ ID NO: 311373 - DNA, 12 bp, Artificial Sequence
  Oligonucleotide primer for the detection of SNP TSC0024452
taattaaattat

SEQ ID NO: 311374 - DNA, 12 bp, Artificial Sequence
  Oligonucleotide primer for the detection of SNP TSC0024452
gtatgaggagaa

SEQ ID NO: 311375 - DNA, 12 bp, Artificial Sequence
  Oligonucleotide primer for the detection of SNP TSC0024452
tgattggattat

SEQ ID NO: 311376 - DNA, 12 bp, Artificial Sequence
  Oligonucleotide primer for the detection of SNP TSC0024454
ctatcaacaaca

SEQ ID NO: 311377 - DNA, 12 bp, Artificial Sequence
  Oligonucleotide primer for the detection of SNP TSC0024454
ggattatgaatt

SEQ ID NO: 311378 - DNA, 12 bp, Artificial Sequence
  Oligonucleotide primer for the detection of SNP TSC0024454
ggattatgaatc

SEQ ID NO: 311379 - DNA, 12 bp, Artificial Sequence
  Oligonucleotide primer for the detection of SNP TSC0024454
aaatcataaatc

SEQ ID NO: 311380 - DNA, 12 bp, Artificial Sequence
  Oligonucleotide primer for the detection of SNP TSC0024454
gttgttaataat

SEQ ID NO: 311381 - DNA, 12 bp, Artificial Sequence
  Oligonucleotide primer for the detection of SNP TSC0024457
aattaaaattat

SEQ ID NO: 311382 - DNA, 12 bp, Artificial Sequence
  Oligonucleotide primer for the detection of SNP TSC0024457
actttaatttat

SEQ ID NO: 311383 - DNA, 12 bp, Artificial Sequence
  Oligonucleotide primer for the detection of SNP TSC0024460
ctaaacttaaaa

SEQ ID NO: 311384 - DNA, 12 bp, Artificial Sequence
  Oligonucleotide primer for the detection of SNP TSC0024460
ttaaaagatgag

SEQ ID NO: 311385 - DNA, 12 bp, Artificial Sequence
  Oligonucleotide primer for the detection of SNP TSC0024460
ttggatttggaa

SEQ ID NO: 311386 - DNA, 12 bp, Artificial Sequence
  Oligonucleotide primer for the detection of SNP TSC0024462
cacaaatcaaac

SEQ ID NO: 311387 - DNA, 12 bp, Artificial Sequence
  Oligonucleotide primer for the detection of SNP TSC0024462
cctctctaaacc

SEQ ID NO: 311388 - DNA, 12 bp, Artificial Sequence
  Oligonucleotide primer for the detection of SNP TSC0024462
ataagttagatt

SEQ ID NO: 311389 - DNA, 12 bp, Artificial Sequence
  Oligonucleotide primer for the detection of SNP TSC0024463
acaaataatacc

SEQ ID NO: 311390 - DNA, 12 bp, Artificial Sequence
  Oligonucleotide primer for the detection of SNP TSC0024463
gatagaatttag

SEQ ID NO: 311391 - DNA, 12 bp, Artificial Sequence
  Oligonucleotide primer for the detection of SNP TSC0024464
taataaaattta

SEQ ID NO: 311392 - DNA, 12 bp, Artificial Sequence
  Oligonucleotide primer for the detection of SNP TSC0024464
caataaaattca

SEQ ID NO: 311393 - DNA, 12 bp, Artificial Sequence
  Oligonucleotide primer for the detection of SNP TSC0024464
gtatttattgat

SEQ ID NO: 311394 - DNA, 12 bp, Artificial Sequence
  Oligonucleotide primer for the detection of SNP TSC0024470
ctcttaaaatac

SEQ ID NO: 311395 - DNA, 12 bp, Artificial Sequence
  Oligonucleotide primer for the detection of SNP TSC0024470
tagatagtgata

SEQ ID NO: 311396 - DNA, 12 bp, Artificial Sequence
  Oligonucleotide primer for the detection of SNP TSC0024472
catacctaaccc

SEQ ID NO: 311397 - DNA, 12 bp, Artificial Sequence
  Oligonucleotide primer for the detection of SNP TSC0024472
cgtacctaaccc

SEQ ID NO: 311398 - DNA, 12 bp, Artificial Sequence
  Oligonucleotide primer for the detection of SNP TSC0024472
gaaaatagaaag

SEQ ID NO: 311399 - DNA, 12 bp, Artificial Sequence
  Oligonucleotide primer for the detection of SNP TSC0024473
acaaataataaa

SEQ ID NO: 311400 - DNA, 12 bp, Artificial Sequence
  Oligonucleotide primer for the detection of SNP TSC0024473
atagatgatagg

SEQ ID NO: 311401 - DNA, 12 bp, Artificial Sequence
  Oligonucleotide primer for the detection of SNP TSC0024477
accctctttaat

SEQ ID NO: 311402 - DNA, 12 bp, Artificial Sequence
  Oligonucleotide primer for the detection of SNP TSC0024482
aaaacctttttt

SEQ ID NO: 311403 - DNA, 12 bp, Artificial Sequence
  Oligonucleotide primer for the detection of SNP TSC0024484
acctctataaac

SEQ ID NO: 311404 - DNA, 12 bp, Artificial Sequence
  Oligonucleotide primer for the detection of SNP TSC0024484
agaagagattag

SEQ ID NO: 311405 - DNA, 12 bp, Artificial Sequence
  Oligonucleotide primer for the detection of SNP TSC0024485
aaaactaacaaa

SEQ ID NO: 311406 - DNA, 12 bp, Artificial Sequence
  Oligonucleotide primer for the detection of SNP TSC0024485
ttaatattttat

SEQ ID NO: 311407 - DNA, 12 bp, Artificial Sequence
  Oligonucleotide primer for the detection of SNP TSC0024485
ttaatattttac

SEQ ID NO: 311408 - DNA, 12 bp, Artificial Sequence
  Oligonucleotide primer for the detection of SNP TSC0024485
ttaacacttcac

SEQ ID NO: 311409 - DNA, 12 bp, Artificial Sequence
  Oligonucleotide primer for the detection of SNP TSC0024485
ggggttggtagg

SEQ ID NO: 311410 - DNA, 12 bp, Artificial Sequence
  Oligonucleotide primer for the detection of SNP TSC0024486
tctcaaactcct

SEQ ID NO: 311411 - DNA, 12 bp, Artificial Sequence
  Oligonucleotide primer for the detection of SNP TSC0024486
tctcgaactcct

SEQ ID NO: 311412 - DNA, 12 bp, Artificial Sequence
  Oligonucleotide primer for the detection of SNP TSC0024486
tggattatttga

SEQ ID NO: 311413 - DNA, 12 bp, Artificial Sequence
  Oligonucleotide primer for the detection of SNP TSC0024490
actttccactat

SEQ ID NO: 311414 - DNA, 12 bp, Artificial Sequence
  Oligonucleotide primer for the detection of SNP TSC0024490
ttgggatagggg

SEQ ID NO: 311415 - DNA, 12 bp, Artificial Sequence
  Oligonucleotide primer for the detection of SNP TSC0024490
tcgggatagggg

SEQ ID NO: 311416 - DNA, 12 bp, Artificial Sequence
  Oligonucleotide primer for the detection of SNP TSC0024491
aatctaaaacta

SEQ ID NO: 311417 - DNA, 12 bp, Artificial Sequence
  Oligonucleotide primer for the detection of SNP TSC0024491
acatcttcctct

SEQ ID NO: 311418 - DNA, 12 bp, Artificial Sequence
  Oligonucleotide primer for the detection of SNP TSC0024491
ggtttggggttg

SEQ ID NO: 311419 - DNA, 12 bp, Artificial Sequence
  Oligonucleotide primer for the detection of SNP TSC0024492
acacaatacaaa

SEQ ID NO: 311420 - DNA, 12 bp, Artificial Sequence
  Oligonucleotide primer for the detection of SNP TSC0024492
ttttagattaga

SEQ ID NO: 311421 - DNA, 12 bp, Artificial Sequence
  Oligonucleotide primer for the detection of SNP TSC0024492
ccccaaaccaaa

SEQ ID NO: 311422 - DNA, 12 bp, Artificial Sequence
  Oligonucleotide primer for the detection of SNP TSC0024492
atatagtgtagg

SEQ ID NO: 311423 - DNA, 12 bp, Artificial Sequence
  Oligonucleotide primer for the detection of SNP TSC0024493
caacttaatata

SEQ ID NO: 311424 - DNA, 12 bp, Artificial Sequence
  Oligonucleotide primer for the detection of SNP TSC0024493
cgacttaatata

SEQ ID NO: 311425 - DNA, 12 bp, Artificial Sequence
  Oligonucleotide primer for the detection of SNP TSC0024493
atgaatatattg

SEQ ID NO: 311426 - DNA, 12 bp, Artificial Sequence
  Oligonucleotide primer for the detection of SNP TSC0024493
ataaatatatta

SEQ ID NO: 311427 - DNA, 12 bp, Artificial Sequence
  Oligonucleotide primer for the detection of SNP TSC0024493
tgatttaatgta

SEQ ID NO: 311428 - DNA, 12 bp, Artificial Sequence
  Oligonukleotid-Primer
cgatttaatgta

SEQ ID NO: 311429 - DNA, 12 bp, Artificial Sequence
  Oligonucleotide primer for the detection of SNP TSC0024494
ttccccaattac

SEQ ID NO: 311430 - DNA, 12 bp, Artificial Sequence
  Oligonucleotide primer for the detection of SNP TSC0024494
taatataattag

SEQ ID NO: 311431 - DNA, 12 bp, Artificial Sequence
  Oligonucleotide primer for the detection of SNP TSC0024494
taatataactaa

SEQ ID NO: 311432 - DNA, 12 bp, Artificial Sequence
  Oligonucleotide primer for the detection of SNP TSC0024494
ttttttagttgt

SEQ ID NO: 311433 - DNA, 12 bp, Artificial Sequence
  Oligonucleotide primer for the detection of SNP TSC0024495
tataagttattg

SEQ ID NO: 311434 - DNA, 12 bp, Artificial Sequence
  Oligonucleotide primer for the detection of SNP TSC0024495
cataaatcatta

SEQ ID NO: 311435 - DNA, 12 bp, Artificial Sequence
  Oligonucleotide primer for the detection of SNP TSC0024495
agaattaatata

SEQ ID NO: 311436 - DNA, 12 bp, Artificial Sequence
  Oligonucleotide primer for the detection of SNP TSC0024496
acacacaatttt

SEQ ID NO: 311437 - DNA, 12 bp, Artificial Sequence
  Oligonucleotide primer for the detection of SNP TSC0024500
tataaaaaaatt

SEQ ID NO: 311438 - DNA, 12 bp, Artificial Sequence
  Oligonucleotide primer for the detection of SNP TSC0024504
acaacatcctat

SEQ ID NO: 311439 - DNA, 12 bp, Artificial Sequence
  Oligonucleotide primer for the detection of SNP TSC0024504
aatatttggtaa

SEQ ID NO: 311440 - DNA, 12 bp, Artificial Sequence
  Oligonucleotide primer for the detection of SNP TSC0024505
ctataataactt

SEQ ID NO: 311441 - DNA, 12 bp, Artificial Sequence
  Oligonucleotide primer for the detection of SNP TSC0024505
ggagaaattttt

SEQ ID NO: 311442 - DNA, 12 bp, Artificial Sequence
  Oligonucleotide primer for the detection of SNP TSC0024506
cctctcttaaaa

SEQ ID NO: 311443 - DNA, 12 bp, Artificial Sequence
  Oligonucleotide primer for the detection of SNP TSC0024506
ggaaaaggattt

SEQ ID NO: 311444 - DNA, 12 bp, Artificial Sequence
  Oligonucleotide primer for the detection of SNP TSC0024507
catttctttact

SEQ ID NO: 311445 - DNA, 12 bp, Artificial Sequence
  Oligonucleotide primer for the detection of SNP TSC0024507
cgtttctttact

SEQ ID NO: 311446 - DNA, 12 bp, Artificial Sequence
  Oligonucleotide primer for the detection of SNP TSC0024508
ccaaaaccacct

SEQ ID NO: 311447 - DNA, 12 bp, Artificial Sequence
  Oligonucleotide primer for the detection of SNP TSC0024508
ccaaaaccgcct

SEQ ID NO: 311448 - DNA, 12 bp, Artificial Sequence
  Oligonukleotid-Primer
aattcctctaaa

SEQ ID NO: 311449 - DNA, 12 bp, Artificial Sequence
  Oligonucleotide primer for the detection of SNP TSC0024508
ttagggttgttt

SEQ ID NO: 311450 - DNA, 12 bp, Artificial Sequence
  Oligonucleotide primer for the detection of SNP TSC0024508
ttagggtcgttt

SEQ ID NO: 311451 - DNA, 12 bp, Artificial Sequence
  Oligonucleotide primer for the detection of SNP TSC0024509
actacaccaaaa

SEQ ID NO: 311452 - DNA, 12 bp, Artificial Sequence
  Oligonucleotide primer for the detection of SNP TSC0024509
ggaaaaggtggg

SEQ ID NO: 311453 - DNA, 12 bp, Artificial Sequence
  Oligonucleotide primer for the detection of SNP TSC0024509
ggaaaaggcggg

SEQ ID NO: 311454 - DNA, 12 bp, Artificial Sequence
  Oligonucleotide primer for the detection of SNP TSC0024509
gttgtattaggg

SEQ ID NO: 311455 - DNA, 12 bp, Artificial Sequence
  Oligonucleotide primer for the detection of SNP TSC0024510
cccaaaaacccc

SEQ ID NO: 311456 - DNA, 12 bp, Artificial Sequence
  Oligonucleotide primer for the detection of SNP TSC0024510
gttttaggtggg

SEQ ID NO: 311457 - DNA, 12 bp, Artificial Sequence
  Oligonucleotide primer for the detection of SNP TSC0024510
atcccaaataaa

SEQ ID NO: 311458 - DNA, 12 bp, Artificial Sequence
  Oligonucleotide primer for the detection of SNP TSC0024510
tttaggagtttc

SEQ ID NO: 311459 - DNA, 12 bp, Artificial Sequence
  Oligonucleotide primer for the detection of SNP TSC0024511
actacctaactc

SEQ ID NO: 311460 - DNA, 12 bp, Artificial Sequence
  Oligonucleotide primer for the detection of SNP TSC0024511
tgttaggatagg

SEQ ID NO: 311461 - DNA, 12 bp, Artificial Sequence
  Oligonucleotide primer for the detection of SNP TSC0024511
taccaaaacaaa

SEQ ID NO: 311462 - DNA, 12 bp, Artificial Sequence
  Oligonucleotide primer for the detection of SNP TSC0024511
gttgtttggttt

SEQ ID NO: 311463 - DNA, 12 bp, Artificial Sequence
  Oligonucleotide primer for the detection of SNP TSC0024511
gttgtttggttc

SEQ ID NO: 311464 - DNA, 12 bp, Artificial Sequence
  Oligonucleotide primer for the detection of SNP TSC0024513
aaacaataacat

SEQ ID NO: 311465 - DNA, 12 bp, Artificial Sequence
  Oligonucleotide primer for the detection of SNP TSC0024513
ttgttttattgg

SEQ ID NO: 311466 - DNA, 12 bp, Artificial Sequence
  Oligonucleotide primer for the detection of SNP TSC0024513
ttgttttatcgg

SEQ ID NO: 311467 - DNA, 12 bp, Artificial Sequence
  Oligonucleotide primer for the detection of SNP TSC0024514
aaactcaaaaac

SEQ ID NO: 311468 - DNA, 12 bp, Artificial Sequence
  Oligonucleotide primer for the detection of SNP TSC0024514
gggtttagaggt

SEQ ID NO: 311469 - DNA, 12 bp, Artificial Sequence
  Oligonucleotide primer for the detection of SNP TSC0024515
tcataccacaat

SEQ ID NO: 311470 - DNA, 12 bp, Artificial Sequence
  Oligonucleotide primer for the detection of SNP TSC0024515
tcgtaccacaat

SEQ ID NO: 311471 - DNA, 12 bp, Artificial Sequence
  Oligonucleotide primer for the detection of SNP TSC0024515
attaaataataa

SEQ ID NO: 311472 - DNA, 12 bp, Artificial Sequence
  Oligonucleotide primer for the detection of SNP TSC0024515
ttgtgttatagt

SEQ ID NO: 311473 - DNA, 12 bp, Artificial Sequence
  Oligonucleotide primer for the detection of SNP TSC0024515
tcgtgttatagt

SEQ ID NO: 311474 - DNA, 12 bp, Artificial Sequence
  Oligonucleotide primer for the detection of SNP TSC0024516
ccacccccattt

SEQ ID NO: 311475 - DNA, 12 bp, Artificial Sequence
  Oligonucleotide primer for the detection of SNP TSC0024516
gatgttattaga

SEQ ID NO: 311476 - DNA, 12 bp, Artificial Sequence
  Oligonucleotide primer for the detection of SNP TSC0024517
attctaaaatta

SEQ ID NO: 311477 - DNA, 12 bp, Artificial Sequence
  Oligonucleotide primer for the detection of SNP TSC0024517
tatattttctct

SEQ ID NO: 311478 - DNA, 12 bp, Artificial Sequence
  Oligonucleotide primer for the detection of SNP TSC0024517
attttagggttg

SEQ ID NO: 311479 - DNA, 12 bp, Artificial Sequence
  Oligonucleotide primer for the detection of SNP TSC0024520
acaacaaactta

SEQ ID NO: 311480 - DNA, 12 bp, Artificial Sequence
  Oligonucleotide primer for the detection of SNP TSC0024520
atttttattagt

SEQ ID NO: 311481 - DNA, 12 bp, Artificial Sequence
  Oligonucleotide primer for the detection of SNP TSC0024520
actcccaccaat

SEQ ID NO: 311482 - DNA, 12 bp, Artificial Sequence
  Oligonucleotide primer for the detection of SNP TSC0024520
gtaataagtttg

SEQ ID NO: 311483 - DNA, 12 bp, Artificial Sequence
  Oligonucleotide primer for the detection of SNP TSC0024526
ctatccttttaa

SEQ ID NO: 311484 - DNA, 12 bp, Artificial Sequence
  Oligonucleotide primer for the detection of SNP TSC0024526
tttagtgattat

SEQ ID NO: 311485 - DNA, 12 bp, Artificial Sequence
  Oligonucleotide primer for the detection of SNP TSC0024526
tttaataaccat

SEQ ID NO: 311486 - DNA, 12 bp, Artificial Sequence
  Oligonucleotide primer for the detection of SNP TSC0024526
ttgtttttttaa

SEQ ID NO: 311487 - DNA, 12 bp, Artificial Sequence
  Oligonucleotide primer for the detection of SNP TSC0024527
tggttttgaagt

SEQ ID NO: 311488 - DNA, 12 bp, Artificial Sequence
  Oligonucleotide primer for the detection of SNP TSC0024527
taattttaaaac

SEQ ID NO: 311489 - DNA, 12 bp, Artificial Sequence
  Oligonucleotide primer for the detection of SNP TSC0024527
ttattggaaaag

SEQ ID NO: 311490 - DNA, 12 bp, Artificial Sequence
  Oligonucleotide primer for the detection of SNP TSC0024528
accaactacccc

SEQ ID NO: 311491 - DNA, 12 bp, Artificial Sequence
  Oligonucleotide primer for the detection of SNP TSC0024528
gagtaggagttg

SEQ ID NO: 311492 - DNA, 12 bp, Artificial Sequence
  Oligonucleotide primer for the detection of SNP TSC0024529
acacctaaactt

SEQ ID NO: 311493 - DNA, 12 bp, Artificial Sequence
  Oligonucleotide primer for the detection of SNP TSC0024529
aaaaaaatatag

SEQ ID NO: 311494 - DNA, 12 bp, Artificial Sequence
  Oligonucleotide primer for the detection of SNP TSC0024530
ttaccaaaacct

SEQ ID NO: 311495 - DNA, 12 bp, Artificial Sequence
  Oligonucleotide primer for the detection of SNP TSC0024530
gaaaaggaaaag

SEQ ID NO: 311496 - DNA, 12 bp, Artificial Sequence
  Oligonucleotide primer for the detection of SNP TSC0024531
ctcactatatca

SEQ ID NO: 311497 - DNA, 12 bp, Artificial Sequence
  Oligonucleotide primer for the detection of SNP TSC0024531
tgtattttagtt

SEQ ID NO: 311498 - DNA, 12 bp, Artificial Sequence
  Oligonucleotide primer for the detection of SNP TSC0024532
aaacttaattca

SEQ ID NO: 311499 - DNA, 12 bp, Artificial Sequence
  Oligonucleotide primer for the detection of SNP TSC0024532
aaacttaattcg

SEQ ID NO: 311500 - DNA, 12 bp, Artificial Sequence
  Oligonucleotide primer for the detection of SNP TSC0024532
tgtattttagta

SEQ ID NO: 311501 - DNA, 12 bp, Artificial Sequence
  Oligonucleotide primer for the detection of SNP TSC0024532
cgtattttagta

SEQ ID NO: 311502 - DNA, 12 bp, Artificial Sequence
  Oligonucleotide primer for the detection of SNP TSC0024532
cacatctcaaca

SEQ ID NO: 311503 - DNA, 12 bp, Artificial Sequence
  Oligonucleotide primer for the detection of SNP TSC0024532
cgcatctcaaca

SEQ ID NO: 311504 - DNA, 12 bp, Artificial Sequence
  Oligonucleotide primer for the detection of SNP TSC0024532
gggtttggtttg

SEQ ID NO: 311505 - DNA, 12 bp, Artificial Sequence
  Oligonucleotide primer for the detection of SNP TSC0024532
gggtttggttcg

SEQ ID NO: 311506 - DNA, 12 bp, Artificial Sequence
  Oligonucleotide primer for the detection of SNP TSC0024536
cctccaaatatt

SEQ ID NO: 311507 - DNA, 12 bp, Artificial Sequence
  Oligonucleotide primer for the detection of SNP TSC0024536
tttagaatataa

SEQ ID NO: 311508 - DNA, 12 bp, Artificial Sequence
  Oligonucleotide primer for the detection of SNP TSC0024536
cccaaaacacaa

SEQ ID NO: 311509 - DNA, 12 bp, Artificial Sequence
  Oligonucleotide primer for the detection of SNP TSC0024536
tttttagatgtt

SEQ ID NO: 311510 - DNA, 12 bp, Artificial Sequence
  Oligonucleotide primer for the detection of SNP TSC0024537
aacttatcctat

SEQ ID NO: 311511 - DNA, 12 bp, Artificial Sequence
  Oligonucleotide primer for the detection of SNP TSC0024537
atttacgaaatg

SEQ ID NO: 311512 - DNA, 12 bp, Artificial Sequence
  Oligonucleotide primer for the detection of SNP TSC0024538
aataaccattaa

SEQ ID NO: 311513 - DNA, 12 bp, Artificial Sequence
  Oligonucleotide primer for the detection of SNP TSC0024538
attaggagatat

SEQ ID NO: 311514 - DNA, 12 bp, Artificial Sequence
  Oligonucleotide primer for the detection of SNP TSC0024538
atcaaaaaacat

SEQ ID NO: 311515 - DNA, 12 bp, Artificial Sequence
  Oligonucleotide primer for the detection of SNP TSC0024538
agtggttattga

SEQ ID NO: 311516 - DNA, 12 bp, Artificial Sequence
  Oligonucleotide primer for the detection of SNP TSC0024539
gattgtggtgat

SEQ ID NO: 311517 - DNA, 12 bp, Artificial Sequence
  Oligonucleotide primer for the detection of SNP TSC0024539
taattataataa

SEQ ID NO: 311518 - DNA, 12 bp, Artificial Sequence
  Oligonucleotide primer for the detection of SNP TSC0024539
ttaatatgattt

SEQ ID NO: 311519 - DNA, 12 bp, Artificial Sequence
  Oligonucleotide primer for the detection of SNP TSC0024539
ttaatatgattc

SEQ ID NO: 311520 - DNA, 12 bp, Artificial Sequence
  Oligonucleotide primer for the detection of SNP TSC0024541
gggtatgtgttt

SEQ ID NO: 311521 - DNA, 12 bp, Artificial Sequence
  Oligonucleotide primer for the detection of SNP TSC0024541
gggtacgtgttt

SEQ ID NO: 311522 - DNA, 12 bp, Artificial Sequence
  Oligonucleotide primer for the detection of SNP TSC0024541
gggtatgcgttt

SEQ ID NO: 311523 - DNA, 12 bp, Artificial Sequence
  Oligonucleotide primer for the detection of SNP TSC0024541
gggtacgcgttt

SEQ ID NO: 311524 - DNA, 12 bp, Artificial Sequence
  Oligonucleotide primer for the detection of SNP TSC0024541
atcaaacacaca

SEQ ID NO: 311525 - DNA, 12 bp, Artificial Sequence
  Oligonucleotide primer for the detection of SNP TSC0024541
atcaaacacacg

SEQ ID NO: 311526 - DNA, 12 bp, Artificial Sequence
  Oligonucleotide primer for the detection of SNP TSC0024541
atcaaacacgca

SEQ ID NO: 311527 - DNA, 12 bp, Artificial Sequence
  Oligonucleotide primer for the detection of SNP TSC0024541
atcgaacacaca

SEQ ID NO: 311528 - DNA, 12 bp, Artificial Sequence
  Oligonucleotide primer for the detection of SNP TSC0024541
atcaaacacgcg

SEQ ID NO: 311529 - DNA, 12 bp, Artificial Sequence
  Oligonucleotide primer for the detection of SNP TSC0024541
atcgaacacacg

SEQ ID NO: 311530 - DNA, 12 bp, Artificial Sequence
  Oligonucleotide primer for the detection of SNP TSC0024541
atcgaacacgca

SEQ ID NO: 311531 - DNA, 12 bp, Artificial Sequence
  Oligonucleotide primer for the detection of SNP TSC0024541
atcgaacacgcg

SEQ ID NO: 311532 - DNA, 12 bp, Artificial Sequence
  Oligonucleotide primer for the detection of SNP TSC0024541
tttagaagaggg

SEQ ID NO: 311533 - DNA, 12 bp, Artificial Sequence
  Oligonucleotide primer for the detection of SNP TSC0024542
cactactacact

SEQ ID NO: 311534 - DNA, 12 bp, Artificial Sequence
  Oligonucleotide primer for the detection of SNP TSC0024542
cgctactacact

SEQ ID NO: 311535 - DNA, 12 bp, Artificial Sequence
  Oligonucleotide primer for the detection of SNP TSC0024542
ttgttaaggttg

SEQ ID NO: 311536 - DNA, 12 bp, Artificial Sequence
  Oligonucleotide primer for the detection of SNP TSC0024542
tcgttaaggttg

SEQ ID NO: 311537 - DNA, 12 bp, Artificial Sequence
  Oligonucleotide primer for the detection of SNP TSC0024545
ttctactaaaaa

SEQ ID NO: 311538 - DNA, 12 bp, Artificial Sequence
  Oligonucleotide primer for the detection of SNP TSC0024545
ttataaaatttt

SEQ ID NO: 311539 - DNA, 12 bp, Artificial Sequence
  Oligonucleotide primer for the detection of SNP TSC0024545
ccttcataaaac

SEQ ID NO: 311540 - DNA, 12 bp, Artificial Sequence
  Oligonucleotide primer for the detection of SNP TSC0024547
gggttatgttta

SEQ ID NO: 311541 - DNA, 12 bp, Artificial Sequence
  Oligonucleotide primer for the detection of SNP TSC0024547
aaaccataccca

SEQ ID NO: 311542 - DNA, 12 bp, Artificial Sequence
  Oligonucleotide primer for the detection of SNP TSC0024547
attggttataat

SEQ ID NO: 311543 - DNA, 12 bp, Artificial Sequence
  Oligonucleotide primer for the detection of SNP TSC0024548
acccgaaactcc

SEQ ID NO: 311544 - DNA, 12 bp, Artificial Sequence
  Oligonucleotide primer for the detection of SNP TSC0024548
tatgggatgttg

SEQ ID NO: 311545 - DNA, 12 bp, Artificial Sequence
  Oligonucleotide primer for the detection of SNP TSC0024548
tacgggatgttg

SEQ ID NO: 311546 - DNA, 12 bp, Artificial Sequence
  Oligonucleotide primer for the detection of SNP TSC0024548
cacaaaatacta

SEQ ID NO: 311547 - DNA, 12 bp, Artificial Sequence
  Oligonucleotide primer for the detection of SNP TSC0024548
cacgaaatacta

SEQ ID NO: 311548 - DNA, 12 bp, Artificial Sequence
  Oligonucleotide primer for the detection of SNP TSC0024548
gtttggggtttt

SEQ ID NO: 311549 - DNA, 12 bp, Artificial Sequence
  Oligonucleotide primer for the detection of SNP TSC0024548
gttcggggtttt

SEQ ID NO: 311550 - DNA, 12 bp, Artificial Sequence
  Oligonucleotide primer for the detection of SNP TSC0024549
ttgttttataag

SEQ ID NO: 311551 - DNA, 12 bp, Artificial Sequence
  Oligonucleotide primer for the detection of SNP TSC0024549
ctaccccacaaa

SEQ ID NO: 311552 - DNA, 12 bp, Artificial Sequence
  Oligonucleotide primer for the detection of SNP TSC0024549
gtagataattta

SEQ ID NO: 311553 - DNA, 12 bp, Artificial Sequence
  Oligonucleotide primer for the detection of SNP TSC0024551
agatagtaggga

SEQ ID NO: 311554 - DNA, 12 bp, Artificial Sequence
  Oligonucleotide primer for the detection of SNP TSC0024552
ccacaccctaac

SEQ ID NO: 311555 - DNA, 12 bp, Artificial Sequence
  Oligonucleotide primer for the detection of SNP TSC0024552
tagagttagggg

SEQ ID NO: 311556 - DNA, 12 bp, Artificial Sequence
  Oligonucleotide primer for the detection of SNP TSC0024553
aacaaaatttaa

SEQ ID NO: 311557 - DNA, 12 bp, Artificial Sequence
  Oligonucleotide primer for the detection of SNP TSC0024553
aataggatatat

SEQ ID NO: 311558 - DNA, 12 bp, Artificial Sequence
  Oligonucleotide primer for the detection of SNP TSC0024553
aataaaatttga

SEQ ID NO: 311559 - DNA, 12 bp, Artificial Sequence
  Oligonucleotide primer for the detection of SNP TSC0024555
attcacaaaaaa

SEQ ID NO: 311560 - DNA, 12 bp, Artificial Sequence
  Oligonucleotide primer for the detection of SNP TSC0024555
ttttgtttatgt

SEQ ID NO: 311561 - DNA, 12 bp, Artificial Sequence
  Oligonucleotide primer for the detection of SNP TSC0024555
ccctactcatat

SEQ ID NO: 311562 - DNA, 12 bp, Artificial Sequence
  Oligonucleotide primer for the detection of SNP TSC0024555
gtttataaaagg

SEQ ID NO: 311563 - DNA, 12 bp, Artificial Sequence
  Oligonucleotide primer for the detection of SNP TSC0024556
taaccataaaca

SEQ ID NO: 311564 - DNA, 12 bp, Artificial Sequence
  Oligonucleotide primer for the detection of SNP TSC0024556
aggaaaatgaat

SEQ ID NO: 311565 - DNA, 12 bp, Artificial Sequence
  Oligonucleotide primer for the detection of SNP TSC0024556
tagttatgggta

SEQ ID NO: 311566 - DNA, 12 bp, Artificial Sequence
  Oligonucleotide primer for the detection of SNP TSC0024557
ttatcacaaata

SEQ ID NO: 311567 - DNA, 12 bp, Artificial Sequence
  Oligonucleotide primer for the detection of SNP TSC0024557
ttttattggttt

SEQ ID NO: 311568 - DNA, 12 bp, Artificial Sequence
  Oligonucleotide primer for the detection of SNP TSC0024557
ttattatagata

SEQ ID NO: 311569 - DNA, 12 bp, Artificial Sequence
  Oligonucleotide primer for the detection of SNP TSC0024559
aacctcttaaat

SEQ ID NO: 311570 - DNA, 12 bp, Artificial Sequence
  Oligonucleotide primer for the detection of SNP TSC0024559
gacctcttaaat

SEQ ID NO: 311571 - DNA, 12 bp, Artificial Sequence
  Oligonucleotide primer for the detection of SNP TSC0024559
ggtgtttaaaga

SEQ ID NO: 311572 - DNA, 12 bp, Artificial Sequence
  Oligonucleotide primer for the detection of SNP TSC0024559
ggttttttaaat

SEQ ID NO: 311573 - DNA, 12 bp, Artificial Sequence
  Oligonucleotide primer for the detection of SNP TSC0024560
tcaaaacaaatc

SEQ ID NO: 311574 - DNA, 12 bp, Artificial Sequence
  Oligonucleotide primer for the detection of SNP TSC0024560
tcaaaacgaatc

SEQ ID NO: 311575 - DNA, 12 bp, Artificial Sequence
  Oligonucleotide primer for the detection of SNP TSC0024560
taccccacccta

SEQ ID NO: 311576 - DNA, 12 bp, Artificial Sequence
  Oligonucleotide primer for the detection of SNP TSC0024560
ttaaggtgggtt

SEQ ID NO: 311577 - DNA, 12 bp, Artificial Sequence
  Oligonucleotide primer for the detection of SNP TSC0024560
ttaaggcgggtt

SEQ ID NO: 311578 - DNA, 12 bp, Artificial Sequence
  Oligonucleotide primer for the detection of SNP TSC0024561
caatacctcaaa

SEQ ID NO: 311579 - DNA, 12 bp, Artificial Sequence
  Oligonucleotide primer for the detection of SNP TSC0024561
ttttgggatttg

SEQ ID NO: 311580 - DNA, 12 bp, Artificial Sequence
  Oligonucleotide primer for the detection of SNP TSC0024561
ttttgggattcg

SEQ ID NO: 311581 - DNA, 12 bp, Artificial Sequence
  Oligonucleotide primer for the detection of SNP TSC0024561
ccctaaaaccca

SEQ ID NO: 311582 - DNA, 12 bp, Artificial Sequence
  Oligonucleotide primer for the detection of SNP TSC0024561
ccctaaaacccg

SEQ ID NO: 311583 - DNA, 12 bp, Artificial Sequence
  Oligonucleotide primer for the detection of SNP TSC0024561
tagtgttttaag

SEQ ID NO: 311584 - DNA, 12 bp, Artificial Sequence
  Oligonucleotide primer for the detection of SNP TSC0024562
tactataatctc

SEQ ID NO: 311585 - DNA, 12 bp, Artificial Sequence
  Oligonucleotide primer for the detection of SNP TSC0024562
gttagattttta

SEQ ID NO: 311586 - DNA, 12 bp, Artificial Sequence
  Oligonukleotid-Primer
accaaattttta

SEQ ID NO: 311587 - DNA, 12 bp, Artificial Sequence
  Oligonucleotide primer for the detection of SNP TSC0024562
tgttatgatttt

SEQ ID NO: 311588 - DNA, 12 bp, Artificial Sequence
  Oligonucleotide primer for the detection of SNP TSC0024563
cccacccaacta

SEQ ID NO: 311589 - DNA, 12 bp, Artificial Sequence
  Oligonucleotide primer for the detection of SNP TSC0024563
ttagattaggtg

SEQ ID NO: 311590 - DNA, 12 bp, Artificial Sequence
  Oligonukleotid-Primer
acctactccaac

SEQ ID NO: 311591 - DNA, 12 bp, Artificial Sequence
  Oligonucleotide primer for the detection of SNP TSC0024567
acctactccgac

SEQ ID NO: 311592 - DNA, 12 bp, Artificial Sequence
  Oligonucleotide primer for the detection of SNP TSC0024567
ggtaggttttag

SEQ ID NO: 311593 - DNA, 12 bp, Artificial Sequence
  Oligonucleotide primer for the detection of SNP TSC0024567
aacaaatttcaa

SEQ ID NO: 311594 - DNA, 12 bp, Artificial Sequence
  Oligonucleotide primer for the detection of SNP TSC0024568
caaaatatcacc

SEQ ID NO: 311595 - DNA, 12 bp, Artificial Sequence
  Oligonucleotide primer for the detection of SNP TSC0024568
aggtgggtatag

SEQ ID NO: 311596 - DNA, 12 bp, Artificial Sequence
  Oligonucleotide primer for the detection of SNP TSC0024569
ttaagcgatttt

SEQ ID NO: 311597 - DNA, 12 bp, Artificial Sequence
  Oligonucleotide primer for the detection of SNP TSC0024570
cctttaaatcac

SEQ ID NO: 311598 - DNA, 12 bp, Artificial Sequence
  Oligonucleotide primer for the detection of SNP TSC0024570
aatatagaatga

SEQ ID NO: 311599 - DNA, 12 bp, Artificial Sequence
  Oligonucleotide primer for the detection of SNP TSC0024570
aacacaaaataa

SEQ ID NO: 311600 - DNA, 12 bp, Artificial Sequence
  Oligonucleotide primer for the detection of SNP TSC0024570
tttttaaattat

SEQ ID NO: 311601 - DNA, 12 bp, Artificial Sequence
  Oligonucleotide primer for the detection of SNP TSC0024570
tttttaaattac

SEQ ID NO: 311602 - DNA, 12 bp, Artificial Sequence
  Oligonucleotide primer for the detection of SNP TSC0024571
ctataaatcctc

SEQ ID NO: 311603 - DNA, 12 bp, Artificial Sequence
  Oligonucleotide primer for the detection of SNP TSC0024571
ttgagttttgtg

SEQ ID NO: 311604 - DNA, 12 bp, Artificial Sequence
  Oligonucleotide primer for the detection of SNP TSC0024573
gttatgttggtg

SEQ ID NO: 311605 - DNA, 12 bp, Artificial Sequence
  Oligonucleotide primer for the detection of SNP TSC0024573
accatactaata

SEQ ID NO: 311606 - DNA, 12 bp, Artificial Sequence
  Oligonucleotide primer for the detection of SNP TSC0024573
attagtgggtgt

SEQ ID NO: 311607 - DNA, 12 bp, Artificial Sequence
  Oligonucleotide primer for the detection of SNP TSC0024577
aaataatttcat

SEQ ID NO: 311608 - DNA, 12 bp, Artificial Sequence
  Oligonucleotide primer for the detection of SNP TSC0024577
aaatgagttttg

SEQ ID NO: 311609 - DNA, 12 bp, Artificial Sequence
  Oligonucleotide primer for the detection of SNP TSC0024577
aaacgagttttg

SEQ ID NO: 311610 - DNA, 12 bp, Artificial Sequence
  Oligonucleotide primer for the detection of SNP TSC0024577
aaatgagtttcg

SEQ ID NO: 311611 - DNA, 12 bp, Artificial Sequence
  Oligonucleotide primer for the detection of SNP TSC0024577
aaacgagtttcg

SEQ ID NO: 311612 - DNA, 12 bp, Artificial Sequence
  Oligonucleotide primer for the detection of SNP TSC0024578
ctaattactatt

SEQ ID NO: 311613 - DNA, 12 bp, Artificial Sequence
  Oligonucleotide primer for the detection of SNP TSC0024578
aaggagtttgtt

SEQ ID NO: 311614 - DNA, 12 bp, Artificial Sequence
  Oligonucleotide primer for the detection of SNP TSC0024578
aaaaaacctatt

SEQ ID NO: 311615 - DNA, 12 bp, Artificial Sequence
  Oligonucleotide primer for the detection of SNP TSC0024579
actccaaaatct

SEQ ID NO: 311616 - DNA, 12 bp, Artificial Sequence
  Oligonucleotide primer for the detection of SNP TSC0024579
tttttaaggata

SEQ ID NO: 311617 - DNA, 12 bp, Artificial Sequence
  Oligonucleotide primer for the detection of SNP TSC0024580
acttctcctcca

SEQ ID NO: 311618 - DNA, 12 bp, Artificial Sequence
  Oligonucleotide primer for the detection of SNP TSC0024580
gcttctcctcca

SEQ ID NO: 311619 - DNA, 12 bp, Artificial Sequence
  Oligonucleotide primer for the detection of SNP TSC0024580
agattatgtaga

SEQ ID NO: 311620 - DNA, 12 bp, Artificial Sequence
  Oligonucleotide primer for the detection of SNP TSC0024580
tcatataaaaaa

SEQ ID NO: 311621 - DNA, 12 bp, Artificial Sequence
  Oligonucleotide primer for the detection of SNP TSC0024581
tccaccctaacc

SEQ ID NO: 311622 - DNA, 12 bp, Artificial Sequence
  Oligonucleotide primer for the detection of SNP TSC0024581
ggtatttattta

SEQ ID NO: 311623 - DNA, 12 bp, Artificial Sequence
  Oligonucleotide primer for the detection of SNP TSC0024586
catcatcataac

SEQ ID NO: 311624 - DNA, 12 bp, Artificial Sequence
  Oligonucleotide primer for the detection of SNP TSC0024586
ggatttaataaa

SEQ ID NO: 311625 - DNA, 12 bp, Artificial Sequence
  Oligonucleotide primer for the detection of SNP TSC0024586
aaattcaataaa

SEQ ID NO: 311626 - DNA, 12 bp, Artificial Sequence
  Oligonucleotide primer for the detection of SNP TSC0024586
tattattatagt

SEQ ID NO: 311627 - DNA, 12 bp, Artificial Sequence
  Oligonucleotide primer for the detection of SNP TSC0024587
aatacccatcca

SEQ ID NO: 311628 - DNA, 12 bp, Artificial Sequence
  Oligonucleotide primer for the detection of SNP TSC0024587
gtgggtttggat

SEQ ID NO: 311629 - DNA, 12 bp, Artificial Sequence
  Oligonucleotide primer for the detection of SNP TSC0024587
aataaacctaaa

SEQ ID NO: 311630 - DNA, 12 bp, Artificial Sequence
  Oligonucleotide primer for the detection of SNP TSC0024587
gtgtttatttat

SEQ ID NO: 311631 - DNA, 12 bp, Artificial Sequence
  Oligonucleotide primer for the detection of SNP TSC0024588
cattccaaaata

SEQ ID NO: 311632 - DNA, 12 bp, Artificial Sequence
  Oligonucleotide primer for the detection of SNP TSC0024588
atagtattgggt

SEQ ID NO: 311633 - DNA, 12 bp, Artificial Sequence
  Oligonucleotide primer for the detection of SNP TSC0024588
ataacactaaac

SEQ ID NO: 311634 - DNA, 12 bp, Artificial Sequence
  Oligonucleotide primer for the detection of SNP TSC0024588
ttattttaaaat

SEQ ID NO: 311635 - DNA, 12 bp, Artificial Sequence
  Oligonucleotide primer for the detection of SNP TSC0024589
aaatcaacccct

SEQ ID NO: 311636 - DNA, 12 bp, Artificial Sequence
  Oligonucleotide primer for the detection of SNP TSC0024589
ggtgttggttga

SEQ ID NO: 311637 - DNA, 12 bp, Artificial Sequence
  Oligonucleotide primer for the detection of SNP TSC0024590
actcatacacat

SEQ ID NO: 311638 - DNA, 12 bp, Artificial Sequence
  Oligonucleotide primer for the detection of SNP TSC0024590
aagttagagtag

SEQ ID NO: 311639 - DNA, 12 bp, Artificial Sequence
  Oligonucleotide primer for the detection of SNP TSC0024593
taacaccacaaa

SEQ ID NO: 311640 - DNA, 12 bp, Artificial Sequence
  Oligonucleotide primer for the detection of SNP TSC0024593
aattaatagtta

SEQ ID NO: 311641 - DNA, 12 bp, Artificial Sequence
  Oligonucleotide primer for the detection of SNP TSC0024593
aactaataacta

SEQ ID NO: 311642 - DNA, 12 bp, Artificial Sequence
  Oligonucleotide primer for the detection of SNP TSC0024593
ttgtaatattat

SEQ ID NO: 311643 - DNA, 12 bp, Artificial Sequence
  Oligonucleotide primer for the detection of SNP TSC0024594
agatattttgga

SEQ ID NO: 311644 - DNA, 12 bp, Artificial Sequence
  Oligonucleotide primer for the detection of SNP TSC0024594
aaatattttaaa

SEQ ID NO: 311645 - DNA, 12 bp, Artificial Sequence
  Oligonucleotide primer for the detection of SNP TSC0024594
taataaaaaatt

SEQ ID NO: 311646 - DNA, 12 bp, Artificial Sequence
  Oligonucleotide primer for the detection of SNP TSC0024596
atattttccaac

SEQ ID NO: 311647 - DNA, 12 bp, Artificial Sequence
  Oligonucleotide primer for the detection of SNP TSC0024596
aggtggggtggg

SEQ ID NO: 311648 - DNA, 12 bp, Artificial Sequence
  Oligonucleotide primer for the detection of SNP TSC0024596
aggtggggcggg

SEQ ID NO: 311649 - DNA, 12 bp, Artificial Sequence
  Oligonucleotide primer for the detection of SNP TSC0024596
aaataaaacgaa

SEQ ID NO: 311650 - DNA, 12 bp, Artificial Sequence
  Oligonucleotide primer for the detection of SNP TSC0024596
atgttttttaat

SEQ ID NO: 311651 - DNA, 12 bp, Artificial Sequence
  Oligonucleotide primer for the detection of SNP TSC0024596
atgttttttaac

SEQ ID NO: 311652 - DNA, 12 bp, Artificial Sequence
  Oligonucleotide primer for the detection of SNP TSC0024599
acaaaccccatc

SEQ ID NO: 311653 - DNA, 12 bp, Artificial Sequence
  Oligonucleotide primer for the detection of SNP TSC0024599
acaaaccccgtc

SEQ ID NO: 311654 - DNA, 12 bp, Artificial Sequence
  Oligonucleotide primer for the detection of SNP TSC0024599
tttgggaggtgg

SEQ ID NO: 311655 - DNA, 12 bp, Artificial Sequence
  Oligonucleotide primer for the detection of SNP TSC0024599
gtaaattttgtt

SEQ ID NO: 311656 - DNA, 12 bp, Artificial Sequence
  Oligonucleotide primer for the detection of SNP TSC0024599
gtaaatttcgtt

SEQ ID NO: 311657 - DNA, 12 bp, Artificial Sequence
  Oligonucleotide primer for the detection of SNP TSC0024601
accattatatct

SEQ ID NO: 311658 - DNA, 12 bp, Artificial Sequence
  Oligonucleotide primer for the detection of SNP TSC0024601
taaaattgatta

SEQ ID NO: 311659 - DNA, 12 bp, Artificial Sequence
  Oligonucleotide primer for the detection of SNP TSC0024602
aaataaacaatc

SEQ ID NO: 311660 - DNA, 12 bp, Artificial Sequence
  Oligonucleotide primer for the detection of SNP TSC0024602
aaataaacgatc

SEQ ID NO: 311661 - DNA, 12 bp, Artificial Sequence
  Oligonucleotide primer for the detection of SNP TSC0024602
agttatattgtg

SEQ ID NO: 311662 - DNA, 12 bp, Artificial Sequence
  Oligonucleotide primer for the detection of SNP TSC0024602
agttatatcgtg

SEQ ID NO: 311663 - DNA, 12 bp, Artificial Sequence
  Oligonucleotide primer for the detection of SNP TSC0024605
tgagtttatttt

SEQ ID NO: 311664 - DNA, 12 bp, Artificial Sequence
  Oligonucleotide primer for the detection of SNP TSC0024605
tgagtttatttc

SEQ ID NO: 311665 - DNA, 12 bp, Artificial Sequence
  Oligonucleotide primer for the detection of SNP TSC0024605
taaacccatttc

SEQ ID NO: 311666 - DNA, 12 bp, Artificial Sequence
  Oligonucleotide primer for the detection of SNP TSC0024605
aaagatattaat

SEQ ID NO: 311667 - DNA, 12 bp, Artificial Sequence
  Oligonucleotide primer for the detection of SNP TSC0024606
aacaataccaac

SEQ ID NO: 311668 - DNA, 12 bp, Artificial Sequence
  Oligonucleotide primer for the detection of SNP TSC0024606
ggaaagttttta

SEQ ID NO: 311669 - DNA, 12 bp, Artificial Sequence
  Oligonucleotide primer for the detection of SNP TSC0024607
aaattacaccac

SEQ ID NO: 311670 - DNA, 12 bp, Artificial Sequence
  Oligonucleotide primer for the detection of SNP TSC0024607
aaattacgccac

SEQ ID NO: 311671 - DNA, 12 bp, Artificial Sequence
  Oligonukleotid-Primer
taggatgaagtg

SEQ ID NO: 311672 - DNA, 12 bp, Artificial Sequence
  Oligonucleotide primer for the detection of SNP TSC0024607
caaaataaaata

SEQ ID NO: 311673 - DNA, 12 bp, Artificial Sequence
  Oligonucleotide primer for the detection of SNP TSC0024611
tctcccctcccc

SEQ ID NO: 311674 - DNA, 12 bp, Artificial Sequence
  Oligonucleotide primer for the detection of SNP TSC0024611
ttagaggggaag

SEQ ID NO: 311675 - DNA, 12 bp, Artificial Sequence
  Oligonukleotid-Primer
ccaatccatcac

SEQ ID NO: 311676 - DNA, 12 bp, Artificial Sequence
  Oligonucleotide primer for the detection of SNP TSC0024612
ccgatccatcac

SEQ ID NO: 311677 - DNA, 12 bp, Artificial Sequence
  Oligonucleotide primer for the detection of SNP TSC0024612
aaaattttgaga

SEQ ID NO: 311678 - DNA, 12 bp, Artificial Sequence
  Oligonucleotide primer for the detection of SNP TSC0024615
tctcaccctcct

SEQ ID NO: 311679 - DNA, 12 bp, Artificial Sequence
  Oligonucleotide primer for the detection of SNP TSC0024615
ttgtgaagttta

SEQ ID NO: 311680 - DNA, 12 bp, Artificial Sequence
  Oligonucleotide primer for the detection of SNP TSC0024615
tcgtgaagttta

SEQ ID NO: 311681 - DNA, 12 bp, Artificial Sequence
  Oligonucleotide primer for the detection of SNP TSC0024616
agtaagaagaag

SEQ ID NO: 311682 - DNA, 12 bp, Artificial Sequence
  Oligonucleotide primer for the detection of SNP TSC0024617
tttaaaggatta

SEQ ID NO: 311683 - DNA, 12 bp, Artificial Sequence
  Oligonukleotid-Primer
cacacctaacta

SEQ ID NO: 311684 - DNA, 12 bp, Artificial Sequence
  Oligonucleotide primer for the detection of SNP TSC0024618
cacgcctaacta

SEQ ID NO: 311685 - DNA, 12 bp, Artificial Sequence
  Oligonucleotide primer for the detection of SNP TSC0024621
acccaaccattt

SEQ ID NO: 311686 - DNA, 12 bp, Artificial Sequence
  Oligonucleotide primer for the detection of SNP TSC0024621
tttaggggtata

SEQ ID NO: 311687 - DNA, 12 bp, Artificial Sequence
  Oligonukleotid-Primer
taaatcccaacc

SEQ ID NO: 311688 - DNA, 12 bp, Artificial Sequence
  Oligonucleotide primer for the detection of SNP TSC0024622
gaaaaatataga

SEQ ID NO: 311689 - DNA, 12 bp, Artificial Sequence
  Oligonucleotide primer for the detection of SNP TSC0024623
acaaaaaaaaac

SEQ ID NO: 311690 - DNA, 12 bp, Artificial Sequence
  Oligonucleotide primer for the detection of SNP TSC0024623
ctatttctatta

SEQ ID NO: 311691 - DNA, 12 bp, Artificial Sequence
  Oligonucleotide primer for the detection of SNP TSC0024623
ataaaaggaaat

SEQ ID NO: 311692 - DNA, 12 bp, Artificial Sequence
  Oligonucleotide primer for the detection of SNP TSC0024624
aaaaatttaata

SEQ ID NO: 311693 - DNA, 12 bp, Artificial Sequence
  Oligonucleotide primer for the detection of SNP TSC0024624
gaaatttttagt

SEQ ID NO: 311694 - DNA, 12 bp, Artificial Sequence
  Oligonucleotide primer for the detection of SNP TSC0024624
gaaatttttagc

SEQ ID NO: 311695 - DNA, 12 bp, Artificial Sequence
  Oligonucleotide primer for the detection of SNP TSC0024624
aaaaccctcaac

SEQ ID NO: 311696 - DNA, 12 bp, Artificial Sequence
  Oligonucleotide primer for the detection of SNP TSC0024624
aaggatttaatg

SEQ ID NO: 311697 - DNA, 12 bp, Artificial Sequence
  Oligonucleotide primer for the detection of SNP TSC0024630
aaaaaaacctat

SEQ ID NO: 311698 - DNA, 12 bp, Artificial Sequence
  Oligonucleotide primer for the detection of SNP TSC0024630
tttttgtttagg

SEQ ID NO: 311699 - DNA, 12 bp, Artificial Sequence
  Oligonucleotide primer for the detection of SNP TSC0024630
ttttcgtttagg

SEQ ID NO: 311700 - DNA, 12 bp, Artificial Sequence
  Oligonucleotide primer for the detection of SNP TSC0024630
ctcccacccaaa

SEQ ID NO: 311701 - DNA, 12 bp, Artificial Sequence
  Oligonucleotide primer for the detection of SNP TSC0024630
ctcccgcccaaa

SEQ ID NO: 311702 - DNA, 12 bp, Artificial Sequence
  Oligonucleotide primer for the detection of SNP TSC0024630
aaaggagtttgt

SEQ ID NO: 311703 - DNA, 12 bp, Artificial Sequence
  Oligonucleotide primer for the detection of SNP TSC0024631
aaaacatcctaa

SEQ ID NO: 311704 - DNA, 12 bp, Artificial Sequence
  Oligonucleotide primer for the detection of SNP TSC0024631
gaaacatcctaa

SEQ ID NO: 311705 - DNA, 12 bp, Artificial Sequence
  Oligonucleotide primer for the detection of SNP TSC0024631
ggaggaaagttt

SEQ ID NO: 311706 - DNA, 12 bp, Artificial Sequence
  Oligonucleotide primer for the detection of SNP TSC0024631
ggaggaaagttc

SEQ ID NO: 311707 - DNA, 12 bp, Artificial Sequence
  Oligonucleotide primer for the detection of SNP TSC0024631
gaggtattttag

SEQ ID NO: 311708 - DNA, 12 bp, Artificial Sequence
  Oligonucleotide primer for the detection of SNP TSC0024632
acataataataa

SEQ ID NO: 311709 - DNA, 12 bp, Artificial Sequence
  Oligonucleotide primer for the detection of SNP TSC0024632
gtatggtggtgg

SEQ ID NO: 311710 - DNA, 12 bp, Artificial Sequence
  Oligonucleotide primer for the detection of SNP TSC0024634
aaaaactacaat

SEQ ID NO: 311711 - DNA, 12 bp, Artificial Sequence
  Oligonucleotide primer for the detection of SNP TSC0024634
gaaatgatagtg

SEQ ID NO: 311712 - DNA, 12 bp, Artificial Sequence
  Oligonucleotide primer for the detection of SNP TSC0024637
taaaatcaccac

SEQ ID NO: 311713 - DNA, 12 bp, Artificial Sequence
  Oligonucleotide primer for the detection of SNP TSC0024637
gtttatgtgtta

SEQ ID NO: 311714 - DNA, 12 bp, Artificial Sequence
  Oligonucleotide primer for the detection of SNP TSC0024637
atttatatatca

SEQ ID NO: 311715 - DNA, 12 bp, Artificial Sequence
  Oligonucleotide primer for the detection of SNP TSC0024637
tgaagttattat

SEQ ID NO: 311716 - DNA, 12 bp, Artificial Sequence
  Oligonucleotide primer for the detection of SNP TSC0024643
tcccttatccta

SEQ ID NO: 311717 - DNA, 12 bp, Artificial Sequence
  Oligonucleotide primer for the detection of SNP TSC0024643
ttttttaatcta

SEQ ID NO: 311718 - DNA, 12 bp, Artificial Sequence
  Oligonucleotide primer for the detection of SNP TSC0024646
cctccaaaacta

SEQ ID NO: 311719 - DNA, 12 bp, Artificial Sequence
  Oligonucleotide primer for the detection of SNP TSC0024646
ggagagagaatt

SEQ ID NO: 311720 - DNA, 12 bp, Artificial Sequence
  Oligonucleotide primer for the detection of SNP TSC0024646
tttttaaagttg

SEQ ID NO: 311721 - DNA, 12 bp, Artificial Sequence
  Oligonucleotide primer for the detection of SNP TSC0024649
aaaatacatacc

SEQ ID NO: 311722 - DNA, 12 bp, Artificial Sequence
  Oligonucleotide primer for the detection of SNP TSC0024649
tgttttttaatg

SEQ ID NO: 311723 - DNA, 12 bp, Artificial Sequence
  Oligonucleotide primer for the detection of SNP TSC0024649
cgttttttaatg

SEQ ID NO: 311724 - DNA, 12 bp, Artificial Sequence
  Oligonucleotide primer for the detection of SNP TSC0024650
ttataaaaccac

SEQ ID NO: 311725 - DNA, 12 bp, Artificial Sequence
  Oligonucleotide primer for the detection of SNP TSC0024650
atgggagtggga

SEQ ID NO: 311726 - DNA, 12 bp, Artificial Sequence
  Oligonucleotide primer for the detection of SNP TSC0024652
ttaggagtttgg

SEQ ID NO: 311727 - DNA, 12 bp, Artificial Sequence
  Oligonucleotide primer for the detection of SNP TSC0024653
aaaaaacccgac

SEQ ID NO: 311728 - DNA, 12 bp, Artificial Sequence
  Oligonucleotide primer for the detection of SNP TSC0024653
ggatgattgttg

SEQ ID NO: 311729 - DNA, 12 bp, Artificial Sequence
  Oligonucleotide primer for the detection of SNP TSC0024653
ggatgatcgttg

SEQ ID NO: 311730 - DNA, 12 bp, Artificial Sequence
  Oligonucleotide primer for the detection of SNP TSC0024653
aaataaccgcta

SEQ ID NO: 311731 - DNA, 12 bp, Artificial Sequence
  Oligonucleotide primer for the detection of SNP TSC0024653
ggggagtttgat

SEQ ID NO: 311732 - DNA, 12 bp, Artificial Sequence
  Oligonucleotide primer for the detection of SNP TSC0024653
ggggagttcgat

SEQ ID NO: 311733 - DNA, 12 bp, Artificial Sequence
  Oligonucleotide primer for the detection of SNP TSC0024655
ctccacccctct

SEQ ID NO: 311734 - DNA, 12 bp, Artificial Sequence
  Oligonucleotide primer for the detection of SNP TSC0024655
gtagattttttg

SEQ ID NO: 311735 - DNA, 12 bp, Artificial Sequence
  Oligonucleotide primer for the detection of SNP TSC0024656
ttaaacaatata

SEQ ID NO: 311736 - DNA, 12 bp, Artificial Sequence
  Oligonucleotide primer for the detection of SNP TSC0024656
tagagtaggatt

SEQ ID NO: 311737 - DNA, 12 bp, Artificial Sequence
  Oligonucleotide primer for the detection of SNP TSC0024656
attgaatagtgt

SEQ ID NO: 311738 - DNA, 12 bp, Artificial Sequence
  Oligonucleotide primer for the detection of SNP TSC0024662
aaaattcaaact

SEQ ID NO: 311739 - DNA, 12 bp, Artificial Sequence
  Oligonucleotide primer for the detection of SNP TSC0024662
ttgatttgggta

SEQ ID NO: 311740 - DNA, 12 bp, Artificial Sequence
  Oligonucleotide primer for the detection of SNP TSC0024663
ctctaaacaaca

SEQ ID NO: 311741 - DNA, 12 bp, Artificial Sequence
  Oligonucleotide primer for the detection of SNP TSC0024663
ttttttaattgt

SEQ ID NO: 311742 - DNA, 12 bp, Artificial Sequence
  Oligonucleotide primer for the detection of SNP TSC0024663
cttaactataaa

SEQ ID NO: 311743 - DNA, 12 bp, Artificial Sequence
  Oligonucleotide primer for the detection of SNP TSC0024663
ttttgggtagta

SEQ ID NO: 311744 - DNA, 12 bp, Artificial Sequence
  Oligonucleotide primer for the detection of SNP TSC0024664
ttatactttatc

SEQ ID NO: 311745 - DNA, 12 bp, Artificial Sequence
  Oligonucleotide primer for the detection of SNP TSC0024664
ggaaatggatgg

SEQ ID NO: 311746 - DNA, 12 bp, Artificial Sequence
  Oligonucleotide primer for the detection of SNP TSC0024665
aaaaacttcaat

SEQ ID NO: 311747 - DNA, 12 bp, Artificial Sequence
  Oligonucleotide primer for the detection of SNP TSC0024665
tgggtgttttta

SEQ ID NO: 311748 - DNA, 12 bp, Artificial Sequence
  Oligonucleotide primer for the detection of SNP TSC0024665
cgggtgttttta

SEQ ID NO: 311749 - DNA, 12 bp, Artificial Sequence
  Oligonucleotide primer for the detection of SNP TSC0024665
tgggcgttttta

SEQ ID NO: 311750 - DNA, 12 bp, Artificial Sequence
  Oligonucleotide primer for the detection of SNP TSC0024665
cgggcgttttta

SEQ ID NO: 311751 - DNA, 12 bp, Artificial Sequence
  Oligonucleotide primer for the detection of SNP TSC0024666
aataaataattt

SEQ ID NO: 311752 - DNA, 12 bp, Artificial Sequence
  Oligonucleotide primer for the detection of SNP TSC0024666
gttggaaatgta

SEQ ID NO: 311753 - DNA, 12 bp, Artificial Sequence
  Oligonucleotide primer for the detection of SNP TSC0024667
tctatactataa

SEQ ID NO: 311754 - DNA, 12 bp, Artificial Sequence
  Oligonucleotide primer for the detection of SNP TSC0024667
ttttggagttgt

SEQ ID NO: 311755 - DNA, 12 bp, Artificial Sequence
  Oligonucleotide primer for the detection of SNP TSC0024667
ccctaaaattac

SEQ ID NO: 311756 - DNA, 12 bp, Artificial Sequence
  Oligonucleotide primer for the detection of SNP TSC0024667
tttgtattatga

SEQ ID NO: 311757 - DNA, 12 bp, Artificial Sequence
  Oligonucleotide primer for the detection of SNP TSC0024671
catctctattac

SEQ ID NO: 311758 - DNA, 12 bp, Artificial Sequence
  Oligonucleotide primer for the detection of SNP TSC0024671
atggggggtagg

SEQ ID NO: 311759 - DNA, 12 bp, Artificial Sequence
  Oligonucleotide primer for the detection of SNP TSC0024672
ggtttggagttg

SEQ ID NO: 311760 - DNA, 12 bp, Artificial Sequence
  Oligonucleotide primer for the detection of SNP TSC0024674
aatcaaaaactc

SEQ ID NO: 311761 - DNA, 12 bp, Artificial Sequence
  Oligonucleotide primer for the detection of SNP TSC0024674
tgtgtttaggag

SEQ ID NO: 311762 - DNA, 12 bp, Artificial Sequence
  Oligonucleotide primer for the detection of SNP TSC0024674
gattaagggttt

SEQ ID NO: 311763 - DNA, 12 bp, Artificial Sequence
  Oligonucleotide primer for the detection of SNP TSC0024675
atcttacccaat

SEQ ID NO: 311764 - DNA, 12 bp, Artificial Sequence
  Oligonucleotide primer for the detection of SNP TSC0024675
gtttattgagag

SEQ ID NO: 311765 - DNA, 12 bp, Artificial Sequence
  Oligonucleotide primer for the detection of SNP TSC0024679
cacaaacataca

SEQ ID NO: 311766 - DNA, 12 bp, Artificial Sequence
  Oligonucleotide primer for the detection of SNP TSC0024679
atatatataatt

SEQ ID NO: 311767 - DNA, 12 bp, Artificial Sequence
  Oligonucleotide primer for the detection of SNP TSC0024679
acacacacaatt

SEQ ID NO: 311768 - DNA, 12 bp, Artificial Sequence
  Oligonucleotide primer for the detection of SNP TSC0024679
tataaatatgta

SEQ ID NO: 311769 - DNA, 12 bp, Artificial Sequence
  Oligonucleotide primer for the detection of SNP TSC0024681
ctcccaaccttc

SEQ ID NO: 311770 - DNA, 12 bp, Artificial Sequence
  Oligonucleotide primer for the detection of SNP TSC0024681
ctcccgaccttc

SEQ ID NO: 311771 - DNA, 12 bp, Artificial Sequence
  Oligonucleotide primer for the detection of SNP TSC0024681
gttttggggggg

SEQ ID NO: 311772 - DNA, 12 bp, Artificial Sequence
  Oligonucleotide primer for the detection of SNP TSC0024681
tttcgatttttt

SEQ ID NO: 311773 - DNA, 12 bp, Artificial Sequence
  Oligonucleotide primer for the detection of SNP TSC0024683
taaaaccaaact

SEQ ID NO: 311774 - DNA, 12 bp, Artificial Sequence
  Oligonucleotide primer for the detection of SNP TSC0024683
ttttgttaaatg

SEQ ID NO: 311775 - DNA, 12 bp, Artificial Sequence
  Oligonucleotide primer for the detection of SNP TSC0024686
cataatattaac

SEQ ID NO: 311776 - DNA, 12 bp, Artificial Sequence
  Oligonucleotide primer for the detection of SNP TSC0024686
cgtaatattaac

SEQ ID NO: 311777 - DNA, 12 bp, Artificial Sequence
  Oligonucleotide primer for the detection of SNP TSC0024686
aatttttgagag

SEQ ID NO: 311778 - DNA, 12 bp, Artificial Sequence
  Oligonucleotide primer for the detection of SNP TSC0024687
cataaaaacaaa

SEQ ID NO: 311779 - DNA, 12 bp, Artificial Sequence
  Oligonucleotide primer for the detection of SNP TSC0024687
gatgttggtttt

SEQ ID NO: 311780 - DNA, 12 bp, Artificial Sequence
  Oligonucleotide primer for the detection of SNP TSC0024687
aaaatattaatc

SEQ ID NO: 311781 - DNA, 12 bp, Artificial Sequence
  Oligonucleotide primer for the detection of SNP TSC0024687
tatgaggatagg

SEQ ID NO: 311782 - DNA, 12 bp, Artificial Sequence
  Oligonucleotide primer for the detection of SNP TSC0024688
cactctaaaaaa

SEQ ID NO: 311783 - DNA, 12 bp, Artificial Sequence
  Oligonucleotide primer for the detection of SNP TSC0024688
gtattttgttat

SEQ ID NO: 311784 - DNA, 12 bp, Artificial Sequence
  Oligonucleotide primer for the detection of SNP TSC0024693
aataaacaacac

SEQ ID NO: 311785 - DNA, 12 bp, Artificial Sequence
  Oligonucleotide primer for the detection of SNP TSC0024693
aataaacaacgc

SEQ ID NO: 311786 - DNA, 12 bp, Artificial Sequence
  Oligonucleotide primer for the detection of SNP TSC0024693
aataaacgacac

SEQ ID NO: 311787 - DNA, 12 bp, Artificial Sequence
  Oligonucleotide primer for the detection of SNP TSC0024693
gataaacaacac

SEQ ID NO: 311788 - DNA, 12 bp, Artificial Sequence
  Oligonukleotid-Primer
aataaacgacgc

SEQ ID NO: 311789 - DNA, 12 bp, Artificial Sequence
  Oligonucleotide primer for the detection of SNP TSC0024693
gataaacaacgc

SEQ ID NO: 311790 - DNA, 12 bp, Artificial Sequence
  Oligonucleotide primer for the detection of SNP TSC0024693
gataaacgacac

SEQ ID NO: 311791 - DNA, 12 bp, Artificial Sequence
  Oligonucleotide primer for the detection of SNP TSC0024693
gataaacgacgc

SEQ ID NO: 311792 - DNA, 12 bp, Artificial Sequence
  Oligonucleotide primer for the detection of SNP TSC0024693
attagggttgtg

SEQ ID NO: 311793 - DNA, 12 bp, Artificial Sequence
  Oligonucleotide primer for the detection of SNP TSC0024693
atcaaaactata

SEQ ID NO: 311794 - DNA, 12 bp, Artificial Sequence
  Oligonucleotide primer for the detection of SNP TSC0024693
ggtgggtggtgt

SEQ ID NO: 311795 - DNA, 12 bp, Artificial Sequence
  Oligonucleotide primer for the detection of SNP TSC0024693
ggtgggcggtgt

SEQ ID NO: 311796 - DNA, 12 bp, Artificial Sequence
  Oligonucleotide primer for the detection of SNP TSC0024693
ggtgggtggcgt

SEQ ID NO: 311797 - DNA, 12 bp, Artificial Sequence
  Oligonucleotide primer for the detection of SNP TSC0024693
ggtgggcggcgt

SEQ ID NO: 311798 - DNA, 12 bp, Artificial Sequence
  Oligonucleotide primer for the detection of SNP TSC0024694
taatttttttct

SEQ ID NO: 311799 - DNA, 12 bp, Artificial Sequence
  Oligonucleotide primer for the detection of SNP TSC0024694
aagattatagat

SEQ ID NO: 311800 - DNA, 12 bp, Artificial Sequence
  Oligonucleotide primer for the detection of SNP TSC0024697
aaaatacaatcc

SEQ ID NO: 311801 - DNA, 12 bp, Artificial Sequence
  Oligonucleotide primer for the detection of SNP TSC0024697
aaaatacgatcc

SEQ ID NO: 311802 - DNA, 12 bp, Artificial Sequence
  Oligonucleotide primer for the detection of SNP TSC0024698
attactatacac

SEQ ID NO: 311803 - DNA, 12 bp, Artificial Sequence
  Oligonucleotide primer for the detection of SNP TSC0024698
agatgtatattg

SEQ ID NO: 311804 - DNA, 12 bp, Artificial Sequence
  Oligonucleotide primer for the detection of SNP TSC0024698
aaatacacacta

SEQ ID NO: 311805 - DNA, 12 bp, Artificial Sequence
  Oligonucleotide primer for the detection of SNP TSC0024698
gttgttgtgtat

SEQ ID NO: 311806 - DNA, 12 bp, Artificial Sequence
  Oligonucleotide primer for the detection of SNP TSC0024701
tcaattaaaaac

SEQ ID NO: 311807 - DNA, 12 bp, Artificial Sequence
  Oligonucleotide primer for the detection of SNP TSC0024701
tgggggaatgtt

SEQ ID NO: 311808 - DNA, 12 bp, Artificial Sequence
  Oligonucleotide primer for the detection of SNP TSC0024701
taaaaaaatact

SEQ ID NO: 311809 - DNA, 12 bp, Artificial Sequence
  Oligonucleotide primer for the detection of SNP TSC0024701
ttagttggagat

SEQ ID NO: 311810 - DNA, 12 bp, Artificial Sequence
  Oligonucleotide primer for the detection of SNP TSC0024702
cattcctacaaa

SEQ ID NO: 311811 - DNA, 12 bp, Artificial Sequence
  Oligonucleotide primer for the detection of SNP TSC0024702
cgttcctacaaa

SEQ ID NO: 311812 - DNA, 12 bp, Artificial Sequence
  Oligonucleotide primer for the detection of SNP TSC0024702
aggttttttatt

SEQ ID NO: 311813 - DNA, 12 bp, Artificial Sequence
  Oligonucleotide primer for the detection of SNP TSC0024702
caaactcttcac

SEQ ID NO: 311814 - DNA, 12 bp, Artificial Sequence
  Oligonucleotide primer for the detection of SNP TSC0024702
agttgtttttgt

SEQ ID NO: 311815 - DNA, 12 bp, Artificial Sequence
  Oligonucleotide primer for the detection of SNP TSC0024702
agtcgtttttgt

SEQ ID NO: 311816 - DNA, 12 bp, Artificial Sequence
  Oligonucleotide primer for the detection of SNP TSC0024703
aatactaaccta

SEQ ID NO: 311817 - DNA, 12 bp, Artificial Sequence
  Oligonucleotide primer for the detection of SNP TSC0024703
ttgttgtttgtt

SEQ ID NO: 311818 - DNA, 12 bp, Artificial Sequence
  Oligonucleotide primer for the detection of SNP TSC0024703
ttattatctacc

SEQ ID NO: 311819 - DNA, 12 bp, Artificial Sequence
  Oligonucleotide primer for the detection of SNP TSC0024703
agtgttggtttg

SEQ ID NO: 311820 - DNA, 12 bp, Artificial Sequence
  Oligonucleotide primer for the detection of SNP TSC0024704
catctctacaaa

SEQ ID NO: 311821 - DNA, 12 bp, Artificial Sequence
  Oligonucleotide primer for the detection of SNP TSC0024704
tttagaggggtt

SEQ ID NO: 311822 - DNA, 12 bp, Artificial Sequence
  Oligonucleotide primer for the detection of SNP TSC0024704
aactcaaaaaaa

SEQ ID NO: 311823 - DNA, 12 bp, Artificial Sequence
  Oligonucleotide primer for the detection of SNP TSC0024704
tatttttgtaga

SEQ ID NO: 311824 - DNA, 12 bp, Artificial Sequence
  Oligonucleotide primer for the detection of SNP TSC0024707
caaaaatcccat

SEQ ID NO: 311825 - DNA, 12 bp, Artificial Sequence
  Oligonucleotide primer for the detection of SNP TSC0024707
caaaaatcccgt

SEQ ID NO: 311826 - DNA, 12 bp, Artificial Sequence
  Oligonucleotide primer for the detection of SNP TSC0024714
acatttatcaat

SEQ ID NO: 311827 - DNA, 12 bp, Artificial Sequence
  Oligonucleotide primer for the detection of SNP TSC0024714
ttggttttaaag

SEQ ID NO: 311828 - DNA, 12 bp, Artificial Sequence
  Oligonucleotide primer for the detection of SNP TSC0024715
aatcttacttta

SEQ ID NO: 311829 - DNA, 12 bp, Artificial Sequence
  Oligonucleotide primer for the detection of SNP TSC0024716
aactcatcacta

SEQ ID NO: 311830 - DNA, 12 bp, Artificial Sequence
  Oligonucleotide primer for the detection of SNP TSC0024716
aatatatgaagt

SEQ ID NO: 311831 - DNA, 12 bp, Artificial Sequence
  Oligonucleotide primer for the detection of SNP TSC0024716
acacataaaaca

SEQ ID NO: 311832 - DNA, 12 bp, Artificial Sequence
  Oligonucleotide primer for the detection of SNP TSC0024716
gtttattattgt

SEQ ID NO: 311833 - DNA, 12 bp, Artificial Sequence
  Oligonucleotide primer for the detection of SNP TSC0024717
caaccacctacc

SEQ ID NO: 311834 - DNA, 12 bp, Artificial Sequence
  Oligonucleotide primer for the detection of SNP TSC0024717
cctactttttaa

SEQ ID NO: 311835 - DNA, 12 bp, Artificial Sequence
  Oligonucleotide primer for the detection of SNP TSC0024717
taattatttgtt

SEQ ID NO: 311836 - DNA, 12 bp, Artificial Sequence
  Oligonucleotide primer for the detection of SNP TSC0024719
aggtgtggtgat

SEQ ID NO: 311837 - DNA, 12 bp, Artificial Sequence
  Oligonucleotide primer for the detection of SNP TSC0024719
aggtgtggtgac

SEQ ID NO: 311838 - DNA, 12 bp, Artificial Sequence
  Oligonucleotide primer for the detection of SNP TSC0024720
ctttctcttaaa

SEQ ID NO: 311839 - DNA, 12 bp, Artificial Sequence
  Oligonucleotide primer for the detection of SNP TSC0024720
tagttttgaatg

SEQ ID NO: 311840 - DNA, 12 bp, Artificial Sequence
  Oligonucleotide primer for the detection of SNP TSC0024720
aaccctaaataa

SEQ ID NO: 311841 - DNA, 12 bp, Artificial Sequence
  Oligonucleotide primer for the detection of SNP TSC0024721
aataaaatacca

SEQ ID NO: 311842 - DNA, 12 bp, Artificial Sequence
  Oligonucleotide primer for the detection of SNP TSC0024721
aggatgttattt

SEQ ID NO: 311843 - DNA, 12 bp, Artificial Sequence
  Oligonucleotide primer for the detection of SNP TSC0024721
aaaatactactt

SEQ ID NO: 311844 - DNA, 12 bp, Artificial Sequence
  Oligonucleotide primer for the detection of SNP TSC0024721
ggtaggatgtta

SEQ ID NO: 311845 - DNA, 12 bp, Artificial Sequence
  Oligonucleotide primer for the detection of SNP TSC0024722
actcacaataca

SEQ ID NO: 311846 - DNA, 12 bp, Artificial Sequence
  Oligonucleotide primer for the detection of SNP TSC0024722
actcacgataca

SEQ ID NO: 311847 - DNA, 12 bp, Artificial Sequence
  Oligonucleotide primer for the detection of SNP TSC0024722
attttatttgag

SEQ ID NO: 311848 - DNA, 12 bp, Artificial Sequence
  Oligonucleotide primer for the detection of SNP TSC0024722
atcctacctaaa

SEQ ID NO: 311849 - DNA, 12 bp, Artificial Sequence
  Oligonucleotide primer for the detection of SNP TSC0024722
gtttatggtgta

SEQ ID NO: 311850 - DNA, 12 bp, Artificial Sequence
  Oligonucleotide primer for the detection of SNP TSC0024722
gtttacggtgta

SEQ ID NO: 311851 - DNA, 12 bp, Artificial Sequence
  Oligonucleotide primer for the detection of SNP TSC0024723
aaaaatctttta

SEQ ID NO: 311852 - DNA, 12 bp, Artificial Sequence
  Oligonucleotide primer for the detection of SNP TSC0024723
attttttttagt

SEQ ID NO: 311853 - DNA, 12 bp, Artificial Sequence
  Oligonucleotide primer for the detection of SNP TSC0024723
actttttccaac

SEQ ID NO: 311854 - DNA, 12 bp, Artificial Sequence
  Oligonucleotide primer for the detection of SNP TSC0024723
aaaagttttttg

SEQ ID NO: 311855 - DNA, 12 bp, Artificial Sequence
  Oligonucleotide primer for the detection of SNP TSC0024724
taactcactatc

SEQ ID NO: 311856 - DNA, 12 bp, Artificial Sequence
  Oligonucleotide primer for the detection of SNP TSC0024724
gtttaggagttc

SEQ ID NO: 311857 - DNA, 12 bp, Artificial Sequence
  Oligonucleotide primer for the detection of SNP TSC0024725
attcgaaaacaa

SEQ ID NO: 311858 - DNA, 12 bp, Artificial Sequence
  Oligonucleotide primer for the detection of SNP TSC0024725
catactaattac

SEQ ID NO: 311859 - DNA, 12 bp, Artificial Sequence
  Oligonucleotide primer for the detection of SNP TSC0024725
cgtactaattac

SEQ ID NO: 311860 - DNA, 12 bp, Artificial Sequence
  Oligonucleotide primer for the detection of SNP TSC0024725
gtttgagggtag

SEQ ID NO: 311861 - DNA, 12 bp, Artificial Sequence
  Oligonucleotide primer for the detection of SNP TSC0024725
gttcgagggtag

SEQ ID NO: 311862 - DNA, 12 bp, Artificial Sequence
  Oligonucleotide primer for the detection of SNP TSC0024726
ttaatctcttta

SEQ ID NO: 311863 - DNA, 12 bp, Artificial Sequence
  Oligonucleotide primer for the detection of SNP TSC0024726
gttagtagatga

SEQ ID NO: 311864 - DNA, 12 bp, Artificial Sequence
  Oligonucleotide primer for the detection of SNP TSC0024726
ttagtttttttg

SEQ ID NO: 311865 - DNA, 12 bp, Artificial Sequence
  Oligonucleotide primer for the detection of SNP TSC0024728
cacactattccc

SEQ ID NO: 311866 - DNA, 12 bp, Artificial Sequence
  Oligonucleotide primer for the detection of SNP TSC0024728
agggttttgtgg

SEQ ID NO: 311867 - DNA, 12 bp, Artificial Sequence
  Oligonucleotide primer for the detection of SNP TSC0024728
agggtttcgtgg

SEQ ID NO: 311868 - DNA, 12 bp, Artificial Sequence
  Oligonucleotide primer for the detection of SNP TSC0024728
aaaatctcataa

SEQ ID NO: 311869 - DNA, 12 bp, Artificial Sequence
  Oligonucleotide primer for the detection of SNP TSC0024728
aaaatctcgtaa

SEQ ID NO: 311870 - DNA, 12 bp, Artificial Sequence
  Oligonucleotide primer for the detection of SNP TSC0024728
tatattgttttt

SEQ ID NO: 311871 - DNA, 12 bp, Artificial Sequence
  Oligonucleotide primer for the detection of SNP TSC0024730
aacttatctaaa

SEQ ID NO: 311872 - DNA, 12 bp, Artificial Sequence
  Oligonucleotide primer for the detection of SNP TSC0024730
tttaaagagttt

SEQ ID NO: 311873 - DNA, 12 bp, Artificial Sequence
  Oligonucleotide primer for the detection of SNP TSC0024730
cccaaaaaattt

SEQ ID NO: 311874 - DNA, 12 bp, Artificial Sequence
  Oligonucleotide primer for the detection of SNP TSC0024730
aaagatttgttt

SEQ ID NO: 311875 - DNA, 12 bp, Artificial Sequence
  Oligonucleotide primer for the detection of SNP TSC0024731
gggagatgaaaa

SEQ ID NO: 311876 - DNA, 12 bp, Artificial Sequence
  Oligonucleotide primer for the detection of SNP TSC0024732
tttgttttatta

SEQ ID NO: 311877 - DNA, 12 bp, Artificial Sequence
  Oligonucleotide primer for the detection of SNP TSC0024733
aattttataata

SEQ ID NO: 311878 - DNA, 12 bp, Artificial Sequence
  Oligonucleotide primer for the detection of SNP TSC0024734
acctaatacaat

SEQ ID NO: 311879 - DNA, 12 bp, Artificial Sequence
  Oligonucleotide primer for the detection of SNP TSC0024734
acctaatacgat

SEQ ID NO: 311880 - DNA, 12 bp, Artificial Sequence
  Oligonucleotide primer for the detection of SNP TSC0024734
ataatattaata

SEQ ID NO: 311881 - DNA, 12 bp, Artificial Sequence
  Oligonucleotide primer for the detection of SNP TSC0024736
ataatctcactc

SEQ ID NO: 311882 - DNA, 12 bp, Artificial Sequence
  Oligonucleotide primer for the detection of SNP TSC0024736
ttagtttggtga

SEQ ID NO: 311883 - DNA, 12 bp, Artificial Sequence
  Oligonucleotide primer for the detection of SNP TSC0024736
ttagtttggcga

SEQ ID NO: 311884 - DNA, 12 bp, Artificial Sequence
  Oligonucleotide primer for the detection of SNP TSC0024736
ccaacctaacaa

SEQ ID NO: 311885 - DNA, 12 bp, Artificial Sequence
  Oligonucleotide primer for the detection of SNP TSC0024736
ccaacctaacga

SEQ ID NO: 311886 - DNA, 12 bp, Artificial Sequence
  Oligonucleotide primer for the detection of SNP TSC0024736
gtagttttattt

SEQ ID NO: 311887 - DNA, 12 bp, Artificial Sequence
  Oligonucleotide primer for the detection of SNP TSC0024740
cataaacttaac

SEQ ID NO: 311888 - DNA, 12 bp, Artificial Sequence
  Oligonucleotide primer for the detection of SNP TSC0024740
cgtaaacttaac

SEQ ID NO: 311889 - DNA, 12 bp, Artificial Sequence
  Oligonucleotide primer for the detection of SNP TSC0024740
aagggttggaga

SEQ ID NO: 311890 - DNA, 12 bp, Artificial Sequence
  Oligonucleotide primer for the detection of SNP TSC0024742
cccaataaaccc

SEQ ID NO: 311891 - DNA, 12 bp, Artificial Sequence
  Oligonucleotide primer for the detection of SNP TSC0024742
atgtatttgttg

SEQ ID NO: 311892 - DNA, 12 bp, Artificial Sequence
  Oligonucleotide primer for the detection of SNP TSC0024743
ttatactacctt

SEQ ID NO: 311893 - DNA, 12 bp, Artificial Sequence
  Oligonucleotide primer for the detection of SNP TSC0024743
ttttggaaatgg

SEQ ID NO: 311894 - DNA, 12 bp, Artificial Sequence
  Oligonucleotide primer for the detection of SNP TSC0024745
cacaaattacac

SEQ ID NO: 311895 - DNA, 12 bp, Artificial Sequence
  Oligonucleotide primer for the detection of SNP TSC0024745
cgcaaattacac

SEQ ID NO: 311896 - DNA, 12 bp, Artificial Sequence
  Oligonucleotide primer for the detection of SNP TSC0024745
gtatgattttgg

SEQ ID NO: 311897 - DNA, 12 bp, Artificial Sequence
  Oligonucleotide primer for the detection of SNP TSC0024745
gtacgattttgg

SEQ ID NO: 311898 - DNA, 12 bp, Artificial Sequence
  Oligonucleotide primer for the detection of SNP TSC0024745
gtatgatttcgg

SEQ ID NO: 311899 - DNA, 12 bp, Artificial Sequence
  Oligonucleotide primer for the detection of SNP TSC0024745
gtacgatttcgg

SEQ ID NO: 311900 - DNA, 12 bp, Artificial Sequence
  Oligonucleotide primer for the detection of SNP TSC0024745
acacaatctcaa

SEQ ID NO: 311901 - DNA, 12 bp, Artificial Sequence
  Oligonucleotide primer for the detection of SNP TSC0024745
acacaatctcga

SEQ ID NO: 311902 - DNA, 12 bp, Artificial Sequence
  Oligonucleotide primer for the detection of SNP TSC0024745
acacgatctcaa

SEQ ID NO: 311903 - DNA, 12 bp, Artificial Sequence
  Oligonucleotide primer for the detection of SNP TSC0024745
acacgatctcga

SEQ ID NO: 311904 - DNA, 12 bp, Artificial Sequence
  Oligonucleotide primer for the detection of SNP TSC0024745
tgtagattgtat

SEQ ID NO: 311905 - DNA, 12 bp, Artificial Sequence
  Oligonucleotide primer for the detection of SNP TSC0024745
cgtagattgtat

SEQ ID NO: 311906 - DNA, 12 bp, Artificial Sequence
  Oligonucleotide primer for the detection of SNP TSC0024751
caacttctaaat

SEQ ID NO: 311907 - DNA, 12 bp, Artificial Sequence
  Oligonucleotide primer for the detection of SNP TSC0024751
gggagatgttag

SEQ ID NO: 311908 - DNA, 12 bp, Artificial Sequence
  Oligonucleotide primer for the detection of SNP TSC0024752
aaaaaacaatcc

SEQ ID NO: 311909 - DNA, 12 bp, Artificial Sequence
  Oligonucleotide primer for the detection of SNP TSC0024752
tttttagtttat

SEQ ID NO: 311910 - DNA, 12 bp, Artificial Sequence
  Oligonucleotide primer for the detection of SNP TSC0024752
tccccaacccac

SEQ ID NO: 311911 - DNA, 12 bp, Artificial Sequence
  Oligonucleotide primer for the detection of SNP TSC0024752
gagaagtagttt

SEQ ID NO: 311912 - DNA, 12 bp, Artificial Sequence
  Oligonucleotide primer for the detection of SNP TSC0024753
tttgtagatggt

SEQ ID NO: 311913 - DNA, 12 bp, Artificial Sequence
  Oligonucleotide primer for the detection of SNP TSC0024753
tctacaaataac

SEQ ID NO: 311914 - DNA, 12 bp, Artificial Sequence
  Oligonucleotide primer for the detection of SNP TSC0024753
gtaggataagaa

SEQ ID NO: 311915 - DNA, 12 bp, Artificial Sequence
  Oligonucleotide primer for the detection of SNP TSC0024755
actcccttacaa

SEQ ID NO: 311916 - DNA, 12 bp, Artificial Sequence
  Oligonucleotide primer for the detection of SNP TSC0024755
attgggaatatt

SEQ ID NO: 311917 - DNA, 12 bp, Artificial Sequence
  Oligonucleotide primer for the detection of SNP TSC0024755
ctaaaaacatta

SEQ ID NO: 311918 - DNA, 12 bp, Artificial Sequence
  Oligonucleotide primer for the detection of SNP TSC0024755
atttttttgtag

SEQ ID NO: 311919 - DNA, 12 bp, Artificial Sequence
  Oligonucleotide primer for the detection of SNP TSC0024756
taatggttgtat

SEQ ID NO: 311920 - DNA, 12 bp, Artificial Sequence
  Oligonucleotide primer for the detection of SNP TSC0024756
ttaataactata

SEQ ID NO: 311921 - DNA, 12 bp, Artificial Sequence
  Oligonucleotide primer for the detection of SNP TSC0024756
tagagaaaatat

SEQ ID NO: 311922 - DNA, 12 bp, Artificial Sequence
  Oligonucleotide primer for the detection of SNP TSC0024757
aaaacaactcac

SEQ ID NO: 311923 - DNA, 12 bp, Artificial Sequence
  Oligonucleotide primer for the detection of SNP TSC0024757
aaaacaactcgc

SEQ ID NO: 311924 - DNA, 12 bp, Artificial Sequence
  Oligonucleotide primer for the detection of SNP TSC0024757
attgggagagag

SEQ ID NO: 311925 - DNA, 12 bp, Artificial Sequence
  Oligonucleotide primer for the detection of SNP TSC0024758
caccctaatcat

SEQ ID NO: 311926 - DNA, 12 bp, Artificial Sequence
  Oligonucleotide primer for the detection of SNP TSC0024758
atttttgaatta

SEQ ID NO: 311927 - DNA, 12 bp, Artificial Sequence
  Oligonucleotide primer for the detection of SNP TSC0024759
aacataaatata

SEQ ID NO: 311928 - DNA, 12 bp, Artificial Sequence
  Oligonucleotide primer for the detection of SNP TSC0024759
tagagtttagtt

SEQ ID NO: 311929 - DNA, 12 bp, Artificial Sequence
  Oligonucleotide primer for the detection of SNP TSC0024759
ggtatgggtatg

SEQ ID NO: 311930 - DNA, 12 bp, Artificial Sequence
  Oligonucleotide primer for the detection of SNP TSC0024769
ttaactaataat

SEQ ID NO: 311931 - DNA, 12 bp, Artificial Sequence
  Oligonucleotide primer for the detection of SNP TSC0024769
ttttgggattaa

SEQ ID NO: 311932 - DNA, 12 bp, Artificial Sequence
  Oligonucleotide primer for the detection of SNP TSC0024769
tcctaaaatcaa

SEQ ID NO: 311933 - DNA, 12 bp, Artificial Sequence
  Oligonucleotide primer for the detection of SNP TSC0024769
ttgattgatgat

SEQ ID NO: 311934 - DNA, 12 bp, Artificial Sequence
  Oligonucleotide primer for the detection of SNP TSC0024770
aacaaaccacca

SEQ ID NO: 311935 - DNA, 12 bp, Artificial Sequence
  Oligonucleotide primer for the detection of SNP TSC0024770
aacgaaccacca

SEQ ID NO: 311936 - DNA, 12 bp, Artificial Sequence
  Oligonucleotide primer for the detection of SNP TSC0024770
aaatttttagtt

SEQ ID NO: 311937 - DNA, 12 bp, Artificial Sequence
  Oligonucleotide primer for the detection of SNP TSC0024770
aaacccccaacc

SEQ ID NO: 311938 - DNA, 12 bp, Artificial Sequence
  Oligonucleotide primer for the detection of SNP TSC0024770
agtgagttatta

SEQ ID NO: 311939 - DNA, 12 bp, Artificial Sequence
  Oligonucleotide primer for the detection of SNP TSC0024770
agcgagttatta

SEQ ID NO: 311940 - DNA, 12 bp, Artificial Sequence
  Oligonucleotide primer for the detection of SNP TSC0024771
ttagtttaaagt

SEQ ID NO: 311941 - DNA, 12 bp, Artificial Sequence
  Oligonucleotide primer for the detection of SNP TSC0024771
taattcaaaaca

SEQ ID NO: 311942 - DNA, 12 bp, Artificial Sequence
  Oligonukleotid-Primer
ggaagagtaaga

SEQ ID NO: 311943 - DNA, 12 bp, Artificial Sequence
  Oligonucleotide primer for the detection of SNP TSC0024774
aattttatcttt

SEQ ID NO: 311944 - DNA, 12 bp, Artificial Sequence
  Oligonucleotide primer for the detection of SNP TSC0024774
aaaaatgtggta

SEQ ID NO: 311945 - DNA, 12 bp, Artificial Sequence
  Oligonucleotide primer for the detection of SNP TSC0024775
aaaaaattctaa

SEQ ID NO: 311946 - DNA, 12 bp, Artificial Sequence
  Oligonukleotid-Primer
gaaggggaagtt

SEQ ID NO: 311947 - DNA, 12 bp, Artificial Sequence
  Oligonucleotide primer for the detection of SNP TSC0024775
gaaggggaagtc

SEQ ID NO: 311948 - DNA, 12 bp, Artificial Sequence
  Oligonucleotide primer for the detection of SNP TSC0024775
gaaaagttttag

SEQ ID NO: 311949 - DNA, 12 bp, Artificial Sequence
  Oligonucleotide primer for the detection of SNP TSC0024778
acccaacatctt

SEQ ID NO: 311950 - DNA, 12 bp, Artificial Sequence
  Oligonucleotide primer for the detection of SNP TSC0024778
taagatgtaggg

SEQ ID NO: 311951 - DNA, 12 bp, Artificial Sequence
  Oligonucleotide primer for the detection of SNP TSC0024779
tataaataccta

SEQ ID NO: 311952 - DNA, 12 bp, Artificial Sequence
  Oligonucleotide primer for the detection of SNP TSC0024779
taatattttatt

SEQ ID NO: 311953 - DNA, 12 bp, Artificial Sequence
  Oligonucleotide primer for the detection of SNP TSC0024779
caatatcttatc

SEQ ID NO: 311954 - DNA, 12 bp, Artificial Sequence
  Oligonucleotide primer for the detection of SNP TSC0024779
tatgggtatttg

SEQ ID NO: 311955 - DNA, 12 bp, Artificial Sequence
  Oligonucleotide primer for the detection of SNP TSC0024780
acaaaatatact

SEQ ID NO: 311956 - DNA, 12 bp, Artificial Sequence
  Oligonucleotide primer for the detection of SNP TSC0024780
attaattttaaa

SEQ ID NO: 311957 - DNA, 12 bp, Artificial Sequence
  Oligonucleotide primer for the detection of SNP TSC0024783
gggtttgattat

SEQ ID NO: 311958 - DNA, 12 bp, Artificial Sequence
  Oligonucleotide primer for the detection of SNP TSC0024783
gggttcgattat

SEQ ID NO: 311959 - DNA, 12 bp, Artificial Sequence
  Oligonucleotide primer for the detection of SNP TSC0024786
tataaataatat

SEQ ID NO: 311960 - DNA, 12 bp, Artificial Sequence
  Oligonucleotide primer for the detection of SNP TSC0024786
atggtttttgga

SEQ ID NO: 311961 - DNA, 12 bp, Artificial Sequence
  Oligonucleotide primer for the detection of SNP TSC0024786
ataacctttaaa

SEQ ID NO: 311962 - DNA, 12 bp, Artificial Sequence
  Oligonucleotide primer for the detection of SNP TSC0024786
tgtggatggtat

SEQ ID NO: 311963 - DNA, 12 bp, Artificial Sequence
  Oligonucleotide primer for the detection of SNP TSC0024787
tataaaaactaa

SEQ ID NO: 311964 - DNA, 12 bp, Artificial Sequence
  Oligonucleotide primer for the detection of SNP TSC0024787
gattttggattt

SEQ ID NO: 311965 - DNA, 12 bp, Artificial Sequence
  Oligonucleotide primer for the detection of SNP TSC0024787
caaattttaaac

SEQ ID NO: 311966 - DNA, 12 bp, Artificial Sequence
  Oligonucleotide primer for the detection of SNP TSC0024787
tatggaagttgg

SEQ ID NO: 311967 - DNA, 12 bp, Artificial Sequence
  Oligonucleotide primer for the detection of SNP TSC0024788
aaaactctaaaa

SEQ ID NO: 311968 - DNA, 12 bp, Artificial Sequence
  Oligonucleotide primer for the detection of SNP TSC0024788
tagttttttttg

SEQ ID NO: 311969 - DNA, 12 bp, Artificial Sequence
  Oligonucleotide primer for the detection of SNP TSC0024793
cacaaaacttca

SEQ ID NO: 311970 - DNA, 12 bp, Artificial Sequence
  Oligonucleotide primer for the detection of SNP TSC0024793
cacgaaacttca

SEQ ID NO: 311971 - DNA, 12 bp, Artificial Sequence
  Oligonucleotide primer for the detection of SNP TSC0024793
cgcaaaacttca

SEQ ID NO: 311972 - DNA, 12 bp, Artificial Sequence
  Oligonucleotide primer for the detection of SNP TSC0024793
cgcgaaacttca

SEQ ID NO: 311973 - DNA, 12 bp, Artificial Sequence
  Oligonucleotide primer for the detection of SNP TSC0024793
tttgtatttttc

SEQ ID NO: 311974 - DNA, 12 bp, Artificial Sequence
  Oligonucleotide primer for the detection of SNP TSC0024793
cttatacctctc

SEQ ID NO: 311975 - DNA, 12 bp, Artificial Sequence
  Oligonucleotide primer for the detection of SNP TSC0024793
ttgtggagtttt

SEQ ID NO: 311976 - DNA, 12 bp, Artificial Sequence
  Oligonucleotide primer for the detection of SNP TSC0024793
tcgtggagtttt

SEQ ID NO: 311977 - DNA, 12 bp, Artificial Sequence
  Oligonucleotide primer for the detection of SNP TSC0024793
ttgcggagtttt

SEQ ID NO: 311978 - DNA, 12 bp, Artificial Sequence
  Oligonucleotide primer for the detection of SNP TSC0024793
tcgcggagtttt

SEQ ID NO: 311979 - DNA, 12 bp, Artificial Sequence
  Oligonucleotide primer for the detection of SNP TSC0024794
ttttatataaat

SEQ ID NO: 311980 - DNA, 12 bp, Artificial Sequence
  Oligonucleotide primer for the detection of SNP TSC0024794
cctacacaaata

SEQ ID NO: 311981 - DNA, 12 bp, Artificial Sequence
  Oligonucleotide primer for the detection of SNP TSC0024794
gaaaaagaaagg

SEQ ID NO: 311982 - DNA, 12 bp, Artificial Sequence
  Oligonucleotide primer for the detection of SNP TSC0024795
gtgcgattttgg

SEQ ID NO: 311983 - DNA, 12 bp, Artificial Sequence
  Oligonucleotide primer for the detection of SNP TSC0024795
gtgtgatttcgg

SEQ ID NO: 311984 - DNA, 12 bp, Artificial Sequence
  Oligonucleotide primer for the detection of SNP TSC0024795
gcgcgattttgg

SEQ ID NO: 311985 - DNA, 12 bp, Artificial Sequence
  Oligonucleotide primer for the detection of SNP TSC0024795
gcgtgatttcgg

SEQ ID NO: 311986 - DNA, 12 bp, Artificial Sequence
  Oligonucleotide primer for the detection of SNP TSC0024795
gtgcgatttcgg

SEQ ID NO: 311987 - DNA, 12 bp, Artificial Sequence
  Oligonucleotide primer for the detection of SNP TSC0024795
gcgcgatttcgg

SEQ ID NO: 311988 - DNA, 12 bp, Artificial Sequence
  Oligonucleotide primer for the detection of SNP TSC0024795
acgcaatctcaa

SEQ ID NO: 311989 - DNA, 12 bp, Artificial Sequence
  Oligonucleotide primer for the detection of SNP TSC0024795
acgcaatctcga

SEQ ID NO: 311990 - DNA, 12 bp, Artificial Sequence
  Oligonucleotide primer for the detection of SNP TSC0024795
acgcgatctcaa

SEQ ID NO: 311991 - DNA, 12 bp, Artificial Sequence
  Oligonucleotide primer for the detection of SNP TSC0024795
acgcgatctcga

SEQ ID NO: 311992 - DNA, 12 bp, Artificial Sequence
  Oligonucleotide primer for the detection of SNP TSC0024796
aaattctctttt

SEQ ID NO: 311993 - DNA, 12 bp, Artificial Sequence
  Oligonucleotide primer for the detection of SNP TSC0024796
gattttgtagaa

SEQ ID NO: 311994 - DNA, 12 bp, Artificial Sequence
  Oligonucleotide primer for the detection of SNP TSC0024797
ctctctccccaa

SEQ ID NO: 311995 - DNA, 12 bp, Artificial Sequence
  Oligonucleotide primer for the detection of SNP TSC0024797
ggttgtgttgtt

SEQ ID NO: 311996 - DNA, 12 bp, Artificial Sequence
  Oligonucleotide primer for the detection of SNP TSC0024798
atcccacactat

SEQ ID NO: 311997 - DNA, 12 bp, Artificial Sequence
  Oligonucleotide primer for the detection of SNP TSC0024798
atcccacgctat

SEQ ID NO: 311998 - DNA, 12 bp, Artificial Sequence
  Oligonucleotide primer for the detection of SNP TSC0024798
atcccgcactat

SEQ ID NO: 311999 - DNA, 12 bp, Artificial Sequence
  Oligonucleotide primer for the detection of SNP TSC0024798
atcccgcgctat

SEQ ID NO: 312000 - DNA, 12 bp, Artificial Sequence
  Oligonucleotide primer for the detection of SNP TSC0024798
gtttgtagatga

SEQ ID NO: 312001 - DNA, 12 bp, Artificial Sequence
  Oligonucleotide primer for the detection of SNP TSC0024798
gttcgtagatga

SEQ ID NO: 312002 - DNA, 12 bp, Artificial Sequence
  Oligonucleotide primer for the detection of SNP TSC0024799
ataaacacaaca

SEQ ID NO: 312003 - DNA, 12 bp, Artificial Sequence
  Oligonucleotide primer for the detection of SNP TSC0024799
ataaacacaacg

SEQ ID NO: 312004 - DNA, 12 bp, Artificial Sequence
  Oligonucleotide primer for the detection of SNP TSC0024799
tagtttgtgatt

SEQ ID NO: 312005 - DNA, 12 bp, Artificial Sequence
  Oligonucleotide primer for the detection of SNP TSC0024799
taacctataacc

SEQ ID NO: 312006 - DNA, 12 bp, Artificial Sequence
  Oligonucleotide primer for the detection of SNP TSC0024799
atgagtatagtg

SEQ ID NO: 312007 - DNA, 12 bp, Artificial Sequence
  Oligonukleotid-Primer
atgagtatagcg

SEQ ID NO: 312008 - DNA, 12 bp, Artificial Sequence
  Oligonucleotide primer for the detection of SNP TSC0024800
aaactaacccac

SEQ ID NO: 312009 - DNA, 12 bp, Artificial Sequence
  Oligonucleotide primer for the detection of SNP TSC0024800
aaactaacccgc

SEQ ID NO: 312010 - DNA, 12 bp, Artificial Sequence
  Oligonucleotide primer for the detection of SNP TSC0024800
atttgtgttgtg

SEQ ID NO: 312011 - DNA, 12 bp, Artificial Sequence
  Oligonucleotide primer for the detection of SNP TSC0024800
attcgtgttgtg

SEQ ID NO: 312012 - DNA, 12 bp, Artificial Sequence
  Oligonucleotide primer for the detection of SNP TSC0024800
atttgcgttgtg

SEQ ID NO: 312013 - DNA, 12 bp, Artificial Sequence
  Oligonucleotide primer for the detection of SNP TSC0024800
attcgcgttgtg

SEQ ID NO: 312014 - DNA, 12 bp, Artificial Sequence
  Oligonucleotide primer for the detection of SNP TSC0024800
acccacactata

SEQ ID NO: 312015 - DNA, 12 bp, Artificial Sequence
  Oligonucleotide primer for the detection of SNP TSC0024800
acccacgctata

SEQ ID NO: 312016 - DNA, 12 bp, Artificial Sequence
  Oligonucleotide primer for the detection of SNP TSC0024800
acccgcactata

SEQ ID NO: 312017 - DNA, 12 bp, Artificial Sequence
  Oligonucleotide primer for the detection of SNP TSC0024800
acccgcgctata

SEQ ID NO: 312018 - DNA, 12 bp, Artificial Sequence
  Oligonucleotide primer for the detection of SNP TSC0024800
aggttagtttgt

SEQ ID NO: 312019 - DNA, 12 bp, Artificial Sequence
  Oligonucleotide primer for the detection of SNP TSC0024800
aggttagttcgt

SEQ ID NO: 312020 - DNA, 12 bp, Artificial Sequence
  Oligonucleotide primer for the detection of SNP TSC0024801
ttggtttattgg

SEQ ID NO: 312021 - DNA, 12 bp, Artificial Sequence
  Oligonucleotide primer for the detection of SNP TSC0024801
ttaatttattaa

SEQ ID NO: 312022 - DNA, 12 bp, Artificial Sequence
  Oligonucleotide primer for the detection of SNP TSC0024801
gtatgtttgttt

SEQ ID NO: 312023 - DNA, 12 bp, Artificial Sequence
  Oligonucleotide primer for the detection of SNP TSC0024809
taaataactata

SEQ ID NO: 312024 - DNA, 12 bp, Artificial Sequence
  Oligonucleotide primer for the detection of SNP TSC0024809
aaatgtagatat

SEQ ID NO: 312025 - DNA, 12 bp, Artificial Sequence
  Oligonucleotide primer for the detection of SNP TSC0024809
caaatataaaca

SEQ ID NO: 312026 - DNA, 12 bp, Artificial Sequence
  Oligonucleotide primer for the detection of SNP TSC0024809
ttgggtggttat

SEQ ID NO: 312027 - DNA, 12 bp, Artificial Sequence
  Oligonucleotide primer for the detection of SNP TSC0024810
aaataactaaac

SEQ ID NO: 312028 - DNA, 12 bp, Artificial Sequence
  Oligonucleotide primer for the detection of SNP TSC0024810
agaggagggtgg

SEQ ID NO: 312029 - DNA, 12 bp, Artificial Sequence
  Oligonucleotide primer for the detection of SNP TSC0024812
atttattttctc

SEQ ID NO: 312030 - DNA, 12 bp, Artificial Sequence
  Oligonucleotide primer for the detection of SNP TSC0024812
tttttagaattg

SEQ ID NO: 312031 - DNA, 12 bp, Artificial Sequence
  Oligonucleotide primer for the detection of SNP TSC0024812
cccctaaaacta

SEQ ID NO: 312032 - DNA, 12 bp, Artificial Sequence
  Oligonucleotide primer for the detection of SNP TSC0024813
aacttacacaac

SEQ ID NO: 312033 - DNA, 12 bp, Artificial Sequence
  Oligonucleotide primer for the detection of SNP TSC0024813
gggagaaaataa

SEQ ID NO: 312034 - DNA, 12 bp, Artificial Sequence
  Oligonucleotide primer for the detection of SNP TSC0024814
cctcaaaccttt

SEQ ID NO: 312035 - DNA, 12 bp, Artificial Sequence
  Oligonucleotide primer for the detection of SNP TSC0024814
ttggtgttaatg

SEQ ID NO: 312036 - DNA, 12 bp, Artificial Sequence
  Oligonucleotide primer for the detection of SNP TSC0024814
ctaatatcaata

SEQ ID NO: 312037 - DNA, 12 bp, Artificial Sequence
  Oligonucleotide primer for the detection of SNP TSC0024816
acatctacccct

SEQ ID NO: 312038 - DNA, 12 bp, Artificial Sequence
  Oligonucleotide primer for the detection of SNP TSC0024817
atacaaacacat

SEQ ID NO: 312039 - DNA, 12 bp, Artificial Sequence
  Oligonucleotide primer for the detection of SNP TSC0024817
tttttaaaatga

SEQ ID NO: 312040 - DNA, 12 bp, Artificial Sequence
  Oligonucleotide primer for the detection of SNP TSC0024818
aaaaaattatta

SEQ ID NO: 312041 - DNA, 12 bp, Artificial Sequence
  Oligonucleotide primer for the detection of SNP TSC0024818
aaaaaatcatta

SEQ ID NO: 312042 - DNA, 12 bp, Artificial Sequence
  Oligonucleotide primer for the detection of SNP TSC0024821
tctccaataata

SEQ ID NO: 312043 - DNA, 12 bp, Artificial Sequence
  Oligonucleotide primer for the detection of SNP TSC0024821
ttacattttatt

SEQ ID NO: 312044 - DNA, 12 bp, Artificial Sequence
  Oligonucleotide primer for the detection of SNP TSC0024821
ttaataatattt

SEQ ID NO: 312045 - DNA, 12 bp, Artificial Sequence
  Oligonucleotide primer for the detection of SNP TSC0024822
ggttaattaagg

SEQ ID NO: 312046 - DNA, 12 bp, Artificial Sequence
  Oligonucleotide primer for the detection of SNP TSC0024826
taattacattaa

SEQ ID NO: 312047 - DNA, 12 bp, Artificial Sequence
  Oligonucleotide primer for the detection of SNP TSC0024826
tgattttaaatt

SEQ ID NO: 312048 - DNA, 12 bp, Artificial Sequence
  Oligonucleotide primer for the detection of SNP TSC0024826
taatttcaaatt

SEQ ID NO: 312049 - DNA, 12 bp, Artificial Sequence
  Oligonucleotide primer for the detection of SNP TSC0024826
tggttatattgg

SEQ ID NO: 312050 - DNA, 12 bp, Artificial Sequence
  Oligonucleotide primer for the detection of SNP TSC0024827
caaaaatatata

SEQ ID NO: 312051 - DNA, 12 bp, Artificial Sequence
  Oligonucleotide primer for the detection of SNP TSC0024827
gtgaatagtgtt

SEQ ID NO: 312052 - DNA, 12 bp, Artificial Sequence
  Oligonucleotide primer for the detection of SNP TSC0024827
ataaacaatact

SEQ ID NO: 312053 - DNA, 12 bp, Artificial Sequence
  Oligonucleotide primer for the detection of SNP TSC0024827
taaggatatgtg

SEQ ID NO: 312054 - DNA, 12 bp, Artificial Sequence
  Oligonucleotide primer for the detection of SNP TSC0024828
aaccatcccaat

SEQ ID NO: 312055 - DNA, 12 bp, Artificial Sequence
  Oligonucleotide primer for the detection of SNP TSC0024828
gaattagttggg

SEQ ID NO: 312056 - DNA, 12 bp, Artificial Sequence
  Oligonucleotide primer for the detection of SNP TSC0024834
ttgaatttttag

SEQ ID NO: 312057 - DNA, 12 bp, Artificial Sequence
  Oligonucleotide primer for the detection of SNP TSC0024835
taaaaacataaa

SEQ ID NO: 312058 - DNA, 12 bp, Artificial Sequence
  Oligonucleotide primer for the detection of SNP TSC0024835
ttactattcctt

SEQ ID NO: 312059 - DNA, 12 bp, Artificial Sequence
  Oligonucleotide primer for the detection of SNP TSC0024835
tagaaatataga

SEQ ID NO: 312060 - DNA, 12 bp, Artificial Sequence
  Oligonucleotide primer for the detection of SNP TSC0024836
tatactaaatac

SEQ ID NO: 312061 - DNA, 12 bp, Artificial Sequence
  Oligonucleotide primer for the detection of SNP TSC0024836
tacaatttccta

SEQ ID NO: 312062 - DNA, 12 bp, Artificial Sequence
  Oligonucleotide primer for the detection of SNP TSC0024836
atattgaatatt

SEQ ID NO: 312063 - DNA, 12 bp, Artificial Sequence
  Oligonucleotide primer for the detection of SNP TSC0024838
ctaatactaaca

SEQ ID NO: 312064 - DNA, 12 bp, Artificial Sequence
  Oligonucleotide primer for the detection of SNP TSC0024838
gtttaatagttt

SEQ ID NO: 312065 - DNA, 12 bp, Artificial Sequence
  Oligonucleotide primer for the detection of SNP TSC0024838
acccaataattt

SEQ ID NO: 312066 - DNA, 12 bp, Artificial Sequence
  Oligonucleotide primer for the detection of SNP TSC0024838
ttgatgttaata

SEQ ID NO: 312067 - DNA, 12 bp, Artificial Sequence
  Oligonucleotide primer for the detection of SNP TSC0024840
agagtgaaatga

SEQ ID NO: 312068 - DNA, 12 bp, Artificial Sequence
  Oligonucleotide primer for the detection of SNP TSC0024840
agagcgaaatga

SEQ ID NO: 312069 - DNA, 12 bp, Artificial Sequence
  Oligonucleotide primer for the detection of SNP TSC0024842
tacaaaacctaa

SEQ ID NO: 312070 - DNA, 12 bp, Artificial Sequence
  Oligonucleotide primer for the detection of SNP TSC0024842
agtgttttatat

SEQ ID NO: 312071 - DNA, 12 bp, Artificial Sequence
  Oligonucleotide primer for the detection of SNP TSC0024842
tatagggtttgg

SEQ ID NO: 312072 - DNA, 12 bp, Artificial Sequence
  Oligonucleotide primer for the detection of SNP TSC0024843
caaaaataaaat

SEQ ID NO: 312073 - DNA, 12 bp, Artificial Sequence
  Oligonucleotide primer for the detection of SNP TSC0024843
tgattttgaatg

SEQ ID NO: 312074 - DNA, 12 bp, Artificial Sequence
  Oligonucleotide primer for the detection of SNP TSC0024849
caaacacactcc

SEQ ID NO: 312075 - DNA, 12 bp, Artificial Sequence
  Oligonucleotide primer for the detection of SNP TSC0024849
aatttggggttg

SEQ ID NO: 312076 - DNA, 12 bp, Artificial Sequence
  Oligonucleotide primer for the detection of SNP TSC0024849
aatttggggtcg

SEQ ID NO: 312077 - DNA, 12 bp, Artificial Sequence
  Oligonucleotide primer for the detection of SNP TSC0024850
accttataattc

SEQ ID NO: 312078 - DNA, 12 bp, Artificial Sequence
  Oligonucleotide primer for the detection of SNP TSC0024851
taattaaaaact

SEQ ID NO: 312079 - DNA, 12 bp, Artificial Sequence
  Oligonucleotide primer for the detection of SNP TSC0024851
aagggaaattga

SEQ ID NO: 312080 - DNA, 12 bp, Artificial Sequence
  Oligonucleotide primer for the detection of SNP TSC0024851
taattaaaaatt

SEQ ID NO: 312081 - DNA, 12 bp, Artificial Sequence
  Oligonucleotide primer for the detection of SNP TSC0024853
aactactaataa

SEQ ID NO: 312082 - DNA, 12 bp, Artificial Sequence
  Oligonucleotide primer for the detection of SNP TSC0024853
gggtattggggt

SEQ ID NO: 312083 - DNA, 12 bp, Artificial Sequence
  Oligonucleotide primer for the detection of SNP TSC0024853
aaacactaaaac

SEQ ID NO: 312084 - DNA, 12 bp, Artificial Sequence
  Oligonucleotide primer for the detection of SNP TSC0024853
ggttgttggtgg

SEQ ID NO: 312085 - DNA, 12 bp, Artificial Sequence
  Oligonucleotide primer for the detection of SNP TSC0024854
acatacattcta

SEQ ID NO: 312086 - DNA, 12 bp, Artificial Sequence
  Oligonucleotide primer for the detection of SNP TSC0024854
ttatatgttatt

SEQ ID NO: 312087 - DNA, 12 bp, Artificial Sequence
  Oligonucleotide primer for the detection of SNP TSC0024854
ttacatatcacc

SEQ ID NO: 312088 - DNA, 12 bp, Artificial Sequence
  Oligonucleotide primer for the detection of SNP TSC0024854
gtatatattttg

SEQ ID NO: 312089 - DNA, 12 bp, Artificial Sequence
  Oligonucleotide primer for the detection of SNP TSC0024855
accctaaaatac

SEQ ID NO: 312090 - DNA, 12 bp, Artificial Sequence
  Oligonucleotide primer for the detection of SNP TSC0024855
atgttaataaga

SEQ ID NO: 312091 - DNA, 12 bp, Artificial Sequence
  Oligonucleotide primer for the detection of SNP TSC0024855
attttggaatgt

SEQ ID NO: 312092 - DNA, 12 bp, Artificial Sequence
  Oligonucleotide primer for the detection of SNP TSC0024859
acccaccaccca

SEQ ID NO: 312093 - DNA, 12 bp, Artificial Sequence
  Oligonucleotide primer for the detection of SNP TSC0024859
acccaccacccg

SEQ ID NO: 312094 - DNA, 12 bp, Artificial Sequence
  Oligonucleotide primer for the detection of SNP TSC0024859
acccgccaccca

SEQ ID NO: 312095 - DNA, 12 bp, Artificial Sequence
  Oligonucleotide primer for the detection of SNP TSC0024859
acccgccacccg

SEQ ID NO: 312096 - DNA, 12 bp, Artificial Sequence
  Oligonucleotide primer for the detection of SNP TSC0024859
tttgtgtgtggt

SEQ ID NO: 312097 - DNA, 12 bp, Artificial Sequence
  Oligonucleotide primer for the detection of SNP TSC0024859
ttcgtgtgtggt

SEQ ID NO: 312098 - DNA, 12 bp, Artificial Sequence
  Oligonucleotide primer for the detection of SNP TSC0024859
tttgcgtgtggt

SEQ ID NO: 312099 - DNA, 12 bp, Artificial Sequence
  Oligonucleotide primer for the detection of SNP TSC0024859
tttgtgtgcggt

SEQ ID NO: 312100 - DNA, 12 bp, Artificial Sequence
  Oligonucleotide primer for the detection of SNP TSC0024859
tttgtgtgtggc

SEQ ID NO: 312101 - DNA, 12 bp, Artificial Sequence
  Oligonucleotide primer for the detection of SNP TSC0024859
ttcgcgtgtggt

SEQ ID NO: 312102 - DNA, 12 bp, Artificial Sequence
  Oligonucleotide primer for the detection of SNP TSC0024859
ttcgtgtgcggt

SEQ ID NO: 312103 - DNA, 12 bp, Artificial Sequence
  Oligonucleotide primer for the detection of SNP TSC0024859
ttcgtgtgtggc

SEQ ID NO: 312104 - DNA, 12 bp, Artificial Sequence
  Oligonucleotide primer for the detection of SNP TSC0024859
tttgcgtgcggt

SEQ ID NO: 312105 - DNA, 12 bp, Artificial Sequence
  Oligonucleotide primer for the detection of SNP TSC0024859
tttgcgtgtggc

SEQ ID NO: 312106 - DNA, 12 bp, Artificial Sequence
  Oligonucleotide primer for the detection of SNP TSC0024859
tttgtgtgcggc

SEQ ID NO: 312107 - DNA, 12 bp, Artificial Sequence
  Oligonucleotide primer for the detection of SNP TSC0024859
ttcgcgtgcggt

SEQ ID NO: 312108 - DNA, 12 bp, Artificial Sequence
  Oligonucleotide primer for the detection of SNP TSC0024859
ttcgcgtgtggc

SEQ ID NO: 312109 - DNA, 12 bp, Artificial Sequence
  Oligonucleotide primer for the detection of SNP TSC0024859
ttcgtgtgcggc

SEQ ID NO: 312110 - DNA, 12 bp, Artificial Sequence
  Oligonucleotide primer for the detection of SNP TSC0024859
tttgcgtgcggc

SEQ ID NO: 312111 - DNA, 12 bp, Artificial Sequence
  Oligonucleotide primer for the detection of SNP TSC0024859
ttcgcgtgcggc

SEQ ID NO: 312112 - DNA, 12 bp, Artificial Sequence
  Oligonucleotide primer for the detection of SNP TSC0024859
tccacatacaac

SEQ ID NO: 312113 - DNA, 12 bp, Artificial Sequence
  Oligonucleotide primer for the detection of SNP TSC0024859
tccacatacgac

SEQ ID NO: 312114 - DNA, 12 bp, Artificial Sequence
  Oligonucleotide primer for the detection of SNP TSC0024859
tccacgtacaac

SEQ ID NO: 312115 - DNA, 12 bp, Artificial Sequence
  Oligonucleotide primer for the detection of SNP TSC0024859
tccgcatacaac

SEQ ID NO: 312116 - DNA, 12 bp, Artificial Sequence
  Oligonucleotide primer for the detection of SNP TSC0024859
tccacgtacgac

SEQ ID NO: 312117 - DNA, 12 bp, Artificial Sequence
  Oligonucleotide primer for the detection of SNP TSC0024859
tccgcatacgac

SEQ ID NO: 312118 - DNA, 12 bp, Artificial Sequence
  Oligonucleotide primer for the detection of SNP TSC0024859
tccgcgtacaac

SEQ ID NO: 312119 - DNA, 12 bp, Artificial Sequence
  Oligonucleotide primer for the detection of SNP TSC0024859
tccgcgtacgac

SEQ ID NO: 312120 - DNA, 12 bp, Artificial Sequence
  Oligonucleotide primer for the detection of SNP TSC0024859
atttgttatttg

SEQ ID NO: 312121 - DNA, 12 bp, Artificial Sequence
  Oligonucleotide primer for the detection of SNP TSC0024859
attcgttatttg

SEQ ID NO: 312122 - DNA, 12 bp, Artificial Sequence
  Oligonucleotide primer for the detection of SNP TSC0024859
atttgttattcg

SEQ ID NO: 312123 - DNA, 12 bp, Artificial Sequence
  Oligonucleotide primer for the detection of SNP TSC0024859
attcgttattcg

SEQ ID NO: 312124 - DNA, 12 bp, Artificial Sequence
  Oligonucleotide primer for the detection of SNP TSC0024860
taacaaaaccat

SEQ ID NO: 312125 - DNA, 12 bp, Artificial Sequence
  Oligonucleotide primer for the detection of SNP TSC0024860
ttattttatgta

SEQ ID NO: 312126 - DNA, 12 bp, Artificial Sequence
  Oligonucleotide primer for the detection of SNP TSC0024860
ttatctcataca

SEQ ID NO: 312127 - DNA, 12 bp, Artificial Sequence
  Oligonucleotide primer for the detection of SNP TSC0024860
tggtaaagttat

SEQ ID NO: 312128 - DNA, 12 bp, Artificial Sequence
  Oligonucleotide primer for the detection of SNP TSC0024865
tcaaatactatc

SEQ ID NO: 312129 - DNA, 12 bp, Artificial Sequence
  Oligonucleotide primer for the detection of SNP TSC0024865
tttaatttttag

SEQ ID NO: 312130 - DNA, 12 bp, Artificial Sequence
  Oligonucleotide primer for the detection of SNP TSC0024865
cccaacttctaa

SEQ ID NO: 312131 - DNA, 12 bp, Artificial Sequence
  Oligonucleotide primer for the detection of SNP TSC0024865
ttaagtgttatt

SEQ ID NO: 312132 - DNA, 12 bp, Artificial Sequence
  Oligonucleotide primer for the detection of SNP TSC0024865
ttaagtgttatc

SEQ ID NO: 312133 - DNA, 12 bp, Artificial Sequence
  Oligonucleotide primer for the detection of SNP TSC0024866
aaaaatcacttt

SEQ ID NO: 312134 - DNA, 12 bp, Artificial Sequence
  Oligonucleotide primer for the detection of SNP TSC0024866
taaagtataatg

SEQ ID NO: 312135 - DNA, 12 bp, Artificial Sequence
  Oligonucleotide primer for the detection of SNP TSC0024867
aatcaacttaat

SEQ ID NO: 312136 - DNA, 12 bp, Artificial Sequence
  Oligonucleotide primer for the detection of SNP TSC0024867
tatatttatgaa

SEQ ID NO: 312137 - DNA, 12 bp, Artificial Sequence
  Oligonucleotide primer for the detection of SNP TSC0024868
aaaacctttcac

SEQ ID NO: 312138 - DNA, 12 bp, Artificial Sequence
  Oligonucleotide primer for the detection of SNP TSC0024871
taccaactaaat

SEQ ID NO: 312139 - DNA, 12 bp, Artificial Sequence
  Oligonucleotide primer for the detection of SNP TSC0024871
taccgactaaat

SEQ ID NO: 312140 - DNA, 12 bp, Artificial Sequence
  Oligonucleotide primer for the detection of SNP TSC0024871
tttttttagaat

SEQ ID NO: 312141 - DNA, 12 bp, Artificial Sequence
  Oligonucleotide primer for the detection of SNP TSC0024871
ctttcccaaaac

SEQ ID NO: 312142 - DNA, 12 bp, Artificial Sequence
  Oligonucleotide primer for the detection of SNP TSC0024871
tgttggttggat

SEQ ID NO: 312143 - DNA, 12 bp, Artificial Sequence
  Oligonucleotide primer for the detection of SNP TSC0024871
tgtcggttggat

SEQ ID NO: 312144 - DNA, 12 bp, Artificial Sequence
  Oligonucleotide primer for the detection of SNP TSC0024872
aaaaataaacca

SEQ ID NO: 312145 - DNA, 12 bp, Artificial Sequence
  Oligonucleotide primer for the detection of SNP TSC0024872
acaacccctcta

SEQ ID NO: 312146 - DNA, 12 bp, Artificial Sequence
  Oligonucleotide primer for the detection of SNP TSC0024872
agagggtaggtt

SEQ ID NO: 312147 - DNA, 12 bp, Artificial Sequence
  Oligonucleotide primer for the detection of SNP TSC0024874
ccaaaacaaaaa

SEQ ID NO: 312148 - DNA, 12 bp, Artificial Sequence
  Oligonucleotide primer for the detection of SNP TSC0024874
ttagtaatttta

SEQ ID NO: 312149 - DNA, 12 bp, Artificial Sequence
  Oligonukleotid-Primer
caacaacctcaa

SEQ ID NO: 312150 - DNA, 12 bp, Artificial Sequence
  Oligonucleotide primer for the detection of SNP TSC0024874
ttaggataggga

SEQ ID NO: 312151 - DNA, 12 bp, Artificial Sequence
  Oligonucleotide primer for the detection of SNP TSC0024875
tcaaaataatac

SEQ ID NO: 312152 - DNA, 12 bp, Artificial Sequence
  Oligonucleotide primer for the detection of SNP TSC0024875
tttatgaatggg

SEQ ID NO: 312153 - DNA, 12 bp, Artificial Sequence
  Oligonukleotid-Primer
atgaaggaaggg

SEQ ID NO: 312154 - DNA, 12 bp, Artificial Sequence
  Oligonucleotide primer for the detection of SNP TSC0024876
gagataaggagt

SEQ ID NO: 312155 - DNA, 12 bp, Artificial Sequence
  Oligonucleotide primer for the detection of SNP TSC0024877
acctttcaaatc

SEQ ID NO: 312156 - DNA, 12 bp, Artificial Sequence
  Oligonucleotide primer for the detection of SNP TSC0024879
tatacataatat

SEQ ID NO: 312157 - DNA, 12 bp, Artificial Sequence
  Oligonukleotid-Primer
ttttatttgata

SEQ ID NO: 312158 - DNA, 12 bp, Artificial Sequence
  Oligonucleotide primer for the detection of SNP TSC0024880
agttttgtgtat

SEQ ID NO: 312159 - DNA, 12 bp, Artificial Sequence
  Oligonucleotide primer for the detection of SNP TSC0024880
agtttcgtgtat

SEQ ID NO: 312160 - DNA, 12 bp, Artificial Sequence
  Oligonucleotide primer for the detection of SNP TSC0024880
aaccccatatac

SEQ ID NO: 312161 - DNA, 12 bp, Artificial Sequence
  Oligonucleotide primer for the detection of SNP TSC0024880
aaccccgtatac

SEQ ID NO: 312162 - DNA, 12 bp, Artificial Sequence
  Oligonucleotide primer for the detection of SNP TSC0024880
tttttggatggg

SEQ ID NO: 312163 - DNA, 12 bp, Artificial Sequence
  Oligonucleotide primer for the detection of SNP TSC0024881
ccaacctaaata

SEQ ID NO: 312164 - DNA, 12 bp, Artificial Sequence
  Oligonucleotide primer for the detection of SNP TSC0024881
attgtgtttttg

SEQ ID NO: 312165 - DNA, 12 bp, Artificial Sequence
  Oligonucleotide primer for the detection of SNP TSC0024881
actatattctta

SEQ ID NO: 312166 - DNA, 12 bp, Artificial Sequence
  Oligonucleotide primer for the detection of SNP TSC0024881
tagtttgaatat

SEQ ID NO: 312167 - DNA, 12 bp, Artificial Sequence
  Oligonucleotide primer for the detection of SNP TSC0024882
atactacatact

SEQ ID NO: 312168 - DNA, 12 bp, Artificial Sequence
  Oligonucleotide primer for the detection of SNP TSC0024882
atgttttatgag

SEQ ID NO: 312169 - DNA, 12 bp, Artificial Sequence
  Oligonucleotide primer for the detection of SNP TSC0024882
acgttttatgag

SEQ ID NO: 312170 - DNA, 12 bp, Artificial Sequence
  Oligonucleotide primer for the detection of SNP TSC0024882
atgttttacgag

SEQ ID NO: 312171 - DNA, 12 bp, Artificial Sequence
  Oligonucleotide primer for the detection of SNP TSC0024882
acgttttacgag

SEQ ID NO: 312172 - DNA, 12 bp, Artificial Sequence
  Oligonucleotide primer for the detection of SNP TSC0024885
aatataaaccgc

SEQ ID NO: 312173 - DNA, 12 bp, Artificial Sequence
  Oligonucleotide primer for the detection of SNP TSC0024885
attggttgggtg

SEQ ID NO: 312174 - DNA, 12 bp, Artificial Sequence
  Oligonucleotide primer for the detection of SNP TSC0024885
attggttgggcg

SEQ ID NO: 312175 - DNA, 12 bp, Artificial Sequence
  Oligonucleotide primer for the detection of SNP TSC0024885
actaactaaaca

SEQ ID NO: 312176 - DNA, 12 bp, Artificial Sequence
  Oligonucleotide primer for the detection of SNP TSC0024885
actaactaaacg

SEQ ID NO: 312177 - DNA, 12 bp, Artificial Sequence
  Oligonucleotide primer for the detection of SNP TSC0024885
ggtgtgagttgt

SEQ ID NO: 312178 - DNA, 12 bp, Artificial Sequence
  Oligonucleotide primer for the detection of SNP TSC0024885
ggtgtgagtcgt

SEQ ID NO: 312179 - DNA, 12 bp, Artificial Sequence
  Oligonucleotide primer for the detection of SNP TSC0024887
tcctacaaaaaa

SEQ ID NO: 312180 - DNA, 12 bp, Artificial Sequence
  Oligonucleotide primer for the detection of SNP TSC0024887
taggtggttagt

SEQ ID NO: 312181 - DNA, 12 bp, Artificial Sequence
  Oligonucleotide primer for the detection of SNP TSC0024887
taggcggttagt

SEQ ID NO: 312182 - DNA, 12 bp, Artificial Sequence
  Oligonucleotide primer for the detection of SNP TSC0024887
aaacaatcaaca

SEQ ID NO: 312183 - DNA, 12 bp, Artificial Sequence
  Oligonucleotide primer for the detection of SNP TSC0024887
aaacgatcaaca

SEQ ID NO: 312184 - DNA, 12 bp, Artificial Sequence
  Oligonucleotide primer for the detection of SNP TSC0024887
gttttataggag

SEQ ID NO: 312185 - DNA, 12 bp, Artificial Sequence
  Oligonucleotide primer for the detection of SNP TSC0024888
tatccttcttcc

SEQ ID NO: 312186 - DNA, 12 bp, Artificial Sequence
  Oligonucleotide primer for the detection of SNP TSC0024888
gatgtaattgtt

SEQ ID NO: 312187 - DNA, 12 bp, Artificial Sequence
  Oligonucleotide primer for the detection of SNP TSC0024888
gatgtaattgtc

SEQ ID NO: 312188 - DNA, 12 bp, Artificial Sequence
  Oligonucleotide primer for the detection of SNP TSC0024888
aatataactatc

SEQ ID NO: 312189 - DNA, 12 bp, Artificial Sequence
  Oligonucleotide primer for the detection of SNP TSC0024888
tatttttttttc

SEQ ID NO: 312190 - DNA, 12 bp, Artificial Sequence
  Oligonucleotide primer for the detection of SNP TSC0024889
ttaaagttttat

SEQ ID NO: 312191 - DNA, 12 bp, Artificial Sequence
  Oligonucleotide primer for the detection of SNP TSC0024889
tccaaaacccta

SEQ ID NO: 312192 - DNA, 12 bp, Artificial Sequence
  Oligonucleotide primer for the detection of SNP TSC0024889
ggagaggggaag

SEQ ID NO: 312193 - DNA, 12 bp, Artificial Sequence
  Oligonucleotide primer for the detection of SNP TSC0024890
tatatctatact

SEQ ID NO: 312194 - DNA, 12 bp, Artificial Sequence
  Oligonucleotide primer for the detection of SNP TSC0024890
gtagaggataga

SEQ ID NO: 312195 - DNA, 12 bp, Artificial Sequence
  Oligonucleotide primer for the detection of SNP TSC0024891
gtttatagatgt

SEQ ID NO: 312196 - DNA, 12 bp, Artificial Sequence
  Oligonucleotide primer for the detection of SNP TSC0024891
acccataaatac

SEQ ID NO: 312197 - DNA, 12 bp, Artificial Sequence
  Oligonucleotide primer for the detection of SNP TSC0024891
ggagatggtgtg

SEQ ID NO: 312198 - DNA, 12 bp, Artificial Sequence
  Oligonucleotide primer for the detection of SNP TSC0024892
ttctaatacaaa

SEQ ID NO: 312199 - DNA, 12 bp, Artificial Sequence
  Oligonucleotide primer for the detection of SNP TSC0024892
ttctaatacgaa

SEQ ID NO: 312200 - DNA, 12 bp, Artificial Sequence
  Oligonucleotide primer for the detection of SNP TSC0024892
tttgtattagaa

SEQ ID NO: 312201 - DNA, 12 bp, Artificial Sequence
  Oligonucleotide primer for the detection of SNP TSC0024892
cctacaccaaaa

SEQ ID NO: 312202 - DNA, 12 bp, Artificial Sequence
  Oligonucleotide primer for the detection of SNP TSC0024892
ttttggtgtggg

SEQ ID NO: 312203 - DNA, 12 bp, Artificial Sequence
  Oligonucleotide primer for the detection of SNP TSC0024892
ttttggtgcggg

SEQ ID NO: 312204 - DNA, 12 bp, Artificial Sequence
  Oligonucleotide primer for the detection of SNP TSC0024895
atacccatataa

SEQ ID NO: 312205 - DNA, 12 bp, Artificial Sequence
  Oligonucleotide primer for the detection of SNP TSC0024895
gtacccatataa

SEQ ID NO: 312206 - DNA, 12 bp, Artificial Sequence
  Oligonucleotide primer for the detection of SNP TSC0024895
ataagtttattg

SEQ ID NO: 312207 - DNA, 12 bp, Artificial Sequence
  Oligonucleotide primer for the detection of SNP TSC0024895
acaaattcacta

SEQ ID NO: 312208 - DNA, 12 bp, Artificial Sequence
  Oligonucleotide primer for the detection of SNP TSC0024895
tgtttatgtgat

SEQ ID NO: 312209 - DNA, 12 bp, Artificial Sequence
  Oligonucleotide primer for the detection of SNP TSC0024896
aaatcccttaca

SEQ ID NO: 312210 - DNA, 12 bp, Artificial Sequence
  Oligonucleotide primer for the detection of SNP TSC0024896
tattatatgggt

SEQ ID NO: 312211 - DNA, 12 bp, Artificial Sequence
  Oligonucleotide primer for the detection of SNP TSC0024896
catcacataaac

SEQ ID NO: 312212 - DNA, 12 bp, Artificial Sequence
  Oligonucleotide primer for the detection of SNP TSC0024896
aaattttttata

SEQ ID NO: 312213 - DNA, 12 bp, Artificial Sequence
  Oligonucleotide primer for the detection of SNP TSC0024897
catccaaaataa

SEQ ID NO: 312214 - DNA, 12 bp, Artificial Sequence
  Oligonucleotide primer for the detection of SNP TSC0024897
taggtttttttt

SEQ ID NO: 312215 - DNA, 12 bp, Artificial Sequence
  Oligonucleotide primer for the detection of SNP TSC0024897
ataaactctctc

SEQ ID NO: 312216 - DNA, 12 bp, Artificial Sequence
  Oligonucleotide primer for the detection of SNP TSC0024897
tatttaggatgg

SEQ ID NO: 312217 - DNA, 12 bp, Artificial Sequence
  Oligonucleotide primer for the detection of SNP TSC0024898
tcgggatttttt

SEQ ID NO: 312218 - DNA, 12 bp, Artificial Sequence
  Oligonukleotid-Primer
tcaaaactttct

SEQ ID NO: 312219 - DNA, 12 bp, Artificial Sequence
  Oligonucleotide primer for the detection of SNP TSC0024898
tcgaaactttct

SEQ ID NO: 312220 - DNA, 12 bp, Artificial Sequence
  Oligonucleotide primer for the detection of SNP TSC0024898
aaagggagaagt

SEQ ID NO: 312221 - DNA, 12 bp, Artificial Sequence
  Oligonucleotide primer for the detection of SNP TSC0024899
aaatctaatcat

SEQ ID NO: 312222 - DNA, 12 bp, Artificial Sequence
  Oligonucleotide primer for the detection of SNP TSC0024899
tgtagtatataa

SEQ ID NO: 312223 - DNA, 12 bp, Artificial Sequence
  Oligonucleotide primer for the detection of SNP TSC0024900
ctacaaatcaat

SEQ ID NO: 312224 - DNA, 12 bp, Artificial Sequence
  Oligonucleotide primer for the detection of SNP TSC0024901
ttatcctaaatc

SEQ ID NO: 312225 - DNA, 12 bp, Artificial Sequence
  Oligonucleotide primer for the detection of SNP TSC0024901
tgattgatgaag

SEQ ID NO: 312226 - DNA, 12 bp, Artificial Sequence
  Oligonucleotide primer for the detection of SNP TSC0024901
tgattgacgaag

SEQ ID NO: 312227 - DNA, 12 bp, Artificial Sequence
  Oligonucleotide primer for the detection of SNP TSC0024904
acttcaaactaa

SEQ ID NO: 312228 - DNA, 12 bp, Artificial Sequence
  Oligonucleotide primer for the detection of SNP TSC0024904
ataaaatggggt

SEQ ID NO: 312229 - DNA, 12 bp, Artificial Sequence
  Oligonucleotide primer for the detection of SNP TSC0024904
gttttaagttgg

SEQ ID NO: 312230 - DNA, 12 bp, Artificial Sequence
  Oligonucleotide primer for the detection of SNP TSC0024905
acatcctaaaat

SEQ ID NO: 312231 - DNA, 12 bp, Artificial Sequence
  Oligonucleotide primer for the detection of SNP TSC0024909
cctacacaaaca

SEQ ID NO: 312232 - DNA, 12 bp, Artificial Sequence
  Oligonucleotide primer for the detection of SNP TSC0024909
agaggatatatt

SEQ ID NO: 312233 - DNA, 12 bp, Artificial Sequence
  Oligonucleotide primer for the detection of SNP TSC0024909
tttatataggta

SEQ ID NO: 312234 - DNA, 12 bp, Artificial Sequence
  Oligonucleotide primer for the detection of SNP TSC0024910
catacaaaatta

SEQ ID NO: 312235 - DNA, 12 bp, Artificial Sequence
  Oligonucleotide primer for the detection of SNP TSC0024910
aatgtaatgagt

SEQ ID NO: 312236 - DNA, 12 bp, Artificial Sequence
  Oligonucleotide primer for the detection of SNP TSC0024910
aatgtaatgagc

SEQ ID NO: 312237 - DNA, 12 bp, Artificial Sequence
  Oligonucleotide primer for the detection of SNP TSC0024910
aaatacaataaa

SEQ ID NO: 312238 - DNA, 12 bp, Artificial Sequence
  Oligonucleotide primer for the detection of SNP TSC0024910
ttatataaggtt

SEQ ID NO: 312239 - DNA, 12 bp, Artificial Sequence
  Oligonucleotide primer for the detection of SNP TSC0024911
acaataacgtaa

SEQ ID NO: 312240 - DNA, 12 bp, Artificial Sequence
  Oligonucleotide primer for the detection of SNP TSC0024911
tttgtagtgagt

SEQ ID NO: 312241 - DNA, 12 bp, Artificial Sequence
  Oligonucleotide primer for the detection of SNP TSC0024911
tttacaataaac

SEQ ID NO: 312242 - DNA, 12 bp, Artificial Sequence
  Oligonucleotide primer for the detection of SNP TSC0024917
atattaacctct

SEQ ID NO: 312243 - DNA, 12 bp, Artificial Sequence
  Oligonucleotide primer for the detection of SNP TSC0024917
aaatgtggttta

SEQ ID NO: 312244 - DNA, 12 bp, Artificial Sequence
  Oligonucleotide primer for the detection of SNP TSC0024918
ataaatatttaa

SEQ ID NO: 312245 - DNA, 12 bp, Artificial Sequence
  Oligonucleotide primer for the detection of SNP TSC0024918
attgaaaagtaa

SEQ ID NO: 312246 - DNA, 12 bp, Artificial Sequence
  Oligonucleotide primer for the detection of SNP TSC0024918
attaaaaaacaa

SEQ ID NO: 312247 - DNA, 12 bp, Artificial Sequence
  Oligonucleotide primer for the detection of SNP TSC0024918
ataaatgtttaa

SEQ ID NO: 312248 - DNA, 12 bp, Artificial Sequence
  Oligonucleotide primer for the detection of SNP TSC0024919
attatctaaatt

SEQ ID NO: 312249 - DNA, 12 bp, Artificial Sequence
  Oligonucleotide primer for the detection of SNP TSC0024919
attagaggggaa

SEQ ID NO: 312250 - DNA, 12 bp, Artificial Sequence
  Oligonucleotide primer for the detection of SNP TSC0024929
tctatccctatc

SEQ ID NO: 312251 - DNA, 12 bp, Artificial Sequence
  Oligonucleotide primer for the detection of SNP TSC0024929
tatttagagata

SEQ ID NO: 312252 - DNA, 12 bp, Artificial Sequence
  Oligonucleotide primer for the detection of SNP TSC0024929
tacttaaaaaca

SEQ ID NO: 312253 - DNA, 12 bp, Artificial Sequence
  Oligonucleotide primer for the detection of SNP TSC0024929
tttatttttgtc

SEQ ID NO: 312254 - DNA, 12 bp, Artificial Sequence
  Oligonucleotide primer for the detection of SNP TSC0024930
cgttaaaaaaat

SEQ ID NO: 312255 - DNA, 12 bp, Artificial Sequence
  Oligonucleotide primer for the detection of SNP TSC0024930
tttatgattatg

SEQ ID NO: 312256 - DNA, 12 bp, Artificial Sequence
  Oligonucleotide primer for the detection of SNP TSC0024937
aataaaaggtaa

SEQ ID NO: 312257 - DNA, 12 bp, Artificial Sequence
  Oligonucleotide primer for the detection of SNP TSC0024938
acacctaaattt

SEQ ID NO: 312258 - DNA, 12 bp, Artificial Sequence
  Oligonucleotide primer for the detection of SNP TSC0024938
acgcctaaattt

SEQ ID NO: 312259 - DNA, 12 bp, Artificial Sequence
  Oligonucleotide primer for the detection of SNP TSC0024938
tgattggggaga

SEQ ID NO: 312260 - DNA, 12 bp, Artificial Sequence
  Oligonucleotide primer for the detection of SNP TSC0024941
tcaataatctac

SEQ ID NO: 312261 - DNA, 12 bp, Artificial Sequence
  Oligonucleotide primer for the detection of SNP TSC0024941
gaatgatttagg

SEQ ID NO: 312262 - DNA, 12 bp, Artificial Sequence
  Oligonucleotide primer for the detection of SNP TSC0024945
ttcttcacactt

SEQ ID NO: 312263 - DNA, 12 bp, Artificial Sequence
  Oligonucleotide primer for the detection of SNP TSC0024945
tggggtatggag

SEQ ID NO: 312264 - DNA, 12 bp, Artificial Sequence
  Oligonucleotide primer for the detection of SNP TSC0024949
atagttagaaag

SEQ ID NO: 312265 - DNA, 12 bp, Artificial Sequence
  Oligonucleotide primer for the detection of SNP TSC0024950
taacaataaaca

SEQ ID NO: 312266 - DNA, 12 bp, Artificial Sequence
  Oligonucleotide primer for the detection of SNP TSC0024950
aaattaagatat

SEQ ID NO: 312267 - DNA, 12 bp, Artificial Sequence
  Oligonucleotide primer for the detection of SNP TSC0024950
aaaccaaaatat

SEQ ID NO: 312268 - DNA, 12 bp, Artificial Sequence
  Oligonucleotide primer for the detection of SNP TSC0024950
taataataggta

SEQ ID NO: 312269 - DNA, 12 bp, Artificial Sequence
  Oligonucleotide primer for the detection of SNP TSC0024951
tcaaataaactc

SEQ ID NO: 312270 - DNA, 12 bp, Artificial Sequence
  Oligonucleotide primer for the detection of SNP TSC0024951
ttattgaaggag

SEQ ID NO: 312271 - DNA, 12 bp, Artificial Sequence
  Oligonucleotide primer for the detection of SNP TSC0024953
aattacaaaaac

SEQ ID NO: 312272 - DNA, 12 bp, Artificial Sequence
  Oligonucleotide primer for the detection of SNP TSC0024953
ttatgatgaagg

SEQ ID NO: 312273 - DNA, 12 bp, Artificial Sequence
  Oligonucleotide primer for the detection of SNP TSC0024956
tactttactaat

SEQ ID NO: 312274 - DNA, 12 bp, Artificial Sequence
  Oligonucleotide primer for the detection of SNP TSC0024956
ttatagttgtat

SEQ ID NO: 312275 - DNA, 12 bp, Artificial Sequence
  Oligonucleotide primer for the detection of SNP TSC0024956
ttataattacat

SEQ ID NO: 312276 - DNA, 12 bp, Artificial Sequence
  Oligonucleotide primer for the detection of SNP TSC0024956
tattttattagt

SEQ ID NO: 312277 - DNA, 12 bp, Artificial Sequence
  Oligonucleotide primer for the detection of SNP TSC0024957
tccaatttattt

SEQ ID NO: 312278 - DNA, 12 bp, Artificial Sequence
  Oligonucleotide primer for the detection of SNP TSC0024957
gagagttaaaaa

SEQ ID NO: 312279 - DNA, 12 bp, Artificial Sequence
  Oligonucleotide primer for the detection of SNP TSC0024957
tttagtttgttt

SEQ ID NO: 312280 - DNA, 12 bp, Artificial Sequence
  Oligonucleotide primer for the detection of SNP TSC0024961
atcaactctact

SEQ ID NO: 312281 - DNA, 12 bp, Artificial Sequence
  Oligonucleotide primer for the detection of SNP TSC0024961
tagagtttttgg

SEQ ID NO: 312282 - DNA, 12 bp, Artificial Sequence
  Oligonucleotide primer for the detection of SNP TSC0024963
taaaaccacaaa

SEQ ID NO: 312283 - DNA, 12 bp, Artificial Sequence
  Oligonucleotide primer for the detection of SNP TSC0024963
gtatggtgatgt

SEQ ID NO: 312284 - DNA, 12 bp, Artificial Sequence
  Oligonucleotide primer for the detection of SNP TSC0024963
acataataatac

SEQ ID NO: 312285 - DNA, 12 bp, Artificial Sequence
  Oligonucleotide primer for the detection of SNP TSC0024965
ttctttctttct

SEQ ID NO: 312286 - DNA, 12 bp, Artificial Sequence
  Oligonucleotide primer for the detection of SNP TSC0024965
ttatggagagaa

SEQ ID NO: 312287 - DNA, 12 bp, Artificial Sequence
  Oligonucleotide primer for the detection of SNP TSC0024966
caccacattccc

SEQ ID NO: 312288 - DNA, 12 bp, Artificial Sequence
  Oligonucleotide primer for the detection of SNP TSC0024966
caccacgttccc

SEQ ID NO: 312289 - DNA, 12 bp, Artificial Sequence
  Oligonucleotide primer for the detection of SNP TSC0024966
cgccacattccc

SEQ ID NO: 312290 - DNA, 12 bp, Artificial Sequence
  Oligonucleotide primer for the detection of SNP TSC0024966
cgccacgttccc

SEQ ID NO: 312291 - DNA, 12 bp, Artificial Sequence
  Oligonucleotide primer for the detection of SNP TSC0024966
gtttgagattag

SEQ ID NO: 312292 - DNA, 12 bp, Artificial Sequence
  Oligonucleotide primer for the detection of SNP TSC0024968
ccaaaataatcc

SEQ ID NO: 312293 - DNA, 12 bp, Artificial Sequence
  Oligonucleotide primer for the detection of SNP TSC0024968
gtgatttagtta

SEQ ID NO: 312294 - DNA, 12 bp, Artificial Sequence
  Oligonucleotide primer for the detection of SNP TSC0024973
acctaaatacca

SEQ ID NO: 312295 - DNA, 12 bp, Artificial Sequence
  Oligonucleotide primer for the detection of SNP TSC0024973
tggtgtttaggt

SEQ ID NO: 312296 - DNA, 12 bp, Artificial Sequence
  Oligonucleotide primer for the detection of SNP TSC0024973
atttggatatta

SEQ ID NO: 312297 - DNA, 12 bp, Artificial Sequence
  Oligonucleotide primer for the detection of SNP TSC0024977
tctaaaattcct

SEQ ID NO: 312298 - DNA, 12 bp, Artificial Sequence
  Oligonucleotide primer for the detection of SNP TSC0024977
ttttggttgtta

SEQ ID NO: 312299 - DNA, 12 bp, Artificial Sequence
  Oligonucleotide primer for the detection of SNP TSC0024987
ctattctccaac

SEQ ID NO: 312300 - DNA, 12 bp, Artificial Sequence
  Oligonucleotide primer for the detection of SNP TSC0024987
ctctatccccca

SEQ ID NO: 312301 - DNA, 12 bp, Artificial Sequence
  Oligonucleotide primer for the detection of SNP TSC0024988
agtggggttttt

SEQ ID NO: 312302 - DNA, 12 bp, Artificial Sequence
  Oligonucleotide primer for the detection of SNP TSC0024988
accacaataaaa

SEQ ID NO: 312303 - DNA, 12 bp, Artificial Sequence
  Oligonucleotide primer for the detection of SNP TSC0024988
gatgaagttttt

SEQ ID NO: 312304 - DNA, 12 bp, Artificial Sequence
  Oligonucleotide primer for the detection of SNP TSC0024988
gatgaagttttc

SEQ ID NO: 312305 - DNA, 12 bp, Artificial Sequence
  Oligonucleotide primer for the detection of SNP TSC0024989
ttggttgttgtc

SEQ ID NO: 312306 - DNA, 12 bp, Artificial Sequence
  Oligonucleotide primer for the detection of SNP TSC0024989
ttaattattatc

SEQ ID NO: 312307 - DNA, 12 bp, Artificial Sequence
  Oligonucleotide primer for the detection of SNP TSC0024989
aaaaataataat

SEQ ID NO: 312308 - DNA, 12 bp, Artificial Sequence
  Oligonucleotide primer for the detection of SNP TSC0024990
ctcaaaaacaac

SEQ ID NO: 312309 - DNA, 12 bp, Artificial Sequence
  Oligonucleotide primer for the detection of SNP TSC0024990
ttttggttgttg

SEQ ID NO: 312310 - DNA, 12 bp, Artificial Sequence
  Oligonucleotide primer for the detection of SNP TSC0024992
gggagatcgagg

SEQ ID NO: 312311 - DNA, 12 bp, Artificial Sequence
  Oligonucleotide primer for the detection of SNP TSC0024992
aaaaaatcgaaa

SEQ ID NO: 312312 - DNA, 12 bp, Artificial Sequence
  Oligonucleotide primer for the detection of SNP TSC0024998
tcaaatataacc

SEQ ID NO: 312313 - DNA, 12 bp, Artificial Sequence
  Oligonucleotide primer for the detection of SNP TSC0024998
tattaaagaatg

SEQ ID NO: 312314 - DNA, 12 bp, Artificial Sequence
  Oligonucleotide primer for the detection of SNP TSC0024998
ttagatgtaatt

SEQ ID NO: 312315 - DNA, 12 bp, Artificial Sequence
  Oligonucleotide primer for the detection of SNP TSC0024999
tgaattattttt

SEQ ID NO: 312316 - DNA, 12 bp, Artificial Sequence
  Oligonucleotide primer for the detection of SNP TSC0024999
taaattattctc

SEQ ID NO: 312317 - DNA, 12 bp, Artificial Sequence
  Oligonucleotide primer for the detection of SNP TSC0024999
gagagaagggga

SEQ ID NO: 312318 - DNA, 12 bp, Artificial Sequence
  Oligonucleotide primer for the detection of SNP TSC0025000
tgagtataagga

SEQ ID NO: 312319 - DNA, 12 bp, Artificial Sequence
  Oligonucleotide primer for the detection of SNP TSC0025000
taaacacaaaaa

SEQ ID NO: 312320 - DNA, 12 bp, Artificial Sequence
  Oligonucleotide primer for the detection of SNP TSC0025000
ttaaagttaagg

SEQ ID NO: 312321 - DNA, 12 bp, Artificial Sequence
  Oligonucleotide primer for the detection of SNP TSC0025001
ctcctcctaaaa

SEQ ID NO: 312322 - DNA, 12 bp, Artificial Sequence
  Oligonucleotide primer for the detection of SNP TSC0025001
gtttagtttggg

SEQ ID NO: 312323 - DNA, 12 bp, Artificial Sequence
  Oligonucleotide primer for the detection of SNP TSC0025001
atccaacctaaa

SEQ ID NO: 312324 - DNA, 12 bp, Artificial Sequence
  Oligonucleotide primer for the detection of SNP TSC0025002
ataacccaaaaa

SEQ ID NO: 312325 - DNA, 12 bp, Artificial Sequence
  Oligonucleotide primer for the detection of SNP TSC0025002
gtagttttgttt

SEQ ID NO: 312326 - DNA, 12 bp, Artificial Sequence
  Oligonucleotide primer for the detection of SNP TSC0025002
ataaccctacct

SEQ ID NO: 312327 - DNA, 12 bp, Artificial Sequence
  Oligonucleotide primer for the detection of SNP TSC0025002
atgatttaggag

SEQ ID NO: 312328 - DNA, 12 bp, Artificial Sequence
  Oligonucleotide primer for the detection of SNP TSC0025003
atggtttttttg

SEQ ID NO: 312329 - DNA, 12 bp, Artificial Sequence
  Oligonucleotide primer for the detection of SNP TSC0025003
atggttttttcg

SEQ ID NO: 312330 - DNA, 12 bp, Artificial Sequence
  Oligonucleotide primer for the detection of SNP TSC0025006
ggagatgaaatg

SEQ ID NO: 312331 - DNA, 12 bp, Artificial Sequence
  Oligonucleotide primer for the detection of SNP TSC0025006
ggagatgaaacg

SEQ ID NO: 312332 - DNA, 12 bp, Artificial Sequence
  Oligonucleotide primer for the detection of SNP TSC0025006
aaaaataaaaca

SEQ ID NO: 312333 - DNA, 12 bp, Artificial Sequence
  Oligonucleotide primer for the detection of SNP TSC0025006
aaaaataaaacg

SEQ ID NO: 312334 - DNA, 12 bp, Artificial Sequence
  Oligonucleotide primer for the detection of SNP TSC0025006
gttaggtatgtt

SEQ ID NO: 312335 - DNA, 12 bp, Artificial Sequence
  Oligonucleotide primer for the detection of SNP TSC0025007
aatataacctct

SEQ ID NO: 312336 - DNA, 12 bp, Artificial Sequence
  Oligonucleotide primer for the detection of SNP TSC0025007
gtttagaatttt

SEQ ID NO: 312337 - DNA, 12 bp, Artificial Sequence
  Oligonucleotide primer for the detection of SNP TSC0025007
attcaaaatcct

SEQ ID NO: 312338 - DNA, 12 bp, Artificial Sequence
  Oligonucleotide primer for the detection of SNP TSC0025007
aatgtaattttt

SEQ ID NO: 312339 - DNA, 12 bp, Artificial Sequence
  Oligonucleotide primer for the detection of SNP TSC0025008
aaccaatttata

SEQ ID NO: 312340 - DNA, 12 bp, Artificial Sequence
  Oligonucleotide primer for the detection of SNP TSC0025008
tttattaaatgt

SEQ ID NO: 312341 - DNA, 12 bp, Artificial Sequence
  Oligonucleotide primer for the detection of SNP TSC0025008
cttattaaatat

SEQ ID NO: 312342 - DNA, 12 bp, Artificial Sequence
  Oligonucleotide primer for the detection of SNP TSC0025008
tagttagtttgt

SEQ ID NO: 312343 - DNA, 12 bp, Artificial Sequence
  Oligonukleotid-Primer
gtgtataaattg

SEQ ID NO: 312344 - DNA, 12 bp, Artificial Sequence
  Oligonucleotide primer for the detection of SNP TSC0025009
atacacaaacta

SEQ ID NO: 312345 - DNA, 12 bp, Artificial Sequence
  Oligonucleotide primer for the detection of SNP TSC0025009
tttaatgtttta

SEQ ID NO: 312346 - DNA, 12 bp, Artificial Sequence
  Oligonucleotide primer for the detection of SNP TSC0025010
aacaaaaacccc

SEQ ID NO: 312347 - DNA, 12 bp, Artificial Sequence
  Oligonucleotide primer for the detection of SNP TSC0025010
ttgtggaagttt

SEQ ID NO: 312348 - DNA, 12 bp, Artificial Sequence
  Oligonucleotide primer for the detection of SNP TSC0025010
ttgtggaagttc

SEQ ID NO: 312349 - DNA, 12 bp, Artificial Sequence
  Oligonucleotide primer for the detection of SNP TSC0025010
gtaaaggttttt

SEQ ID NO: 312350 - DNA, 12 bp, Artificial Sequence
  Oligonucleotide primer for the detection of SNP TSC0025011
ttgttatatttt

SEQ ID NO: 312351 - DNA, 12 bp, Artificial Sequence
  Oligonucleotide primer for the detection of SNP TSC0025011
tttattattaca

SEQ ID NO: 312352 - DNA, 12 bp, Artificial Sequence
  Oligonucleotide primer for the detection of SNP TSC0025011
taggaggtgagg

SEQ ID NO: 312353 - DNA, 12 bp, Artificial Sequence
  Oligonucleotide primer for the detection of SNP TSC0025012
acaattacttct

SEQ ID NO: 312354 - DNA, 12 bp, Artificial Sequence
  Oligonucleotide primer for the detection of SNP TSC0025012
atcttttcaata

SEQ ID NO: 312355 - DNA, 12 bp, Artificial Sequence
  Oligonucleotide primer for the detection of SNP TSC0025012
gtagttgttttt

SEQ ID NO: 312356 - DNA, 12 bp, Artificial Sequence
  Oligonucleotide primer for the detection of SNP TSC0025013
aaacaattactt

SEQ ID NO: 312357 - DNA, 12 bp, Artificial Sequence
  Oligonucleotide primer for the detection of SNP TSC0025013
ttttttaatata

SEQ ID NO: 312358 - DNA, 12 bp, Artificial Sequence
  Oligonucleotide primer for the detection of SNP TSC0025013
cttttcaatata

SEQ ID NO: 312359 - DNA, 12 bp, Artificial Sequence
  Oligonucleotide primer for the detection of SNP TSC0025013
ggtagttgtttt

SEQ ID NO: 312360 - DNA, 12 bp, Artificial Sequence
  Oligonucleotide primer for the detection of SNP TSC0025014
tatctaaaacat

SEQ ID NO: 312361 - DNA, 12 bp, Artificial Sequence
  Oligonucleotide primer for the detection of SNP TSC0025014
ttataaagatgg

SEQ ID NO: 312362 - DNA, 12 bp, Artificial Sequence
  Oligonucleotide primer for the detection of SNP TSC0025016
acaaaaacataa

SEQ ID NO: 312363 - DNA, 12 bp, Artificial Sequence
  Oligonucleotide primer for the detection of SNP TSC0025016
cctcctccatcc

SEQ ID NO: 312364 - DNA, 12 bp, Artificial Sequence
  Oligonucleotide primer for the detection of SNP TSC0025016
atagagatataa

SEQ ID NO: 312365 - DNA, 12 bp, Artificial Sequence
  Oligonucleotide primer for the detection of SNP TSC0025018
taacctctataa

SEQ ID NO: 312366 - DNA, 12 bp, Artificial Sequence
  Oligonucleotide primer for the detection of SNP TSC0025018
gagtaattagga

SEQ ID NO: 312367 - DNA, 12 bp, Artificial Sequence
  Oligonucleotide primer for the detection of SNP TSC0025018
ttggtttttata

SEQ ID NO: 312368 - DNA, 12 bp, Artificial Sequence
  Oligonucleotide primer for the detection of SNP TSC0025019
ctccctataaaa

SEQ ID NO: 312369 - DNA, 12 bp, Artificial Sequence
  Oligonucleotide primer for the detection of SNP TSC0025019
ttatgtgttggt

SEQ ID NO: 312370 - DNA, 12 bp, Artificial Sequence
  Oligonucleotide primer for the detection of SNP TSC0025019
ttatgtgtcggt

SEQ ID NO: 312371 - DNA, 12 bp, Artificial Sequence
  Oligonucleotide primer for the detection of SNP TSC0025019
catataccaata

SEQ ID NO: 312372 - DNA, 12 bp, Artificial Sequence
  Oligonucleotide primer for the detection of SNP TSC0025019
catataccgata

SEQ ID NO: 312373 - DNA, 12 bp, Artificial Sequence
  Oligonucleotide primer for the detection of SNP TSC0025021
atttttcccttc

SEQ ID NO: 312374 - DNA, 12 bp, Artificial Sequence
  Oligonucleotide primer for the detection of SNP TSC0025021
ggtagtaaatgg

SEQ ID NO: 312375 - DNA, 12 bp, Artificial Sequence
  Oligonucleotide primer for the detection of SNP TSC0025022
ctattcaataat

SEQ ID NO: 312376 - DNA, 12 bp, Artificial Sequence
  Oligonucleotide primer for the detection of SNP TSC0025022
ttaaagttataa

SEQ ID NO: 312377 - DNA, 12 bp, Artificial Sequence
  Oligonucleotide primer for the detection of SNP TSC0025023
cctcctttcttt

SEQ ID NO: 312378 - DNA, 12 bp, Artificial Sequence
  Oligonucleotide primer for the detection of SNP TSC0025023
aagggagagaga

SEQ ID NO: 312379 - DNA, 12 bp, Artificial Sequence
  Oligonucleotide primer for the detection of SNP TSC0025024
attataaaataa

SEQ ID NO: 312380 - DNA, 12 bp, Artificial Sequence
  Oligonucleotide primer for the detection of SNP TSC0025024
ggaataatattg

SEQ ID NO: 312381 - DNA, 12 bp, Artificial Sequence
  Oligonucleotide primer for the detection of SNP TSC0025024
tattgtgaggta

SEQ ID NO: 312382 - DNA, 12 bp, Artificial Sequence
  Oligonucleotide primer for the detection of SNP TSC0025026
tcttaaattcct

SEQ ID NO: 312383 - DNA, 12 bp, Artificial Sequence
  Oligonucleotide primer for the detection of SNP TSC0025026
gagattatttga

SEQ ID NO: 312384 - DNA, 12 bp, Artificial Sequence
  Oligonucleotide primer for the detection of SNP TSC0025026
ttttgaattttt

SEQ ID NO: 312385 - DNA, 12 bp, Artificial Sequence
  Oligonucleotide primer for the detection of SNP TSC0025034
tggtttcgattt

SEQ ID NO: 312386 - DNA, 12 bp, Artificial Sequence
  Oligonucleotide primer for the detection of SNP TSC0025034
taggaaagagtt

SEQ ID NO: 312387 - DNA, 12 bp, Artificial Sequence
  Oligonucleotide primer for the detection of SNP TSC0025036
aaaattttaact

SEQ ID NO: 312388 - DNA, 12 bp, Artificial Sequence
  Oligonucleotide primer for the detection of SNP TSC0025036
ttgtgagttatg

SEQ ID NO: 312389 - DNA, 12 bp, Artificial Sequence
  Oligonucleotide primer for the detection of SNP TSC0025036
ttgcgagttatg

SEQ ID NO: 312390 - DNA, 12 bp, Artificial Sequence
  Oligonucleotide primer for the detection of SNP TSC0025036
ttgtgagttacg

SEQ ID NO: 312391 - DNA, 12 bp, Artificial Sequence
  Oligonucleotide primer for the detection of SNP TSC0025036
ttgcgagttacg

SEQ ID NO: 312392 - DNA, 12 bp, Artificial Sequence
  Oligonucleotide primer for the detection of SNP TSC0025036
ctacaaaccaca

SEQ ID NO: 312393 - DNA, 12 bp, Artificial Sequence
  Oligonucleotide primer for the detection of SNP TSC0025036
ctacaaaccacg

SEQ ID NO: 312394 - DNA, 12 bp, Artificial Sequence
  Oligonucleotide primer for the detection of SNP TSC0025036
ctacgaaccaca

SEQ ID NO: 312395 - DNA, 12 bp, Artificial Sequence
  Oligonucleotide primer for the detection of SNP TSC0025036
ctacgaaccacg

SEQ ID NO: 312396 - DNA, 12 bp, Artificial Sequence
  Oligonucleotide primer for the detection of SNP TSC0025036
gagattttagtt

SEQ ID NO: 312397 - DNA, 12 bp, Artificial Sequence
  Oligonucleotide primer for the detection of SNP TSC0025037
caaaccacattc

SEQ ID NO: 312398 - DNA, 12 bp, Artificial Sequence
  Oligonucleotide primer for the detection of SNP TSC0025037
caaaccacgttc

SEQ ID NO: 312399 - DNA, 12 bp, Artificial Sequence
  Oligonucleotide primer for the detection of SNP TSC0025037
cgaaccacattc

SEQ ID NO: 312400 - DNA, 12 bp, Artificial Sequence
  Oligonucleotide primer for the detection of SNP TSC0025037
cgaaccacgttc

SEQ ID NO: 312401 - DNA, 12 bp, Artificial Sequence
  Oligonucleotide primer for the detection of SNP TSC0025037
gggagattttag

SEQ ID NO: 312402 - DNA, 12 bp, Artificial Sequence
  Oligonucleotide primer for the detection of SNP TSC0025040
caataaaattat

SEQ ID NO: 312403 - DNA, 12 bp, Artificial Sequence
  Oligonucleotide primer for the detection of SNP TSC0025040
acttcatcatca

SEQ ID NO: 312404 - DNA, 12 bp, Artificial Sequence
  Oligonucleotide primer for the detection of SNP TSC0025040
tagtggaattat

SEQ ID NO: 312405 - DNA, 12 bp, Artificial Sequence
  Oligonucleotide primer for the detection of SNP TSC0025043
ataaactcattt

SEQ ID NO: 312406 - DNA, 12 bp, Artificial Sequence
  Oligonucleotide primer for the detection of SNP TSC0025043
aagatatttatg

SEQ ID NO: 312407 - DNA, 12 bp, Artificial Sequence
  Oligonucleotide primer for the detection of SNP TSC0025046
ctacacaaacca

SEQ ID NO: 312408 - DNA, 12 bp, Artificial Sequence
  Oligonucleotide primer for the detection of SNP TSC0025046
ctacgcaaacca

SEQ ID NO: 312409 - DNA, 12 bp, Artificial Sequence
  Oligonucleotide primer for the detection of SNP TSC0025046
agtagtagggtt

SEQ ID NO: 312410 - DNA, 12 bp, Artificial Sequence
  Oligonucleotide primer for the detection of SNP TSC0025046
aacaacaaaact

SEQ ID NO: 312411 - DNA, 12 bp, Artificial Sequence
  Oligonucleotide primer for the detection of SNP TSC0025046
ttgtgtagatta

SEQ ID NO: 312412 - DNA, 12 bp, Artificial Sequence
  Oligonucleotide primer for the detection of SNP TSC0025046
ttgcgtagatta

SEQ ID NO: 312413 - DNA, 12 bp, Artificial Sequence
  Oligonucleotide primer for the detection of SNP TSC0025047
cactatctatct

SEQ ID NO: 312414 - DNA, 12 bp, Artificial Sequence
  Oligonucleotide primer for the detection of SNP TSC0025047
ggaaaatatttg

SEQ ID NO: 312415 - DNA, 12 bp, Artificial Sequence
  Oligonucleotide primer for the detection of SNP TSC0025048
aacaaaaaaaca

SEQ ID NO: 312416 - DNA, 12 bp, Artificial Sequence
  Oligonucleotide primer for the detection of SNP TSC0025048
attatgtttaat

SEQ ID NO: 312417 - DNA, 12 bp, Artificial Sequence
  Oligonucleotide primer for the detection of SNP TSC0025048
attacgtttaat

SEQ ID NO: 312418 - DNA, 12 bp, Artificial Sequence
  Oligonucleotide primer for the detection of SNP TSC0025048
accacatctaat

SEQ ID NO: 312419 - DNA, 12 bp, Artificial Sequence
  Oligonucleotide primer for the detection of SNP TSC0025048
accacgtctaat

SEQ ID NO: 312420 - DNA, 12 bp, Artificial Sequence
  Oligonucleotide primer for the detection of SNP TSC0025048
aatagaaaagta

SEQ ID NO: 312421 - DNA, 12 bp, Artificial Sequence
  Oligonucleotide primer for the detection of SNP TSC0025049
aacttaaacaac

SEQ ID NO: 312422 - DNA, 12 bp, Artificial Sequence
  Oligonucleotide primer for the detection of SNP TSC0025049
agagttttattt

SEQ ID NO: 312423 - DNA, 12 bp, Artificial Sequence
  Oligonucleotide primer for the detection of SNP TSC0025049
agagttttattc

SEQ ID NO: 312424 - DNA, 12 bp, Artificial Sequence
  Oligonucleotide primer for the detection of SNP TSC0025049
caaaatctcact

SEQ ID NO: 312425 - DNA, 12 bp, Artificial Sequence
  Oligonucleotide primer for the detection of SNP TSC0025049
agtttgggtaat

SEQ ID NO: 312426 - DNA, 12 bp, Artificial Sequence
  Oligonucleotide primer for the detection of SNP TSC0025050
ttcctaaattaa

SEQ ID NO: 312427 - DNA, 12 bp, Artificial Sequence
  Oligonucleotide primer for the detection of SNP TSC0025050
ggatttagttgt

SEQ ID NO: 312428 - DNA, 12 bp, Artificial Sequence
  Oligonucleotide primer for the detection of SNP TSC0025050
aaatctaactac

SEQ ID NO: 312429 - DNA, 12 bp, Artificial Sequence
  Oligonucleotide primer for the detection of SNP TSC0025050
tttttggattga

SEQ ID NO: 312430 - DNA, 12 bp, Artificial Sequence
  Oligonucleotide primer for the detection of SNP TSC0025051
ttggagtatagt

SEQ ID NO: 312431 - DNA, 12 bp, Artificial Sequence
  Oligonucleotide primer for the detection of SNP TSC0025051
agtgagtcgaga

SEQ ID NO: 312432 - DNA, 12 bp, Artificial Sequence
  Oligonucleotide primer for the detection of SNP TSC0025052
aagaaggagtgg

SEQ ID NO: 312433 - DNA, 12 bp, Artificial Sequence
  Oligonucleotide primer for the detection of SNP TSC0025052
aagaaggagcgg

SEQ ID NO: 312434 - DNA, 12 bp, Artificial Sequence
  Oligonucleotide primer for the detection of SNP TSC0025052
aaaaaaaaacga

SEQ ID NO: 312435 - DNA, 12 bp, Artificial Sequence
  Oligonucleotide primer for the detection of SNP TSC0025052
ttattagaaaat

SEQ ID NO: 312436 - DNA, 12 bp, Artificial Sequence
  Oligonucleotide primer for the detection of SNP TSC0025053
tctcgactcact

SEQ ID NO: 312437 - DNA, 12 bp, Artificial Sequence
  Oligonucleotide primer for the detection of SNP TSC0025054
atttattctttc

SEQ ID NO: 312438 - DNA, 12 bp, Artificial Sequence
  Oligonucleotide primer for the detection of SNP TSC0025054
ttaaattgagta

SEQ ID NO: 312439 - DNA, 12 bp, Artificial Sequence
  Oligonucleotide primer for the detection of SNP TSC0025054
ttaaactaaaca

SEQ ID NO: 312440 - DNA, 12 bp, Artificial Sequence
  Oligonucleotide primer for the detection of SNP TSC0025054
gtttattttttt

SEQ ID NO: 312441 - DNA, 12 bp, Artificial Sequence
  Oligonucleotide primer for the detection of SNP TSC0025055
tatctaaaacac

SEQ ID NO: 312442 - DNA, 12 bp, Artificial Sequence
  Oligonucleotide primer for the detection of SNP TSC0025055
ttgagatggaga

SEQ ID NO: 312443 - DNA, 12 bp, Artificial Sequence
  Oligonucleotide primer for the detection of SNP TSC0025055
tcgagatggaga

SEQ ID NO: 312444 - DNA, 12 bp, Artificial Sequence
  Oligonucleotide primer for the detection of SNP TSC0025055
ttgagacggaga

SEQ ID NO: 312445 - DNA, 12 bp, Artificial Sequence
  Oligonucleotide primer for the detection of SNP TSC0025055
tcgagacggaga

SEQ ID NO: 312446 - DNA, 12 bp, Artificial Sequence
  Oligonucleotide primer for the detection of SNP TSC0025062
ccaaaaaaacaa

SEQ ID NO: 312447 - DNA, 12 bp, Artificial Sequence
  Oligonucleotide primer for the detection of SNP TSC0025062
taaaggggaaat

SEQ ID NO: 312448 - DNA, 12 bp, Artificial Sequence
  Oligonucleotide primer for the detection of SNP TSC0025062
ttaggagggtag

SEQ ID NO: 312449 - DNA, 12 bp, Artificial Sequence
  Oligonucleotide primer for the detection of SNP TSC0025063
caaactttccta

SEQ ID NO: 312450 - DNA, 12 bp, Artificial Sequence
  Oligonucleotide primer for the detection of SNP TSC0025063
cgaactttccta

SEQ ID NO: 312451 - DNA, 12 bp, Artificial Sequence
  Oligonucleotide primer for the detection of SNP TSC0025063
gaatagatttag

SEQ ID NO: 312452 - DNA, 12 bp, Artificial Sequence
  Oligonucleotide primer for the detection of SNP TSC0025063
aaacaaacccaa

SEQ ID NO: 312453 - DNA, 12 bp, Artificial Sequence
  Oligonucleotide primer for the detection of SNP TSC0025063
tgggtttttttg

SEQ ID NO: 312454 - DNA, 12 bp, Artificial Sequence
  Oligonucleotide primer for the detection of SNP TSC0025063
cgggtttttttg

SEQ ID NO: 312455 - DNA, 12 bp, Artificial Sequence
  Oligonucleotide primer for the detection of SNP TSC0025067
aatctttactat

SEQ ID NO: 312456 - DNA, 12 bp, Artificial Sequence
  Oligonucleotide primer for the detection of SNP TSC0025067
ggtttttgttta

SEQ ID NO: 312457 - DNA, 12 bp, Artificial Sequence
  Oligonucleotide primer for the detection of SNP TSC0025068
aactttcacaac

SEQ ID NO: 312458 - DNA, 12 bp, Artificial Sequence
  Oligonucleotide primer for the detection of SNP TSC0025068
atggagtgtggg

SEQ ID NO: 312459 - DNA, 12 bp, Artificial Sequence
  Oligonucleotide primer for the detection of SNP TSC0025068
atggagcgtggg

SEQ ID NO: 312460 - DNA, 12 bp, Artificial Sequence
  Oligonucleotide primer for the detection of SNP TSC0025069
ccactacaatcc

SEQ ID NO: 312461 - DNA, 12 bp, Artificial Sequence
  Oligonucleotide primer for the detection of SNP TSC0025070
agttaatttttc

SEQ ID NO: 312462 - DNA, 12 bp, Artificial Sequence
  Oligonucleotide primer for the detection of SNP TSC0025070
aactaatttttc

SEQ ID NO: 312463 - DNA, 12 bp, Artificial Sequence
  Oligonucleotide primer for the detection of SNP TSC0025071
tgatatggatgg

SEQ ID NO: 312464 - DNA, 12 bp, Artificial Sequence
  Oligonucleotide primer for the detection of SNP TSC0025071
taacataaataa

SEQ ID NO: 312465 - DNA, 12 bp, Artificial Sequence
  Oligonucleotide primer for the detection of SNP TSC0025072
aaactctatatt

SEQ ID NO: 312466 - DNA, 12 bp, Artificial Sequence
  Oligonucleotide primer for the detection of SNP TSC0025072
tagggttgagag

SEQ ID NO: 312467 - DNA, 12 bp, Artificial Sequence
  Oligonucleotide primer for the detection of SNP TSC0025073
acttaaaaaaat

SEQ ID NO: 312468 - DNA, 12 bp, Artificial Sequence
  Oligonucleotide primer for the detection of SNP TSC0025073
taaggtatataa

SEQ ID NO: 312469 - DNA, 12 bp, Artificial Sequence
  Oligonucleotide primer for the detection of SNP TSC0025074
aactactccaca

SEQ ID NO: 312470 - DNA, 12 bp, Artificial Sequence
  Oligonucleotide primer for the detection of SNP TSC0025074
agatataaattt

SEQ ID NO: 312471 - DNA, 12 bp, Artificial Sequence
  Oligonucleotide primer for the detection of SNP TSC0025074
aaatacaaatct

SEQ ID NO: 312472 - DNA, 12 bp, Artificial Sequence
  Oligonucleotide primer for the detection of SNP TSC0025074
aattgttttata

SEQ ID NO: 312473 - DNA, 12 bp, Artificial Sequence
  Oligonucleotide primer for the detection of SNP TSC0025081
caacccatactc

SEQ ID NO: 312474 - DNA, 12 bp, Artificial Sequence
  Oligonucleotide primer for the detection of SNP TSC0025082
tatttctttata

SEQ ID NO: 312475 - DNA, 12 bp, Artificial Sequence
  Oligonucleotide primer for the detection of SNP TSC0025082
attcttacacta

SEQ ID NO: 312476 - DNA, 12 bp, Artificial Sequence
  Oligonucleotide primer for the detection of SNP TSC0025083
ctaaatacaaat

SEQ ID NO: 312477 - DNA, 12 bp, Artificial Sequence
  Oligonucleotide primer for the detection of SNP TSC0025083
aggtagatagat

SEQ ID NO: 312478 - DNA, 12 bp, Artificial Sequence
  Oligonucleotide primer for the detection of SNP TSC0025083
ttgagtgtaagt

SEQ ID NO: 312479 - DNA, 12 bp, Artificial Sequence
  Oligonucleotide primer for the detection of SNP TSC0025085
taaactcctacc

SEQ ID NO: 312480 - DNA, 12 bp, Artificial Sequence
  Oligonucleotide primer for the detection of SNP TSC0025085
tttgtttagagg

SEQ ID NO: 312481 - DNA, 12 bp, Artificial Sequence
  Oligonucleotide primer for the detection of SNP TSC0025086
aaacaaacacat

SEQ ID NO: 312482 - DNA, 12 bp, Artificial Sequence
  Oligonucleotide primer for the detection of SNP TSC0025086
aaacaaacacgt

SEQ ID NO: 312483 - DNA, 12 bp, Artificial Sequence
  Oligonucleotide primer for the detection of SNP TSC0025086
aaacgaacacat

SEQ ID NO: 312484 - DNA, 12 bp, Artificial Sequence
  Oligonucleotide primer for the detection of SNP TSC0025086
aaacgaacacgt

SEQ ID NO: 312485 - DNA, 12 bp, Artificial Sequence
  Oligonucleotide primer for the detection of SNP TSC0025086
aaggtttgggaa

SEQ ID NO: 312486 - DNA, 12 bp, Artificial Sequence
  Oligonucleotide primer for the detection of SNP TSC0025087
attaaaaacatc

SEQ ID NO: 312487 - DNA, 12 bp, Artificial Sequence
  Oligonucleotide primer for the detection of SNP TSC0025087
tttgatgtttat

SEQ ID NO: 312488 - DNA, 12 bp, Artificial Sequence
  Oligonucleotide primer for the detection of SNP TSC0025087
ctaatacttata

SEQ ID NO: 312489 - DNA, 12 bp, Artificial Sequence
  Oligonucleotide primer for the detection of SNP TSC0025087
gttaaaaatatt

SEQ ID NO: 312490 - DNA, 12 bp, Artificial Sequence
  Oligonucleotide primer for the detection of SNP TSC0025088
ccatatttacat

SEQ ID NO: 312491 - DNA, 12 bp, Artificial Sequence
  Oligonucleotide primer for the detection of SNP TSC0025088
aaaatttagata

SEQ ID NO: 312492 - DNA, 12 bp, Artificial Sequence
  Oligonucleotide primer for the detection of SNP TSC0025089
acattcaaaaaa

SEQ ID NO: 312493 - DNA, 12 bp, Artificial Sequence
  Oligonucleotide primer for the detection of SNP TSC0025089
aaacaataaaac

SEQ ID NO: 312494 - DNA, 12 bp, Artificial Sequence
  Oligonucleotide primer for the detection of SNP TSC0025089
atatttaaggaa

SEQ ID NO: 312495 - DNA, 12 bp, Artificial Sequence
  Oligonucleotide primer for the detection of SNP TSC0025092
aattcctaacaa

SEQ ID NO: 312496 - DNA, 12 bp, Artificial Sequence
  Oligonucleotide primer for the detection of SNP TSC0025092
gtattggtttgt

SEQ ID NO: 312497 - DNA, 12 bp, Artificial Sequence
  Oligonucleotide primer for the detection of SNP TSC0025092
actaacctataa

SEQ ID NO: 312498 - DNA, 12 bp, Artificial Sequence
  Oligonucleotide primer for the detection of SNP TSC0025092
agtttttaatag

SEQ ID NO: 312499 - DNA, 12 bp, Artificial Sequence
  Oligonucleotide primer for the detection of SNP TSC0025093
atctaatactac

SEQ ID NO: 312500 - DNA, 12 bp, Artificial Sequence
  Oligonucleotide primer for the detection of SNP TSC0025093
ttgttaggttag

SEQ ID NO: 312501 - DNA, 12 bp, Artificial Sequence
  Oligonucleotide primer for the detection of SNP TSC0025093
ctatcaaatcaa

SEQ ID NO: 312502 - DNA, 12 bp, Artificial Sequence
  Oligonucleotide primer for the detection of SNP TSC0025093
gtttaatgttat

SEQ ID NO: 312503 - DNA, 12 bp, Artificial Sequence
  Oligonucleotide primer for the detection of SNP TSC0025096
atattggattta

SEQ ID NO: 312504 - DNA, 12 bp, Artificial Sequence
  Oligonucleotide primer for the detection of SNP TSC0025096
acattaaactca

SEQ ID NO: 312505 - DNA, 12 bp, Artificial Sequence
  Oligonucleotide primer for the detection of SNP TSC0025096
agttgaagaatt

SEQ ID NO: 312506 - DNA, 12 bp, Artificial Sequence
  Oligonucleotide primer for the detection of SNP TSC0025103
aaacaatcaccg

SEQ ID NO: 312507 - DNA, 12 bp, Artificial Sequence
  Oligonucleotide primer for the detection of SNP TSC0025103
aaacgatcacca

SEQ ID NO: 312508 - DNA, 12 bp, Artificial Sequence
  Oligonucleotide primer for the detection of SNP TSC0025103
aaacgatcaccg

SEQ ID NO: 312509 - DNA, 12 bp, Artificial Sequence
  Oligonucleotide primer for the detection of SNP TSC0025103
aaggaatattat

SEQ ID NO: 312510 - DNA, 12 bp, Artificial Sequence
  Oligonucleotide primer for the detection of SNP TSC0025103
aaaaacaccaca

SEQ ID NO: 312511 - DNA, 12 bp, Artificial Sequence
  Oligonucleotide primer for the detection of SNP TSC0025103
aagtgattattg

SEQ ID NO: 312512 - DNA, 12 bp, Artificial Sequence
  Oligonucleotide primer for the detection of SNP TSC0025103
aagcgattattg

SEQ ID NO: 312513 - DNA, 12 bp, Artificial Sequence
  Oligonukleotid-Primer
aagtgattatcg

SEQ ID NO: 312514 - DNA, 12 bp, Artificial Sequence
  Oligonucleotide primer for the detection of SNP TSC0025103
aagcgattatcg

SEQ ID NO: 312515 - DNA, 12 bp, Artificial Sequence
  Oligonucleotide primer for the detection of SNP TSC0025108
ctactaaaaact

SEQ ID NO: 312516 - DNA, 12 bp, Artificial Sequence
  Oligonucleotide primer for the detection of SNP TSC0025108
tcctaactcaca

SEQ ID NO: 312517 - DNA, 12 bp, Artificial Sequence
  Oligonucleotide primer for the detection of SNP TSC0025108
ttgttgggagtt

SEQ ID NO: 312518 - DNA, 12 bp, Artificial Sequence
  Oligonucleotide primer for the detection of SNP TSC0025109
aatctcaacaat

SEQ ID NO: 312519 - DNA, 12 bp, Artificial Sequence
  Oligonucleotide primer for the detection of SNP TSC0025109
atttggttgatg

SEQ ID NO: 312520 - DNA, 12 bp, Artificial Sequence
  Oligonucleotide primer for the detection of SNP TSC0025110
acttatctaata

SEQ ID NO: 312521 - DNA, 12 bp, Artificial Sequence
  Oligonucleotide primer for the detection of SNP TSC0025110
tggattattttt

SEQ ID NO: 312522 - DNA, 12 bp, Artificial Sequence
  Oligonucleotide primer for the detection of SNP TSC0025110
accatctttaaa

SEQ ID NO: 312523 - DNA, 12 bp, Artificial Sequence
  Oligonucleotide primer for the detection of SNP TSC0025111
aaatacccaaaa

SEQ ID NO: 312524 - DNA, 12 bp, Artificial Sequence
  Oligonucleotide primer for the detection of SNP TSC0025111
tccaatcttcca

SEQ ID NO: 312525 - DNA, 12 bp, Artificial Sequence
  Oligonucleotide primer for the detection of SNP TSC0025111
taaatatttaag

SEQ ID NO: 312526 - DNA, 12 bp, Artificial Sequence
  Oligonucleotide primer for the detection of SNP TSC0025113
actaattattat

SEQ ID NO: 312527 - DNA, 12 bp, Artificial Sequence
  Oligonucleotide primer for the detection of SNP TSC0025113
tgagaaaatggg

SEQ ID NO: 312528 - DNA, 12 bp, Artificial Sequence
  Oligonucleotide primer for the detection of SNP TSC0025122
ctacctaccctt

SEQ ID NO: 312529 - DNA, 12 bp, Artificial Sequence
  Oligonucleotide primer for the detection of SNP TSC0025122
tactaaataccc

SEQ ID NO: 312530 - DNA, 12 bp, Artificial Sequence
  Oligonucleotide primer for the detection of SNP TSC0025123
cactacccctcc

SEQ ID NO: 312531 - DNA, 12 bp, Artificial Sequence
  Oligonucleotide primer for the detection of SNP TSC0025123
gtaggtaggaag

SEQ ID NO: 312532 - DNA, 12 bp, Artificial Sequence
  Oligonucleotide primer for the detection of SNP TSC0025123
tattgttttttc

SEQ ID NO: 312533 - DNA, 12 bp, Artificial Sequence
  Oligonucleotide primer for the detection of SNP TSC0025127
aaatattccaac

SEQ ID NO: 312534 - DNA, 12 bp, Artificial Sequence
  Oligonucleotide primer for the detection of SNP TSC0025127
ataaatgagggg

SEQ ID NO: 312535 - DNA, 12 bp, Artificial Sequence
  Oligonucleotide primer for the detection of SNP TSC0025127
ataaacgagggg

SEQ ID NO: 312536 - DNA, 12 bp, Artificial Sequence
  Oligonucleotide primer for the detection of SNP TSC0025127
aatgttttaatt

SEQ ID NO: 312537 - DNA, 12 bp, Artificial Sequence
  Oligonucleotide primer for the detection of SNP TSC0025129
taacctcacctc

SEQ ID NO: 312538 - DNA, 12 bp, Artificial Sequence
  Oligonucleotide primer for the detection of SNP TSC0025129
gtatttagtaga

SEQ ID NO: 312539 - DNA, 12 bp, Artificial Sequence
  Oligonucleotide primer for the detection of SNP TSC0025129
acacccaacaaa

SEQ ID NO: 312540 - DNA, 12 bp, Artificial Sequence
  Oligonucleotide primer for the detection of SNP TSC0025134
taagaaaaattg

SEQ ID NO: 312541 - DNA, 12 bp, Artificial Sequence
  Oligonucleotide primer for the detection of SNP TSC0025134
taagaaaaatcg

SEQ ID NO: 312542 - DNA, 12 bp, Artificial Sequence
  Oligonucleotide primer for the detection of SNP TSC0025135
actctaaaaacc

SEQ ID NO: 312543 - DNA, 12 bp, Artificial Sequence
  Oligonucleotide primer for the detection of SNP TSC0025135
ctaaacatctta

SEQ ID NO: 312544 - DNA, 12 bp, Artificial Sequence
  Oligonucleotide primer for the detection of SNP TSC0025135
attttgaaagtt

SEQ ID NO: 312545 - DNA, 12 bp, Artificial Sequence
  Oligonucleotide primer for the detection of SNP TSC0025141
cataaaataaac

SEQ ID NO: 312546 - DNA, 12 bp, Artificial Sequence
  Oligonucleotide primer for the detection of SNP TSC0025142
ccttctctccac

SEQ ID NO: 312547 - DNA, 12 bp, Artificial Sequence
  Oligonucleotide primer for the detection of SNP TSC0025142
attgtgtgtgtg

SEQ ID NO: 312548 - DNA, 12 bp, Artificial Sequence
  Oligonucleotide primer for the detection of SNP TSC0025142
atcgtgtgtgtg

SEQ ID NO: 312549 - DNA, 12 bp, Artificial Sequence
  Oligonucleotide primer for the detection of SNP TSC0025143
taacctccacaa

SEQ ID NO: 312550 - DNA, 12 bp, Artificial Sequence
  Oligonucleotide primer for the detection of SNP TSC0025143
taacctccgcaa

SEQ ID NO: 312551 - DNA, 12 bp, Artificial Sequence
  Oligonucleotide primer for the detection of SNP TSC0025143
aaatcttccccc

SEQ ID NO: 312552 - DNA, 12 bp, Artificial Sequence
  Oligonucleotide primer for the detection of SNP TSC0025143
tgatttttgtaa

SEQ ID NO: 312553 - DNA, 12 bp, Artificial Sequence
  Oligonucleotide primer for the detection of SNP TSC0025143
tgattttcgtaa

SEQ ID NO: 312554 - DNA, 12 bp, Artificial Sequence
  Oligonucleotide primer for the detection of SNP TSC0025144
taaatacccaaa

SEQ ID NO: 312555 - DNA, 12 bp, Artificial Sequence
  Oligonucleotide primer for the detection of SNP TSC0025144
aaaatcactcct

SEQ ID NO: 312556 - DNA, 12 bp, Artificial Sequence
  Oligonucleotide primer for the detection of SNP TSC0025144
tgggtgtttaga

SEQ ID NO: 312557 - DNA, 12 bp, Artificial Sequence
  Oligonucleotide primer for the detection of SNP TSC0025145
gggtgtagttag

SEQ ID NO: 312558 - DNA, 12 bp, Artificial Sequence
  Oligonucleotide primer for the detection of SNP TSC0025145
aatacaaccaaa

SEQ ID NO: 312559 - DNA, 12 bp, Artificial Sequence
  Oligonucleotide primer for the detection of SNP TSC0025145
tgggggtatgtt

SEQ ID NO: 312560 - DNA, 12 bp, Artificial Sequence
  Oligonucleotide primer for the detection of SNP TSC0025146
acccaaaactac

SEQ ID NO: 312561 - DNA, 12 bp, Artificial Sequence
  Oligonucleotide primer for the detection of SNP TSC0025146
ttttagttttat

SEQ ID NO: 312562 - DNA, 12 bp, Artificial Sequence
  Oligonucleotide primer for the detection of SNP TSC0025147
tcaacttcatac

SEQ ID NO: 312563 - DNA, 12 bp, Artificial Sequence
  Oligonucleotide primer for the detection of SNP TSC0025147
gtgttttatgta

SEQ ID NO: 312564 - DNA, 12 bp, Artificial Sequence
  Oligonucleotide primer for the detection of SNP TSC0025148
ccctaccctcac

SEQ ID NO: 312565 - DNA, 12 bp, Artificial Sequence
  Oligonucleotide primer for the detection of SNP TSC0025148
tttttaggttcg

SEQ ID NO: 312566 - DNA, 12 bp, Artificial Sequence
  Oligonucleotide primer for the detection of SNP TSC0025150
aataaaacgata

SEQ ID NO: 312567 - DNA, 12 bp, Artificial Sequence
  Oligonucleotide primer for the detection of SNP TSC0025150
aaatagggtggg

SEQ ID NO: 312568 - DNA, 12 bp, Artificial Sequence
  Oligonucleotide primer for the detection of SNP TSC0025150
aaatagggcggg

SEQ ID NO: 312569 - DNA, 12 bp, Artificial Sequence
  Oligonucleotide primer for the detection of SNP TSC0025150
aaacaaaacgaa

SEQ ID NO: 312570 - DNA, 12 bp, Artificial Sequence
  Oligonucleotide primer for the detection of SNP TSC0025150
gagtgagatgat

SEQ ID NO: 312571 - DNA, 12 bp, Artificial Sequence
  Oligonucleotide primer for the detection of SNP TSC0025150
gagtgagacgat

SEQ ID NO: 312572 - DNA, 12 bp, Artificial Sequence
  Oligonucleotide primer for the detection of SNP TSC0025155
taaaaaaattct

SEQ ID NO: 312573 - DNA, 12 bp, Artificial Sequence
  Oligonucleotide primer for the detection of SNP TSC0025155
tggtgaaatgag

SEQ ID NO: 312574 - DNA, 12 bp, Artificial Sequence
  Oligonucleotide primer for the detection of SNP TSC0025156
aattctcctaac

SEQ ID NO: 312575 - DNA, 12 bp, Artificial Sequence
  Oligonucleotide primer for the detection of SNP TSC0025156
ttttttaatgga

SEQ ID NO: 312576 - DNA, 12 bp, Artificial Sequence
  Oligonucleotide primer for the detection of SNP TSC0025157
tttcttcttaaa

SEQ ID NO: 312577 - DNA, 12 bp, Artificial Sequence
  Oligonucleotide primer for the detection of SNP TSC0025157
attgaggaaatt

SEQ ID NO: 312578 - DNA, 12 bp, Artificial Sequence
  Oligonucleotide primer for the detection of SNP TSC0025157
actaaaaaaatt

SEQ ID NO: 312579 - DNA, 12 bp, Artificial Sequence
  Oligonucleotide primer for the detection of SNP TSC0025158
aaaaaaacttta

SEQ ID NO: 312580 - DNA, 12 bp, Artificial Sequence
  Oligonucleotide primer for the detection of SNP TSC0025158
tatgtatttatg

SEQ ID NO: 312581 - DNA, 12 bp, Artificial Sequence
  Oligonucleotide primer for the detection of SNP TSC0025158
tatgtatttacg

SEQ ID NO: 312582 - DNA, 12 bp, Artificial Sequence
  Oligonucleotide primer for the detection of SNP TSC0025158
tatacatttaca

SEQ ID NO: 312583 - DNA, 12 bp, Artificial Sequence
  Oligonucleotide primer for the detection of SNP TSC0025158
tatacatttacg

SEQ ID NO: 312584 - DNA, 12 bp, Artificial Sequence
  Oligonucleotide primer for the detection of SNP TSC0025158
aagaaaatttta

SEQ ID NO: 312585 - DNA, 12 bp, Artificial Sequence
  Oligonucleotide primer for the detection of SNP TSC0025159
cttaaaaataaa

SEQ ID NO: 312586 - DNA, 12 bp, Artificial Sequence
  Oligonucleotide primer for the detection of SNP TSC0025159
ataagaagggaa

SEQ ID NO: 312587 - DNA, 12 bp, Artificial Sequence
  Oligonucleotide primer for the detection of SNP TSC0025159
tttgaaaatggg

SEQ ID NO: 312588 - DNA, 12 bp, Artificial Sequence
  Oligonucleotide primer for the detection of SNP TSC0025160
aaaggttttagt

SEQ ID NO: 312589 - DNA, 12 bp, Artificial Sequence
  Oligonucleotide primer for the detection of SNP TSC0025160
tagatgtgggtt

SEQ ID NO: 312590 - DNA, 12 bp, Artificial Sequence
  Oligonucleotide primer for the detection of SNP TSC0025161
acaaaaaacccc

SEQ ID NO: 312591 - DNA, 12 bp, Artificial Sequence
  Oligonucleotide primer for the detection of SNP TSC0025161
ttgatttaagta

SEQ ID NO: 312592 - DNA, 12 bp, Artificial Sequence
  Oligonucleotide primer for the detection of SNP TSC0025162
atcctctacaca

SEQ ID NO: 312593 - DNA, 12 bp, Artificial Sequence
  Oligonucleotide primer for the detection of SNP TSC0025162
ttttatttaaat

SEQ ID NO: 312594 - DNA, 12 bp, Artificial Sequence
  Oligonucleotide primer for the detection of SNP TSC0025162
cttcattcaaac

SEQ ID NO: 312595 - DNA, 12 bp, Artificial Sequence
  Oligonucleotide primer for the detection of SNP TSC0025163
acaataaaacat

SEQ ID NO: 312596 - DNA, 12 bp, Artificial Sequence
  Oligonucleotide primer for the detection of SNP TSC0025163
tcctaacccccc

SEQ ID NO: 312597 - DNA, 12 bp, Artificial Sequence
  Oligonucleotide primer for the detection of SNP TSC0025163
atagtgaagtat

SEQ ID NO: 312598 - DNA, 12 bp, Artificial Sequence
  Oligonucleotide primer for the detection of SNP TSC0025164
tttactataaac

SEQ ID NO: 312599 - DNA, 12 bp, Artificial Sequence
  Oligonucleotide primer for the detection of SNP TSC0025164
aatatttagtat

SEQ ID NO: 312600 - DNA, 12 bp, Artificial Sequence
  Oligonucleotide primer for the detection of SNP TSC0025164
aacatccaacac

SEQ ID NO: 312601 - DNA, 12 bp, Artificial Sequence
  Oligonucleotide primer for the detection of SNP TSC0025164
tttgttatgggt

SEQ ID NO: 312602 - DNA, 12 bp, Artificial Sequence
  Oligonucleotide primer for the detection of SNP TSC0025165
cttaatcttatc

SEQ ID NO: 312603 - DNA, 12 bp, Artificial Sequence
  Oligonucleotide primer for the detection of SNP TSC0025165
ggaggaagtggg

SEQ ID NO: 312604 - DNA, 12 bp, Artificial Sequence
  Oligonucleotide primer for the detection of SNP TSC0025166
aaaatccttaac

SEQ ID NO: 312605 - DNA, 12 bp, Artificial Sequence
  Oligonucleotide primer for the detection of SNP TSC0025166
gaaatccttaac

SEQ ID NO: 312606 - DNA, 12 bp, Artificial Sequence
  Oligonucleotide primer for the detection of SNP TSC0025166
tttattgttgtt

SEQ ID NO: 312607 - DNA, 12 bp, Artificial Sequence
  Oligonucleotide primer for the detection of SNP TSC0025166
cttactattatt

SEQ ID NO: 312608 - DNA, 12 bp, Artificial Sequence
  Oligonucleotide primer for the detection of SNP TSC0025166
ggggtttttgat

SEQ ID NO: 312609 - DNA, 12 bp, Artificial Sequence
  Oligonucleotide primer for the detection of SNP TSC0025167
tatattcctcta

SEQ ID NO: 312610 - DNA, 12 bp, Artificial Sequence
  Oligonucleotide primer for the detection of SNP TSC0025167
ttggttggagtt

SEQ ID NO: 312611 - DNA, 12 bp, Artificial Sequence
  Oligonucleotide primer for the detection of SNP TSC0025167
tatgtttttttg

SEQ ID NO: 312612 - DNA, 12 bp, Artificial Sequence
  Oligonucleotide primer for the detection of SNP TSC0025168
aaaaaatataac

SEQ ID NO: 312613 - DNA, 12 bp, Artificial Sequence
  Oligonucleotide primer for the detection of SNP TSC0025168
ttgggtaaaaat

SEQ ID NO: 312614 - DNA, 12 bp, Artificial Sequence
  Oligonucleotide primer for the detection of SNP TSC0025168
ttgggtaaaaac

SEQ ID NO: 312615 - DNA, 12 bp, Artificial Sequence
  Oligonucleotide primer for the detection of SNP TSC0025168
aaaaatatggtt

SEQ ID NO: 312616 - DNA, 12 bp, Artificial Sequence
  Oligonucleotide primer for the detection of SNP TSC0025171
aggtaagtgttg

SEQ ID NO: 312617 - DNA, 12 bp, Artificial Sequence
  Oligonucleotide primer for the detection of SNP TSC0025172
ggttataggggg

SEQ ID NO: 312618 - DNA, 12 bp, Artificial Sequence
  Oligonucleotide primer for the detection of SNP TSC0025175
tcacaataacac

SEQ ID NO: 312619 - DNA, 12 bp, Artificial Sequence
  Oligonucleotide primer for the detection of SNP TSC0025175
tgatggtgaagg

SEQ ID NO: 312620 - DNA, 12 bp, Artificial Sequence
  Oligonucleotide primer for the detection of SNP TSC0025176
caatcactaaac

SEQ ID NO: 312621 - DNA, 12 bp, Artificial Sequence
  Oligonucleotide primer for the detection of SNP TSC0025176
ttggttatataa

SEQ ID NO: 312622 - DNA, 12 bp, Artificial Sequence
  Oligonucleotide primer for the detection of SNP TSC0025180
ataatccaacat

SEQ ID NO: 312623 - DNA, 12 bp, Artificial Sequence
  Oligonucleotide primer for the detection of SNP TSC0025180
gattttttgtta

SEQ ID NO: 312624 - DNA, 12 bp, Artificial Sequence
  Oligonucleotide primer for the detection of SNP TSC0025181
ccaaaaatctct

SEQ ID NO: 312625 - DNA, 12 bp, Artificial Sequence
  Oligonucleotide primer for the detection of SNP TSC0025181
tagttagtagta

SEQ ID NO: 312626 - DNA, 12 bp, Artificial Sequence
  Oligonucleotide primer for the detection of SNP TSC0025182
aatcttaaaaac

SEQ ID NO: 312627 - DNA, 12 bp, Artificial Sequence
  Oligonucleotide primer for the detection of SNP TSC0025182
tgttttggaatt

SEQ ID NO: 312628 - DNA, 12 bp, Artificial Sequence
  Oligonucleotide primer for the detection of SNP TSC0025182
attttaaaacta

SEQ ID NO: 312629 - DNA, 12 bp, Artificial Sequence
  Oligonucleotide primer for the detection of SNP TSC0025182
attttgaagatt

SEQ ID NO: 312630 - DNA, 12 bp, Artificial Sequence
  Oligonucleotide primer for the detection of SNP TSC0025183
aactcaaaaccc

SEQ ID NO: 312631 - DNA, 12 bp, Artificial Sequence
  Oligonucleotide primer for the detection of SNP TSC0025183
tagtttgataaa

SEQ ID NO: 312632 - DNA, 12 bp, Artificial Sequence
  Oligonucleotide primer for the detection of SNP TSC0025184
tttaaatattat

SEQ ID NO: 312633 - DNA, 12 bp, Artificial Sequence
  Oligonucleotide primer for the detection of SNP TSC0025184
ctcaaacaccat

SEQ ID NO: 312634 - DNA, 12 bp, Artificial Sequence
  Oligonucleotide primer for the detection of SNP TSC0025184
ttggagggtgga

SEQ ID NO: 312635 - DNA, 12 bp, Artificial Sequence
  Oligonucleotide primer for the detection of SNP TSC0025191
tcttattccttc

SEQ ID NO: 312636 - DNA, 12 bp, Artificial Sequence
  Oligonucleotide primer for the detection of SNP TSC0025191
tcttctcaataa

SEQ ID NO: 312637 - DNA, 12 bp, Artificial Sequence
  Oligonucleotide primer for the detection of SNP TSC0025192
ttaaccaaatcc

SEQ ID NO: 312638 - DNA, 12 bp, Artificial Sequence
  Oligonucleotide primer for the detection of SNP TSC0025192
ttaaccgaatcc

SEQ ID NO: 312639 - DNA, 12 bp, Artificial Sequence
  Oligonucleotide primer for the detection of SNP TSC0025192
gatggattgata

SEQ ID NO: 312640 - DNA, 12 bp, Artificial Sequence
  Oligonucleotide primer for the detection of SNP TSC0025192
ttggttgagttt

SEQ ID NO: 312641 - DNA, 12 bp, Artificial Sequence
  Oligonucleotide primer for the detection of SNP TSC0025192
ttggtcgagttt

SEQ ID NO: 312642 - DNA, 12 bp, Artificial Sequence
  Oligonucleotide primer for the detection of SNP TSC0025196
ccacatatctaa

SEQ ID NO: 312643 - DNA, 12 bp, Artificial Sequence
  Oligonucleotide primer for the detection of SNP TSC0025196
ttttgagttttt

SEQ ID NO: 312644 - DNA, 12 bp, Artificial Sequence
  Oligonucleotide primer for the detection of SNP TSC0025196
tcttaaatcttc

SEQ ID NO: 312645 - DNA, 12 bp, Artificial Sequence
  Oligonucleotide primer for the detection of SNP TSC0025196
ttatatatttgg

SEQ ID NO: 312646 - DNA, 12 bp, Artificial Sequence
  Oligonukleotid-Primer
accttactctcc

SEQ ID NO: 312647 - DNA, 12 bp, Artificial Sequence
  Oligonucleotide primer for the detection of SNP TSC0025200
atttgatgagga

SEQ ID NO: 312648 - DNA, 12 bp, Artificial Sequence
  Oligonucleotide primer for the detection of SNP TSC0025206
aaaaaacccgaa

SEQ ID NO: 312649 - DNA, 12 bp, Artificial Sequence
  Oligonucleotide primer for the detection of SNP TSC0025206
agaggtttttta

SEQ ID NO: 312650 - DNA, 12 bp, Artificial Sequence
  Oligonucleotide primer for the detection of SNP TSC0025206
agaagtttgaat

SEQ ID NO: 312651 - DNA, 12 bp, Artificial Sequence
  Oligonucleotide primer for the detection of SNP TSC0025206
agaagttcgaat

SEQ ID NO: 312652 - DNA, 12 bp, Artificial Sequence
  Oligonucleotide primer for the detection of SNP TSC0025207
aaacaactcccc

SEQ ID NO: 312653 - DNA, 12 bp, Artificial Sequence
  Oligonucleotide primer for the detection of SNP TSC0025207
gattattgttag

SEQ ID NO: 312654 - DNA, 12 bp, Artificial Sequence
  Oligonucleotide primer for the detection of SNP TSC0025207
aatcactatcaa

SEQ ID NO: 312655 - DNA, 12 bp, Artificial Sequence
  Oligonucleotide primer for the detection of SNP TSC0025207
gagtagtttttt

SEQ ID NO: 312656 - DNA, 12 bp, Artificial Sequence
  Oligonucleotide primer for the detection of SNP TSC0025209
ccacaaaaaaat

SEQ ID NO: 312657 - DNA, 12 bp, Artificial Sequence
  Oligonucleotide primer for the detection of SNP TSC0025213
acctttcccctt

SEQ ID NO: 312658 - DNA, 12 bp, Artificial Sequence
  Oligonucleotide primer for the detection of SNP TSC0025213
gcctttcccctt

SEQ ID NO: 312659 - DNA, 12 bp, Artificial Sequence
  Oligonucleotide primer for the detection of SNP TSC0025213
gagaggagaagt

SEQ ID NO: 312660 - DNA, 12 bp, Artificial Sequence
  Oligonucleotide primer for the detection of SNP TSC0025214
ataactctttcc

SEQ ID NO: 312661 - DNA, 12 bp, Artificial Sequence
  Oligonucleotide primer for the detection of SNP TSC0025214
agtgttttatag

SEQ ID NO: 312662 - DNA, 12 bp, Artificial Sequence
  Oligonucleotide primer for the detection of SNP TSC0025214
aataccccacaa

SEQ ID NO: 312663 - DNA, 12 bp, Artificial Sequence
  Oligonucleotide primer for the detection of SNP TSC0025215
taaagatgtata

SEQ ID NO: 312664 - DNA, 12 bp, Artificial Sequence
  Oligonucleotide primer for the detection of SNP TSC0025218
aaaaaccccaaa

SEQ ID NO: 312665 - DNA, 12 bp, Artificial Sequence
  Oligonucleotide primer for the detection of SNP TSC0025218
agttggttttat

SEQ ID NO: 312666 - DNA, 12 bp, Artificial Sequence
  Oligonucleotide primer for the detection of SNP TSC0025218
agtcggttttat

SEQ ID NO: 312667 - DNA, 12 bp, Artificial Sequence
  Oligonucleotide primer for the detection of SNP TSC0025218
aaccaatcccac

SEQ ID NO: 312668 - DNA, 12 bp, Artificial Sequence
  Oligonucleotide primer for the detection of SNP TSC0025218
aaccgatcccac

SEQ ID NO: 312669 - DNA, 12 bp, Artificial Sequence
  Oligonucleotide primer for the detection of SNP TSC0025218
agggattttaaa

SEQ ID NO: 312670 - DNA, 12 bp, Artificial Sequence
  Oligonucleotide primer for the detection of SNP TSC0025220
cattatcttctt

SEQ ID NO: 312671 - DNA, 12 bp, Artificial Sequence
  Oligonucleotide primer for the detection of SNP TSC0025220
cgttatcttctt

SEQ ID NO: 312672 - DNA, 12 bp, Artificial Sequence
  Oligonucleotide primer for the detection of SNP TSC0025220
attgtggttttg

SEQ ID NO: 312673 - DNA, 12 bp, Artificial Sequence
  Oligonucleotide primer for the detection of SNP TSC0025220
atcgtggttttg

SEQ ID NO: 312674 - DNA, 12 bp, Artificial Sequence
  Oligonucleotide primer for the detection of SNP TSC0025220
accataatttta

SEQ ID NO: 312675 - DNA, 12 bp, Artificial Sequence
  Oligonucleotide primer for the detection of SNP TSC0025220
accgtaatttta

SEQ ID NO: 312676 - DNA, 12 bp, Artificial Sequence
  Oligonucleotide primer for the detection of SNP TSC0025220
cgttattttttt

SEQ ID NO: 312677 - DNA, 12 bp, Artificial Sequence
  Oligonucleotide primer for the detection of SNP TSC0025221
gtgaaaatttta

SEQ ID NO: 312678 - DNA, 12 bp, Artificial Sequence
  Oligonucleotide primer for the detection of SNP TSC0025222
ccactccaaacc

SEQ ID NO: 312679 - DNA, 12 bp, Artificial Sequence
  Oligonucleotide primer for the detection of SNP TSC0025222
ttaggtagtata

SEQ ID NO: 312680 - DNA, 12 bp, Artificial Sequence
  Oligonucleotide primer for the detection of SNP TSC0025223
taatattacctt

SEQ ID NO: 312681 - DNA, 12 bp, Artificial Sequence
  Oligonucleotide primer for the detection of SNP TSC0025223
gtatatggatgg

SEQ ID NO: 312682 - DNA, 12 bp, Artificial Sequence
  Oligonucleotide primer for the detection of SNP TSC0025228
tagtatttattt

SEQ ID NO: 312683 - DNA, 12 bp, Artificial Sequence
  Oligonucleotide primer for the detection of SNP TSC0025228
aatacttatcta

SEQ ID NO: 312684 - DNA, 12 bp, Artificial Sequence
  Oligonucleotide primer for the detection of SNP TSC0025228
ataaatgagaat

SEQ ID NO: 312685 - DNA, 12 bp, Artificial Sequence
  Oligonucleotide primer for the detection of SNP TSC0025233
acaaaactaatc

SEQ ID NO: 312686 - DNA, 12 bp, Artificial Sequence
  Oligonucleotide primer for the detection of SNP TSC0025233
taggggtttagg

SEQ ID NO: 312687 - DNA, 12 bp, Artificial Sequence
  Oligonucleotide primer for the detection of SNP TSC0025234
aaaactttaata

SEQ ID NO: 312688 - DNA, 12 bp, Artificial Sequence
  Oligonucleotide primer for the detection of SNP TSC0025234
aattttacctaa

SEQ ID NO: 312689 - DNA, 12 bp, Artificial Sequence
  Oligonucleotide primer for the detection of SNP TSC0025234
aaagttttaatg

SEQ ID NO: 312690 - DNA, 12 bp, Artificial Sequence
  Oligonucleotide primer for the detection of SNP TSC0025235
tgattttaggtg

SEQ ID NO: 312691 - DNA, 12 bp, Artificial Sequence
  Oligonucleotide primer for the detection of SNP TSC0025238
gttgggttaagt

SEQ ID NO: 312692 - DNA, 12 bp, Artificial Sequence
  Oligonucleotide primer for the detection of SNP TSC0025238
ctaaaccaaaca

SEQ ID NO: 312693 - DNA, 12 bp, Artificial Sequence
  Oligonucleotide primer for the detection of SNP TSC0025238
tttaaaggaaat

SEQ ID NO: 312694 - DNA, 12 bp, Artificial Sequence
  Oligonucleotide primer for the detection of SNP TSC0025241
tattataaaatg

SEQ ID NO: 312695 - DNA, 12 bp, Artificial Sequence
  Oligonucleotide primer for the detection of SNP TSC0025241
attgagaattat

SEQ ID NO: 312696 - DNA, 12 bp, Artificial Sequence
  Oligonucleotide primer for the detection of SNP TSC0025242
ccacaccaatct

SEQ ID NO: 312697 - DNA, 12 bp, Artificial Sequence
  Oligonucleotide primer for the detection of SNP TSC0025244
ataacaccatca

SEQ ID NO: 312698 - DNA, 12 bp, Artificial Sequence
  Oligonucleotide primer for the detection of SNP TSC0025244
gtggggtggtgt

SEQ ID NO: 312699 - DNA, 12 bp, Artificial Sequence
  Oligonucleotide primer for the detection of SNP TSC0025244
gtggggtggtgc

SEQ ID NO: 312700 - DNA, 12 bp, Artificial Sequence
  Oligonucleotide primer for the detection of SNP TSC0025244
atgatattatta

SEQ ID NO: 312701 - DNA, 12 bp, Artificial Sequence
  Oligonucleotide primer for the detection of SNP TSC0025245
atgttttttttg

SEQ ID NO: 312702 - DNA, 12 bp, Artificial Sequence
  Oligonucleotide primer for the detection of SNP TSC0025245
atactttcttta

SEQ ID NO: 312703 - DNA, 12 bp, Artificial Sequence
  Oligonucleotide primer for the detection of SNP TSC0025245
tttgttattttc

SEQ ID NO: 312704 - DNA, 12 bp, Artificial Sequence
  Oligonucleotide primer for the detection of SNP TSC0025246
acctaaaactac

SEQ ID NO: 312705 - DNA, 12 bp, Artificial Sequence
  Oligonucleotide primer for the detection of SNP TSC0025246
ggtggtatgtgg

SEQ ID NO: 312706 - DNA, 12 bp, Artificial Sequence
  Oligonucleotide primer for the detection of SNP TSC0025246
aataatatataa

SEQ ID NO: 312707 - DNA, 12 bp, Artificial Sequence
  Oligonucleotide primer for the detection of SNP TSC0025246
atttggggttat

SEQ ID NO: 312708 - DNA, 12 bp, Artificial Sequence
  Oligonucleotide primer for the detection of SNP TSC0025247
accctcctatca

SEQ ID NO: 312709 - DNA, 12 bp, Artificial Sequence
  Oligonucleotide primer for the detection of SNP TSC0025247
tcatatcactat

SEQ ID NO: 312710 - DNA, 12 bp, Artificial Sequence
  Oligonucleotide primer for the detection of SNP TSC0025247
gtttttttgtta

SEQ ID NO: 312711 - DNA, 12 bp, Artificial Sequence
  Oligonucleotide primer for the detection of SNP TSC0025249
cttccccccccc

SEQ ID NO: 312712 - DNA, 12 bp, Artificial Sequence
  Oligonucleotide primer for the detection of SNP TSC0025249
gggtgtgggggg

SEQ ID NO: 312713 - DNA, 12 bp, Artificial Sequence
  Oligonucleotide primer for the detection of SNP TSC0025249
gggtgcgggggg

SEQ ID NO: 312714 - DNA, 12 bp, Artificial Sequence
  Oligonucleotide primer for the detection of SNP TSC0025249
aaatacgaaaaa

SEQ ID NO: 312715 - DNA, 12 bp, Artificial Sequence
  Oligonucleotide primer for the detection of SNP TSC0025250
atctaccccata

SEQ ID NO: 312716 - DNA, 12 bp, Artificial Sequence
  Oligonucleotide primer for the detection of SNP TSC0025250
gtagttaagatt

SEQ ID NO: 312717 - DNA, 12 bp, Artificial Sequence
  Oligonucleotide primer for the detection of SNP TSC0025250
ataatcaaaatt

SEQ ID NO: 312718 - DNA, 12 bp, Artificial Sequence
  Oligonucleotide primer for the detection of SNP TSC0025251
tctcctttttaa

SEQ ID NO: 312719 - DNA, 12 bp, Artificial Sequence
  Oligonucleotide primer for the detection of SNP TSC0025251
ttagaaataggt

SEQ ID NO: 312720 - DNA, 12 bp, Artificial Sequence
  Oligonucleotide primer for the detection of SNP TSC0025251
ccaaaaacaaac

SEQ ID NO: 312721 - DNA, 12 bp, Artificial Sequence
  Oligonucleotide primer for the detection of SNP TSC0025252
acccaacctaaa

SEQ ID NO: 312722 - DNA, 12 bp, Artificial Sequence
  Oligonucleotide primer for the detection of SNP TSC0025252
tgttaaaaagga

SEQ ID NO: 312723 - DNA, 12 bp, Artificial Sequence
  Oligonucleotide primer for the detection of SNP TSC0025252
cgttaaaaagga

SEQ ID NO: 312724 - DNA, 12 bp, Artificial Sequence
  Oligonucleotide primer for the detection of SNP TSC0025252
gtcaaaaaaaaa

SEQ ID NO: 312725 - DNA, 12 bp, Artificial Sequence
  Oligonucleotide primer for the detection of SNP TSC0025252
gtttagtttgaa

SEQ ID NO: 312726 - DNA, 12 bp, Artificial Sequence
  Oligonucleotide primer for the detection of SNP TSC0025255
acacccatactc

SEQ ID NO: 312727 - DNA, 12 bp, Artificial Sequence
  Oligonucleotide primer for the detection of SNP TSC0025255
taggttgtgggg

SEQ ID NO: 312728 - DNA, 12 bp, Artificial Sequence
  Oligonucleotide primer for the detection of SNP TSC0025259
aaactcccatcc

SEQ ID NO: 312729 - DNA, 12 bp, Artificial Sequence
  Oligonucleotide primer for the detection of SNP TSC0025259
tttattttgtag

SEQ ID NO: 312730 - DNA, 12 bp, Artificial Sequence
  Oligonucleotide primer for the detection of SNP TSC0025260
tctatctaattt

SEQ ID NO: 312731 - DNA, 12 bp, Artificial Sequence
  Oligonucleotide primer for the detection of SNP TSC0025260
gaaggattgggg

SEQ ID NO: 312732 - DNA, 12 bp, Artificial Sequence
  Oligonucleotide primer for the detection of SNP TSC0025263
cgaatacaacaa

SEQ ID NO: 312733 - DNA, 12 bp, Artificial Sequence
  Oligonucleotide primer for the detection of SNP TSC0025263
attattatattg

SEQ ID NO: 312734 - DNA, 12 bp, Artificial Sequence
  Oligonucleotide primer for the detection of SNP TSC0025263
atcatcacatta

SEQ ID NO: 312735 - DNA, 12 bp, Artificial Sequence
  Oligonucleotide primer for the detection of SNP TSC0025263
ttgaatgtagta

SEQ ID NO: 312736 - DNA, 12 bp, Artificial Sequence
  Oligonucleotide primer for the detection of SNP TSC0025263
tcgaatgtagta

SEQ ID NO: 312737 - DNA, 12 bp, Artificial Sequence
  Oligonucleotide primer for the detection of SNP TSC0025264
acattaatataa

SEQ ID NO: 312738 - DNA, 12 bp, Artificial Sequence
  Oligonucleotide primer for the detection of SNP TSC0025264
gtattggtgtga

SEQ ID NO: 312739 - DNA, 12 bp, Artificial Sequence
  Oligonucleotide primer for the detection of SNP TSC0025270
ttataaatcata

SEQ ID NO: 312740 - DNA, 12 bp, Artificial Sequence
  Oligonucleotide primer for the detection of SNP TSC0025270
ttaacaccctaa

SEQ ID NO: 312741 - DNA, 12 bp, Artificial Sequence
  Oligonucleotide primer for the detection of SNP TSC0025270
ttaacgccctaa

SEQ ID NO: 312742 - DNA, 12 bp, Artificial Sequence
  Oligonucleotide primer for the detection of SNP TSC0025270
ttataaattata

SEQ ID NO: 312743 - DNA, 12 bp, Artificial Sequence
  Oligonucleotide primer for the detection of SNP TSC0025271
ccctaacatacc

SEQ ID NO: 312744 - DNA, 12 bp, Artificial Sequence
  Oligonucleotide primer for the detection of SNP TSC0025271
ccctaacgtacc

SEQ ID NO: 312745 - DNA, 12 bp, Artificial Sequence
  Oligonucleotide primer for the detection of SNP TSC0025271
gggggttttatg

SEQ ID NO: 312746 - DNA, 12 bp, Artificial Sequence
  Oligonucleotide primer for the detection of SNP TSC0025271
gggggttttacg

SEQ ID NO: 312747 - DNA, 12 bp, Artificial Sequence
  Oligonukleotid-Primer
aaaatcctacaa

SEQ ID NO: 312748 - DNA, 12 bp, Artificial Sequence
  Oligonucleotide primer for the detection of SNP TSC0025271
aaaatcctacga

SEQ ID NO: 312749 - DNA, 12 bp, Artificial Sequence
  Oligonucleotide primer for the detection of SNP TSC0025271
ttttgatgtgtt

SEQ ID NO: 312750 - DNA, 12 bp, Artificial Sequence
  Oligonucleotide primer for the detection of SNP TSC0025271
ttttgacgtgtt

SEQ ID NO: 312751 - DNA, 12 bp, Artificial Sequence
  Oligonucleotide primer for the detection of SNP TSC0025271
ttttgatgtgtc

SEQ ID NO: 312752 - DNA, 12 bp, Artificial Sequence
  Oligonucleotide primer for the detection of SNP TSC0025271
ttttgacgtgtc

SEQ ID NO: 312753 - DNA, 12 bp, Artificial Sequence
  Oligonucleotide primer for the detection of SNP TSC0025272
atttataactta

SEQ ID NO: 312754 - DNA, 12 bp, Artificial Sequence
  Oligonucleotide primer for the detection of SNP TSC0025272
tttgatttagtt

SEQ ID NO: 312755 - DNA, 12 bp, Artificial Sequence
  Oligonucleotide primer for the detection of SNP TSC0025272
ttaactcaacta

SEQ ID NO: 312756 - DNA, 12 bp, Artificial Sequence
  Oligonucleotide primer for the detection of SNP TSC0025272
aatttgtaattt

SEQ ID NO: 312757 - DNA, 12 bp, Artificial Sequence
  Oligonucleotide primer for the detection of SNP TSC0025274
tacaaaatacaa

SEQ ID NO: 312758 - DNA, 12 bp, Artificial Sequence
  Oligonucleotide primer for the detection of SNP TSC0025274
aaaggggtgata

SEQ ID NO: 312759 - DNA, 12 bp, Artificial Sequence
  Oligonucleotide primer for the detection of SNP TSC0025274
tgtaaaatataa

SEQ ID NO: 312760 - DNA, 12 bp, Artificial Sequence
  Oligonucleotide primer for the detection of SNP TSC0025275
aaaaatacattt

SEQ ID NO: 312761 - DNA, 12 bp, Artificial Sequence
  Oligonucleotide primer for the detection of SNP TSC0025275
aaaaatacgttt

SEQ ID NO: 312762 - DNA, 12 bp, Artificial Sequence
  Oligonucleotide primer for the detection of SNP TSC0025275
taagttatttat

SEQ ID NO: 312763 - DNA, 12 bp, Artificial Sequence
  Oligonucleotide primer for the detection of SNP TSC0025275
ccaaatcactca

SEQ ID NO: 312764 - DNA, 12 bp, Artificial Sequence
  Oligonucleotide primer for the detection of SNP TSC0025275
aaggtgtgtttt

SEQ ID NO: 312765 - DNA, 12 bp, Artificial Sequence
  Oligonucleotide primer for the detection of SNP TSC0025275
aaggtgcgtttt

SEQ ID NO: 312766 - DNA, 12 bp, Artificial Sequence
  Oligonucleotide primer for the detection of SNP TSC0025276
taatttcctttt

SEQ ID NO: 312767 - DNA, 12 bp, Artificial Sequence
  Oligonucleotide primer for the detection of SNP TSC0025276
tagtttttagtt

SEQ ID NO: 312768 - DNA, 12 bp, Artificial Sequence
  Oligonucleotide primer for the detection of SNP TSC0025276
ttcaattttcaa

SEQ ID NO: 312769 - DNA, 12 bp, Artificial Sequence
  Oligonucleotide primer for the detection of SNP TSC0025278
caaatatttaac

SEQ ID NO: 312770 - DNA, 12 bp, Artificial Sequence
  Oligonucleotide primer for the detection of SNP TSC0025278
attgtaattata

SEQ ID NO: 312771 - DNA, 12 bp, Artificial Sequence
  Oligonucleotide primer for the detection of SNP TSC0025282
caccctcccctc

SEQ ID NO: 312772 - DNA, 12 bp, Artificial Sequence
  Oligonucleotide primer for the detection of SNP TSC0025282
tggtaggaagag

SEQ ID NO: 312773 - DNA, 12 bp, Artificial Sequence
  Oligonucleotide primer for the detection of SNP TSC0025284
cccttctaaaac

SEQ ID NO: 312774 - DNA, 12 bp, Artificial Sequence
  Oligonucleotide primer for the detection of SNP TSC0025284
tggggagaagag

SEQ ID NO: 312775 - DNA, 12 bp, Artificial Sequence
  Oligonucleotide primer for the detection of SNP TSC0025290
ctatccttttta

SEQ ID NO: 312776 - DNA, 12 bp, Artificial Sequence
  Oligonucleotide primer for the detection of SNP TSC0025290
tggtatatgttt

SEQ ID NO: 312777 - DNA, 12 bp, Artificial Sequence
  Oligonucleotide primer for the detection of SNP TSC0025290
atacatatctaa

SEQ ID NO: 312778 - DNA, 12 bp, Artificial Sequence
  Oligonucleotide primer for the detection of SNP TSC0025295
aacctacaccga

SEQ ID NO: 312779 - DNA, 12 bp, Artificial Sequence
  Oligonucleotide primer for the detection of SNP TSC0025295
tagtgtgttttt

SEQ ID NO: 312780 - DNA, 12 bp, Artificial Sequence
  Oligonucleotide primer for the detection of SNP TSC0025295
caatatatctcc

SEQ ID NO: 312781 - DNA, 12 bp, Artificial Sequence
  Oligonucleotide primer for the detection of SNP TSC0025295
gaatttgtattg

SEQ ID NO: 312782 - DNA, 12 bp, Artificial Sequence
  Oligonucleotide primer for the detection of SNP TSC0025295
gaatttgtatcg

SEQ ID NO: 312783 - DNA, 12 bp, Artificial Sequence
  Oligonucleotide primer for the detection of SNP TSC0025296
accaaaaatata

SEQ ID NO: 312784 - DNA, 12 bp, Artificial Sequence
  Oligonucleotide primer for the detection of SNP TSC0025296
ttttatttttgt

SEQ ID NO: 312785 - DNA, 12 bp, Artificial Sequence
  Oligonucleotide primer for the detection of SNP TSC0025296
ttccacttttac

SEQ ID NO: 312786 - DNA, 12 bp, Artificial Sequence
  Oligonucleotide primer for the detection of SNP TSC0025296
attaggggtgtg

SEQ ID NO: 312787 - DNA, 12 bp, Artificial Sequence
  Oligonucleotide primer for the detection of SNP TSC0025297
actccaaaaatc

SEQ ID NO: 312788 - DNA, 12 bp, Artificial Sequence
  Oligonucleotide primer for the detection of SNP TSC0025297
ataaaattgaga

SEQ ID NO: 312789 - DNA, 12 bp, Artificial Sequence
  Oligonucleotide primer for the detection of SNP TSC0025301
actaactctcaa

SEQ ID NO: 312790 - DNA, 12 bp, Artificial Sequence
  Oligonucleotide primer for the detection of SNP TSC0025301
actaactctcga

SEQ ID NO: 312791 - DNA, 12 bp, Artificial Sequence
  Oligonucleotide primer for the detection of SNP TSC0025301
gctaactctcaa

SEQ ID NO: 312792 - DNA, 12 bp, Artificial Sequence
  Oligonucleotide primer for the detection of SNP TSC0025301
gctaactctcga

SEQ ID NO: 312793 - DNA, 12 bp, Artificial Sequence
  Oligonucleotide primer for the detection of SNP TSC0025301
ggttgaggttga

SEQ ID NO: 312794 - DNA, 12 bp, Artificial Sequence
  Oligonucleotide primer for the detection of SNP TSC0025301
ggttgaggtcga

SEQ ID NO: 312795 - DNA, 12 bp, Artificial Sequence
  Oligonucleotide primer for the detection of SNP TSC0025301
aactaaaaccga

SEQ ID NO: 312796 - DNA, 12 bp, Artificial Sequence
  Oligonucleotide primer for the detection of SNP TSC0025301
gttggtttttgg

SEQ ID NO: 312797 - DNA, 12 bp, Artificial Sequence
  Oligonucleotide primer for the detection of SNP TSC0025301
gttggttttcgg

SEQ ID NO: 312798 - DNA, 12 bp, Artificial Sequence
  Oligonucleotide primer for the detection of SNP TSC0025313
cctaaacaaatc

SEQ ID NO: 312799 - DNA, 12 bp, Artificial Sequence
  Oligonucleotide primer for the detection of SNP TSC0025313
ttagttgtggaa

SEQ ID NO: 312800 - DNA, 12 bp, Artificial Sequence
  Oligonucleotide primer for the detection of SNP TSC0025314
gaaacaatacct

SEQ ID NO: 312801 - DNA, 12 bp, Artificial Sequence
  Oligonucleotide primer for the detection of SNP TSC0025314
tgggttgggttt

SEQ ID NO: 312802 - DNA, 12 bp, Artificial Sequence
  Oligonucleotide primer for the detection of SNP TSC0025314
taaactaaatcc

SEQ ID NO: 312803 - DNA, 12 bp, Artificial Sequence
  Oligonucleotide primer for the detection of SNP TSC0025314
ggagtagtgttt

SEQ ID NO: 312804 - DNA, 12 bp, Artificial Sequence
  Oligonucleotide primer for the detection of SNP TSC0025315
atactccaatat

SEQ ID NO: 312805 - DNA, 12 bp, Artificial Sequence
  Oligonucleotide primer for the detection of SNP TSC0025315
tttaggtgtttg

SEQ ID NO: 312806 - DNA, 12 bp, Artificial Sequence
  Oligonucleotide primer for the detection of SNP TSC0025316
tagatgatttaa

SEQ ID NO: 312807 - DNA, 12 bp, Artificial Sequence
  Oligonucleotide primer for the detection of SNP TSC0025319
actccactaaac

SEQ ID NO: 312808 - DNA, 12 bp, Artificial Sequence
  Oligonucleotide primer for the detection of SNP TSC0025319
gatgtttgtttt

SEQ ID NO: 312809 - DNA, 12 bp, Artificial Sequence
  Oligonucleotide primer for the detection of SNP TSC0025319
gatgttcgtttt

SEQ ID NO: 312810 - DNA, 12 bp, Artificial Sequence
  Oligonucleotide primer for the detection of SNP TSC0025319
aatacccacttc

SEQ ID NO: 312811 - DNA, 12 bp, Artificial Sequence
  Oligonucleotide primer for the detection of SNP TSC0025319
aatacccgcttc

SEQ ID NO: 312812 - DNA, 12 bp, Artificial Sequence
  Oligonucleotide primer for the detection of SNP TSC0025319
gttttattgagt

SEQ ID NO: 312813 - DNA, 12 bp, Artificial Sequence
  Oligonucleotide primer for the detection of SNP TSC0025321
aatataacttac

SEQ ID NO: 312814 - DNA, 12 bp, Artificial Sequence
  Oligonucleotide primer for the detection of SNP TSC0025321
gatataacttac

SEQ ID NO: 312815 - DNA, 12 bp, Artificial Sequence
  Oligonucleotide primer for the detection of SNP TSC0025321
aggttgtgttaa

SEQ ID NO: 312816 - DNA, 12 bp, Artificial Sequence
  Oligonukleotid-Primer
aaactatactaa

SEQ ID NO: 312817 - DNA, 12 bp, Artificial Sequence
  Oligonucleotide primer for the detection of SNP TSC0025321
gatgtgatttat

SEQ ID NO: 312818 - DNA, 12 bp, Artificial Sequence
  Oligonucleotide primer for the detection of SNP TSC0025322
atatacaaaaac

SEQ ID NO: 312819 - DNA, 12 bp, Artificial Sequence
  Oligonucleotide primer for the detection of SNP TSC0025322
atatacgaaaac

SEQ ID NO: 312820 - DNA, 12 bp, Artificial Sequence
  Oligonucleotide primer for the detection of SNP TSC0025322
taagtgttttgg

SEQ ID NO: 312821 - DNA, 12 bp, Artificial Sequence
  Oligonucleotide primer for the detection of SNP TSC0025322
caaataccttaa

SEQ ID NO: 312822 - DNA, 12 bp, Artificial Sequence
  Oligonucleotide primer for the detection of SNP TSC0025322
gtgtatggaaat

SEQ ID NO: 312823 - DNA, 12 bp, Artificial Sequence
  Oligonucleotide primer for the detection of SNP TSC0025322
gtgtacggaaat

SEQ ID NO: 312824 - DNA, 12 bp, Artificial Sequence
  Oligonucleotide primer for the detection of SNP TSC0025323
gataaatgattg

SEQ ID NO: 312825 - DNA, 12 bp, Artificial Sequence
  Oligonucleotide primer for the detection of SNP TSC0025323
aataaataatta

SEQ ID NO: 312826 - DNA, 12 bp, Artificial Sequence
  Oligonucleotide primer for the detection of SNP TSC0025323
tagagaaagagt

SEQ ID NO: 312827 - DNA, 12 bp, Artificial Sequence
  Oligonucleotide primer for the detection of SNP TSC0025324
caataatataat

SEQ ID NO: 312828 - DNA, 12 bp, Artificial Sequence
  Oligonucleotide primer for the detection of SNP TSC0025324
aatgagaatgtg

SEQ ID NO: 312829 - DNA, 12 bp, Artificial Sequence
  Oligonucleotide primer for the detection of SNP TSC0025325
acccccattcct

SEQ ID NO: 312830 - DNA, 12 bp, Artificial Sequence
  Oligonucleotide primer for the detection of SNP TSC0025325
gggtggggttgg

SEQ ID NO: 312831 - DNA, 12 bp, Artificial Sequence
  Oligonucleotide primer for the detection of SNP TSC0025326
ggagtagaagtg

SEQ ID NO: 312832 - DNA, 12 bp, Artificial Sequence
  Oligonucleotide primer for the detection of SNP TSC0025326
gtaggagaggtt

SEQ ID NO: 312833 - DNA, 12 bp, Artificial Sequence
  Oligonucleotide primer for the detection of SNP TSC0025328
aaacaaaataac

SEQ ID NO: 312834 - DNA, 12 bp, Artificial Sequence
  Oligonucleotide primer for the detection of SNP TSC0025328
tttagggtgtgg

SEQ ID NO: 312835 - DNA, 12 bp, Artificial Sequence
  Oligonucleotide primer for the detection of SNP TSC0025329
acaactcacaat

SEQ ID NO: 312836 - DNA, 12 bp, Artificial Sequence
  Oligonucleotide primer for the detection of SNP TSC0025329
acgactcacaat

SEQ ID NO: 312837 - DNA, 12 bp, Artificial Sequence
  Oligonucleotide primer for the detection of SNP TSC0025329
tgtttattgttg

SEQ ID NO: 312838 - DNA, 12 bp, Artificial Sequence
  Oligonucleotide primer for the detection of SNP TSC0025329
tactcactacta

SEQ ID NO: 312839 - DNA, 12 bp, Artificial Sequence
  Oligonucleotide primer for the detection of SNP TSC0025329
gtggtttatagt

SEQ ID NO: 312840 - DNA, 12 bp, Artificial Sequence
  Oligonucleotide primer for the detection of SNP TSC0025329
gcggtttatagt

SEQ ID NO: 312841 - DNA, 12 bp, Artificial Sequence
  Oligonucleotide primer for the detection of SNP TSC0025330
ccaaacatatac

SEQ ID NO: 312842 - DNA, 12 bp, Artificial Sequence
  Oligonucleotide primer for the detection of SNP TSC0025330
ttggggaaagtt

SEQ ID NO: 312843 - DNA, 12 bp, Artificial Sequence
  Oligonucleotide primer for the detection of SNP TSC0025330
tcggggaaagtt

SEQ ID NO: 312844 - DNA, 12 bp, Artificial Sequence
  Oligonucleotide primer for the detection of SNP TSC0025330
tcaaaaaaaact

SEQ ID NO: 312845 - DNA, 12 bp, Artificial Sequence
  Oligonucleotide primer for the detection of SNP TSC0025330
tcgaaaaaaact

SEQ ID NO: 312846 - DNA, 12 bp, Artificial Sequence
  Oligonucleotide primer for the detection of SNP TSC0025330
ttagatatgtat

SEQ ID NO: 312847 - DNA, 12 bp, Artificial Sequence
  Oligonucleotide primer for the detection of SNP TSC0025331
ccactaacctcc

SEQ ID NO: 312848 - DNA, 12 bp, Artificial Sequence
  Oligonucleotide primer for the detection of SNP TSC0025331
ccgctaacctcc

SEQ ID NO: 312849 - DNA, 12 bp, Artificial Sequence
  Oligonucleotide primer for the detection of SNP TSC0025331
gaataaagataa

SEQ ID NO: 312850 - DNA, 12 bp, Artificial Sequence
  Oligonucleotide primer for the detection of SNP TSC0025331
ttgttgattttt

SEQ ID NO: 312851 - DNA, 12 bp, Artificial Sequence
  Oligonucleotide primer for the detection of SNP TSC0025331
tcgttgattttt

SEQ ID NO: 312852 - DNA, 12 bp, Artificial Sequence
  Oligonucleotide primer for the detection of SNP TSC0025337
acacattattcc

SEQ ID NO: 312853 - DNA, 12 bp, Artificial Sequence
  Oligonucleotide primer for the detection of SNP TSC0025337
ttttgatgttta

SEQ ID NO: 312854 - DNA, 12 bp, Artificial Sequence
  Oligonucleotide primer for the detection of SNP TSC0025338
agggtttgtgtg

SEQ ID NO: 312855 - DNA, 12 bp, Artificial Sequence
  Oligonucleotide primer for the detection of SNP TSC0025338
agggtttgcgtg

SEQ ID NO: 312856 - DNA, 12 bp, Artificial Sequence
  Oligonucleotide primer for the detection of SNP TSC0025338
agggtttgtgcg

SEQ ID NO: 312857 - DNA, 12 bp, Artificial Sequence
  Oligonucleotide primer for the detection of SNP TSC0025338
agggtttgcgcg

SEQ ID NO: 312858 - DNA, 12 bp, Artificial Sequence
  Oligonucleotide primer for the detection of SNP TSC0025338
aaaacctacaca

SEQ ID NO: 312859 - DNA, 12 bp, Artificial Sequence
  Oligonucleotide primer for the detection of SNP TSC0025338
aaaacctacacg

SEQ ID NO: 312860 - DNA, 12 bp, Artificial Sequence
  Oligonucleotide primer for the detection of SNP TSC0025338
aaaacctacgca

SEQ ID NO: 312861 - DNA, 12 bp, Artificial Sequence
  Oligonucleotide primer for the detection of SNP TSC0025338
aaaacctacgcg

SEQ ID NO: 312862 - DNA, 12 bp, Artificial Sequence
  Oligonucleotide primer for the detection of SNP TSC0025338
tgtggagtgtta

SEQ ID NO: 312863 - DNA, 12 bp, Artificial Sequence
  Oligonucleotide primer for the detection of SNP TSC0025339
acctttcctaaa

SEQ ID NO: 312864 - DNA, 12 bp, Artificial Sequence
  Oligonucleotide primer for the detection of SNP TSC0025339
ctctccctaaaa

SEQ ID NO: 312865 - DNA, 12 bp, Artificial Sequence
  Oligonucleotide primer for the detection of SNP TSC0025340
tcaaacacaact

SEQ ID NO: 312866 - DNA, 12 bp, Artificial Sequence
  Oligonucleotide primer for the detection of SNP TSC0025340
gaagtagtagta

SEQ ID NO: 312867 - DNA, 12 bp, Artificial Sequence
  Oligonucleotide primer for the detection of SNP TSC0025341
tcactacaccca

SEQ ID NO: 312868 - DNA, 12 bp, Artificial Sequence
  Oligonucleotide primer for the detection of SNP TSC0025341
ttttgtttgtga

SEQ ID NO: 312869 - DNA, 12 bp, Artificial Sequence
  Oligonucleotide primer for the detection of SNP TSC0025341
ccttatctataa

SEQ ID NO: 312870 - DNA, 12 bp, Artificial Sequence
  Oligonucleotide primer for the detection of SNP TSC0025341
tattatatttat

SEQ ID NO: 312871 - DNA, 12 bp, Artificial Sequence
  Oligonucleotide primer for the detection of SNP TSC0025342
ccaatctcaaat

SEQ ID NO: 312872 - DNA, 12 bp, Artificial Sequence
  Oligonucleotide primer for the detection of SNP TSC0025342
tgttgataaaga

SEQ ID NO: 312873 - DNA, 12 bp, Artificial Sequence
  Oligonucleotide primer for the detection of SNP TSC0025342
tactaataaaaa

SEQ ID NO: 312874 - DNA, 12 bp, Artificial Sequence
  Oligonucleotide primer for the detection of SNP TSC0025342
ttagttttagat

SEQ ID NO: 312875 - DNA, 12 bp, Artificial Sequence
  Oligonucleotide primer for the detection of SNP TSC0025343
cccacccacacc

SEQ ID NO: 312876 - DNA, 12 bp, Artificial Sequence
  Oligonucleotide primer for the detection of SNP TSC0025343
gtgattgttttt

SEQ ID NO: 312877 - DNA, 12 bp, Artificial Sequence
  Oligonucleotide primer for the detection of SNP TSC0025343
gcgattgttttt

SEQ ID NO: 312878 - DNA, 12 bp, Artificial Sequence
  Oligonucleotide primer for the detection of SNP TSC0025343
tacaattacttc

SEQ ID NO: 312879 - DNA, 12 bp, Artificial Sequence
  Oligonucleotide primer for the detection of SNP TSC0025343
tacgattacttc

SEQ ID NO: 312880 - DNA, 12 bp, Artificial Sequence
  Oligonucleotide primer for the detection of SNP TSC0025343
tttatttatatc

SEQ ID NO: 312881 - DNA, 12 bp, Artificial Sequence
  Oligonucleotide primer for the detection of SNP TSC0025344
gatttttagaaa

SEQ ID NO: 312882 - DNA, 12 bp, Artificial Sequence
  Oligonucleotide primer for the detection of SNP TSC0025345
atacacatatct

SEQ ID NO: 312883 - DNA, 12 bp, Artificial Sequence
  Oligonucleotide primer for the detection of SNP TSC0025345
atagattggggg

SEQ ID NO: 312884 - DNA, 12 bp, Artificial Sequence
  Oligonucleotide primer for the detection of SNP TSC0025346
cacacattctac

SEQ ID NO: 312885 - DNA, 12 bp, Artificial Sequence
  Oligonucleotide primer for the detection of SNP TSC0025346
cacacgttctac

SEQ ID NO: 312886 - DNA, 12 bp, Artificial Sequence
  Oligonucleotide primer for the detection of SNP TSC0025346
gtgggaagatta

SEQ ID NO: 312887 - DNA, 12 bp, Artificial Sequence
  Oligonucleotide primer for the detection of SNP TSC0025347
ctatccttaccc

SEQ ID NO: 312888 - DNA, 12 bp, Artificial Sequence
  Oligonucleotide primer for the detection of SNP TSC0025347
tagtagtgaagg

SEQ ID NO: 312889 - DNA, 12 bp, Artificial Sequence
  Oligonukleotid-Primer
tagtagcgaagg

SEQ ID NO: 312890 - DNA, 12 bp, Artificial Sequence
  Oligonucleotide primer for the detection of SNP TSC0025348
aacaaattcaat

SEQ ID NO: 312891 - DNA, 12 bp, Artificial Sequence
  Oligonucleotide primer for the detection of SNP TSC0025348
ttgtgtggtttg

SEQ ID NO: 312892 - DNA, 12 bp, Artificial Sequence
  Oligonucleotide primer for the detection of SNP TSC0025348
tcgtgtggtttg

SEQ ID NO: 312893 - DNA, 12 bp, Artificial Sequence
  Oligonucleotide primer for the detection of SNP TSC0025348
ttgcgtggtttg

SEQ ID NO: 312894 - DNA, 12 bp, Artificial Sequence
  Oligonucleotide primer for the detection of SNP TSC0025348
tcgcgtggtttg

SEQ ID NO: 312895 - DNA, 12 bp, Artificial Sequence
  Oligonucleotide primer for the detection of SNP TSC0025349
taaactccaaat

SEQ ID NO: 312896 - DNA, 12 bp, Artificial Sequence
  Oligonucleotide primer for the detection of SNP TSC0025349
tttataaataga

SEQ ID NO: 312897 - DNA, 12 bp, Artificial Sequence
  Oligonucleotide primer for the detection of SNP TSC0025350
cttcctaatctc

SEQ ID NO: 312898 - DNA, 12 bp, Artificial Sequence
  Oligonucleotide primer for the detection of SNP TSC0025350
atgagagagttg

SEQ ID NO: 312899 - DNA, 12 bp, Artificial Sequence
  Oligonucleotide primer for the detection of SNP TSC0025351
cattttctctac

SEQ ID NO: 312900 - DNA, 12 bp, Artificial Sequence
  Oligonucleotide primer for the detection of SNP TSC0025351
ggtatgaaagtg

SEQ ID NO: 312901 - DNA, 12 bp, Artificial Sequence
  Oligonucleotide primer for the detection of SNP TSC0025351
ggtatgaaagcg

SEQ ID NO: 312902 - DNA, 12 bp, Artificial Sequence
  Oligonucleotide primer for the detection of SNP TSC0025357
caaatataaacc

SEQ ID NO: 312903 - DNA, 12 bp, Artificial Sequence
  Oligonucleotide primer for the detection of SNP TSC0025357
gattgggtgtgg

SEQ ID NO: 312904 - DNA, 12 bp, Artificial Sequence
  Oligonucleotide primer for the detection of SNP TSC0025357
gattgggcgtgg

SEQ ID NO: 312905 - DNA, 12 bp, Artificial Sequence
  Oligonucleotide primer for the detection of SNP TSC0025357
gattgggtgcgg

SEQ ID NO: 312906 - DNA, 12 bp, Artificial Sequence
  Oligonucleotide primer for the detection of SNP TSC0025357
gattgggcgcgg

SEQ ID NO: 312907 - DNA, 12 bp, Artificial Sequence
  Oligonucleotide primer for the detection of SNP TSC0025357
aactaaacacaa

SEQ ID NO: 312908 - DNA, 12 bp, Artificial Sequence
  Oligonucleotide primer for the detection of SNP TSC0025357
aactaaacacga

SEQ ID NO: 312909 - DNA, 12 bp, Artificial Sequence
  Oligonucleotide primer for the detection of SNP TSC0025357
aactaaacgcaa

SEQ ID NO: 312910 - DNA, 12 bp, Artificial Sequence
  Oligonucleotide primer for the detection of SNP TSC0025357
aactaaacgcga

SEQ ID NO: 312911 - DNA, 12 bp, Artificial Sequence
  Oligonucleotide primer for the detection of SNP TSC0025357
taagtatgagtt

SEQ ID NO: 312912 - DNA, 12 bp, Artificial Sequence
  Oligonucleotide primer for the detection of SNP TSC0025358
aacaacaacaaa

SEQ ID NO: 312913 - DNA, 12 bp, Artificial Sequence
  Oligonucleotide primer for the detection of SNP TSC0025359
cctcttccatcc

SEQ ID NO: 312914 - DNA, 12 bp, Artificial Sequence
  Oligonucleotide primer for the detection of SNP TSC0025359
ggttttggaaga

SEQ ID NO: 312915 - DNA, 12 bp, Artificial Sequence
  Oligonucleotide primer for the detection of SNP TSC0025362
ccccaaaatccc

SEQ ID NO: 312916 - DNA, 12 bp, Artificial Sequence
  Oligonucleotide primer for the detection of SNP TSC0025362
ccccgaaatccc

SEQ ID NO: 312917 - DNA, 12 bp, Artificial Sequence
  Oligonucleotide primer for the detection of SNP TSC0025362
tggggggtatgg

SEQ ID NO: 312918 - DNA, 12 bp, Artificial Sequence
  Oligonucleotide primer for the detection of SNP TSC0025363
aactacaacctc

SEQ ID NO: 312919 - DNA, 12 bp, Artificial Sequence
  Oligonucleotide primer for the detection of SNP TSC0025363
tttagttttggg

SEQ ID NO: 312920 - DNA, 12 bp, Artificial Sequence
  Oligonucleotide primer for the detection of SNP TSC0025363
tttagtttcggg

SEQ ID NO: 312921 - DNA, 12 bp, Artificial Sequence
  Oligonucleotide primer for the detection of SNP TSC0025364
ataaacccttaa

SEQ ID NO: 312922 - DNA, 12 bp, Artificial Sequence
  Oligonucleotide primer for the detection of SNP TSC0025364
ttggtgtttgtt

SEQ ID NO: 312923 - DNA, 12 bp, Artificial Sequence
  Oligonucleotide primer for the detection of SNP TSC0025364
ttggcgtttgtt

SEQ ID NO: 312924 - DNA, 12 bp, Artificial Sequence
  Oligonucleotide primer for the detection of SNP TSC0025364
ttggtgtttgtc

SEQ ID NO: 312925 - DNA, 12 bp, Artificial Sequence
  Oligonucleotide primer for the detection of SNP TSC0025364
ttggcgtttgtc

SEQ ID NO: 312926 - DNA, 12 bp, Artificial Sequence
  Oligonucleotide primer for the detection of SNP TSC0025364
actaacatctat

SEQ ID NO: 312927 - DNA, 12 bp, Artificial Sequence
  Oligonucleotide primer for the detection of SNP TSC0025364
actaacgtctat

SEQ ID NO: 312928 - DNA, 12 bp, Artificial Sequence
  Oligonucleotide primer for the detection of SNP TSC0025370
ttaaccatatcc

SEQ ID NO: 312929 - DNA, 12 bp, Artificial Sequence
  Oligonucleotide primer for the detection of SNP TSC0025370
tttaagggagaa

SEQ ID NO: 312930 - DNA, 12 bp, Artificial Sequence
  Oligonucleotide primer for the detection of SNP TSC0025371
gttttatatggg

SEQ ID NO: 312931 - DNA, 12 bp, Artificial Sequence
  Oligonucleotide primer for the detection of SNP TSC0025372
aatccctaaaaa

SEQ ID NO: 312932 - DNA, 12 bp, Artificial Sequence
  Oligonucleotide primer for the detection of SNP TSC0025372
gatttgtgtttg

SEQ ID NO: 312933 - DNA, 12 bp, Artificial Sequence
  Oligonucleotide primer for the detection of SNP TSC0025372
aatttatactta

SEQ ID NO: 312934 - DNA, 12 bp, Artificial Sequence
  Oligonucleotide primer for the detection of SNP TSC0025372
tttttgagagtt

SEQ ID NO: 312935 - DNA, 12 bp, Artificial Sequence
  Oligonucleotide primer for the detection of SNP TSC0025379
aaaccacaaaaa

SEQ ID NO: 312936 - DNA, 12 bp, Artificial Sequence
  Oligonucleotide primer for the detection of SNP TSC0025379
ttttggttaagt

SEQ ID NO: 312937 - DNA, 12 bp, Artificial Sequence
  Oligonucleotide primer for the detection of SNP TSC0025379
tccctaactaaa

SEQ ID NO: 312938 - DNA, 12 bp, Artificial Sequence
  Oligonucleotide primer for the detection of SNP TSC0025379
gaattataggaa

SEQ ID NO: 312939 - DNA, 12 bp, Artificial Sequence
  Oligonucleotide primer for the detection of SNP TSC0025380
cctatcctctat

SEQ ID NO: 312940 - DNA, 12 bp, Artificial Sequence
  Oligonucleotide primer for the detection of SNP TSC0025380
tttatttatatg

SEQ ID NO: 312941 - DNA, 12 bp, Artificial Sequence
  Oligonucleotide primer for the detection of SNP TSC0025381
attctcacataa

SEQ ID NO: 312942 - DNA, 12 bp, Artificial Sequence
  Oligonucleotide primer for the detection of SNP TSC0025381
gatattgatgtt

SEQ ID NO: 312943 - DNA, 12 bp, Artificial Sequence
  Oligonucleotide primer for the detection of SNP TSC0025381
aggtttttatat

SEQ ID NO: 312944 - DNA, 12 bp, Artificial Sequence
  Oligonucleotide primer for the detection of SNP TSC0025382
ttatatactatt

SEQ ID NO: 312945 - DNA, 12 bp, Artificial Sequence
  Oligonucleotide primer for the detection of SNP TSC0025382
atttttaggttg

SEQ ID NO: 312946 - DNA, 12 bp, Artificial Sequence
  Oligonucleotide primer for the detection of SNP TSC0025386
tacccaaccata

SEQ ID NO: 312947 - DNA, 12 bp, Artificial Sequence
  Oligonucleotide primer for the detection of SNP TSC0025386
tttttgttaatt

SEQ ID NO: 312948 - DNA, 12 bp, Artificial Sequence
  Oligonucleotide primer for the detection of SNP TSC0025386
tttttatcaacc

SEQ ID NO: 312949 - DNA, 12 bp, Artificial Sequence
  Oligonucleotide primer for the detection of SNP TSC0025386
tgtttaattatg

SEQ ID NO: 312950 - DNA, 12 bp, Artificial Sequence
  Oligonucleotide primer for the detection of SNP TSC0025390
cttttttatttt

SEQ ID NO: 312951 - DNA, 12 bp, Artificial Sequence
  Oligonucleotide primer for the detection of SNP TSC0025390
gagtgagtgaga

SEQ ID NO: 312952 - DNA, 12 bp, Artificial Sequence
  Oligonucleotide primer for the detection of SNP TSC0025391
aaacacaataac

SEQ ID NO: 312953 - DNA, 12 bp, Artificial Sequence
  Oligonucleotide primer for the detection of SNP TSC0025391
aaacacgataac

SEQ ID NO: 312954 - DNA, 12 bp, Artificial Sequence
  Oligonucleotide primer for the detection of SNP TSC0025391
gaacacaataac

SEQ ID NO: 312955 - DNA, 12 bp, Artificial Sequence
  Oligonucleotide primer for the detection of SNP TSC0025391
gaacacgataac

SEQ ID NO: 312956 - DNA, 12 bp, Artificial Sequence
  Oligonucleotide primer for the detection of SNP TSC0025391
ggtatggtggtt

SEQ ID NO: 312957 - DNA, 12 bp, Artificial Sequence
  Oligonucleotide primer for the detection of SNP TSC0025391
ggtacggtggtt

SEQ ID NO: 312958 - DNA, 12 bp, Artificial Sequence
  Oligonucleotide primer for the detection of SNP TSC0025392
aaccaaaaaaat

SEQ ID NO: 312959 - DNA, 12 bp, Artificial Sequence
  Oligonucleotide primer for the detection of SNP TSC0025392
aaccgaaaaaat

SEQ ID NO: 312960 - DNA, 12 bp, Artificial Sequence
  Oligonucleotide primer for the detection of SNP TSC0025392
tttggagttttg

SEQ ID NO: 312961 - DNA, 12 bp, Artificial Sequence
  Oligonucleotide primer for the detection of SNP TSC0025393
tgtttatttttt

SEQ ID NO: 312962 - DNA, 12 bp, Artificial Sequence
  Oligonucleotide primer for the detection of SNP TSC0025393
tgtttatttttc

SEQ ID NO: 312963 - DNA, 12 bp, Artificial Sequence
  Oligonucleotide primer for the detection of SNP TSC0025393
tatccacccccc

SEQ ID NO: 312964 - DNA, 12 bp, Artificial Sequence
  Oligonucleotide primer for the detection of SNP TSC0025393
ttaaaaaaaaag

SEQ ID NO: 312965 - DNA, 12 bp, Artificial Sequence
  Oligonucleotide primer for the detection of SNP TSC0025395
ttcaaaaaaacc

SEQ ID NO: 312966 - DNA, 12 bp, Artificial Sequence
  Oligonucleotide primer for the detection of SNP TSC0025397
tcaatatatatt

SEQ ID NO: 312967 - DNA, 12 bp, Artificial Sequence
  Oligonucleotide primer for the detection of SNP TSC0025397
gaaaaaaaaaat

SEQ ID NO: 312968 - DNA, 12 bp, Artificial Sequence
  Oligonucleotide primer for the detection of SNP TSC0025398
ctctttcaatat

SEQ ID NO: 312969 - DNA, 12 bp, Artificial Sequence
  Oligonucleotide primer for the detection of SNP TSC0025398
ctctactcccaa

SEQ ID NO: 312970 - DNA, 12 bp, Artificial Sequence
  Oligonucleotide primer for the detection of SNP TSC0025401
aaacgaaatttt

SEQ ID NO: 312971 - DNA, 12 bp, Artificial Sequence
  Oligonucleotide primer for the detection of SNP TSC0025401
gggtaatatggg

SEQ ID NO: 312972 - DNA, 12 bp, Artificial Sequence
  Oligonucleotide primer for the detection of SNP TSC0025402
tatacatatcat

SEQ ID NO: 312973 - DNA, 12 bp, Artificial Sequence
  Oligonucleotide primer for the detection of SNP TSC0025402
ttttaagtaaaa

SEQ ID NO: 312974 - DNA, 12 bp, Artificial Sequence
  Oligonucleotide primer for the detection of SNP TSC0025406
aatcaatataca

SEQ ID NO: 312975 - DNA, 12 bp, Artificial Sequence
  Oligonucleotide primer for the detection of SNP TSC0025406
aatcaatatacg

SEQ ID NO: 312976 - DNA, 12 bp, Artificial Sequence
  Oligonucleotide primer for the detection of SNP TSC0025406
tttagtttatag

SEQ ID NO: 312977 - DNA, 12 bp, Artificial Sequence
  Oligonucleotide primer for the detection of SNP TSC0025406
cccaacttacaa

SEQ ID NO: 312978 - DNA, 12 bp, Artificial Sequence
  Oligonucleotide primer for the detection of SNP TSC0025406
ttagtgtgtgtt

SEQ ID NO: 312979 - DNA, 12 bp, Artificial Sequence
  Oligonucleotide primer for the detection of SNP TSC0025406
ttagtgtgcgtt

SEQ ID NO: 312980 - DNA, 12 bp, Artificial Sequence
  Oligonucleotide primer for the detection of SNP TSC0025409
acactttattct

SEQ ID NO: 312981 - DNA, 12 bp, Artificial Sequence
  Oligonucleotide primer for the detection of SNP TSC0025409
attgtgttaagt

SEQ ID NO: 312982 - DNA, 12 bp, Artificial Sequence
  Oligonukleotid-Primer
tattatattaaa

SEQ ID NO: 312983 - DNA, 12 bp, Artificial Sequence
  Oligonucleotide primer for the detection of SNP TSC0025409
atattttgtttt

SEQ ID NO: 312984 - DNA, 12 bp, Artificial Sequence
  Oligonucleotide primer for the detection of SNP TSC0025413
aaaatattcatt

SEQ ID NO: 312985 - DNA, 12 bp, Artificial Sequence
  Oligonucleotide primer for the detection of SNP TSC0025413
tgtaaattttag

SEQ ID NO: 312986 - DNA, 12 bp, Artificial Sequence
  Oligonucleotide primer for the detection of SNP TSC0025413
agggtgtttatt

SEQ ID NO: 312987 - DNA, 12 bp, Artificial Sequence
  Oligonucleotide primer for the detection of SNP TSC0025414
tttcttttcaat

SEQ ID NO: 312988 - DNA, 12 bp, Artificial Sequence
  Oligonucleotide primer for the detection of SNP TSC0025414
ggaaaggtaata

SEQ ID NO: 312989 - DNA, 12 bp, Artificial Sequence
  Oligonucleotide primer for the detection of SNP TSC0025417
aatttaaactcc

SEQ ID NO: 312990 - DNA, 12 bp, Artificial Sequence
  Oligonucleotide primer for the detection of SNP TSC0025417
ttttgaaaatag

SEQ ID NO: 312991 - DNA, 12 bp, Artificial Sequence
  Oligonucleotide primer for the detection of SNP TSC0025417
atttaagttttt

SEQ ID NO: 312992 - DNA, 12 bp, Artificial Sequence
  Oligonucleotide primer for the detection of SNP TSC0025418
aaacaataatct

SEQ ID NO: 312993 - DNA, 12 bp, Artificial Sequence
  Oligonucleotide primer for the detection of SNP TSC0025418
aaacgataatct

SEQ ID NO: 312994 - DNA, 12 bp, Artificial Sequence
  Oligonucleotide primer for the detection of SNP TSC0025418
gaaagataatta

SEQ ID NO: 312995 - DNA, 12 bp, Artificial Sequence
  Oligonucleotide primer for the detection of SNP TSC0025418
aaaaaacaacta

SEQ ID NO: 312996 - DNA, 12 bp, Artificial Sequence
  Oligonucleotide primer for the detection of SNP TSC0025418
gagtgatgattt

SEQ ID NO: 312997 - DNA, 12 bp, Artificial Sequence
  Oligonucleotide primer for the detection of SNP TSC0025418
gagcgatgattt

SEQ ID NO: 312998 - DNA, 12 bp, Artificial Sequence
  Oligonucleotide primer for the detection of SNP TSC0025421
tccaaaaaaact

SEQ ID NO: 312999 - DNA, 12 bp, Artificial Sequence
  Oligonucleotide primer for the detection of SNP TSC0025421
attgtttttgag

SEQ ID NO: 313000 - DNA, 12 bp, Artificial Sequence
  Oligonucleotide primer for the detection of SNP TSC0025421
attgttttcgag

SEQ ID NO: 313001 - DNA, 12 bp, Artificial Sequence
  Oligonucleotide primer for the detection of SNP TSC0025424
tttaaaacataa

SEQ ID NO: 313002 - DNA, 12 bp, Artificial Sequence
  Oligonucleotide primer for the detection of SNP TSC0025424
taaacatatttt

SEQ ID NO: 313003 - DNA, 12 bp, Artificial Sequence
  Oligonucleotide primer for the detection of SNP TSC0025424
tttaaggtatag

SEQ ID NO: 313004 - DNA, 12 bp, Artificial Sequence
  Oligonucleotide primer for the detection of SNP TSC0025425
atacactatcct

SEQ ID NO: 313005 - DNA, 12 bp, Artificial Sequence
  Oligonucleotide primer for the detection of SNP TSC0025425
agtttttggggg

SEQ ID NO: 313006 - DNA, 12 bp, Artificial Sequence
  Oligonucleotide primer for the detection of SNP TSC0025426
aaaatacttcct

SEQ ID NO: 313007 - DNA, 12 bp, Artificial Sequence
  Oligonucleotide primer for the detection of SNP TSC0025426
gagatgagtaaa

SEQ ID NO: 313008 - DNA, 12 bp, Artificial Sequence
  Oligonucleotide primer for the detection of SNP TSC0025427
aactataaacct

SEQ ID NO: 313009 - DNA, 12 bp, Artificial Sequence
  Oligonucleotide primer for the detection of SNP TSC0025427
aatttaatattg

SEQ ID NO: 313010 - DNA, 12 bp, Artificial Sequence
  Oligonucleotide primer for the detection of SNP TSC0025431
ctaatatttcat

SEQ ID NO: 313011 - DNA, 12 bp, Artificial Sequence
  Oligonucleotide primer for the detection of SNP TSC0025431
ttttgtgtaggg

SEQ ID NO: 313012 - DNA, 12 bp, Artificial Sequence
  Oligonucleotide primer for the detection of SNP TSC0025432
tctctaaaaata

SEQ ID NO: 313013 - DNA, 12 bp, Artificial Sequence
  Oligonucleotide primer for the detection of SNP TSC0025432
agttagtttttt

SEQ ID NO: 313014 - DNA, 12 bp, Artificial Sequence
  Oligonucleotide primer for the detection of SNP TSC0025432
caatcttccaaa

SEQ ID NO: 313015 - DNA, 12 bp, Artificial Sequence
  Oligonucleotide primer for the detection of SNP TSC0025432
tttttgaaagtg

SEQ ID NO: 313016 - DNA, 12 bp, Artificial Sequence
  Oligonucleotide primer for the detection of SNP TSC0025433
tactaccaaatc

SEQ ID NO: 313017 - DNA, 12 bp, Artificial Sequence
  Oligonucleotide primer for the detection of SNP TSC0025433
tggtgtgatttg

SEQ ID NO: 313018 - DNA, 12 bp, Artificial Sequence
  Oligonucleotide primer for the detection of SNP TSC0025433
tggcgtgatttg

SEQ ID NO: 313019 - DNA, 12 bp, Artificial Sequence
  Oligonucleotide primer for the detection of SNP TSC0025434
atcgaataaaaa

SEQ ID NO: 313020 - DNA, 12 bp, Artificial Sequence
  Oligonucleotide primer for the detection of SNP TSC0025434
actcctctccaa

SEQ ID NO: 313021 - DNA, 12 bp, Artificial Sequence
  Oligonucleotide primer for the detection of SNP TSC0025434
attgggtagaga

SEQ ID NO: 313022 - DNA, 12 bp, Artificial Sequence
  Oligonucleotide primer for the detection of SNP TSC0025434
atcgggtagaga

SEQ ID NO: 313023 - DNA, 12 bp, Artificial Sequence
  Oligonucleotide primer for the detection of SNP TSC0025435
actaataaacac

SEQ ID NO: 313024 - DNA, 12 bp, Artificial Sequence
  Oligonucleotide primer for the detection of SNP TSC0025435
actaataaacgc

SEQ ID NO: 313025 - DNA, 12 bp, Artificial Sequence
  Oligonucleotide primer for the detection of SNP TSC0025435
gatgtttttagg

SEQ ID NO: 313026 - DNA, 12 bp, Artificial Sequence
  Oligonucleotide primer for the detection of SNP TSC0025435
aatatccccaaa

SEQ ID NO: 313027 - DNA, 12 bp, Artificial Sequence
  Oligonucleotide primer for the detection of SNP TSC0025435
attggtagatgt

SEQ ID NO: 313028 - DNA, 12 bp, Artificial Sequence
  Oligonucleotide primer for the detection of SNP TSC0025435
attggtagacgt

SEQ ID NO: 313029 - DNA, 12 bp, Artificial Sequence
  Oligonucleotide primer for the detection of SNP TSC0025436
catatccccccc

SEQ ID NO: 313030 - DNA, 12 bp, Artificial Sequence
  Oligonucleotide primer for the detection of SNP TSC0025436
tggggggagtgg

SEQ ID NO: 313031 - DNA, 12 bp, Artificial Sequence
  Oligonucleotide primer for the detection of SNP TSC0025436
tatgtttttttc

SEQ ID NO: 313032 - DNA, 12 bp, Artificial Sequence
  Oligonucleotide primer for the detection of SNP TSC0025437
tatctaattaaa

SEQ ID NO: 313033 - DNA, 12 bp, Artificial Sequence
  Oligonucleotide primer for the detection of SNP TSC0025437
ttcctttcacca

SEQ ID NO: 313034 - DNA, 12 bp, Artificial Sequence
  Oligonucleotide primer for the detection of SNP TSC0025437
tgtttaattgag

SEQ ID NO: 313035 - DNA, 12 bp, Artificial Sequence
  Oligonucleotide primer for the detection of SNP TSC0025438
accactacaccc

SEQ ID NO: 313036 - DNA, 12 bp, Artificial Sequence
  Oligonucleotide primer for the detection of SNP TSC0025438
taagaatatgag

SEQ ID NO: 313037 - DNA, 12 bp, Artificial Sequence
  Oligonucleotide primer for the detection of SNP TSC0025441
taatcaacctta

SEQ ID NO: 313038 - DNA, 12 bp, Artificial Sequence
  Oligonucleotide primer for the detection of SNP TSC0025441
ttaaaactcctt

SEQ ID NO: 313039 - DNA, 12 bp, Artificial Sequence
  Oligonucleotide primer for the detection of SNP TSC0025441
taattaattttg

SEQ ID NO: 313040 - DNA, 12 bp, Artificial Sequence
  Oligonucleotide primer for the detection of SNP TSC0025442
tacaataacact

SEQ ID NO: 313041 - DNA, 12 bp, Artificial Sequence
  Oligonucleotide primer for the detection of SNP TSC0025442
tagtgagttata

SEQ ID NO: 313042 - DNA, 12 bp, Artificial Sequence
  Oligonucleotide primer for the detection of SNP TSC0025443
cataaaaatcaa

SEQ ID NO: 313043 - DNA, 12 bp, Artificial Sequence
  Oligonucleotide primer for the detection of SNP TSC0025443
tttagtaggtat

SEQ ID NO: 313044 - DNA, 12 bp, Artificial Sequence
  Oligonucleotide primer for the detection of SNP TSC0025443
tccaacaaatac

SEQ ID NO: 313045 - DNA, 12 bp, Artificial Sequence
  Oligonucleotide primer for the detection of SNP TSC0025443
tatgggggttag

SEQ ID NO: 313046 - DNA, 12 bp, Artificial Sequence
  Oligonucleotide primer for the detection of SNP TSC0025445
aaaacacataac

SEQ ID NO: 313047 - DNA, 12 bp, Artificial Sequence
  Oligonucleotide primer for the detection of SNP TSC0025445
atgtttaaggta

SEQ ID NO: 313048 - DNA, 12 bp, Artificial Sequence
  Oligonucleotide primer for the detection of SNP TSC0025446
aagtatggatag

SEQ ID NO: 313049 - DNA, 12 bp, Artificial Sequence
  Oligonucleotide primer for the detection of SNP TSC0025449
ttcacctatcat

SEQ ID NO: 313050 - DNA, 12 bp, Artificial Sequence
  Oligonucleotide primer for the detection of SNP TSC0025450
ccccttccacat

SEQ ID NO: 313051 - DNA, 12 bp, Artificial Sequence
  Oligonucleotide primer for the detection of SNP TSC0025450
aatgataggtga

SEQ ID NO: 313052 - DNA, 12 bp, Artificial Sequence
  Oligonucleotide primer for the detection of SNP TSC0025451
atatctataata

SEQ ID NO: 313053 - DNA, 12 bp, Artificial Sequence
  Oligonucleotide primer for the detection of SNP TSC0025451
atatgtgtttat

SEQ ID NO: 313054 - DNA, 12 bp, Artificial Sequence
  Oligonucleotide primer for the detection of SNP TSC0025451
atacgtgtttat

SEQ ID NO: 313055 - DNA, 12 bp, Artificial Sequence
  Oligonucleotide primer for the detection of SNP TSC0025451
acacatatccat

SEQ ID NO: 313056 - DNA, 12 bp, Artificial Sequence
  Oligonucleotide primer for the detection of SNP TSC0025451
acacgtatccat

SEQ ID NO: 313057 - DNA, 12 bp, Artificial Sequence
  Oligonucleotide primer for the detection of SNP TSC0025451
gtgtttgtggtg

SEQ ID NO: 313058 - DNA, 12 bp, Artificial Sequence
  Oligonucleotide primer for the detection of SNP TSC0025452
catcctaaaaaa

SEQ ID NO: 313059 - DNA, 12 bp, Artificial Sequence
  Oligonucleotide primer for the detection of SNP TSC0025452
agatagaatggt

SEQ ID NO: 313060 - DNA, 12 bp, Artificial Sequence
  Oligonucleotide primer for the detection of SNP TSC0025452
tattttgagaga

SEQ ID NO: 313061 - DNA, 12 bp, Artificial Sequence
  Oligonucleotide primer for the detection of SNP TSC0025454
aaacgaaataac

SEQ ID NO: 313062 - DNA, 12 bp, Artificial Sequence
  Oligonucleotide primer for the detection of SNP TSC0025454
gaacaaaataac

SEQ ID NO: 313063 - DNA, 12 bp, Artificial Sequence
  Oligonucleotide primer for the detection of SNP TSC0025454
gaacgaaataac

SEQ ID NO: 313064 - DNA, 12 bp, Artificial Sequence
  Oligonucleotide primer for the detection of SNP TSC0025454
gggtgaggtggt

SEQ ID NO: 313065 - DNA, 12 bp, Artificial Sequence
  Oligonucleotide primer for the detection of SNP TSC0025454
gggcgaggtggt

SEQ ID NO: 313066 - DNA, 12 bp, Artificial Sequence
  Oligonucleotide primer for the detection of SNP TSC0025454
gggtgaggtggc

SEQ ID NO: 313067 - DNA, 12 bp, Artificial Sequence
  Oligonucleotide primer for the detection of SNP TSC0025454
gggcgaggtggc

SEQ ID NO: 313068 - DNA, 12 bp, Artificial Sequence
  Oligonucleotide primer for the detection of SNP TSC0025455
cgcaataactca

SEQ ID NO: 313069 - DNA, 12 bp, Artificial Sequence
  Oligonucleotide primer for the detection of SNP TSC0025455
cgcgataactca

SEQ ID NO: 313070 - DNA, 12 bp, Artificial Sequence
  Oligonucleotide primer for the detection of SNP TSC0025455
cgtggtggttta

SEQ ID NO: 313071 - DNA, 12 bp, Artificial Sequence
  Oligonukleotid-Primer
cgcggtggttta

SEQ ID NO: 313072 - DNA, 12 bp, Artificial Sequence
  Oligonucleotide primer for the detection of SNP TSC0025456
taacccatccta

SEQ ID NO: 313073 - DNA, 12 bp, Artificial Sequence
  Oligonucleotide primer for the detection of SNP TSC0025456
gattagattaga

SEQ ID NO: 313074 - DNA, 12 bp, Artificial Sequence
  Oligonucleotide primer for the detection of SNP TSC0025456
aaccaaactaaa

SEQ ID NO: 313075 - DNA, 12 bp, Artificial Sequence
  Oligonukleotid-Primer
aaacacactaac

SEQ ID NO: 313076 - DNA, 12 bp, Artificial Sequence
  Oligonucleotide primer for the detection of SNP TSC0025458
tttagtttggtg

SEQ ID NO: 313077 - DNA, 12 bp, Artificial Sequence
  Oligonucleotide primer for the detection of SNP TSC0025459
acaaaaatataa

SEQ ID NO: 313078 - DNA, 12 bp, Artificial Sequence
  Oligonucleotide primer for the detection of SNP TSC0025459
gagggtttattg

SEQ ID NO: 313079 - DNA, 12 bp, Artificial Sequence
  Oligonucleotide primer for the detection of SNP TSC0025459
aaaaacttatta

SEQ ID NO: 313080 - DNA, 12 bp, Artificial Sequence
  Oligonucleotide primer for the detection of SNP TSC0025459
aataaaaatatg

SEQ ID NO: 313081 - DNA, 12 bp, Artificial Sequence
  Oligonucleotide primer for the detection of SNP TSC0025460
aatttatacctc

SEQ ID NO: 313082 - DNA, 12 bp, Artificial Sequence
  Oligonucleotide primer for the detection of SNP TSC0025460
gatttaaagaag

SEQ ID NO: 313083 - DNA, 12 bp, Artificial Sequence
  Oligonucleotide primer for the detection of SNP TSC0025461
tttctaaaatcc

SEQ ID NO: 313084 - DNA, 12 bp, Artificial Sequence
  Oligonucleotide primer for the detection of SNP TSC0025461
gtaattatatga

SEQ ID NO: 313085 - DNA, 12 bp, Artificial Sequence
  Oligonucleotide primer for the detection of SNP TSC0025463
caaaatttaaac

SEQ ID NO: 313086 - DNA, 12 bp, Artificial Sequence
  Oligonucleotide primer for the detection of SNP TSC0025463
ttagttagattg

SEQ ID NO: 313087 - DNA, 12 bp, Artificial Sequence
  Oligonucleotide primer for the detection of SNP TSC0025468
atggtgtgaatt

SEQ ID NO: 313088 - DNA, 12 bp, Artificial Sequence
  Oligonucleotide primer for the detection of SNP TSC0025468
atggcgtgaatt

SEQ ID NO: 313089 - DNA, 12 bp, Artificial Sequence
  Oligonucleotide primer for the detection of SNP TSC0025472
atctcaacattt

SEQ ID NO: 313090 - DNA, 12 bp, Artificial Sequence
  Oligonucleotide primer for the detection of SNP TSC0025474
agtttagtattt

SEQ ID NO: 313091 - DNA, 12 bp, Artificial Sequence
  Oligonucleotide primer for the detection of SNP TSC0025474
aacccaacaccc

SEQ ID NO: 313092 - DNA, 12 bp, Artificial Sequence
  Oligonucleotide primer for the detection of SNP TSC0025474
aggtgtgggagg

SEQ ID NO: 313093 - DNA, 12 bp, Artificial Sequence
  Oligonucleotide primer for the detection of SNP TSC0025477
actcactctacc

SEQ ID NO: 313094 - DNA, 12 bp, Artificial Sequence
  Oligonucleotide primer for the detection of SNP TSC0025477
ggatagtgagat

SEQ ID NO: 313095 - DNA, 12 bp, Artificial Sequence
  Oligonucleotide primer for the detection of SNP TSC0025480
tcttccaaatat

SEQ ID NO: 313096 - DNA, 12 bp, Artificial Sequence
  Oligonucleotide primer for the detection of SNP TSC0025480
atgttttgggaa

SEQ ID NO: 313097 - DNA, 12 bp, Artificial Sequence
  Oligonucleotide primer for the detection of SNP TSC0025480
atgtttcgggaa

SEQ ID NO: 313098 - DNA, 12 bp, Artificial Sequence
  Oligonucleotide primer for the detection of SNP TSC0025481
aaccaataaaac

SEQ ID NO: 313099 - DNA, 12 bp, Artificial Sequence
  Oligonucleotide primer for the detection of SNP TSC0025482
aaactaaaatcc

SEQ ID NO: 313100 - DNA, 12 bp, Artificial Sequence
  Oligonucleotide primer for the detection of SNP TSC0025482
ggaggaagttag

SEQ ID NO: 313101 - DNA, 12 bp, Artificial Sequence
  Oligonucleotide primer for the detection of SNP TSC0025482
aagttgggattt

SEQ ID NO: 313102 - DNA, 12 bp, Artificial Sequence
  Oligonucleotide primer for the detection of SNP TSC0025485
caatacctcccc

SEQ ID NO: 313103 - DNA, 12 bp, Artificial Sequence
  Oligonucleotide primer for the detection of SNP TSC0025485
tgagtatttaag

SEQ ID NO: 313104 - DNA, 12 bp, Artificial Sequence
  Oligonucleotide primer for the detection of SNP TSC0025491
caattactaaat

SEQ ID NO: 313105 - DNA, 12 bp, Artificial Sequence
  Oligonucleotide primer for the detection of SNP TSC0025491
gattgtggaatg

SEQ ID NO: 313106 - DNA, 12 bp, Artificial Sequence
  Oligonucleotide primer for the detection of SNP TSC0025497
tccaaaactcct

SEQ ID NO: 313107 - DNA, 12 bp, Artificial Sequence
  Oligonucleotide primer for the detection of SNP TSC0025497
ggttagagtaag

SEQ ID NO: 313108 - DNA, 12 bp, Artificial Sequence
  Oligonucleotide primer for the detection of SNP TSC0025498
aataactaaaat

SEQ ID NO: 313109 - DNA, 12 bp, Artificial Sequence
  Oligonucleotide primer for the detection of SNP TSC0025499
agaaatattaga

SEQ ID NO: 313110 - DNA, 12 bp, Artificial Sequence
  Oligonucleotide primer for the detection of SNP TSC0025499
aaaaatattaaa

SEQ ID NO: 313111 - DNA, 12 bp, Artificial Sequence
  Oligonucleotide primer for the detection of SNP TSC0025499
gtagaagagaag

SEQ ID NO: 313112 - DNA, 12 bp, Artificial Sequence
  Oligonucleotide primer for the detection of SNP TSC0025501
taaatggattat

SEQ ID NO: 313113 - DNA, 12 bp, Artificial Sequence
  Oligonucleotide primer for the detection of SNP TSC0025501
taaatggattac

SEQ ID NO: 313114 - DNA, 12 bp, Artificial Sequence
  Oligonucleotide primer for the detection of SNP TSC0025501
tcaaataaatca

SEQ ID NO: 313115 - DNA, 12 bp, Artificial Sequence
  Oligonucleotide primer for the detection of SNP TSC0025501
tgtgggtttgga

SEQ ID NO: 313116 - DNA, 12 bp, Artificial Sequence
  Oligonucleotide primer for the detection of SNP TSC0025502
aaaaaccataat

SEQ ID NO: 313117 - DNA, 12 bp, Artificial Sequence
  Oligonucleotide primer for the detection of SNP TSC0025502
tgggaaggtggg

SEQ ID NO: 313118 - DNA, 12 bp, Artificial Sequence
  Oligonucleotide primer for the detection of SNP TSC0025504
caaacttcctac

SEQ ID NO: 313119 - DNA, 12 bp, Artificial Sequence
  Oligonucleotide primer for the detection of SNP TSC0025504
ttggtgttagaa

SEQ ID NO: 313120 - DNA, 12 bp, Artificial Sequence
  Oligonucleotide primer for the detection of SNP TSC0025504
tcggtgttagaa

SEQ ID NO: 313121 - DNA, 12 bp, Artificial Sequence
  Oligonucleotide primer for the detection of SNP TSC0025510
tagggaaggttt

SEQ ID NO: 313122 - DNA, 12 bp, Artificial Sequence
  Oligonucleotide primer for the detection of SNP TSC0025515
tcacacttataa

SEQ ID NO: 313123 - DNA, 12 bp, Artificial Sequence
  Oligonucleotide primer for the detection of SNP TSC0025515
tttatagattgt

SEQ ID NO: 313124 - DNA, 12 bp, Artificial Sequence
  Oligonucleotide primer for the detection of SNP TSC0025515
cccacaaactac

SEQ ID NO: 313125 - DNA, 12 bp, Artificial Sequence
  Oligonucleotide primer for the detection of SNP TSC0025515
ttatatttgtaa

SEQ ID NO: 313126 - DNA, 12 bp, Artificial Sequence
  Oligonucleotide primer for the detection of SNP TSC0025516
taaaaaaataca

SEQ ID NO: 313127 - DNA, 12 bp, Artificial Sequence
  Oligonucleotide primer for the detection of SNP TSC0025516
tgtggttttgat

SEQ ID NO: 313128 - DNA, 12 bp, Artificial Sequence
  Oligonucleotide primer for the detection of SNP TSC0025516
tataattttaat

SEQ ID NO: 313129 - DNA, 12 bp, Artificial Sequence
  Oligonucleotide primer for the detection of SNP TSC0025516
tagggaaatgta

SEQ ID NO: 313130 - DNA, 12 bp, Artificial Sequence
  Oligonucleotide primer for the detection of SNP TSC0025517
tcactaaaaact

SEQ ID NO: 313131 - DNA, 12 bp, Artificial Sequence
  Oligonucleotide primer for the detection of SNP TSC0025517
aaagagtgttag

SEQ ID NO: 313132 - DNA, 12 bp, Artificial Sequence
  Oligonucleotide primer for the detection of SNP TSC0025518
aactccacccac

SEQ ID NO: 313133 - DNA, 12 bp, Artificial Sequence
  Oligonucleotide primer for the detection of SNP TSC0025518
gggtttaggtta

SEQ ID NO: 313134 - DNA, 12 bp, Artificial Sequence
  Oligonucleotide primer for the detection of SNP TSC0025520
aacaactctacc

SEQ ID NO: 313135 - DNA, 12 bp, Artificial Sequence
  Oligonucleotide primer for the detection of SNP TSC0025520
agtgaggtgtta

SEQ ID NO: 313136 - DNA, 12 bp, Artificial Sequence
  Oligonucleotide primer for the detection of SNP TSC0025520
agcgaggtgtta

SEQ ID NO: 313137 - DNA, 12 bp, Artificial Sequence
  Oligonucleotide primer for the detection of SNP TSC0025520
aacaaaatatca

SEQ ID NO: 313138 - DNA, 12 bp, Artificial Sequence
  Oligonucleotide primer for the detection of SNP TSC0025520
aacgaaatatca

SEQ ID NO: 313139 - DNA, 12 bp, Artificial Sequence
  Oligonucleotide primer for the detection of SNP TSC0025520
gatagttttgtt

SEQ ID NO: 313140 - DNA, 12 bp, Artificial Sequence
  Oligonucleotide primer for the detection of SNP TSC0025523
aatataatttat

SEQ ID NO: 313141 - DNA, 12 bp, Artificial Sequence
  Oligonucleotide primer for the detection of SNP TSC0025523
aacataatctat

SEQ ID NO: 313142 - DNA, 12 bp, Artificial Sequence
  Oligonucleotide primer for the detection of SNP TSC0025523
atggggaggagg

SEQ ID NO: 313143 - DNA, 12 bp, Artificial Sequence
  Oligonucleotide primer for the detection of SNP TSC0025524
ctcttaattatt

SEQ ID NO: 313144 - DNA, 12 bp, Artificial Sequence
  Oligonucleotide primer for the detection of SNP TSC0025524
aatatagaaaga

SEQ ID NO: 313145 - DNA, 12 bp, Artificial Sequence
  Oligonucleotide primer for the detection of SNP TSC0025526
ccctaattttcc

SEQ ID NO: 313146 - DNA, 12 bp, Artificial Sequence
  Oligonucleotide primer for the detection of SNP TSC0025526
attgtttgttta

SEQ ID NO: 313147 - DNA, 12 bp, Artificial Sequence
  Oligonucleotide primer for the detection of SNP TSC0025527
ccattcataaac

SEQ ID NO: 313148 - DNA, 12 bp, Artificial Sequence
  Oligonucleotide primer for the detection of SNP TSC0025527
tttggtaggatg

SEQ ID NO: 313149 - DNA, 12 bp, Artificial Sequence
  Oligonucleotide primer for the detection of SNP TSC0025528
aacccatcctac

SEQ ID NO: 313150 - DNA, 12 bp, Artificial Sequence
  Oligonucleotide primer for the detection of SNP TSC0025528
gggtagtttagg

SEQ ID NO: 313151 - DNA, 12 bp, Artificial Sequence
  Oligonucleotide primer for the detection of SNP TSC0025529
gtttgatggtga

SEQ ID NO: 313152 - DNA, 12 bp, Artificial Sequence
  Oligonucleotide primer for the detection of SNP TSC0025529
gttcgatggtga

SEQ ID NO: 313153 - DNA, 12 bp, Artificial Sequence
  Oligonucleotide primer for the detection of SNP TSC0025530
atatggttgttt

SEQ ID NO: 313154 - DNA, 12 bp, Artificial Sequence
  Oligonucleotide primer for the detection of SNP TSC0025530
cataattattta

SEQ ID NO: 313155 - DNA, 12 bp, Artificial Sequence
  Oligonucleotide primer for the detection of SNP TSC0025530
ttgttatgggat

SEQ ID NO: 313156 - DNA, 12 bp, Artificial Sequence
  Oligonucleotide primer for the detection of SNP TSC0025534
ttatccactcat

SEQ ID NO: 313157 - DNA, 12 bp, Artificial Sequence
  Oligonucleotide primer for the detection of SNP TSC0025534
atattttttttg

SEQ ID NO: 313158 - DNA, 12 bp, Artificial Sequence
  Oligonucleotide primer for the detection of SNP TSC0025535
aaaccaaacttc

SEQ ID NO: 313159 - DNA, 12 bp, Artificial Sequence
  Oligonucleotide primer for the detection of SNP TSC0025535
attaagtttttt

SEQ ID NO: 313160 - DNA, 12 bp, Artificial Sequence
  Oligonucleotide primer for the detection of SNP TSC0025538
acgtaaaaaatt

SEQ ID NO: 313161 - DNA, 12 bp, Artificial Sequence
  Oligonucleotide primer for the detection of SNP TSC0025538
tatagagaaaga

SEQ ID NO: 313162 - DNA, 12 bp, Artificial Sequence
  Oligonucleotide primer for the detection of SNP TSC0025538
atgtaagggatt

SEQ ID NO: 313163 - DNA, 12 bp, Artificial Sequence
  Oligonucleotide primer for the detection of SNP TSC0025538
acgtaagggatt

SEQ ID NO: 313164 - DNA, 12 bp, Artificial Sequence
  Oligonucleotide primer for the detection of SNP TSC0025540
cctcatttttaa

SEQ ID NO: 313165 - DNA, 12 bp, Artificial Sequence
  Oligonucleotide primer for the detection of SNP TSC0025544
gaggtgggagga

SEQ ID NO: 313166 - DNA, 12 bp, Artificial Sequence
  Oligonucleotide primer for the detection of SNP TSC0025545
caatcttaactc

SEQ ID NO: 313167 - DNA, 12 bp, Artificial Sequence
  Oligonucleotide primer for the detection of SNP TSC0025545
gtgaaggttgtg

SEQ ID NO: 313168 - DNA, 12 bp, Artificial Sequence
  Oligonucleotide primer for the detection of SNP TSC0025545
gcgaaggttgtg

SEQ ID NO: 313169 - DNA, 12 bp, Artificial Sequence
  Oligonucleotide primer for the detection of SNP TSC0025546
aactcaaactat

SEQ ID NO: 313170 - DNA, 12 bp, Artificial Sequence
  Oligonucleotide primer for the detection of SNP TSC0025546
tgaggaggaagg

SEQ ID NO: 313171 - DNA, 12 bp, Artificial Sequence
  Oligonucleotide primer for the detection of SNP TSC0025547
catcacacctca

SEQ ID NO: 313172 - DNA, 12 bp, Artificial Sequence
  Oligonucleotide primer for the detection of SNP TSC0025547
ggttgaggtttt

SEQ ID NO: 313173 - DNA, 12 bp, Artificial Sequence
  Oligonucleotide primer for the detection of SNP TSC0025547
attaaaacttca

SEQ ID NO: 313174 - DNA, 12 bp, Artificial Sequence
  Oligonucleotide primer for the detection of SNP TSC0025547
tattatatttta

SEQ ID NO: 313175 - DNA, 12 bp, Artificial Sequence
  Oligonucleotide primer for the detection of SNP TSC0025548
agtttatgattt

SEQ ID NO: 313176 - DNA, 12 bp, Artificial Sequence
  Oligonucleotide primer for the detection of SNP TSC0025549
tcaaataatccg

SEQ ID NO: 313177 - DNA, 12 bp, Artificial Sequence
  Oligonucleotide primer for the detection of SNP TSC0025549
ttttgggatgtt

SEQ ID NO: 313178 - DNA, 12 bp, Artificial Sequence
  Oligonucleotide primer for the detection of SNP TSC0025549
ttttgggatgtc

SEQ ID NO: 313179 - DNA, 12 bp, Artificial Sequence
  Oligonucleotide primer for the detection of SNP TSC0025549
ctttaaaatacc

SEQ ID NO: 313180 - DNA, 12 bp, Artificial Sequence
  Oligonucleotide primer for the detection of SNP TSC0025549
ttaaatgatttg

SEQ ID NO: 313181 - DNA, 12 bp, Artificial Sequence
  Oligonucleotide primer for the detection of SNP TSC0025549
ttaaatgattcg

SEQ ID NO: 313182 - DNA, 12 bp, Artificial Sequence
  Oligonucleotide primer for the detection of SNP TSC0025556
accaatactacc

SEQ ID NO: 313183 - DNA, 12 bp, Artificial Sequence
  Oligonucleotide primer for the detection of SNP TSC0025556
ttttcgtggtaa

SEQ ID NO: 313184 - DNA, 12 bp, Artificial Sequence
  Oligonucleotide primer for the detection of SNP TSC0025557
ttggtgtatata

SEQ ID NO: 313185 - DNA, 12 bp, Artificial Sequence
  Oligonucleotide primer for the detection of SNP TSC0025559
cttcactaacat

SEQ ID NO: 313186 - DNA, 12 bp, Artificial Sequence
  Oligonucleotide primer for the detection of SNP TSC0025559
gtagtgggtgat

SEQ ID NO: 313187 - DNA, 12 bp, Artificial Sequence
  Oligonucleotide primer for the detection of SNP TSC0025559
gtagtgggcgat

SEQ ID NO: 313188 - DNA, 12 bp, Artificial Sequence
  Oligonucleotide primer for the detection of SNP TSC0025559
caataaacaata

SEQ ID NO: 313189 - DNA, 12 bp, Artificial Sequence
  Oligonucleotide primer for the detection of SNP TSC0025559
caataaacgata

SEQ ID NO: 313190 - DNA, 12 bp, Artificial Sequence
  Oligonucleotide primer for the detection of SNP TSC0025559
ttttattaatat

SEQ ID NO: 313191 - DNA, 12 bp, Artificial Sequence
  Oligonucleotide primer for the detection of SNP TSC0025561
aaaacaataact

SEQ ID NO: 313192 - DNA, 12 bp, Artificial Sequence
  Oligonucleotide primer for the detection of SNP TSC0025561
ggggttttagta

SEQ ID NO: 313193 - DNA, 12 bp, Artificial Sequence
  Oligonucleotide primer for the detection of SNP TSC0025562
ataattaaacaa

SEQ ID NO: 313194 - DNA, 12 bp, Artificial Sequence
  Oligonucleotide primer for the detection of SNP TSC0025562
aaactttacttt

SEQ ID NO: 313195 - DNA, 12 bp, Artificial Sequence
  Oligonucleotide primer for the detection of SNP TSC0025562
tgattaaataat

SEQ ID NO: 313196 - DNA, 12 bp, Artificial Sequence
  Oligonucleotide primer for the detection of SNP TSC0025564
ttcccttattcc

SEQ ID NO: 313197 - DNA, 12 bp, Artificial Sequence
  Oligonucleotide primer for the detection of SNP TSC0025564
ttagtggtattg

SEQ ID NO: 313198 - DNA, 12 bp, Artificial Sequence
  Oligonucleotide primer for the detection of SNP TSC0025567
aaataaactact

SEQ ID NO: 313199 - DNA, 12 bp, Artificial Sequence
  Oligonucleotide primer for the detection of SNP TSC0025567
tattgtatttgg

SEQ ID NO: 313200 - DNA, 12 bp, Artificial Sequence
  Oligonucleotide primer for the detection of SNP TSC0025567
tattgtattcgg

SEQ ID NO: 313201 - DNA, 12 bp, Artificial Sequence
  Oligonucleotide primer for the detection of SNP TSC0025567
cactacacccaa

SEQ ID NO: 313202 - DNA, 12 bp, Artificial Sequence
  Oligonucleotide primer for the detection of SNP TSC0025567
cactacacccga

SEQ ID NO: 313203 - DNA, 12 bp, Artificial Sequence
  Oligonucleotide primer for the detection of SNP TSC0025567
gggtggattatt

SEQ ID NO: 313204 - DNA, 12 bp, Artificial Sequence
  Oligonucleotide primer for the detection of SNP TSC0025568
actaaaatattc

SEQ ID NO: 313205 - DNA, 12 bp, Artificial Sequence
  Oligonucleotide primer for the detection of SNP TSC0025568
taataatattta

SEQ ID NO: 313206 - DNA, 12 bp, Artificial Sequence
  Oligonucleotide primer for the detection of SNP TSC0025568
attaaagtattt

SEQ ID NO: 313207 - DNA, 12 bp, Artificial Sequence
  Oligonucleotide primer for the detection of SNP TSC0025568
attaaagtattc

SEQ ID NO: 313208 - DNA, 12 bp, Artificial Sequence
  Oligonucleotide primer for the detection of SNP TSC0025571
ttctcataactt

SEQ ID NO: 313209 - DNA, 12 bp, Artificial Sequence
  Oligonucleotide primer for the detection of SNP TSC0025571
atagttgataaa

SEQ ID NO: 313210 - DNA, 12 bp, Artificial Sequence
  Oligonucleotide primer for the detection of SNP TSC0025572
taaaccaccgca

SEQ ID NO: 313211 - DNA, 12 bp, Artificial Sequence
  Oligonucleotide primer for the detection of SNP TSC0025572
tttggaagggtt

SEQ ID NO: 313212 - DNA, 12 bp, Artificial Sequence
  Oligonucleotide primer for the detection of SNP TSC0025572
cctaaaaaaacc

SEQ ID NO: 313213 - DNA, 12 bp, Artificial Sequence
  Oligonucleotide primer for the detection of SNP TSC0025572
agttatcgtatt

SEQ ID NO: 313214 - DNA, 12 bp, Artificial Sequence
  Oligonucleotide primer for the detection of SNP TSC0025572
agttattgtatc

SEQ ID NO: 313215 - DNA, 12 bp, Artificial Sequence
  Oligonucleotide primer for the detection of SNP TSC0025572
agttatcgtatc

SEQ ID NO: 313216 - DNA, 12 bp, Artificial Sequence
  Oligonukleotid-Primer
aaaaataatcaa

SEQ ID NO: 313217 - DNA, 12 bp, Artificial Sequence
  Oligonucleotide primer for the detection of SNP TSC0025574
tattttctatta

SEQ ID NO: 313218 - DNA, 12 bp, Artificial Sequence
  Oligonucleotide primer for the detection of SNP TSC0025574
gaaaataattaa

SEQ ID NO: 313219 - DNA, 12 bp, Artificial Sequence
  Oligonucleotide primer for the detection of SNP TSC0025575
aaataccctttt

SEQ ID NO: 313220 - DNA, 12 bp, Artificial Sequence
  Oligonucleotide primer for the detection of SNP TSC0025575
ttaatatttgga

SEQ ID NO: 313221 - DNA, 12 bp, Artificial Sequence
  Oligonucleotide primer for the detection of SNP TSC0025576
atcaccttccaa

SEQ ID NO: 313222 - DNA, 12 bp, Artificial Sequence
  Oligonucleotide primer for the detection of SNP TSC0025576
gtggtattagtt

SEQ ID NO: 313223 - DNA, 12 bp, Artificial Sequence
  Oligonucleotide primer for the detection of SNP TSC0025576
gcggtattagtt

SEQ ID NO: 313224 - DNA, 12 bp, Artificial Sequence
  Oligonucleotide primer for the detection of SNP TSC0025576
caatactaatta

SEQ ID NO: 313225 - DNA, 12 bp, Artificial Sequence
  Oligonucleotide primer for the detection of SNP TSC0025576
cgatactaatta

SEQ ID NO: 313226 - DNA, 12 bp, Artificial Sequence
  Oligonucleotide primer for the detection of SNP TSC0025578
aactcaaaaaac

SEQ ID NO: 313227 - DNA, 12 bp, Artificial Sequence
  Oligonucleotide primer for the detection of SNP TSC0025579
cttatcctaaac

SEQ ID NO: 313228 - DNA, 12 bp, Artificial Sequence
  Oligonucleotide primer for the detection of SNP TSC0025579
gttttagtggtt

SEQ ID NO: 313229 - DNA, 12 bp, Artificial Sequence
  Oligonucleotide primer for the detection of SNP TSC0025579
actccaataatc

SEQ ID NO: 313230 - DNA, 12 bp, Artificial Sequence
  Oligonucleotide primer for the detection of SNP TSC0025579
tttgttttgggt

SEQ ID NO: 313231 - DNA, 12 bp, Artificial Sequence
  Oligonucleotide primer for the detection of SNP TSC0025580
tcctatcaacac

SEQ ID NO: 313232 - DNA, 12 bp, Artificial Sequence
  Oligonucleotide primer for the detection of SNP TSC0025580
tagtttttaaga

SEQ ID NO: 313233 - DNA, 12 bp, Artificial Sequence
  Oligonucleotide primer for the detection of SNP TSC0025588
cccaatataata

SEQ ID NO: 313234 - DNA, 12 bp, Artificial Sequence
  Oligonucleotide primer for the detection of SNP TSC0025588
aatattgtattt

SEQ ID NO: 313235 - DNA, 12 bp, Artificial Sequence
  Oligonucleotide primer for the detection of SNP TSC0025588
aatatcgtattt

SEQ ID NO: 313236 - DNA, 12 bp, Artificial Sequence
  Oligonucleotide primer for the detection of SNP TSC0025588
ataccatatcta

SEQ ID NO: 313237 - DNA, 12 bp, Artificial Sequence
  Oligonucleotide primer for the detection of SNP TSC0025588
ataccgtatcta

SEQ ID NO: 313238 - DNA, 12 bp, Artificial Sequence
  Oligonucleotide primer for the detection of SNP TSC0025588
tttagtgtggta

SEQ ID NO: 313239 - DNA, 12 bp, Artificial Sequence
  Oligonucleotide primer for the detection of SNP TSC0025589
ccttaactaatt

SEQ ID NO: 313240 - DNA, 12 bp, Artificial Sequence
  Oligonucleotide primer for the detection of SNP TSC0025589
gattttaaggag

SEQ ID NO: 313241 - DNA, 12 bp, Artificial Sequence
  Oligonucleotide primer for the detection of SNP TSC0025590
tttagtggtttg

SEQ ID NO: 313242 - DNA, 12 bp, Artificial Sequence
  Oligonucleotide primer for the detection of SNP TSC0025590
cccaataaccta

SEQ ID NO: 313243 - DNA, 12 bp, Artificial Sequence
  Oligonucleotide primer for the detection of SNP TSC0025590
gataaaggaggt

SEQ ID NO: 313244 - DNA, 12 bp, Artificial Sequence
  Oligonucleotide primer for the detection of SNP TSC0025591
caaaaacaaaat

SEQ ID NO: 313245 - DNA, 12 bp, Artificial Sequence
  Oligonucleotide primer for the detection of SNP TSC0025591
agggtttaggtg

SEQ ID NO: 313246 - DNA, 12 bp, Artificial Sequence
  Oligonucleotide primer for the detection of SNP TSC0025593
caatctataccc

SEQ ID NO: 313247 - DNA, 12 bp, Artificial Sequence
  Oligonucleotide primer for the detection of SNP TSC0025593
taggaatggata

SEQ ID NO: 313248 - DNA, 12 bp, Artificial Sequence
  Oligonucleotide primer for the detection of SNP TSC0025594
accacacataac

SEQ ID NO: 313249 - DNA, 12 bp, Artificial Sequence
  Oligonucleotide primer for the detection of SNP TSC0025594
accacacgtaac

SEQ ID NO: 313250 - DNA, 12 bp, Artificial Sequence
  Oligonucleotide primer for the detection of SNP TSC0025594
tcctacttaaca

SEQ ID NO: 313251 - DNA, 12 bp, Artificial Sequence
  Oligonucleotide primer for the detection of SNP TSC0025594
gttatatgtggt

SEQ ID NO: 313252 - DNA, 12 bp, Artificial Sequence
  Oligonucleotide primer for the detection of SNP TSC0025594
gttatacgtggt

SEQ ID NO: 313253 - DNA, 12 bp, Artificial Sequence
  Oligonucleotide primer for the detection of SNP TSC0025597
ataccattctcc

SEQ ID NO: 313254 - DNA, 12 bp, Artificial Sequence
  Oligonucleotide primer for the detection of SNP TSC0025597
ataccgttctcc

SEQ ID NO: 313255 - DNA, 12 bp, Artificial Sequence
  Oligonucleotide primer for the detection of SNP TSC0025597
gagggttgggga

SEQ ID NO: 313256 - DNA, 12 bp, Artificial Sequence
  Oligonucleotide primer for the detection of SNP TSC0025603
aaaactatctca

SEQ ID NO: 313257 - DNA, 12 bp, Artificial Sequence
  Oligonucleotide primer for the detection of SNP TSC0025603
gtgtaaaagttt

SEQ ID NO: 313258 - DNA, 12 bp, Artificial Sequence
  Oligonucleotide primer for the detection of SNP TSC0025603
atacaaaaatct

SEQ ID NO: 313259 - DNA, 12 bp, Artificial Sequence
  Oligonucleotide primer for the detection of SNP TSC0025603
agggttgtttta

SEQ ID NO: 313260 - DNA, 12 bp, Artificial Sequence
  Oligonucleotide primer for the detection of SNP TSC0025608
ctataaactcac

SEQ ID NO: 313261 - DNA, 12 bp, Artificial Sequence
  Oligonucleotide primer for the detection of SNP TSC0025608
agatattttata

SEQ ID NO: 313262 - DNA, 12 bp, Artificial Sequence
  Oligonucleotide primer for the detection of SNP TSC0025608
aaacatttcaca

SEQ ID NO: 313263 - DNA, 12 bp, Artificial Sequence
  Oligonucleotide primer for the detection of SNP TSC0025609
aaaaaatttctc

SEQ ID NO: 313264 - DNA, 12 bp, Artificial Sequence
  Oligonucleotide primer for the detection of SNP TSC0025609
taaggaagaata

SEQ ID NO: 313265 - DNA, 12 bp, Artificial Sequence
  Oligonucleotide primer for the detection of SNP TSC0025610
aaaacaacaaaa

SEQ ID NO: 313266 - DNA, 12 bp, Artificial Sequence
  Oligonucleotide primer for the detection of SNP TSC0025610
aaaacaacgaaa

SEQ ID NO: 313267 - DNA, 12 bp, Artificial Sequence
  Oligonucleotide primer for the detection of SNP TSC0025610
taattttagttt

SEQ ID NO: 313268 - DNA, 12 bp, Artificial Sequence
  Oligonucleotide primer for the detection of SNP TSC0025610
aaacaaccctaa

SEQ ID NO: 313269 - DNA, 12 bp, Artificial Sequence
  Oligonucleotide primer for the detection of SNP TSC0025610
gaggtagtgagg

SEQ ID NO: 313270 - DNA, 12 bp, Artificial Sequence
  Oligonucleotide primer for the detection of SNP TSC0025610
gaggtagcgagg

SEQ ID NO: 313271 - DNA, 12 bp, Artificial Sequence
  Oligonucleotide primer for the detection of SNP TSC0025614
acatatatatat

SEQ ID NO: 313272 - DNA, 12 bp, Artificial Sequence
  Oligonucleotide primer for the detection of SNP TSC0025615
cttcattattct

SEQ ID NO: 313273 - DNA, 12 bp, Artificial Sequence
  Oligonucleotide primer for the detection of SNP TSC0025615
aaataaatggaa

SEQ ID NO: 313274 - DNA, 12 bp, Artificial Sequence
  Oligonucleotide primer for the detection of SNP TSC0025620
taatttcttaat

SEQ ID NO: 313275 - DNA, 12 bp, Artificial Sequence
  Oligonucleotide primer for the detection of SNP TSC0025624
cccaccttcata

SEQ ID NO: 313276 - DNA, 12 bp, Artificial Sequence
  Oligonucleotide primer for the detection of SNP TSC0025624
tttagttgattg

SEQ ID NO: 313277 - DNA, 12 bp, Artificial Sequence
  Oligonucleotide primer for the detection of SNP TSC0025624
cctaactaacta

SEQ ID NO: 313278 - DNA, 12 bp, Artificial Sequence
  Oligonucleotide primer for the detection of SNP TSC0025624
tatttttatatt

SEQ ID NO: 313279 - DNA, 12 bp, Artificial Sequence
  Oligonucleotide primer for the detection of SNP TSC0025625
cttaataataaa

SEQ ID NO: 313280 - DNA, 12 bp, Artificial Sequence
  Oligonucleotide primer for the detection of SNP TSC0025625
tttggtggtggg

SEQ ID NO: 313281 - DNA, 12 bp, Artificial Sequence
  Oligonucleotide primer for the detection of SNP TSC0025640
actctcctccaa

SEQ ID NO: 313282 - DNA, 12 bp, Artificial Sequence
  Oligonucleotide primer for the detection of SNP TSC0025640
ggggagtggagt

SEQ ID NO: 313283 - DNA, 12 bp, Artificial Sequence
  Oligonucleotide primer for the detection of SNP TSC0025641
atttgtatggtg

SEQ ID NO: 313284 - DNA, 12 bp, Artificial Sequence
  Oligonucleotide primer for the detection of SNP TSC0025642
ttttctactaaa

SEQ ID NO: 313285 - DNA, 12 bp, Artificial Sequence
  Oligonucleotide primer for the detection of SNP TSC0025642
gtagatttttgt

SEQ ID NO: 313286 - DNA, 12 bp, Artificial Sequence
  Oligonucleotide primer for the detection of SNP TSC0025642
taaatctttata

SEQ ID NO: 313287 - DNA, 12 bp, Artificial Sequence
  Oligonucleotide primer for the detection of SNP TSC0025643
agggtgtttttg

SEQ ID NO: 313288 - DNA, 12 bp, Artificial Sequence
  Oligonucleotide primer for the detection of SNP TSC0025643
agggtgttttcg

SEQ ID NO: 313289 - DNA, 12 bp, Artificial Sequence
  Oligonucleotide primer for the detection of SNP TSC0025644
atataccatcta

SEQ ID NO: 313290 - DNA, 12 bp, Artificial Sequence
  Oligonucleotide primer for the detection of SNP TSC0025644
gatttatgtttt

SEQ ID NO: 313291 - DNA, 12 bp, Artificial Sequence
  Oligonucleotide primer for the detection of SNP TSC0025644
aattcatactct

SEQ ID NO: 313292 - DNA, 12 bp, Artificial Sequence
  Oligonucleotide primer for the detection of SNP TSC0025644
gtgtgttatttg

SEQ ID NO: 313293 - DNA, 12 bp, Artificial Sequence
  Oligonucleotide primer for the detection of SNP TSC0025645
caacaataaaat

SEQ ID NO: 313294 - DNA, 12 bp, Artificial Sequence
  Oligonucleotide primer for the detection of SNP TSC0025645
ataaaaattttt

SEQ ID NO: 313295 - DNA, 12 bp, Artificial Sequence
  Oligonucleotide primer for the detection of SNP TSC0025645
taaaaaccctta

SEQ ID NO: 313296 - DNA, 12 bp, Artificial Sequence
  Oligonucleotide primer for the detection of SNP TSC0025645
tagtagtgaaat

SEQ ID NO: 313297 - DNA, 12 bp, Artificial Sequence
  Oligonucleotide primer for the detection of SNP TSC0025646
accattcaacaa

SEQ ID NO: 313298 - DNA, 12 bp, Artificial Sequence
  Oligonucleotide primer for the detection of SNP TSC0025646
atttttgaattt

SEQ ID NO: 313299 - DNA, 12 bp, Artificial Sequence
  Oligonucleotide primer for the detection of SNP TSC0025646
aaaacccttaaa

SEQ ID NO: 313300 - DNA, 12 bp, Artificial Sequence
  Oligonucleotide primer for the detection of SNP TSC0025646
ttatttagtagt

SEQ ID NO: 313301 - DNA, 12 bp, Artificial Sequence
  Oligonucleotide primer for the detection of SNP TSC0025647
atatatactaat

SEQ ID NO: 313302 - DNA, 12 bp, Artificial Sequence
  Oligonucleotide primer for the detection of SNP TSC0025647
atataaaatata

SEQ ID NO: 313303 - DNA, 12 bp, Artificial Sequence
  Oligonucleotide primer for the detection of SNP TSC0025652
acttaatttccc

SEQ ID NO: 313304 - DNA, 12 bp, Artificial Sequence
  Oligonucleotide primer for the detection of SNP TSC0025652
gatagattaagg

SEQ ID NO: 313305 - DNA, 12 bp, Artificial Sequence
  Oligonucleotide primer for the detection of SNP TSC0025652
aacaaattaaaa

SEQ ID NO: 313306 - DNA, 12 bp, Artificial Sequence
  Oligonucleotide primer for the detection of SNP TSC0025653
taatacattatt

SEQ ID NO: 313307 - DNA, 12 bp, Artificial Sequence
  Oligonucleotide primer for the detection of SNP TSC0025653
ttattagatata

SEQ ID NO: 313308 - DNA, 12 bp, Artificial Sequence
  Oligonucleotide primer for the detection of SNP TSC0025653
ccatcaaacata

SEQ ID NO: 313309 - DNA, 12 bp, Artificial Sequence
  Oligonucleotide primer for the detection of SNP TSC0025653
tgatatattatt

SEQ ID NO: 313310 - DNA, 12 bp, Artificial Sequence
  Oligonucleotide primer for the detection of SNP TSC0025655
agttttaggttt

SEQ ID NO: 313311 - DNA, 12 bp, Artificial Sequence
  Oligonucleotide primer for the detection of SNP TSC0025655
aaccttaaacct

SEQ ID NO: 313312 - DNA, 12 bp, Artificial Sequence
  Oligonucleotide primer for the detection of SNP TSC0025656
aaaatatacatt

SEQ ID NO: 313313 - DNA, 12 bp, Artificial Sequence
  Oligonucleotide primer for the detection of SNP TSC0025656
tttttatttgga

SEQ ID NO: 313314 - DNA, 12 bp, Artificial Sequence
  Oligonucleotide primer for the detection of SNP TSC0025663
tactccaaaact

SEQ ID NO: 313315 - DNA, 12 bp, Artificial Sequence
  Oligonucleotide primer for the detection of SNP TSC0025663
attaggaagagg

SEQ ID NO: 313316 - DNA, 12 bp, Artificial Sequence
  Oligonucleotide primer for the detection of SNP TSC0025666
ctaccaaaacaa

SEQ ID NO: 313317 - DNA, 12 bp, Artificial Sequence
  Oligonucleotide primer for the detection of SNP TSC0025666
ttaaatgggtat

SEQ ID NO: 313318 - DNA, 12 bp, Artificial Sequence
  Oligonucleotide primer for the detection of SNP TSC0025666
ttaaacgggtat

SEQ ID NO: 313319 - DNA, 12 bp, Artificial Sequence
  Oligonucleotide primer for the detection of SNP TSC0025666
ccaaacgaatat

SEQ ID NO: 313320 - DNA, 12 bp, Artificial Sequence
  Oligonucleotide primer for the detection of SNP TSC0025666
ttgttagagtag

SEQ ID NO: 313321 - DNA, 12 bp, Artificial Sequence
  Oligonucleotide primer for the detection of SNP TSC0025667
agaggatttgta

SEQ ID NO: 313322 - DNA, 12 bp, Artificial Sequence
  Oligonucleotide primer for the detection of SNP TSC0025669
aaagtggtaaaa

SEQ ID NO: 313323 - DNA, 12 bp, Artificial Sequence
  Oligonucleotide primer for the detection of SNP TSC0025670
cccctactatta

SEQ ID NO: 313324 - DNA, 12 bp, Artificial Sequence
  Oligonucleotide primer for the detection of SNP TSC0025673
ttattctaacaa

SEQ ID NO: 313325 - DNA, 12 bp, Artificial Sequence
  Oligonucleotide primer for the detection of SNP TSC0025673
attagtttttag

SEQ ID NO: 313326 - DNA, 12 bp, Artificial Sequence
  Oligonucleotide primer for the detection of SNP TSC0025673
attaacctttaa

SEQ ID NO: 313327 - DNA, 12 bp, Artificial Sequence
  Oligonucleotide primer for the detection of SNP TSC0025673
ttttgttttggt

SEQ ID NO: 313328 - DNA, 12 bp, Artificial Sequence
  Oligonucleotide primer for the detection of SNP TSC0025674
ccacactaaaac

SEQ ID NO: 313329 - DNA, 12 bp, Artificial Sequence
  Oligonucleotide primer for the detection of SNP TSC0025674
ccacgctaaaac

SEQ ID NO: 313330 - DNA, 12 bp, Artificial Sequence
  Oligonucleotide primer for the detection of SNP TSC0025674
ggttaggagtta

SEQ ID NO: 313331 - DNA, 12 bp, Artificial Sequence
  Oligonucleotide primer for the detection of SNP TSC0025677
aaaatcatcaac

SEQ ID NO: 313332 - DNA, 12 bp, Artificial Sequence
  Oligonucleotide primer for the detection of SNP TSC0025677
agttttgtgatt

SEQ ID NO: 313333 - DNA, 12 bp, Artificial Sequence
  Oligonucleotide primer for the detection of SNP TSC0025677
aaccttataatt

SEQ ID NO: 313334 - DNA, 12 bp, Artificial Sequence
  Oligonucleotide primer for the detection of SNP TSC0025677
gagattattaat

SEQ ID NO: 313335 - DNA, 12 bp, Artificial Sequence
  Oligonucleotide primer for the detection of SNP TSC0025678
actccatattta

SEQ ID NO: 313336 - DNA, 12 bp, Artificial Sequence
  Oligonucleotide primer for the detection of SNP TSC0025678
gataagttaaat

SEQ ID NO: 313337 - DNA, 12 bp, Artificial Sequence
  Oligonucleotide primer for the detection of SNP TSC0025683
gagatattatgg

SEQ ID NO: 313338 - DNA, 12 bp, Artificial Sequence
  Oligonucleotide primer for the detection of SNP TSC0025685
ccttataacacc

SEQ ID NO: 313339 - DNA, 12 bp, Artificial Sequence
  Oligonucleotide primer for the detection of SNP TSC0025686
acctccctacat

SEQ ID NO: 313340 - DNA, 12 bp, Artificial Sequence
  Oligonucleotide primer for the detection of SNP TSC0025686
aaaggttttaag

SEQ ID NO: 313341 - DNA, 12 bp, Artificial Sequence
  Oligonucleotide primer for the detection of SNP TSC0025688
ctcccacaaact

SEQ ID NO: 313342 - DNA, 12 bp, Artificial Sequence
  Oligonucleotide primer for the detection of SNP TSC0025688
atttgggttagg

SEQ ID NO: 313343 - DNA, 12 bp, Artificial Sequence
  Oligonucleotide primer for the detection of SNP TSC0025690
agttggtttgga

SEQ ID NO: 313344 - DNA, 12 bp, Artificial Sequence
  Oligonucleotide primer for the detection of SNP TSC0025691
atttcttttttt

SEQ ID NO: 313345 - DNA, 12 bp, Artificial Sequence
  Oligonucleotide primer for the detection of SNP TSC0025691
aaaaaagaaaaa

SEQ ID NO: 313346 - DNA, 12 bp, Artificial Sequence
  Oligonucleotide primer for the detection of SNP TSC0025693
tacgatattcca

SEQ ID NO: 313347 - DNA, 12 bp, Artificial Sequence
  Oligonucleotide primer for the detection of SNP TSC0025693
cttacacaataa

SEQ ID NO: 313348 - DNA, 12 bp, Artificial Sequence
  Oligonucleotide primer for the detection of SNP TSC0025693
ttatgatgtttt

SEQ ID NO: 313349 - DNA, 12 bp, Artificial Sequence
  Oligonucleotide primer for the detection of SNP TSC0025693
ttacgatgtttt

SEQ ID NO: 313350 - DNA, 12 bp, Artificial Sequence
  Oligonucleotide primer for the detection of SNP TSC0025698
caactctacttc

SEQ ID NO: 313351 - DNA, 12 bp, Artificial Sequence
  Oligonucleotide primer for the detection of SNP TSC0025698
gttttgtagtga

SEQ ID NO: 313352 - DNA, 12 bp, Artificial Sequence
  Oligonucleotide primer for the detection of SNP TSC0025701
ctccaacaacac

SEQ ID NO: 313353 - DNA, 12 bp, Artificial Sequence
  Oligonucleotide primer for the detection of SNP TSC0025701
cacattatttta

SEQ ID NO: 313354 - DNA, 12 bp, Artificial Sequence
  Oligonucleotide primer for the detection of SNP TSC0025701
ttttaatagtat

SEQ ID NO: 313355 - DNA, 12 bp, Artificial Sequence
  Oligonucleotide primer for the detection of SNP TSC0025702
cccttaacaaca

SEQ ID NO: 313356 - DNA, 12 bp, Artificial Sequence
  Oligonucleotide primer for the detection of SNP TSC0025702
gggtgtgtttgt

SEQ ID NO: 313357 - DNA, 12 bp, Artificial Sequence
  Oligonucleotide primer for the detection of SNP TSC0025702
aatatatctata

SEQ ID NO: 313358 - DNA, 12 bp, Artificial Sequence
  Oligonucleotide primer for the detection of SNP TSC0025702
ttggtaatattt

SEQ ID NO: 313359 - DNA, 12 bp, Artificial Sequence
  Oligonucleotide primer for the detection of SNP TSC0025702
ttggtaatattc

SEQ ID NO: 313360 - DNA, 12 bp, Artificial Sequence
  Oligonucleotide primer for the detection of SNP TSC0025703
accctccctatc

SEQ ID NO: 313361 - DNA, 12 bp, Artificial Sequence
  Oligonukleotid-Primer
tagtgtagggtg

SEQ ID NO: 313362 - DNA, 12 bp, Artificial Sequence
  Oligonucleotide primer for the detection of SNP TSC0025703
tagcgtagggtg

SEQ ID NO: 313363 - DNA, 12 bp, Artificial Sequence
  Oligonucleotide primer for the detection of SNP TSC0025703
caacacaaaata

SEQ ID NO: 313364 - DNA, 12 bp, Artificial Sequence
  Oligonucleotide primer for the detection of SNP TSC0025703
caacgcaaaata

SEQ ID NO: 313365 - DNA, 12 bp, Artificial Sequence
  Oligonucleotide primer for the detection of SNP TSC0025704
caccatatacaa

SEQ ID NO: 313366 - DNA, 12 bp, Artificial Sequence
  Oligonucleotide primer for the detection of SNP TSC0025704
cgccatatacaa

SEQ ID NO: 313367 - DNA, 12 bp, Artificial Sequence
  Oligonucleotide primer for the detection of SNP TSC0025704
gtttatgaagtt

SEQ ID NO: 313368 - DNA, 12 bp, Artificial Sequence
  Oligonucleotide primer for the detection of SNP TSC0025704
gtttatgaagtc

SEQ ID NO: 313369 - DNA, 12 bp, Artificial Sequence
  Oligonucleotide primer for the detection of SNP TSC0025704
acccataaaatc

SEQ ID NO: 313370 - DNA, 12 bp, Artificial Sequence
  Oligonucleotide primer for the detection of SNP TSC0025704
gcccataaaatc

SEQ ID NO: 313371 - DNA, 12 bp, Artificial Sequence
  Oligonucleotide primer for the detection of SNP TSC0025704
agtgttatgtgt

SEQ ID NO: 313372 - DNA, 12 bp, Artificial Sequence
  Oligonucleotide primer for the detection of SNP TSC0025704
agcgttatgtgt

SEQ ID NO: 313373 - DNA, 12 bp, Artificial Sequence
  Oligonucleotide primer for the detection of SNP TSC0025706
acccaccccacc

SEQ ID NO: 313374 - DNA, 12 bp, Artificial Sequence
  Oligonucleotide primer for the detection of SNP TSC0025706
gcccaccccacc

SEQ ID NO: 313375 - DNA, 12 bp, Artificial Sequence
  Oligonucleotide primer for the detection of SNP TSC0025706
ctattaaaataa

SEQ ID NO: 313376 - DNA, 12 bp, Artificial Sequence
  Oligonucleotide primer for the detection of SNP TSC0025707
ccacccactcca

SEQ ID NO: 313377 - DNA, 12 bp, Artificial Sequence
  Oligonucleotide primer for the detection of SNP TSC0025707
gttaggtggggt

SEQ ID NO: 313378 - DNA, 12 bp, Artificial Sequence
  Oligonucleotide primer for the detection of SNP TSC0025707
accaaataaaat

SEQ ID NO: 313379 - DNA, 12 bp, Artificial Sequence
  Oligonucleotide primer for the detection of SNP TSC0025707
ttatttatttta

SEQ ID NO: 313380 - DNA, 12 bp, Artificial Sequence
  Oligonucleotide primer for the detection of SNP TSC0025710
ggaaaatgtagt

SEQ ID NO: 313381 - DNA, 12 bp, Artificial Sequence
  Oligonucleotide primer for the detection of SNP TSC0025710
gaggagttggaa

SEQ ID NO: 313382 - DNA, 12 bp, Artificial Sequence
  Oligonucleotide primer for the detection of SNP TSC0025713
ttacccctacat

SEQ ID NO: 313383 - DNA, 12 bp, Artificial Sequence
  Oligonucleotide primer for the detection of SNP TSC0025713
ttacccctacgt

SEQ ID NO: 313384 - DNA, 12 bp, Artificial Sequence
  Oligonucleotide primer for the detection of SNP TSC0025714
acctcttaacct

SEQ ID NO: 313385 - DNA, 12 bp, Artificial Sequence
  Oligonucleotide primer for the detection of SNP TSC0025714
ggggtaataagg

SEQ ID NO: 313386 - DNA, 12 bp, Artificial Sequence
  Oligonucleotide primer for the detection of SNP TSC0025715
tcaaataatcta

SEQ ID NO: 313387 - DNA, 12 bp, Artificial Sequence
  Oligonucleotide primer for the detection of SNP TSC0025715
ttaggtgatttg

SEQ ID NO: 313388 - DNA, 12 bp, Artificial Sequence
  Oligonucleotide primer for the detection of SNP TSC0025716
aaaataccacct

SEQ ID NO: 313389 - DNA, 12 bp, Artificial Sequence
  Oligonucleotide primer for the detection of SNP TSC0025716
tttttttaaatg

SEQ ID NO: 313390 - DNA, 12 bp, Artificial Sequence
  Oligonucleotide primer for the detection of SNP TSC0025717
tagtgagattgt

SEQ ID NO: 313391 - DNA, 12 bp, Artificial Sequence
  Oligonucleotide primer for the detection of SNP TSC0025717
tagtgagatcgt

SEQ ID NO: 313392 - DNA, 12 bp, Artificial Sequence
  Oligonucleotide primer for the detection of SNP TSC0025717
acaataaaatca

SEQ ID NO: 313393 - DNA, 12 bp, Artificial Sequence
  Oligonucleotide primer for the detection of SNP TSC0025717
acaataaaatcg

SEQ ID NO: 313394 - DNA, 12 bp, Artificial Sequence
  Oligonucleotide primer for the detection of SNP TSC0025717
ggagtgtaatgg

SEQ ID NO: 313395 - DNA, 12 bp, Artificial Sequence
  Oligonucleotide primer for the detection of SNP TSC0025718
ttatatatcata

SEQ ID NO: 313396 - DNA, 12 bp, Artificial Sequence
  Oligonucleotide primer for the detection of SNP TSC0025718
tttaagtattat

SEQ ID NO: 313397 - DNA, 12 bp, Artificial Sequence
  Oligonucleotide primer for the detection of SNP TSC0025718
cctaaatattac

SEQ ID NO: 313398 - DNA, 12 bp, Artificial Sequence
  Oligonucleotide primer for the detection of SNP TSC0025718
attgtatattat

SEQ ID NO: 313399 - DNA, 12 bp, Artificial Sequence
  Oligonucleotide primer for the detection of SNP TSC0025719
tactctccctac

SEQ ID NO: 313400 - DNA, 12 bp, Artificial Sequence
  Oligonucleotide primer for the detection of SNP TSC0025719
ttttttttaggg

SEQ ID NO: 313401 - DNA, 12 bp, Artificial Sequence
  Oligonucleotide primer for the detection of SNP TSC0025722
caataacaatta

SEQ ID NO: 313402 - DNA, 12 bp, Artificial Sequence
  Oligonucleotide primer for the detection of SNP TSC0025722
gggaagaatatt

SEQ ID NO: 313403 - DNA, 12 bp, Artificial Sequence
  Oligonucleotide primer for the detection of SNP TSC0025722
gggaagaatatc

SEQ ID NO: 313404 - DNA, 12 bp, Artificial Sequence
  Oligonucleotide primer for the detection of SNP TSC0025723
tgtaatagatta

SEQ ID NO: 313405 - DNA, 12 bp, Artificial Sequence
  Oligonucleotide primer for the detection of SNP TSC0025724
taaatacacctc

SEQ ID NO: 313406 - DNA, 12 bp, Artificial Sequence
  Oligonucleotide primer for the detection of SNP TSC0025724
ttttcaaatcaa

SEQ ID NO: 313407 - DNA, 12 bp, Artificial Sequence
  Oligonucleotide primer for the detection of SNP TSC0025724
tgaatgtatttt

SEQ ID NO: 313408 - DNA, 12 bp, Artificial Sequence
  Oligonucleotide primer for the detection of SNP TSC0025732
aaataatatctt

SEQ ID NO: 313409 - DNA, 12 bp, Artificial Sequence
  Oligonucleotide primer for the detection of SNP TSC0025732
ggtaaagtgata

SEQ ID NO: 313410 - DNA, 12 bp, Artificial Sequence
  Oligonucleotide primer for the detection of SNP TSC0025736
caaacaaatccc

SEQ ID NO: 313411 - DNA, 12 bp, Artificial Sequence
  Oligonucleotide primer for the detection of SNP TSC0025736
taagttttataa

SEQ ID NO: 313412 - DNA, 12 bp, Artificial Sequence
  Oligonucleotide primer for the detection of SNP TSC0025737
caattctaaaaa

SEQ ID NO: 313413 - DNA, 12 bp, Artificial Sequence
  Oligonucleotide primer for the detection of SNP TSC0025737
aaataataccta

SEQ ID NO: 313414 - DNA, 12 bp, Artificial Sequence
  Oligonucleotide primer for the detection of SNP TSC0025737
atagtagttttg

SEQ ID NO: 313415 - DNA, 12 bp, Artificial Sequence
  Oligonucleotide primer for the detection of SNP TSC0025738
tcctaactaatt

SEQ ID NO: 313416 - DNA, 12 bp, Artificial Sequence
  Oligonucleotide primer for the detection of SNP TSC0025738
tttggagtgaaa

SEQ ID NO: 313417 - DNA, 12 bp, Artificial Sequence
  Oligonucleotide primer for the detection of SNP TSC0025739
tttatatatcta

SEQ ID NO: 313418 - DNA, 12 bp, Artificial Sequence
  Oligonucleotide primer for the detection of SNP TSC0025739
cataacatacat

SEQ ID NO: 313419 - DNA, 12 bp, Artificial Sequence
  Oligonucleotide primer for the detection of SNP TSC0025739
tgtgtatttatt

SEQ ID NO: 313420 - DNA, 12 bp, Artificial Sequence
  Oligonucleotide primer for the detection of SNP TSC0025740
tatttgtgtttg

SEQ ID NO: 313421 - DNA, 12 bp, Artificial Sequence
  Oligonucleotide primer for the detection of SNP TSC0025751
ccctcaacctcc

SEQ ID NO: 313422 - DNA, 12 bp, Artificial Sequence
  Oligonucleotide primer for the detection of SNP TSC0025751
aggagggtggta

SEQ ID NO: 313423 - DNA, 12 bp, Artificial Sequence
  Oligonucleotide primer for the detection of SNP TSC0025752
tactccctcaac

SEQ ID NO: 313424 - DNA, 12 bp, Artificial Sequence
  Oligonucleotide primer for the detection of SNP TSC0025752
aaggagggtggt

SEQ ID NO: 313425 - DNA, 12 bp, Artificial Sequence
  Oligonucleotide primer for the detection of SNP TSC0025753
acttctaaaaat

SEQ ID NO: 313426 - DNA, 12 bp, Artificial Sequence
  Oligonucleotide primer for the detection of SNP TSC0025754
aatttttaactc

SEQ ID NO: 313427 - DNA, 12 bp, Artificial Sequence
  Oligonucleotide primer for the detection of SNP TSC0025755
atatagatatat

SEQ ID NO: 313428 - DNA, 12 bp, Artificial Sequence
  Oligonucleotide primer for the detection of SNP TSC0025755
cacaaacacaca

SEQ ID NO: 313429 - DNA, 12 bp, Artificial Sequence
  Oligonucleotide primer for the detection of SNP TSC0025756
tattaggatgaa

SEQ ID NO: 313430 - DNA, 12 bp, Artificial Sequence
  Oligonucleotide primer for the detection of SNP TSC0025757
tgtgtagtttat

SEQ ID NO: 313431 - DNA, 12 bp, Artificial Sequence
  Oligonucleotide primer for the detection of SNP TSC0025757
tgcgtagtttat

SEQ ID NO: 313432 - DNA, 12 bp, Artificial Sequence
  Oligonucleotide primer for the detection of SNP TSC0025757
tacataatttat

SEQ ID NO: 313433 - DNA, 12 bp, Artificial Sequence
  Oligonucleotide primer for the detection of SNP TSC0025757
tacgtaatttat

SEQ ID NO: 313434 - DNA, 12 bp, Artificial Sequence
  Oligonucleotide primer for the detection of SNP TSC0025758
aaattaaaaccc

SEQ ID NO: 313435 - DNA, 12 bp, Artificial Sequence
  Oligonucleotide primer for the detection of SNP TSC0025758
gaggttatgggg

SEQ ID NO: 313436 - DNA, 12 bp, Artificial Sequence
  Oligonucleotide primer for the detection of SNP TSC0025760
cttttaaacatt

SEQ ID NO: 313437 - DNA, 12 bp, Artificial Sequence
  Oligonucleotide primer for the detection of SNP TSC0025760
tgttttttgtta

SEQ ID NO: 313438 - DNA, 12 bp, Artificial Sequence
  Oligonucleotide primer for the detection of SNP TSC0025760
cgttttttgtta

SEQ ID NO: 313439 - DNA, 12 bp, Artificial Sequence
  Oligonucleotide primer for the detection of SNP TSC0025761
acaccccccaca

SEQ ID NO: 313440 - DNA, 12 bp, Artificial Sequence
  Oligonucleotide primer for the detection of SNP TSC0025761
acaccccccacg

SEQ ID NO: 313441 - DNA, 12 bp, Artificial Sequence
  Oligonucleotide primer for the detection of SNP TSC0025761
gttttaaggttg

SEQ ID NO: 313442 - DNA, 12 bp, Artificial Sequence
  Oligonucleotide primer for the detection of SNP TSC0025761
accccaaaacta

SEQ ID NO: 313443 - DNA, 12 bp, Artificial Sequence
  Oligonucleotide primer for the detection of SNP TSC0025761
gtattttttatg

SEQ ID NO: 313444 - DNA, 12 bp, Artificial Sequence
  Oligonucleotide primer for the detection of SNP TSC0025761
gtattttttacg

SEQ ID NO: 313445 - DNA, 12 bp, Artificial Sequence
  Oligonucleotide primer for the detection of SNP TSC0025767
atttgggaggta

SEQ ID NO: 313446 - DNA, 12 bp, Artificial Sequence
  Oligonucleotide primer for the detection of SNP TSC0025768
ctacaatatctt

SEQ ID NO: 313447 - DNA, 12 bp, Artificial Sequence
  Oligonucleotide primer for the detection of SNP TSC0025768
gggtttggggtg

SEQ ID NO: 313448 - DNA, 12 bp, Artificial Sequence
  Oligonucleotide primer for the detection of SNP TSC0025771
tacaaacaaaac

SEQ ID NO: 313449 - DNA, 12 bp, Artificial Sequence
  Oligonucleotide primer for the detection of SNP TSC0025771
tacaaacgaaac

SEQ ID NO: 313450 - DNA, 12 bp, Artificial Sequence
  Oligonucleotide primer for the detection of SNP TSC0025771
gtgtgtatttta

SEQ ID NO: 313451 - DNA, 12 bp, Artificial Sequence
  Oligonucleotide primer for the detection of SNP TSC0025771
atatacactcca

SEQ ID NO: 313452 - DNA, 12 bp, Artificial Sequence
  Oligonucleotide primer for the detection of SNP TSC0025771
tgtaaatgaggt

SEQ ID NO: 313453 - DNA, 12 bp, Artificial Sequence
  Oligonucleotide primer for the detection of SNP TSC0025771
tgtaaacgaggt

SEQ ID NO: 313454 - DNA, 12 bp, Artificial Sequence
  Oligonucleotide primer for the detection of SNP TSC0025772
aaaaacttttaa

SEQ ID NO: 313455 - DNA, 12 bp, Artificial Sequence
  Oligonucleotide primer for the detection of SNP TSC0025772
agtgtatgtgga

SEQ ID NO: 313456 - DNA, 12 bp, Artificial Sequence
  Oligonucleotide primer for the detection of SNP TSC0025772
atacatataaaa

SEQ ID NO: 313457 - DNA, 12 bp, Artificial Sequence
  Oligonucleotide primer for the detection of SNP TSC0025772
aaaggtttttga

SEQ ID NO: 313458 - DNA, 12 bp, Artificial Sequence
  Oligonucleotide primer for the detection of SNP TSC0025776
tattcttataaa

SEQ ID NO: 313459 - DNA, 12 bp, Artificial Sequence
  Oligonucleotide primer for the detection of SNP TSC0025776
tgtttaatgagg

SEQ ID NO: 313460 - DNA, 12 bp, Artificial Sequence
  Oligonucleotide primer for the detection of SNP TSC0025777
caataaaaattt

SEQ ID NO: 313461 - DNA, 12 bp, Artificial Sequence
  Oligonucleotide primer for the detection of SNP TSC0025777
aatgtgaatgta

SEQ ID NO: 313462 - DNA, 12 bp, Artificial Sequence
  Oligonucleotide primer for the detection of SNP TSC0025777
aacgtgaatgta

SEQ ID NO: 313463 - DNA, 12 bp, Artificial Sequence
  Oligonucleotide primer for the detection of SNP TSC0025778
taatacctataa

SEQ ID NO: 313464 - DNA, 12 bp, Artificial Sequence
  Oligonucleotide primer for the detection of SNP TSC0025778
ggtttttgtgat

SEQ ID NO: 313465 - DNA, 12 bp, Artificial Sequence
  Oligonucleotide primer for the detection of SNP TSC0025778
aactcctataac

SEQ ID NO: 313466 - DNA, 12 bp, Artificial Sequence
  Oligonucleotide primer for the detection of SNP TSC0025778
taatgtttgtga

SEQ ID NO: 313467 - DNA, 12 bp, Artificial Sequence
  Oligonucleotide primer for the detection of SNP TSC0025784
cctatccatccc

SEQ ID NO: 313468 - DNA, 12 bp, Artificial Sequence
  Oligonucleotide primer for the detection of SNP TSC0025784
aaggtaggatgg

SEQ ID NO: 313469 - DNA, 12 bp, Artificial Sequence
  Oligonucleotide primer for the detection of SNP TSC0025785
tatattaaatcc

SEQ ID NO: 313470 - DNA, 12 bp, Artificial Sequence
  Oligonucleotide primer for the detection of SNP TSC0025785
tggggggatgga

SEQ ID NO: 313471 - DNA, 12 bp, Artificial Sequence
  Oligonucleotide primer for the detection of SNP TSC0025785
tatgttgggttt

SEQ ID NO: 313472 - DNA, 12 bp, Artificial Sequence
  Oligonucleotide primer for the detection of SNP TSC0025791
ccacacacccaa

SEQ ID NO: 313473 - DNA, 12 bp, Artificial Sequence
  Oligonucleotide primer for the detection of SNP TSC0025791
ccacacgcccaa

SEQ ID NO: 313474 - DNA, 12 bp, Artificial Sequence
  Oligonukleotid-Primer
ccacgcacccaa

SEQ ID NO: 313475 - DNA, 12 bp, Artificial Sequence
  Oligonucleotide primer for the detection of SNP TSC0025791
ccacgcgcccaa

SEQ ID NO: 313476 - DNA, 12 bp, Artificial Sequence
  Oligonucleotide primer for the detection of SNP TSC0025791
ttattgtataag

SEQ ID NO: 313477 - DNA, 12 bp, Artificial Sequence
  Oligonucleotide primer for the detection of SNP TSC0025791
tactatataaaa

SEQ ID NO: 313478 - DNA, 12 bp, Artificial Sequence
  Oligonucleotide primer for the detection of SNP TSC0025791
tatgtgtttagt

SEQ ID NO: 313479 - DNA, 12 bp, Artificial Sequence
  Oligonucleotide primer for the detection of SNP TSC0025791
tacgtgtttagt

SEQ ID NO: 313480 - DNA, 12 bp, Artificial Sequence
  Oligonucleotide primer for the detection of SNP TSC0025791
tatgcgtttagt

SEQ ID NO: 313481 - DNA, 12 bp, Artificial Sequence
  Oligonucleotide primer for the detection of SNP TSC0025791
tacgcgtttagt

SEQ ID NO: 313482 - DNA, 12 bp, Artificial Sequence
  Oligonucleotide primer for the detection of SNP TSC0025792
tcaaccttttct

SEQ ID NO: 313483 - DNA, 12 bp, Artificial Sequence
  Oligonucleotide primer for the detection of SNP TSC0025792
tcgaccttttct

SEQ ID NO: 313484 - DNA, 12 bp, Artificial Sequence
  Oligonucleotide primer for the detection of SNP TSC0025792
gtgagataatga

SEQ ID NO: 313485 - DNA, 12 bp, Artificial Sequence
  Oligonucleotide primer for the detection of SNP TSC0025793
atctaatatact

SEQ ID NO: 313486 - DNA, 12 bp, Artificial Sequence
  Oligonucleotide primer for the detection of SNP TSC0025793
attatttattga

SEQ ID NO: 313487 - DNA, 12 bp, Artificial Sequence
  Oligonucleotide primer for the detection of SNP TSC0025793
atcatttattaa

SEQ ID NO: 313488 - DNA, 12 bp, Artificial Sequence
  Oligonucleotide primer for the detection of SNP TSC0025793
gtttaatatatt

SEQ ID NO: 313489 - DNA, 12 bp, Artificial Sequence
  Oligonucleotide primer for the detection of SNP TSC0025794
atttcaaacaac

SEQ ID NO: 313490 - DNA, 12 bp, Artificial Sequence
  Oligonucleotide primer for the detection of SNP TSC0025794
atgaagtttaga

SEQ ID NO: 313491 - DNA, 12 bp, Artificial Sequence
  Oligonucleotide primer for the detection of SNP TSC0025795
taactaattaat

SEQ ID NO: 313492 - DNA, 12 bp, Artificial Sequence
  Oligonucleotide primer for the detection of SNP TSC0025795
tattgtttataa

SEQ ID NO: 313493 - DNA, 12 bp, Artificial Sequence
  Oligonucleotide primer for the detection of SNP TSC0025795
cactattcataa

SEQ ID NO: 313494 - DNA, 12 bp, Artificial Sequence
  Oligonucleotide primer for the detection of SNP TSC0025795
tgattgattgat

SEQ ID NO: 313495 - DNA, 12 bp, Artificial Sequence
  Oligonucleotide primer for the detection of SNP TSC0025796
aacttttatcct

SEQ ID NO: 313496 - DNA, 12 bp, Artificial Sequence
  Oligonucleotide primer for the detection of SNP TSC0025796
ttatgttaggaa

SEQ ID NO: 313497 - DNA, 12 bp, Artificial Sequence
  Oligonucleotide primer for the detection of SNP TSC0025797
taaaaaactatc

SEQ ID NO: 313498 - DNA, 12 bp, Artificial Sequence
  Oligonucleotide primer for the detection of SNP TSC0025797
tggatgtgattt

SEQ ID NO: 313499 - DNA, 12 bp, Artificial Sequence
  Oligonucleotide primer for the detection of SNP TSC0025797
cggatgtgattt

SEQ ID NO: 313500 - DNA, 12 bp, Artificial Sequence
  Oligonucleotide primer for the detection of SNP TSC0025797
aaatataattca

SEQ ID NO: 313501 - DNA, 12 bp, Artificial Sequence
  Oligonucleotide primer for the detection of SNP TSC0025797
gaatataattca

SEQ ID NO: 313502 - DNA, 12 bp, Artificial Sequence
  Oligonucleotide primer for the detection of SNP TSC0025797
aaaaattgtttt

SEQ ID NO: 313503 - DNA, 12 bp, Artificial Sequence
  Oligonucleotide primer for the detection of SNP TSC0025804
cacattcaaacc

SEQ ID NO: 313504 - DNA, 12 bp, Artificial Sequence
  Oligonucleotide primer for the detection of SNP TSC0025804
gtgaatttagag

SEQ ID NO: 313505 - DNA, 12 bp, Artificial Sequence
  Oligonucleotide primer for the detection of SNP TSC0025805
tttccaacacat

SEQ ID NO: 313506 - DNA, 12 bp, Artificial Sequence
  Oligonucleotide primer for the detection of SNP TSC0025805
gtgttttttata

SEQ ID NO: 313507 - DNA, 12 bp, Artificial Sequence
  Oligonucleotide primer for the detection of SNP TSC0025806
acccaatatcat

SEQ ID NO: 313508 - DNA, 12 bp, Artificial Sequence
  Oligonucleotide primer for the detection of SNP TSC0025806
taatgttattga

SEQ ID NO: 313509 - DNA, 12 bp, Artificial Sequence
  Oligonucleotide primer for the detection of SNP TSC0025806
taacgttattga

SEQ ID NO: 313510 - DNA, 12 bp, Artificial Sequence
  Oligonucleotide primer for the detection of SNP TSC0025806
caacactactaa

SEQ ID NO: 313511 - DNA, 12 bp, Artificial Sequence
  Oligonucleotide primer for the detection of SNP TSC0025806
caacgctactaa

SEQ ID NO: 313512 - DNA, 12 bp, Artificial Sequence
  Oligonucleotide primer for the detection of SNP TSC0025806
gtttagtgttat

SEQ ID NO: 313513 - DNA, 12 bp, Artificial Sequence
  Oligonucleotide primer for the detection of SNP TSC0025808
ctaccaaaaaaa

SEQ ID NO: 313514 - DNA, 12 bp, Artificial Sequence
  Oligonucleotide primer for the detection of SNP TSC0025809
ctctattaccca

SEQ ID NO: 313515 - DNA, 12 bp, Artificial Sequence
  Oligonucleotide primer for the detection of SNP TSC0025809
ttgtattttagc

SEQ ID NO: 313516 - DNA, 12 bp, Artificial Sequence
  Oligonucleotide primer for the detection of SNP TSC0025809
gttttgttgttt

SEQ ID NO: 313517 - DNA, 12 bp, Artificial Sequence
  Oligonucleotide primer for the detection of SNP TSC0025813
aaataaaataac

SEQ ID NO: 313518 - DNA, 12 bp, Artificial Sequence
  Oligonucleotide primer for the detection of SNP TSC0025813
gaataaaataac

SEQ ID NO: 313519 - DNA, 12 bp, Artificial Sequence
  Oligonucleotide primer for the detection of SNP TSC0025813
ggtgttatttta

SEQ ID NO: 313520 - DNA, 12 bp, Artificial Sequence
  Oligonucleotide primer for the detection of SNP TSC0025813
aatactactcta

SEQ ID NO: 313521 - DNA, 12 bp, Artificial Sequence
  Oligonucleotide primer for the detection of SNP TSC0025813
gggtggagtggt

SEQ ID NO: 313522 - DNA, 12 bp, Artificial Sequence
  Oligonucleotide primer for the detection of SNP TSC0025815
tataacaaacat

SEQ ID NO: 313523 - DNA, 12 bp, Artificial Sequence
  Oligonucleotide primer for the detection of SNP TSC0025815
ttagtttgaata

SEQ ID NO: 313524 - DNA, 12 bp, Artificial Sequence
  Oligonucleotide primer for the detection of SNP TSC0025815
caacctaaataa

SEQ ID NO: 313525 - DNA, 12 bp, Artificial Sequence
  Oligonucleotide primer for the detection of SNP TSC0025815
tgtgataggtat

SEQ ID NO: 313526 - DNA, 12 bp, Artificial Sequence
  Oligonucleotide primer for the detection of SNP TSC0025816
ccaccaaaaaac

SEQ ID NO: 313527 - DNA, 12 bp, Artificial Sequence
  Oligonucleotide primer for the detection of SNP TSC0025816
ccaccgaaaaac

SEQ ID NO: 313528 - DNA, 12 bp, Artificial Sequence
  Oligonucleotide primer for the detection of SNP TSC0025816
agttatttttag

SEQ ID NO: 313529 - DNA, 12 bp, Artificial Sequence
  Oligonucleotide primer for the detection of SNP TSC0025817
aataccttactt

SEQ ID NO: 313530 - DNA, 12 bp, Artificial Sequence
  Oligonucleotide primer for the detection of SNP TSC0025817
aaatagaggttg

SEQ ID NO: 313531 - DNA, 12 bp, Artificial Sequence
  Oligonucleotide primer for the detection of SNP TSC0025822
cttaaccttttt

SEQ ID NO: 313532 - DNA, 12 bp, Artificial Sequence
  Oligonucleotide primer for the detection of SNP TSC0025822
ttttatgtgtta

SEQ ID NO: 313533 - DNA, 12 bp, Artificial Sequence
  Oligonucleotide primer for the detection of SNP TSC0025826
ttctttccttca

SEQ ID NO: 313534 - DNA, 12 bp, Artificial Sequence
  Oligonucleotide primer for the detection of SNP TSC0025826
tatgtattttga

SEQ ID NO: 313535 - DNA, 12 bp, Artificial Sequence
  Oligonucleotide primer for the detection of SNP TSC0025826
tatatactttaa

SEQ ID NO: 313536 - DNA, 12 bp, Artificial Sequence
  Oligonucleotide primer for the detection of SNP TSC0025828
ttaatttaattc

SEQ ID NO: 313537 - DNA, 12 bp, Artificial Sequence
  Oligonucleotide primer for the detection of SNP TSC0025828
ttttgagagaag

SEQ ID NO: 313538 - DNA, 12 bp, Artificial Sequence
  Oligonucleotide primer for the detection of SNP TSC0025830
cttaaaaaccat

SEQ ID NO: 313539 - DNA, 12 bp, Artificial Sequence
  Oligonucleotide primer for the detection of SNP TSC0025831
cgtgttttgttt

SEQ ID NO: 313540 - DNA, 12 bp, Artificial Sequence
  Oligonucleotide primer for the detection of SNP TSC0025831
tgtgtttcgttt

SEQ ID NO: 313541 - DNA, 12 bp, Artificial Sequence
  Oligonucleotide primer for the detection of SNP TSC0025831
tgtgttttgttc

SEQ ID NO: 313542 - DNA, 12 bp, Artificial Sequence
  Oligonucleotide primer for the detection of SNP TSC0025831
cgtgtttcgttt

SEQ ID NO: 313543 - DNA, 12 bp, Artificial Sequence
  Oligonucleotide primer for the detection of SNP TSC0025831
cgtgttttgttc

SEQ ID NO: 313544 - DNA, 12 bp, Artificial Sequence
  Oligonucleotide primer for the detection of SNP TSC0025831
tgtgtttcgttc

SEQ ID NO: 313545 - DNA, 12 bp, Artificial Sequence
  Oligonucleotide primer for the detection of SNP TSC0025831
cgtgtttcgttc

SEQ ID NO: 313546 - DNA, 12 bp, Artificial Sequence
  Oligonucleotide primer for the detection of SNP TSC0025831
ataccccaccca

SEQ ID NO: 313547 - DNA, 12 bp, Artificial Sequence
  Oligonukleotid-Primer
ataccccacccg

SEQ ID NO: 313548 - DNA, 12 bp, Artificial Sequence
  Oligonucleotide primer for the detection of SNP TSC0025831
ataccccgccca

SEQ ID NO: 313549 - DNA, 12 bp, Artificial Sequence
  Oligonucleotide primer for the detection of SNP TSC0025831
gtaccccaccca

SEQ ID NO: 313550 - DNA, 12 bp, Artificial Sequence
  Oligonucleotide primer for the detection of SNP TSC0025831
ataccccgcccg

SEQ ID NO: 313551 - DNA, 12 bp, Artificial Sequence
  Oligonucleotide primer for the detection of SNP TSC0025831
gtaccccacccg

SEQ ID NO: 313552 - DNA, 12 bp, Artificial Sequence
  Oligonucleotide primer for the detection of SNP TSC0025831
gtaccccgccca

SEQ ID NO: 313553 - DNA, 12 bp, Artificial Sequence
  Oligonucleotide primer for the detection of SNP TSC0025831
gtaccccgcccg

SEQ ID NO: 313554 - DNA, 12 bp, Artificial Sequence
  Oligonucleotide primer for the detection of SNP TSC0025831
gtagggtaagag

SEQ ID NO: 313555 - DNA, 12 bp, Artificial Sequence
  Oligonucleotide primer for the detection of SNP TSC0025832
ctcccaaaatca

SEQ ID NO: 313556 - DNA, 12 bp, Artificial Sequence
  Oligonucleotide primer for the detection of SNP TSC0025832
ttatgggttagt

SEQ ID NO: 313557 - DNA, 12 bp, Artificial Sequence
  Oligonucleotide primer for the detection of SNP TSC0025832
ttacgggttagt

SEQ ID NO: 313558 - DNA, 12 bp, Artificial Sequence
  Oligonucleotide primer for the detection of SNP TSC0025832
cacaaaccaaca

SEQ ID NO: 313559 - DNA, 12 bp, Artificial Sequence
  Oligonucleotide primer for the detection of SNP TSC0025832
cacgaaccaaca

SEQ ID NO: 313560 - DNA, 12 bp, Artificial Sequence
  Oligonucleotide primer for the detection of SNP TSC0025832
tttttaaggtta

SEQ ID NO: 313561 - DNA, 12 bp, Artificial Sequence
  Oligonucleotide primer for the detection of SNP TSC0025833
ttacatatatac

SEQ ID NO: 313562 - DNA, 12 bp, Artificial Sequence
  Oligonucleotide primer for the detection of SNP TSC0025833
ttacgtatatac

SEQ ID NO: 313563 - DNA, 12 bp, Artificial Sequence
  Oligonucleotide primer for the detection of SNP TSC0025833
ttatatttatgg

SEQ ID NO: 313564 - DNA, 12 bp, Artificial Sequence
  Oligonucleotide primer for the detection of SNP TSC0025833
ttatatttacgg

SEQ ID NO: 313565 - DNA, 12 bp, Artificial Sequence
  Oligonucleotide primer for the detection of SNP TSC0025835
ctaaaaaataaa

SEQ ID NO: 313566 - DNA, 12 bp, Artificial Sequence
  Oligonucleotide primer for the detection of SNP TSC0025835
ggaaaagaagta

SEQ ID NO: 313567 - DNA, 12 bp, Artificial Sequence
  Oligonucleotide primer for the detection of SNP TSC0025835
ttggggggtggg

SEQ ID NO: 313568 - DNA, 12 bp, Artificial Sequence
  Oligonucleotide primer for the detection of SNP TSC0025837
aaaccattacta

SEQ ID NO: 313569 - DNA, 12 bp, Artificial Sequence
  Oligonucleotide primer for the detection of SNP TSC0025837
tttaatattttt

SEQ ID NO: 313570 - DNA, 12 bp, Artificial Sequence
  Oligonucleotide primer for the detection of SNP TSC0025837
tccaacatttct

SEQ ID NO: 313571 - DNA, 12 bp, Artificial Sequence
  Oligonucleotide primer for the detection of SNP TSC0025837
ggggttattatt

SEQ ID NO: 313572 - DNA, 12 bp, Artificial Sequence
  Oligonucleotide primer for the detection of SNP TSC0025845
aacacataacct

SEQ ID NO: 313573 - DNA, 12 bp, Artificial Sequence
  Oligonucleotide primer for the detection of SNP TSC0025845
aacacgtaacct

SEQ ID NO: 313574 - DNA, 12 bp, Artificial Sequence
  Oligonucleotide primer for the detection of SNP TSC0025845
gttatggtttta

SEQ ID NO: 313575 - DNA, 12 bp, Artificial Sequence
  Oligonucleotide primer for the detection of SNP TSC0025847
aattcaaaccac

SEQ ID NO: 313576 - DNA, 12 bp, Artificial Sequence
  Oligonucleotide primer for the detection of SNP TSC0025847
gtaaattgtgag

SEQ ID NO: 313577 - DNA, 12 bp, Artificial Sequence
  Oligonucleotide primer for the detection of SNP TSC0025847
gtaaatcgtgag

SEQ ID NO: 313578 - DNA, 12 bp, Artificial Sequence
  Oligonucleotide primer for the detection of SNP TSC0025847
gtaaattgcgag

SEQ ID NO: 313579 - DNA, 12 bp, Artificial Sequence
  Oligonucleotide primer for the detection of SNP TSC0025847
gtaaatcgcgag

SEQ ID NO: 313580 - DNA, 12 bp, Artificial Sequence
  Oligonucleotide primer for the detection of SNP TSC0025848
atttccatttct

SEQ ID NO: 313581 - DNA, 12 bp, Artificial Sequence
  Oligonucleotide primer for the detection of SNP TSC0025848
tatcgtgttttt

SEQ ID NO: 313582 - DNA, 12 bp, Artificial Sequence
  Oligonucleotide primer for the detection of SNP TSC0025848
acatcatatccc

SEQ ID NO: 313583 - DNA, 12 bp, Artificial Sequence
  Oligonucleotide primer for the detection of SNP TSC0025848
acatcgtatccc

SEQ ID NO: 313584 - DNA, 12 bp, Artificial Sequence
  Oligonucleotide primer for the detection of SNP TSC0025851
caccatactcaa

SEQ ID NO: 313585 - DNA, 12 bp, Artificial Sequence
  Oligonucleotide primer for the detection of SNP TSC0025851
atacaaaaaatt

SEQ ID NO: 313586 - DNA, 12 bp, Artificial Sequence
  Oligonucleotide primer for the detection of SNP TSC0025851
attatgtttagt

SEQ ID NO: 313587 - DNA, 12 bp, Artificial Sequence
  Oligonucleotide primer for the detection of SNP TSC0025852
gaaatagtttta

SEQ ID NO: 313588 - DNA, 12 bp, Artificial Sequence
  Oligonucleotide primer for the detection of SNP TSC0025853
attcaatttacc

SEQ ID NO: 313589 - DNA, 12 bp, Artificial Sequence
  Oligonucleotide primer for the detection of SNP TSC0025853
aaaagttttaag

SEQ ID NO: 313590 - DNA, 12 bp, Artificial Sequence
  Oligonucleotide primer for the detection of SNP TSC0025853
aaaaacctcaaa

SEQ ID NO: 313591 - DNA, 12 bp, Artificial Sequence
  Oligonucleotide primer for the detection of SNP TSC0025856
caaaacattttt

SEQ ID NO: 313592 - DNA, 12 bp, Artificial Sequence
  Oligonucleotide primer for the detection of SNP TSC0025856
atagaggaataa

SEQ ID NO: 313593 - DNA, 12 bp, Artificial Sequence
  Oligonucleotide primer for the detection of SNP TSC0025856
acaaaaaaacaa

SEQ ID NO: 313594 - DNA, 12 bp, Artificial Sequence
  Oligonucleotide primer for the detection of SNP TSC0025856
taaagtattttt

SEQ ID NO: 313595 - DNA, 12 bp, Artificial Sequence
  Oligonucleotide primer for the detection of SNP TSC0025857
ctttcctaaata

SEQ ID NO: 313596 - DNA, 12 bp, Artificial Sequence
  Oligonucleotide primer for the detection of SNP TSC0025857
gaagtattttat

SEQ ID NO: 313597 - DNA, 12 bp, Artificial Sequence
  Oligonucleotide primer for the detection of SNP TSC0025857
aaaatattctac

SEQ ID NO: 313598 - DNA, 12 bp, Artificial Sequence
  Oligonucleotide primer for the detection of SNP TSC0025859
aaataaaatacc

SEQ ID NO: 313599 - DNA, 12 bp, Artificial Sequence
  Oligonucleotide primer for the detection of SNP TSC0025860
tatatacaaaca

SEQ ID NO: 313600 - DNA, 12 bp, Artificial Sequence
  Oligonucleotide primer for the detection of SNP TSC0025860
tcaaatctctat

SEQ ID NO: 313601 - DNA, 12 bp, Artificial Sequence
  Oligonucleotide primer for the detection of SNP TSC0025860
tgtgtgtaaata

SEQ ID NO: 313602 - DNA, 12 bp, Artificial Sequence
  Oligonucleotide primer for the detection of SNP TSC0025861
catcaaaaaatc

SEQ ID NO: 313603 - DNA, 12 bp, Artificial Sequence
  Oligonucleotide primer for the detection of SNP TSC0025861
gtaaaggtttgt

SEQ ID NO: 313604 - DNA, 12 bp, Artificial Sequence
  Oligonucleotide primer for the detection of SNP TSC0025861
acaaaaacttat

SEQ ID NO: 313605 - DNA, 12 bp, Artificial Sequence
  Oligonucleotide primer for the detection of SNP TSC0025861
tattaaagagtt

SEQ ID NO: 313606 - DNA, 12 bp, Artificial Sequence
  Oligonucleotide primer for the detection of SNP TSC0025862
ttgggtatagtg

SEQ ID NO: 313607 - DNA, 12 bp, Artificial Sequence
  Oligonucleotide primer for the detection of SNP TSC0025862
tcgggtatagtg

SEQ ID NO: 313608 - DNA, 12 bp, Artificial Sequence
  Oligonucleotide primer for the detection of SNP TSC0025862
ccaaacacaata

SEQ ID NO: 313609 - DNA, 12 bp, Artificial Sequence
  Oligonucleotide primer for the detection of SNP TSC0025862
ccgaacacaata

SEQ ID NO: 313610 - DNA, 12 bp, Artificial Sequence
  Oligonucleotide primer for the detection of SNP TSC0025862
tataggtgtgag

SEQ ID NO: 313611 - DNA, 12 bp, Artificial Sequence
  Oligonucleotide primer for the detection of SNP TSC0025863
ctcacaccacac

SEQ ID NO: 313612 - DNA, 12 bp, Artificial Sequence
  Oligonucleotide primer for the detection of SNP TSC0025863
gtttgattagta

SEQ ID NO: 313613 - DNA, 12 bp, Artificial Sequence
  Oligonucleotide primer for the detection of SNP TSC0025863
acctaatcaaca

SEQ ID NO: 313614 - DNA, 12 bp, Artificial Sequence
  Oligonucleotide primer for the detection of SNP TSC0025863
tttatattatat

SEQ ID NO: 313615 - DNA, 12 bp, Artificial Sequence
  Oligonucleotide primer for the detection of SNP TSC0025865
aattctatttct

SEQ ID NO: 313616 - DNA, 12 bp, Artificial Sequence
  Oligonucleotide primer for the detection of SNP TSC0025866
ccaaattttaat

SEQ ID NO: 313617 - DNA, 12 bp, Artificial Sequence
  Oligonucleotide primer for the detection of SNP TSC0025866
aatatatgttta

SEQ ID NO: 313618 - DNA, 12 bp, Artificial Sequence
  Oligonucleotide primer for the detection of SNP TSC0025871
ttcccttcaccc

SEQ ID NO: 313619 - DNA, 12 bp, Artificial Sequence
  Oligonucleotide primer for the detection of SNP TSC0025871
ttagtagtttag

SEQ ID NO: 313620 - DNA, 12 bp, Artificial Sequence
  Oligonukleotid-Primer
ctaacaacctaa

SEQ ID NO: 313621 - DNA, 12 bp, Artificial Sequence
  Oligonucleotide primer for the detection of SNP TSC0025872
aattttttgtat

SEQ ID NO: 313622 - DNA, 12 bp, Artificial Sequence
  Oligonucleotide primer for the detection of SNP TSC0025872
aatttttcgtat

SEQ ID NO: 313623 - DNA, 12 bp, Artificial Sequence
  Oligonucleotide primer for the detection of SNP TSC0025872
aatttctcatat

SEQ ID NO: 313624 - DNA, 12 bp, Artificial Sequence
  Oligonucleotide primer for the detection of SNP TSC0025872
aatttctcgtat

SEQ ID NO: 313625 - DNA, 12 bp, Artificial Sequence
  Oligonucleotide primer for the detection of SNP TSC0025872
ataatagaaaaa

SEQ ID NO: 313626 - DNA, 12 bp, Artificial Sequence
  Oligonucleotide primer for the detection of SNP TSC0025873
aaattgtttatg

SEQ ID NO: 313627 - DNA, 12 bp, Artificial Sequence
  Oligonucleotide primer for the detection of SNP TSC0025876
tggttagaaaaa

SEQ ID NO: 313628 - DNA, 12 bp, Artificial Sequence
  Oligonucleotide primer for the detection of SNP TSC0025876
taaccaaaaaaa

SEQ ID NO: 313629 - DNA, 12 bp, Artificial Sequence
  Oligonucleotide primer for the detection of SNP TSC0025876
tttgtggtgtgt

SEQ ID NO: 313630 - DNA, 12 bp, Artificial Sequence
  Oligonucleotide primer for the detection of SNP TSC0025877
tacaaaatctat

SEQ ID NO: 313631 - DNA, 12 bp, Artificial Sequence
  Oligonucleotide primer for the detection of SNP TSC0025877
gaaaaattaata

SEQ ID NO: 313632 - DNA, 12 bp, Artificial Sequence
  Oligonucleotide primer for the detection of SNP TSC0025877
tataggatttgt

SEQ ID NO: 313633 - DNA, 12 bp, Artificial Sequence
  Oligonucleotide primer for the detection of SNP TSC0025879
cattacttaact

SEQ ID NO: 313634 - DNA, 12 bp, Artificial Sequence
  Oligonucleotide primer for the detection of SNP TSC0025879
tgtgtattaagg

SEQ ID NO: 313635 - DNA, 12 bp, Artificial Sequence
  Oligonucleotide primer for the detection of SNP TSC0025880
caaaactacaat

SEQ ID NO: 313636 - DNA, 12 bp, Artificial Sequence
  Oligonucleotide primer for the detection of SNP TSC0025880
atggtatgatta

SEQ ID NO: 313637 - DNA, 12 bp, Artificial Sequence
  Oligonucleotide primer for the detection of SNP TSC0025880
ataacataatca

SEQ ID NO: 313638 - DNA, 12 bp, Artificial Sequence
  Oligonucleotide primer for the detection of SNP TSC0025880
taaggttgtagt

SEQ ID NO: 313639 - DNA, 12 bp, Artificial Sequence
  Oligonucleotide primer for the detection of SNP TSC0025886
caaaacaattac

SEQ ID NO: 313640 - DNA, 12 bp, Artificial Sequence
  Oligonucleotide primer for the detection of SNP TSC0025886
gtttgttattta

SEQ ID NO: 313641 - DNA, 12 bp, Artificial Sequence
  Oligonucleotide primer for the detection of SNP TSC0025887
acaaattaccta

SEQ ID NO: 313642 - DNA, 12 bp, Artificial Sequence
  Oligonucleotide primer for the detection of SNP TSC0025887
gaagtgtggttt

SEQ ID NO: 313643 - DNA, 12 bp, Artificial Sequence
  Oligonucleotide primer for the detection of SNP TSC0025887
aaaatataatcc

SEQ ID NO: 313644 - DNA, 12 bp, Artificial Sequence
  Oligonucleotide primer for the detection of SNP TSC0025887
ataagttatttg

SEQ ID NO: 313645 - DNA, 12 bp, Artificial Sequence
  Oligonucleotide primer for the detection of SNP TSC0025888
atactttaactc

SEQ ID NO: 313646 - DNA, 12 bp, Artificial Sequence
  Oligonucleotide primer for the detection of SNP TSC0025888
atagagagggaa

SEQ ID NO: 313647 - DNA, 12 bp, Artificial Sequence
  Oligonucleotide primer for the detection of SNP TSC0025889
atctctccaacc

SEQ ID NO: 313648 - DNA, 12 bp, Artificial Sequence
  Oligonucleotide primer for the detection of SNP TSC0025892
attaaaaaaacg

SEQ ID NO: 313649 - DNA, 12 bp, Artificial Sequence
  Oligonucleotide primer for the detection of SNP TSC0025892
tatttgtgttat

SEQ ID NO: 313650 - DNA, 12 bp, Artificial Sequence
  Oligonucleotide primer for the detection of SNP TSC0025892
catttatactac

SEQ ID NO: 313651 - DNA, 12 bp, Artificial Sequence
  Oligonucleotide primer for the detection of SNP TSC0025892
gttaggagaatg

SEQ ID NO: 313652 - DNA, 12 bp, Artificial Sequence
  Oligonucleotide primer for the detection of SNP TSC0025892
gttaggagaacg

SEQ ID NO: 313653 - DNA, 12 bp, Artificial Sequence
  Oligonucleotide primer for the detection of SNP TSC0025893
taataactcaac

SEQ ID NO: 313654 - DNA, 12 bp, Artificial Sequence
  Oligonucleotide primer for the detection of SNP TSC0025893
tatagggttagg

SEQ ID NO: 313655 - DNA, 12 bp, Artificial Sequence
  Oligonucleotide primer for the detection of SNP TSC0025896
aaaaccaacacc

SEQ ID NO: 313656 - DNA, 12 bp, Artificial Sequence
  Oligonucleotide primer for the detection of SNP TSC0025896
aaaaccaacgcc

SEQ ID NO: 313657 - DNA, 12 bp, Artificial Sequence
  Oligonucleotide primer for the detection of SNP TSC0025896
gggtgttgaaag

SEQ ID NO: 313658 - DNA, 12 bp, Artificial Sequence
  Oligonucleotide primer for the detection of SNP TSC0025896
gaatactaaaaa

SEQ ID NO: 313659 - DNA, 12 bp, Artificial Sequence
  Oligonucleotide primer for the detection of SNP TSC0025896
ggaattagtgtt

SEQ ID NO: 313660 - DNA, 12 bp, Artificial Sequence
  Oligonucleotide primer for the detection of SNP TSC0025896
ggaattagcgtt

SEQ ID NO: 313661 - DNA, 12 bp, Artificial Sequence
  Oligonucleotide primer for the detection of SNP TSC0025896
ggaattagtgtc

SEQ ID NO: 313662 - DNA, 12 bp, Artificial Sequence
  Oligonucleotide primer for the detection of SNP TSC0025896
ggaattagcgtc

SEQ ID NO: 313663 - DNA, 12 bp, Artificial Sequence
  Oligonucleotide primer for the detection of SNP TSC0025897
cctaactatcca

SEQ ID NO: 313664 - DNA, 12 bp, Artificial Sequence
  Oligonucleotide primer for the detection of SNP TSC0025897
aaggggtgtgat

SEQ ID NO: 313665 - DNA, 12 bp, Artificial Sequence
  Oligonucleotide primer for the detection of SNP TSC0025897
aaggggtgtgac

SEQ ID NO: 313666 - DNA, 12 bp, Artificial Sequence
  Oligonucleotide primer for the detection of SNP TSC0025899
tttactatttat

SEQ ID NO: 313667 - DNA, 12 bp, Artificial Sequence
  Oligonucleotide primer for the detection of SNP TSC0025900
caaacaaaacct

SEQ ID NO: 313668 - DNA, 12 bp, Artificial Sequence
  Oligonucleotide primer for the detection of SNP TSC0025900
caaacgaaacct

SEQ ID NO: 313669 - DNA, 12 bp, Artificial Sequence
  Oligonucleotide primer for the detection of SNP TSC0025900
tatttatacgtg

SEQ ID NO: 313670 - DNA, 12 bp, Artificial Sequence
  Oligonucleotide primer for the detection of SNP TSC0025903
cttatacaaaca

SEQ ID NO: 313671 - DNA, 12 bp, Artificial Sequence
  Oligonucleotide primer for the detection of SNP TSC0025903
gttggaatgttt

SEQ ID NO: 313672 - DNA, 12 bp, Artificial Sequence
  Oligonucleotide primer for the detection of SNP TSC0025903
tttatgtaagta

SEQ ID NO: 313673 - DNA, 12 bp, Artificial Sequence
  Oligonucleotide primer for the detection of SNP TSC0025904
atattttgattt

SEQ ID NO: 313674 - DNA, 12 bp, Artificial Sequence
  Oligonucleotide primer for the detection of SNP TSC0025904
acaccttaatct

SEQ ID NO: 313675 - DNA, 12 bp, Artificial Sequence
  Oligonucleotide primer for the detection of SNP TSC0025904
ggaggttagaag

SEQ ID NO: 313676 - DNA, 12 bp, Artificial Sequence
  Oligonucleotide primer for the detection of SNP TSC0025906
tactctctccac

SEQ ID NO: 313677 - DNA, 12 bp, Artificial Sequence
  Oligonucleotide primer for the detection of SNP TSC0025906
tttttttttacg

SEQ ID NO: 313678 - DNA, 12 bp, Artificial Sequence
  Oligonucleotide primer for the detection of SNP TSC0025908
ccacctaaaaac

SEQ ID NO: 313679 - DNA, 12 bp, Artificial Sequence
  Oligonucleotide primer for the detection of SNP TSC0025908
ccgcctaaaaac

SEQ ID NO: 313680 - DNA, 12 bp, Artificial Sequence
  Oligonucleotide primer for the detection of SNP TSC0025908
agaatgggttta

SEQ ID NO: 313681 - DNA, 12 bp, Artificial Sequence
  Oligonucleotide primer for the detection of SNP TSC0025908
aaaataaatcca

SEQ ID NO: 313682 - DNA, 12 bp, Artificial Sequence
  Oligonucleotide primer for the detection of SNP TSC0025908
ttgtttgaggat

SEQ ID NO: 313683 - DNA, 12 bp, Artificial Sequence
  Oligonucleotide primer for the detection of SNP TSC0025908
tcgtttgaggat

SEQ ID NO: 313684 - DNA, 12 bp, Artificial Sequence
  Oligonucleotide primer for the detection of SNP TSC0025909
tactaaataact

SEQ ID NO: 313685 - DNA, 12 bp, Artificial Sequence
  Oligonucleotide primer for the detection of SNP TSC0025909
gttttttattag

SEQ ID NO: 313686 - DNA, 12 bp, Artificial Sequence
  Oligonucleotide primer for the detection of SNP TSC0025910
atccacctcttt

SEQ ID NO: 313687 - DNA, 12 bp, Artificial Sequence
  Oligonucleotide primer for the detection of SNP TSC0025910
gtgtagtggaaa

SEQ ID NO: 313688 - DNA, 12 bp, Artificial Sequence
  Oligonucleotide primer for the detection of SNP TSC0025910
gtgtagcggaaa

SEQ ID NO: 313689 - DNA, 12 bp, Artificial Sequence
  Oligonucleotide primer for the detection of SNP TSC0025910
atacaacaaaaa

SEQ ID NO: 313690 - DNA, 12 bp, Artificial Sequence
  Oligonucleotide primer for the detection of SNP TSC0025910
atacaacgaaaa

SEQ ID NO: 313691 - DNA, 12 bp, Artificial Sequence
  Oligonucleotide primer for the detection of SNP TSC0025911
atttcaaatacc

SEQ ID NO: 313692 - DNA, 12 bp, Artificial Sequence
  Oligonucleotide primer for the detection of SNP TSC0025911
taggtatggtag

SEQ ID NO: 313693 - DNA, 12 bp, Artificial Sequence
  Oligonucleotide primer for the detection of SNP TSC0025911
taaacataataa

SEQ ID NO: 313694 - DNA, 12 bp, Artificial Sequence
  Oligonucleotide primer for the detection of SNP TSC0025911
attttaagtgtt

SEQ ID NO: 313695 - DNA, 12 bp, Artificial Sequence
  Oligonucleotide primer for the detection of SNP TSC0025914
ctaatttttatt

SEQ ID NO: 313696 - DNA, 12 bp, Artificial Sequence
  Oligonucleotide primer for the detection of SNP TSC0025914
ttttataattta

SEQ ID NO: 313697 - DNA, 12 bp, Artificial Sequence
  Oligonucleotide primer for the detection of SNP TSC0025914
ttctataactta

SEQ ID NO: 313698 - DNA, 12 bp, Artificial Sequence
  Oligonucleotide primer for the detection of SNP TSC0025914
ttaatttttatt

SEQ ID NO: 313699 - DNA, 12 bp, Artificial Sequence
  Oligonucleotide primer for the detection of SNP TSC0025915
aaaacatattat

SEQ ID NO: 313700 - DNA, 12 bp, Artificial Sequence
  Oligonucleotide primer for the detection of SNP TSC0025915
atatggaataaa

SEQ ID NO: 313701 - DNA, 12 bp, Artificial Sequence
  Oligonucleotide primer for the detection of SNP TSC0025924
aatcacacaaaa

SEQ ID NO: 313702 - DNA, 12 bp, Artificial Sequence
  Oligonucleotide primer for the detection of SNP TSC0025924
atctaaatctca

SEQ ID NO: 313703 - DNA, 12 bp, Artificial Sequence
  Oligonucleotide primer for the detection of SNP TSC0025924
aattatataaag

SEQ ID NO: 313704 - DNA, 12 bp, Artificial Sequence
  Oligonucleotide primer for the detection of SNP TSC0025926
aaatccattata

SEQ ID NO: 313705 - DNA, 12 bp, Artificial Sequence
  Oligonucleotide primer for the detection of SNP TSC0025926
gataaattatgt

SEQ ID NO: 313706 - DNA, 12 bp, Artificial Sequence
  Oligonucleotide primer for the detection of SNP TSC0025926
caataaatcata

SEQ ID NO: 313707 - DNA, 12 bp, Artificial Sequence
  Oligonucleotide primer for the detection of SNP TSC0025926
cgataaatcata

SEQ ID NO: 313708 - DNA, 12 bp, Artificial Sequence
  Oligonucleotide primer for the detection of SNP TSC0025926
tgaatttattat

SEQ ID NO: 313709 - DNA, 12 bp, Artificial Sequence
  Oligonukleotid-Primer
ctataaaacaaa

SEQ ID NO: 313710 - DNA, 12 bp, Artificial Sequence
  Oligonucleotide primer for the detection of SNP TSC0025927
gtaattaaggta

SEQ ID NO: 313711 - DNA, 12 bp, Artificial Sequence
  Oligonucleotide primer for the detection of SNP TSC0025927
acaatcaaaaca

SEQ ID NO: 313712 - DNA, 12 bp, Artificial Sequence
  Oligonucleotide primer for the detection of SNP TSC0025927
ttgtgaaataaa

SEQ ID NO: 313713 - DNA, 12 bp, Artificial Sequence
  Oligonukleotid-Primer
taatatttcctc

SEQ ID NO: 313714 - DNA, 12 bp, Artificial Sequence
  Oligonucleotide primer for the detection of SNP TSC0025932
taattatatatt

SEQ ID NO: 313715 - DNA, 12 bp, Artificial Sequence
  Oligonucleotide primer for the detection of SNP TSC0025932
aggaaaaggaat

SEQ ID NO: 313716 - DNA, 12 bp, Artificial Sequence
  Oligonucleotide primer for the detection of SNP TSC0025933
ctaaacaacaca

SEQ ID NO: 313717 - DNA, 12 bp, Artificial Sequence
  Oligonukleotid-Primer
ctaaacaacacg

SEQ ID NO: 313718 - DNA, 12 bp, Artificial Sequence
  Oligonucleotide primer for the detection of SNP TSC0025933
tgggttgtgttt

SEQ ID NO: 313719 - DNA, 12 bp, Artificial Sequence
  Oligonucleotide primer for the detection of SNP TSC0025933
tgggtcgtgttt

SEQ ID NO: 313720 - DNA, 12 bp, Artificial Sequence
  Oligonucleotide primer for the detection of SNP TSC0025933
taaatcataccc

SEQ ID NO: 313721 - DNA, 12 bp, Artificial Sequence
  Oligonucleotide primer for the detection of SNP TSC0025933
taaatcgtaccc

SEQ ID NO: 313722 - DNA, 12 bp, Artificial Sequence
  Oligonucleotide primer for the detection of SNP TSC0025933
ttgagtaatatg

SEQ ID NO: 313723 - DNA, 12 bp, Artificial Sequence
  Oligonucleotide primer for the detection of SNP TSC0025933
ttgagtaatacg

SEQ ID NO: 313724 - DNA, 12 bp, Artificial Sequence
  Oligonucleotide primer for the detection of SNP TSC0025934
tttaaagagagt

SEQ ID NO: 313725 - DNA, 12 bp, Artificial Sequence
  Oligonucleotide primer for the detection of SNP TSC0025934
gagagagaggat

SEQ ID NO: 313726 - DNA, 12 bp, Artificial Sequence
  Oligonucleotide primer for the detection of SNP TSC0025935
tttttctttatc

SEQ ID NO: 313727 - DNA, 12 bp, Artificial Sequence
  Oligonucleotide primer for the detection of SNP TSC0025935
gtattagtattt

SEQ ID NO: 313728 - DNA, 12 bp, Artificial Sequence
  Oligonucleotide primer for the detection of SNP TSC0025935
acattaacattt

SEQ ID NO: 313729 - DNA, 12 bp, Artificial Sequence
  Oligonucleotide primer for the detection of SNP TSC0025936
ttatatactctt

SEQ ID NO: 313730 - DNA, 12 bp, Artificial Sequence
  Oligonucleotide primer for the detection of SNP TSC0025936
ttaaaaggatag

SEQ ID NO: 313731 - DNA, 12 bp, Artificial Sequence
  Oligonucleotide primer for the detection of SNP TSC0025937
atcctaacaatt

SEQ ID NO: 313732 - DNA, 12 bp, Artificial Sequence
  Oligonucleotide primer for the detection of SNP TSC0025937
taatgatatgta

SEQ ID NO: 313733 - DNA, 12 bp, Artificial Sequence
  Oligonucleotide primer for the detection of SNP TSC0025937
taatgatacgta

SEQ ID NO: 313734 - DNA, 12 bp, Artificial Sequence
  Oligonucleotide primer for the detection of SNP TSC0025938
ttattaataaca

SEQ ID NO: 313735 - DNA, 12 bp, Artificial Sequence
  Oligonucleotide primer for the detection of SNP TSC0025938
aataattataat

SEQ ID NO: 313736 - DNA, 12 bp, Artificial Sequence
  Oligonucleotide primer for the detection of SNP TSC0025938
ttattaatgata

SEQ ID NO: 313737 - DNA, 12 bp, Artificial Sequence
  Oligonucleotide primer for the detection of SNP TSC0025939
ttaatctttaat

SEQ ID NO: 313738 - DNA, 12 bp, Artificial Sequence
  Oligonucleotide primer for the detection of SNP TSC0025939
gtgttattaata

SEQ ID NO: 313739 - DNA, 12 bp, Artificial Sequence
  Oligonucleotide primer for the detection of SNP TSC0025940
acaattcatcac

SEQ ID NO: 313740 - DNA, 12 bp, Artificial Sequence
  Oligonucleotide primer for the detection of SNP TSC0025940
gaatataggtta

SEQ ID NO: 313741 - DNA, 12 bp, Artificial Sequence
  Oligonucleotide primer for the detection of SNP TSC0025941
ttatttattatg

SEQ ID NO: 313742 - DNA, 12 bp, Artificial Sequence
  Oligonucleotide primer for the detection of SNP TSC0025942
ttaacatctatt

SEQ ID NO: 313743 - DNA, 12 bp, Artificial Sequence
  Oligonucleotide primer for the detection of SNP TSC0025942
attgggtttaaa

SEQ ID NO: 313744 - DNA, 12 bp, Artificial Sequence
  Oligonucleotide primer for the detection of SNP TSC0025943
ataaaaaaatcg

SEQ ID NO: 313745 - DNA, 12 bp, Artificial Sequence
  Oligonucleotide primer for the detection of SNP TSC0025943
gtaaaaaaatca

SEQ ID NO: 313746 - DNA, 12 bp, Artificial Sequence
  Oligonucleotide primer for the detection of SNP TSC0025943
gtaaaaaaatcg

SEQ ID NO: 313747 - DNA, 12 bp, Artificial Sequence
  Oligonucleotide primer for the detection of SNP TSC0025943
ttgagattagat

SEQ ID NO: 313748 - DNA, 12 bp, Artificial Sequence
  Oligonucleotide primer for the detection of SNP TSC0025943
ctaaaactaaat

SEQ ID NO: 313749 - DNA, 12 bp, Artificial Sequence
  Oligonucleotide primer for the detection of SNP TSC0025943
gtaggaaaattg

SEQ ID NO: 313750 - DNA, 12 bp, Artificial Sequence
  Oligonucleotide primer for the detection of SNP TSC0025943
gtaggaaaatcg

SEQ ID NO: 313751 - DNA, 12 bp, Artificial Sequence
  Oligonucleotide primer for the detection of SNP TSC0025944
aaccaaatcact

SEQ ID NO: 313752 - DNA, 12 bp, Artificial Sequence
  Oligonucleotide primer for the detection of SNP TSC0025944
ttttattttgtg

SEQ ID NO: 313753 - DNA, 12 bp, Artificial Sequence
  Oligonucleotide primer for the detection of SNP TSC0025945
taagtttggaag

SEQ ID NO: 313754 - DNA, 12 bp, Artificial Sequence
  Oligonucleotide primer for the detection of SNP TSC0025945
tagatttatttt

SEQ ID NO: 313755 - DNA, 12 bp, Artificial Sequence
  Oligonucleotide primer for the detection of SNP TSC0025946
gtttatggtgat

SEQ ID NO: 313756 - DNA, 12 bp, Artificial Sequence
  Oligonucleotide primer for the detection of SNP TSC0025946
atccataataac

SEQ ID NO: 313757 - DNA, 12 bp, Artificial Sequence
  Oligonucleotide primer for the detection of SNP TSC0025946
gtttggggaagg

SEQ ID NO: 313758 - DNA, 12 bp, Artificial Sequence
  Oligonucleotide primer for the detection of SNP TSC0025947
tatcttaatacc

SEQ ID NO: 313759 - DNA, 12 bp, Artificial Sequence
  Oligonucleotide primer for the detection of SNP TSC0025947
tgattataggaa

SEQ ID NO: 313760 - DNA, 12 bp, Artificial Sequence
  Oligonucleotide primer for the detection of SNP TSC0025950
gagtttgggtta

SEQ ID NO: 313761 - DNA, 12 bp, Artificial Sequence
  Oligonucleotide primer for the detection of SNP TSC0025952
aaaacctaaatc

SEQ ID NO: 313762 - DNA, 12 bp, Artificial Sequence
  Oligonucleotide primer for the detection of SNP TSC0025952
ttaggttgttag

SEQ ID NO: 313763 - DNA, 12 bp, Artificial Sequence
  Oligonucleotide primer for the detection of SNP TSC0025952
ttaggtcgttag

SEQ ID NO: 313764 - DNA, 12 bp, Artificial Sequence
  Oligonucleotide primer for the detection of SNP TSC0025953
ttaataaatttc

SEQ ID NO: 313765 - DNA, 12 bp, Artificial Sequence
  Oligonucleotide primer for the detection of SNP TSC0025953
attaaaataaga

SEQ ID NO: 313766 - DNA, 12 bp, Artificial Sequence
  Oligonucleotide primer for the detection of SNP TSC0025956
ctcactataaac

SEQ ID NO: 313767 - DNA, 12 bp, Artificial Sequence
  Oligonucleotide primer for the detection of SNP TSC0025956
ttgttgtagagg

SEQ ID NO: 313768 - DNA, 12 bp, Artificial Sequence
  Oligonucleotide primer for the detection of SNP TSC0025957
cactataaaccc

SEQ ID NO: 313769 - DNA, 12 bp, Artificial Sequence
  Oligonucleotide primer for the detection of SNP TSC0025957
atttgttgtaga

SEQ ID NO: 313770 - DNA, 12 bp, Artificial Sequence
  Oligonucleotide primer for the detection of SNP TSC0025963
ctaataattctc

SEQ ID NO: 313771 - DNA, 12 bp, Artificial Sequence
  Oligonucleotide primer for the detection of SNP TSC0025963
tttgaagttagg

SEQ ID NO: 313772 - DNA, 12 bp, Artificial Sequence
  Oligonucleotide primer for the detection of SNP TSC0025964
ttaagtttttta

SEQ ID NO: 313773 - DNA, 12 bp, Artificial Sequence
  Oligonucleotide primer for the detection of SNP TSC0025964
ccaaacccttta

SEQ ID NO: 313774 - DNA, 12 bp, Artificial Sequence
  Oligonucleotide primer for the detection of SNP TSC0025964
ataagttgatat

SEQ ID NO: 313775 - DNA, 12 bp, Artificial Sequence
  Oligonucleotide primer for the detection of SNP TSC0025965
cataactcatct

SEQ ID NO: 313776 - DNA, 12 bp, Artificial Sequence
  Oligonucleotide primer for the detection of SNP TSC0025965
tgaagtaggatt

SEQ ID NO: 313777 - DNA, 12 bp, Artificial Sequence
  Oligonucleotide primer for the detection of SNP TSC0025965
ataatttatttt

SEQ ID NO: 313778 - DNA, 12 bp, Artificial Sequence
  Oligonucleotide primer for the detection of SNP TSC0025965
ataatttatttc

SEQ ID NO: 313779 - DNA, 12 bp, Artificial Sequence
  Oligonucleotide primer for the detection of SNP TSC0025966
actaacctttac

SEQ ID NO: 313780 - DNA, 12 bp, Artificial Sequence
  Oligonucleotide primer for the detection of SNP TSC0025966
ttagattttaaa

SEQ ID NO: 313781 - DNA, 12 bp, Artificial Sequence
  Oligonucleotide primer for the detection of SNP TSC0025967
tatcataaatta

SEQ ID NO: 313782 - DNA, 12 bp, Artificial Sequence
  Oligonucleotide primer for the detection of SNP TSC0025967
tatttaagattg

SEQ ID NO: 313783 - DNA, 12 bp, Artificial Sequence
  Oligonucleotide primer for the detection of SNP TSC0025967
tacctaaaacta

SEQ ID NO: 313784 - DNA, 12 bp, Artificial Sequence
  Oligonucleotide primer for the detection of SNP TSC0025967
attataaattat

SEQ ID NO: 313785 - DNA, 12 bp, Artificial Sequence
  Oligonucleotide primer for the detection of SNP TSC0025968
atcactaaacac

SEQ ID NO: 313786 - DNA, 12 bp, Artificial Sequence
  Oligonucleotide primer for the detection of SNP TSC0025971
tcttttcctcta

SEQ ID NO: 313787 - DNA, 12 bp, Artificial Sequence
  Oligonucleotide primer for the detection of SNP TSC0025971
aaatcactcttc

SEQ ID NO: 313788 - DNA, 12 bp, Artificial Sequence
  Oligonucleotide primer for the detection of SNP TSC0025972
aatcaaccaacc

SEQ ID NO: 313789 - DNA, 12 bp, Artificial Sequence
  Oligonucleotide primer for the detection of SNP TSC0025972
aatcaaccgacc

SEQ ID NO: 313790 - DNA, 12 bp, Artificial Sequence
  Oligonucleotide primer for the detection of SNP TSC0025972
taaatttttttc

SEQ ID NO: 313791 - DNA, 12 bp, Artificial Sequence
  Oligonucleotide primer for the detection of SNP TSC0025972
attacaaactct

SEQ ID NO: 313792 - DNA, 12 bp, Artificial Sequence
  Oligonucleotide primer for the detection of SNP TSC0025972
ggttagttgatt

SEQ ID NO: 313793 - DNA, 12 bp, Artificial Sequence
  Oligonucleotide primer for the detection of SNP TSC0025972
ggttagtcgatt

SEQ ID NO: 313794 - DNA, 12 bp, Artificial Sequence
  Oligonucleotide primer for the detection of SNP TSC0025974
aaaaaaacattt

SEQ ID NO: 313795 - DNA, 12 bp, Artificial Sequence
  Oligonucleotide primer for the detection of SNP TSC0025974
catcattctttt

SEQ ID NO: 313796 - DNA, 12 bp, Artificial Sequence
  Oligonucleotide primer for the detection of SNP TSC0025974
agaaggatattt

SEQ ID NO: 313797 - DNA, 12 bp, Artificial Sequence
  Oligonucleotide primer for the detection of SNP TSC0025975
aaaatatctccc

SEQ ID NO: 313798 - DNA, 12 bp, Artificial Sequence
  Oligonucleotide primer for the detection of SNP TSC0025975
ggaggggagatg

SEQ ID NO: 313799 - DNA, 12 bp, Artificial Sequence
  Oligonucleotide primer for the detection of SNP TSC0025976
ctactattcctc

SEQ ID NO: 313800 - DNA, 12 bp, Artificial Sequence
  Oligonucleotide primer for the detection of SNP TSC0025976
gttgtttaattg

SEQ ID NO: 313801 - DNA, 12 bp, Artificial Sequence
  Oligonucleotide primer for the detection of SNP TSC0025976
gtcgtttaattg

SEQ ID NO: 313802 - DNA, 12 bp, Artificial Sequence
  Oligonucleotide primer for the detection of SNP TSC0025979
ttaataaattct

SEQ ID NO: 313803 - DNA, 12 bp, Artificial Sequence
  Oligonucleotide primer for the detection of SNP TSC0025979
ttaataaattta

SEQ ID NO: 313804 - DNA, 12 bp, Artificial Sequence
  Oligonucleotide primer for the detection of SNP TSC0025981
acccaataccta

SEQ ID NO: 313805 - DNA, 12 bp, Artificial Sequence
  Oligonucleotide primer for the detection of SNP TSC0025981
gaaggtggtgtt

SEQ ID NO: 313806 - DNA, 12 bp, Artificial Sequence
  Oligonucleotide primer for the detection of SNP TSC0025981
gtttagtgtttg

SEQ ID NO: 313807 - DNA, 12 bp, Artificial Sequence
  Oligonucleotide primer for the detection of SNP TSC0025984
aaaaaacactca

SEQ ID NO: 313808 - DNA, 12 bp, Artificial Sequence
  Oligonucleotide primer for the detection of SNP TSC0025984
aaaaaacgctca

SEQ ID NO: 313809 - DNA, 12 bp, Artificial Sequence
  Oligonucleotide primer for the detection of SNP TSC0025984
ttgggaaattag

SEQ ID NO: 313810 - DNA, 12 bp, Artificial Sequence
  Oligonucleotide primer for the detection of SNP TSC0025984
ttaaaaaactaa

SEQ ID NO: 313811 - DNA, 12 bp, Artificial Sequence
  Oligonucleotide primer for the detection of SNP TSC0025984
aggagatgttta

SEQ ID NO: 313812 - DNA, 12 bp, Artificial Sequence
  Oligonucleotide primer for the detection of SNP TSC0025984
aggagacgttta

SEQ ID NO: 313813 - DNA, 12 bp, Artificial Sequence
  Oligonucleotide primer for the detection of SNP TSC0025985
aatttcaacccc

SEQ ID NO: 313814 - DNA, 12 bp, Artificial Sequence
  Oligonucleotide primer for the detection of SNP TSC0025985
attagtatagag

SEQ ID NO: 313815 - DNA, 12 bp, Artificial Sequence
  Oligonucleotide primer for the detection of SNP TSC0025986
aactctaacaaa

SEQ ID NO: 313816 - DNA, 12 bp, Artificial Sequence
  Oligonucleotide primer for the detection of SNP TSC0025986
acttttactcat

SEQ ID NO: 313817 - DNA, 12 bp, Artificial Sequence
  Oligonucleotide primer for the detection of SNP TSC0025986
acttttactcgt

SEQ ID NO: 313818 - DNA, 12 bp, Artificial Sequence
  Oligonucleotide primer for the detection of SNP TSC0025986
ggttttggtaaa

SEQ ID NO: 313819 - DNA, 12 bp, Artificial Sequence
  Oligonucleotide primer for the detection of SNP TSC0025987
ttttatgtatag

SEQ ID NO: 313820 - DNA, 12 bp, Artificial Sequence
  Oligonucleotide primer for the detection of SNP TSC0025989
aacaaacctcct

SEQ ID NO: 313821 - DNA, 12 bp, Artificial Sequence
  Oligonucleotide primer for the detection of SNP TSC0025989
ggtttttgtaag

SEQ ID NO: 313822 - DNA, 12 bp, Artificial Sequence
  Oligonucleotide primer for the detection of SNP TSC0025989
ggttttcgtaag

SEQ ID NO: 313823 - DNA, 12 bp, Artificial Sequence
  Oligonucleotide primer for the detection of SNP TSC0025996
ccaacaatatat

SEQ ID NO: 313824 - DNA, 12 bp, Artificial Sequence
  Oligonucleotide primer for the detection of SNP TSC0025996
ccgacaatatat

SEQ ID NO: 313825 - DNA, 12 bp, Artificial Sequence
  Oligonucleotide primer for the detection of SNP TSC0025996
ttaggtgatttt

SEQ ID NO: 313826 - DNA, 12 bp, Artificial Sequence
  Oligonucleotide primer for the detection of SNP TSC0025996
ccaaataactct

SEQ ID NO: 313827 - DNA, 12 bp, Artificial Sequence
  Oligonucleotide primer for the detection of SNP TSC0025996
ttggtaatgtgt

SEQ ID NO: 313828 - DNA, 12 bp, Artificial Sequence
  Oligonucleotide primer for the detection of SNP TSC0025996
tcggtaatgtgt

SEQ ID NO: 313829 - DNA, 12 bp, Artificial Sequence
  Oligonucleotide primer for the detection of SNP TSC0025997
acctcaaaatcc

SEQ ID NO: 313830 - DNA, 12 bp, Artificial Sequence
  Oligonukleotid-Primer
acctcgaaatcc

SEQ ID NO: 313831 - DNA, 12 bp, Artificial Sequence
  Oligonucleotide primer for the detection of SNP TSC0025997
tcggggagttag

SEQ ID NO: 313832 - DNA, 12 bp, Artificial Sequence
  Oligonucleotide primer for the detection of SNP TSC0025997
ccaaaaaatcaa

SEQ ID NO: 313833 - DNA, 12 bp, Artificial Sequence
  Oligonucleotide primer for the detection of SNP TSC0025997
ccgaaaaatcaa

SEQ ID NO: 313834 - DNA, 12 bp, Artificial Sequence
  Oligonucleotide primer for the detection of SNP TSC0025997
gttttggggttt

SEQ ID NO: 313835 - DNA, 12 bp, Artificial Sequence
  Oligonucleotide primer for the detection of SNP TSC0025997
gtttcggggttt

SEQ ID NO: 313836 - DNA, 12 bp, Artificial Sequence
  Oligonucleotide primer for the detection of SNP TSC0025997
gttttggggttc

SEQ ID NO: 313837 - DNA, 12 bp, Artificial Sequence
  Oligonucleotide primer for the detection of SNP TSC0025997
gtttcggggttc

SEQ ID NO: 313838 - DNA, 12 bp, Artificial Sequence
  Oligonucleotide primer for the detection of SNP TSC0025998
cctccaaaccca

SEQ ID NO: 313839 - DNA, 12 bp, Artificial Sequence
  Oligonucleotide primer for the detection of SNP TSC0025998
cctccaaacccg

SEQ ID NO: 313840 - DNA, 12 bp, Artificial Sequence
  Oligonucleotide primer for the detection of SNP TSC0025998
gattggggtggt

SEQ ID NO: 313841 - DNA, 12 bp, Artificial Sequence
  Oligonucleotide primer for the detection of SNP TSC0025999
atataaaaacaa

SEQ ID NO: 313842 - DNA, 12 bp, Artificial Sequence
  Oligonucleotide primer for the detection of SNP TSC0025999
atataaaaacga

SEQ ID NO: 313843 - DNA, 12 bp, Artificial Sequence
  Oligonucleotide primer for the detection of SNP TSC0025999
tttgggggttgt

SEQ ID NO: 313844 - DNA, 12 bp, Artificial Sequence
  Oligonucleotide primer for the detection of SNP TSC0025999
ttcgggggttgt

SEQ ID NO: 313845 - DNA, 12 bp, Artificial Sequence
  Oligonucleotide primer for the detection of SNP TSC0025999
tttgggggtcgt

SEQ ID NO: 313846 - DNA, 12 bp, Artificial Sequence
  Oligonucleotide primer for the detection of SNP TSC0025999
tttgggggttgc

SEQ ID NO: 313847 - DNA, 12 bp, Artificial Sequence
  Oligonucleotide primer for the detection of SNP TSC0025999
ttcgggggtcgt

SEQ ID NO: 313848 - DNA, 12 bp, Artificial Sequence
  Oligonucleotide primer for the detection of SNP TSC0025999
ttcgggggttgc

SEQ ID NO: 313849 - DNA, 12 bp, Artificial Sequence
  Oligonucleotide primer for the detection of SNP TSC0025999
tttgggggtcgc

SEQ ID NO: 313850 - DNA, 12 bp, Artificial Sequence
  Oligonucleotide primer for the detection of SNP TSC0025999
ttcgggggtcgc

SEQ ID NO: 313851 - DNA, 12 bp, Artificial Sequence
  Oligonucleotide primer for the detection of SNP TSC0025999
actcaaaaatca

SEQ ID NO: 313852 - DNA, 12 bp, Artificial Sequence
  Oligonucleotide primer for the detection of SNP TSC0025999
actcaaaaatcg

SEQ ID NO: 313853 - DNA, 12 bp, Artificial Sequence
  Oligonucleotide primer for the detection of SNP TSC0025999
actcgaaaatca

SEQ ID NO: 313854 - DNA, 12 bp, Artificial Sequence
  Oligonucleotide primer for the detection of SNP TSC0025999
gctcaaaaatca

SEQ ID NO: 313855 - DNA, 12 bp, Artificial Sequence
  Oligonucleotide primer for the detection of SNP TSC0025999
actcgaaaatcg

SEQ ID NO: 313856 - DNA, 12 bp, Artificial Sequence
  Oligonucleotide primer for the detection of SNP TSC0025999
gctcaaaaatcg

SEQ ID NO: 313857 - DNA, 12 bp, Artificial Sequence
  Oligonucleotide primer for the detection of SNP TSC0025999
gctcgaaaatca

SEQ ID NO: 313858 - DNA, 12 bp, Artificial Sequence
  Oligonucleotide primer for the detection of SNP TSC0025999
gctcgaaaatcg

SEQ ID NO: 313859 - DNA, 12 bp, Artificial Sequence
  Oligonucleotide primer for the detection of SNP TSC0025999
gtatgagggtga

SEQ ID NO: 313860 - DNA, 12 bp, Artificial Sequence
  Oligonucleotide primer for the detection of SNP TSC0025999
gtatgagggcga

SEQ ID NO: 313861 - DNA, 12 bp, Artificial Sequence
  Oligonucleotide primer for the detection of SNP TSC0026002
ttggtaaatttt

SEQ ID NO: 313862 - DNA, 12 bp, Artificial Sequence
  Oligonucleotide primer for the detection of SNP TSC0026002
tcggtaaatttt

SEQ ID NO: 313863 - DNA, 12 bp, Artificial Sequence
  Oligonucleotide primer for the detection of SNP TSC0026002
caacaaatttca

SEQ ID NO: 313864 - DNA, 12 bp, Artificial Sequence
  Oligonucleotide primer for the detection of SNP TSC0026002
cgacaaatttca

SEQ ID NO: 313865 - DNA, 12 bp, Artificial Sequence
  Oligonucleotide primer for the detection of SNP TSC0026002
ggggtggaaagt

SEQ ID NO: 313866 - DNA, 12 bp, Artificial Sequence
  Oligonucleotide primer for the detection of SNP TSC0026004
tattcctaccac

SEQ ID NO: 313867 - DNA, 12 bp, Artificial Sequence
  Oligonucleotide primer for the detection of SNP TSC0026004
ttagttggaggt

SEQ ID NO: 313868 - DNA, 12 bp, Artificial Sequence
  Oligonucleotide primer for the detection of SNP TSC0026004
ttagtcggaggt

SEQ ID NO: 313869 - DNA, 12 bp, Artificial Sequence
  Oligonucleotide primer for the detection of SNP TSC0026004
atcaaccaaaaa

SEQ ID NO: 313870 - DNA, 12 bp, Artificial Sequence
  Oligonucleotide primer for the detection of SNP TSC0026004
atcaaccgaaaa

SEQ ID NO: 313871 - DNA, 12 bp, Artificial Sequence
  Oligonukleotid-Primer
tgtttttgttat

SEQ ID NO: 313872 - DNA, 12 bp, Artificial Sequence
  Oligonucleotide primer for the detection of SNP TSC0026004
tgtttttgttac

SEQ ID NO: 313873 - DNA, 12 bp, Artificial Sequence
  Oligonucleotide primer for the detection of SNP TSC0026005
aatcctaaaaac

SEQ ID NO: 313874 - DNA, 12 bp, Artificial Sequence
  Oligonucleotide primer for the detection of SNP TSC0026005
gagaattggtag

SEQ ID NO: 313875 - DNA, 12 bp, Artificial Sequence
  Oligonukleotid-Primer
tcctaccaactc

SEQ ID NO: 313876 - DNA, 12 bp, Artificial Sequence
  Oligonucleotide primer for the detection of SNP TSC0026006
gaagttgggata

SEQ ID NO: 313877 - DNA, 12 bp, Artificial Sequence
  Oligonucleotide primer for the detection of SNP TSC0026007
tagaggtaggta

SEQ ID NO: 313878 - DNA, 12 bp, Artificial Sequence
  Oligonucleotide primer for the detection of SNP TSC0026007
caaaaacaaata

SEQ ID NO: 313879 - DNA, 12 bp, Artificial Sequence
  Oligonucleotide primer for the detection of SNP TSC0026007
aaatattttagt

SEQ ID NO: 313880 - DNA, 12 bp, Artificial Sequence
  Oligonucleotide primer for the detection of SNP TSC0026008
aacacacacccc

SEQ ID NO: 313881 - DNA, 12 bp, Artificial Sequence
  Oligonucleotide primer for the detection of SNP TSC0026008
aacacgcacccc

SEQ ID NO: 313882 - DNA, 12 bp, Artificial Sequence
  Oligonucleotide primer for the detection of SNP TSC0026008
aaaattagtttg

SEQ ID NO: 313883 - DNA, 12 bp, Artificial Sequence
  Oligonucleotide primer for the detection of SNP TSC0026008
aaaattaaccta

SEQ ID NO: 313884 - DNA, 12 bp, Artificial Sequence
  Oligonucleotide primer for the detection of SNP TSC0026008
ggtatgtatttt

SEQ ID NO: 313885 - DNA, 12 bp, Artificial Sequence
  Oligonucleotide primer for the detection of SNP TSC0026008
ggtacgtatttt

SEQ ID NO: 313886 - DNA, 12 bp, Artificial Sequence
  Oligonucleotide primer for the detection of SNP TSC0026009
tcaaacccaaca

SEQ ID NO: 313887 - DNA, 12 bp, Artificial Sequence
  Oligonucleotide primer for the detection of SNP TSC0026009
atttttatgatt

SEQ ID NO: 313888 - DNA, 12 bp, Artificial Sequence
  Oligonucleotide primer for the detection of SNP TSC0026009
acccccataacc

SEQ ID NO: 313889 - DNA, 12 bp, Artificial Sequence
  Oligonucleotide primer for the detection of SNP TSC0026009
ttagatttaata

SEQ ID NO: 313890 - DNA, 12 bp, Artificial Sequence
  Oligonucleotide primer for the detection of SNP TSC0026010
ttttaattaatc

SEQ ID NO: 313891 - DNA, 12 bp, Artificial Sequence
  Oligonucleotide primer for the detection of SNP TSC0026010
ataaggttgaga

SEQ ID NO: 313892 - DNA, 12 bp, Artificial Sequence
  Oligonucleotide primer for the detection of SNP TSC0026011
aaaaccaaactt

SEQ ID NO: 313893 - DNA, 12 bp, Artificial Sequence
  Oligonucleotide primer for the detection of SNP TSC0026011
ataaaaatagaa

SEQ ID NO: 313894 - DNA, 12 bp, Artificial Sequence
  Oligonucleotide primer for the detection of SNP TSC0026011
ggaattagattt

SEQ ID NO: 313895 - DNA, 12 bp, Artificial Sequence
  Oligonucleotide primer for the detection of SNP TSC0026014
ccaaaataattt

SEQ ID NO: 313896 - DNA, 12 bp, Artificial Sequence
  Oligonucleotide primer for the detection of SNP TSC0026014
tttaatattaga

SEQ ID NO: 313897 - DNA, 12 bp, Artificial Sequence
  Oligonucleotide primer for the detection of SNP TSC0026017
ataataaaaact

SEQ ID NO: 313898 - DNA, 12 bp, Artificial Sequence
  Oligonucleotide primer for the detection of SNP TSC0026017
tgttataaatag

SEQ ID NO: 313899 - DNA, 12 bp, Artificial Sequence
  Oligonucleotide primer for the detection of SNP TSC0026017
cgttataaatag

SEQ ID NO: 313900 - DNA, 12 bp, Artificial Sequence
  Oligonucleotide primer for the detection of SNP TSC0026018
ctcaatactttc

SEQ ID NO: 313901 - DNA, 12 bp, Artificial Sequence
  Oligonucleotide primer for the detection of SNP TSC0026018
agatttttaaaa

SEQ ID NO: 313902 - DNA, 12 bp, Artificial Sequence
  Oligonucleotide primer for the detection of SNP TSC0026019
taactcacccct

SEQ ID NO: 313903 - DNA, 12 bp, Artificial Sequence
  Oligonucleotide primer for the detection of SNP TSC0026019
agaggtgaggga

SEQ ID NO: 313904 - DNA, 12 bp, Artificial Sequence
  Oligonucleotide primer for the detection of SNP TSC0026020
taaaccactcca

SEQ ID NO: 313905 - DNA, 12 bp, Artificial Sequence
  Oligonucleotide primer for the detection of SNP TSC0026020
ggtgagttaaat

SEQ ID NO: 313906 - DNA, 12 bp, Artificial Sequence
  Oligonucleotide primer for the detection of SNP TSC0026020
taagttatttta

SEQ ID NO: 313907 - DNA, 12 bp, Artificial Sequence
  Oligonucleotide primer for the detection of SNP TSC0026021
acacaaaactcc

SEQ ID NO: 313908 - DNA, 12 bp, Artificial Sequence
  Oligonucleotide primer for the detection of SNP TSC0026021
gaatattatata

SEQ ID NO: 313909 - DNA, 12 bp, Artificial Sequence
  Oligonucleotide primer for the detection of SNP TSC0026022
ctcatctaatac

SEQ ID NO: 313910 - DNA, 12 bp, Artificial Sequence
  Oligonucleotide primer for the detection of SNP TSC0026022
ttcccatcatct

SEQ ID NO: 313911 - DNA, 12 bp, Artificial Sequence
  Oligonucleotide primer for the detection of SNP TSC0026022
ttcccatcgtct

SEQ ID NO: 313912 - DNA, 12 bp, Artificial Sequence
  Oligonucleotide primer for the detection of SNP TSC0026022
ttatttgatgtt

SEQ ID NO: 313913 - DNA, 12 bp, Artificial Sequence
  Oligonucleotide primer for the detection of SNP TSC0026028
tatttaatagag

SEQ ID NO: 313914 - DNA, 12 bp, Artificial Sequence
  Oligonucleotide primer for the detection of SNP TSC0026029
taatcctctact

SEQ ID NO: 313915 - DNA, 12 bp, Artificial Sequence
  Oligonucleotide primer for the detection of SNP TSC0026029
gtttcgtattta

SEQ ID NO: 313916 - DNA, 12 bp, Artificial Sequence
  Oligonucleotide primer for the detection of SNP TSC0026029
acttcacattca

SEQ ID NO: 313917 - DNA, 12 bp, Artificial Sequence
  Oligonucleotide primer for the detection of SNP TSC0026029
acttcgcattca

SEQ ID NO: 313918 - DNA, 12 bp, Artificial Sequence
  Oligonucleotide primer for the detection of SNP TSC0026029
gcttcacattca

SEQ ID NO: 313919 - DNA, 12 bp, Artificial Sequence
  Oligonucleotide primer for the detection of SNP TSC0026029
gcttcgcattca

SEQ ID NO: 313920 - DNA, 12 bp, Artificial Sequence
  Oligonucleotide primer for the detection of SNP TSC0026029
tgattttttgtt

SEQ ID NO: 313921 - DNA, 12 bp, Artificial Sequence
  Oligonucleotide primer for the detection of SNP TSC0026030
aataaacaactt

SEQ ID NO: 313922 - DNA, 12 bp, Artificial Sequence
  Oligonucleotide primer for the detection of SNP TSC0026031
cacaatcaaata

SEQ ID NO: 313923 - DNA, 12 bp, Artificial Sequence
  Oligonucleotide primer for the detection of SNP TSC0026031
atgtattgttgt

SEQ ID NO: 313924 - DNA, 12 bp, Artificial Sequence
  Oligonucleotide primer for the detection of SNP TSC0026031
atacactattac

SEQ ID NO: 313925 - DNA, 12 bp, Artificial Sequence
  Oligonucleotide primer for the detection of SNP TSC0026031
tataattagatg

SEQ ID NO: 313926 - DNA, 12 bp, Artificial Sequence
  Oligonucleotide primer for the detection of SNP TSC0026032
ctcccaaataac

SEQ ID NO: 313927 - DNA, 12 bp, Artificial Sequence
  Oligonucleotide primer for the detection of SNP TSC0026032
ctcccgaataac

SEQ ID NO: 313928 - DNA, 12 bp, Artificial Sequence
  Oligonucleotide primer for the detection of SNP TSC0026032
gggtgtttgtaa

SEQ ID NO: 313929 - DNA, 12 bp, Artificial Sequence
  Oligonucleotide primer for the detection of SNP TSC0026032
tttttgagtagt

SEQ ID NO: 313930 - DNA, 12 bp, Artificial Sequence
  Oligonucleotide primer for the detection of SNP TSC0026032
ttttcgagtagt

SEQ ID NO: 313931 - DNA, 12 bp, Artificial Sequence
  Oligonucleotide primer for the detection of SNP TSC0026034
tataacacaccc

SEQ ID NO: 313932 - DNA, 12 bp, Artificial Sequence
  Oligonucleotide primer for the detection of SNP TSC0026034
tgtggttagtgg

SEQ ID NO: 313933 - DNA, 12 bp, Artificial Sequence
  Oligonucleotide primer for the detection of SNP TSC0026034
cgtggttagtgg

SEQ ID NO: 313934 - DNA, 12 bp, Artificial Sequence
  Oligonucleotide primer for the detection of SNP TSC0026035
caaaataaccac

SEQ ID NO: 313935 - DNA, 12 bp, Artificial Sequence
  Oligonucleotide primer for the detection of SNP TSC0026035
ttgtggggtagg

SEQ ID NO: 313936 - DNA, 12 bp, Artificial Sequence
  Oligonucleotide primer for the detection of SNP TSC0026037
atccaaatacac

SEQ ID NO: 313937 - DNA, 12 bp, Artificial Sequence
  Oligonucleotide primer for the detection of SNP TSC0026039
ttctaatttttt

SEQ ID NO: 313938 - DNA, 12 bp, Artificial Sequence
  Oligonucleotide primer for the detection of SNP TSC0026039
tttgaaataatt

SEQ ID NO: 313939 - DNA, 12 bp, Artificial Sequence
  Oligonucleotide primer for the detection of SNP TSC0026039
tttaaaataatt

SEQ ID NO: 313940 - DNA, 12 bp, Artificial Sequence
  Oligonucleotide primer for the detection of SNP TSC0026041
ccacccacctaa

SEQ ID NO: 313941 - DNA, 12 bp, Artificial Sequence
  Oligonucleotide primer for the detection of SNP TSC0026041
ccaccctcaaac

SEQ ID NO: 313942 - DNA, 12 bp, Artificial Sequence
  Oligonucleotide primer for the detection of SNP TSC0026041
ttatttatttag

SEQ ID NO: 313943 - DNA, 12 bp, Artificial Sequence
  Oligonucleotide primer for the detection of SNP TSC0026042
tcaactctaaaa

SEQ ID NO: 313944 - DNA, 12 bp, Artificial Sequence
  Oligonucleotide primer for the detection of SNP TSC0026042
tatttttctacc

SEQ ID NO: 313945 - DNA, 12 bp, Artificial Sequence
  Oligonucleotide primer for the detection of SNP TSC0026042
ttaattttgggg

SEQ ID NO: 313946 - DNA, 12 bp, Artificial Sequence
  Oligonucleotide primer for the detection of SNP TSC0026044
tctatcccaata

SEQ ID NO: 313947 - DNA, 12 bp, Artificial Sequence
  Oligonucleotide primer for the detection of SNP TSC0026044
aatatttttgtt

SEQ ID NO: 313948 - DNA, 12 bp, Artificial Sequence
  Oligonucleotide primer for the detection of SNP TSC0026044
aacatttttact

SEQ ID NO: 313949 - DNA, 12 bp, Artificial Sequence
  Oligonucleotide primer for the detection of SNP TSC0026044
ttgttttaatat

SEQ ID NO: 313950 - DNA, 12 bp, Artificial Sequence
  Oligonucleotide primer for the detection of SNP TSC0026047
tcacacacaaac

SEQ ID NO: 313951 - DNA, 12 bp, Artificial Sequence
  Oligonucleotide primer for the detection of SNP TSC0026047
tcacacgcaaac

SEQ ID NO: 313952 - DNA, 12 bp, Artificial Sequence
  Oligonucleotide primer for the detection of SNP TSC0026047
tcacgcacaaac

SEQ ID NO: 313953 - DNA, 12 bp, Artificial Sequence
  Oligonucleotide primer for the detection of SNP TSC0026047
tcacgcgcaaac

SEQ ID NO: 313954 - DNA, 12 bp, Artificial Sequence
  Oligonucleotide primer for the detection of SNP TSC0026047
ggatataaggtt

SEQ ID NO: 313955 - DNA, 12 bp, Artificial Sequence
  Oligonucleotide primer for the detection of SNP TSC0026047
aatacaaaacca

SEQ ID NO: 313956 - DNA, 12 bp, Artificial Sequence
  Oligonucleotide primer for the detection of SNP TSC0026047
ttatgtgtaagt

SEQ ID NO: 313957 - DNA, 12 bp, Artificial Sequence
  Oligonucleotide primer for the detection of SNP TSC0026047
ttacgtgtaagt

SEQ ID NO: 313958 - DNA, 12 bp, Artificial Sequence
  Oligonucleotide primer for the detection of SNP TSC0026047
ttatgcgtaagt

SEQ ID NO: 313959 - DNA, 12 bp, Artificial Sequence
  Oligonucleotide primer for the detection of SNP TSC0026047
ttatgtgtaagc

SEQ ID NO: 313960 - DNA, 12 bp, Artificial Sequence
  Oligonucleotide primer for the detection of SNP TSC0026047
ttacgcgtaagt

SEQ ID NO: 313961 - DNA, 12 bp, Artificial Sequence
  Oligonucleotide primer for the detection of SNP TSC0026047
ttacgtgtaagc

SEQ ID NO: 313962 - DNA, 12 bp, Artificial Sequence
  Oligonucleotide primer for the detection of SNP TSC0026047
ttatgcgtaagc

SEQ ID NO: 313963 - DNA, 12 bp, Artificial Sequence
  Oligonucleotide primer for the detection of SNP TSC0026047
ttacgcgtaagc

SEQ ID NO: 313964 - DNA, 12 bp, Artificial Sequence
  Oligonucleotide primer for the detection of SNP TSC0026048
ctaaaaatcccc

SEQ ID NO: 313965 - DNA, 12 bp, Artificial Sequence
  Oligonucleotide primer for the detection of SNP TSC0026048
ttggagattgga

SEQ ID NO: 313966 - DNA, 12 bp, Artificial Sequence
  Oligonucleotide primer for the detection of SNP TSC0026049
caatcattacat

SEQ ID NO: 313967 - DNA, 12 bp, Artificial Sequence
  Oligonucleotide primer for the detection of SNP TSC0026049
agggatagttag

SEQ ID NO: 313968 - DNA, 12 bp, Artificial Sequence
  Oligonucleotide primer for the detection of SNP TSC0026050
aagagtagtata

SEQ ID NO: 313969 - DNA, 12 bp, Artificial Sequence
  Oligonucleotide primer for the detection of SNP TSC0026050
aaaataacacaa

SEQ ID NO: 313970 - DNA, 12 bp, Artificial Sequence
  Oligonucleotide primer for the detection of SNP TSC0026050
tttatagtggat

SEQ ID NO: 313971 - DNA, 12 bp, Artificial Sequence
  Oligonucleotide primer for the detection of SNP TSC0026051
ttgttttatgtg

SEQ ID NO: 313972 - DNA, 12 bp, Artificial Sequence
  Oligonucleotide primer for the detection of SNP TSC0026051
ttgttttacgtg

SEQ ID NO: 313973 - DNA, 12 bp, Artificial Sequence
  Oligonucleotide primer for the detection of SNP TSC0026054
ggtttattataa

SEQ ID NO: 313974 - DNA, 12 bp, Artificial Sequence
  Oligonucleotide primer for the detection of SNP TSC0026054
cgtttaaatttg

SEQ ID NO: 313975 - DNA, 12 bp, Artificial Sequence
  Oligonucleotide primer for the detection of SNP TSC0026056
aatctttctcat

SEQ ID NO: 313976 - DNA, 12 bp, Artificial Sequence
  Oligonucleotide primer for the detection of SNP TSC0026056
gatggtgttggg

SEQ ID NO: 313977 - DNA, 12 bp, Artificial Sequence
  Oligonucleotide primer for the detection of SNP TSC0026056
gatggcgttggg

SEQ ID NO: 313978 - DNA, 12 bp, Artificial Sequence
  Oligonucleotide primer for the detection of SNP TSC0026057
attaaaccacta

SEQ ID NO: 313979 - DNA, 12 bp, Artificial Sequence
  Oligonucleotide primer for the detection of SNP TSC0026057
ggtgtttaatag

SEQ ID NO: 313980 - DNA, 12 bp, Artificial Sequence
  Oligonucleotide primer for the detection of SNP TSC0026057
gatacttaacaa

SEQ ID NO: 313981 - DNA, 12 bp, Artificial Sequence
  Oligonucleotide primer for the detection of SNP TSC0026057
attaagttatta

SEQ ID NO: 313982 - DNA, 12 bp, Artificial Sequence
  Oligonucleotide primer for the detection of SNP TSC0026058
tctttatatcca

SEQ ID NO: 313983 - DNA, 12 bp, Artificial Sequence
  Oligonucleotide primer for the detection of SNP TSC0026058
tattggatattt

SEQ ID NO: 313984 - DNA, 12 bp, Artificial Sequence
  Oligonucleotide primer for the detection of SNP TSC0026058
cattaaatactc

SEQ ID NO: 313985 - DNA, 12 bp, Artificial Sequence
  Oligonucleotide primer for the detection of SNP TSC0026058
atttttatgttt

SEQ ID NO: 313986 - DNA, 12 bp, Artificial Sequence
  Oligonucleotide primer for the detection of SNP TSC0026060
aaataataacac

SEQ ID NO: 313987 - DNA, 12 bp, Artificial Sequence
  Oligonucleotide primer for the detection of SNP TSC0026060
aattttggttgg

SEQ ID NO: 313988 - DNA, 12 bp, Artificial Sequence
  Oligonucleotide primer for the detection of SNP TSC0026060
aatttcggttgg

SEQ ID NO: 313989 - DNA, 12 bp, Artificial Sequence
  Oligonucleotide primer for the detection of SNP TSC0026060
aatcccaactaa

SEQ ID NO: 313990 - DNA, 12 bp, Artificial Sequence
  Oligonucleotide primer for the detection of SNP TSC0026060
aatcccgactaa

SEQ ID NO: 313991 - DNA, 12 bp, Artificial Sequence
  Oligonucleotide primer for the detection of SNP TSC0026060
aggtggtggtat

SEQ ID NO: 313992 - DNA, 12 bp, Artificial Sequence
  Oligonucleotide primer for the detection of SNP TSC0026060
aggtggtggtac

SEQ ID NO: 313993 - DNA, 12 bp, Artificial Sequence
  Oligonucleotide primer for the detection of SNP TSC0026061
ccaacttaactt

SEQ ID NO: 313994 - DNA, 12 bp, Artificial Sequence
  Oligonucleotide primer for the detection of SNP TSC0026061
attagagtaaag

SEQ ID NO: 313995 - DNA, 12 bp, Artificial Sequence
  Oligonucleotide primer for the detection of SNP TSC0026061
ttagtttggttt

SEQ ID NO: 313996 - DNA, 12 bp, Artificial Sequence
  Oligonucleotide primer for the detection of SNP TSC0026062
cacctcccaact

SEQ ID NO: 313997 - DNA, 12 bp, Artificial Sequence
  Oligonucleotide primer for the detection of SNP TSC0026062
ggttggggttta

SEQ ID NO: 313998 - DNA, 12 bp, Artificial Sequence
  Oligonucleotide primer for the detection of SNP TSC0026064
acaacatcatta

SEQ ID NO: 313999 - DNA, 12 bp, Artificial Sequence
  Oligonucleotide primer for the detection of SNP TSC0026064
acaacatcgtta

SEQ ID NO: 314000 - DNA, 12 bp, Artificial Sequence
  Oligonucleotide primer for the detection of SNP TSC0026064
tttgaatttatt

SEQ ID NO: 314001 - DNA, 12 bp, Artificial Sequence
  Oligonucleotide primer for the detection of SNP TSC0026064
ttcgaatttatt

SEQ ID NO: 314002 - DNA, 12 bp, Artificial Sequence
  Oligonucleotide primer for the detection of SNP TSC0026064
ttcaaatccatc

SEQ ID NO: 314003 - DNA, 12 bp, Artificial Sequence
  Oligonucleotide primer for the detection of SNP TSC0026064
ttcgaatccatc

SEQ ID NO: 314004 - DNA, 12 bp, Artificial Sequence
  Oligonucleotide primer for the detection of SNP TSC0026064
gtaatattgtta

SEQ ID NO: 314005 - DNA, 12 bp, Artificial Sequence
  Oligonucleotide primer for the detection of SNP TSC0026064
gtaatatcgtta

SEQ ID NO: 314006 - DNA, 12 bp, Artificial Sequence
  Oligonucleotide primer for the detection of SNP TSC0026065
atcacaaaaact

SEQ ID NO: 314007 - DNA, 12 bp, Artificial Sequence
  Oligonucleotide primer for the detection of SNP TSC0026065
tattattaagta

SEQ ID NO: 314008 - DNA, 12 bp, Artificial Sequence
  Oligonucleotide primer for the detection of SNP TSC0026066
tttgatataaat

SEQ ID NO: 314009 - DNA, 12 bp, Artificial Sequence
  Oligonucleotide primer for the detection of SNP TSC0026066
tttgatataaac

SEQ ID NO: 314010 - DNA, 12 bp, Artificial Sequence
  Oligonucleotide primer for the detection of SNP TSC0026066
ccctaacacaaa

SEQ ID NO: 314011 - DNA, 12 bp, Artificial Sequence
  Oligonucleotide primer for the detection of SNP TSC0026066
ttttgttaaagt

SEQ ID NO: 314012 - DNA, 12 bp, Artificial Sequence
  Oligonucleotide primer for the detection of SNP TSC0026069
aattataaaaaa

SEQ ID NO: 314013 - DNA, 12 bp, Artificial Sequence
  Oligonucleotide primer for the detection of SNP TSC0026069
ttaagtttaagg

SEQ ID NO: 314014 - DNA, 12 bp, Artificial Sequence
  Oligonucleotide primer for the detection of SNP TSC0026069
ccaaattcaaaa

SEQ ID NO: 314015 - DNA, 12 bp, Artificial Sequence
  Oligonucleotide primer for the detection of SNP TSC0026070
ttttaaaggttt

SEQ ID NO: 314016 - DNA, 12 bp, Artificial Sequence
  Oligonucleotide primer for the detection of SNP TSC0026070
ctcaaaaaccca

SEQ ID NO: 314017 - DNA, 12 bp, Artificial Sequence
  Oligonucleotide primer for the detection of SNP TSC0026070
tgagttgggggg

SEQ ID NO: 314018 - DNA, 12 bp, Artificial Sequence
  Oligonucleotide primer for the detection of SNP TSC0026072
aaacaaataatt

SEQ ID NO: 314019 - DNA, 12 bp, Artificial Sequence
  Oligonucleotide primer for the detection of SNP TSC0026072
tgtggtttttta

SEQ ID NO: 314020 - DNA, 12 bp, Artificial Sequence
  Oligonucleotide primer for the detection of SNP TSC0026074
cttccaacctcc

SEQ ID NO: 314021 - DNA, 12 bp, Artificial Sequence
  Oligonucleotide primer for the detection of SNP TSC0026074
gatttgtaggag

SEQ ID NO: 314022 - DNA, 12 bp, Artificial Sequence
  Oligonucleotide primer for the detection of SNP TSC0026074
aacctacaaaaa

SEQ ID NO: 314023 - DNA, 12 bp, Artificial Sequence
  Oligonucleotide primer for the detection of SNP TSC0026075
aaatatttatta

SEQ ID NO: 314024 - DNA, 12 bp, Artificial Sequence
  Oligonucleotide primer for the detection of SNP TSC0026075
ataaatatattg

SEQ ID NO: 314025 - DNA, 12 bp, Artificial Sequence
  Oligonucleotide primer for the detection of SNP TSC0026075
ggatgtttatta

SEQ ID NO: 314026 - DNA, 12 bp, Artificial Sequence
  Oligonucleotide primer for the detection of SNP TSC0026077
tatttcctattc

SEQ ID NO: 314027 - DNA, 12 bp, Artificial Sequence
  Oligonucleotide primer for the detection of SNP TSC0026077
tattgtgagtaa

SEQ ID NO: 314028 - DNA, 12 bp, Artificial Sequence
  Oligonucleotide primer for the detection of SNP TSC0026078
ttcctccacctt

SEQ ID NO: 314029 - DNA, 12 bp, Artificial Sequence
  Oligonucleotide primer for the detection of SNP TSC0026078
tttgaattatag

SEQ ID NO: 314030 - DNA, 12 bp, Artificial Sequence
  Oligonucleotide primer for the detection of SNP TSC0026079
caaccctaaact

SEQ ID NO: 314031 - DNA, 12 bp, Artificial Sequence
  Oligonucleotide primer for the detection of SNP TSC0026080
ataattatgttt

SEQ ID NO: 314032 - DNA, 12 bp, Artificial Sequence
  Oligonucleotide primer for the detection of SNP TSC0026080
ataattacgttt

SEQ ID NO: 314033 - DNA, 12 bp, Artificial Sequence
  Oligonucleotide primer for the detection of SNP TSC0026080
acaaccacatcc

SEQ ID NO: 314034 - DNA, 12 bp, Artificial Sequence
  Oligonucleotide primer for the detection of SNP TSC0026080
acaaccacgtcc

SEQ ID NO: 314035 - DNA, 12 bp, Artificial Sequence
  Oligonucleotide primer for the detection of SNP TSC0026080
aggattattagg

SEQ ID NO: 314036 - DNA, 12 bp, Artificial Sequence
  Oligonucleotide primer for the detection of SNP TSC0026081
aaaaatatttcc

SEQ ID NO: 314037 - DNA, 12 bp, Artificial Sequence
  Oligonucleotide primer for the detection of SNP TSC0026081
aaaattgaattg

SEQ ID NO: 314038 - DNA, 12 bp, Artificial Sequence
  Oligonucleotide primer for the detection of SNP TSC0026081
aaaatcgaattg

SEQ ID NO: 314039 - DNA, 12 bp, Artificial Sequence
  Oligonucleotide primer for the detection of SNP TSC0026081
aaaaccaaatta

SEQ ID NO: 314040 - DNA, 12 bp, Artificial Sequence
  Oligonucleotide primer for the detection of SNP TSC0026081
aaaaccgaatta

SEQ ID NO: 314041 - DNA, 12 bp, Artificial Sequence
  Oligonucleotide primer for the detection of SNP TSC0026081
agaggtattttt

SEQ ID NO: 314042 - DNA, 12 bp, Artificial Sequence
  Oligonucleotide primer for the detection of SNP TSC0026082
attggatttggg

SEQ ID NO: 314043 - DNA, 12 bp, Artificial Sequence
  Oligonucleotide primer for the detection of SNP TSC0026082
actaaacttaaa

SEQ ID NO: 314044 - DNA, 12 bp, Artificial Sequence
  Oligonucleotide primer for the detection of SNP TSC0026082
tattgattagaa

SEQ ID NO: 314045 - DNA, 12 bp, Artificial Sequence
  Oligonucleotide primer for the detection of SNP TSC0026083
tattctaaccat

SEQ ID NO: 314046 - DNA, 12 bp, Artificial Sequence
  Oligonucleotide primer for the detection of SNP TSC0026083
ataaaatggtgg

SEQ ID NO: 314047 - DNA, 12 bp, Artificial Sequence
  Oligonucleotide primer for the detection of SNP TSC0026084
aactctcccaat

SEQ ID NO: 314048 - DNA, 12 bp, Artificial Sequence
  Oligonucleotide primer for the detection of SNP TSC0026084
gtaaagttgtgt

SEQ ID NO: 314049 - DNA, 12 bp, Artificial Sequence
  Oligonucleotide primer for the detection of SNP TSC0026084
gtaaagttgcgt

SEQ ID NO: 314050 - DNA, 12 bp, Artificial Sequence
  Oligonucleotide primer for the detection of SNP TSC0026084
acaaaattacac

SEQ ID NO: 314051 - DNA, 12 bp, Artificial Sequence
  Oligonucleotide primer for the detection of SNP TSC0026084
acaaaattacgc

SEQ ID NO: 314052 - DNA, 12 bp, Artificial Sequence
  Oligonucleotide primer for the detection of SNP TSC0026085
accaactatttc

SEQ ID NO: 314053 - DNA, 12 bp, Artificial Sequence
  Oligonucleotide primer for the detection of SNP TSC0026085
aaataagaaaaa

SEQ ID NO: 314054 - DNA, 12 bp, Artificial Sequence
  Oligonucleotide primer for the detection of SNP TSC0026093
acaaaaatcata

SEQ ID NO: 314055 - DNA, 12 bp, Artificial Sequence
  Oligonucleotide primer for the detection of SNP TSC0026093
tttaaggatttt

SEQ ID NO: 314056 - DNA, 12 bp, Artificial Sequence
  Oligonucleotide primer for the detection of SNP TSC0026094
ataaatatatac

SEQ ID NO: 314057 - DNA, 12 bp, Artificial Sequence
  Oligonucleotide primer for the detection of SNP TSC0026094
atttaaagtatt

SEQ ID NO: 314058 - DNA, 12 bp, Artificial Sequence
  Oligonucleotide primer for the detection of SNP TSC0026094
actcaaaacatt

SEQ ID NO: 314059 - DNA, 12 bp, Artificial Sequence
  Oligonucleotide primer for the detection of SNP TSC0026095
ttccctccataa

SEQ ID NO: 314060 - DNA, 12 bp, Artificial Sequence
  Oligonucleotide primer for the detection of SNP TSC0026095
gggatttggaga

SEQ ID NO: 314061 - DNA, 12 bp, Artificial Sequence
  Oligonucleotide primer for the detection of SNP TSC0026098
aaccacatctct

SEQ ID NO: 314062 - DNA, 12 bp, Artificial Sequence
  Oligonucleotide primer for the detection of SNP TSC0026098
aaccgcatctct

SEQ ID NO: 314063 - DNA, 12 bp, Artificial Sequence
  Oligonucleotide primer for the detection of SNP TSC0026098
tgataataatta

SEQ ID NO: 314064 - DNA, 12 bp, Artificial Sequence
  Oligonucleotide primer for the detection of SNP TSC0026100
tttatgatagaa

SEQ ID NO: 314065 - DNA, 12 bp, Artificial Sequence
  Oligonucleotide primer for the detection of SNP TSC0026101
atttttttggta

SEQ ID NO: 314066 - DNA, 12 bp, Artificial Sequence
  Oligonucleotide primer for the detection of SNP TSC0026102
gtttttgttgat

SEQ ID NO: 314067 - DNA, 12 bp, Artificial Sequence
  Oligonucleotide primer for the detection of SNP TSC0026102
atccttattaac

SEQ ID NO: 314068 - DNA, 12 bp, Artificial Sequence
  Oligonucleotide primer for the detection of SNP TSC0026102
atgaagggtggt

SEQ ID NO: 314069 - DNA, 12 bp, Artificial Sequence
  Oligonucleotide primer for the detection of SNP TSC0026103
cctactctaaac

SEQ ID NO: 314070 - DNA, 12 bp, Artificial Sequence
  Oligonucleotide primer for the detection of SNP TSC0026103
tttttttttgga

SEQ ID NO: 314071 - DNA, 12 bp, Artificial Sequence
  Oligonucleotide primer for the detection of SNP TSC0026103
ttttctcttaaa

SEQ ID NO: 314072 - DNA, 12 bp, Artificial Sequence
  Oligonucleotide primer for the detection of SNP TSC0026105
aatttaaaactc

SEQ ID NO: 314073 - DNA, 12 bp, Artificial Sequence
  Oligonucleotide primer for the detection of SNP TSC0026105
cttatattttcc

SEQ ID NO: 314074 - DNA, 12 bp, Artificial Sequence
  Oligonucleotide primer for the detection of SNP TSC0026105
atttgaaatttt

SEQ ID NO: 314075 - DNA, 12 bp, Artificial Sequence
  Oligonucleotide primer for the detection of SNP TSC0026106
ttttaaatttgt

SEQ ID NO: 314076 - DNA, 12 bp, Artificial Sequence
  Oligonucleotide primer for the detection of SNP TSC0026106
tttcaaatttat

SEQ ID NO: 314077 - DNA, 12 bp, Artificial Sequence
  Oligonucleotide primer for the detection of SNP TSC0026107
taatattttcac

SEQ ID NO: 314078 - DNA, 12 bp, Artificial Sequence
  Oligonucleotide primer for the detection of SNP TSC0026107
ttttgagtatta

SEQ ID NO: 314079 - DNA, 12 bp, Artificial Sequence
  Oligonucleotide primer for the detection of SNP TSC0026108
ccacttttaaat

SEQ ID NO: 314080 - DNA, 12 bp, Artificial Sequence
  Oligonucleotide primer for the detection of SNP TSC0026108
ttttataatata

SEQ ID NO: 314081 - DNA, 12 bp, Artificial Sequence
  Oligonucleotide primer for the detection of SNP TSC0026109
tagttaattatg

SEQ ID NO: 314082 - DNA, 12 bp, Artificial Sequence
  Oligonucleotide primer for the detection of SNP TSC0026110
tttgtgaatatt

SEQ ID NO: 314083 - DNA, 12 bp, Artificial Sequence
  Oligonucleotide primer for the detection of SNP TSC0026110
ttcgtgaatatt

SEQ ID NO: 314084 - DNA, 12 bp, Artificial Sequence
  Oligonucleotide primer for the detection of SNP TSC0026110
tttgcgaatatt

SEQ ID NO: 314085 - DNA, 12 bp, Artificial Sequence
  Oligonucleotide primer for the detection of SNP TSC0026110
ttcgcgaatatt

SEQ ID NO: 314086 - DNA, 12 bp, Artificial Sequence
  Oligonucleotide primer for the detection of SNP TSC0026110
ctcacaaacact

SEQ ID NO: 314087 - DNA, 12 bp, Artificial Sequence
  Oligonucleotide primer for the detection of SNP TSC0026110
ctcacgaacact

SEQ ID NO: 314088 - DNA, 12 bp, Artificial Sequence
  Oligonucleotide primer for the detection of SNP TSC0026110
ctcgcaaacact

SEQ ID NO: 314089 - DNA, 12 bp, Artificial Sequence
  Oligonucleotide primer for the detection of SNP TSC0026110
ctcgcgaacact

SEQ ID NO: 314090 - DNA, 12 bp, Artificial Sequence
  Oligonucleotide primer for the detection of SNP TSC0026110
tataagtgtggg

SEQ ID NO: 314091 - DNA, 12 bp, Artificial Sequence
  Oligonucleotide primer for the detection of SNP TSC0026111
ctttataaacca

SEQ ID NO: 314092 - DNA, 12 bp, Artificial Sequence
  Oligonucleotide primer for the detection of SNP TSC0026111
ttttgatgaggt

SEQ ID NO: 314093 - DNA, 12 bp, Artificial Sequence
  Oligonucleotide primer for the detection of SNP TSC0026111
ctaataaaacaa

SEQ ID NO: 314094 - DNA, 12 bp, Artificial Sequence
  Oligonucleotide primer for the detection of SNP TSC0026111
attttgtgagtt

SEQ ID NO: 314095 - DNA, 12 bp, Artificial Sequence
  Oligonucleotide primer for the detection of SNP TSC0026119
aactaaaacata

SEQ ID NO: 314096 - DNA, 12 bp, Artificial Sequence
  Oligonucleotide primer for the detection of SNP TSC0026119
aactaaaacgta

SEQ ID NO: 314097 - DNA, 12 bp, Artificial Sequence
  Oligonucleotide primer for the detection of SNP TSC0026119
gtttttttaggt

SEQ ID NO: 314098 - DNA, 12 bp, Artificial Sequence
  Oligonucleotide primer for the detection of SNP TSC0026119
acctttccaaac

SEQ ID NO: 314099 - DNA, 12 bp, Artificial Sequence
  Oligonucleotide primer for the detection of SNP TSC0026119
aattgggatgtg

SEQ ID NO: 314100 - DNA, 12 bp, Artificial Sequence
  Oligonucleotide primer for the detection of SNP TSC0026119
aattgggacgtg

SEQ ID NO: 314101 - DNA, 12 bp, Artificial Sequence
  Oligonucleotide primer for the detection of SNP TSC0026120
caaaacaaaccc

SEQ ID NO: 314102 - DNA, 12 bp, Artificial Sequence
  Oligonucleotide primer for the detection of SNP TSC0026120
tttagaagttag

SEQ ID NO: 314103 - DNA, 12 bp, Artificial Sequence
  Oligonucleotide primer for the detection of SNP TSC0026120
ctcaaaaaccaa

SEQ ID NO: 314104 - DNA, 12 bp, Artificial Sequence
  Oligonucleotide primer for the detection of SNP TSC0026120
tagaataaattt

SEQ ID NO: 314105 - DNA, 12 bp, Artificial Sequence
  Oligonucleotide primer for the detection of SNP TSC0026121
aagggtaagtgt

SEQ ID NO: 314106 - DNA, 12 bp, Artificial Sequence
  Oligonucleotide primer for the detection of SNP TSC0026122
ttaaaaaaatta

SEQ ID NO: 314107 - DNA, 12 bp, Artificial Sequence
  Oligonucleotide primer for the detection of SNP TSC0026122
agtgataataaa

SEQ ID NO: 314108 - DNA, 12 bp, Artificial Sequence
  Oligonucleotide primer for the detection of SNP TSC0026123
cactaacaccat

SEQ ID NO: 314109 - DNA, 12 bp, Artificial Sequence
  Oligonucleotide primer for the detection of SNP TSC0026123
taaaaagtaata

SEQ ID NO: 314110 - DNA, 12 bp, Artificial Sequence
  Oligonucleotide primer for the detection of SNP TSC0026125
ctaaccctacct

SEQ ID NO: 314111 - DNA, 12 bp, Artificial Sequence
  Oligonucleotide primer for the detection of SNP TSC0026125
tgatggtaggtt

SEQ ID NO: 314112 - DNA, 12 bp, Artificial Sequence
  Oligonucleotide primer for the detection of SNP TSC0026125
taataacaaacc

SEQ ID NO: 314113 - DNA, 12 bp, Artificial Sequence
  Oligonucleotide primer for the detection of SNP TSC0026126
aacacctaaaac

SEQ ID NO: 314114 - DNA, 12 bp, Artificial Sequence
  Oligonucleotide primer for the detection of SNP TSC0026126
aaggaataggaa

SEQ ID NO: 314115 - DNA, 12 bp, Artificial Sequence
  Oligonucleotide primer for the detection of SNP TSC0026127
ttacatattact

SEQ ID NO: 314116 - DNA, 12 bp, Artificial Sequence
  Oligonucleotide primer for the detection of SNP TSC0026127
tatattaaatta

SEQ ID NO: 314117 - DNA, 12 bp, Artificial Sequence
  Oligonucleotide primer for the detection of SNP TSC0026127
tacaccaaacca

SEQ ID NO: 314118 - DNA, 12 bp, Artificial Sequence
  Oligonucleotide primer for the detection of SNP TSC0026127
ttgtatgttgtt

SEQ ID NO: 314119 - DNA, 12 bp, Artificial Sequence
  Oligonucleotide primer for the detection of SNP TSC0026131
taaatcttccaa

SEQ ID NO: 314120 - DNA, 12 bp, Artificial Sequence
  Oligonucleotide primer for the detection of SNP TSC0026131
gttttttttagt

SEQ ID NO: 314121 - DNA, 12 bp, Artificial Sequence
  Oligonucleotide primer for the detection of SNP TSC0026131
actctctccaac

SEQ ID NO: 314122 - DNA, 12 bp, Artificial Sequence
  Oligonucleotide primer for the detection of SNP TSC0026132
attaatcaaacc

SEQ ID NO: 314123 - DNA, 12 bp, Artificial Sequence
  Oligonucleotide primer for the detection of SNP TSC0026132
ggttgtttgggg

SEQ ID NO: 314124 - DNA, 12 bp, Artificial Sequence
  Oligonucleotide primer for the detection of SNP TSC0026135
acctaacccaca

SEQ ID NO: 314125 - DNA, 12 bp, Artificial Sequence
  Oligonucleotide primer for the detection of SNP TSC0026135
tatattgaattt

SEQ ID NO: 314126 - DNA, 12 bp, Artificial Sequence
  Oligonucleotide primer for the detection of SNP TSC0026135
atactaaaccta

SEQ ID NO: 314127 - DNA, 12 bp, Artificial Sequence
  Oligonucleotide primer for the detection of SNP TSC0026135
agtttgatttat

SEQ ID NO: 314128 - DNA, 12 bp, Artificial Sequence
  Oligonucleotide primer for the detection of SNP TSC0026138
caaatatttcta

SEQ ID NO: 314129 - DNA, 12 bp, Artificial Sequence
  Oligonucleotide primer for the detection of SNP TSC0026138
aggttgggaagt

SEQ ID NO: 314130 - DNA, 12 bp, Artificial Sequence
  Oligonucleotide primer for the detection of SNP TSC0026138
aggttgggaagc

SEQ ID NO: 314131 - DNA, 12 bp, Artificial Sequence
  Oligonucleotide primer for the detection of SNP TSC0026138
taaatatttttg

SEQ ID NO: 314132 - DNA, 12 bp, Artificial Sequence
  Oligonucleotide primer for the detection of SNP TSC0026139
attaaactatac

SEQ ID NO: 314133 - DNA, 12 bp, Artificial Sequence
  Oligonucleotide primer for the detection of SNP TSC0026139
atttttttaagt

SEQ ID NO: 314134 - DNA, 12 bp, Artificial Sequence
  Oligonucleotide primer for the detection of SNP TSC0026139
atttttttaagc

SEQ ID NO: 314135 - DNA, 12 bp, Artificial Sequence
  Oligonucleotide primer for the detection of SNP TSC0026139
catttctccaaa

SEQ ID NO: 314136 - DNA, 12 bp, Artificial Sequence
  Oligonucleotide primer for the detection of SNP TSC0026139
attaggttgtgt

SEQ ID NO: 314137 - DNA, 12 bp, Artificial Sequence
  Oligonucleotide primer for the detection of SNP TSC0026140
aacttacaataa

SEQ ID NO: 314138 - DNA, 12 bp, Artificial Sequence
  Oligonukleotid-Primer
tgttattttgga

SEQ ID NO: 314139 - DNA, 12 bp, Artificial Sequence
  Oligonucleotide primer for the detection of SNP TSC0026140
cgttattttgga

SEQ ID NO: 314140 - DNA, 12 bp, Artificial Sequence
  Oligonucleotide primer for the detection of SNP TSC0026140
tgttatttcgga

SEQ ID NO: 314141 - DNA, 12 bp, Artificial Sequence
  Oligonucleotide primer for the detection of SNP TSC0026140
cgttatttcgga

SEQ ID NO: 314142 - DNA, 12 bp, Artificial Sequence
  Oligonucleotide primer for the detection of SNP TSC0026140
caccatctcaaa

SEQ ID NO: 314143 - DNA, 12 bp, Artificial Sequence
  Oligonucleotide primer for the detection of SNP TSC0026140
caccatctcgaa

SEQ ID NO: 314144 - DNA, 12 bp, Artificial Sequence
  Oligonucleotide primer for the detection of SNP TSC0026140
cgccatctcaaa

SEQ ID NO: 314145 - DNA, 12 bp, Artificial Sequence
  Oligonucleotide primer for the detection of SNP TSC0026140
cgccatctcgaa

SEQ ID NO: 314146 - DNA, 12 bp, Artificial Sequence
  Oligonucleotide primer for the detection of SNP TSC0026142
ctctctcacata

SEQ ID NO: 314147 - DNA, 12 bp, Artificial Sequence
  Oligonucleotide primer for the detection of SNP TSC0026142
atgtttgtatgt

SEQ ID NO: 314148 - DNA, 12 bp, Artificial Sequence
  Oligonucleotide primer for the detection of SNP TSC0026142
atatctatatat

SEQ ID NO: 314149 - DNA, 12 bp, Artificial Sequence
  Oligonucleotide primer for the detection of SNP TSC0026143
atacccaactaa

SEQ ID NO: 314150 - DNA, 12 bp, Artificial Sequence
  Oligonucleotide primer for the detection of SNP TSC0026143
gaaagtataaaa

SEQ ID NO: 314151 - DNA, 12 bp, Artificial Sequence
  Oligonucleotide primer for the detection of SNP TSC0026143
gaaaatacaaaa

SEQ ID NO: 314152 - DNA, 12 bp, Artificial Sequence
  Oligonucleotide primer for the detection of SNP TSC0026143
taatgtttagtt

SEQ ID NO: 314153 - DNA, 12 bp, Artificial Sequence
  Oligonucleotide primer for the detection of SNP TSC0026151
aaataaataact

SEQ ID NO: 314154 - DNA, 12 bp, Artificial Sequence
  Oligonucleotide primer for the detection of SNP TSC0026151
gataagtggttg

SEQ ID NO: 314155 - DNA, 12 bp, Artificial Sequence
  Oligonucleotide primer for the detection of SNP TSC0026151
gataagcggttg

SEQ ID NO: 314156 - DNA, 12 bp, Artificial Sequence
  Oligonucleotide primer for the detection of SNP TSC0026151
gataagtggtcg

SEQ ID NO: 314157 - DNA, 12 bp, Artificial Sequence
  Oligonucleotide primer for the detection of SNP TSC0026151
gataagcggtcg

SEQ ID NO: 314158 - DNA, 12 bp, Artificial Sequence
  Oligonucleotide primer for the detection of SNP TSC0026152
tccctctcataa

SEQ ID NO: 314159 - DNA, 12 bp, Artificial Sequence
  Oligonucleotide primer for the detection of SNP TSC0026152
aaaggggtatgg

SEQ ID NO: 314160 - DNA, 12 bp, Artificial Sequence
  Oligonucleotide primer for the detection of SNP TSC0026157
caaaaaacaact

SEQ ID NO: 314161 - DNA, 12 bp, Artificial Sequence
  Oligonucleotide primer for the detection of SNP TSC0026157
caaaaaacgact

SEQ ID NO: 314162 - DNA, 12 bp, Artificial Sequence
  Oligonucleotide primer for the detection of SNP TSC0026157
cgaaaaacaact

SEQ ID NO: 314163 - DNA, 12 bp, Artificial Sequence
  Oligonucleotide primer for the detection of SNP TSC0026157
cgaaaaacgact

SEQ ID NO: 314164 - DNA, 12 bp, Artificial Sequence
  Oligonucleotide primer for the detection of SNP TSC0026157
tatgggagggta

SEQ ID NO: 314165 - DNA, 12 bp, Artificial Sequence
  Oligonucleotide primer for the detection of SNP TSC0026157
tacgggagggta

SEQ ID NO: 314166 - DNA, 12 bp, Artificial Sequence
  Oligonucleotide primer for the detection of SNP TSC0026157
tacaaaaaaata

SEQ ID NO: 314167 - DNA, 12 bp, Artificial Sequence
  Oligonucleotide primer for the detection of SNP TSC0026157
tacgaaaaaata

SEQ ID NO: 314168 - DNA, 12 bp, Artificial Sequence
  Oligonucleotide primer for the detection of SNP TSC0026157
tggagggtggtt

SEQ ID NO: 314169 - DNA, 12 bp, Artificial Sequence
  Oligonucleotide primer for the detection of SNP TSC0026157
cggagggtggtt

SEQ ID NO: 314170 - DNA, 12 bp, Artificial Sequence
  Oligonucleotide primer for the detection of SNP TSC0026157
tggagggcggtt

SEQ ID NO: 314171 - DNA, 12 bp, Artificial Sequence
  Oligonucleotide primer for the detection of SNP TSC0026157
cggagggcggtt

SEQ ID NO: 314172 - DNA, 12 bp, Artificial Sequence
  Oligonucleotide primer for the detection of SNP TSC0026160
actcaatattca

SEQ ID NO: 314173 - DNA, 12 bp, Artificial Sequence
  Oligonucleotide primer for the detection of SNP TSC0026160
agtaaatttgaa

SEQ ID NO: 314174 - DNA, 12 bp, Artificial Sequence
  Oligonucleotide primer for the detection of SNP TSC0026161
ctcaataaaact

SEQ ID NO: 314175 - DNA, 12 bp, Artificial Sequence
  Oligonucleotide primer for the detection of SNP TSC0026161
gattttagatta

SEQ ID NO: 314176 - DNA, 12 bp, Artificial Sequence
  Oligonucleotide primer for the detection of SNP TSC0026161
aaccccaaacca

SEQ ID NO: 314177 - DNA, 12 bp, Artificial Sequence
  Oligonucleotide primer for the detection of SNP TSC0026161
ttagtggggttt

SEQ ID NO: 314178 - DNA, 12 bp, Artificial Sequence
  Oligonucleotide primer for the detection of SNP TSC0026161
ttagtggggttc

SEQ ID NO: 314179 - DNA, 12 bp, Artificial Sequence
  Oligonucleotide primer for the detection of SNP TSC0026162
tataaaacaaaa

SEQ ID NO: 314180 - DNA, 12 bp, Artificial Sequence
  Oligonucleotide primer for the detection of SNP TSC0026162
ggttgttttttc

SEQ ID NO: 314181 - DNA, 12 bp, Artificial Sequence
  Oligonucleotide primer for the detection of SNP TSC0026162
atcaactacctt

SEQ ID NO: 314182 - DNA, 12 bp, Artificial Sequence
  Oligonucleotide primer for the detection of SNP TSC0026162
atcgactacctt

SEQ ID NO: 314183 - DNA, 12 bp, Artificial Sequence
  Oligonucleotide primer for the detection of SNP TSC0026162
tatgagatagga

SEQ ID NO: 314184 - DNA, 12 bp, Artificial Sequence
  Oligonucleotide primer for the detection of SNP TSC0026168
ccttataaaaca

SEQ ID NO: 314185 - DNA, 12 bp, Artificial Sequence
  Oligonucleotide primer for the detection of SNP TSC0026168
ggattttggttt

SEQ ID NO: 314186 - DNA, 12 bp, Artificial Sequence
  Oligonucleotide primer for the detection of SNP TSC0026168
ggattttggttc

SEQ ID NO: 314187 - DNA, 12 bp, Artificial Sequence
  Oligonucleotide primer for the detection of SNP TSC0026168
taaattttaact

SEQ ID NO: 314188 - DNA, 12 bp, Artificial Sequence
  Oligonucleotide primer for the detection of SNP TSC0026168
ttttatgaaata

SEQ ID NO: 314189 - DNA, 12 bp, Artificial Sequence
  Oligonucleotide primer for the detection of SNP TSC0026170
aaaccaaaaacc

SEQ ID NO: 314190 - DNA, 12 bp, Artificial Sequence
  Oligonucleotide primer for the detection of SNP TSC0026170
tatgtgaattta

SEQ ID NO: 314191 - DNA, 12 bp, Artificial Sequence
  Oligonucleotide primer for the detection of SNP TSC0026171
ttatatttaata

SEQ ID NO: 314192 - DNA, 12 bp, Artificial Sequence
  Oligonucleotide primer for the detection of SNP TSC0026171
aattttagattt

SEQ ID NO: 314193 - DNA, 12 bp, Artificial Sequence
  Oligonucleotide primer for the detection of SNP TSC0026171
accctaaattca

SEQ ID NO: 314194 - DNA, 12 bp, Artificial Sequence
  Oligonucleotide primer for the detection of SNP TSC0026175
ttctacaaaacc

SEQ ID NO: 314195 - DNA, 12 bp, Artificial Sequence
  Oligonucleotide primer for the detection of SNP TSC0026182
cccaaaactcac

SEQ ID NO: 314196 - DNA, 12 bp, Artificial Sequence
  Oligonucleotide primer for the detection of SNP TSC0026182
tttttttggaag

SEQ ID NO: 314197 - DNA, 12 bp, Artificial Sequence
  Oligonucleotide primer for the detection of SNP TSC0026182
tttttctaaaaa

SEQ ID NO: 314198 - DNA, 12 bp, Artificial Sequence
  Oligonucleotide primer for the detection of SNP TSC0026183
acttcataaaat

SEQ ID NO: 314199 - DNA, 12 bp, Artificial Sequence
  Oligonukleotid-Primer
gcttcataaaat

SEQ ID NO: 314200 - DNA, 12 bp, Artificial Sequence
  Oligonucleotide primer for the detection of SNP TSC0026183
ttttattgatat

SEQ ID NO: 314201 - DNA, 12 bp, Artificial Sequence
  Oligonucleotide primer for the detection of SNP TSC0026183
tttttactaaca

SEQ ID NO: 314202 - DNA, 12 bp, Artificial Sequence
  Oligonucleotide primer for the detection of SNP TSC0026183
gttttatagaat

SEQ ID NO: 314203 - DNA, 12 bp, Artificial Sequence
  Oligonucleotide primer for the detection of SNP TSC0026185
attttgtttaaa

SEQ ID NO: 314204 - DNA, 12 bp, Artificial Sequence
  Oligonucleotide primer for the detection of SNP TSC0026185
actttatctaaa

SEQ ID NO: 314205 - DNA, 12 bp, Artificial Sequence
  Oligonucleotide primer for the detection of SNP TSC0026197
ataataatacat

SEQ ID NO: 314206 - DNA, 12 bp, Artificial Sequence
  Oligonucleotide primer for the detection of SNP TSC0026197
ataataatacgt

SEQ ID NO: 314207 - DNA, 12 bp, Artificial Sequence
  Oligonucleotide primer for the detection of SNP TSC0026197
gtaataatacat

SEQ ID NO: 314208 - DNA, 12 bp, Artificial Sequence
  Oligonucleotide primer for the detection of SNP TSC0026197
gtaataatacgt

SEQ ID NO: 314209 - DNA, 12 bp, Artificial Sequence
  Oligonucleotide primer for the detection of SNP TSC0026200
tttattagggga

SEQ ID NO: 314210 - DNA, 12 bp, Artificial Sequence
  Oligonucleotide primer for the detection of SNP TSC0026202
aataacacaatc

SEQ ID NO: 314211 - DNA, 12 bp, Artificial Sequence
  Oligonucleotide primer for the detection of SNP TSC0026202
aataacgcaatc

SEQ ID NO: 314212 - DNA, 12 bp, Artificial Sequence
  Oligonucleotide primer for the detection of SNP TSC0026202
ttggtagttata

SEQ ID NO: 314213 - DNA, 12 bp, Artificial Sequence
  Oligonucleotide primer for the detection of SNP TSC0026202
ttaacaaccaca

SEQ ID NO: 314214 - DNA, 12 bp, Artificial Sequence
  Oligonucleotide primer for the detection of SNP TSC0026202
agtgatgtaatt

SEQ ID NO: 314215 - DNA, 12 bp, Artificial Sequence
  Oligonucleotide primer for the detection of SNP TSC0026202
agtgacgtaatt

SEQ ID NO: 314216 - DNA, 12 bp, Artificial Sequence
  Oligonucleotide primer for the detection of SNP TSC0026203
atcacacatact

SEQ ID NO: 314217 - DNA, 12 bp, Artificial Sequence
  Oligonucleotide primer for the detection of SNP TSC0026203
tataagtaatta

SEQ ID NO: 314218 - DNA, 12 bp, Artificial Sequence
  Oligonucleotide primer for the detection of SNP TSC0026205
acatacaattac

SEQ ID NO: 314219 - DNA, 12 bp, Artificial Sequence
  Oligonucleotide primer for the detection of SNP TSC0026205
attttgttttat

SEQ ID NO: 314220 - DNA, 12 bp, Artificial Sequence
  Oligonucleotide primer for the detection of SNP TSC0026205
caccctactcta

SEQ ID NO: 314221 - DNA, 12 bp, Artificial Sequence
  Oligonucleotide primer for the detection of SNP TSC0026206
cttatcccaaac

SEQ ID NO: 314222 - DNA, 12 bp, Artificial Sequence
  Oligonucleotide primer for the detection of SNP TSC0026206
gtgtggtattat

SEQ ID NO: 314223 - DNA, 12 bp, Artificial Sequence
  Oligonucleotide primer for the detection of SNP TSC0026206
atataacactac

SEQ ID NO: 314224 - DNA, 12 bp, Artificial Sequence
  Oligonucleotide primer for the detection of SNP TSC0026206
tttattttaggt

SEQ ID NO: 314225 - DNA, 12 bp, Artificial Sequence
  Oligonucleotide primer for the detection of SNP TSC0026211
aactttccaaac

SEQ ID NO: 314226 - DNA, 12 bp, Artificial Sequence
  Oligonucleotide primer for the detection of SNP TSC0026211
tgttgtaaaaag

SEQ ID NO: 314227 - DNA, 12 bp, Artificial Sequence
  Oligonucleotide primer for the detection of SNP TSC0026211
tactataaaaaa

SEQ ID NO: 314228 - DNA, 12 bp, Artificial Sequence
  Oligonucleotide primer for the detection of SNP TSC0026215
aaaacaaaacat

SEQ ID NO: 314229 - DNA, 12 bp, Artificial Sequence
  Oligonucleotide primer for the detection of SNP TSC0026215
ttctaaaaccct

SEQ ID NO: 314230 - DNA, 12 bp, Artificial Sequence
  Oligonucleotide primer for the detection of SNP TSC0026215
agaatagaatat

SEQ ID NO: 314231 - DNA, 12 bp, Artificial Sequence
  Oligonucleotide primer for the detection of SNP TSC0026217
gaggtagggtta

SEQ ID NO: 314232 - DNA, 12 bp, Artificial Sequence
  Oligonucleotide primer for the detection of SNP TSC0026218
taaaattacata

SEQ ID NO: 314233 - DNA, 12 bp, Artificial Sequence
  Oligonucleotide primer for the detection of SNP TSC0026218
atttttttgggg

SEQ ID NO: 314234 - DNA, 12 bp, Artificial Sequence
  Oligonucleotide primer for the detection of SNP TSC0026218
actcccctaaaa

SEQ ID NO: 314235 - DNA, 12 bp, Artificial Sequence
  Oligonucleotide primer for the detection of SNP TSC0026218
atgaggttgtat

SEQ ID NO: 314236 - DNA, 12 bp, Artificial Sequence
  Oligonucleotide primer for the detection of SNP TSC0026219
ctttcctcattc

SEQ ID NO: 314237 - DNA, 12 bp, Artificial Sequence
  Oligonucleotide primer for the detection of SNP TSC0026219
aagtgaaatgag

SEQ ID NO: 314238 - DNA, 12 bp, Artificial Sequence
  Oligonucleotide primer for the detection of SNP TSC0026220
aaatcaaattct

SEQ ID NO: 314239 - DNA, 12 bp, Artificial Sequence
  Oligonucleotide primer for the detection of SNP TSC0026220
aaatcgaattct

SEQ ID NO: 314240 - DNA, 12 bp, Artificial Sequence
  Oligonucleotide primer for the detection of SNP TSC0026220
ataaagatataa

SEQ ID NO: 314241 - DNA, 12 bp, Artificial Sequence
  Oligonucleotide primer for the detection of SNP TSC0026220
acaaaaatacaa

SEQ ID NO: 314242 - DNA, 12 bp, Artificial Sequence
  Oligonucleotide primer for the detection of SNP TSC0026220
aggtcgggtttt

SEQ ID NO: 314243 - DNA, 12 bp, Artificial Sequence
  Oligonucleotide primer for the detection of SNP TSC0026222
aataattacacc

SEQ ID NO: 314244 - DNA, 12 bp, Artificial Sequence
  Oligonucleotide primer for the detection of SNP TSC0026222
taggtttgagta

SEQ ID NO: 314245 - DNA, 12 bp, Artificial Sequence
  Oligonucleotide primer for the detection of SNP TSC0026224
tttaacttcccc

SEQ ID NO: 314246 - DNA, 12 bp, Artificial Sequence
  Oligonucleotide primer for the detection of SNP TSC0026226
tcataataactt

SEQ ID NO: 314247 - DNA, 12 bp, Artificial Sequence
  Oligonucleotide primer for the detection of SNP TSC0026226
aagttttagtat

SEQ ID NO: 314248 - DNA, 12 bp, Artificial Sequence
  Oligonucleotide primer for the detection of SNP TSC0026226
aacctcaatata

SEQ ID NO: 314249 - DNA, 12 bp, Artificial Sequence
  Oligonucleotide primer for the detection of SNP TSC0026226
ttataatgattt

SEQ ID NO: 314250 - DNA, 12 bp, Artificial Sequence
  Oligonucleotide primer for the detection of SNP TSC0026227
acaacatctttt

SEQ ID NO: 314251 - DNA, 12 bp, Artificial Sequence
  Oligonucleotide primer for the detection of SNP TSC0026236
gaaatatctccc

SEQ ID NO: 314252 - DNA, 12 bp, Artificial Sequence
  Oligonucleotide primer for the detection of SNP TSC0026236
gggtaggatatg

SEQ ID NO: 314253 - DNA, 12 bp, Artificial Sequence
  Oligonucleotide primer for the detection of SNP TSC0026236
aaacaaaacata

SEQ ID NO: 314254 - DNA, 12 bp, Artificial Sequence
  Oligonucleotide primer for the detection of SNP TSC0026236
aaatgttttttt

SEQ ID NO: 314255 - DNA, 12 bp, Artificial Sequence
  Oligonucleotide primer for the detection of SNP TSC0026243
aactaattaaat

SEQ ID NO: 314256 - DNA, 12 bp, Artificial Sequence
  Oligonucleotide primer for the detection of SNP TSC0026243
tattatactttc

SEQ ID NO: 314257 - DNA, 12 bp, Artificial Sequence
  Oligonucleotide primer for the detection of SNP TSC0026243
tgattagatttt

SEQ ID NO: 314258 - DNA, 12 bp, Artificial Sequence
  Oligonucleotide primer for the detection of SNP TSC0026243
tgattagatttc

SEQ ID NO: 314259 - DNA, 12 bp, Artificial Sequence
  Oligonucleotide primer for the detection of SNP TSC0026244
ccttaataaaaa

SEQ ID NO: 314260 - DNA, 12 bp, Artificial Sequence
  Oligonucleotide primer for the detection of SNP TSC0026244
tgattgttattt

SEQ ID NO: 314261 - DNA, 12 bp, Artificial Sequence
  Oligonucleotide primer for the detection of SNP TSC0026244
aactatcatcca

SEQ ID NO: 314262 - DNA, 12 bp, Artificial Sequence
  Oligonucleotide primer for the detection of SNP TSC0026244
gttttttaatgg

SEQ ID NO: 314263 - DNA, 12 bp, Artificial Sequence
  Oligonucleotide primer for the detection of SNP TSC0026245
tttgtgaaatta

SEQ ID NO: 314264 - DNA, 12 bp, Artificial Sequence
  Oligonucleotide primer for the detection of SNP TSC0026246
tatcctaaaact

SEQ ID NO: 314265 - DNA, 12 bp, Artificial Sequence
  Oligonucleotide primer for the detection of SNP TSC0026248
taaaccaaacaa

SEQ ID NO: 314266 - DNA, 12 bp, Artificial Sequence
  Oligonucleotide primer for the detection of SNP TSC0026248
taaaccaaacga

SEQ ID NO: 314267 - DNA, 12 bp, Artificial Sequence
  Oligonucleotide primer for the detection of SNP TSC0026248
tggggttgttag

SEQ ID NO: 314268 - DNA, 12 bp, Artificial Sequence
  Oligonucleotide primer for the detection of SNP TSC0026248
cggggttgttag

SEQ ID NO: 314269 - DNA, 12 bp, Artificial Sequence
  Oligonucleotide primer for the detection of SNP TSC0026248
caaaactaccaa

SEQ ID NO: 314270 - DNA, 12 bp, Artificial Sequence
  Oligonucleotide primer for the detection of SNP TSC0026248
cgaaactaccaa

SEQ ID NO: 314271 - DNA, 12 bp, Artificial Sequence
  Oligonucleotide primer for the detection of SNP TSC0026248
tgagttaagtgg

SEQ ID NO: 314272 - DNA, 12 bp, Artificial Sequence
  Oligonucleotide primer for the detection of SNP TSC0026248
tgagttaagcgg

SEQ ID NO: 314273 - DNA, 12 bp, Artificial Sequence
  Oligonucleotide primer for the detection of SNP TSC0026249
cttaaacacccc

SEQ ID NO: 314274 - DNA, 12 bp, Artificial Sequence
  Oligonucleotide primer for the detection of SNP TSC0026249
atttggggtaag

SEQ ID NO: 314275 - DNA, 12 bp, Artificial Sequence
  Oligonucleotide primer for the detection of SNP TSC0026249
atttaaaacaaa

SEQ ID NO: 314276 - DNA, 12 bp, Artificial Sequence
  Oligonucleotide primer for the detection of SNP TSC0026250
aaccaaaatcac

SEQ ID NO: 314277 - DNA, 12 bp, Artificial Sequence
  Oligonucleotide primer for the detection of SNP TSC0026250
aaccaaaatcgc

SEQ ID NO: 314278 - DNA, 12 bp, Artificial Sequence
  Oligonucleotide primer for the detection of SNP TSC0026250
tggaatgtagtg

SEQ ID NO: 314279 - DNA, 12 bp, Artificial Sequence
  Oligonucleotide primer for the detection of SNP TSC0026251
caactcacacct

SEQ ID NO: 314280 - DNA, 12 bp, Artificial Sequence
  Oligonucleotide primer for the detection of SNP TSC0026251
caactcacgcct

SEQ ID NO: 314281 - DNA, 12 bp, Artificial Sequence
  Oligonucleotide primer for the detection of SNP TSC0026251
cgactcacacct

SEQ ID NO: 314282 - DNA, 12 bp, Artificial Sequence
  Oligonucleotide primer for the detection of SNP TSC0026251
cgactcacgcct

SEQ ID NO: 314283 - DNA, 12 bp, Artificial Sequence
  Oligonucleotide primer for the detection of SNP TSC0026251
aaagtgttggga

SEQ ID NO: 314284 - DNA, 12 bp, Artificial Sequence
  Oligonucleotide primer for the detection of SNP TSC0026257
aatatctttact

SEQ ID NO: 314285 - DNA, 12 bp, Artificial Sequence
  Oligonucleotide primer for the detection of SNP TSC0026258
acctaacaattt

SEQ ID NO: 314286 - DNA, 12 bp, Artificial Sequence
  Oligonucleotide primer for the detection of SNP TSC0026260
ttaaccttattt

SEQ ID NO: 314287 - DNA, 12 bp, Artificial Sequence
  Oligonucleotide primer for the detection of SNP TSC0026260
gtttagagaaag

SEQ ID NO: 314288 - DNA, 12 bp, Artificial Sequence
  Oligonucleotide primer for the detection of SNP TSC0026262
tctcaaaaacat

SEQ ID NO: 314289 - DNA, 12 bp, Artificial Sequence
  Oligonucleotide primer for the detection of SNP TSC0026262
gattttagggta

SEQ ID NO: 314290 - DNA, 12 bp, Artificial Sequence
  Oligonucleotide primer for the detection of SNP TSC0026263
accaacctattc

SEQ ID NO: 314291 - DNA, 12 bp, Artificial Sequence
  Oligonucleotide primer for the detection of SNP TSC0026263
tttgagatttta

SEQ ID NO: 314292 - DNA, 12 bp, Artificial Sequence
  Oligonucleotide primer for the detection of SNP TSC0026264
ataactatatca

SEQ ID NO: 314293 - DNA, 12 bp, Artificial Sequence
  Oligonucleotide primer for the detection of SNP TSC0026264
aaatctatatat

SEQ ID NO: 314294 - DNA, 12 bp, Artificial Sequence
  Oligonucleotide primer for the detection of SNP TSC0026264
ataattgtgtta

SEQ ID NO: 314295 - DNA, 12 bp, Artificial Sequence
  Oligonucleotide primer for the detection of SNP TSC0026265
tttccccctcac

SEQ ID NO: 314296 - DNA, 12 bp, Artificial Sequence
  Oligonucleotide primer for the detection of SNP TSC0026265
ttttggagagta

SEQ ID NO: 314297 - DNA, 12 bp, Artificial Sequence
  Oligonucleotide primer for the detection of SNP TSC0026269
ataaatattcat

SEQ ID NO: 314298 - DNA, 12 bp, Artificial Sequence
  Oligonucleotide primer for the detection of SNP TSC0026269
accccattaaca

SEQ ID NO: 314299 - DNA, 12 bp, Artificial Sequence
  Oligonucleotide primer for the detection of SNP TSC0026269
ataaatatttat

SEQ ID NO: 314300 - DNA, 12 bp, Artificial Sequence
  Oligonucleotide primer for the detection of SNP TSC0026272
aactacccaacc

SEQ ID NO: 314301 - DNA, 12 bp, Artificial Sequence
  Oligonucleotide primer for the detection of SNP TSC0026272
ttgttaggggta

SEQ ID NO: 314302 - DNA, 12 bp, Artificial Sequence
  Oligonucleotide primer for the detection of SNP TSC0026273
aataacctccct

SEQ ID NO: 314303 - DNA, 12 bp, Artificial Sequence
  Oligonucleotide primer for the detection of SNP TSC0026273
gtatttggttag

SEQ ID NO: 314304 - DNA, 12 bp, Artificial Sequence
  Oligonucleotide primer for the detection of SNP TSC0026274
tcccaaaatact

SEQ ID NO: 314305 - DNA, 12 bp, Artificial Sequence
  Oligonucleotide primer for the detection of SNP TSC0026275
aacacaataata

SEQ ID NO: 314306 - DNA, 12 bp, Artificial Sequence
  Oligonucleotide primer for the detection of SNP TSC0026275
tagtgagttgat

SEQ ID NO: 314307 - DNA, 12 bp, Artificial Sequence
  Oligonucleotide primer for the detection of SNP TSC0026275
caataaactaac

SEQ ID NO: 314308 - DNA, 12 bp, Artificial Sequence
  Oligonucleotide primer for the detection of SNP TSC0026275
agtatagtggta

SEQ ID NO: 314309 - DNA, 12 bp, Artificial Sequence
  Oligonucleotide primer for the detection of SNP TSC0026276
acaaacaaattt

SEQ ID NO: 314310 - DNA, 12 bp, Artificial Sequence
  Oligonucleotide primer for the detection of SNP TSC0026276
acgaacaaattt

SEQ ID NO: 314311 - DNA, 12 bp, Artificial Sequence
  Oligonucleotide primer for the detection of SNP TSC0026276
agggaggtttta

SEQ ID NO: 314312 - DNA, 12 bp, Artificial Sequence
  Oligonucleotide primer for the detection of SNP TSC0026277
tttagaattatg

SEQ ID NO: 314313 - DNA, 12 bp, Artificial Sequence
  Oligonucleotide primer for the detection of SNP TSC0026278
ggtattaagttt

SEQ ID NO: 314314 - DNA, 12 bp, Artificial Sequence
  Oligonucleotide primer for the detection of SNP TSC0026278
aacatcaaatct

SEQ ID NO: 314315 - DNA, 12 bp, Artificial Sequence
  Oligonucleotide primer for the detection of SNP TSC0026278
gggaggatttaa

SEQ ID NO: 314316 - DNA, 12 bp, Artificial Sequence
  Oligonucleotide primer for the detection of SNP TSC0026279
ctcattttcacc

SEQ ID NO: 314317 - DNA, 12 bp, Artificial Sequence
  Oligonucleotide primer for the detection of SNP TSC0026279
aagaaaaataga

SEQ ID NO: 314318 - DNA, 12 bp, Artificial Sequence
  Oligonucleotide primer for the detection of SNP TSC0026280
atacttataatc

SEQ ID NO: 314319 - DNA, 12 bp, Artificial Sequence
  Oligonucleotide primer for the detection of SNP TSC0026280
tttaaagtgttg

SEQ ID NO: 314320 - DNA, 12 bp, Artificial Sequence
  Oligonucleotide primer for the detection of SNP TSC0026283
tttctaaaatct

SEQ ID NO: 314321 - DNA, 12 bp, Artificial Sequence
  Oligonucleotide primer for the detection of SNP TSC0026283
ttgttttggaga

SEQ ID NO: 314322 - DNA, 12 bp, Artificial Sequence
  Oligonucleotide primer for the detection of SNP TSC0026284
aacaatctcctt

SEQ ID NO: 314323 - DNA, 12 bp, Artificial Sequence
  Oligonucleotide primer for the detection of SNP TSC0026284
attgtgtgtgga

SEQ ID NO: 314324 - DNA, 12 bp, Artificial Sequence
  Oligonucleotide primer for the detection of SNP TSC0026284
attgtgcgtgga

SEQ ID NO: 314325 - DNA, 12 bp, Artificial Sequence
  Oligonucleotide primer for the detection of SNP TSC0026285
tcctaaaaaccc

SEQ ID NO: 314326 - DNA, 12 bp, Artificial Sequence
  Oligonucleotide primer for the detection of SNP TSC0026285
gatgttatttat

SEQ ID NO: 314327 - DNA, 12 bp, Artificial Sequence
  Oligonucleotide primer for the detection of SNP TSC0026285
gatgttatttac

SEQ ID NO: 314328 - DNA, 12 bp, Artificial Sequence
  Oligonucleotide primer for the detection of SNP TSC0026285
caatattatcca

SEQ ID NO: 314329 - DNA, 12 bp, Artificial Sequence
  Oligonucleotide primer for the detection of SNP TSC0026285
cgatattatcca

SEQ ID NO: 314330 - DNA, 12 bp, Artificial Sequence
  Oligonucleotide primer for the detection of SNP TSC0026285
ttttgagagttt

SEQ ID NO: 314331 - DNA, 12 bp, Artificial Sequence
  Oligonucleotide primer for the detection of SNP TSC0026287
tcatataatact

SEQ ID NO: 314332 - DNA, 12 bp, Artificial Sequence
  Oligonucleotide primer for the detection of SNP TSC0026287
tcgtataatact

SEQ ID NO: 314333 - DNA, 12 bp, Artificial Sequence
  Oligonucleotide primer for the detection of SNP TSC0026287
tgtttaaagttt

SEQ ID NO: 314334 - DNA, 12 bp, Artificial Sequence
  Oligonucleotide primer for the detection of SNP TSC0026287
tattcaaaattt

SEQ ID NO: 314335 - DNA, 12 bp, Artificial Sequence
  Oligonucleotide primer for the detection of SNP TSC0026287
tgtgtaatgttt

SEQ ID NO: 314336 - DNA, 12 bp, Artificial Sequence
  Oligonucleotide primer for the detection of SNP TSC0026287
cgtgtaatgttt

SEQ ID NO: 314337 - DNA, 12 bp, Artificial Sequence
  Oligonucleotide primer for the detection of SNP TSC0026289
aaactcgaaaac

SEQ ID NO: 314338 - DNA, 12 bp, Artificial Sequence
  Oligonucleotide primer for the detection of SNP TSC0026289
tattgtagtagg

SEQ ID NO: 314339 - DNA, 12 bp, Artificial Sequence
  Oligonucleotide primer for the detection of SNP TSC0026289
cactacaacaaa

SEQ ID NO: 314340 - DNA, 12 bp, Artificial Sequence
  Oligonucleotide primer for the detection of SNP TSC0026289
agatttgggagt

SEQ ID NO: 314341 - DNA, 12 bp, Artificial Sequence
  Oligonucleotide primer for the detection of SNP TSC0026289
agattcgggagt

SEQ ID NO: 314342 - DNA, 12 bp, Artificial Sequence
  Oligonucleotide primer for the detection of SNP TSC0026293
caaaaaaaatta

SEQ ID NO: 314343 - DNA, 12 bp, Artificial Sequence
  Oligonucleotide primer for the detection of SNP TSC0026293
ttgaaattattt

SEQ ID NO: 314344 - DNA, 12 bp, Artificial Sequence
  Oligonucleotide primer for the detection of SNP TSC0026293
tcgaaattattt

SEQ ID NO: 314345 - DNA, 12 bp, Artificial Sequence
  Oligonucleotide primer for the detection of SNP TSC0026293
ccgaaaccacct

SEQ ID NO: 314346 - DNA, 12 bp, Artificial Sequence
  Oligonucleotide primer for the detection of SNP TSC0026293
taaaaggagttg

SEQ ID NO: 314347 - DNA, 12 bp, Artificial Sequence
  Oligonucleotide primer for the detection of SNP TSC0026294
tataatctttaa

SEQ ID NO: 314348 - DNA, 12 bp, Artificial Sequence
  Oligonucleotide primer for the detection of SNP TSC0026294
aagttaaagttg

SEQ ID NO: 314349 - DNA, 12 bp, Artificial Sequence
  Oligonucleotide primer for the detection of SNP TSC0026297
tacttccccaaa

SEQ ID NO: 314350 - DNA, 12 bp, Artificial Sequence
  Oligonucleotide primer for the detection of SNP TSC0026297
ttttgtttaagt

SEQ ID NO: 314351 - DNA, 12 bp, Artificial Sequence
  Oligonucleotide primer for the detection of SNP TSC0026297
ccctacccaaac

SEQ ID NO: 314352 - DNA, 12 bp, Artificial Sequence
  Oligonucleotide primer for the detection of SNP TSC0026298
acacacaaaaca

SEQ ID NO: 314353 - DNA, 12 bp, Artificial Sequence
  Oligonucleotide primer for the detection of SNP TSC0026298
ttttttagatat

SEQ ID NO: 314354 - DNA, 12 bp, Artificial Sequence
  Oligonucleotide primer for the detection of SNP TSC0026298
tcctctaaatac

SEQ ID NO: 314355 - DNA, 12 bp, Artificial Sequence
  Oligonucleotide primer for the detection of SNP TSC0026298
atatatagggta

SEQ ID NO: 314356 - DNA, 12 bp, Artificial Sequence
  Oligonucleotide primer for the detection of SNP TSC0026301
cacttacacaaa

SEQ ID NO: 314357 - DNA, 12 bp, Artificial Sequence
  Oligonucleotide primer for the detection of SNP TSC0026301
gagtataagatt

SEQ ID NO: 314358 - DNA, 12 bp, Artificial Sequence
  Oligonucleotide primer for the detection of SNP TSC0026301
tatttgtatagg

SEQ ID NO: 314359 - DNA, 12 bp, Artificial Sequence
  Oligonucleotide primer for the detection of SNP TSC0026305
attatattacct

SEQ ID NO: 314360 - DNA, 12 bp, Artificial Sequence
  Oligonucleotide primer for the detection of SNP TSC0026306
catacatttatt

SEQ ID NO: 314361 - DNA, 12 bp, Artificial Sequence
  Oligonucleotide primer for the detection of SNP TSC0026306
aattaaaactca

SEQ ID NO: 314362 - DNA, 12 bp, Artificial Sequence
  Oligonucleotide primer for the detection of SNP TSC0026306
tatatatttatt

SEQ ID NO: 314363 - DNA, 12 bp, Artificial Sequence
  Oligonucleotide primer for the detection of SNP TSC0026309
ccttttaaaatt

SEQ ID NO: 314364 - DNA, 12 bp, Artificial Sequence
  Oligonucleotide primer for the detection of SNP TSC0026309
ggattaagaata

SEQ ID NO: 314365 - DNA, 12 bp, Artificial Sequence
  Oligonucleotide primer for the detection of SNP TSC0026310
acttcaaatttc

SEQ ID NO: 314366 - DNA, 12 bp, Artificial Sequence
  Oligonucleotide primer for the detection of SNP TSC0026310
gcttcaaatttc

SEQ ID NO: 314367 - DNA, 12 bp, Artificial Sequence
  Oligonucleotide primer for the detection of SNP TSC0026310
ttagttagtggg

SEQ ID NO: 314368 - DNA, 12 bp, Artificial Sequence
  Oligonucleotide primer for the detection of SNP TSC0026314
actccaactcct

SEQ ID NO: 314369 - DNA, 12 bp, Artificial Sequence
  Oligonucleotide primer for the detection of SNP TSC0026314
tttgttaattta

SEQ ID NO: 314370 - DNA, 12 bp, Artificial Sequence
  Oligonucleotide primer for the detection of SNP TSC0026315
ttaaaccctatc

SEQ ID NO: 314371 - DNA, 12 bp, Artificial Sequence
  Oligonucleotide primer for the detection of SNP TSC0026315
aatagttatata

SEQ ID NO: 314372 - DNA, 12 bp, Artificial Sequence
  Oligonucleotide primer for the detection of SNP TSC0026316
accaccacaccc

SEQ ID NO: 314373 - DNA, 12 bp, Artificial Sequence
  Oligonucleotide primer for the detection of SNP TSC0026316
accaccacgccc

SEQ ID NO: 314374 - DNA, 12 bp, Artificial Sequence
  Oligonucleotide primer for the detection of SNP TSC0026320
atttttaaaccc

SEQ ID NO: 314375 - DNA, 12 bp, Artificial Sequence
  Oligonucleotide primer for the detection of SNP TSC0026320
agatttttggaa

SEQ ID NO: 314376 - DNA, 12 bp, Artificial Sequence
  Oligonucleotide primer for the detection of SNP TSC0026323
cccctacctatc

SEQ ID NO: 314377 - DNA, 12 bp, Artificial Sequence
  Oligonucleotide primer for the detection of SNP TSC0026323
tagagaatgaat

SEQ ID NO: 314378 - DNA, 12 bp, Artificial Sequence
  Oligonucleotide primer for the detection of SNP TSC0026329
caatctatcaca

SEQ ID NO: 314379 - DNA, 12 bp, Artificial Sequence
  Oligonucleotide primer for the detection of SNP TSC0026329
gaaattagaatt

SEQ ID NO: 314380 - DNA, 12 bp, Artificial Sequence
  Oligonucleotide primer for the detection of SNP TSC0026329
aaaaccaaaatc

SEQ ID NO: 314381 - DNA, 12 bp, Artificial Sequence
  Oligonucleotide primer for the detection of SNP TSC0026329
tagtttgttata

SEQ ID NO: 314382 - DNA, 12 bp, Artificial Sequence
  Oligonucleotide primer for the detection of SNP TSC0026330
aaaattaaaact

SEQ ID NO: 314383 - DNA, 12 bp, Artificial Sequence
  Oligonucleotide primer for the detection of SNP TSC0026330
gattatagttta

SEQ ID NO: 314384 - DNA, 12 bp, Artificial Sequence
  Oligonucleotide primer for the detection of SNP TSC0026331
acatcctctccc

SEQ ID NO: 314385 - DNA, 12 bp, Artificial Sequence
  Oligonucleotide primer for the detection of SNP TSC0026331
actcctccaaaa

SEQ ID NO: 314386 - DNA, 12 bp, Artificial Sequence
  Oligonucleotide primer for the detection of SNP TSC0026332
aacaaaaaactc

SEQ ID NO: 314387 - DNA, 12 bp, Artificial Sequence
  Oligonucleotide primer for the detection of SNP TSC0026332
aacgaaaaactc

SEQ ID NO: 314388 - DNA, 12 bp, Artificial Sequence
  Oligonucleotide primer for the detection of SNP TSC0026332
attttgagttat

SEQ ID NO: 314389 - DNA, 12 bp, Artificial Sequence
  Oligonucleotide primer for the detection of SNP TSC0026332
ctctaaactaca

SEQ ID NO: 314390 - DNA, 12 bp, Artificial Sequence
  Oligonucleotide primer for the detection of SNP TSC0026332
aatgggagattt

SEQ ID NO: 314391 - DNA, 12 bp, Artificial Sequence
  Oligonucleotide primer for the detection of SNP TSC0026332
aacgggagattt

SEQ ID NO: 314392 - DNA, 12 bp, Artificial Sequence
  Oligonucleotide primer for the detection of SNP TSC0026333
tcacactatcac

SEQ ID NO: 314393 - DNA, 12 bp, Artificial Sequence
  Oligonucleotide primer for the detection of SNP TSC0026333
ttatattgttat

SEQ ID NO: 314394 - DNA, 12 bp, Artificial Sequence
  Oligonucleotide primer for the detection of SNP TSC0026334
aaaaatcttaac

SEQ ID NO: 314395 - DNA, 12 bp, Artificial Sequence
  Oligonucleotide primer for the detection of SNP TSC0026334
taaaatttttta

SEQ ID NO: 314396 - DNA, 12 bp, Artificial Sequence
  Oligonucleotide primer for the detection of SNP TSC0026335
ttttttcattca

SEQ ID NO: 314397 - DNA, 12 bp, Artificial Sequence
  Oligonucleotide primer for the detection of SNP TSC0026335
atatttaattat

SEQ ID NO: 314398 - DNA, 12 bp, Artificial Sequence
  Oligonucleotide primer for the detection of SNP TSC0026337
ataacaaaacct

SEQ ID NO: 314399 - DNA, 12 bp, Artificial Sequence
  Oligonucleotide primer for the detection of SNP TSC0026337
tagtggtttata

SEQ ID NO: 314400 - DNA, 12 bp, Artificial Sequence
  Oligonucleotide primer for the detection of SNP TSC0026338
aactactcacaa

SEQ ID NO: 314401 - DNA, 12 bp, Artificial Sequence
  Oligonucleotide primer for the detection of SNP TSC0026338
aactactcacga

SEQ ID NO: 314402 - DNA, 12 bp, Artificial Sequence
  Oligonucleotide primer for the detection of SNP TSC0026338
tttgttaaggaa

SEQ ID NO: 314403 - DNA, 12 bp, Artificial Sequence
  Oligonucleotide primer for the detection of SNP TSC0026338
cctatcaaaaaa

SEQ ID NO: 314404 - DNA, 12 bp, Artificial Sequence
  Oligonucleotide primer for the detection of SNP TSC0026338
aaagttgtttat

SEQ ID NO: 314405 - DNA, 12 bp, Artificial Sequence
  Oligonucleotide primer for the detection of SNP TSC0026338
aaagttgtttac

SEQ ID NO: 314406 - DNA, 12 bp, Artificial Sequence
  Oligonucleotide primer for the detection of SNP TSC0026341
aacaaatactac

SEQ ID NO: 314407 - DNA, 12 bp, Artificial Sequence
  Oligonucleotide primer for the detection of SNP TSC0026341
ggaagtattgta

SEQ ID NO: 314408 - DNA, 12 bp, Artificial Sequence
  Oligonucleotide primer for the detection of SNP TSC0026342
ccaaaaactcca

SEQ ID NO: 314409 - DNA, 12 bp, Artificial Sequence
  Oligonucleotide primer for the detection of SNP TSC0026342
cacaaatttccc

SEQ ID NO: 314410 - DNA, 12 bp, Artificial Sequence
  Oligonucleotide primer for the detection of SNP TSC0026343
ttataataactc

SEQ ID NO: 314411 - DNA, 12 bp, Artificial Sequence
  Oligonucleotide primer for the detection of SNP TSC0026343
taaagtagaaaa

SEQ ID NO: 314412 - DNA, 12 bp, Artificial Sequence
  Oligonucleotide primer for the detection of SNP TSC0026346
cccaattaaaat

SEQ ID NO: 314413 - DNA, 12 bp, Artificial Sequence
  Oligonucleotide primer for the detection of SNP TSC0026346
tattatagagaa

SEQ ID NO: 314414 - DNA, 12 bp, Artificial Sequence
  Oligonucleotide primer for the detection of SNP TSC0026346
tttaattaaaat

SEQ ID NO: 314415 - DNA, 12 bp, Artificial Sequence
  Oligonucleotide primer for the detection of SNP TSC0026347
atggagagtttt

SEQ ID NO: 314416 - DNA, 12 bp, Artificial Sequence
  Oligonucleotide primer for the detection of SNP TSC0026347
acggagagtttt

SEQ ID NO: 314417 - DNA, 12 bp, Artificial Sequence
  Oligonucleotide primer for the detection of SNP TSC0026347
cgaaaaacccta

SEQ ID NO: 314418 - DNA, 12 bp, Artificial Sequence
  Oligonucleotide primer for the detection of SNP TSC0026347
ttatggttggta

SEQ ID NO: 314419 - DNA, 12 bp, Artificial Sequence
  Oligonucleotide primer for the detection of SNP TSC0026350
tttaaacttacc

SEQ ID NO: 314420 - DNA, 12 bp, Artificial Sequence
  Oligonucleotide primer for the detection of SNP TSC0026350
tttacctaccta

SEQ ID NO: 314421 - DNA, 12 bp, Artificial Sequence
  Oligonucleotide primer for the detection of SNP TSC0026350
tttggatttgtt

SEQ ID NO: 314422 - DNA, 12 bp, Artificial Sequence
  Oligonucleotide primer for the detection of SNP TSC0026351
aaaaacaccact

SEQ ID NO: 314423 - DNA, 12 bp, Artificial Sequence
  Oligonucleotide primer for the detection of SNP TSC0026351
aaaaacgccact

SEQ ID NO: 314424 - DNA, 12 bp, Artificial Sequence
  Oligonucleotide primer for the detection of SNP TSC0026351
gggatgatggtg

SEQ ID NO: 314425 - DNA, 12 bp, Artificial Sequence
  Oligonucleotide primer for the detection of SNP TSC0026351
gggatgacggtg

SEQ ID NO: 314426 - DNA, 12 bp, Artificial Sequence
  Oligonucleotide primer for the detection of SNP TSC0026351
gggatgatggcg

SEQ ID NO: 314427 - DNA, 12 bp, Artificial Sequence
  Oligonucleotide primer for the detection of SNP TSC0026351
gggatgacggcg

SEQ ID NO: 314428 - DNA, 12 bp, Artificial Sequence
  Oligonucleotide primer for the detection of SNP TSC0026352
ctatttctctta

SEQ ID NO: 314429 - DNA, 12 bp, Artificial Sequence
  Oligonucleotide primer for the detection of SNP TSC0026352
gggattggggat

SEQ ID NO: 314430 - DNA, 12 bp, Artificial Sequence
  Oligonucleotide primer for the detection of SNP TSC0026353
accacactcacg

SEQ ID NO: 314431 - DNA, 12 bp, Artificial Sequence
  Oligonucleotide primer for the detection of SNP TSC0026353
ttattgtaagtt

SEQ ID NO: 314432 - DNA, 12 bp, Artificial Sequence
  Oligonucleotide primer for the detection of SNP TSC0026353
ttattgtaagtc

SEQ ID NO: 314433 - DNA, 12 bp, Artificial Sequence
  Oligonucleotide primer for the detection of SNP TSC0026353
tcattataaacc

SEQ ID NO: 314434 - DNA, 12 bp, Artificial Sequence
  Oligonucleotide primer for the detection of SNP TSC0026353
attatatttatg

SEQ ID NO: 314435 - DNA, 12 bp, Artificial Sequence
  Oligonucleotide primer for the detection of SNP TSC0026353
attatatttacg

SEQ ID NO: 314436 - DNA, 12 bp, Artificial Sequence
  Oligonucleotide primer for the detection of SNP TSC0026356
caccatcacaca

SEQ ID NO: 314437 - DNA, 12 bp, Artificial Sequence
  Oligonukleotid-Primer
caccatcacgca

SEQ ID NO: 314438 - DNA, 12 bp, Artificial Sequence
  Oligonucleotide primer for the detection of SNP TSC0026356
ttcctcatctat

SEQ ID NO: 314439 - DNA, 12 bp, Artificial Sequence
  Oligonucleotide primer for the detection of SNP TSC0026356
tattattatgta

SEQ ID NO: 314440 - DNA, 12 bp, Artificial Sequence
  Oligonucleotide primer for the detection of SNP TSC0026356
tattattacgta

SEQ ID NO: 314441 - DNA, 12 bp, Artificial Sequence
  Oligonucleotide primer for the detection of SNP TSC0026358
aaccaaataaaa

SEQ ID NO: 314442 - DNA, 12 bp, Artificial Sequence
  Oligonucleotide primer for the detection of SNP TSC0026358
agttagatgaaa

SEQ ID NO: 314443 - DNA, 12 bp, Artificial Sequence
  Oligonucleotide primer for the detection of SNP TSC0026360
tactaccacact

SEQ ID NO: 314444 - DNA, 12 bp, Artificial Sequence
  Oligonucleotide primer for the detection of SNP TSC0026360
tatttattgaga

SEQ ID NO: 314445 - DNA, 12 bp, Artificial Sequence
  Oligonucleotide primer for the detection of SNP TSC0026360
cccactaaaaaa

SEQ ID NO: 314446 - DNA, 12 bp, Artificial Sequence
  Oligonucleotide primer for the detection of SNP TSC0026360
tgttgttatatt

SEQ ID NO: 314447 - DNA, 12 bp, Artificial Sequence
  Oligonucleotide primer for the detection of SNP TSC0026363
atatttgtattt

SEQ ID NO: 314448 - DNA, 12 bp, Artificial Sequence
  Oligonucleotide primer for the detection of SNP TSC0026363
catttacatcta

SEQ ID NO: 314449 - DNA, 12 bp, Artificial Sequence
  Oligonucleotide primer for the detection of SNP TSC0026363
ttttggtagagg

SEQ ID NO: 314450 - DNA, 12 bp, Artificial Sequence
  Oligonucleotide primer for the detection of SNP TSC0026369
catactacccaa

SEQ ID NO: 314451 - DNA, 12 bp, Artificial Sequence
  Oligonucleotide primer for the detection of SNP TSC0026369
tgtgtgtgagtt

SEQ ID NO: 314452 - DNA, 12 bp, Artificial Sequence
  Oligonucleotide primer for the detection of SNP TSC0026372
ccttaacattca

SEQ ID NO: 314453 - DNA, 12 bp, Artificial Sequence
  Oligonucleotide primer for the detection of SNP TSC0026372
tgatttttagat

SEQ ID NO: 314454 - DNA, 12 bp, Artificial Sequence
  Oligonucleotide primer for the detection of SNP TSC0026372
taacttccaaat

SEQ ID NO: 314455 - DNA, 12 bp, Artificial Sequence
  Oligonucleotide primer for the detection of SNP TSC0026372
ttttgatattta

SEQ ID NO: 314456 - DNA, 12 bp, Artificial Sequence
  Oligonucleotide primer for the detection of SNP TSC0026374
atccaaatctcc

SEQ ID NO: 314457 - DNA, 12 bp, Artificial Sequence
  Oligonucleotide primer for the detection of SNP TSC0026374
attgtttgttag

SEQ ID NO: 314458 - DNA, 12 bp, Artificial Sequence
  Oligonucleotide primer for the detection of SNP TSC0026375
cttcacatcatc

SEQ ID NO: 314459 - DNA, 12 bp, Artificial Sequence
  Oligonucleotide primer for the detection of SNP TSC0026375
tgtatagaggga

SEQ ID NO: 314460 - DNA, 12 bp, Artificial Sequence
  Oligonucleotide primer for the detection of SNP TSC0026380
tttaacaaactc

SEQ ID NO: 314461 - DNA, 12 bp, Artificial Sequence
  Oligonucleotide primer for the detection of SNP TSC0026380
tttaacgaactc

SEQ ID NO: 314462 - DNA, 12 bp, Artificial Sequence
  Oligonucleotide primer for the detection of SNP TSC0026380
tagtggatgaat

SEQ ID NO: 314463 - DNA, 12 bp, Artificial Sequence
  Oligonucleotide primer for the detection of SNP TSC0026380
tttggtgaattt

SEQ ID NO: 314464 - DNA, 12 bp, Artificial Sequence
  Oligonucleotide primer for the detection of SNP TSC0026380
tttggcgaattt

SEQ ID NO: 314465 - DNA, 12 bp, Artificial Sequence
  Oligonucleotide primer for the detection of SNP TSC0026380
tttggtgaattc

SEQ ID NO: 314466 - DNA, 12 bp, Artificial Sequence
  Oligonucleotide primer for the detection of SNP TSC0026380
tttggcgaattc

SEQ ID NO: 314467 - DNA, 12 bp, Artificial Sequence
  Oligonucleotide primer for the detection of SNP TSC0026382
ataacacaattt

SEQ ID NO: 314468 - DNA, 12 bp, Artificial Sequence
  Oligonucleotide primer for the detection of SNP TSC0026382
tttaaatgtaaa

SEQ ID NO: 314469 - DNA, 12 bp, Artificial Sequence
  Oligonucleotide primer for the detection of SNP TSC0026382
tttaaatataaa

SEQ ID NO: 314470 - DNA, 12 bp, Artificial Sequence
  Oligonucleotide primer for the detection of SNP TSC0026382
atgatataattt

SEQ ID NO: 314471 - DNA, 12 bp, Artificial Sequence
  Oligonucleotide primer for the detection of SNP TSC0026383
tattttaaaacc

SEQ ID NO: 314472 - DNA, 12 bp, Artificial Sequence
  Oligonucleotide primer for the detection of SNP TSC0026383
aaattttttaag

SEQ ID NO: 314473 - DNA, 12 bp, Artificial Sequence
  Oligonucleotide primer for the detection of SNP TSC0026383
aaattccctaaa

SEQ ID NO: 314474 - DNA, 12 bp, Artificial Sequence
  Oligonucleotide primer for the detection of SNP TSC0026383
tattttgaggtt

SEQ ID NO: 314475 - DNA, 12 bp, Artificial Sequence
  Oligonucleotide primer for the detection of SNP TSC0026384
ctaataaaaact

SEQ ID NO: 314476 - DNA, 12 bp, Artificial Sequence
  Oligonucleotide primer for the detection of SNP TSC0026384
tttaggaaatgg

SEQ ID NO: 314477 - DNA, 12 bp, Artificial Sequence
  Oligonucleotide primer for the detection of SNP TSC0026386
ttgagattagtt

SEQ ID NO: 314478 - DNA, 12 bp, Artificial Sequence
  Oligonucleotide primer for the detection of SNP TSC0026386
tcgagattagtt

SEQ ID NO: 314479 - DNA, 12 bp, Artificial Sequence
  Oligonucleotide primer for the detection of SNP TSC0026386
tcaaaaccaatc

SEQ ID NO: 314480 - DNA, 12 bp, Artificial Sequence
  Oligonucleotide primer for the detection of SNP TSC0026386
tcgaaaccaatc

SEQ ID NO: 314481 - DNA, 12 bp, Artificial Sequence
  Oligonucleotide primer for the detection of SNP TSC0026386
ttattatgttgg

SEQ ID NO: 314482 - DNA, 12 bp, Artificial Sequence
  Oligonucleotide primer for the detection of SNP TSC0026387
gttttaaaaaaa

SEQ ID NO: 314483 - DNA, 12 bp, Artificial Sequence
  Oligonucleotide primer for the detection of SNP TSC0026388
aacacgataaaa

SEQ ID NO: 314484 - DNA, 12 bp, Artificial Sequence
  Oligonucleotide primer for the detection of SNP TSC0026388
aatacggtgaaa

SEQ ID NO: 314485 - DNA, 12 bp, Artificial Sequence
  Oligonucleotide primer for the detection of SNP TSC0026389
taggtagtttta

SEQ ID NO: 314486 - DNA, 12 bp, Artificial Sequence
  Oligonucleotide primer for the detection of SNP TSC0026389
taaacaactcca

SEQ ID NO: 314487 - DNA, 12 bp, Artificial Sequence
  Oligonucleotide primer for the detection of SNP TSC0026389
aaagatttggga

SEQ ID NO: 314488 - DNA, 12 bp, Artificial Sequence
  Oligonucleotide primer for the detection of SNP TSC0026390
ttaaaaatatga

SEQ ID NO: 314489 - DNA, 12 bp, Artificial Sequence
  Oligonucleotide primer for the detection of SNP TSC0026390
ttaaaaatacga

SEQ ID NO: 314490 - DNA, 12 bp, Artificial Sequence
  Oligonucleotide primer for the detection of SNP TSC0026391
gaaaaaaattaa

SEQ ID NO: 314491 - DNA, 12 bp, Artificial Sequence
  Oligonucleotide primer for the detection of SNP TSC0026392
tcctcaatcccc

SEQ ID NO: 314492 - DNA, 12 bp, Artificial Sequence
  Oligonucleotide primer for the detection of SNP TSC0026392
aaattaagaatt

SEQ ID NO: 314493 - DNA, 12 bp, Artificial Sequence
  Oligonucleotide primer for the detection of SNP TSC0026393
caaaaccttcca

SEQ ID NO: 314494 - DNA, 12 bp, Artificial Sequence
  Oligonucleotide primer for the detection of SNP TSC0026393
gtaagttattgt

SEQ ID NO: 314495 - DNA, 12 bp, Artificial Sequence
  Oligonucleotide primer for the detection of SNP TSC0026393
acaaatcactac

SEQ ID NO: 314496 - DNA, 12 bp, Artificial Sequence
  Oligonucleotide primer for the detection of SNP TSC0026393
gcaaatcactac

SEQ ID NO: 314497 - DNA, 12 bp, Artificial Sequence
  Oligonucleotide primer for the detection of SNP TSC0026393
taggatttttta

SEQ ID NO: 314498 - DNA, 12 bp, Artificial Sequence
  Oligonucleotide primer for the detection of SNP TSC0026398
ctttaatacaat

SEQ ID NO: 314499 - DNA, 12 bp, Artificial Sequence
  Oligonucleotide primer for the detection of SNP TSC0026398
ggagttggagtg

SEQ ID NO: 314500 - DNA, 12 bp, Artificial Sequence
  Oligonucleotide primer for the detection of SNP TSC0026399
tttttgtattgg

SEQ ID NO: 314501 - DNA, 12 bp, Artificial Sequence
  Oligonucleotide primer for the detection of SNP TSC0026399
cccttacactaa

SEQ ID NO: 314502 - DNA, 12 bp, Artificial Sequence
  Oligonucleotide primer for the detection of SNP TSC0026399
agaaggaaatat

SEQ ID NO: 314503 - DNA, 12 bp, Artificial Sequence
  Oligonucleotide primer for the detection of SNP TSC0026400
aaagatatggtt

SEQ ID NO: 314504 - DNA, 12 bp, Artificial Sequence
  Oligonucleotide primer for the detection of SNP TSC0026400
tttgtagataag

SEQ ID NO: 314505 - DNA, 12 bp, Artificial Sequence
  Oligonucleotide primer for the detection of SNP TSC0026401
attatttttgtt

SEQ ID NO: 314506 - DNA, 12 bp, Artificial Sequence
  Oligonucleotide primer for the detection of SNP TSC0026401
accacccttatt

SEQ ID NO: 314507 - DNA, 12 bp, Artificial Sequence
  Oligonucleotide primer for the detection of SNP TSC0026401
agttgggtgttt

SEQ ID NO: 314508 - DNA, 12 bp, Artificial Sequence
  Oligonucleotide primer for the detection of SNP TSC0026406
ctcaaaaaataa

SEQ ID NO: 314509 - DNA, 12 bp, Artificial Sequence
  Oligonucleotide primer for the detection of SNP TSC0026406
attattaagtag

SEQ ID NO: 314510 - DNA, 12 bp, Artificial Sequence
  Oligonucleotide primer for the detection of SNP TSC0026406
tattaaacaaaa

SEQ ID NO: 314511 - DNA, 12 bp, Artificial Sequence
  Oligonucleotide primer for the detection of SNP TSC0026406
tttaagagataa

SEQ ID NO: 314512 - DNA, 12 bp, Artificial Sequence
  Oligonucleotide primer for the detection of SNP TSC0026409
ctaattactaac

SEQ ID NO: 314513 - DNA, 12 bp, Artificial Sequence
  Oligonucleotide primer for the detection of SNP TSC0026409
ataatgaattgg

SEQ ID NO: 314514 - DNA, 12 bp, Artificial Sequence
  Oligonucleotide primer for the detection of SNP TSC0026409
ataacgaattgg

SEQ ID NO: 314515 - DNA, 12 bp, Artificial Sequence
  Oligonucleotide primer for the detection of SNP TSC0026410
tcatccttaaac

SEQ ID NO: 314516 - DNA, 12 bp, Artificial Sequence
  Oligonucleotide primer for the detection of SNP TSC0026410
aaattatgttag

SEQ ID NO: 314517 - DNA, 12 bp, Artificial Sequence
  Oligonucleotide primer for the detection of SNP TSC0026412
tccacccatcca

SEQ ID NO: 314518 - DNA, 12 bp, Artificial Sequence
  Oligonucleotide primer for the detection of SNP TSC0026412
tgatagatgggt

SEQ ID NO: 314519 - DNA, 12 bp, Artificial Sequence
  Oligonucleotide primer for the detection of SNP TSC0026415
ttaggtatggag

SEQ ID NO: 314520 - DNA, 12 bp, Artificial Sequence
  Oligonucleotide primer for the detection of SNP TSC0026415
ttaaacataaaa

SEQ ID NO: 314521 - DNA, 12 bp, Artificial Sequence
  Oligonucleotide primer for the detection of SNP TSC0026415
gatgggagggtt

SEQ ID NO: 314522 - DNA, 12 bp, Artificial Sequence
  Oligonucleotide primer for the detection of SNP TSC0026417
aactactcttaa

SEQ ID NO: 314523 - DNA, 12 bp, Artificial Sequence
  Oligonucleotide primer for the detection of SNP TSC0026417
tggggttaagga

SEQ ID NO: 314524 - DNA, 12 bp, Artificial Sequence
  Oligonucleotide primer for the detection of SNP TSC0026421
ataaaaatatcc

SEQ ID NO: 314525 - DNA, 12 bp, Artificial Sequence
  Oligonucleotide primer for the detection of SNP TSC0026421
gagaagagaggg

SEQ ID NO: 314526 - DNA, 12 bp, Artificial Sequence
  Oligonucleotide primer for the detection of SNP TSC0026422
ttaaaaacacaa

SEQ ID NO: 314527 - DNA, 12 bp, Artificial Sequence
  Oligonucleotide primer for the detection of SNP TSC0026423
tcatctcaaaat

SEQ ID NO: 314528 - DNA, 12 bp, Artificial Sequence
  Oligonucleotide primer for the detection of SNP TSC0026423
tgtgattaagtt

SEQ ID NO: 314529 - DNA, 12 bp, Artificial Sequence
  Oligonucleotide primer for the detection of SNP TSC0026423
attttaaaattt

SEQ ID NO: 314530 - DNA, 12 bp, Artificial Sequence
  Oligonucleotide primer for the detection of SNP TSC0026423
attttaaaattc

SEQ ID NO: 314531 - DNA, 12 bp, Artificial Sequence
  Oligonucleotide primer for the detection of SNP TSC0026424
aaccaccacaaa

SEQ ID NO: 314532 - DNA, 12 bp, Artificial Sequence
  Oligonucleotide primer for the detection of SNP TSC0026424
atgagtaataat

SEQ ID NO: 314533 - DNA, 12 bp, Artificial Sequence
  Oligonucleotide primer for the detection of SNP TSC0026424
taaacaataata

SEQ ID NO: 314534 - DNA, 12 bp, Artificial Sequence
  Oligonucleotide primer for the detection of SNP TSC0026424
aattattataag

SEQ ID NO: 314535 - DNA, 12 bp, Artificial Sequence
  Oligonucleotide primer for the detection of SNP TSC0026428
aacccctacaaa

SEQ ID NO: 314536 - DNA, 12 bp, Artificial Sequence
  Oligonucleotide primer for the detection of SNP TSC0026428
ttttggtataga

SEQ ID NO: 314537 - DNA, 12 bp, Artificial Sequence
  Oligonucleotide primer for the detection of SNP TSC0026428
tttcggtataga

SEQ ID NO: 314538 - DNA, 12 bp, Artificial Sequence
  Oligonucleotide primer for the detection of SNP TSC0026428
cctcaacataaa

SEQ ID NO: 314539 - DNA, 12 bp, Artificial Sequence
  Oligonucleotide primer for the detection of SNP TSC0026428
cctcgacataaa

SEQ ID NO: 314540 - DNA, 12 bp, Artificial Sequence
  Oligonucleotide primer for the detection of SNP TSC0026428
atttttgtaggt

SEQ ID NO: 314541 - DNA, 12 bp, Artificial Sequence
  Oligonucleotide primer for the detection of SNP TSC0026429
tccccaccaacc

SEQ ID NO: 314542 - DNA, 12 bp, Artificial Sequence
  Oligonukleotid-Primer
tccccaccgacc

SEQ ID NO: 314543 - DNA, 12 bp, Artificial Sequence
  Oligonucleotide primer for the detection of SNP TSC0026429
tccccgccaacc

SEQ ID NO: 314544 - DNA, 12 bp, Artificial Sequence
  Oligonucleotide primer for the detection of SNP TSC0026429
tccccgccgacc

SEQ ID NO: 314545 - DNA, 12 bp, Artificial Sequence
  Oligonucleotide primer for the detection of SNP TSC0026429
ttttttggtgtg

SEQ ID NO: 314546 - DNA, 12 bp, Artificial Sequence
  Oligonucleotide primer for the detection of SNP TSC0026429
tttttcggtgtg

SEQ ID NO: 314547 - DNA, 12 bp, Artificial Sequence
  Oligonucleotide primer for the detection of SNP TSC0026429
ttttttggcgtg

SEQ ID NO: 314548 - DNA, 12 bp, Artificial Sequence
  Oligonucleotide primer for the detection of SNP TSC0026429
ttttttggtgcg

SEQ ID NO: 314549 - DNA, 12 bp, Artificial Sequence
  Oligonucleotide primer for the detection of SNP TSC0026429
tttttcggcgtg

SEQ ID NO: 314550 - DNA, 12 bp, Artificial Sequence
  Oligonucleotide primer for the detection of SNP TSC0026429
tttttcggtgcg

SEQ ID NO: 314551 - DNA, 12 bp, Artificial Sequence
  Oligonucleotide primer for the detection of SNP TSC0026429
ttttttggcgcg

SEQ ID NO: 314552 - DNA, 12 bp, Artificial Sequence
  Oligonucleotide primer for the detection of SNP TSC0026429
tttttcggcgcg

SEQ ID NO: 314553 - DNA, 12 bp, Artificial Sequence
  Oligonucleotide primer for the detection of SNP TSC0026429
cttctcaacaca

SEQ ID NO: 314554 - DNA, 12 bp, Artificial Sequence
  Oligonucleotide primer for the detection of SNP TSC0026429
cttctcaacacg

SEQ ID NO: 314555 - DNA, 12 bp, Artificial Sequence
  Oligonucleotide primer for the detection of SNP TSC0026429
cttctcaacgca

SEQ ID NO: 314556 - DNA, 12 bp, Artificial Sequence
  Oligonucleotide primer for the detection of SNP TSC0026429
cttctcgacaca

SEQ ID NO: 314557 - DNA, 12 bp, Artificial Sequence
  Oligonucleotide primer for the detection of SNP TSC0026429
cttctcaacgcg

SEQ ID NO: 314558 - DNA, 12 bp, Artificial Sequence
  Oligonucleotide primer for the detection of SNP TSC0026429
cttctcgacacg

SEQ ID NO: 314559 - DNA, 12 bp, Artificial Sequence
  Oligonucleotide primer for the detection of SNP TSC0026429
cttctcgacgca

SEQ ID NO: 314560 - DNA, 12 bp, Artificial Sequence
  Oligonucleotide primer for the detection of SNP TSC0026429
cttctcgacgcg

SEQ ID NO: 314561 - DNA, 12 bp, Artificial Sequence
  Oligonucleotide primer for the detection of SNP TSC0026429
ttttcgttggtt

SEQ ID NO: 314562 - DNA, 12 bp, Artificial Sequence
  Oligonucleotide primer for the detection of SNP TSC0026429
tttttgtcggtt

SEQ ID NO: 314563 - DNA, 12 bp, Artificial Sequence
  Oligonucleotide primer for the detection of SNP TSC0026429
ttttcgtcggtt

SEQ ID NO: 314564 - DNA, 12 bp, Artificial Sequence
  Oligonucleotide primer for the detection of SNP TSC0026431
aacctttccaaa

SEQ ID NO: 314565 - DNA, 12 bp, Artificial Sequence
  Oligonucleotide primer for the detection of SNP TSC0026431
atttgttgtgta

SEQ ID NO: 314566 - DNA, 12 bp, Artificial Sequence
  Oligonucleotide primer for the detection of SNP TSC0026431
attcgttgtgta

SEQ ID NO: 314567 - DNA, 12 bp, Artificial Sequence
  Oligonucleotide primer for the detection of SNP TSC0026431
attcactataca

SEQ ID NO: 314568 - DNA, 12 bp, Artificial Sequence
  Oligonucleotide primer for the detection of SNP TSC0026431
attcgctataca

SEQ ID NO: 314569 - DNA, 12 bp, Artificial Sequence
  Oligonucleotide primer for the detection of SNP TSC0026432
ataaaccaccat

SEQ ID NO: 314570 - DNA, 12 bp, Artificial Sequence
  Oligonucleotide primer for the detection of SNP TSC0026432
ttgtgtgatggg

SEQ ID NO: 314571 - DNA, 12 bp, Artificial Sequence
  Oligonucleotide primer for the detection of SNP TSC0026435
tctataacttta

SEQ ID NO: 314572 - DNA, 12 bp, Artificial Sequence
  Oligonucleotide primer for the detection of SNP TSC0026435
gaagggaagaat

SEQ ID NO: 314573 - DNA, 12 bp, Artificial Sequence
  Oligonucleotide primer for the detection of SNP TSC0026436
aaaaaacaacat

SEQ ID NO: 314574 - DNA, 12 bp, Artificial Sequence
  Oligonucleotide primer for the detection of SNP TSC0026436
tttgtaaaatga

SEQ ID NO: 314575 - DNA, 12 bp, Artificial Sequence
  Oligonucleotide primer for the detection of SNP TSC0026437
aaaaaacaatat

SEQ ID NO: 314576 - DNA, 12 bp, Artificial Sequence
  Oligonucleotide primer for the detection of SNP TSC0026440
tcttaaaaacac

SEQ ID NO: 314577 - DNA, 12 bp, Artificial Sequence
  Oligonucleotide primer for the detection of SNP TSC0026440
aatgttttgaga

SEQ ID NO: 314578 - DNA, 12 bp, Artificial Sequence
  Oligonucleotide primer for the detection of SNP TSC0026440
aatatcttaaaa

SEQ ID NO: 314579 - DNA, 12 bp, Artificial Sequence
  Oligonucleotide primer for the detection of SNP TSC0026440
ttttagaaatat

SEQ ID NO: 314580 - DNA, 12 bp, Artificial Sequence
  Oligonucleotide primer for the detection of SNP TSC0026441
tcatcttaacca

SEQ ID NO: 314581 - DNA, 12 bp, Artificial Sequence
  Oligonucleotide primer for the detection of SNP TSC0026441
ataagtttgtga

SEQ ID NO: 314582 - DNA, 12 bp, Artificial Sequence
  Oligonucleotide primer for the detection of SNP TSC0026441
ataagtttgcga

SEQ ID NO: 314583 - DNA, 12 bp, Artificial Sequence
  Oligonucleotide primer for the detection of SNP TSC0026441
acaaatctacaa

SEQ ID NO: 314584 - DNA, 12 bp, Artificial Sequence
  Oligonucleotide primer for the detection of SNP TSC0026441
acaaatctacga

SEQ ID NO: 314585 - DNA, 12 bp, Artificial Sequence
  Oligonucleotide primer for the detection of SNP TSC0026441
tattttggttat

SEQ ID NO: 314586 - DNA, 12 bp, Artificial Sequence
  Oligonucleotide primer for the detection of SNP TSC0026442
taaacattcaat

SEQ ID NO: 314587 - DNA, 12 bp, Artificial Sequence
  Oligonucleotide primer for the detection of SNP TSC0026442
gtattgtggtta

SEQ ID NO: 314588 - DNA, 12 bp, Artificial Sequence
  Oligonucleotide primer for the detection of SNP TSC0026443
ttcatctatcta

SEQ ID NO: 314589 - DNA, 12 bp, Artificial Sequence
  Oligonucleotide primer for the detection of SNP TSC0026443
atgatattgtta

SEQ ID NO: 314590 - DNA, 12 bp, Artificial Sequence
  Oligonucleotide primer for the detection of SNP TSC0026444
cttcttctctcc

SEQ ID NO: 314591 - DNA, 12 bp, Artificial Sequence
  Oligonucleotide primer for the detection of SNP TSC0026444
agagatagagag

SEQ ID NO: 314592 - DNA, 12 bp, Artificial Sequence
  Oligonucleotide primer for the detection of SNP TSC0026445
ccacttccctcc

SEQ ID NO: 314593 - DNA, 12 bp, Artificial Sequence
  Oligonucleotide primer for the detection of SNP TSC0026445
tggaatggttta

SEQ ID NO: 314594 - DNA, 12 bp, Artificial Sequence
  Oligonucleotide primer for the detection of SNP TSC0026445
cggaatggttta

SEQ ID NO: 314595 - DNA, 12 bp, Artificial Sequence
  Oligonucleotide primer for the detection of SNP TSC0026445
caaaataaccca

SEQ ID NO: 314596 - DNA, 12 bp, Artificial Sequence
  Oligonucleotide primer for the detection of SNP TSC0026445
cgaaataaccca

SEQ ID NO: 314597 - DNA, 12 bp, Artificial Sequence
  Oligonucleotide primer for the detection of SNP TSC0026448
cctatctactca

SEQ ID NO: 314598 - DNA, 12 bp, Artificial Sequence
  Oligonucleotide primer for the detection of SNP TSC0026448
gagtaagattat

SEQ ID NO: 314599 - DNA, 12 bp, Artificial Sequence
  Oligonucleotide primer for the detection of SNP TSC0026449
ctcctttaaaca

SEQ ID NO: 314600 - DNA, 12 bp, Artificial Sequence
  Oligonucleotide primer for the detection of SNP TSC0026449
gattggagagtt

SEQ ID NO: 314601 - DNA, 12 bp, Artificial Sequence
  Oligonucleotide primer for the detection of SNP TSC0026449
ctaaaaaattaa

SEQ ID NO: 314602 - DNA, 12 bp, Artificial Sequence
  Oligonucleotide primer for the detection of SNP TSC0026449
ttttttaagtat

SEQ ID NO: 314603 - DNA, 12 bp, Artificial Sequence
  Oligonukleotid-Primer
tcacttactatc

SEQ ID NO: 314604 - DNA, 12 bp, Artificial Sequence
  Oligonucleotide primer for the detection of SNP TSC0026451
gtgttgagtttg

SEQ ID NO: 314605 - DNA, 12 bp, Artificial Sequence
  Oligonucleotide primer for the detection of SNP TSC0026451
atactaaactta

SEQ ID NO: 314606 - DNA, 12 bp, Artificial Sequence
  Oligonucleotide primer for the detection of SNP TSC0026451
ttatttgttgtt

SEQ ID NO: 314607 - DNA, 12 bp, Artificial Sequence
  Oligonucleotide primer for the detection of SNP TSC0026452
ataaaaaatttc

SEQ ID NO: 314608 - DNA, 12 bp, Artificial Sequence
  Oligonucleotide primer for the detection of SNP TSC0026452
ataatgttttta

SEQ ID NO: 314609 - DNA, 12 bp, Artificial Sequence
  Oligonucleotide primer for the detection of SNP TSC0026452
ataacgttttta

SEQ ID NO: 314610 - DNA, 12 bp, Artificial Sequence
  Oligonucleotide primer for the detection of SNP TSC0026453
aaatataaatta

SEQ ID NO: 314611 - DNA, 12 bp, Artificial Sequence
  Oligonucleotide primer for the detection of SNP TSC0026453
gggtttttgaat

SEQ ID NO: 314612 - DNA, 12 bp, Artificial Sequence
  Oligonucleotide primer for the detection of SNP TSC0026453
taaacctctaaa

SEQ ID NO: 314613 - DNA, 12 bp, Artificial Sequence
  Oligonucleotide primer for the detection of SNP TSC0026453
tgggtgtgggtt

SEQ ID NO: 314614 - DNA, 12 bp, Artificial Sequence
  Oligonucleotide primer for the detection of SNP TSC0026456
aacattatcaaa

SEQ ID NO: 314615 - DNA, 12 bp, Artificial Sequence
  Oligonucleotide primer for the detection of SNP TSC0026456
taatattgtttg

SEQ ID NO: 314616 - DNA, 12 bp, Artificial Sequence
  Oligonucleotide primer for the detection of SNP TSC0026459
cccaaattctct

SEQ ID NO: 314617 - DNA, 12 bp, Artificial Sequence
  Oligonucleotide primer for the detection of SNP TSC0026459
atttttggttga

SEQ ID NO: 314618 - DNA, 12 bp, Artificial Sequence
  Oligonucleotide primer for the detection of SNP TSC0026465
ctaataactatt

SEQ ID NO: 314619 - DNA, 12 bp, Artificial Sequence
  Oligonucleotide primer for the detection of SNP TSC0026465
cactttttttta

SEQ ID NO: 314620 - DNA, 12 bp, Artificial Sequence
  Oligonucleotide primer for the detection of SNP TSC0026465
tagtgattattt

SEQ ID NO: 314621 - DNA, 12 bp, Artificial Sequence
  Oligonucleotide primer for the detection of SNP TSC0026466
cattctaaataa

SEQ ID NO: 314622 - DNA, 12 bp, Artificial Sequence
  Oligonucleotide primer for the detection of SNP TSC0026466
ggggattttatt

SEQ ID NO: 314623 - DNA, 12 bp, Artificial Sequence
  Oligonucleotide primer for the detection of SNP TSC0026466
tattttgaatgg

SEQ ID NO: 314624 - DNA, 12 bp, Artificial Sequence
  Oligonucleotide primer for the detection of SNP TSC0026468
ccacaaaattaa

SEQ ID NO: 314625 - DNA, 12 bp, Artificial Sequence
  Oligonucleotide primer for the detection of SNP TSC0026468
ttttaggaggat

SEQ ID NO: 314626 - DNA, 12 bp, Artificial Sequence
  Oligonucleotide primer for the detection of SNP TSC0026468
tcccaaaaaaat

SEQ ID NO: 314627 - DNA, 12 bp, Artificial Sequence
  Oligonucleotide primer for the detection of SNP TSC0026468
ttatagggttgg

SEQ ID NO: 314628 - DNA, 12 bp, Artificial Sequence
  Oligonucleotide primer for the detection of SNP TSC0026469
aaattaggagtt

SEQ ID NO: 314629 - DNA, 12 bp, Artificial Sequence
  Oligonucleotide primer for the detection of SNP TSC0026470
ttatcaaccacc

SEQ ID NO: 314630 - DNA, 12 bp, Artificial Sequence
  Oligonucleotide primer for the detection of SNP TSC0026470
gtgtttagtttt

SEQ ID NO: 314631 - DNA, 12 bp, Artificial Sequence
  Oligonucleotide primer for the detection of SNP TSC0026470
tacttaacctta

SEQ ID NO: 314632 - DNA, 12 bp, Artificial Sequence
  Oligonucleotide primer for the detection of SNP TSC0026470
ttattaattatt

SEQ ID NO: 314633 - DNA, 12 bp, Artificial Sequence
  Oligonucleotide primer for the detection of SNP TSC0026470
ttattaattatc

SEQ ID NO: 314634 - DNA, 12 bp, Artificial Sequence
  Oligonucleotide primer for the detection of SNP TSC0026473
aattcctaaaac

SEQ ID NO: 314635 - DNA, 12 bp, Artificial Sequence
  Oligonucleotide primer for the detection of SNP TSC0026473
tgttataattag

SEQ ID NO: 314636 - DNA, 12 bp, Artificial Sequence
  Oligonucleotide primer for the detection of SNP TSC0026473
tactataaccaa

SEQ ID NO: 314637 - DNA, 12 bp, Artificial Sequence
  Oligonucleotide primer for the detection of SNP TSC0026473
aatttttgagat

SEQ ID NO: 314638 - DNA, 12 bp, Artificial Sequence
  Oligonucleotide primer for the detection of SNP TSC0026474
ttaccactatta

SEQ ID NO: 314639 - DNA, 12 bp, Artificial Sequence
  Oligonucleotide primer for the detection of SNP TSC0026474
aatgatatagtt

SEQ ID NO: 314640 - DNA, 12 bp, Artificial Sequence
  Oligonucleotide primer for the detection of SNP TSC0026475
taatccaaaact

SEQ ID NO: 314641 - DNA, 12 bp, Artificial Sequence
  Oligonucleotide primer for the detection of SNP TSC0026475
ataggaagagag

SEQ ID NO: 314642 - DNA, 12 bp, Artificial Sequence
  Oligonucleotide primer for the detection of SNP TSC0026476
aaaattaccttt

SEQ ID NO: 314643 - DNA, 12 bp, Artificial Sequence
  Oligonucleotide primer for the detection of SNP TSC0026476
atgatgatgggg

SEQ ID NO: 314644 - DNA, 12 bp, Artificial Sequence
  Oligonucleotide primer for the detection of SNP TSC0026478
tccaccaaatac

SEQ ID NO: 314645 - DNA, 12 bp, Artificial Sequence
  Oligonucleotide primer for the detection of SNP TSC0026478
tccgccaaatac

SEQ ID NO: 314646 - DNA, 12 bp, Artificial Sequence
  Oligonucleotide primer for the detection of SNP TSC0026478
atgttgaggaat

SEQ ID NO: 314647 - DNA, 12 bp, Artificial Sequence
  Oligonucleotide primer for the detection of SNP TSC0026478
atgtcgaggaat

SEQ ID NO: 314648 - DNA, 12 bp, Artificial Sequence
  Oligonucleotide primer for the detection of SNP TSC0026478
atgttgaggaac

SEQ ID NO: 314649 - DNA, 12 bp, Artificial Sequence
  Oligonucleotide primer for the detection of SNP TSC0026478
atgtcgaggaac

SEQ ID NO: 314650 - DNA, 12 bp, Artificial Sequence
  Oligonucleotide primer for the detection of SNP TSC0026478
ataccaaaaaac

SEQ ID NO: 314651 - DNA, 12 bp, Artificial Sequence
  Oligonucleotide primer for the detection of SNP TSC0026478
ataccgaaaaac

SEQ ID NO: 314652 - DNA, 12 bp, Artificial Sequence
  Oligonucleotide primer for the detection of SNP TSC0026478
tgttaaatgttt

SEQ ID NO: 314653 - DNA, 12 bp, Artificial Sequence
  Oligonucleotide primer for the detection of SNP TSC0026478
cgttaaatgttt

SEQ ID NO: 314654 - DNA, 12 bp, Artificial Sequence
  Oligonucleotide primer for the detection of SNP TSC0026483
ctaaactttaaa

SEQ ID NO: 314655 - DNA, 12 bp, Artificial Sequence
  Oligonucleotide primer for the detection of SNP TSC0026483
taggtttaattt

SEQ ID NO: 314656 - DNA, 12 bp, Artificial Sequence
  Oligonucleotide primer for the detection of SNP TSC0026483
caaacccaatct

SEQ ID NO: 314657 - DNA, 12 bp, Artificial Sequence
  Oligonucleotide primer for the detection of SNP TSC0026483
tggattttaagt

SEQ ID NO: 314658 - DNA, 12 bp, Artificial Sequence
  Oligonucleotide primer for the detection of SNP TSC0026484
cctaacttccaa

SEQ ID NO: 314659 - DNA, 12 bp, Artificial Sequence
  Oligonucleotide primer for the detection of SNP TSC0026484
gtgttagatttt

SEQ ID NO: 314660 - DNA, 12 bp, Artificial Sequence
  Oligonucleotide primer for the detection of SNP TSC0026484
taccaaactcta

SEQ ID NO: 314661 - DNA, 12 bp, Artificial Sequence
  Oligonucleotide primer for the detection of SNP TSC0026484
ttagtttttagt

SEQ ID NO: 314662 - DNA, 12 bp, Artificial Sequence
  Oligonucleotide primer for the detection of SNP TSC0026484
ttagtttttagc

SEQ ID NO: 314663 - DNA, 12 bp, Artificial Sequence
  Oligonucleotide primer for the detection of SNP TSC0026485
caaatctcaata

SEQ ID NO: 314664 - DNA, 12 bp, Artificial Sequence
  Oligonucleotide primer for the detection of SNP TSC0026485
ggtatttgaggt

SEQ ID NO: 314665 - DNA, 12 bp, Artificial Sequence
  Oligonucleotide primer for the detection of SNP TSC0026485
ggtatttgaggc

SEQ ID NO: 314666 - DNA, 12 bp, Artificial Sequence
  Oligonucleotide primer for the detection of SNP TSC0026485
aacatttaaaac

SEQ ID NO: 314667 - DNA, 12 bp, Artificial Sequence
  Oligonucleotide primer for the detection of SNP TSC0026485
taggttttagtg

SEQ ID NO: 314668 - DNA, 12 bp, Artificial Sequence
  Oligonucleotide primer for the detection of SNP TSC0026486
accttacaactt

SEQ ID NO: 314669 - DNA, 12 bp, Artificial Sequence
  Oligonucleotide primer for the detection of SNP TSC0026486
gaaatgggatag

SEQ ID NO: 314670 - DNA, 12 bp, Artificial Sequence
  Oligonucleotide primer for the detection of SNP TSC0026488
ttttaattgggt

SEQ ID NO: 314671 - DNA, 12 bp, Artificial Sequence
  Oligonucleotide primer for the detection of SNP TSC0026488
ttctaattaaat

SEQ ID NO: 314672 - DNA, 12 bp, Artificial Sequence
  Oligonucleotide primer for the detection of SNP TSC0026488
tttataaaggta

SEQ ID NO: 314673 - DNA, 12 bp, Artificial Sequence
  Oligonucleotide primer for the detection of SNP TSC0026489
atatatctatac

SEQ ID NO: 314674 - DNA, 12 bp, Artificial Sequence
  Oligonucleotide primer for the detection of SNP TSC0026489
tatatattaaga

SEQ ID NO: 314675 - DNA, 12 bp, Artificial Sequence
  Oligonucleotide primer for the detection of SNP TSC0026493
cttttacaactt

SEQ ID NO: 314676 - DNA, 12 bp, Artificial Sequence
  Oligonucleotide primer for the detection of SNP TSC0026493
ataggtaagtaa

SEQ ID NO: 314677 - DNA, 12 bp, Artificial Sequence
  Oligonucleotide primer for the detection of SNP TSC0026496
cattaattaaac

SEQ ID NO: 314678 - DNA, 12 bp, Artificial Sequence
  Oligonucleotide primer for the detection of SNP TSC0026496
aaatttagtaat

SEQ ID NO: 314679 - DNA, 12 bp, Artificial Sequence
  Oligonucleotide primer for the detection of SNP TSC0026496
aaacctaacaat

SEQ ID NO: 314680 - DNA, 12 bp, Artificial Sequence
  Oligonucleotide primer for the detection of SNP TSC0026497
aacaaaataaac

SEQ ID NO: 314681 - DNA, 12 bp, Artificial Sequence
  Oligonucleotide primer for the detection of SNP TSC0026497
tgggagtagtaa

SEQ ID NO: 314682 - DNA, 12 bp, Artificial Sequence
  Oligonucleotide primer for the detection of SNP TSC0026498
aaaaattcctta

SEQ ID NO: 314683 - DNA, 12 bp, Artificial Sequence
  Oligonucleotide primer for the detection of SNP TSC0026498
ttaggtttagtt

SEQ ID NO: 314684 - DNA, 12 bp, Artificial Sequence
  Oligonucleotide primer for the detection of SNP TSC0026498
ccaaactcaacc

SEQ ID NO: 314685 - DNA, 12 bp, Artificial Sequence
  Oligonucleotide primer for the detection of SNP TSC0026499
aatcaaccttcc

SEQ ID NO: 314686 - DNA, 12 bp, Artificial Sequence
  Oligonucleotide primer for the detection of SNP TSC0026499
ttgtatatttag

SEQ ID NO: 314687 - DNA, 12 bp, Artificial Sequence
  Oligonucleotide primer for the detection of SNP TSC0026499
ttatatattcaa

SEQ ID NO: 314688 - DNA, 12 bp, Artificial Sequence
  Oligonukleotid-Primer
gattagtttttt

SEQ ID NO: 314689 - DNA, 12 bp, Artificial Sequence
  Oligonucleotide primer for the detection of SNP TSC0026505
aatactatacaa

SEQ ID NO: 314690 - DNA, 12 bp, Artificial Sequence
  Oligonucleotide primer for the detection of SNP TSC0026509
ttatttcaaact

SEQ ID NO: 314691 - DNA, 12 bp, Artificial Sequence
  Oligonucleotide primer for the detection of SNP TSC0026509
atatagattaga

SEQ ID NO: 314692 - DNA, 12 bp, Artificial Sequence
  Oligonucleotide primer for the detection of SNP TSC0026510
ttacctaaaaac

SEQ ID NO: 314693 - DNA, 12 bp, Artificial Sequence
  Oligonucleotide primer for the detection of SNP TSC0026510
tttccttccctt

SEQ ID NO: 314694 - DNA, 12 bp, Artificial Sequence
  Oligonucleotide primer for the detection of SNP TSC0026510
ttgtttaaaagt

SEQ ID NO: 314695 - DNA, 12 bp, Artificial Sequence
  Oligonucleotide primer for the detection of SNP TSC0026513
tccttttctcac

SEQ ID NO: 314696 - DNA, 12 bp, Artificial Sequence
  Oligonucleotide primer for the detection of SNP TSC0026513
taaggagatata

SEQ ID NO: 314697 - DNA, 12 bp, Artificial Sequence
  Oligonucleotide primer for the detection of SNP TSC0026513
caaaaaaacaca

SEQ ID NO: 314698 - DNA, 12 bp, Artificial Sequence
  Oligonucleotide primer for the detection of SNP TSC0026514
ctcaaatctacc

SEQ ID NO: 314699 - DNA, 12 bp, Artificial Sequence
  Oligonucleotide primer for the detection of SNP TSC0026514
cctattttcaaa

SEQ ID NO: 314700 - DNA, 12 bp, Artificial Sequence
  Oligonucleotide primer for the detection of SNP TSC0026517
atatcccctact

SEQ ID NO: 314701 - DNA, 12 bp, Artificial Sequence
  Oligonucleotide primer for the detection of SNP TSC0026517
ttttagttttga

SEQ ID NO: 314702 - DNA, 12 bp, Artificial Sequence
  Oligonucleotide primer for the detection of SNP TSC0026517
tctcaaccctaa

SEQ ID NO: 314703 - DNA, 12 bp, Artificial Sequence
  Oligonucleotide primer for the detection of SNP TSC0026521
aaaatacaccca

SEQ ID NO: 314704 - DNA, 12 bp, Artificial Sequence
  Oligonucleotide primer for the detection of SNP TSC0026521
aaaatacacccg

SEQ ID NO: 314705 - DNA, 12 bp, Artificial Sequence
  Oligonucleotide primer for the detection of SNP TSC0026521
gatatggagggt

SEQ ID NO: 314706 - DNA, 12 bp, Artificial Sequence
  Oligonucleotide primer for the detection of SNP TSC0026521
aaaatgtatttg

SEQ ID NO: 314707 - DNA, 12 bp, Artificial Sequence
  Oligonucleotide primer for the detection of SNP TSC0026521
aaaatgtattcg

SEQ ID NO: 314708 - DNA, 12 bp, Artificial Sequence
  Oligonukleotid-Primer
tattatcactcc

SEQ ID NO: 314709 - DNA, 12 bp, Artificial Sequence
  Oligonucleotide primer for the detection of SNP TSC0026522
tattatcgctcc

SEQ ID NO: 314710 - DNA, 12 bp, Artificial Sequence
  Oligonucleotide primer for the detection of SNP TSC0026522
atgtgttaggtg

SEQ ID NO: 314711 - DNA, 12 bp, Artificial Sequence
  Oligonucleotide primer for the detection of SNP TSC0026526
cataactccttt

SEQ ID NO: 314712 - DNA, 12 bp, Artificial Sequence
  Oligonucleotide primer for the detection of SNP TSC0026526
cgtaactccttt

SEQ ID NO: 314713 - DNA, 12 bp, Artificial Sequence
  Oligonucleotide primer for the detection of SNP TSC0026526
tgttttatttaa

SEQ ID NO: 314714 - DNA, 12 bp, Artificial Sequence
  Oligonucleotide primer for the detection of SNP TSC0026527
attttcttctcc

SEQ ID NO: 314715 - DNA, 12 bp, Artificial Sequence
  Oligonucleotide primer for the detection of SNP TSC0026527
ggaaaaattgaa

SEQ ID NO: 314716 - DNA, 12 bp, Artificial Sequence
  Oligonucleotide primer for the detection of SNP TSC0026530
tatcaactccaa

SEQ ID NO: 314717 - DNA, 12 bp, Artificial Sequence
  Oligonucleotide primer for the detection of SNP TSC0026530
gatgaagtgggt

SEQ ID NO: 314718 - DNA, 12 bp, Artificial Sequence
  Oligonucleotide primer for the detection of SNP TSC0026530
gatgaagcgggt

SEQ ID NO: 314719 - DNA, 12 bp, Artificial Sequence
  Oligonucleotide primer for the detection of SNP TSC0026530
aataaaacaaac

SEQ ID NO: 314720 - DNA, 12 bp, Artificial Sequence
  Oligonucleotide primer for the detection of SNP TSC0026530
aataaaacgaac

SEQ ID NO: 314721 - DNA, 12 bp, Artificial Sequence
  Oligonucleotide primer for the detection of SNP TSC0026532
taaatttaacta

SEQ ID NO: 314722 - DNA, 12 bp, Artificial Sequence
  Oligonucleotide primer for the detection of SNP TSC0026532
taatttattttt

SEQ ID NO: 314723 - DNA, 12 bp, Artificial Sequence
  Oligonucleotide primer for the detection of SNP TSC0026532
tataattcactc

SEQ ID NO: 314724 - DNA, 12 bp, Artificial Sequence
  Oligonucleotide primer for the detection of SNP TSC0026532
taaatttgattg

SEQ ID NO: 314725 - DNA, 12 bp, Artificial Sequence
  Oligonucleotide primer for the detection of SNP TSC0026533
tatataacaata

SEQ ID NO: 314726 - DNA, 12 bp, Artificial Sequence
  Oligonucleotide primer for the detection of SNP TSC0026533
gggagtttatgt

SEQ ID NO: 314727 - DNA, 12 bp, Artificial Sequence
  Oligonucleotide primer for the detection of SNP TSC0026533
tgtatggtaatg

SEQ ID NO: 314728 - DNA, 12 bp, Artificial Sequence
  Oligonucleotide primer for the detection of SNP TSC0026534
ctataattatct

SEQ ID NO: 314729 - DNA, 12 bp, Artificial Sequence
  Oligonucleotide primer for the detection of SNP TSC0026534
ttgtaaatattg

SEQ ID NO: 314730 - DNA, 12 bp, Artificial Sequence
  Oligonucleotide primer for the detection of SNP TSC0026540
cctacttatttt

SEQ ID NO: 314731 - DNA, 12 bp, Artificial Sequence
  Oligonucleotide primer for the detection of SNP TSC0026540
ggaaagaaaagg

SEQ ID NO: 314732 - DNA, 12 bp, Artificial Sequence
  Oligonucleotide primer for the detection of SNP TSC0026541
ataacataatta

SEQ ID NO: 314733 - DNA, 12 bp, Artificial Sequence
  Oligonucleotide primer for the detection of SNP TSC0026541
taaattattaat

SEQ ID NO: 314734 - DNA, 12 bp, Artificial Sequence
  Oligonucleotide primer for the detection of SNP TSC0026541
taaatcaccaac

SEQ ID NO: 314735 - DNA, 12 bp, Artificial Sequence
  Oligonucleotide primer for the detection of SNP TSC0026541
agtgatatgatt

SEQ ID NO: 314736 - DNA, 12 bp, Artificial Sequence
  Oligonucleotide primer for the detection of SNP TSC0026542
ataactaaatat

SEQ ID NO: 314737 - DNA, 12 bp, Artificial Sequence
  Oligonucleotide primer for the detection of SNP TSC0026542
gtttttttagta

SEQ ID NO: 314738 - DNA, 12 bp, Artificial Sequence
  Oligonucleotide primer for the detection of SNP TSC0026542
acttctccaata

SEQ ID NO: 314739 - DNA, 12 bp, Artificial Sequence
  Oligonucleotide primer for the detection of SNP TSC0026542
gtggttaagtgt

SEQ ID NO: 314740 - DNA, 12 bp, Artificial Sequence
  Oligonucleotide primer for the detection of SNP TSC0026543
aaaaacatcatc

SEQ ID NO: 314741 - DNA, 12 bp, Artificial Sequence
  Oligonucleotide primer for the detection of SNP TSC0026543
aaaaacgtcatc

SEQ ID NO: 314742 - DNA, 12 bp, Artificial Sequence
  Oligonucleotide primer for the detection of SNP TSC0026543
agggtgttattt

SEQ ID NO: 314743 - DNA, 12 bp, Artificial Sequence
  Oligonucleotide primer for the detection of SNP TSC0026543
agggcgttattt

SEQ ID NO: 314744 - DNA, 12 bp, Artificial Sequence
  Oligonucleotide primer for the detection of SNP TSC0026545
aaaaccatacca

SEQ ID NO: 314745 - DNA, 12 bp, Artificial Sequence
  Oligonucleotide primer for the detection of SNP TSC0026545
taatagatttta

SEQ ID NO: 314746 - DNA, 12 bp, Artificial Sequence
  Oligonucleotide primer for the detection of SNP TSC0026545
taacaaatttca

SEQ ID NO: 314747 - DNA, 12 bp, Artificial Sequence
  Oligonucleotide primer for the detection of SNP TSC0026545
agagttatgtta

SEQ ID NO: 314748 - DNA, 12 bp, Artificial Sequence
  Oligonucleotide primer for the detection of SNP TSC0026546
ttctcctataaa

SEQ ID NO: 314749 - DNA, 12 bp, Artificial Sequence
  Oligonucleotide primer for the detection of SNP TSC0026546
atttttttaatt

SEQ ID NO: 314750 - DNA, 12 bp, Artificial Sequence
  Oligonucleotide primer for the detection of SNP TSC0026546
atttttctaatc

SEQ ID NO: 314751 - DNA, 12 bp, Artificial Sequence
  Oligonucleotide primer for the detection of SNP TSC0026548
acatcatcacac

SEQ ID NO: 314752 - DNA, 12 bp, Artificial Sequence
  Oligonucleotide primer for the detection of SNP TSC0026548
acatcatcacgc

SEQ ID NO: 314753 - DNA, 12 bp, Artificial Sequence
  Oligonucleotide primer for the detection of SNP TSC0026548
acatcatcgcac

SEQ ID NO: 314754 - DNA, 12 bp, Artificial Sequence
  Oligonucleotide primer for the detection of SNP TSC0026548
acgtcatcacac

SEQ ID NO: 314755 - DNA, 12 bp, Artificial Sequence
  Oligonucleotide primer for the detection of SNP TSC0026548
gcatcatcacac

SEQ ID NO: 314756 - DNA, 12 bp, Artificial Sequence
  Oligonucleotide primer for the detection of SNP TSC0026548
acatcatcgcgc

SEQ ID NO: 314757 - DNA, 12 bp, Artificial Sequence
  Oligonucleotide primer for the detection of SNP TSC0026548
acgtcatcacgc

SEQ ID NO: 314758 - DNA, 12 bp, Artificial Sequence
  Oligonucleotide primer for the detection of SNP TSC0026548
gcatcatcacgc

SEQ ID NO: 314759 - DNA, 12 bp, Artificial Sequence
  Oligonucleotide primer for the detection of SNP TSC0026548
acgtcatcgcac

SEQ ID NO: 314760 - DNA, 12 bp, Artificial Sequence
  Oligonucleotide primer for the detection of SNP TSC0026548
gcatcatcgcac

SEQ ID NO: 314761 - DNA, 12 bp, Artificial Sequence
  Oligonucleotide primer for the detection of SNP TSC0026548
gcgtcatcacac

SEQ ID NO: 314762 - DNA, 12 bp, Artificial Sequence
  Oligonucleotide primer for the detection of SNP TSC0026548
acgtcatcgcgc

SEQ ID NO: 314763 - DNA, 12 bp, Artificial Sequence
  Oligonucleotide primer for the detection of SNP TSC0026548
gcatcatcgcgc

SEQ ID NO: 314764 - DNA, 12 bp, Artificial Sequence
  Oligonucleotide primer for the detection of SNP TSC0026548
gcgtcatcacgc

SEQ ID NO: 314765 - DNA, 12 bp, Artificial Sequence
  Oligonucleotide primer for the detection of SNP TSC0026548
gcgtcatcgcac

SEQ ID NO: 314766 - DNA, 12 bp, Artificial Sequence
  Oligonucleotide primer for the detection of SNP TSC0026548
gcgtcatcgcgc

SEQ ID NO: 314767 - DNA, 12 bp, Artificial Sequence
  Oligonucleotide primer for the detection of SNP TSC0026548
tgatgtggtggg

SEQ ID NO: 314768 - DNA, 12 bp, Artificial Sequence
  Oligonucleotide primer for the detection of SNP TSC0026548
tgacgtggtggg

SEQ ID NO: 314769 - DNA, 12 bp, Artificial Sequence
  Oligonucleotide primer for the detection of SNP TSC0026548
tgatgtggcggg

SEQ ID NO: 314770 - DNA, 12 bp, Artificial Sequence
  Oligonucleotide primer for the detection of SNP TSC0026548
tgacgtggcggg

SEQ ID NO: 314771 - DNA, 12 bp, Artificial Sequence
  Oligonucleotide primer for the detection of SNP TSC0026548
taacataacaaa

SEQ ID NO: 314772 - DNA, 12 bp, Artificial Sequence
  Oligonucleotide primer for the detection of SNP TSC0026548
taacataacgaa

SEQ ID NO: 314773 - DNA, 12 bp, Artificial Sequence
  Oligonucleotide primer for the detection of SNP TSC0026548
taacgtaacaaa

SEQ ID NO: 314774 - DNA, 12 bp, Artificial Sequence
  Oligonucleotide primer for the detection of SNP TSC0026548
taacgtaacgaa

SEQ ID NO: 314775 - DNA, 12 bp, Artificial Sequence
  Oligonucleotide primer for the detection of SNP TSC0026548
gtgttattgtgt

SEQ ID NO: 314776 - DNA, 12 bp, Artificial Sequence
  Oligonucleotide primer for the detection of SNP TSC0026548
gcgttattgtgt

SEQ ID NO: 314777 - DNA, 12 bp, Artificial Sequence
  Oligonucleotide primer for the detection of SNP TSC0026548
gtgttatcgtgt

SEQ ID NO: 314778 - DNA, 12 bp, Artificial Sequence
  Oligonucleotide primer for the detection of SNP TSC0026548
gtgttattgcgt

SEQ ID NO: 314779 - DNA, 12 bp, Artificial Sequence
  Oligonucleotide primer for the detection of SNP TSC0026548
gtgttattgtgc

SEQ ID NO: 314780 - DNA, 12 bp, Artificial Sequence
  Oligonucleotide primer for the detection of SNP TSC0026548
gcgttatcgtgt

SEQ ID NO: 314781 - DNA, 12 bp, Artificial Sequence
  Oligonucleotide primer for the detection of SNP TSC0026548
gcgttattgcgt

SEQ ID NO: 314782 - DNA, 12 bp, Artificial Sequence
  Oligonucleotide primer for the detection of SNP TSC0026548
gcgttattgtgc

SEQ ID NO: 314783 - DNA, 12 bp, Artificial Sequence
  Oligonucleotide primer for the detection of SNP TSC0026548
gtgttatcgcgt

SEQ ID NO: 314784 - DNA, 12 bp, Artificial Sequence
  Oligonucleotide primer for the detection of SNP TSC0026548
gtgttatcgtgc

SEQ ID NO: 314785 - DNA, 12 bp, Artificial Sequence
  Oligonucleotide primer for the detection of SNP TSC0026548
gtgttattgcgc

SEQ ID NO: 314786 - DNA, 12 bp, Artificial Sequence
  Oligonucleotide primer for the detection of SNP TSC0026548
gcgttatcgcgt

SEQ ID NO: 314787 - DNA, 12 bp, Artificial Sequence
  Oligonucleotide primer for the detection of SNP TSC0026548
gcgttatcgtgc

SEQ ID NO: 314788 - DNA, 12 bp, Artificial Sequence
  Oligonucleotide primer for the detection of SNP TSC0026548
gcgttattgcgc

SEQ ID NO: 314789 - DNA, 12 bp, Artificial Sequence
  Oligonucleotide primer for the detection of SNP TSC0026548
gtgttatcgcgc

SEQ ID NO: 314790 - DNA, 12 bp, Artificial Sequence
  Oligonucleotide primer for the detection of SNP TSC0026548
gcgttatcgcgc

SEQ ID NO: 314791 - DNA, 12 bp, Artificial Sequence
  Oligonucleotide primer for the detection of SNP TSC0026549
accacaataact

SEQ ID NO: 314792 - DNA, 12 bp, Artificial Sequence
  Oligonucleotide primer for the detection of SNP TSC0026549
gtgtttattttt

SEQ ID NO: 314793 - DNA, 12 bp, Artificial Sequence
  Oligonucleotide primer for the detection of SNP TSC0026549
ataatacttact

SEQ ID NO: 314794 - DNA, 12 bp, Artificial Sequence
  Oligonucleotide primer for the detection of SNP TSC0026549
gttatagtgatt

SEQ ID NO: 314795 - DNA, 12 bp, Artificial Sequence
  Oligonucleotide primer for the detection of SNP TSC0026552
accaccgcaccc

SEQ ID NO: 314796 - DNA, 12 bp, Artificial Sequence
  Oligonucleotide primer for the detection of SNP TSC0026552
aaaaaaatattg

SEQ ID NO: 314797 - DNA, 12 bp, Artificial Sequence
  Oligonucleotide primer for the detection of SNP TSC0026552
aaaaaaatatcg

SEQ ID NO: 314798 - DNA, 12 bp, Artificial Sequence
  Oligonucleotide primer for the detection of SNP TSC0026556
acttccctacct

SEQ ID NO: 314799 - DNA, 12 bp, Artificial Sequence
  Oligonucleotide primer for the detection of SNP TSC0026556
agtataagataa

SEQ ID NO: 314800 - DNA, 12 bp, Artificial Sequence
  Oligonucleotide primer for the detection of SNP TSC0026557
gattttgattta

SEQ ID NO: 314801 - DNA, 12 bp, Artificial Sequence
  Oligonucleotide primer for the detection of SNP TSC0026558
atggatatttag

SEQ ID NO: 314802 - DNA, 12 bp, Artificial Sequence
  Oligonucleotide primer for the detection of SNP TSC0026558
ttttatgttttt

SEQ ID NO: 314803 - DNA, 12 bp, Artificial Sequence
  Oligonucleotide primer for the detection of SNP TSC0026560
ataaacatatat

SEQ ID NO: 314804 - DNA, 12 bp, Artificial Sequence
  Oligonucleotide primer for the detection of SNP TSC0026560
tatatatgattg

SEQ ID NO: 314805 - DNA, 12 bp, Artificial Sequence
  Oligonucleotide primer for the detection of SNP TSC0026562
tattgtattttt

SEQ ID NO: 314806 - DNA, 12 bp, Artificial Sequence
  Oligonucleotide primer for the detection of SNP TSC0026562
tatcgtattttt

SEQ ID NO: 314807 - DNA, 12 bp, Artificial Sequence
  Oligonucleotide primer for the detection of SNP TSC0026562
tattgtattttc

SEQ ID NO: 314808 - DNA, 12 bp, Artificial Sequence
  Oligonucleotide primer for the detection of SNP TSC0026562
tatcgtattttc

SEQ ID NO: 314809 - DNA, 12 bp, Artificial Sequence
  Oligonucleotide primer for the detection of SNP TSC0026562
caccacaccccc

SEQ ID NO: 314810 - DNA, 12 bp, Artificial Sequence
  Oligonucleotide primer for the detection of SNP TSC0026562
caccgcaccccc

SEQ ID NO: 314811 - DNA, 12 bp, Artificial Sequence
  Oligonucleotide primer for the detection of SNP TSC0026562
taggaggtaggt

SEQ ID NO: 314812 - DNA, 12 bp, Artificial Sequence
  Oligonucleotide primer for the detection of SNP TSC0026563
ctcaacaaacac

SEQ ID NO: 314813 - DNA, 12 bp, Artificial Sequence
  Oligonucleotide primer for the detection of SNP TSC0026563
ctcgacaaacac

SEQ ID NO: 314814 - DNA, 12 bp, Artificial Sequence
  Oligonucleotide primer for the detection of SNP TSC0026563
ttggggttgagg

SEQ ID NO: 314815 - DNA, 12 bp, Artificial Sequence
  Oligonucleotide primer for the detection of SNP TSC0026563
tttgataggtat

SEQ ID NO: 314816 - DNA, 12 bp, Artificial Sequence
  Oligonucleotide primer for the detection of SNP TSC0026563
ttcgataggtat

SEQ ID NO: 314817 - DNA, 12 bp, Artificial Sequence
  Oligonucleotide primer for the detection of SNP TSC0026564
tagtttttaatt

SEQ ID NO: 314818 - DNA, 12 bp, Artificial Sequence
  Oligonukleotid-Primer
taatttccaatt

SEQ ID NO: 314819 - DNA, 12 bp, Artificial Sequence
  Oligonucleotide primer for the detection of SNP TSC0026564
agaggttattaa

SEQ ID NO: 314820 - DNA, 12 bp, Artificial Sequence
  Oligonucleotide primer for the detection of SNP TSC0026565
tataaaatcccc

SEQ ID NO: 314821 - DNA, 12 bp, Artificial Sequence
  Oligonucleotide primer for the detection of SNP TSC0026565
atttggggttgg

SEQ ID NO: 314822 - DNA, 12 bp, Artificial Sequence
  Oligonukleotid-Primer
aataatcataat

SEQ ID NO: 314823 - DNA, 12 bp, Artificial Sequence
  Oligonucleotide primer for the detection of SNP TSC0026567
taatattttttt

SEQ ID NO: 314824 - DNA, 12 bp, Artificial Sequence
  Oligonucleotide primer for the detection of SNP TSC0026569
atctatactaaa

SEQ ID NO: 314825 - DNA, 12 bp, Artificial Sequence
  Oligonucleotide primer for the detection of SNP TSC0026569
tagaaaggattt

SEQ ID NO: 314826 - DNA, 12 bp, Artificial Sequence
  Oligonucleotide primer for the detection of SNP TSC0026569
atttgtattgag

SEQ ID NO: 314827 - DNA, 12 bp, Artificial Sequence
  Oligonucleotide primer for the detection of SNP TSC0026570
tcatatataaaa

SEQ ID NO: 314828 - DNA, 12 bp, Artificial Sequence
  Oligonucleotide primer for the detection of SNP TSC0026570
agaatatttatt

SEQ ID NO: 314829 - DNA, 12 bp, Artificial Sequence
  Oligonucleotide primer for the detection of SNP TSC0026570
aaatatctatta

SEQ ID NO: 314830 - DNA, 12 bp, Artificial Sequence
  Oligonucleotide primer for the detection of SNP TSC0026570
ttatgtataaag

SEQ ID NO: 314831 - DNA, 12 bp, Artificial Sequence
  Oligonucleotide primer for the detection of SNP TSC0026571
ccaaattatcct

SEQ ID NO: 314832 - DNA, 12 bp, Artificial Sequence
  Oligonucleotide primer for the detection of SNP TSC0026571
tatgtatatatg

SEQ ID NO: 314833 - DNA, 12 bp, Artificial Sequence
  Oligonucleotide primer for the detection of SNP TSC0026572
cacaaaactaca

SEQ ID NO: 314834 - DNA, 12 bp, Artificial Sequence
  Oligonucleotide primer for the detection of SNP TSC0026572
atttggtttttt

SEQ ID NO: 314835 - DNA, 12 bp, Artificial Sequence
  Oligonucleotide primer for the detection of SNP TSC0026572
acttaacctctt

SEQ ID NO: 314836 - DNA, 12 bp, Artificial Sequence
  Oligonucleotide primer for the detection of SNP TSC0026572
tatagaattgta

SEQ ID NO: 314837 - DNA, 12 bp, Artificial Sequence
  Oligonucleotide primer for the detection of SNP TSC0026573
cttcaaactcaa

SEQ ID NO: 314838 - DNA, 12 bp, Artificial Sequence
  Oligonucleotide primer for the detection of SNP TSC0026573
ggtgatttaagt

SEQ ID NO: 314839 - DNA, 12 bp, Artificial Sequence
  Oligonucleotide primer for the detection of SNP TSC0026573
aataacccaaat

SEQ ID NO: 314840 - DNA, 12 bp, Artificial Sequence
  Oligonucleotide primer for the detection of SNP TSC0026576
tctaaatatata

SEQ ID NO: 314841 - DNA, 12 bp, Artificial Sequence
  Oligonucleotide primer for the detection of SNP TSC0026576
tggaaaaaaaaa

SEQ ID NO: 314842 - DNA, 12 bp, Artificial Sequence
  Oligonucleotide primer for the detection of SNP TSC0026576
tttggatatgtg

SEQ ID NO: 314843 - DNA, 12 bp, Artificial Sequence
  Oligonucleotide primer for the detection of SNP TSC0026577
atttcaaaaaat

SEQ ID NO: 314844 - DNA, 12 bp, Artificial Sequence
  Oligonucleotide primer for the detection of SNP TSC0026577
tgttttggttag

SEQ ID NO: 314845 - DNA, 12 bp, Artificial Sequence
  Oligonucleotide primer for the detection of SNP TSC0026577
tactctaaccaa

SEQ ID NO: 314846 - DNA, 12 bp, Artificial Sequence
  Oligonucleotide primer for the detection of SNP TSC0026577
attttagagggt

SEQ ID NO: 314847 - DNA, 12 bp, Artificial Sequence
  Oligonucleotide primer for the detection of SNP TSC0026578
tatagtgttata

SEQ ID NO: 314848 - DNA, 12 bp, Artificial Sequence
  Oligonucleotide primer for the detection of SNP TSC0026579
tgtggtgtataa

SEQ ID NO: 314849 - DNA, 12 bp, Artificial Sequence
  Oligonucleotide primer for the detection of SNP TSC0026579
cgtggtgtataa

SEQ ID NO: 314850 - DNA, 12 bp, Artificial Sequence
  Oligonucleotide primer for the detection of SNP TSC0026580
tataattaacat

SEQ ID NO: 314851 - DNA, 12 bp, Artificial Sequence
  Oligonucleotide primer for the detection of SNP TSC0026580
agatttatataa

SEQ ID NO: 314852 - DNA, 12 bp, Artificial Sequence
  Oligonucleotide primer for the detection of SNP TSC0026582
aaccatcctccc

SEQ ID NO: 314853 - DNA, 12 bp, Artificial Sequence
  Oligonucleotide primer for the detection of SNP TSC0026582
gggaggttaatg

SEQ ID NO: 314854 - DNA, 12 bp, Artificial Sequence
  Oligonucleotide primer for the detection of SNP TSC0026582
gggaggttaacg

SEQ ID NO: 314855 - DNA, 12 bp, Artificial Sequence
  Oligonucleotide primer for the detection of SNP TSC0026582
aaaaaaccaacg

SEQ ID NO: 314856 - DNA, 12 bp, Artificial Sequence
  Oligonucleotide primer for the detection of SNP TSC0026584
tgtattttagaa

SEQ ID NO: 314857 - DNA, 12 bp, Artificial Sequence
  Oligonucleotide primer for the detection of SNP TSC0026585
taaatttttacc

SEQ ID NO: 314858 - DNA, 12 bp, Artificial Sequence
  Oligonucleotide primer for the detection of SNP TSC0026585
ttaagtatggga

SEQ ID NO: 314859 - DNA, 12 bp, Artificial Sequence
  Oligonucleotide primer for the detection of SNP TSC0026586
aacaaattactt

SEQ ID NO: 314860 - DNA, 12 bp, Artificial Sequence
  Oligonucleotide primer for the detection of SNP TSC0026586
aaagatttggta

SEQ ID NO: 314861 - DNA, 12 bp, Artificial Sequence
  Oligonucleotide primer for the detection of SNP TSC0026587
tatatatttttc

SEQ ID NO: 314862 - DNA, 12 bp, Artificial Sequence
  Oligonucleotide primer for the detection of SNP TSC0026587
tataatagttta

SEQ ID NO: 314863 - DNA, 12 bp, Artificial Sequence
  Oligonucleotide primer for the detection of SNP TSC0026588
aaaatttaaatc

SEQ ID NO: 314864 - DNA, 12 bp, Artificial Sequence
  Oligonucleotide primer for the detection of SNP TSC0026588
tatgatttttta

SEQ ID NO: 314865 - DNA, 12 bp, Artificial Sequence
  Oligonucleotide primer for the detection of SNP TSC0026589
attaatctatca

SEQ ID NO: 314866 - DNA, 12 bp, Artificial Sequence
  Oligonucleotide primer for the detection of SNP TSC0026589
agagaaaatagt

SEQ ID NO: 314867 - DNA, 12 bp, Artificial Sequence
  Oligonucleotide primer for the detection of SNP TSC0026589
aaaaaaaacaat

SEQ ID NO: 314868 - DNA, 12 bp, Artificial Sequence
  Oligonucleotide primer for the detection of SNP TSC0026589
gttaatttatta

SEQ ID NO: 314869 - DNA, 12 bp, Artificial Sequence
  Oligonucleotide primer for the detection of SNP TSC0026591
ctactaaactaa

SEQ ID NO: 314870 - DNA, 12 bp, Artificial Sequence
  Oligonucleotide primer for the detection of SNP TSC0026591
tttgagggtgaa

SEQ ID NO: 314871 - DNA, 12 bp, Artificial Sequence
  Oligonucleotide primer for the detection of SNP TSC0026591
ttgttgggttgg

SEQ ID NO: 314872 - DNA, 12 bp, Artificial Sequence
  Oligonucleotide primer for the detection of SNP TSC0026596
taccctacatct

SEQ ID NO: 314873 - DNA, 12 bp, Artificial Sequence
  Oligonucleotide primer for the detection of SNP TSC0026596
agtatttggtga

SEQ ID NO: 314874 - DNA, 12 bp, Artificial Sequence
  Oligonucleotide primer for the detection of SNP TSC0026596
agtattcggtga

SEQ ID NO: 314875 - DNA, 12 bp, Artificial Sequence
  Oligonucleotide primer for the detection of SNP TSC0026596
aacattcaataa

SEQ ID NO: 314876 - DNA, 12 bp, Artificial Sequence
  Oligonucleotide primer for the detection of SNP TSC0026596
aacattcgataa

SEQ ID NO: 314877 - DNA, 12 bp, Artificial Sequence
  Oligonucleotide primer for the detection of SNP TSC0026596
tattttgtattt

SEQ ID NO: 314878 - DNA, 12 bp, Artificial Sequence
  Oligonucleotide primer for the detection of SNP TSC0026599
taaaaaacctcc

SEQ ID NO: 314879 - DNA, 12 bp, Artificial Sequence
  Oligonucleotide primer for the detection of SNP TSC0026599
agtttttggagg

SEQ ID NO: 314880 - DNA, 12 bp, Artificial Sequence
  Oligonucleotide primer for the detection of SNP TSC0026599
tggaaggttttt

SEQ ID NO: 314881 - DNA, 12 bp, Artificial Sequence
  Oligonucleotide primer for the detection of SNP TSC0026600
tttagatatttg

SEQ ID NO: 314882 - DNA, 12 bp, Artificial Sequence
  Oligonucleotide primer for the detection of SNP TSC0026600
tccaaacatcta

SEQ ID NO: 314883 - DNA, 12 bp, Artificial Sequence
  Oligonucleotide primer for the detection of SNP TSC0026600
ggagagtttaga

SEQ ID NO: 314884 - DNA, 12 bp, Artificial Sequence
  Oligonucleotide primer for the detection of SNP TSC0026601
aaatataataga

SEQ ID NO: 314885 - DNA, 12 bp, Artificial Sequence
  Oligonucleotide primer for the detection of SNP TSC0026602
ttaaagtagtgg

SEQ ID NO: 314886 - DNA, 12 bp, Artificial Sequence
  Oligonucleotide primer for the detection of SNP TSC0026602
ccaaaacaataa

SEQ ID NO: 314887 - DNA, 12 bp, Artificial Sequence
  Oligonucleotide primer for the detection of SNP TSC0026602
agggagggtggg

SEQ ID NO: 314888 - DNA, 12 bp, Artificial Sequence
  Oligonucleotide primer for the detection of SNP TSC0026607
actattcttcac

SEQ ID NO: 314889 - DNA, 12 bp, Artificial Sequence
  Oligonucleotide primer for the detection of SNP TSC0026607
attttttaagaa

SEQ ID NO: 314890 - DNA, 12 bp, Artificial Sequence
  Oligonucleotide primer for the detection of SNP TSC0026608
tgtttttgggtg

SEQ ID NO: 314891 - DNA, 12 bp, Artificial Sequence
  Oligonucleotide primer for the detection of SNP TSC0026612
ttataaaaaatc

SEQ ID NO: 314892 - DNA, 12 bp, Artificial Sequence
  Oligonucleotide primer for the detection of SNP TSC0026612
gtagtttgtgtg

SEQ ID NO: 314893 - DNA, 12 bp, Artificial Sequence
  Oligonucleotide primer for the detection of SNP TSC0026615
atacatatatat

SEQ ID NO: 314894 - DNA, 12 bp, Artificial Sequence
  Oligonucleotide primer for the detection of SNP TSC0026615
atacgtatatat

SEQ ID NO: 314895 - DNA, 12 bp, Artificial Sequence
  Oligonucleotide primer for the detection of SNP TSC0026615
atatatgtgata

SEQ ID NO: 314896 - DNA, 12 bp, Artificial Sequence
  Oligonucleotide primer for the detection of SNP TSC0026615
atatacgtgata

SEQ ID NO: 314897 - DNA, 12 bp, Artificial Sequence
  Oligonucleotide primer for the detection of SNP TSC0026615
acacacataaca

SEQ ID NO: 314898 - DNA, 12 bp, Artificial Sequence
  Oligonucleotide primer for the detection of SNP TSC0026615
acacacgtaaca

SEQ ID NO: 314899 - DNA, 12 bp, Artificial Sequence
  Oligonucleotide primer for the detection of SNP TSC0026616
tgataaatatat

SEQ ID NO: 314900 - DNA, 12 bp, Artificial Sequence
  Oligonucleotide primer for the detection of SNP TSC0026616
taacaaacacac

SEQ ID NO: 314901 - DNA, 12 bp, Artificial Sequence
  Oligonucleotide primer for the detection of SNP TSC0026618
tttaactaccac

SEQ ID NO: 314902 - DNA, 12 bp, Artificial Sequence
  Oligonucleotide primer for the detection of SNP TSC0026618
tttattgtttta

SEQ ID NO: 314903 - DNA, 12 bp, Artificial Sequence
  Oligonucleotide primer for the detection of SNP TSC0026619
tttctaaactaa

SEQ ID NO: 314904 - DNA, 12 bp, Artificial Sequence
  Oligonucleotide primer for the detection of SNP TSC0026619
tattgatattat

SEQ ID NO: 314905 - DNA, 12 bp, Artificial Sequence
  Oligonucleotide primer for the detection of SNP TSC0026619
cattaacaccac

SEQ ID NO: 314906 - DNA, 12 bp, Artificial Sequence
  Oligonucleotide primer for the detection of SNP TSC0026619
tttttgagttga

SEQ ID NO: 314907 - DNA, 12 bp, Artificial Sequence
  Oligonucleotide primer for the detection of SNP TSC0026620
aaccacaattaa

SEQ ID NO: 314908 - DNA, 12 bp, Artificial Sequence
  Oligonucleotide primer for the detection of SNP TSC0026620
aaccgcaattaa

SEQ ID NO: 314909 - DNA, 12 bp, Artificial Sequence
  Oligonucleotide primer for the detection of SNP TSC0026620
cttcctaacccc

SEQ ID NO: 314910 - DNA, 12 bp, Artificial Sequence
  Oligonucleotide primer for the detection of SNP TSC0026620
tagttgtaattg

SEQ ID NO: 314911 - DNA, 12 bp, Artificial Sequence
  Oligonucleotide primer for the detection of SNP TSC0026620
tagtcgtaattg

SEQ ID NO: 314912 - DNA, 12 bp, Artificial Sequence
  Oligonucleotide primer for the detection of SNP TSC0026624
tatcccttttaa

SEQ ID NO: 314913 - DNA, 12 bp, Artificial Sequence
  Oligonucleotide primer for the detection of SNP TSC0026624
ggtttttattgt

SEQ ID NO: 314914 - DNA, 12 bp, Artificial Sequence
  Oligonucleotide primer for the detection of SNP TSC0026624
ggtttttatcgt

SEQ ID NO: 314915 - DNA, 12 bp, Artificial Sequence
  Oligonucleotide primer for the detection of SNP TSC0026624
aacccctaccat

SEQ ID NO: 314916 - DNA, 12 bp, Artificial Sequence
  Oligonucleotide primer for the detection of SNP TSC0026624
aacccctaccgt

SEQ ID NO: 314917 - DNA, 12 bp, Artificial Sequence
  Oligonucleotide primer for the detection of SNP TSC0026624
tgttttttttga

SEQ ID NO: 314918 - DNA, 12 bp, Artificial Sequence
  Oligonucleotide primer for the detection of SNP TSC0026627
ggatattggaga

SEQ ID NO: 314919 - DNA, 12 bp, Artificial Sequence
  Oligonucleotide primer for the detection of SNP TSC0026628
tttaacacaatt

SEQ ID NO: 314920 - DNA, 12 bp, Artificial Sequence
  Oligonucleotide primer for the detection of SNP TSC0026628
aattattaatta

SEQ ID NO: 314921 - DNA, 12 bp, Artificial Sequence
  Oligonucleotide primer for the detection of SNP TSC0026629
taatatttatga

SEQ ID NO: 314922 - DNA, 12 bp, Artificial Sequence
  Oligonucleotide primer for the detection of SNP TSC0026630
agttagttttat

SEQ ID NO: 314923 - DNA, 12 bp, Artificial Sequence
  Oligonucleotide primer for the detection of SNP TSC0026630
aaccaactctat

SEQ ID NO: 314924 - DNA, 12 bp, Artificial Sequence
  Oligonucleotide primer for the detection of SNP TSC0026630
gagaaagggtaa

SEQ ID NO: 314925 - DNA, 12 bp, Artificial Sequence
  Oligonucleotide primer for the detection of SNP TSC0026632
aaaaattcacta

SEQ ID NO: 314926 - DNA, 12 bp, Artificial Sequence
  Oligonucleotide primer for the detection of SNP TSC0026632
agaggttgtttt

SEQ ID NO: 314927 - DNA, 12 bp, Artificial Sequence
  Oligonucleotide primer for the detection of SNP TSC0026632
agaggtcgtttt

SEQ ID NO: 314928 - DNA, 12 bp, Artificial Sequence
  Oligonucleotide primer for the detection of SNP TSC0026632
aaaaaccacccc

SEQ ID NO: 314929 - DNA, 12 bp, Artificial Sequence
  Oligonucleotide primer for the detection of SNP TSC0026632
aaaaaccgcccc

SEQ ID NO: 314930 - DNA, 12 bp, Artificial Sequence
  Oligonucleotide primer for the detection of SNP TSC0026632
gggagtttatta

SEQ ID NO: 314931 - DNA, 12 bp, Artificial Sequence
  Oligonucleotide primer for the detection of SNP TSC0026635
ttattagagaaa

SEQ ID NO: 314932 - DNA, 12 bp, Artificial Sequence
  Oligonucleotide primer for the detection of SNP TSC0026640
tataaacaacct

SEQ ID NO: 314933 - DNA, 12 bp, Artificial Sequence
  Oligonucleotide primer for the detection of SNP TSC0026640
ctaaccccaaca

SEQ ID NO: 314934 - DNA, 12 bp, Artificial Sequence
  Oligonucleotide primer for the detection of SNP TSC0026640
gtggatagtttt

SEQ ID NO: 314935 - DNA, 12 bp, Artificial Sequence
  Oligonukleotid-Primer
gtggatagtttc

SEQ ID NO: 314936 - DNA, 12 bp, Artificial Sequence
  Oligonucleotide primer for the detection of SNP TSC0026643
ttcatcccaact

SEQ ID NO: 314937 - DNA, 12 bp, Artificial Sequence
  Oligonucleotide primer for the detection of SNP TSC0026643
atttatggggag

SEQ ID NO: 314938 - DNA, 12 bp, Artificial Sequence
  Oligonucleotide primer for the detection of SNP TSC0026644
attaaaaactcc

SEQ ID NO: 314939 - DNA, 12 bp, Artificial Sequence
  Oligonukleotid-Primer
aaattatgaagg

SEQ ID NO: 314940 - DNA, 12 bp, Artificial Sequence
  Oligonucleotide primer for the detection of SNP TSC0026646
ccacacccccac

SEQ ID NO: 314941 - DNA, 12 bp, Artificial Sequence
  Oligonucleotide primer for the detection of SNP TSC0026646
ccacgcccccac

SEQ ID NO: 314942 - DNA, 12 bp, Artificial Sequence
  Oligonucleotide primer for the detection of SNP TSC0026646
tggggtgtggtt

SEQ ID NO: 314943 - DNA, 12 bp, Artificial Sequence
  Oligonucleotide primer for the detection of SNP TSC0026646
cggggtgtggtt

SEQ ID NO: 314944 - DNA, 12 bp, Artificial Sequence
  Oligonucleotide primer for the detection of SNP TSC0026646
tggggcgtggtt

SEQ ID NO: 314945 - DNA, 12 bp, Artificial Sequence
  Oligonucleotide primer for the detection of SNP TSC0026646
cggggcgtggtt

SEQ ID NO: 314946 - DNA, 12 bp, Artificial Sequence
  Oligonucleotide primer for the detection of SNP TSC0026646
aaaacataacca

SEQ ID NO: 314947 - DNA, 12 bp, Artificial Sequence
  Oligonucleotide primer for the detection of SNP TSC0026646
aaaacgtaacca

SEQ ID NO: 314948 - DNA, 12 bp, Artificial Sequence
  Oligonucleotide primer for the detection of SNP TSC0026646
gaaacataacca

SEQ ID NO: 314949 - DNA, 12 bp, Artificial Sequence
  Oligonucleotide primer for the detection of SNP TSC0026646
gaaacgtaacca

SEQ ID NO: 314950 - DNA, 12 bp, Artificial Sequence
  Oligonucleotide primer for the detection of SNP TSC0026646
ttatgtttttat

SEQ ID NO: 314951 - DNA, 12 bp, Artificial Sequence
  Oligonucleotide primer for the detection of SNP TSC0026646
ttacgtttttat

SEQ ID NO: 314952 - DNA, 12 bp, Artificial Sequence
  Oligonucleotide primer for the detection of SNP TSC0026647
cacttttccaaa

SEQ ID NO: 314953 - DNA, 12 bp, Artificial Sequence
  Oligonucleotide primer for the detection of SNP TSC0026647
agaatatgatgt

SEQ ID NO: 314954 - DNA, 12 bp, Artificial Sequence
  Oligonucleotide primer for the detection of SNP TSC0026647
aaatataatata

SEQ ID NO: 314955 - DNA, 12 bp, Artificial Sequence
  Oligonucleotide primer for the detection of SNP TSC0026649
aaccctaaattc

SEQ ID NO: 314956 - DNA, 12 bp, Artificial Sequence
  Oligonucleotide primer for the detection of SNP TSC0026649
gaagtggttttt

SEQ ID NO: 314957 - DNA, 12 bp, Artificial Sequence
  Oligonucleotide primer for the detection of SNP TSC0026649
aaaataacccct

SEQ ID NO: 314958 - DNA, 12 bp, Artificial Sequence
  Oligonucleotide primer for the detection of SNP TSC0026652
tacctcccaaaa

SEQ ID NO: 314959 - DNA, 12 bp, Artificial Sequence
  Oligonucleotide primer for the detection of SNP TSC0026652
ggaattgttaat

SEQ ID NO: 314960 - DNA, 12 bp, Artificial Sequence
  Oligonucleotide primer for the detection of SNP TSC0026652
ggaatcgttaat

SEQ ID NO: 314961 - DNA, 12 bp, Artificial Sequence
  Oligonucleotide primer for the detection of SNP TSC0026652
ggaattgttaac

SEQ ID NO: 314962 - DNA, 12 bp, Artificial Sequence
  Oligonucleotide primer for the detection of SNP TSC0026652
ggaatcgttaac

SEQ ID NO: 314963 - DNA, 12 bp, Artificial Sequence
  Oligonucleotide primer for the detection of SNP TSC0026652
aaaatcactaac

SEQ ID NO: 314964 - DNA, 12 bp, Artificial Sequence
  Oligonucleotide primer for the detection of SNP TSC0026652
aaaatcgctaac

SEQ ID NO: 314965 - DNA, 12 bp, Artificial Sequence
  Oligonucleotide primer for the detection of SNP TSC0026652
tgttttttagag

SEQ ID NO: 314966 - DNA, 12 bp, Artificial Sequence
  Oligonucleotide primer for the detection of SNP TSC0026653
atatctatatta

SEQ ID NO: 314967 - DNA, 12 bp, Artificial Sequence
  Oligonucleotide primer for the detection of SNP TSC0026653
ttagtatgtatt

SEQ ID NO: 314968 - DNA, 12 bp, Artificial Sequence
  Oligonucleotide primer for the detection of SNP TSC0026653
ttaacatacatt

SEQ ID NO: 314969 - DNA, 12 bp, Artificial Sequence
  Oligonucleotide primer for the detection of SNP TSC0026653
atgtttgtgtta

SEQ ID NO: 314970 - DNA, 12 bp, Artificial Sequence
  Oligonucleotide primer for the detection of SNP TSC0026654
catataatcaaa

SEQ ID NO: 314971 - DNA, 12 bp, Artificial Sequence
  Oligonucleotide primer for the detection of SNP TSC0026654
gagtttgtttta

SEQ ID NO: 314972 - DNA, 12 bp, Artificial Sequence
  Oligonucleotide primer for the detection of SNP TSC0026654
aaacctacctca

SEQ ID NO: 314973 - DNA, 12 bp, Artificial Sequence
  Oligonucleotide primer for the detection of SNP TSC0026654
tatgtggttagg

SEQ ID NO: 314974 - DNA, 12 bp, Artificial Sequence
  Oligonucleotide primer for the detection of SNP TSC0026656
caccccaacatc

SEQ ID NO: 314975 - DNA, 12 bp, Artificial Sequence
  Oligonucleotide primer for the detection of SNP TSC0026656
tagtgaatttta

SEQ ID NO: 314976 - DNA, 12 bp, Artificial Sequence
  Oligonucleotide primer for the detection of SNP TSC0026658
aaaaaacaaatc

SEQ ID NO: 314977 - DNA, 12 bp, Artificial Sequence
  Oligonucleotide primer for the detection of SNP TSC0026658
aaaaaacgaatc

SEQ ID NO: 314978 - DNA, 12 bp, Artificial Sequence
  Oligonucleotide primer for the detection of SNP TSC0026660
cctttctctctc

SEQ ID NO: 314979 - DNA, 12 bp, Artificial Sequence
  Oligonucleotide primer for the detection of SNP TSC0026660
aaagaaagagag

SEQ ID NO: 314980 - DNA, 12 bp, Artificial Sequence
  Oligonucleotide primer for the detection of SNP TSC0026666
gtgaagagggtg

SEQ ID NO: 314981 - DNA, 12 bp, Artificial Sequence
  Oligonucleotide primer for the detection of SNP TSC0026666
ggtaaagtttgg

SEQ ID NO: 314982 - DNA, 12 bp, Artificial Sequence
  Oligonucleotide primer for the detection of SNP TSC0026668
ttactctcccac

SEQ ID NO: 314983 - DNA, 12 bp, Artificial Sequence
  Oligonucleotide primer for the detection of SNP TSC0026668
ttaaattgtggg

SEQ ID NO: 314984 - DNA, 12 bp, Artificial Sequence
  Oligonucleotide primer for the detection of SNP TSC0026669
acaccaccaaac

SEQ ID NO: 314985 - DNA, 12 bp, Artificial Sequence
  Oligonucleotide primer for the detection of SNP TSC0026670
aactaaattctt

SEQ ID NO: 314986 - DNA, 12 bp, Artificial Sequence
  Oligonucleotide primer for the detection of SNP TSC0026670
gttgattattta

SEQ ID NO: 314987 - DNA, 12 bp, Artificial Sequence
  Oligonucleotide primer for the detection of SNP TSC0026671
ttcttttttttt

SEQ ID NO: 314988 - DNA, 12 bp, Artificial Sequence
  Oligonucleotide primer for the detection of SNP TSC0026671
atttaaaaaaag

SEQ ID NO: 314989 - DNA, 12 bp, Artificial Sequence
  Oligonucleotide primer for the detection of SNP TSC0026673
ctaccaacatac

SEQ ID NO: 314990 - DNA, 12 bp, Artificial Sequence
  Oligonucleotide primer for the detection of SNP TSC0026673
ctaccaacgtac

SEQ ID NO: 314991 - DNA, 12 bp, Artificial Sequence
  Oligonucleotide primer for the detection of SNP TSC0026674
tattggtttata

SEQ ID NO: 314992 - DNA, 12 bp, Artificial Sequence
  Oligonucleotide primer for the detection of SNP TSC0026674
tactaactcata

SEQ ID NO: 314993 - DNA, 12 bp, Artificial Sequence
  Oligonucleotide primer for the detection of SNP TSC0026674
agtaatttttat

SEQ ID NO: 314994 - DNA, 12 bp, Artificial Sequence
  Oligonucleotide primer for the detection of SNP TSC0026679
atttataccatt

SEQ ID NO: 314995 - DNA, 12 bp, Artificial Sequence
  Oligonucleotide primer for the detection of SNP TSC0026680
ctataataccac

SEQ ID NO: 314996 - DNA, 12 bp, Artificial Sequence
  Oligonucleotide primer for the detection of SNP TSC0026680
tatagttaagaa

SEQ ID NO: 314997 - DNA, 12 bp, Artificial Sequence
  Oligonucleotide primer for the detection of SNP TSC0026681
ttttccaataat

SEQ ID NO: 314998 - DNA, 12 bp, Artificial Sequence
  Oligonucleotide primer for the detection of SNP TSC0026681
tttttttttagg

SEQ ID NO: 314999 - DNA, 12 bp, Artificial Sequence
  Oligonucleotide primer for the detection of SNP TSC0026681
ttttctctcaaa

SEQ ID NO: 315000 - DNA, 12 bp, Artificial Sequence
  Oligonucleotide primer for the detection of SNP TSC0026681
ttttttagtggt

SEQ ID NO: 315001 - DNA, 12 bp, Artificial Sequence
  Oligonucleotide primer for the detection of SNP TSC0026682
ctacacaaacaa

SEQ ID NO: 315002 - DNA, 12 bp, Artificial Sequence
  Oligonucleotide primer for the detection of SNP TSC0026682
ggaaaatttgtt

SEQ ID NO: 315003 - DNA, 12 bp, Artificial Sequence
  Oligonucleotide primer for the detection of SNP TSC0026682
ggaaaattcgtt

SEQ ID NO: 315004 - DNA, 12 bp, Artificial Sequence
  Oligonucleotide primer for the detection of SNP TSC0026682
taaaaaacccac

SEQ ID NO: 315005 - DNA, 12 bp, Artificial Sequence
  Oligonucleotide primer for the detection of SNP TSC0026682
taaaaaacccgc

SEQ ID NO: 315006 - DNA, 12 bp, Artificial Sequence
  Oligonucleotide primer for the detection of SNP TSC0026682
ttgtatagatag

SEQ ID NO: 315007 - DNA, 12 bp, Artificial Sequence
  Oligonucleotide primer for the detection of SNP TSC0026683
gttggtgtaaaa

SEQ ID NO: 315008 - DNA, 12 bp, Artificial Sequence
  Oligonucleotide primer for the detection of SNP TSC0026684
atactcccctta

SEQ ID NO: 315009 - DNA, 12 bp, Artificial Sequence
  Oligonucleotide primer for the detection of SNP TSC0026684
gtatagtattta

SEQ ID NO: 315010 - DNA, 12 bp, Artificial Sequence
  Oligonucleotide primer for the detection of SNP TSC0026684
cacaacactcaa

SEQ ID NO: 315011 - DNA, 12 bp, Artificial Sequence
  Oligonucleotide primer for the detection of SNP TSC0026686
tcattcttaaat

SEQ ID NO: 315012 - DNA, 12 bp, Artificial Sequence
  Oligonucleotide primer for the detection of SNP TSC0026686
aatgaaatgttt

SEQ ID NO: 315013 - DNA, 12 bp, Artificial Sequence
  Oligonucleotide primer for the detection of SNP TSC0026686
aataaaatacct

SEQ ID NO: 315014 - DNA, 12 bp, Artificial Sequence
  Oligonucleotide primer for the detection of SNP TSC0026687
aaaaaataacca

SEQ ID NO: 315015 - DNA, 12 bp, Artificial Sequence
  Oligonucleotide primer for the detection of SNP TSC0026687
tattttttacgg

SEQ ID NO: 315016 - DNA, 12 bp, Artificial Sequence
  Oligonucleotide primer for the detection of SNP TSC0026687
catctcttacaa

SEQ ID NO: 315017 - DNA, 12 bp, Artificial Sequence
  Oligonucleotide primer for the detection of SNP TSC0026687
catctcttacga

SEQ ID NO: 315018 - DNA, 12 bp, Artificial Sequence
  Oligonucleotide primer for the detection of SNP TSC0026687
agaaaaatagtt

SEQ ID NO: 315019 - DNA, 12 bp, Artificial Sequence
  Oligonucleotide primer for the detection of SNP TSC0026688
tgtttgttggtg

SEQ ID NO: 315020 - DNA, 12 bp, Artificial Sequence
  Oligonucleotide primer for the detection of SNP TSC0026688
tgtttgtcggtg

SEQ ID NO: 315021 - DNA, 12 bp, Artificial Sequence
  Oligonucleotide primer for the detection of SNP TSC0026690
aacttctctaaa

SEQ ID NO: 315022 - DNA, 12 bp, Artificial Sequence
  Oligonucleotide primer for the detection of SNP TSC0026690
gaaagagattat

SEQ ID NO: 315023 - DNA, 12 bp, Artificial Sequence
  Oligonucleotide primer for the detection of SNP TSC0026691
cttcctaaaact

SEQ ID NO: 315024 - DNA, 12 bp, Artificial Sequence
  Oligonucleotide primer for the detection of SNP TSC0026692
attgtatattag

SEQ ID NO: 315025 - DNA, 12 bp, Artificial Sequence
  Oligonucleotide primer for the detection of SNP TSC0026692
actacatatcaa

SEQ ID NO: 315026 - DNA, 12 bp, Artificial Sequence
  Oligonucleotide primer for the detection of SNP TSC0026692
gatatgagtatg

SEQ ID NO: 315027 - DNA, 12 bp, Artificial Sequence
  Oligonucleotide primer for the detection of SNP TSC0026694
ccaactaatatt

SEQ ID NO: 315028 - DNA, 12 bp, Artificial Sequence
  Oligonucleotide primer for the detection of SNP TSC0026694
ttttagtggtag

SEQ ID NO: 315029 - DNA, 12 bp, Artificial Sequence
  Oligonucleotide primer for the detection of SNP TSC0026695
tcattatcctct

SEQ ID NO: 315030 - DNA, 12 bp, Artificial Sequence
  Oligonucleotide primer for the detection of SNP TSC0026695
taataggtataa

SEQ ID NO: 315031 - DNA, 12 bp, Artificial Sequence
  Oligonucleotide primer for the detection of SNP TSC0026696
accgaaacaaaa

SEQ ID NO: 315032 - DNA, 12 bp, Artificial Sequence
  Oligonucleotide primer for the detection of SNP TSC0026696
ttgtgttgagtt

SEQ ID NO: 315033 - DNA, 12 bp, Artificial Sequence
  Oligonucleotide primer for the detection of SNP TSC0026696
tcgtgttgagtt

SEQ ID NO: 315034 - DNA, 12 bp, Artificial Sequence
  Oligonucleotide primer for the detection of SNP TSC0026696
ccatactaaact

SEQ ID NO: 315035 - DNA, 12 bp, Artificial Sequence
  Oligonucleotide primer for the detection of SNP TSC0026696
ccgtactaaact

SEQ ID NO: 315036 - DNA, 12 bp, Artificial Sequence
  Oligonukleotid-Primer
attggagtaggg

SEQ ID NO: 315037 - DNA, 12 bp, Artificial Sequence
  Oligonucleotide primer for the detection of SNP TSC0026696
atcggagtaggg

SEQ ID NO: 315038 - DNA, 12 bp, Artificial Sequence
  Oligonucleotide primer for the detection of SNP TSC0026697
atccataacaac

SEQ ID NO: 315039 - DNA, 12 bp, Artificial Sequence
  Oligonucleotide primer for the detection of SNP TSC0026697
atccataacgac

SEQ ID NO: 315040 - DNA, 12 bp, Artificial Sequence
  Oligonucleotide primer for the detection of SNP TSC0026697
ttggtggatgtg

SEQ ID NO: 315041 - DNA, 12 bp, Artificial Sequence
  Oligonucleotide primer for the detection of SNP TSC0026697
ttggcggatgtg

SEQ ID NO: 315042 - DNA, 12 bp, Artificial Sequence
  Oligonucleotide primer for the detection of SNP TSC0026697
ttggtggacgtg

SEQ ID NO: 315043 - DNA, 12 bp, Artificial Sequence
  Oligonucleotide primer for the detection of SNP TSC0026697
ttggcggacgtg

SEQ ID NO: 315044 - DNA, 12 bp, Artificial Sequence
  Oligonucleotide primer for the detection of SNP TSC0026697
ctaacaaacata

SEQ ID NO: 315045 - DNA, 12 bp, Artificial Sequence
  Oligonucleotide primer for the detection of SNP TSC0026697
ctaacaaacgta

SEQ ID NO: 315046 - DNA, 12 bp, Artificial Sequence
  Oligonucleotide primer for the detection of SNP TSC0026697
ctaacgaacata

SEQ ID NO: 315047 - DNA, 12 bp, Artificial Sequence
  Oligonucleotide primer for the detection of SNP TSC0026697
ctaacgaacgta

SEQ ID NO: 315048 - DNA, 12 bp, Artificial Sequence
  Oligonucleotide primer for the detection of SNP TSC0026697
gtttatgatggt

SEQ ID NO: 315049 - DNA, 12 bp, Artificial Sequence
  Oligonucleotide primer for the detection of SNP TSC0026697
gtttatgacggt

SEQ ID NO: 315050 - DNA, 12 bp, Artificial Sequence
  Oligonucleotide primer for the detection of SNP TSC0026698
cttattatacct

SEQ ID NO: 315051 - DNA, 12 bp, Artificial Sequence
  Oligonucleotide primer for the detection of SNP TSC0026698
ttttgatgtaaa

SEQ ID NO: 315052 - DNA, 12 bp, Artificial Sequence
  Oligonucleotide primer for the detection of SNP TSC0026699
tcacaatactct

SEQ ID NO: 315053 - DNA, 12 bp, Artificial Sequence
  Oligonucleotide primer for the detection of SNP TSC0026699
tcgcaatactct

SEQ ID NO: 315054 - DNA, 12 bp, Artificial Sequence
  Oligonucleotide primer for the detection of SNP TSC0026699
gataaattgggg

SEQ ID NO: 315055 - DNA, 12 bp, Artificial Sequence
  Oligonucleotide primer for the detection of SNP TSC0026700
ccccaatttatc

SEQ ID NO: 315056 - DNA, 12 bp, Artificial Sequence
  Oligonucleotide primer for the detection of SNP TSC0026700
agtggttggtag

SEQ ID NO: 315057 - DNA, 12 bp, Artificial Sequence
  Oligonucleotide primer for the detection of SNP TSC0026701
tccaaacgaaaa

SEQ ID NO: 315058 - DNA, 12 bp, Artificial Sequence
  Oligonucleotide primer for the detection of SNP TSC0026701
tttggttattat

SEQ ID NO: 315059 - DNA, 12 bp, Artificial Sequence
  Oligonucleotide primer for the detection of SNP TSC0026701
cttaatcatcat

SEQ ID NO: 315060 - DNA, 12 bp, Artificial Sequence
  Oligonucleotide primer for the detection of SNP TSC0026701
tttaggtgaggg

SEQ ID NO: 315061 - DNA, 12 bp, Artificial Sequence
  Oligonucleotide primer for the detection of SNP TSC0026701
tttaggcgaggg

SEQ ID NO: 315062 - DNA, 12 bp, Artificial Sequence
  Oligonucleotide primer for the detection of SNP TSC0026702
ctaacaacaaac

SEQ ID NO: 315063 - DNA, 12 bp, Artificial Sequence
  Oligonucleotide primer for the detection of SNP TSC0026702
tgttgagggtag

SEQ ID NO: 315064 - DNA, 12 bp, Artificial Sequence
  Oligonucleotide primer for the detection of SNP TSC0026703
taaggtatatgg

SEQ ID NO: 315065 - DNA, 12 bp, Artificial Sequence
  Oligonucleotide primer for the detection of SNP TSC0026704
attataaaaaaa

SEQ ID NO: 315066 - DNA, 12 bp, Artificial Sequence
  Oligonucleotide primer for the detection of SNP TSC0026704
ggttatattgta

SEQ ID NO: 315067 - DNA, 12 bp, Artificial Sequence
  Oligonucleotide primer for the detection of SNP TSC0026704
aaccacactaca

SEQ ID NO: 315068 - DNA, 12 bp, Artificial Sequence
  Oligonucleotide primer for the detection of SNP TSC0026704
gttgtggggggg

SEQ ID NO: 315069 - DNA, 12 bp, Artificial Sequence
  Oligonucleotide primer for the detection of SNP TSC0026705
tttatttcttaa

SEQ ID NO: 315070 - DNA, 12 bp, Artificial Sequence
  Oligonucleotide primer for the detection of SNP TSC0026705
gtaatagttagg

SEQ ID NO: 315071 - DNA, 12 bp, Artificial Sequence
  Oligonucleotide primer for the detection of SNP TSC0026705
aatttgtttttt

SEQ ID NO: 315072 - DNA, 12 bp, Artificial Sequence
  Oligonucleotide primer for the detection of SNP TSC0026706
tttttcatcaaa

SEQ ID NO: 315073 - DNA, 12 bp, Artificial Sequence
  Oligonucleotide primer for the detection of SNP TSC0026706
cacaattccctt

SEQ ID NO: 315074 - DNA, 12 bp, Artificial Sequence
  Oligonucleotide primer for the detection of SNP TSC0026707
aattttcccaaa

SEQ ID NO: 315075 - DNA, 12 bp, Artificial Sequence
  Oligonucleotide primer for the detection of SNP TSC0026707
ttagttgagtta

SEQ ID NO: 315076 - DNA, 12 bp, Artificial Sequence
  Oligonucleotide primer for the detection of SNP TSC0026707
ttagtcgagtta

SEQ ID NO: 315077 - DNA, 12 bp, Artificial Sequence
  Oligonucleotide primer for the detection of SNP TSC0026707
ccaaccgaacca

SEQ ID NO: 315078 - DNA, 12 bp, Artificial Sequence
  Oligonucleotide primer for the detection of SNP TSC0026707
gatttttttaga

SEQ ID NO: 315079 - DNA, 12 bp, Artificial Sequence
  Oligonucleotide primer for the detection of SNP TSC0026708
aatttattactc

SEQ ID NO: 315080 - DNA, 12 bp, Artificial Sequence
  Oligonucleotide primer for the detection of SNP TSC0026708
aaattagatatg

SEQ ID NO: 315081 - DNA, 12 bp, Artificial Sequence
  Oligonucleotide primer for the detection of SNP TSC0026709
aaaactcttatc

SEQ ID NO: 315082 - DNA, 12 bp, Artificial Sequence
  Oligonucleotide primer for the detection of SNP TSC0026710
tccctctaaacc

SEQ ID NO: 315083 - DNA, 12 bp, Artificial Sequence
  Oligonucleotide primer for the detection of SNP TSC0026710
gttaatggggaa

SEQ ID NO: 315084 - DNA, 12 bp, Artificial Sequence
  Oligonucleotide primer for the detection of SNP TSC0026710
accaataaaaaa

SEQ ID NO: 315085 - DNA, 12 bp, Artificial Sequence
  Oligonucleotide primer for the detection of SNP TSC0026713
ggtagttagtga

SEQ ID NO: 315086 - DNA, 12 bp, Artificial Sequence
  Oligonucleotide primer for the detection of SNP TSC0026713
ggtagttagcga

SEQ ID NO: 315087 - DNA, 12 bp, Artificial Sequence
  Oligonucleotide primer for the detection of SNP TSC0026713
acaaccaacaaa

SEQ ID NO: 315088 - DNA, 12 bp, Artificial Sequence
  Oligonucleotide primer for the detection of SNP TSC0026713
acaaccaacgaa

SEQ ID NO: 315089 - DNA, 12 bp, Artificial Sequence
  Oligonucleotide primer for the detection of SNP TSC0026713
ttgttttttttc

SEQ ID NO: 315090 - DNA, 12 bp, Artificial Sequence
  Oligonucleotide primer for the detection of SNP TSC0026714
atccaaaactaa

SEQ ID NO: 315091 - DNA, 12 bp, Artificial Sequence
  Oligonucleotide primer for the detection of SNP TSC0026714
agtttgttgtat

SEQ ID NO: 315092 - DNA, 12 bp, Artificial Sequence
  Oligonucleotide primer for the detection of SNP TSC0026714
atctactataca

SEQ ID NO: 315093 - DNA, 12 bp, Artificial Sequence
  Oligonucleotide primer for the detection of SNP TSC0026714
gtttagggttgg

SEQ ID NO: 315094 - DNA, 12 bp, Artificial Sequence
  Oligonucleotide primer for the detection of SNP TSC0026715
atatatatttac

SEQ ID NO: 315095 - DNA, 12 bp, Artificial Sequence
  Oligonucleotide primer for the detection of SNP TSC0026715
tttttggggaag

SEQ ID NO: 315096 - DNA, 12 bp, Artificial Sequence
  Oligonucleotide primer for the detection of SNP TSC0026715
atgtatatttgt

SEQ ID NO: 315097 - DNA, 12 bp, Artificial Sequence
  Oligonucleotide primer for the detection of SNP TSC0026716
tccacacaacca

SEQ ID NO: 315098 - DNA, 12 bp, Artificial Sequence
  Oligonucleotide primer for the detection of SNP TSC0026716
atttagttattc

SEQ ID NO: 315099 - DNA, 12 bp, Artificial Sequence
  Oligonucleotide primer for the detection of SNP TSC0026716
acccaaccactc

SEQ ID NO: 315100 - DNA, 12 bp, Artificial Sequence
  Oligonucleotide primer for the detection of SNP TSC0026716
gtttatatagtt

SEQ ID NO: 315101 - DNA, 12 bp, Artificial Sequence
  Oligonucleotide primer for the detection of SNP TSC0026717
taaacaaaaccc

SEQ ID NO: 315102 - DNA, 12 bp, Artificial Sequence
  Oligonucleotide primer for the detection of SNP TSC0026717
tggttgtgtgga

SEQ ID NO: 315103 - DNA, 12 bp, Artificial Sequence
  Oligonucleotide primer for the detection of SNP TSC0026717
taactatataaa

SEQ ID NO: 315104 - DNA, 12 bp, Artificial Sequence
  Oligonucleotide primer for the detection of SNP TSC0026717
taggtagggttt

SEQ ID NO: 315105 - DNA, 12 bp, Artificial Sequence
  Oligonucleotide primer for the detection of SNP TSC0026718
caacaattatca

SEQ ID NO: 315106 - DNA, 12 bp, Artificial Sequence
  Oligonucleotide primer for the detection of SNP TSC0026718
gaaattttgggt

SEQ ID NO: 315107 - DNA, 12 bp, Artificial Sequence
  Oligonucleotide primer for the detection of SNP TSC0026718
aaaatcctaaac

SEQ ID NO: 315108 - DNA, 12 bp, Artificial Sequence
  Oligonucleotide primer for the detection of SNP TSC0026718
taataattatta

SEQ ID NO: 315109 - DNA, 12 bp, Artificial Sequence
  Oligonucleotide primer for the detection of SNP TSC0026719
cttccctaaccc

SEQ ID NO: 315110 - DNA, 12 bp, Artificial Sequence
  Oligonucleotide primer for the detection of SNP TSC0026719
gaaggggttatg

SEQ ID NO: 315111 - DNA, 12 bp, Artificial Sequence
  Oligonucleotide primer for the detection of SNP TSC0026719
aaaaaaactata

SEQ ID NO: 315112 - DNA, 12 bp, Artificial Sequence
  Oligonucleotide primer for the detection of SNP TSC0026723
catctaccacaa

SEQ ID NO: 315113 - DNA, 12 bp, Artificial Sequence
  Oligonukleotid-Primer
catctaccacga

SEQ ID NO: 315114 - DNA, 12 bp, Artificial Sequence
  Oligonucleotide primer for the detection of SNP TSC0026723
tatttgttatga

SEQ ID NO: 315115 - DNA, 12 bp, Artificial Sequence
  Oligonucleotide primer for the detection of SNP TSC0026723
tatttgttacga

SEQ ID NO: 315116 - DNA, 12 bp, Artificial Sequence
  Oligonucleotide primer for the detection of SNP TSC0026725
aatattaaacac

SEQ ID NO: 315117 - DNA, 12 bp, Artificial Sequence
  Oligonucleotide primer for the detection of SNP TSC0026725
gagttagaagtt

SEQ ID NO: 315118 - DNA, 12 bp, Artificial Sequence
  Oligonucleotide primer for the detection of SNP TSC0026725
gagttagaagtc

SEQ ID NO: 315119 - DNA, 12 bp, Artificial Sequence
  Oligonucleotide primer for the detection of SNP TSC0026725
aatgttggatat

SEQ ID NO: 315120 - DNA, 12 bp, Artificial Sequence
  Oligonucleotide primer for the detection of SNP TSC0026725
aatgttggatac

SEQ ID NO: 315121 - DNA, 12 bp, Artificial Sequence
  Oligonucleotide primer for the detection of SNP TSC0026726
catataaccaaa

SEQ ID NO: 315122 - DNA, 12 bp, Artificial Sequence
  Oligonucleotide primer for the detection of SNP TSC0026726
gtagtattttgt

SEQ ID NO: 315123 - DNA, 12 bp, Artificial Sequence
  Oligonucleotide primer for the detection of SNP TSC0026726
aacaacacttta

SEQ ID NO: 315124 - DNA, 12 bp, Artificial Sequence
  Oligonucleotide primer for the detection of SNP TSC0026726
atatatagttaa

SEQ ID NO: 315125 - DNA, 12 bp, Artificial Sequence
  Oligonucleotide primer for the detection of SNP TSC0026728
catcccatccac

SEQ ID NO: 315126 - DNA, 12 bp, Artificial Sequence
  Oligonucleotide primer for the detection of SNP TSC0026728
ttagatgatggg

SEQ ID NO: 315127 - DNA, 12 bp, Artificial Sequence
  Oligonucleotide primer for the detection of SNP TSC0026730
tataaataaata

SEQ ID NO: 315128 - DNA, 12 bp, Artificial Sequence
  Oligonucleotide primer for the detection of SNP TSC0026730
ttatttatgttt

SEQ ID NO: 315129 - DNA, 12 bp, Artificial Sequence
  Oligonucleotide primer for the detection of SNP TSC0026730
ttatttacgttt

SEQ ID NO: 315130 - DNA, 12 bp, Artificial Sequence
  Oligonucleotide primer for the detection of SNP TSC0026730
caaccacccaca

SEQ ID NO: 315131 - DNA, 12 bp, Artificial Sequence
  Oligonucleotide primer for the detection of SNP TSC0026730
caaccacccacg

SEQ ID NO: 315132 - DNA, 12 bp, Artificial Sequence
  Oligonucleotide primer for the detection of SNP TSC0026730
ttgtgagtaaat

SEQ ID NO: 315133 - DNA, 12 bp, Artificial Sequence
  Oligonucleotide primer for the detection of SNP TSC0026731
taaaaaacctac

SEQ ID NO: 315134 - DNA, 12 bp, Artificial Sequence
  Oligonucleotide primer for the detection of SNP TSC0026731
ggtagttttgta

SEQ ID NO: 315135 - DNA, 12 bp, Artificial Sequence
  Oligonucleotide primer for the detection of SNP TSC0026733
tttaacaaaact

SEQ ID NO: 315136 - DNA, 12 bp, Artificial Sequence
  Oligonucleotide primer for the detection of SNP TSC0026733
ttttttttgtgg

SEQ ID NO: 315137 - DNA, 12 bp, Artificial Sequence
  Oligonucleotide primer for the detection of SNP TSC0026733
tttttttcgtgg

SEQ ID NO: 315138 - DNA, 12 bp, Artificial Sequence
  Oligonucleotide primer for the detection of SNP TSC0026737
atttaaataaac

SEQ ID NO: 315139 - DNA, 12 bp, Artificial Sequence
  Oligonucleotide primer for the detection of SNP TSC0026737
tggtattgggga

SEQ ID NO: 315140 - DNA, 12 bp, Artificial Sequence
  Oligonucleotide primer for the detection of SNP TSC0026737
atttgaatggat

SEQ ID NO: 315141 - DNA, 12 bp, Artificial Sequence
  Oligonucleotide primer for the detection of SNP TSC0026738
tttcatttctcc

SEQ ID NO: 315142 - DNA, 12 bp, Artificial Sequence
  Oligonucleotide primer for the detection of SNP TSC0026738
aaatggggatag

SEQ ID NO: 315143 - DNA, 12 bp, Artificial Sequence
  Oligonucleotide primer for the detection of SNP TSC0026739
ttataatattac

SEQ ID NO: 315144 - DNA, 12 bp, Artificial Sequence
  Oligonucleotide primer for the detection of SNP TSC0026739
aagttagttata

SEQ ID NO: 315145 - DNA, 12 bp, Artificial Sequence
  Oligonucleotide primer for the detection of SNP TSC0026740
atataatttcta

SEQ ID NO: 315146 - DNA, 12 bp, Artificial Sequence
  Oligonucleotide primer for the detection of SNP TSC0026740
caatccaattaa

SEQ ID NO: 315147 - DNA, 12 bp, Artificial Sequence
  Oligonucleotide primer for the detection of SNP TSC0026741
taaaaatataat

SEQ ID NO: 315148 - DNA, 12 bp, Artificial Sequence
  Oligonucleotide primer for the detection of SNP TSC0026741
ttaatttataaa

SEQ ID NO: 315149 - DNA, 12 bp, Artificial Sequence
  Oligonucleotide primer for the detection of SNP TSC0026741
taaggatataat

SEQ ID NO: 315150 - DNA, 12 bp, Artificial Sequence
  Oligonucleotide primer for the detection of SNP TSC0026744
atatatttttct

SEQ ID NO: 315151 - DNA, 12 bp, Artificial Sequence
  Oligonucleotide primer for the detection of SNP TSC0026744
gttgggtgagtt

SEQ ID NO: 315152 - DNA, 12 bp, Artificial Sequence
  Oligonucleotide primer for the detection of SNP TSC0026746
atcctttatcct

SEQ ID NO: 315153 - DNA, 12 bp, Artificial Sequence
  Oligonucleotide primer for the detection of SNP TSC0026746
attgtggaaaat

SEQ ID NO: 315154 - DNA, 12 bp, Artificial Sequence
  Oligonucleotide primer for the detection of SNP TSC0026750
caaaacttaaaa

SEQ ID NO: 315155 - DNA, 12 bp, Artificial Sequence
  Oligonucleotide primer for the detection of SNP TSC0026750
cgaaacttaaaa

SEQ ID NO: 315156 - DNA, 12 bp, Artificial Sequence
  Oligonucleotide primer for the detection of SNP TSC0026750
tttttttttcta

SEQ ID NO: 315157 - DNA, 12 bp, Artificial Sequence
  Oligonucleotide primer for the detection of SNP TSC0026750
tgaaatttaaaa

SEQ ID NO: 315158 - DNA, 12 bp, Artificial Sequence
  Oligonucleotide primer for the detection of SNP TSC0026750
cgaaatttaaaa

SEQ ID NO: 315159 - DNA, 12 bp, Artificial Sequence
  Oligonucleotide primer for the detection of SNP TSC0026752
atctattaaaaa

SEQ ID NO: 315160 - DNA, 12 bp, Artificial Sequence
  Oligonucleotide primer for the detection of SNP TSC0026752
agtgggtattat

SEQ ID NO: 315161 - DNA, 12 bp, Artificial Sequence
  Oligonucleotide primer for the detection of SNP TSC0026752
aataaatatcac

SEQ ID NO: 315162 - DNA, 12 bp, Artificial Sequence
  Oligonucleotide primer for the detection of SNP TSC0026752
atttattgaggg

SEQ ID NO: 315163 - DNA, 12 bp, Artificial Sequence
  Oligonucleotide primer for the detection of SNP TSC0026753
tagggttttttt

SEQ ID NO: 315164 - DNA, 12 bp, Artificial Sequence
  Oligonucleotide primer for the detection of SNP TSC0026753
caaaatttcccc

SEQ ID NO: 315165 - DNA, 12 bp, Artificial Sequence
  Oligonucleotide primer for the detection of SNP TSC0026757
ctaaattattaa

SEQ ID NO: 315166 - DNA, 12 bp, Artificial Sequence
  Oligonucleotide primer for the detection of SNP TSC0026757
tatgtttaaaag

SEQ ID NO: 315167 - DNA, 12 bp, Artificial Sequence
  Oligonucleotide primer for the detection of SNP TSC0026758
tatataatattg

SEQ ID NO: 315168 - DNA, 12 bp, Artificial Sequence
  Oligonucleotide primer for the detection of SNP TSC0026758
catacaacacta

SEQ ID NO: 315169 - DNA, 12 bp, Artificial Sequence
  Oligonucleotide primer for the detection of SNP TSC0026758
ttatttttagaa

SEQ ID NO: 315170 - DNA, 12 bp, Artificial Sequence
  Oligonucleotide primer for the detection of SNP TSC0026759
aaccatccacta

SEQ ID NO: 315171 - DNA, 12 bp, Artificial Sequence
  Oligonucleotide primer for the detection of SNP TSC0026759
aaccgtccacta

SEQ ID NO: 315172 - DNA, 12 bp, Artificial Sequence
  Oligonucleotide primer for the detection of SNP TSC0026759
taagagtaggat

SEQ ID NO: 315173 - DNA, 12 bp, Artificial Sequence
  Oligonucleotide primer for the detection of SNP TSC0026759
agtcgtttattg

SEQ ID NO: 315174 - DNA, 12 bp, Artificial Sequence
  Oligonucleotide primer for the detection of SNP TSC0026761
caacaccccatc

SEQ ID NO: 315175 - DNA, 12 bp, Artificial Sequence
  Oligonucleotide primer for the detection of SNP TSC0026761
cgacaccccatc

SEQ ID NO: 315176 - DNA, 12 bp, Artificial Sequence
  Oligonucleotide primer for the detection of SNP TSC0026761
tttgttgagtag

SEQ ID NO: 315177 - DNA, 12 bp, Artificial Sequence
  Oligonucleotide primer for the detection of SNP TSC0026761
cttactaaacaa

SEQ ID NO: 315178 - DNA, 12 bp, Artificial Sequence
  Oligonucleotide primer for the detection of SNP TSC0026761
tgatattttatt

SEQ ID NO: 315179 - DNA, 12 bp, Artificial Sequence
  Oligonucleotide primer for the detection of SNP TSC0026761
cgatattttatt

SEQ ID NO: 315180 - DNA, 12 bp, Artificial Sequence
  Oligonucleotide primer for the detection of SNP TSC0026763
acccaaatcacc

SEQ ID NO: 315181 - DNA, 12 bp, Artificial Sequence
  Oligonucleotide primer for the detection of SNP TSC0026763
tagtggttatag

SEQ ID NO: 315182 - DNA, 12 bp, Artificial Sequence
  Oligonucleotide primer for the detection of SNP TSC0026764
taacaaataatt

SEQ ID NO: 315183 - DNA, 12 bp, Artificial Sequence
  Oligonucleotide primer for the detection of SNP TSC0026765
taataaatcaaa

SEQ ID NO: 315184 - DNA, 12 bp, Artificial Sequence
  Oligonucleotide primer for the detection of SNP TSC0026765
aattggggtaaa

SEQ ID NO: 315185 - DNA, 12 bp, Artificial Sequence
  Oligonucleotide primer for the detection of SNP TSC0026765
aactaaaacaaa

SEQ ID NO: 315186 - DNA, 12 bp, Artificial Sequence
  Oligonucleotide primer for the detection of SNP TSC0026765
agtaagttaaat

SEQ ID NO: 315187 - DNA, 12 bp, Artificial Sequence
  Oligonucleotide primer for the detection of SNP TSC0026765
agtaagttaaac

SEQ ID NO: 315188 - DNA, 12 bp, Artificial Sequence
  Oligonucleotide primer for the detection of SNP TSC0026766
caactcttctca

SEQ ID NO: 315189 - DNA, 12 bp, Artificial Sequence
  Oligonucleotide primer for the detection of SNP TSC0026766
tatttgttgaat

SEQ ID NO: 315190 - DNA, 12 bp, Artificial Sequence
  Oligonucleotide primer for the detection of SNP TSC0026766
tatctactaaac

SEQ ID NO: 315191 - DNA, 12 bp, Artificial Sequence
  Oligonucleotide primer for the detection of SNP TSC0026770
cttctttcctaa

SEQ ID NO: 315192 - DNA, 12 bp, Artificial Sequence
  Oligonucleotide primer for the detection of SNP TSC0026770
ttaatgggtgat

SEQ ID NO: 315193 - DNA, 12 bp, Artificial Sequence
  Oligonucleotide primer for the detection of SNP TSC0026770
ctaataaataac

SEQ ID NO: 315194 - DNA, 12 bp, Artificial Sequence
  Oligonucleotide primer for the detection of SNP TSC0026771
gttgggtgtgga

SEQ ID NO: 315195 - DNA, 12 bp, Artificial Sequence
  Oligonucleotide primer for the detection of SNP TSC0026772
atttttactttt

SEQ ID NO: 315196 - DNA, 12 bp, Artificial Sequence
  Oligonucleotide primer for the detection of SNP TSC0026773
tttaaaaaatca

SEQ ID NO: 315197 - DNA, 12 bp, Artificial Sequence
  Oligonucleotide primer for the detection of SNP TSC0026773
aattgaataaat

SEQ ID NO: 315198 - DNA, 12 bp, Artificial Sequence
  Oligonucleotide primer for the detection of SNP TSC0026773
aattaaacaaat

SEQ ID NO: 315199 - DNA, 12 bp, Artificial Sequence
  Oligonucleotide primer for the detection of SNP TSC0026773
taaggaattatt

SEQ ID NO: 315200 - DNA, 12 bp, Artificial Sequence
  Oligonucleotide primer for the detection of SNP TSC0026778
cccttacaataa

SEQ ID NO: 315201 - DNA, 12 bp, Artificial Sequence
  Oligonucleotide primer for the detection of SNP TSC0026778
ttttataataat

SEQ ID NO: 315202 - DNA, 12 bp, Artificial Sequence
  Oligonucleotide primer for the detection of SNP TSC0026778
ttttataataac

SEQ ID NO: 315203 - DNA, 12 bp, Artificial Sequence
  Oligonucleotide primer for the detection of SNP TSC0026780
ataacaaaaccc

SEQ ID NO: 315204 - DNA, 12 bp, Artificial Sequence
  Oligonucleotide primer for the detection of SNP TSC0026780
gtaacaaaaccc

SEQ ID NO: 315205 - DNA, 12 bp, Artificial Sequence
  Oligonucleotide primer for the detection of SNP TSC0026780
gtggtaaaattt

SEQ ID NO: 315206 - DNA, 12 bp, Artificial Sequence
  Oligonucleotide primer for the detection of SNP TSC0026781
ggatgatttttt

SEQ ID NO: 315207 - DNA, 12 bp, Artificial Sequence
  Oligonucleotide primer for the detection of SNP TSC0026781
ggatgatttttc

SEQ ID NO: 315208 - DNA, 12 bp, Artificial Sequence
  Oligonucleotide primer for the detection of SNP TSC0026781
taaataactcct

SEQ ID NO: 315209 - DNA, 12 bp, Artificial Sequence
  Oligonucleotide primer for the detection of SNP TSC0026781
aatgggaatgga

SEQ ID NO: 315210 - DNA, 12 bp, Artificial Sequence
  Oligonucleotide primer for the detection of SNP TSC0026782
aaacaccaataa

SEQ ID NO: 315211 - DNA, 12 bp, Artificial Sequence
  Oligonucleotide primer for the detection of SNP TSC0026782
aaacaccgataa

SEQ ID NO: 315212 - DNA, 12 bp, Artificial Sequence
  Oligonucleotide primer for the detection of SNP TSC0026782
ttttgggttatt

SEQ ID NO: 315213 - DNA, 12 bp, Artificial Sequence
  Oligonucleotide primer for the detection of SNP TSC0026782
tcctaaatcatc

SEQ ID NO: 315214 - DNA, 12 bp, Artificial Sequence
  Oligonucleotide primer for the detection of SNP TSC0026782
aggtattggtgg

SEQ ID NO: 315215 - DNA, 12 bp, Artificial Sequence
  Oligonucleotide primer for the detection of SNP TSC0026782
aggtatcggtgg

SEQ ID NO: 315216 - DNA, 12 bp, Artificial Sequence
  Oligonucleotide primer for the detection of SNP TSC0026784
tgtaattattaa

SEQ ID NO: 315217 - DNA, 12 bp, Artificial Sequence
  Oligonucleotide primer for the detection of SNP TSC0026784
cgtaattattaa

SEQ ID NO: 315218 - DNA, 12 bp, Artificial Sequence
  Oligonucleotide primer for the detection of SNP TSC0026784
cacaattattaa

SEQ ID NO: 315219 - DNA, 12 bp, Artificial Sequence
  Oligonucleotide primer for the detection of SNP TSC0026784
cgcaattattaa

SEQ ID NO: 315220 - DNA, 12 bp, Artificial Sequence
  Oligonucleotide primer for the detection of SNP TSC0026784
tggagtgagttt

SEQ ID NO: 315221 - DNA, 12 bp, Artificial Sequence
  Oligonucleotide primer for the detection of SNP TSC0026785
atatatatcttc

SEQ ID NO: 315222 - DNA, 12 bp, Artificial Sequence
  Oligonucleotide primer for the detection of SNP TSC0026785
tttggtaaaaat

SEQ ID NO: 315223 - DNA, 12 bp, Artificial Sequence
  Oligonucleotide primer for the detection of SNP TSC0026785
ttaataaaaaca

SEQ ID NO: 315224 - DNA, 12 bp, Artificial Sequence
  Oligonucleotide primer for the detection of SNP TSC0026785
atatatattttt

SEQ ID NO: 315225 - DNA, 12 bp, Artificial Sequence
  Oligonucleotide primer for the detection of SNP TSC0026785
atatatattttc

SEQ ID NO: 315226 - DNA, 12 bp, Artificial Sequence
  Oligonucleotide primer for the detection of SNP TSC0026786
tgaaagagatgg

SEQ ID NO: 315227 - DNA, 12 bp, Artificial Sequence
  Oligonucleotide primer for the detection of SNP TSC0026786
tagagagtgtat

SEQ ID NO: 315228 - DNA, 12 bp, Artificial Sequence
  Oligonucleotide primer for the detection of SNP TSC0026788
aatatgatgaaa

SEQ ID NO: 315229 - DNA, 12 bp, Artificial Sequence
  Oligonucleotide primer for the detection of SNP TSC0026788
tgtatttttggt

SEQ ID NO: 315230 - DNA, 12 bp, Artificial Sequence
  Oligonucleotide primer for the detection of SNP TSC0026789
atccaacacatc

SEQ ID NO: 315231 - DNA, 12 bp, Artificial Sequence
  Oligonucleotide primer for the detection of SNP TSC0026789
ggaatattttta

SEQ ID NO: 315232 - DNA, 12 bp, Artificial Sequence
  Oligonucleotide primer for the detection of SNP TSC0026790
ccaaaacctaac

SEQ ID NO: 315233 - DNA, 12 bp, Artificial Sequence
  Oligonucleotide primer for the detection of SNP TSC0026790
tccacctcatcc

SEQ ID NO: 315234 - DNA, 12 bp, Artificial Sequence
  Oligonucleotide primer for the detection of SNP TSC0026790
tagagtttgatt

SEQ ID NO: 315235 - DNA, 12 bp, Artificial Sequence
  Oligonucleotide primer for the detection of SNP TSC0026793
ctttctcttaac

SEQ ID NO: 315236 - DNA, 12 bp, Artificial Sequence
  Oligonucleotide primer for the detection of SNP TSC0026793
agaaagaatttg

SEQ ID NO: 315237 - DNA, 12 bp, Artificial Sequence
  Oligonucleotide primer for the detection of SNP TSC0026793
aaaaaaacctaa

SEQ ID NO: 315238 - DNA, 12 bp, Artificial Sequence
  Oligonucleotide primer for the detection of SNP TSC0026798
tatatatctact

SEQ ID NO: 315239 - DNA, 12 bp, Artificial Sequence
  Oligonucleotide primer for the detection of SNP TSC0026798
gggtagggaagg

SEQ ID NO: 315240 - DNA, 12 bp, Artificial Sequence
  Oligonucleotide primer for the detection of SNP TSC0026801
accacttttccc

SEQ ID NO: 315241 - DNA, 12 bp, Artificial Sequence
  Oligonucleotide primer for the detection of SNP TSC0026801
tgtaatagaata

SEQ ID NO: 315242 - DNA, 12 bp, Artificial Sequence
  Oligonucleotide primer for the detection of SNP TSC0026801
tataataaaata

SEQ ID NO: 315243 - DNA, 12 bp, Artificial Sequence
  Oligonucleotide primer for the detection of SNP TSC0026803
atcctcttacct

SEQ ID NO: 315244 - DNA, 12 bp, Artificial Sequence
  Oligonucleotide primer for the detection of SNP TSC0026806
ctacccaccaaa

SEQ ID NO: 315245 - DNA, 12 bp, Artificial Sequence
  Oligonucleotide primer for the detection of SNP TSC0026806
tgttatttttta

SEQ ID NO: 315246 - DNA, 12 bp, Artificial Sequence
  Oligonucleotide primer for the detection of SNP TSC0026806
cgttatttttta

SEQ ID NO: 315247 - DNA, 12 bp, Artificial Sequence
  Oligonucleotide primer for the detection of SNP TSC0026806
accatttcccaa

SEQ ID NO: 315248 - DNA, 12 bp, Artificial Sequence
  Oligonucleotide primer for the detection of SNP TSC0026806
gccatttcccaa

SEQ ID NO: 315249 - DNA, 12 bp, Artificial Sequence
  Oligonucleotide primer for the detection of SNP TSC0026806
ttgtttattaag

SEQ ID NO: 315250 - DNA, 12 bp, Artificial Sequence
  Oligonucleotide primer for the detection of SNP TSC0026807
aaattcatacac

SEQ ID NO: 315251 - DNA, 12 bp, Artificial Sequence
  Oligonucleotide primer for the detection of SNP TSC0026807
tttagagttatg

SEQ ID NO: 315252 - DNA, 12 bp, Artificial Sequence
  Oligonucleotide primer for the detection of SNP TSC0026807
tccaaaaccata

SEQ ID NO: 315253 - DNA, 12 bp, Artificial Sequence
  Oligonucleotide primer for the detection of SNP TSC0026807
aggtttatatat

SEQ ID NO: 315254 - DNA, 12 bp, Artificial Sequence
  Oligonucleotide primer for the detection of SNP TSC0026815
aaccactaaaca

SEQ ID NO: 315255 - DNA, 12 bp, Artificial Sequence
  Oligonucleotide primer for the detection of SNP TSC0026815
agggagttggga

SEQ ID NO: 315256 - DNA, 12 bp, Artificial Sequence
  Oligonucleotide primer for the detection of SNP TSC0026818
taaaccatatat

SEQ ID NO: 315257 - DNA, 12 bp, Artificial Sequence
  Oligonucleotide primer for the detection of SNP TSC0026818
attttaattgga

SEQ ID NO: 315258 - DNA, 12 bp, Artificial Sequence
  Oligonucleotide primer for the detection of SNP TSC0026818
accccaactaaa

SEQ ID NO: 315259 - DNA, 12 bp, Artificial Sequence
  Oligonucleotide primer for the detection of SNP TSC0026819
ttatatcccaaa

SEQ ID NO: 315260 - DNA, 12 bp, Artificial Sequence
  Oligonucleotide primer for the detection of SNP TSC0026819
ttacctcctatc

SEQ ID NO: 315261 - DNA, 12 bp, Artificial Sequence
  Oligonucleotide primer for the detection of SNP TSC0026820
atttcatcatct

SEQ ID NO: 315262 - DNA, 12 bp, Artificial Sequence
  Oligonucleotide primer for the detection of SNP TSC0026820
atttcgtcatct

SEQ ID NO: 315263 - DNA, 12 bp, Artificial Sequence
  Oligonucleotide primer for the detection of SNP TSC0026820
gattttatttta

SEQ ID NO: 315264 - DNA, 12 bp, Artificial Sequence
  Oligonucleotide primer for the detection of SNP TSC0026821
ccccaaaaatat

SEQ ID NO: 315265 - DNA, 12 bp, Artificial Sequence
  Oligonucleotide primer for the detection of SNP TSC0026821
cccctccccaaa

SEQ ID NO: 315266 - DNA, 12 bp, Artificial Sequence
  Oligonucleotide primer for the detection of SNP TSC0026821
ttttaggggtgt

SEQ ID NO: 315267 - DNA, 12 bp, Artificial Sequence
  Oligonucleotide primer for the detection of SNP TSC0026822
atataatatttt

SEQ ID NO: 315268 - DNA, 12 bp, Artificial Sequence
  Oligonucleotide primer for the detection of SNP TSC0026822
tacaatatccta

SEQ ID NO: 315269 - DNA, 12 bp, Artificial Sequence
  Oligonucleotide primer for the detection of SNP TSC0026822
gaatgagtgagg

SEQ ID NO: 315270 - DNA, 12 bp, Artificial Sequence
  Oligonucleotide primer for the detection of SNP TSC0026825
tttagggtagga

SEQ ID NO: 315271 - DNA, 12 bp, Artificial Sequence
  Oligonucleotide primer for the detection of SNP TSC0026826
aacaaacaaaaa

SEQ ID NO: 315272 - DNA, 12 bp, Artificial Sequence
  Oligonucleotide primer for the detection of SNP TSC0026826
cttttcttctaa

SEQ ID NO: 315273 - DNA, 12 bp, Artificial Sequence
  Oligonucleotide primer for the detection of SNP TSC0026826
gtaaatagagat

SEQ ID NO: 315274 - DNA, 12 bp, Artificial Sequence
  Oligonucleotide primer for the detection of SNP TSC0026827
tgaattatttta

SEQ ID NO: 315275 - DNA, 12 bp, Artificial Sequence
  Oligonucleotide primer for the detection of SNP TSC0026828
aacaaacatcaa

SEQ ID NO: 315276 - DNA, 12 bp, Artificial Sequence
  Oligonucleotide primer for the detection of SNP TSC0026828
gtggtggatgat

SEQ ID NO: 315277 - DNA, 12 bp, Artificial Sequence
  Oligonucleotide primer for the detection of SNP TSC0026828
ataataaataat

SEQ ID NO: 315278 - DNA, 12 bp, Artificial Sequence
  Oligonucleotide primer for the detection of SNP TSC0026828
gataggtattag

SEQ ID NO: 315279 - DNA, 12 bp, Artificial Sequence
  Oligonucleotide primer for the detection of SNP TSC0026830
ataaataaaaga

SEQ ID NO: 315280 - DNA, 12 bp, Artificial Sequence
  Oligonucleotide primer for the detection of SNP TSC0026831
aaatcatacaac

SEQ ID NO: 315281 - DNA, 12 bp, Artificial Sequence
  Oligonucleotide primer for the detection of SNP TSC0026831
aaatcatacgac

SEQ ID NO: 315282 - DNA, 12 bp, Artificial Sequence
  Oligonucleotide primer for the detection of SNP TSC0026831
aggtgttttgta

SEQ ID NO: 315283 - DNA, 12 bp, Artificial Sequence
  Oligonucleotide primer for the detection of SNP TSC0026831
aggtgtttcgta

SEQ ID NO: 315284 - DNA, 12 bp, Artificial Sequence
  Oligonucleotide primer for the detection of SNP TSC0026831
aaatatcccaca

SEQ ID NO: 315285 - DNA, 12 bp, Artificial Sequence
  Oligonucleotide primer for the detection of SNP TSC0026831
aaatatcccgca

SEQ ID NO: 315286 - DNA, 12 bp, Artificial Sequence
  Oligonucleotide primer for the detection of SNP TSC0026831
agattatgtgat

SEQ ID NO: 315287 - DNA, 12 bp, Artificial Sequence
  Oligonucleotide primer for the detection of SNP TSC0026831
agattatgcgat

SEQ ID NO: 315288 - DNA, 12 bp, Artificial Sequence
  Oligonucleotide primer for the detection of SNP TSC0026831
agattatgtgac

SEQ ID NO: 315289 - DNA, 12 bp, Artificial Sequence
  Oligonucleotide primer for the detection of SNP TSC0026831
agattatgcgac

SEQ ID NO: 315290 - DNA, 12 bp, Artificial Sequence
  Oligonucleotide primer for the detection of SNP TSC0026832
aaaatacccaat

SEQ ID NO: 315291 - DNA, 12 bp, Artificial Sequence
  Oligonucleotide primer for the detection of SNP TSC0026832
tagggagatata

SEQ ID NO: 315292 - DNA, 12 bp, Artificial Sequence
  Oligonucleotide primer for the detection of SNP TSC0026833
taaacttcaata

SEQ ID NO: 315293 - DNA, 12 bp, Artificial Sequence
  Oligonucleotide primer for the detection of SNP TSC0026833
tatttttaaaaa

SEQ ID NO: 315294 - DNA, 12 bp, Artificial Sequence
  Oligonucleotide primer for the detection of SNP TSC0026833
ataaattttagt

SEQ ID NO: 315295 - DNA, 12 bp, Artificial Sequence
  Oligonucleotide primer for the detection of SNP TSC0026834
aaaacaaattcc

SEQ ID NO: 315296 - DNA, 12 bp, Artificial Sequence
  Oligonucleotide primer for the detection of SNP TSC0026834
aaaacgaattcc

SEQ ID NO: 315297 - DNA, 12 bp, Artificial Sequence
  Oligonucleotide primer for the detection of SNP TSC0026835
acaataaaaaca

SEQ ID NO: 315298 - DNA, 12 bp, Artificial Sequence
  Oligonucleotide primer for the detection of SNP TSC0026835
gggtgggtttag

SEQ ID NO: 315299 - DNA, 12 bp, Artificial Sequence
  Oligonucleotide primer for the detection of SNP TSC0026835
gatagtgggggt

SEQ ID NO: 315300 - DNA, 12 bp, Artificial Sequence
  Oligonucleotide primer for the detection of SNP TSC0026836
aaattcttataa

SEQ ID NO: 315301 - DNA, 12 bp, Artificial Sequence
  Oligonucleotide primer for the detection of SNP TSC0026836
gaattcttataa

SEQ ID NO: 315302 - DNA, 12 bp, Artificial Sequence
  Oligonucleotide primer for the detection of SNP TSC0026836
tagggaatagat

SEQ ID NO: 315303 - DNA, 12 bp, Artificial Sequence
  Oligonucleotide primer for the detection of SNP TSC0026836
gatttttataat

SEQ ID NO: 315304 - DNA, 12 bp, Artificial Sequence
  Oligonucleotide primer for the detection of SNP TSC0026836
gatttttataac

SEQ ID NO: 315305 - DNA, 12 bp, Artificial Sequence
  Oligonucleotide primer for the detection of SNP TSC0026837
aaccaaattttc

SEQ ID NO: 315306 - DNA, 12 bp, Artificial Sequence
  Oligonucleotide primer for the detection of SNP TSC0026837
aaccgaattttc

SEQ ID NO: 315307 - DNA, 12 bp, Artificial Sequence
  Oligonucleotide primer for the detection of SNP TSC0026837
gggtaaaattta

SEQ ID NO: 315308 - DNA, 12 bp, Artificial Sequence
  Oligonucleotide primer for the detection of SNP TSC0026838
ttttattttaaa

SEQ ID NO: 315309 - DNA, 12 bp, Artificial Sequence
  Oligonucleotide primer for the detection of SNP TSC0026841
atggaggttaaa

SEQ ID NO: 315310 - DNA, 12 bp, Artificial Sequence
  Oligonucleotide primer for the detection of SNP TSC0026845
aaccaaaacctt

SEQ ID NO: 315311 - DNA, 12 bp, Artificial Sequence
  Oligonucleotide primer for the detection of SNP TSC0026845
gagaaaggtggg

SEQ ID NO: 315312 - DNA, 12 bp, Artificial Sequence
  Oligonucleotide primer for the detection of SNP TSC0026848
atctataaaaaa

SEQ ID NO: 315313 - DNA, 12 bp, Artificial Sequence
  Oligonucleotide primer for the detection of SNP TSC0026848
atttggaatttt

SEQ ID NO: 315314 - DNA, 12 bp, Artificial Sequence
  Oligonucleotide primer for the detection of SNP TSC0026848
atttggaatttc

SEQ ID NO: 315315 - DNA, 12 bp, Artificial Sequence
  Oligonucleotide primer for the detection of SNP TSC0026848
acctaaaacccc

SEQ ID NO: 315316 - DNA, 12 bp, Artificial Sequence
  Oligonucleotide primer for the detection of SNP TSC0026848
tttatttgtagg

SEQ ID NO: 315317 - DNA, 12 bp, Artificial Sequence
  Oligonucleotide primer for the detection of SNP TSC0026849
aataataaaccc

SEQ ID NO: 315318 - DNA, 12 bp, Artificial Sequence
  Oligonucleotide primer for the detection of SNP TSC0026849
tgtgttttggag

SEQ ID NO: 315319 - DNA, 12 bp, Artificial Sequence
  Oligonucleotide primer for the detection of SNP TSC0026849
tgcgttttggag

SEQ ID NO: 315320 - DNA, 12 bp, Artificial Sequence
  Oligonucleotide primer for the detection of SNP TSC0026849
cgttttaaaaaa

SEQ ID NO: 315321 - DNA, 12 bp, Artificial Sequence
  Oligonucleotide primer for the detection of SNP TSC0026849
aatagtagattt

SEQ ID NO: 315322 - DNA, 12 bp, Artificial Sequence
  Oligonucleotide primer for the detection of SNP TSC0026850
aaaacaactcct

SEQ ID NO: 315323 - DNA, 12 bp, Artificial Sequence
  Oligonukleotid-Primer
ggtatgagggga

SEQ ID NO: 315324 - DNA, 12 bp, Artificial Sequence
  Oligonucleotide primer for the detection of SNP TSC0026851
accaaaaatcaa

SEQ ID NO: 315325 - DNA, 12 bp, Artificial Sequence
  Oligonucleotide primer for the detection of SNP TSC0026851
ttatgagttttt

SEQ ID NO: 315326 - DNA, 12 bp, Artificial Sequence
  Oligonucleotide primer for the detection of SNP TSC0026851
ttagaaattaat

SEQ ID NO: 315327 - DNA, 12 bp, Artificial Sequence
  Oligonukleotid-Primer
taaacttttcta

SEQ ID NO: 315328 - DNA, 12 bp, Artificial Sequence
  Oligonucleotide primer for the detection of SNP TSC0026853
tattaaaaatac

SEQ ID NO: 315329 - DNA, 12 bp, Artificial Sequence
  Oligonucleotide primer for the detection of SNP TSC0026853
ataagttttttt

SEQ ID NO: 315330 - DNA, 12 bp, Artificial Sequence
  Oligonucleotide primer for the detection of SNP TSC0026854
aaaatatgttta

SEQ ID NO: 315331 - DNA, 12 bp, Artificial Sequence
  Oligonucleotide primer for the detection of SNP TSC0026854
aaaacatatcca

SEQ ID NO: 315332 - DNA, 12 bp, Artificial Sequence
  Oligonucleotide primer for the detection of SNP TSC0026854
ttttggggatgt

SEQ ID NO: 315333 - DNA, 12 bp, Artificial Sequence
  Oligonucleotide primer for the detection of SNP TSC0026856
aacctattaaat

SEQ ID NO: 315334 - DNA, 12 bp, Artificial Sequence
  Oligonucleotide primer for the detection of SNP TSC0026856
tattttaaataa

SEQ ID NO: 315335 - DNA, 12 bp, Artificial Sequence
  Oligonucleotide primer for the detection of SNP TSC0026856
cactctaaacaa

SEQ ID NO: 315336 - DNA, 12 bp, Artificial Sequence
  Oligonucleotide primer for the detection of SNP TSC0026856
aatttattaaat

SEQ ID NO: 315337 - DNA, 12 bp, Artificial Sequence
  Oligonucleotide primer for the detection of SNP TSC0026857
caacactaaaac

SEQ ID NO: 315338 - DNA, 12 bp, Artificial Sequence
  Oligonucleotide primer for the detection of SNP TSC0026858
ccatataaaaac

SEQ ID NO: 315339 - DNA, 12 bp, Artificial Sequence
  Oligonucleotide primer for the detection of SNP TSC0026858
ccgtataaaaac

SEQ ID NO: 315340 - DNA, 12 bp, Artificial Sequence
  Oligonucleotide primer for the detection of SNP TSC0026858
atttaggttagg

SEQ ID NO: 315341 - DNA, 12 bp, Artificial Sequence
  Oligonucleotide primer for the detection of SNP TSC0026858
acccaaaccaaa

SEQ ID NO: 315342 - DNA, 12 bp, Artificial Sequence
  Oligonucleotide primer for the detection of SNP TSC0026858
ttgtgtgggggt

SEQ ID NO: 315343 - DNA, 12 bp, Artificial Sequence
  Oligonucleotide primer for the detection of SNP TSC0026858
tcgtgtgggggt

SEQ ID NO: 315344 - DNA, 12 bp, Artificial Sequence
  Oligonucleotide primer for the detection of SNP TSC0026860
attaaaacaaaa

SEQ ID NO: 315345 - DNA, 12 bp, Artificial Sequence
  Oligonucleotide primer for the detection of SNP TSC0026860
tattttaggttt

SEQ ID NO: 315346 - DNA, 12 bp, Artificial Sequence
  Oligonucleotide primer for the detection of SNP TSC0026860
actcactttaaa

SEQ ID NO: 315347 - DNA, 12 bp, Artificial Sequence
  Oligonucleotide primer for the detection of SNP TSC0026860
gttggagtagag

SEQ ID NO: 315348 - DNA, 12 bp, Artificial Sequence
  Oligonucleotide primer for the detection of SNP TSC0026861
ataaaaaacatt

SEQ ID NO: 315349 - DNA, 12 bp, Artificial Sequence
  Oligonucleotide primer for the detection of SNP TSC0026861
atattttggatg

SEQ ID NO: 315350 - DNA, 12 bp, Artificial Sequence
  Oligonucleotide primer for the detection of SNP TSC0026862
tactttttctaa

SEQ ID NO: 315351 - DNA, 12 bp, Artificial Sequence
  Oligonucleotide primer for the detection of SNP TSC0026862
aaaagatggtat

SEQ ID NO: 315352 - DNA, 12 bp, Artificial Sequence
  Oligonucleotide primer for the detection of SNP TSC0026863
ccccgcccaaaa

SEQ ID NO: 315353 - DNA, 12 bp, Artificial Sequence
  Oligonucleotide primer for the detection of SNP TSC0026863
ctcatcctaacc

SEQ ID NO: 315354 - DNA, 12 bp, Artificial Sequence
  Oligonucleotide primer for the detection of SNP TSC0026863
ttttgtttaggg

SEQ ID NO: 315355 - DNA, 12 bp, Artificial Sequence
  Oligonucleotide primer for the detection of SNP TSC0026863
tttcgtttaggg

SEQ ID NO: 315356 - DNA, 12 bp, Artificial Sequence
  Oligonucleotide primer for the detection of SNP TSC0026864
aatttccccatc

SEQ ID NO: 315357 - DNA, 12 bp, Artificial Sequence
  Oligonucleotide primer for the detection of SNP TSC0026864
gatttccccatc

SEQ ID NO: 315358 - DNA, 12 bp, Artificial Sequence
  Oligonucleotide primer for the detection of SNP TSC0026864
ggtgggagtggg

SEQ ID NO: 315359 - DNA, 12 bp, Artificial Sequence
  Oligonucleotide primer for the detection of SNP TSC0026865
atcccaatctcc

SEQ ID NO: 315360 - DNA, 12 bp, Artificial Sequence
  Oligonucleotide primer for the detection of SNP TSC0026865
gtttggttttaa

SEQ ID NO: 315361 - DNA, 12 bp, Artificial Sequence
  Oligonucleotide primer for the detection of SNP TSC0026867
ggaagttgtagt

SEQ ID NO: 315362 - DNA, 12 bp, Artificial Sequence
  Oligonucleotide primer for the detection of SNP TSC0026867
aaaattataata

SEQ ID NO: 315363 - DNA, 12 bp, Artificial Sequence
  Oligonucleotide primer for the detection of SNP TSC0026867
atagttagagtt

SEQ ID NO: 315364 - DNA, 12 bp, Artificial Sequence
  Oligonucleotide primer for the detection of SNP TSC0026869
gtgtagtggtgt

SEQ ID NO: 315365 - DNA, 12 bp, Artificial Sequence
  Oligonucleotide primer for the detection of SNP TSC0026869
gtgtagtggtgc

SEQ ID NO: 315366 - DNA, 12 bp, Artificial Sequence
  Oligonucleotide primer for the detection of SNP TSC0026871
atacccaccacc

SEQ ID NO: 315367 - DNA, 12 bp, Artificial Sequence
  Oligonucleotide primer for the detection of SNP TSC0026872
aaacaaaaactt

SEQ ID NO: 315368 - DNA, 12 bp, Artificial Sequence
  Oligonucleotide primer for the detection of SNP TSC0026872
tttttttagtta

SEQ ID NO: 315369 - DNA, 12 bp, Artificial Sequence
  Oligonucleotide primer for the detection of SNP TSC0026872
cctttctaacca

SEQ ID NO: 315370 - DNA, 12 bp, Artificial Sequence
  Oligonucleotide primer for the detection of SNP TSC0026872
aataagggtttt

SEQ ID NO: 315371 - DNA, 12 bp, Artificial Sequence
  Oligonucleotide primer for the detection of SNP TSC0026872
aataagggtttc

SEQ ID NO: 315372 - DNA, 12 bp, Artificial Sequence
  Oligonucleotide primer for the detection of SNP TSC0026873
aaccaaaattta

SEQ ID NO: 315373 - DNA, 12 bp, Artificial Sequence
  Oligonucleotide primer for the detection of SNP TSC0026873
atgttgtttagg

SEQ ID NO: 315374 - DNA, 12 bp, Artificial Sequence
  Oligonucleotide primer for the detection of SNP TSC0026874
taattctcctac

SEQ ID NO: 315375 - DNA, 12 bp, Artificial Sequence
  Oligonucleotide primer for the detection of SNP TSC0026889
tccatccatcca

SEQ ID NO: 315376 - DNA, 12 bp, Artificial Sequence
  Oligonucleotide primer for the detection of SNP TSC0026889
gatggatagatt

SEQ ID NO: 315377 - DNA, 12 bp, Artificial Sequence
  Oligonucleotide primer for the detection of SNP TSC0026892
attaactttact

SEQ ID NO: 315378 - DNA, 12 bp, Artificial Sequence
  Oligonucleotide primer for the detection of SNP TSC0026892
gtgttaggtata

SEQ ID NO: 315379 - DNA, 12 bp, Artificial Sequence
  Oligonucleotide primer for the detection of SNP TSC0026893
ataatttactcc

SEQ ID NO: 315380 - DNA, 12 bp, Artificial Sequence
  Oligonucleotide primer for the detection of SNP TSC0026893
gtaatttactcc

SEQ ID NO: 315381 - DNA, 12 bp, Artificial Sequence
  Oligonucleotide primer for the detection of SNP TSC0026893
tattggtagtaa

SEQ ID NO: 315382 - DNA, 12 bp, Artificial Sequence
  Oligonucleotide primer for the detection of SNP TSC0026894
atattgaaatgt

SEQ ID NO: 315383 - DNA, 12 bp, Artificial Sequence
  Oligonucleotide primer for the detection of SNP TSC0026894
acactaaaatac

SEQ ID NO: 315384 - DNA, 12 bp, Artificial Sequence
  Oligonucleotide primer for the detection of SNP TSC0026894
gggtgaaatgag

SEQ ID NO: 315385 - DNA, 12 bp, Artificial Sequence
  Oligonucleotide primer for the detection of SNP TSC0026895
catactaaaatc

SEQ ID NO: 315386 - DNA, 12 bp, Artificial Sequence
  Oligonucleotide primer for the detection of SNP TSC0026895
taattgttgtaa

SEQ ID NO: 315387 - DNA, 12 bp, Artificial Sequence
  Oligonucleotide primer for the detection of SNP TSC0026896
caaattactata

SEQ ID NO: 315388 - DNA, 12 bp, Artificial Sequence
  Oligonucleotide primer for the detection of SNP TSC0026896
ttttttgagtgt

SEQ ID NO: 315389 - DNA, 12 bp, Artificial Sequence
  Oligonucleotide primer for the detection of SNP TSC0026896
ccccttaaatat

SEQ ID NO: 315390 - DNA, 12 bp, Artificial Sequence
  Oligonucleotide primer for the detection of SNP TSC0026896
taagttattgtg

SEQ ID NO: 315391 - DNA, 12 bp, Artificial Sequence
  Oligonucleotide primer for the detection of SNP TSC0026897
caaacaacaaaa

SEQ ID NO: 315392 - DNA, 12 bp, Artificial Sequence
  Oligonucleotide primer for the detection of SNP TSC0026897
gttatttaggag

SEQ ID NO: 315393 - DNA, 12 bp, Artificial Sequence
  Oligonucleotide primer for the detection of SNP TSC0026897
accacccaaaaa

SEQ ID NO: 315394 - DNA, 12 bp, Artificial Sequence
  Oligonucleotide primer for the detection of SNP TSC0026897
ttttaaatagta

SEQ ID NO: 315395 - DNA, 12 bp, Artificial Sequence
  Oligonucleotide primer for the detection of SNP TSC0026898
aaactaatataa

SEQ ID NO: 315396 - DNA, 12 bp, Artificial Sequence
  Oligonucleotide primer for the detection of SNP TSC0026898
tattttgatata

SEQ ID NO: 315397 - DNA, 12 bp, Artificial Sequence
  Oligonucleotide primer for the detection of SNP TSC0026898
tatttcgatata

SEQ ID NO: 315398 - DNA, 12 bp, Artificial Sequence
  Oligonucleotide primer for the detection of SNP TSC0026898
caccccaacata

SEQ ID NO: 315399 - DNA, 12 bp, Artificial Sequence
  Oligonucleotide primer for the detection of SNP TSC0026898
caccccgacata

SEQ ID NO: 315400 - DNA, 12 bp, Artificial Sequence
  Oligonucleotide primer for the detection of SNP TSC0026898
gggttgatgtgg

SEQ ID NO: 315401 - DNA, 12 bp, Artificial Sequence
  Oligonucleotide primer for the detection of SNP TSC0026900
cattctccctcc

SEQ ID NO: 315402 - DNA, 12 bp, Artificial Sequence
  Oligonucleotide primer for the detection of SNP TSC0026900
ggagggagggat

SEQ ID NO: 315403 - DNA, 12 bp, Artificial Sequence
  Oligonucleotide primer for the detection of SNP TSC0026901
tcttaaactcct

SEQ ID NO: 315404 - DNA, 12 bp, Artificial Sequence
  Oligonucleotide primer for the detection of SNP TSC0026903
aaaacctaaaaa

SEQ ID NO: 315405 - DNA, 12 bp, Artificial Sequence
  Oligonucleotide primer for the detection of SNP TSC0026903
tccctaccccat

SEQ ID NO: 315406 - DNA, 12 bp, Artificial Sequence
  Oligonucleotide primer for the detection of SNP TSC0026903
tccctaccccgt

SEQ ID NO: 315407 - DNA, 12 bp, Artificial Sequence
  Oligonucleotide primer for the detection of SNP TSC0026903
ggggtttgaggg

SEQ ID NO: 315408 - DNA, 12 bp, Artificial Sequence
  Oligonucleotide primer for the detection of SNP TSC0026904
tttaattttgta

SEQ ID NO: 315409 - DNA, 12 bp, Artificial Sequence
  Oligonucleotide primer for the detection of SNP TSC0026904
ttcaattctata

SEQ ID NO: 315410 - DNA, 12 bp, Artificial Sequence
  Oligonucleotide primer for the detection of SNP TSC0026904
ggagagtagagt

SEQ ID NO: 315411 - DNA, 12 bp, Artificial Sequence
  Oligonucleotide primer for the detection of SNP TSC0026907
taaatatatgaa

SEQ ID NO: 315412 - DNA, 12 bp, Artificial Sequence
  Oligonucleotide primer for the detection of SNP TSC0026908
aactaaaataaa

SEQ ID NO: 315413 - DNA, 12 bp, Artificial Sequence
  Oligonucleotide primer for the detection of SNP TSC0026908
atttggaaagtt

SEQ ID NO: 315414 - DNA, 12 bp, Artificial Sequence
  Oligonucleotide primer for the detection of SNP TSC0026908
atctaaaaaatt

SEQ ID NO: 315415 - DNA, 12 bp, Artificial Sequence
  Oligonucleotide primer for the detection of SNP TSC0026908
gattgaagtgaa

SEQ ID NO: 315416 - DNA, 12 bp, Artificial Sequence
  Oligonucleotide primer for the detection of SNP TSC0026910
ccacatcatcta

SEQ ID NO: 315417 - DNA, 12 bp, Artificial Sequence
  Oligonucleotide primer for the detection of SNP TSC0026910
ccacatcgtcta

SEQ ID NO: 315418 - DNA, 12 bp, Artificial Sequence
  Oligonucleotide primer for the detection of SNP TSC0026910
ccgcatcatcta

SEQ ID NO: 315419 - DNA, 12 bp, Artificial Sequence
  Oligonucleotide primer for the detection of SNP TSC0026910
ccgcatcgtcta

SEQ ID NO: 315420 - DNA, 12 bp, Artificial Sequence
  Oligonucleotide primer for the detection of SNP TSC0026910
tttgttgggtat

SEQ ID NO: 315421 - DNA, 12 bp, Artificial Sequence
  Oligonucleotide primer for the detection of SNP TSC0026910
tctactaaacat

SEQ ID NO: 315422 - DNA, 12 bp, Artificial Sequence
  Oligonucleotide primer for the detection of SNP TSC0026910
ttgtattgtttg

SEQ ID NO: 315423 - DNA, 12 bp, Artificial Sequence
  Oligonucleotide primer for the detection of SNP TSC0026910
tcgtattgtttg

SEQ ID NO: 315424 - DNA, 12 bp, Artificial Sequence
  Oligonucleotide primer for the detection of SNP TSC0026910
ttgtatcgtttg

SEQ ID NO: 315425 - DNA, 12 bp, Artificial Sequence
  Oligonucleotide primer for the detection of SNP TSC0026910
tcgtatcgtttg

SEQ ID NO: 315426 - DNA, 12 bp, Artificial Sequence
  Oligonucleotide primer for the detection of SNP TSC0026912
taccattccata

SEQ ID NO: 315427 - DNA, 12 bp, Artificial Sequence
  Oligonucleotide primer for the detection of SNP TSC0026912
tgatatagagtt

SEQ ID NO: 315428 - DNA, 12 bp, Artificial Sequence
  Oligonucleotide primer for the detection of SNP TSC0026912
taacataaaatt

SEQ ID NO: 315429 - DNA, 12 bp, Artificial Sequence
  Oligonucleotide primer for the detection of SNP TSC0026913
atatatcttaac

SEQ ID NO: 315430 - DNA, 12 bp, Artificial Sequence
  Oligonucleotide primer for the detection of SNP TSC0026913
aatatagtgtag

SEQ ID NO: 315431 - DNA, 12 bp, Artificial Sequence
  Oligonucleotide primer for the detection of SNP TSC0026914
aaatccccaatc

SEQ ID NO: 315432 - DNA, 12 bp, Artificial Sequence
  Oligonucleotide primer for the detection of SNP TSC0026914
atttttgggata

SEQ ID NO: 315433 - DNA, 12 bp, Artificial Sequence
  Oligonucleotide primer for the detection of SNP TSC0026915
taatacccccat

SEQ ID NO: 315434 - DNA, 12 bp, Artificial Sequence
  Oligonucleotide primer for the detection of SNP TSC0026915
tctcatctatca

SEQ ID NO: 315435 - DNA, 12 bp, Artificial Sequence
  Oligonucleotide primer for the detection of SNP TSC0026916
ttcaatcaaata

SEQ ID NO: 315436 - DNA, 12 bp, Artificial Sequence
  Oligonucleotide primer for the detection of SNP TSC0026916
aatgggggtatt

SEQ ID NO: 315437 - DNA, 12 bp, Artificial Sequence
  Oligonucleotide primer for the detection of SNP TSC0026916
ttaattaaatat

SEQ ID NO: 315438 - DNA, 12 bp, Artificial Sequence
  Oligonucleotide primer for the detection of SNP TSC0026917
tcattaccatca

SEQ ID NO: 315439 - DNA, 12 bp, Artificial Sequence
  Oligonucleotide primer for the detection of SNP TSC0026917
ggttttaataat

SEQ ID NO: 315440 - DNA, 12 bp, Artificial Sequence
  Oligonucleotide primer for the detection of SNP TSC0026917
ggttttaataac

SEQ ID NO: 315441 - DNA, 12 bp, Artificial Sequence
  Oligonucleotide primer for the detection of SNP TSC0026917
aactttaataac

SEQ ID NO: 315442 - DNA, 12 bp, Artificial Sequence
  Oligonucleotide primer for the detection of SNP TSC0026917
ttattgttatta

SEQ ID NO: 315443 - DNA, 12 bp, Artificial Sequence
  Oligonucleotide primer for the detection of SNP TSC0026918
taaaactaccct

SEQ ID NO: 315444 - DNA, 12 bp, Artificial Sequence
  Oligonucleotide primer for the detection of SNP TSC0026918
atctattttttt

SEQ ID NO: 315445 - DNA, 12 bp, Artificial Sequence
  Oligonucleotide primer for the detection of SNP TSC0026920
tagggttggatg

SEQ ID NO: 315446 - DNA, 12 bp, Artificial Sequence
  Oligonucleotide primer for the detection of SNP TSC0026921
tgttaatatgtt

SEQ ID NO: 315447 - DNA, 12 bp, Artificial Sequence
  Oligonucleotide primer for the detection of SNP TSC0026921
cgttaatatgtt

SEQ ID NO: 315448 - DNA, 12 bp, Artificial Sequence
  Oligonucleotide primer for the detection of SNP TSC0026921
cattaacatatt

SEQ ID NO: 315449 - DNA, 12 bp, Artificial Sequence
  Oligonucleotide primer for the detection of SNP TSC0026921
cgttaacatatt

SEQ ID NO: 315450 - DNA, 12 bp, Artificial Sequence
  Oligonucleotide primer for the detection of SNP TSC0026921
aggaaggatgtg

SEQ ID NO: 315451 - DNA, 12 bp, Artificial Sequence
  Oligonucleotide primer for the detection of SNP TSC0026922
ctataacaaaac

SEQ ID NO: 315452 - DNA, 12 bp, Artificial Sequence
  Oligonucleotide primer for the detection of SNP TSC0026922
ttttatttttcg

SEQ ID NO: 315453 - DNA, 12 bp, Artificial Sequence
  Oligonucleotide primer for the detection of SNP TSC0026923
aaacaaaatata

SEQ ID NO: 315454 - DNA, 12 bp, Artificial Sequence
  Oligonucleotide primer for the detection of SNP TSC0026923
ggagtggggagt

SEQ ID NO: 315455 - DNA, 12 bp, Artificial Sequence
  Oligonucleotide primer for the detection of SNP TSC0026923
gagtaaggtgtg

SEQ ID NO: 315456 - DNA, 12 bp, Artificial Sequence
  Oligonucleotide primer for the detection of SNP TSC0026924
cctaaaattaac

SEQ ID NO: 315457 - DNA, 12 bp, Artificial Sequence
  Oligonucleotide primer for the detection of SNP TSC0026924
ttaatttttaaa

SEQ ID NO: 315458 - DNA, 12 bp, Artificial Sequence
  Oligonucleotide primer for the detection of SNP TSC0026925
cccaacccacaa

SEQ ID NO: 315459 - DNA, 12 bp, Artificial Sequence
  Oligonucleotide primer for the detection of SNP TSC0026925
cccgacccacaa

SEQ ID NO: 315460 - DNA, 12 bp, Artificial Sequence
  Oligonucleotide primer for the detection of SNP TSC0026925
tttttttataat

SEQ ID NO: 315461 - DNA, 12 bp, Artificial Sequence
  Oligonucleotide primer for the detection of SNP TSC0026925
ggtttataattt

SEQ ID NO: 315462 - DNA, 12 bp, Artificial Sequence
  Oligonucleotide primer for the detection of SNP TSC0026926
ttttgtgtgtgg

SEQ ID NO: 315463 - DNA, 12 bp, Artificial Sequence
  Oligonucleotide primer for the detection of SNP TSC0026926
ttctatatataa

SEQ ID NO: 315464 - DNA, 12 bp, Artificial Sequence
  Oligonucleotide primer for the detection of SNP TSC0026927
tttgtgtgtggg

SEQ ID NO: 315465 - DNA, 12 bp, Artificial Sequence
  Oligonucleotide primer for the detection of SNP TSC0026927
tctatatataaa

SEQ ID NO: 315466 - DNA, 12 bp, Artificial Sequence
  Oligonucleotide primer for the detection of SNP TSC0026928
aacccaataaaa

SEQ ID NO: 315467 - DNA, 12 bp, Artificial Sequence
  Oligonucleotide primer for the detection of SNP TSC0026928
aacccgataaaa

SEQ ID NO: 315468 - DNA, 12 bp, Artificial Sequence
  Oligonucleotide primer for the detection of SNP TSC0026928
ttggtcggtttt

SEQ ID NO: 315469 - DNA, 12 bp, Artificial Sequence
  Oligonucleotide primer for the detection of SNP TSC0026928
ttggttggtttc

SEQ ID NO: 315470 - DNA, 12 bp, Artificial Sequence
  Oligonucleotide primer for the detection of SNP TSC0026928
ttggtcggtttc

SEQ ID NO: 315471 - DNA, 12 bp, Artificial Sequence
  Oligonucleotide primer for the detection of SNP TSC0026928
ttaatcaacccc

SEQ ID NO: 315472 - DNA, 12 bp, Artificial Sequence
  Oligonucleotide primer for the detection of SNP TSC0026928
ttaatcgacccc

SEQ ID NO: 315473 - DNA, 12 bp, Artificial Sequence
  Oligonucleotide primer for the detection of SNP TSC0026928
ggtttggtgggg

SEQ ID NO: 315474 - DNA, 12 bp, Artificial Sequence
  Oligonucleotide primer for the detection of SNP TSC0026928
ggttcggtgggg

SEQ ID NO: 315475 - DNA, 12 bp, Artificial Sequence
  Oligonucleotide primer for the detection of SNP TSC0026929
aaccccatccct

SEQ ID NO: 315476 - DNA, 12 bp, Artificial Sequence
  Oligonucleotide primer for the detection of SNP TSC0026929
agttattggtag

SEQ ID NO: 315477 - DNA, 12 bp, Artificial Sequence
  Oligonucleotide primer for the detection of SNP TSC0026929
agttatcggtag

SEQ ID NO: 315478 - DNA, 12 bp, Artificial Sequence
  Oligonucleotide primer for the detection of SNP TSC0026931
cttaaaaaacat

SEQ ID NO: 315479 - DNA, 12 bp, Artificial Sequence
  Oligonucleotide primer for the detection of SNP TSC0026931
ggtagtttaata

SEQ ID NO: 315480 - DNA, 12 bp, Artificial Sequence
  Oligonucleotide primer for the detection of SNP TSC0026931
aataatccaata

SEQ ID NO: 315481 - DNA, 12 bp, Artificial Sequence
  Oligonucleotide primer for the detection of SNP TSC0026931
tttagaaagtat

SEQ ID NO: 315482 - DNA, 12 bp, Artificial Sequence
  Oligonucleotide primer for the detection of SNP TSC0026935
caaacttaaaac

SEQ ID NO: 315483 - DNA, 12 bp, Artificial Sequence
  Oligonucleotide primer for the detection of SNP TSC0026935
ttgaatatagta

SEQ ID NO: 315484 - DNA, 12 bp, Artificial Sequence
  Oligonucleotide primer for the detection of SNP TSC0026936
aataactattat

SEQ ID NO: 315485 - DNA, 12 bp, Artificial Sequence
  Oligonucleotide primer for the detection of SNP TSC0026936
tggagatataat

SEQ ID NO: 315486 - DNA, 12 bp, Artificial Sequence
  Oligonucleotide primer for the detection of SNP TSC0026936
aataattattat

SEQ ID NO: 315487 - DNA, 12 bp, Artificial Sequence
  Oligonucleotide primer for the detection of SNP TSC0026937
ttaagggtggaa

SEQ ID NO: 315488 - DNA, 12 bp, Artificial Sequence
  Oligonucleotide primer for the detection of SNP TSC0026938
tggtttgataat

SEQ ID NO: 315489 - DNA, 12 bp, Artificial Sequence
  Oligonucleotide primer for the detection of SNP TSC0026938
tttaacaacaaa

SEQ ID NO: 315490 - DNA, 12 bp, Artificial Sequence
  Oligonucleotide primer for the detection of SNP TSC0026938
tatatagaggga

SEQ ID NO: 315491 - DNA, 12 bp, Artificial Sequence
  Oligonucleotide primer for the detection of SNP TSC0026940
taaataaaatct

SEQ ID NO: 315492 - DNA, 12 bp, Artificial Sequence
  Oligonucleotide primer for the detection of SNP TSC0026940
taaggtttaggg

SEQ ID NO: 315493 - DNA, 12 bp, Artificial Sequence
  Oligonucleotide primer for the detection of SNP TSC0026942
gtttttgtttga

SEQ ID NO: 315494 - DNA, 12 bp, Artificial Sequence
  Oligonucleotide primer for the detection of SNP TSC0026942
gttttcgtttga

SEQ ID NO: 315495 - DNA, 12 bp, Artificial Sequence
  Oligonucleotide primer for the detection of SNP TSC0026944
tcgttttatatt

SEQ ID NO: 315496 - DNA, 12 bp, Artificial Sequence
  Oligonucleotide primer for the detection of SNP TSC0026944
catcccacacta

SEQ ID NO: 315497 - DNA, 12 bp, Artificial Sequence
  Oligonucleotide primer for the detection of SNP TSC0026944
cgtcccacacta

SEQ ID NO: 315498 - DNA, 12 bp, Artificial Sequence
  Oligonucleotide primer for the detection of SNP TSC0026944
gaagtaatggtt

SEQ ID NO: 315499 - DNA, 12 bp, Artificial Sequence
  Oligonucleotide primer for the detection of SNP TSC0026944
gaagtaatggtc

SEQ ID NO: 315500 - DNA, 12 bp, Artificial Sequence
  Oligonucleotide primer for the detection of SNP TSC0026948
ccttcatactat

SEQ ID NO: 315501 - DNA, 12 bp, Artificial Sequence
  Oligonucleotide primer for the detection of SNP TSC0026948
gtaagagagtaa

SEQ ID NO: 315502 - DNA, 12 bp, Artificial Sequence
  Oligonucleotide primer for the detection of SNP TSC0026950
aaatttaccaat

SEQ ID NO: 315503 - DNA, 12 bp, Artificial Sequence
  Oligonucleotide primer for the detection of SNP TSC0026950
aagattatttag

SEQ ID NO: 315504 - DNA, 12 bp, Artificial Sequence
  Oligonucleotide primer for the detection of SNP TSC0026951
gtatgggggaat

SEQ ID NO: 315505 - DNA, 12 bp, Artificial Sequence
  Oligonucleotide primer for the detection of SNP TSC0026951
gtacgggggaat

SEQ ID NO: 315506 - DNA, 12 bp, Artificial Sequence
  Oligonucleotide primer for the detection of SNP TSC0026951
gattatgggagt

SEQ ID NO: 315507 - DNA, 12 bp, Artificial Sequence
  Oligonucleotide primer for the detection of SNP TSC0026952
cccaacactaac

SEQ ID NO: 315508 - DNA, 12 bp, Artificial Sequence
  Oligonucleotide primer for the detection of SNP TSC0026952
taggtgtgtttg

SEQ ID NO: 315509 - DNA, 12 bp, Artificial Sequence
  Oligonucleotide primer for the detection of SNP TSC0026953
ctcaaaaaactt

SEQ ID NO: 315510 - DNA, 12 bp, Artificial Sequence
  Oligonucleotide primer for the detection of SNP TSC0026953
tgtaggtagtga

SEQ ID NO: 315511 - DNA, 12 bp, Artificial Sequence
  Oligonucleotide primer for the detection of SNP TSC0026954
tatacaaacata

SEQ ID NO: 315512 - DNA, 12 bp, Artificial Sequence
  Oligonucleotide primer for the detection of SNP TSC0026954
tgttttttatgg

SEQ ID NO: 315513 - DNA, 12 bp, Artificial Sequence
  Oligonucleotide primer for the detection of SNP TSC0026954
tacctcccataa

SEQ ID NO: 315514 - DNA, 12 bp, Artificial Sequence
  Oligonucleotide primer for the detection of SNP TSC0026954
tgtgtagatatg

SEQ ID NO: 315515 - DNA, 12 bp, Artificial Sequence
  Oligonucleotide primer for the detection of SNP TSC0026955
aaactcaaaacc

SEQ ID NO: 315516 - DNA, 12 bp, Artificial Sequence
  Oligonucleotide primer for the detection of SNP TSC0026955
aaactcgaaacc

SEQ ID NO: 315517 - DNA, 12 bp, Artificial Sequence
  Oligonucleotide primer for the detection of SNP TSC0026955
tatgtttgtata

SEQ ID NO: 315518 - DNA, 12 bp, Artificial Sequence
  Oligonucleotide primer for the detection of SNP TSC0026956
ttaattataatc

SEQ ID NO: 315519 - DNA, 12 bp, Artificial Sequence
  Oligonucleotide primer for the detection of SNP TSC0026956
ttttttgaagat

SEQ ID NO: 315520 - DNA, 12 bp, Artificial Sequence
  Oligonucleotide primer for the detection of SNP TSC0026956
atttcctaaaaa

SEQ ID NO: 315521 - DNA, 12 bp, Artificial Sequence
  Oligonukleotid-Primer
taattgtgattt

SEQ ID NO: 315522 - DNA, 12 bp, Artificial Sequence
  Oligonucleotide primer for the detection of SNP TSC0026957
cccaccttatac

SEQ ID NO: 315523 - DNA, 12 bp, Artificial Sequence
  Oligonucleotide primer for the detection of SNP TSC0026957
atagggttttgg

SEQ ID NO: 315524 - DNA, 12 bp, Artificial Sequence
  Oligonucleotide primer for the detection of SNP TSC0026958
caattcccacct

SEQ ID NO: 315525 - DNA, 12 bp, Artificial Sequence
  Oligonukleotid-Primer
tttggatttgta

SEQ ID NO: 315526 - DNA, 12 bp, Artificial Sequence
  Oligonucleotide primer for the detection of SNP TSC0026963
cataaccaaaaa

SEQ ID NO: 315527 - DNA, 12 bp, Artificial Sequence
  Oligonucleotide primer for the detection of SNP TSC0026963
tggaggatttgt

SEQ ID NO: 315528 - DNA, 12 bp, Artificial Sequence
  Oligonucleotide primer for the detection of SNP TSC0026963
tggaggatttgc

SEQ ID NO: 315529 - DNA, 12 bp, Artificial Sequence
  Oligonukleotid-Primer
ttttactattaa

SEQ ID NO: 315530 - DNA, 12 bp, Artificial Sequence
  Oligonucleotide primer for the detection of SNP TSC0026966
ttaaatttataa

SEQ ID NO: 315531 - DNA, 12 bp, Artificial Sequence
  Oligonucleotide primer for the detection of SNP TSC0026966
ttttgttgttgg

SEQ ID NO: 315532 - DNA, 12 bp, Artificial Sequence
  Oligonucleotide primer for the detection of SNP TSC0026967
tttaaaaccaac

SEQ ID NO: 315533 - DNA, 12 bp, Artificial Sequence
  Oligonucleotide primer for the detection of SNP TSC0026967
ttatgttgatta

SEQ ID NO: 315534 - DNA, 12 bp, Artificial Sequence
  Oligonucleotide primer for the detection of SNP TSC0026968
atcattttaaac

SEQ ID NO: 315535 - DNA, 12 bp, Artificial Sequence
  Oligonucleotide primer for the detection of SNP TSC0026968
gagagatattaa

SEQ ID NO: 315536 - DNA, 12 bp, Artificial Sequence
  Oligonucleotide primer for the detection of SNP TSC0026969
aaacctttacaa

SEQ ID NO: 315537 - DNA, 12 bp, Artificial Sequence
  Oligonucleotide primer for the detection of SNP TSC0026969
agaaaatggaaa

SEQ ID NO: 315538 - DNA, 12 bp, Artificial Sequence
  Oligonucleotide primer for the detection of SNP TSC0026969
gggtttttatag

SEQ ID NO: 315539 - DNA, 12 bp, Artificial Sequence
  Oligonucleotide primer for the detection of SNP TSC0026970
tctaataaaaat

SEQ ID NO: 315540 - DNA, 12 bp, Artificial Sequence
  Oligonucleotide primer for the detection of SNP TSC0026970
taatatggtgaa

SEQ ID NO: 315541 - DNA, 12 bp, Artificial Sequence
  Oligonucleotide primer for the detection of SNP TSC0026970
taatacggtgaa

SEQ ID NO: 315542 - DNA, 12 bp, Artificial Sequence
  Oligonucleotide primer for the detection of SNP TSC0026971
ccacaacaacca

SEQ ID NO: 315543 - DNA, 12 bp, Artificial Sequence
  Oligonucleotide primer for the detection of SNP TSC0026971
ccacaacaaccg

SEQ ID NO: 315544 - DNA, 12 bp, Artificial Sequence
  Oligonucleotide primer for the detection of SNP TSC0026971
ccacaacgacca

SEQ ID NO: 315545 - DNA, 12 bp, Artificial Sequence
  Oligonucleotide primer for the detection of SNP TSC0026971
ccgcaacaacca

SEQ ID NO: 315546 - DNA, 12 bp, Artificial Sequence
  Oligonucleotide primer for the detection of SNP TSC0026971
ccacaacgaccg

SEQ ID NO: 315547 - DNA, 12 bp, Artificial Sequence
  Oligonucleotide primer for the detection of SNP TSC0026971
ccgcaacaaccg

SEQ ID NO: 315548 - DNA, 12 bp, Artificial Sequence
  Oligonucleotide primer for the detection of SNP TSC0026971
ccgcaacgacca

SEQ ID NO: 315549 - DNA, 12 bp, Artificial Sequence
  Oligonucleotide primer for the detection of SNP TSC0026971
ccgcaacgaccg

SEQ ID NO: 315550 - DNA, 12 bp, Artificial Sequence
  Oligonucleotide primer for the detection of SNP TSC0026971
ggttggggaggg

SEQ ID NO: 315551 - DNA, 12 bp, Artificial Sequence
  Oligonucleotide primer for the detection of SNP TSC0026971
ggtcggggaggg

SEQ ID NO: 315552 - DNA, 12 bp, Artificial Sequence
  Oligonucleotide primer for the detection of SNP TSC0026971
aatcgaaaaaaa

SEQ ID NO: 315553 - DNA, 12 bp, Artificial Sequence
  Oligonucleotide primer for the detection of SNP TSC0026971
ttgtagtgattg

SEQ ID NO: 315554 - DNA, 12 bp, Artificial Sequence
  Oligonucleotide primer for the detection of SNP TSC0026971
tcgtagtgattg

SEQ ID NO: 315555 - DNA, 12 bp, Artificial Sequence
  Oligonucleotide primer for the detection of SNP TSC0026971
ttgtagcgattg

SEQ ID NO: 315556 - DNA, 12 bp, Artificial Sequence
  Oligonucleotide primer for the detection of SNP TSC0026971
ttgtagtgatcg

SEQ ID NO: 315557 - DNA, 12 bp, Artificial Sequence
  Oligonucleotide primer for the detection of SNP TSC0026971
tcgtagcgattg

SEQ ID NO: 315558 - DNA, 12 bp, Artificial Sequence
  Oligonucleotide primer for the detection of SNP TSC0026971
tcgtagtgatcg

SEQ ID NO: 315559 - DNA, 12 bp, Artificial Sequence
  Oligonucleotide primer for the detection of SNP TSC0026971
ttgtagcgatcg

SEQ ID NO: 315560 - DNA, 12 bp, Artificial Sequence
  Oligonucleotide primer for the detection of SNP TSC0026971
tcgtagcgatcg

SEQ ID NO: 315561 - DNA, 12 bp, Artificial Sequence
  Oligonucleotide primer for the detection of SNP TSC0026974
aaacaaccaaac

SEQ ID NO: 315562 - DNA, 12 bp, Artificial Sequence
  Oligonucleotide primer for the detection of SNP TSC0026974
aaacaaccgaac

SEQ ID NO: 315563 - DNA, 12 bp, Artificial Sequence
  Oligonucleotide primer for the detection of SNP TSC0026974
agagataatttt

SEQ ID NO: 315564 - DNA, 12 bp, Artificial Sequence
  Oligonucleotide primer for the detection of SNP TSC0026974
agagataatttc

SEQ ID NO: 315565 - DNA, 12 bp, Artificial Sequence
  Oligonucleotide primer for the detection of SNP TSC0026974
aaaaataacctc

SEQ ID NO: 315566 - DNA, 12 bp, Artificial Sequence
  Oligonucleotide primer for the detection of SNP TSC0026974
ataattgggttt

SEQ ID NO: 315567 - DNA, 12 bp, Artificial Sequence
  Oligonucleotide primer for the detection of SNP TSC0026974
ataatcgggttt

SEQ ID NO: 315568 - DNA, 12 bp, Artificial Sequence
  Oligonucleotide primer for the detection of SNP TSC0026975
tccactatcccc

SEQ ID NO: 315569 - DNA, 12 bp, Artificial Sequence
  Oligonucleotide primer for the detection of SNP TSC0026975
tccgctatcccc

SEQ ID NO: 315570 - DNA, 12 bp, Artificial Sequence
  Oligonucleotide primer for the detection of SNP TSC0026975
tggcgaggtttt

SEQ ID NO: 315571 - DNA, 12 bp, Artificial Sequence
  Oligonucleotide primer for the detection of SNP TSC0026975
tggtgaggtttc

SEQ ID NO: 315572 - DNA, 12 bp, Artificial Sequence
  Oligonucleotide primer for the detection of SNP TSC0026975
tggcgaggtttc

SEQ ID NO: 315573 - DNA, 12 bp, Artificial Sequence
  Oligonucleotide primer for the detection of SNP TSC0026975
ataacaaaactt

SEQ ID NO: 315574 - DNA, 12 bp, Artificial Sequence
  Oligonucleotide primer for the detection of SNP TSC0026975
ataacgaaactt

SEQ ID NO: 315575 - DNA, 12 bp, Artificial Sequence
  Oligonucleotide primer for the detection of SNP TSC0026977
ctatattctttt

SEQ ID NO: 315576 - DNA, 12 bp, Artificial Sequence
  Oligonucleotide primer for the detection of SNP TSC0026978
tcaacaaaacct

SEQ ID NO: 315577 - DNA, 12 bp, Artificial Sequence
  Oligonucleotide primer for the detection of SNP TSC0026978
attatttttgga

SEQ ID NO: 315578 - DNA, 12 bp, Artificial Sequence
  Oligonucleotide primer for the detection of SNP TSC0026979
tttaatatttcc

SEQ ID NO: 315579 - DNA, 12 bp, Artificial Sequence
  Oligonucleotide primer for the detection of SNP TSC0026979
gttgggagtgat

SEQ ID NO: 315580 - DNA, 12 bp, Artificial Sequence
  Oligonucleotide primer for the detection of SNP TSC0026979
gttgggagtgac

SEQ ID NO: 315581 - DNA, 12 bp, Artificial Sequence
  Oligonucleotide primer for the detection of SNP TSC0026979
actaaaaataac

SEQ ID NO: 315582 - DNA, 12 bp, Artificial Sequence
  Oligonukleotid-Primer
tttgatgttttt

SEQ ID NO: 315583 - DNA, 12 bp, Artificial Sequence
  Oligonucleotide primer for the detection of SNP TSC0026979
tttgatgttttc

SEQ ID NO: 315584 - DNA, 12 bp, Artificial Sequence
  Oligonucleotide primer for the detection of SNP TSC0026980
acctccaatact

SEQ ID NO: 315585 - DNA, 12 bp, Artificial Sequence
  Oligonucleotide primer for the detection of SNP TSC0026980
ggggatatggga

SEQ ID NO: 315586 - DNA, 12 bp, Artificial Sequence
  Oligonucleotide primer for the detection of SNP TSC0026980
ggggatacggga

SEQ ID NO: 315587 - DNA, 12 bp, Artificial Sequence
  Oligonucleotide primer for the detection of SNP TSC0026980
aaaaacacgaaa

SEQ ID NO: 315588 - DNA, 12 bp, Artificial Sequence
  Oligonucleotide primer for the detection of SNP TSC0026980
gtttttagtgtt

SEQ ID NO: 315589 - DNA, 12 bp, Artificial Sequence
  Oligonucleotide primer for the detection of SNP TSC0026981
tgggttttgtta

SEQ ID NO: 315590 - DNA, 12 bp, Artificial Sequence
  Oligonucleotide primer for the detection of SNP TSC0026982
tcaaacaataac

SEQ ID NO: 315591 - DNA, 12 bp, Artificial Sequence
  Oligonucleotide primer for the detection of SNP TSC0026982
gtttttggagtt

SEQ ID NO: 315592 - DNA, 12 bp, Artificial Sequence
  Oligonucleotide primer for the detection of SNP TSC0026982
atccttaaaatt

SEQ ID NO: 315593 - DNA, 12 bp, Artificial Sequence
  Oligonucleotide primer for the detection of SNP TSC0026982
aggtagtggttt

SEQ ID NO: 315594 - DNA, 12 bp, Artificial Sequence
  Oligonucleotide primer for the detection of SNP TSC0026983
aaaccacaataa

SEQ ID NO: 315595 - DNA, 12 bp, Artificial Sequence
  Oligonucleotide primer for the detection of SNP TSC0026983
actcaaacaatt

SEQ ID NO: 315596 - DNA, 12 bp, Artificial Sequence
  Oligonucleotide primer for the detection of SNP TSC0026983
ggaggttatagt

SEQ ID NO: 315597 - DNA, 12 bp, Artificial Sequence
  Oligonucleotide primer for the detection of SNP TSC0026984
acctataattcc

SEQ ID NO: 315598 - DNA, 12 bp, Artificial Sequence
  Oligonucleotide primer for the detection of SNP TSC0026984
gttttttgagta

SEQ ID NO: 315599 - DNA, 12 bp, Artificial Sequence
  Oligonucleotide primer for the detection of SNP TSC0026985
aaccctaaccaa

SEQ ID NO: 315600 - DNA, 12 bp, Artificial Sequence
  Oligonucleotide primer for the detection of SNP TSC0026985
agaggagggggt

SEQ ID NO: 315601 - DNA, 12 bp, Artificial Sequence
  Oligonucleotide primer for the detection of SNP TSC0026985
agttttgattag

SEQ ID NO: 315602 - DNA, 12 bp, Artificial Sequence
  Oligonucleotide primer for the detection of SNP TSC0026991
aaatctaaaaac

SEQ ID NO: 315603 - DNA, 12 bp, Artificial Sequence
  Oligonucleotide primer for the detection of SNP TSC0026991
agtaatatatgg

SEQ ID NO: 315604 - DNA, 12 bp, Artificial Sequence
  Oligonucleotide primer for the detection of SNP TSC0026991
agtaatatacgg

SEQ ID NO: 315605 - DNA, 12 bp, Artificial Sequence
  Oligonucleotide primer for the detection of SNP TSC0026991
aataatacacaa

SEQ ID NO: 315606 - DNA, 12 bp, Artificial Sequence
  Oligonucleotide primer for the detection of SNP TSC0026991
aataatacacga

SEQ ID NO: 315607 - DNA, 12 bp, Artificial Sequence
  Oligonucleotide primer for the detection of SNP TSC0026991
agatttgaggat

SEQ ID NO: 315608 - DNA, 12 bp, Artificial Sequence
  Oligonucleotide primer for the detection of SNP TSC0026992
tcacttatatat

SEQ ID NO: 315609 - DNA, 12 bp, Artificial Sequence
  Oligonucleotide primer for the detection of SNP TSC0026992
tcgcttatatat

SEQ ID NO: 315610 - DNA, 12 bp, Artificial Sequence
  Oligonucleotide primer for the detection of SNP TSC0026992
ttataatagttg

SEQ ID NO: 315611 - DNA, 12 bp, Artificial Sequence
  Oligonucleotide primer for the detection of SNP TSC0026992
ttataatagtcg

SEQ ID NO: 315612 - DNA, 12 bp, Artificial Sequence
  Oligonucleotide primer for the detection of SNP TSC0026993
taaatctcaatc

SEQ ID NO: 315613 - DNA, 12 bp, Artificial Sequence
  Oligonucleotide primer for the detection of SNP TSC0026994
actactaaaact

SEQ ID NO: 315614 - DNA, 12 bp, Artificial Sequence
  Oligonucleotide primer for the detection of SNP TSC0026994
tagttgtatgtg

SEQ ID NO: 315615 - DNA, 12 bp, Artificial Sequence
  Oligonucleotide primer for the detection of SNP TSC0026994
tagtcgtatgtg

SEQ ID NO: 315616 - DNA, 12 bp, Artificial Sequence
  Oligonucleotide primer for the detection of SNP TSC0026995
taatatacacct

SEQ ID NO: 315617 - DNA, 12 bp, Artificial Sequence
  Oligonucleotide primer for the detection of SNP TSC0026995
aggtagttggga

SEQ ID NO: 315618 - DNA, 12 bp, Artificial Sequence
  Oligonucleotide primer for the detection of SNP TSC0026995
aggtagtcggga

SEQ ID NO: 315619 - DNA, 12 bp, Artificial Sequence
  Oligonucleotide primer for the detection of SNP TSC0026996
aatcccgactac

SEQ ID NO: 315620 - DNA, 12 bp, Artificial Sequence
  Oligonucleotide primer for the detection of SNP TSC0026996
ttgggtttttta

SEQ ID NO: 315621 - DNA, 12 bp, Artificial Sequence
  Oligonucleotide primer for the detection of SNP TSC0026999
aaaaaatacatt

SEQ ID NO: 315622 - DNA, 12 bp, Artificial Sequence
  Oligonucleotide primer for the detection of SNP TSC0026999
tttaagtagata

SEQ ID NO: 315623 - DNA, 12 bp, Artificial Sequence
  Oligonucleotide primer for the detection of SNP TSC0027000
attaatatggaa

SEQ ID NO: 315624 - DNA, 12 bp, Artificial Sequence
  Oligonucleotide primer for the detection of SNP TSC0027000
ttaacataaaaa

SEQ ID NO: 315625 - DNA, 12 bp, Artificial Sequence
  Oligonucleotide primer for the detection of SNP TSC0027000
aattttaattat

SEQ ID NO: 315626 - DNA, 12 bp, Artificial Sequence
  Oligonucleotide primer for the detection of SNP TSC0027001
ggtatgattttg

SEQ ID NO: 315627 - DNA, 12 bp, Artificial Sequence
  Oligonucleotide primer for the detection of SNP TSC0027001
ggtacgattttg

SEQ ID NO: 315628 - DNA, 12 bp, Artificial Sequence
  Oligonucleotide primer for the detection of SNP TSC0027004
ttactaaaaaat

SEQ ID NO: 315629 - DNA, 12 bp, Artificial Sequence
  Oligonucleotide primer for the detection of SNP TSC0027004
ggatgtttgaga

SEQ ID NO: 315630 - DNA, 12 bp, Artificial Sequence
  Oligonucleotide primer for the detection of SNP TSC0027008
acccctaaaata

SEQ ID NO: 315631 - DNA, 12 bp, Artificial Sequence
  Oligonucleotide primer for the detection of SNP TSC0027008
aaggttggtgtt

SEQ ID NO: 315632 - DNA, 12 bp, Artificial Sequence
  Oligonucleotide primer for the detection of SNP TSC0027008
aaactaatacca

SEQ ID NO: 315633 - DNA, 12 bp, Artificial Sequence
  Oligonucleotide primer for the detection of SNP TSC0027008
tgtttttgagat

SEQ ID NO: 315634 - DNA, 12 bp, Artificial Sequence
  Oligonucleotide primer for the detection of SNP TSC0027009
tactaacaaaat

SEQ ID NO: 315635 - DNA, 12 bp, Artificial Sequence
  Oligonucleotide primer for the detection of SNP TSC0027012
taaacttaacac

SEQ ID NO: 315636 - DNA, 12 bp, Artificial Sequence
  Oligonucleotide primer for the detection of SNP TSC0027012
atatgtaagagg

SEQ ID NO: 315637 - DNA, 12 bp, Artificial Sequence
  Oligonucleotide primer for the detection of SNP TSC0027013
aactactctctt

SEQ ID NO: 315638 - DNA, 12 bp, Artificial Sequence
  Oligonucleotide primer for the detection of SNP TSC0027013
ggaaatttttaa

SEQ ID NO: 315639 - DNA, 12 bp, Artificial Sequence
  Oligonucleotide primer for the detection of SNP TSC0027014
atttttctaaat

SEQ ID NO: 315640 - DNA, 12 bp, Artificial Sequence
  Oligonucleotide primer for the detection of SNP TSC0027014
aaaagataaaat

SEQ ID NO: 315641 - DNA, 12 bp, Artificial Sequence
  Oligonucleotide primer for the detection of SNP TSC0027016
aaacccaataca

SEQ ID NO: 315642 - DNA, 12 bp, Artificial Sequence
  Oligonucleotide primer for the detection of SNP TSC0027016
ttttaggttata

SEQ ID NO: 315643 - DNA, 12 bp, Artificial Sequence
  Oligonucleotide primer for the detection of SNP TSC0027016
tcctaaaccata

SEQ ID NO: 315644 - DNA, 12 bp, Artificial Sequence
  Oligonucleotide primer for the detection of SNP TSC0027016
ggagtttagtat

SEQ ID NO: 315645 - DNA, 12 bp, Artificial Sequence
  Oligonucleotide primer for the detection of SNP TSC0027017
aatccaccataa

SEQ ID NO: 315646 - DNA, 12 bp, Artificial Sequence
  Oligonucleotide primer for the detection of SNP TSC0027017
atagttatgttt

SEQ ID NO: 315647 - DNA, 12 bp, Artificial Sequence
  Oligonucleotide primer for the detection of SNP TSC0027017
ataattatattc

SEQ ID NO: 315648 - DNA, 12 bp, Artificial Sequence
  Oligonucleotide primer for the detection of SNP TSC0027017
aatttattataa

SEQ ID NO: 315649 - DNA, 12 bp, Artificial Sequence
  Oligonucleotide primer for the detection of SNP TSC0027019
tttatatttggg

SEQ ID NO: 315650 - DNA, 12 bp, Artificial Sequence
  Oligonucleotide primer for the detection of SNP TSC0027020
aaaaaacaacac

SEQ ID NO: 315651 - DNA, 12 bp, Artificial Sequence
  Oligonucleotide primer for the detection of SNP TSC0027020
tttgttttatag

SEQ ID NO: 315652 - DNA, 12 bp, Artificial Sequence
  Oligonucleotide primer for the detection of SNP TSC0027020
cctacctcacaa

SEQ ID NO: 315653 - DNA, 12 bp, Artificial Sequence
  Oligonucleotide primer for the detection of SNP TSC0027020
gggaggtagtat

SEQ ID NO: 315654 - DNA, 12 bp, Artificial Sequence
  Oligonucleotide primer for the detection of SNP TSC0027021
atttctaatctt

SEQ ID NO: 315655 - DNA, 12 bp, Artificial Sequence
  Oligonucleotide primer for the detection of SNP TSC0027021
ttaaataatatt

SEQ ID NO: 315656 - DNA, 12 bp, Artificial Sequence
  Oligonucleotide primer for the detection of SNP TSC0027021
ccaaataatatc

SEQ ID NO: 315657 - DNA, 12 bp, Artificial Sequence
  Oligonucleotide primer for the detection of SNP TSC0027021
atttttagtttt

SEQ ID NO: 315658 - DNA, 12 bp, Artificial Sequence
  Oligonucleotide primer for the detection of SNP TSC0027022
aacatcctattt

SEQ ID NO: 315659 - DNA, 12 bp, Artificial Sequence
  Oligonucleotide primer for the detection of SNP TSC0027022
gtattatagaag

SEQ ID NO: 315660 - DNA, 12 bp, Artificial Sequence
  Oligonucleotide primer for the detection of SNP TSC0027023
tatttatattta

SEQ ID NO: 315661 - DNA, 12 bp, Artificial Sequence
  Oligonucleotide primer for the detection of SNP TSC0027026
aaaattttacct

SEQ ID NO: 315662 - DNA, 12 bp, Artificial Sequence
  Oligonucleotide primer for the detection of SNP TSC0027026
gaaattttacct

SEQ ID NO: 315663 - DNA, 12 bp, Artificial Sequence
  Oligonucleotide primer for the detection of SNP TSC0027026
ggaggtggtgga

SEQ ID NO: 315664 - DNA, 12 bp, Artificial Sequence
  Oligonucleotide primer for the detection of SNP TSC0027026
ggaggcggtgga

SEQ ID NO: 315665 - DNA, 12 bp, Artificial Sequence
  Oligonucleotide primer for the detection of SNP TSC0027026
ggaggtggcgga

SEQ ID NO: 315666 - DNA, 12 bp, Artificial Sequence
  Oligonucleotide primer for the detection of SNP TSC0027026
ggaggcggcgga

SEQ ID NO: 315667 - DNA, 12 bp, Artificial Sequence
  Oligonucleotide primer for the detection of SNP TSC0027027
tctctcaaaatt

SEQ ID NO: 315668 - DNA, 12 bp, Artificial Sequence
  Oligonucleotide primer for the detection of SNP TSC0027027
tctctcgaaatt

SEQ ID NO: 315669 - DNA, 12 bp, Artificial Sequence
  Oligonucleotide primer for the detection of SNP TSC0027027
ggtggaaaggta

SEQ ID NO: 315670 - DNA, 12 bp, Artificial Sequence
  Oligonucleotide primer for the detection of SNP TSC0027027
ggcggaaaggta

SEQ ID NO: 315671 - DNA, 12 bp, Artificial Sequence
  Oligonucleotide primer for the detection of SNP TSC0027034
actatatactta

SEQ ID NO: 315672 - DNA, 12 bp, Artificial Sequence
  Oligonucleotide primer for the detection of SNP TSC0027034
aattttttttat

SEQ ID NO: 315673 - DNA, 12 bp, Artificial Sequence
  Oligonucleotide primer for the detection of SNP TSC0027034
gttatatattta

SEQ ID NO: 315674 - DNA, 12 bp, Artificial Sequence
  Oligonucleotide primer for the detection of SNP TSC0027035
acgaatacaaaa

SEQ ID NO: 315675 - DNA, 12 bp, Artificial Sequence
  Oligonucleotide primer for the detection of SNP TSC0027035
ttatgaatgtaa

SEQ ID NO: 315676 - DNA, 12 bp, Artificial Sequence
  Oligonucleotide primer for the detection of SNP TSC0027035
ttacgaatgtaa

SEQ ID NO: 315677 - DNA, 12 bp, Artificial Sequence
  Oligonucleotide primer for the detection of SNP TSC0027038
gataaattattt

SEQ ID NO: 315678 - DNA, 12 bp, Artificial Sequence
  Oligonucleotide primer for the detection of SNP TSC0027038
aataaattacct

SEQ ID NO: 315679 - DNA, 12 bp, Artificial Sequence
  Oligonucleotide primer for the detection of SNP TSC0027038
aatagttaaaat

SEQ ID NO: 315680 - DNA, 12 bp, Artificial Sequence
  Oligonucleotide primer for the detection of SNP TSC0027039
aaacaataacaa

SEQ ID NO: 315681 - DNA, 12 bp, Artificial Sequence
  Oligonucleotide primer for the detection of SNP TSC0027039
aaacaataacga

SEQ ID NO: 315682 - DNA, 12 bp, Artificial Sequence
  Oligonucleotide primer for the detection of SNP TSC0027039
aggttggttttt

SEQ ID NO: 315683 - DNA, 12 bp, Artificial Sequence
  Oligonukleotid-Primer
ctaaaaattaac

SEQ ID NO: 315684 - DNA, 12 bp, Artificial Sequence
  Oligonucleotide primer for the detection of SNP TSC0027039
gggtagtggtgg

SEQ ID NO: 315685 - DNA, 12 bp, Artificial Sequence
  Oligonucleotide primer for the detection of SNP TSC0027039
gggtagtggcgg

SEQ ID NO: 315686 - DNA, 12 bp, Artificial Sequence
  Oligonucleotide primer for the detection of SNP TSC0027040
tccctaaaaaac

SEQ ID NO: 315687 - DNA, 12 bp, Artificial Sequence
  Oligonucleotide primer for the detection of SNP TSC0027040
ggggattaatat

SEQ ID NO: 315688 - DNA, 12 bp, Artificial Sequence
  Oligonucleotide primer for the detection of SNP TSC0027040
taaaaactaaca

SEQ ID NO: 315689 - DNA, 12 bp, Artificial Sequence
  Oligonucleotide primer for the detection of SNP TSC0027040
tttttggaggat

SEQ ID NO: 315690 - DNA, 12 bp, Artificial Sequence
  Oligonucleotide primer for the detection of SNP TSC0027040
tttttggaggac

SEQ ID NO: 315691 - DNA, 12 bp, Artificial Sequence
  Oligonucleotide primer for the detection of SNP TSC0027042
cacccccaaata

SEQ ID NO: 315692 - DNA, 12 bp, Artificial Sequence
  Oligonucleotide primer for the detection of SNP TSC0027042
cacccccgaata

SEQ ID NO: 315693 - DNA, 12 bp, Artificial Sequence
  Oligonucleotide primer for the detection of SNP TSC0027042
agtgtgtattat

SEQ ID NO: 315694 - DNA, 12 bp, Artificial Sequence
  Oligonucleotide primer for the detection of SNP TSC0027042
agtgtgtattac

SEQ ID NO: 315695 - DNA, 12 bp, Artificial Sequence
  Oligonucleotide primer for the detection of SNP TSC0027042
aatatacaccac

SEQ ID NO: 315696 - DNA, 12 bp, Artificial Sequence
  Oligonucleotide primer for the detection of SNP TSC0027042
atttttggatgt

SEQ ID NO: 315697 - DNA, 12 bp, Artificial Sequence
  Oligonucleotide primer for the detection of SNP TSC0027042
attttcggatgt

SEQ ID NO: 315698 - DNA, 12 bp, Artificial Sequence
  Oligonucleotide primer for the detection of SNP TSC0027043
ctatatataacc

SEQ ID NO: 315699 - DNA, 12 bp, Artificial Sequence
  Oligonucleotide primer for the detection of SNP TSC0027044
ctatttaataac

SEQ ID NO: 315700 - DNA, 12 bp, Artificial Sequence
  Oligonucleotide primer for the detection of SNP TSC0027044
gttttttttgaa

SEQ ID NO: 315701 - DNA, 12 bp, Artificial Sequence
  Oligonucleotide primer for the detection of SNP TSC0027046
aacctttaaccc

SEQ ID NO: 315702 - DNA, 12 bp, Artificial Sequence
  Oligonucleotide primer for the detection of SNP TSC0027046
gacctttaaccc

SEQ ID NO: 315703 - DNA, 12 bp, Artificial Sequence
  Oligonucleotide primer for the detection of SNP TSC0027046
aggttttgggta

SEQ ID NO: 315704 - DNA, 12 bp, Artificial Sequence
  Oligonucleotide primer for the detection of SNP TSC0027046
aaatcctaaata

SEQ ID NO: 315705 - DNA, 12 bp, Artificial Sequence
  Oligonucleotide primer for the detection of SNP TSC0027046
gatttttgattt

SEQ ID NO: 315706 - DNA, 12 bp, Artificial Sequence
  Oligonucleotide primer for the detection of SNP TSC0027047
cctatttttaac

SEQ ID NO: 315707 - DNA, 12 bp, Artificial Sequence
  Oligonucleotide primer for the detection of SNP TSC0027047
tgataaagttgg

SEQ ID NO: 315708 - DNA, 12 bp, Artificial Sequence
  Oligonucleotide primer for the detection of SNP TSC0027048
aaaattttataa

SEQ ID NO: 315709 - DNA, 12 bp, Artificial Sequence
  Oligonucleotide primer for the detection of SNP TSC0027048
agttttattatt

SEQ ID NO: 315710 - DNA, 12 bp, Artificial Sequence
  Oligonucleotide primer for the detection of SNP TSC0027048
aactttatcatt

SEQ ID NO: 315711 - DNA, 12 bp, Artificial Sequence
  Oligonucleotide primer for the detection of SNP TSC0027048
gaagttttgtaa

SEQ ID NO: 315712 - DNA, 12 bp, Artificial Sequence
  Oligonucleotide primer for the detection of SNP TSC0027049
tccctacaaaac

SEQ ID NO: 315713 - DNA, 12 bp, Artificial Sequence
  Oligonucleotide primer for the detection of SNP TSC0027049
gtttatggtgtg

SEQ ID NO: 315714 - DNA, 12 bp, Artificial Sequence
  Oligonucleotide primer for the detection of SNP TSC0027050
taacataaacct

SEQ ID NO: 315715 - DNA, 12 bp, Artificial Sequence
  Oligonucleotide primer for the detection of SNP TSC0027050
gagtaattgaga

SEQ ID NO: 315716 - DNA, 12 bp, Artificial Sequence
  Oligonucleotide primer for the detection of SNP TSC0027051
tggtgattgtgg

SEQ ID NO: 315717 - DNA, 12 bp, Artificial Sequence
  Oligonucleotide primer for the detection of SNP TSC0027051
tggcgattgtgg

SEQ ID NO: 315718 - DNA, 12 bp, Artificial Sequence
  Oligonucleotide primer for the detection of SNP TSC0027051
taacaactataa

SEQ ID NO: 315719 - DNA, 12 bp, Artificial Sequence
  Oligonucleotide primer for the detection of SNP TSC0027051
taacgactataa

SEQ ID NO: 315720 - DNA, 12 bp, Artificial Sequence
  Oligonucleotide primer for the detection of SNP TSC0027051
tgtattgatgtt

SEQ ID NO: 315721 - DNA, 12 bp, Artificial Sequence
  Oligonucleotide primer for the detection of SNP TSC0027054
gtttgtgttgta

SEQ ID NO: 315722 - DNA, 12 bp, Artificial Sequence
  Oligonucleotide primer for the detection of SNP TSC0027059
cacacacacccc

SEQ ID NO: 315723 - DNA, 12 bp, Artificial Sequence
  Oligonucleotide primer for the detection of SNP TSC0027059
gtggtttgtatt

SEQ ID NO: 315724 - DNA, 12 bp, Artificial Sequence
  Oligonucleotide primer for the detection of SNP TSC0027059
ataatttacact

SEQ ID NO: 315725 - DNA, 12 bp, Artificial Sequence
  Oligonucleotide primer for the detection of SNP TSC0027060
aaacttcctact

SEQ ID NO: 315726 - DNA, 12 bp, Artificial Sequence
  Oligonucleotide primer for the detection of SNP TSC0027060
tgtgagtgtgaa

SEQ ID NO: 315727 - DNA, 12 bp, Artificial Sequence
  Oligonucleotide primer for the detection of SNP TSC0027063
acactattttaa

SEQ ID NO: 315728 - DNA, 12 bp, Artificial Sequence
  Oligonucleotide primer for the detection of SNP TSC0027063
ggttgaaagtgt

SEQ ID NO: 315729 - DNA, 12 bp, Artificial Sequence
  Oligonucleotide primer for the detection of SNP TSC0027063
gtattgttttaa

SEQ ID NO: 315730 - DNA, 12 bp, Artificial Sequence
  Oligonucleotide primer for the detection of SNP TSC0027064
atttaaatatac

SEQ ID NO: 315731 - DNA, 12 bp, Artificial Sequence
  Oligonucleotide primer for the detection of SNP TSC0027064
tgaaattagaaa

SEQ ID NO: 315732 - DNA, 12 bp, Artificial Sequence
  Oligonucleotide primer for the detection of SNP TSC0027065
gtatatttaaat

SEQ ID NO: 315733 - DNA, 12 bp, Artificial Sequence
  Oligonucleotide primer for the detection of SNP TSC0027065
tacatttaaata

SEQ ID NO: 315734 - DNA, 12 bp, Artificial Sequence
  Oligonucleotide primer for the detection of SNP TSC0027065
gaattgtgttaa

SEQ ID NO: 315735 - DNA, 12 bp, Artificial Sequence
  Oligonucleotide primer for the detection of SNP TSC0027068
ataatatcactc

SEQ ID NO: 315736 - DNA, 12 bp, Artificial Sequence
  Oligonucleotide primer for the detection of SNP TSC0027068
tattgttgtttt

SEQ ID NO: 315737 - DNA, 12 bp, Artificial Sequence
  Oligonucleotide primer for the detection of SNP TSC0027068
tattgtcgtttt

SEQ ID NO: 315738 - DNA, 12 bp, Artificial Sequence
  Oligonucleotide primer for the detection of SNP TSC0027068
tattgttgtttc

SEQ ID NO: 315739 - DNA, 12 bp, Artificial Sequence
  Oligonucleotide primer for the detection of SNP TSC0027068
tattgtcgtttc

SEQ ID NO: 315740 - DNA, 12 bp, Artificial Sequence
  Oligonucleotide primer for the detection of SNP TSC0027068
ctattatcattt

SEQ ID NO: 315741 - DNA, 12 bp, Artificial Sequence
  Oligonucleotide primer for the detection of SNP TSC0027068
ctattatcgttt

SEQ ID NO: 315742 - DNA, 12 bp, Artificial Sequence
  Oligonucleotide primer for the detection of SNP TSC0027068
atgatgttattt

SEQ ID NO: 315743 - DNA, 12 bp, Artificial Sequence
  Oligonucleotide primer for the detection of SNP TSC0027079
ccatctatacta

SEQ ID NO: 315744 - DNA, 12 bp, Artificial Sequence
  Oligonucleotide primer for the detection of SNP TSC0027079
ccgtctatacta

SEQ ID NO: 315745 - DNA, 12 bp, Artificial Sequence
  Oligonucleotide primer for the detection of SNP TSC0027079
atttttctattt

SEQ ID NO: 315746 - DNA, 12 bp, Artificial Sequence
  Oligonucleotide primer for the detection of SNP TSC0027079
ttgtttgtatta

SEQ ID NO: 315747 - DNA, 12 bp, Artificial Sequence
  Oligonucleotide primer for the detection of SNP TSC0027079
tcgtttgtatta

SEQ ID NO: 315748 - DNA, 12 bp, Artificial Sequence
  Oligonucleotide primer for the detection of SNP TSC0027080
caaactccaaac

SEQ ID NO: 315749 - DNA, 12 bp, Artificial Sequence
  Oligonucleotide primer for the detection of SNP TSC0027080
caaactccgaac

SEQ ID NO: 315750 - DNA, 12 bp, Artificial Sequence
  Oligonucleotide primer for the detection of SNP TSC0027080
cgaactccaaac

SEQ ID NO: 315751 - DNA, 12 bp, Artificial Sequence
  Oligonucleotide primer for the detection of SNP TSC0027080
cgaactccgaac

SEQ ID NO: 315752 - DNA, 12 bp, Artificial Sequence
  Oligonucleotide primer for the detection of SNP TSC0027081
aactaaacttat

SEQ ID NO: 315753 - DNA, 12 bp, Artificial Sequence
  Oligonucleotide primer for the detection of SNP TSC0027081
attttttttgga

SEQ ID NO: 315754 - DNA, 12 bp, Artificial Sequence
  Oligonucleotide primer for the detection of SNP TSC0027082
ttgtagggttgt

SEQ ID NO: 315755 - DNA, 12 bp, Artificial Sequence
  Oligonucleotide primer for the detection of SNP TSC0027082
ttacaaaattac

SEQ ID NO: 315756 - DNA, 12 bp, Artificial Sequence
  Oligonucleotide primer for the detection of SNP TSC0027083
taaacctctatc

SEQ ID NO: 315757 - DNA, 12 bp, Artificial Sequence
  Oligonucleotide primer for the detection of SNP TSC0027083
gggtagaggtaa

SEQ ID NO: 315758 - DNA, 12 bp, Artificial Sequence
  Oligonucleotide primer for the detection of SNP TSC0027084
gggttagtttat

SEQ ID NO: 315759 - DNA, 12 bp, Artificial Sequence
  Oligonucleotide primer for the detection of SNP TSC0027084
aaccaacccaca

SEQ ID NO: 315760 - DNA, 12 bp, Artificial Sequence
  Oligonucleotide primer for the detection of SNP TSC0027084
aggaatgagttt

SEQ ID NO: 315761 - DNA, 12 bp, Artificial Sequence
  Oligonucleotide primer for the detection of SNP TSC0027086
aaaaaaacgcaa

SEQ ID NO: 315762 - DNA, 12 bp, Artificial Sequence
  Oligonucleotide primer for the detection of SNP TSC0027086
tttgtggaagag

SEQ ID NO: 315763 - DNA, 12 bp, Artificial Sequence
  Oligonucleotide primer for the detection of SNP TSC0027086
cttataaaaaaa

SEQ ID NO: 315764 - DNA, 12 bp, Artificial Sequence
  Oligonucleotide primer for the detection of SNP TSC0027086
agaagagtgtag

SEQ ID NO: 315765 - DNA, 12 bp, Artificial Sequence
  Oligonucleotide primer for the detection of SNP TSC0027086
agaagagcgtag

SEQ ID NO: 315766 - DNA, 12 bp, Artificial Sequence
  Oligonucleotide primer for the detection of SNP TSC0027087
acataactaaac

SEQ ID NO: 315767 - DNA, 12 bp, Artificial Sequence
  Oligonucleotide primer for the detection of SNP TSC0027087
gcataactaaac

SEQ ID NO: 315768 - DNA, 12 bp, Artificial Sequence
  Oligonucleotide primer for the detection of SNP TSC0027088
tcacatattcac

SEQ ID NO: 315769 - DNA, 12 bp, Artificial Sequence
  Oligonucleotide primer for the detection of SNP TSC0027088
tttagttatgtg

SEQ ID NO: 315770 - DNA, 12 bp, Artificial Sequence
  Oligonucleotide primer for the detection of SNP TSC0027088
tttagttatgcg

SEQ ID NO: 315771 - DNA, 12 bp, Artificial Sequence
  Oligonucleotide primer for the detection of SNP TSC0027088
ctcaatcataca

SEQ ID NO: 315772 - DNA, 12 bp, Artificial Sequence
  Oligonukleotid-Primer
ctcaatcatacg

SEQ ID NO: 315773 - DNA, 12 bp, Artificial Sequence
  Oligonucleotide primer for the detection of SNP TSC0027088
ttatatgtttat

SEQ ID NO: 315774 - DNA, 12 bp, Artificial Sequence
  Oligonucleotide primer for the detection of SNP TSC0027089
catttaataaat

SEQ ID NO: 315775 - DNA, 12 bp, Artificial Sequence
  Oligonucleotide primer for the detection of SNP TSC0027089
gtgttaatatag

SEQ ID NO: 315776 - DNA, 12 bp, Artificial Sequence
  Oligonukleotid-Primer
ggagttgtagat

SEQ ID NO: 315777 - DNA, 12 bp, Artificial Sequence
  Oligonucleotide primer for the detection of SNP TSC0027090
aaataggaatag

SEQ ID NO: 315778 - DNA, 12 bp, Artificial Sequence
  Oligonucleotide primer for the detection of SNP TSC0027094
tgtaatgtttta

SEQ ID NO: 315779 - DNA, 12 bp, Artificial Sequence
  Oligonucleotide primer for the detection of SNP TSC0027096
ttgtttttattg

SEQ ID NO: 315780 - DNA, 12 bp, Artificial Sequence
  Oligonucleotide primer for the detection of SNP TSC0027099
ataaatttagta

SEQ ID NO: 315781 - DNA, 12 bp, Artificial Sequence
  Oligonucleotide primer for the detection of SNP TSC0027099
ataaatttaaca

SEQ ID NO: 315782 - DNA, 12 bp, Artificial Sequence
  Oligonucleotide primer for the detection of SNP TSC0027099
aagttgaatatt

SEQ ID NO: 315783 - DNA, 12 bp, Artificial Sequence
  Oligonucleotide primer for the detection of SNP TSC0027100
taaaaccctcac

SEQ ID NO: 315784 - DNA, 12 bp, Artificial Sequence
  Oligonukleotid-Primer
tattagtatttg

SEQ ID NO: 315785 - DNA, 12 bp, Artificial Sequence
  Oligonucleotide primer for the detection of SNP TSC0027101
tggtttaaataa

SEQ ID NO: 315786 - DNA, 12 bp, Artificial Sequence
  Oligonucleotide primer for the detection of SNP TSC0027101
taacccaaataa

SEQ ID NO: 315787 - DNA, 12 bp, Artificial Sequence
  Oligonucleotide primer for the detection of SNP TSC0027101
aagttgagtaga

SEQ ID NO: 315788 - DNA, 12 bp, Artificial Sequence
  Oligonukleotid-Primer
tttagagaatag

SEQ ID NO: 315789 - DNA, 12 bp, Artificial Sequence
  Oligonucleotide primer for the detection of SNP TSC0027103
caattaccaata

SEQ ID NO: 315790 - DNA, 12 bp, Artificial Sequence
  Oligonucleotide primer for the detection of SNP TSC0027103
ctctttaaaaac

SEQ ID NO: 315791 - DNA, 12 bp, Artificial Sequence
  Oligonucleotide primer for the detection of SNP TSC0027103
gtagttattagt

SEQ ID NO: 315792 - DNA, 12 bp, Artificial Sequence
  Oligonukleotid-Primer
agtttatttttg

SEQ ID NO: 315793 - DNA, 12 bp, Artificial Sequence
  Oligonucleotide primer for the detection of SNP TSC0027107
acctttaaaaaa

SEQ ID NO: 315794 - DNA, 12 bp, Artificial Sequence
  Oligonucleotide primer for the detection of SNP TSC0027107
tagtgataaaat

SEQ ID NO: 315795 - DNA, 12 bp, Artificial Sequence
  Oligonucleotide primer for the detection of SNP TSC0027108
ctaccatctaca

SEQ ID NO: 315796 - DNA, 12 bp, Artificial Sequence
  Oligonucleotide primer for the detection of SNP TSC0027108
atatttttgtat

SEQ ID NO: 315797 - DNA, 12 bp, Artificial Sequence
  Oligonucleotide primer for the detection of SNP TSC0027108
acatccctatac

SEQ ID NO: 315798 - DNA, 12 bp, Artificial Sequence
  Oligonucleotide primer for the detection of SNP TSC0027108
ttattatttgta

SEQ ID NO: 315799 - DNA, 12 bp, Artificial Sequence
  Oligonucleotide primer for the detection of SNP TSC0027109
attttagagggg

SEQ ID NO: 315800 - DNA, 12 bp, Artificial Sequence
  Oligonucleotide primer for the detection of SNP TSC0027110
ttattaatgtta

SEQ ID NO: 315801 - DNA, 12 bp, Artificial Sequence
  Oligonucleotide primer for the detection of SNP TSC0027110
ttatcaatatca

SEQ ID NO: 315802 - DNA, 12 bp, Artificial Sequence
  Oligonucleotide primer for the detection of SNP TSC0027110
gagatataaggt

SEQ ID NO: 315803 - DNA, 12 bp, Artificial Sequence
  Oligonucleotide primer for the detection of SNP TSC0027111
cctcacccctat

SEQ ID NO: 315804 - DNA, 12 bp, Artificial Sequence
  Oligonucleotide primer for the detection of SNP TSC0027111
gggtttggtgtt

SEQ ID NO: 315805 - DNA, 12 bp, Artificial Sequence
  Oligonucleotide primer for the detection of SNP TSC0027111
gggtttggcgtt

SEQ ID NO: 315806 - DNA, 12 bp, Artificial Sequence
  Oligonucleotide primer for the detection of SNP TSC0027111
aaacctaacacc

SEQ ID NO: 315807 - DNA, 12 bp, Artificial Sequence
  Oligonucleotide primer for the detection of SNP TSC0027111
aaacctaacgcc

SEQ ID NO: 315808 - DNA, 12 bp, Artificial Sequence
  Oligonucleotide primer for the detection of SNP TSC0027113
caaaatcacacc

SEQ ID NO: 315809 - DNA, 12 bp, Artificial Sequence
  Oligonucleotide primer for the detection of SNP TSC0027113
caaaatcgcacc

SEQ ID NO: 315810 - DNA, 12 bp, Artificial Sequence
  Oligonucleotide primer for the detection of SNP TSC0027114
caataaataatt

SEQ ID NO: 315811 - DNA, 12 bp, Artificial Sequence
  Oligonucleotide primer for the detection of SNP TSC0027114
cgataaataatt

SEQ ID NO: 315812 - DNA, 12 bp, Artificial Sequence
  Oligonucleotide primer for the detection of SNP TSC0027114
ataatttaatta

SEQ ID NO: 315813 - DNA, 12 bp, Artificial Sequence
  Oligonucleotide primer for the detection of SNP TSC0027114
ataatctaatta

SEQ ID NO: 315814 - DNA, 12 bp, Artificial Sequence
  Oligonucleotide primer for the detection of SNP TSC0027114
tggtaggtgatt

SEQ ID NO: 315815 - DNA, 12 bp, Artificial Sequence
  Oligonucleotide primer for the detection of SNP TSC0027114
cggtaggtgatt

SEQ ID NO: 315816 - DNA, 12 bp, Artificial Sequence
  Oligonucleotide primer for the detection of SNP TSC0027118
aactctataata

SEQ ID NO: 315817 - DNA, 12 bp, Artificial Sequence
  Oligonucleotide primer for the detection of SNP TSC0027118
tgatatttagat

SEQ ID NO: 315818 - DNA, 12 bp, Artificial Sequence
  Oligonucleotide primer for the detection of SNP TSC0027118
taacactcaaat

SEQ ID NO: 315819 - DNA, 12 bp, Artificial Sequence
  Oligonucleotide primer for the detection of SNP TSC0027118
agttttatgata

SEQ ID NO: 315820 - DNA, 12 bp, Artificial Sequence
  Oligonucleotide primer for the detection of SNP TSC0027119
tctcactatatc

SEQ ID NO: 315821 - DNA, 12 bp, Artificial Sequence
  Oligonucleotide primer for the detection of SNP TSC0027119
tttagattagag

SEQ ID NO: 315822 - DNA, 12 bp, Artificial Sequence
  Oligonucleotide primer for the detection of SNP TSC0027120
acaaccctaaac

SEQ ID NO: 315823 - DNA, 12 bp, Artificial Sequence
  Oligonucleotide primer for the detection of SNP TSC0027120
gaaaaaattata

SEQ ID NO: 315824 - DNA, 12 bp, Artificial Sequence
  Oligonucleotide primer for the detection of SNP TSC0027120
gtagttttaaat

SEQ ID NO: 315825 - DNA, 12 bp, Artificial Sequence
  Oligonucleotide primer for the detection of SNP TSC0027121
aaataccaactc

SEQ ID NO: 315826 - DNA, 12 bp, Artificial Sequence
  Oligonucleotide primer for the detection of SNP TSC0027121
gtttatttttag

SEQ ID NO: 315827 - DNA, 12 bp, Artificial Sequence
  Oligonucleotide primer for the detection of SNP TSC0027121
acttatttttaa

SEQ ID NO: 315828 - DNA, 12 bp, Artificial Sequence
  Oligonucleotide primer for the detection of SNP TSC0027122
atacatcaccca

SEQ ID NO: 315829 - DNA, 12 bp, Artificial Sequence
  Oligonucleotide primer for the detection of SNP TSC0027122
atacatcacccg

SEQ ID NO: 315830 - DNA, 12 bp, Artificial Sequence
  Oligonucleotide primer for the detection of SNP TSC0027122
accctaaactcc

SEQ ID NO: 315831 - DNA, 12 bp, Artificial Sequence
  Oligonucleotide primer for the detection of SNP TSC0027122
gtgtattatttg

SEQ ID NO: 315832 - DNA, 12 bp, Artificial Sequence
  Oligonucleotide primer for the detection of SNP TSC0027122
gtgtattattcg

SEQ ID NO: 315833 - DNA, 12 bp, Artificial Sequence
  Oligonucleotide primer for the detection of SNP TSC0027123
aaaaaaacctac

SEQ ID NO: 315834 - DNA, 12 bp, Artificial Sequence
  Oligonucleotide primer for the detection of SNP TSC0027123
cttttctctccc

SEQ ID NO: 315835 - DNA, 12 bp, Artificial Sequence
  Oligonucleotide primer for the detection of SNP TSC0027123
ggaaaggtttgt

SEQ ID NO: 315836 - DNA, 12 bp, Artificial Sequence
  Oligonucleotide primer for the detection of SNP TSC0027123
ggaaaggtttgc

SEQ ID NO: 315837 - DNA, 12 bp, Artificial Sequence
  Oligonucleotide primer for the detection of SNP TSC0027124
caacacccctac

SEQ ID NO: 315838 - DNA, 12 bp, Artificial Sequence
  Oligonucleotide primer for the detection of SNP TSC0027124
ttttgagtttta

SEQ ID NO: 315839 - DNA, 12 bp, Artificial Sequence
  Oligonucleotide primer for the detection of SNP TSC0027124
tttcgagtttta

SEQ ID NO: 315840 - DNA, 12 bp, Artificial Sequence
  Oligonucleotide primer for the detection of SNP TSC0027124
cctcaaactcta

SEQ ID NO: 315841 - DNA, 12 bp, Artificial Sequence
  Oligonucleotide primer for the detection of SNP TSC0027124
cctcgaactcta

SEQ ID NO: 315842 - DNA, 12 bp, Artificial Sequence
  Oligonucleotide primer for the detection of SNP TSC0027125
atcccatcctac

SEQ ID NO: 315843 - DNA, 12 bp, Artificial Sequence
  Oligonucleotide primer for the detection of SNP TSC0027125
ttatatttagga

SEQ ID NO: 315844 - DNA, 12 bp, Artificial Sequence
  Oligonucleotide primer for the detection of SNP TSC0027125
tcacatccaaaa

SEQ ID NO: 315845 - DNA, 12 bp, Artificial Sequence
  Oligonucleotide primer for the detection of SNP TSC0027126
ttcatatatcat

SEQ ID NO: 315846 - DNA, 12 bp, Artificial Sequence
  Oligonucleotide primer for the detection of SNP TSC0027126
ttcatatatcgt

SEQ ID NO: 315847 - DNA, 12 bp, Artificial Sequence
  Oligonucleotide primer for the detection of SNP TSC0027126
tgtttgtttgat

SEQ ID NO: 315848 - DNA, 12 bp, Artificial Sequence
  Oligonucleotide primer for the detection of SNP TSC0027126
acttacttaata

SEQ ID NO: 315849 - DNA, 12 bp, Artificial Sequence
  Oligonucleotide primer for the detection of SNP TSC0027126
tttatgtgttgt

SEQ ID NO: 315850 - DNA, 12 bp, Artificial Sequence
  Oligonucleotide primer for the detection of SNP TSC0027126
tttatgtgtcgt

SEQ ID NO: 315851 - DNA, 12 bp, Artificial Sequence
  Oligonucleotide primer for the detection of SNP TSC0027127
taaataaaacca

SEQ ID NO: 315852 - DNA, 12 bp, Artificial Sequence
  Oligonucleotide primer for the detection of SNP TSC0027127
ccaaacccccta

SEQ ID NO: 315853 - DNA, 12 bp, Artificial Sequence
  Oligonucleotide primer for the detection of SNP TSC0027127
ttgggtaaagtt

SEQ ID NO: 315854 - DNA, 12 bp, Artificial Sequence
  Oligonucleotide primer for the detection of SNP TSC0027129
aatccaacaatc

SEQ ID NO: 315855 - DNA, 12 bp, Artificial Sequence
  Oligonucleotide primer for the detection of SNP TSC0027130
taccactaaaat

SEQ ID NO: 315856 - DNA, 12 bp, Artificial Sequence
  Oligonucleotide primer for the detection of SNP TSC0027130
agaaaggtattt

SEQ ID NO: 315857 - DNA, 12 bp, Artificial Sequence
  Oligonucleotide primer for the detection of SNP TSC0027131
gtttggttttgg

SEQ ID NO: 315858 - DNA, 12 bp, Artificial Sequence
  Oligonucleotide primer for the detection of SNP TSC0027132
tatggagagggg

SEQ ID NO: 315859 - DNA, 12 bp, Artificial Sequence
  Oligonucleotide primer for the detection of SNP TSC0027132
tacggagagggg

SEQ ID NO: 315860 - DNA, 12 bp, Artificial Sequence
  Oligonucleotide primer for the detection of SNP TSC0027135
aaaacctataac

SEQ ID NO: 315861 - DNA, 12 bp, Artificial Sequence
  Oligonucleotide primer for the detection of SNP TSC0027135
gttgatttttta

SEQ ID NO: 315862 - DNA, 12 bp, Artificial Sequence
  Oligonucleotide primer for the detection of SNP TSC0027136
tattatgttatt

SEQ ID NO: 315863 - DNA, 12 bp, Artificial Sequence
  Oligonucleotide primer for the detection of SNP TSC0027136
tattatactatt

SEQ ID NO: 315864 - DNA, 12 bp, Artificial Sequence
  Oligonucleotide primer for the detection of SNP TSC0027136
tattggagggtg

SEQ ID NO: 315865 - DNA, 12 bp, Artificial Sequence
  Oligonucleotide primer for the detection of SNP TSC0027138
atacctaaacct

SEQ ID NO: 315866 - DNA, 12 bp, Artificial Sequence
  Oligonucleotide primer for the detection of SNP TSC0027138
ttagttatttag

SEQ ID NO: 315867 - DNA, 12 bp, Artificial Sequence
  Oligonucleotide primer for the detection of SNP TSC0027139
aaaccaacacat

SEQ ID NO: 315868 - DNA, 12 bp, Artificial Sequence
  Oligonucleotide primer for the detection of SNP TSC0027139
aatgaggatggg

SEQ ID NO: 315869 - DNA, 12 bp, Artificial Sequence
  Oligonucleotide primer for the detection of SNP TSC0027141
cttcccctaaaa

SEQ ID NO: 315870 - DNA, 12 bp, Artificial Sequence
  Oligonucleotide primer for the detection of SNP TSC0027141
tagtatgggttt

SEQ ID NO: 315871 - DNA, 12 bp, Artificial Sequence
  Oligonucleotide primer for the detection of SNP TSC0027142
ctttttacctca

SEQ ID NO: 315872 - DNA, 12 bp, Artificial Sequence
  Oligonucleotide primer for the detection of SNP TSC0027142
tgtaggtgttgt

SEQ ID NO: 315873 - DNA, 12 bp, Artificial Sequence
  Oligonucleotide primer for the detection of SNP TSC0027142
tataaatactat

SEQ ID NO: 315874 - DNA, 12 bp, Artificial Sequence
  Oligonucleotide primer for the detection of SNP TSC0027143
agtgagttgtga

SEQ ID NO: 315875 - DNA, 12 bp, Artificial Sequence
  Oligonucleotide primer for the detection of SNP TSC0027144
aaattatctaaa

SEQ ID NO: 315876 - DNA, 12 bp, Artificial Sequence
  Oligonucleotide primer for the detection of SNP TSC0027144
ataggtgtatat

SEQ ID NO: 315877 - DNA, 12 bp, Artificial Sequence
  Oligonucleotide primer for the detection of SNP TSC0027144
ataaatacatac

SEQ ID NO: 315878 - DNA, 12 bp, Artificial Sequence
  Oligonucleotide primer for the detection of SNP TSC0027144
aaattatttgag

SEQ ID NO: 315879 - DNA, 12 bp, Artificial Sequence
  Oligonucleotide primer for the detection of SNP TSC0027145
ctaaaacactac

SEQ ID NO: 315880 - DNA, 12 bp, Artificial Sequence
  Oligonucleotide primer for the detection of SNP TSC0027145
ctaaaacgctac

SEQ ID NO: 315881 - DNA, 12 bp, Artificial Sequence
  Oligonucleotide primer for the detection of SNP TSC0027145
tgaattagttaa

SEQ ID NO: 315882 - DNA, 12 bp, Artificial Sequence
  Oligonucleotide primer for the detection of SNP TSC0027145
cgaattagttaa

SEQ ID NO: 315883 - DNA, 12 bp, Artificial Sequence
  Oligonucleotide primer for the detection of SNP TSC0027145
caaaccaaccaa

SEQ ID NO: 315884 - DNA, 12 bp, Artificial Sequence
  Oligonucleotide primer for the detection of SNP TSC0027145
cgaaccaaccaa

SEQ ID NO: 315885 - DNA, 12 bp, Artificial Sequence
  Oligonukleotid-Primer
ttgaagtgttgt

SEQ ID NO: 315886 - DNA, 12 bp, Artificial Sequence
  Oligonucleotide primer for the detection of SNP TSC0027145
ttgaagcgttgt

SEQ ID NO: 315887 - DNA, 12 bp, Artificial Sequence
  Oligonucleotide primer for the detection of SNP TSC0027146
acttaattaact

SEQ ID NO: 315888 - DNA, 12 bp, Artificial Sequence
  Oligonucleotide primer for the detection of SNP TSC0027146
ggaggggttaaa

SEQ ID NO: 315889 - DNA, 12 bp, Artificial Sequence
  Oligonukleotid-Primer
acaactctatac

SEQ ID NO: 315890 - DNA, 12 bp, Artificial Sequence
  Oligonucleotide primer for the detection of SNP TSC0027147
atagggttgggg

SEQ ID NO: 315891 - DNA, 12 bp, Artificial Sequence
  Oligonucleotide primer for the detection of SNP TSC0027147
gtagttttgtgt

SEQ ID NO: 315892 - DNA, 12 bp, Artificial Sequence
  Oligonucleotide primer for the detection of SNP TSC0027147
gtagttttgtgc

SEQ ID NO: 315893 - DNA, 12 bp, Artificial Sequence
  Oligonucleotide primer for the detection of SNP TSC0027151
ctacaaacttca

SEQ ID NO: 315894 - DNA, 12 bp, Artificial Sequence
  Oligonucleotide primer for the detection of SNP TSC0027151
taggttgatttt

SEQ ID NO: 315895 - DNA, 12 bp, Artificial Sequence
  Oligonucleotide primer for the detection of SNP TSC0027151
taggtcgatttt

SEQ ID NO: 315896 - DNA, 12 bp, Artificial Sequence
  Oligonucleotide primer for the detection of SNP TSC0027151
caaaccaactct

SEQ ID NO: 315897 - DNA, 12 bp, Artificial Sequence
  Oligonucleotide primer for the detection of SNP TSC0027151
caaaccgactct

SEQ ID NO: 315898 - DNA, 12 bp, Artificial Sequence
  Oligonucleotide primer for the detection of SNP TSC0027151
ttgtaggtttta

SEQ ID NO: 315899 - DNA, 12 bp, Artificial Sequence
  Oligonucleotide primer for the detection of SNP TSC0027152
tataaaaatgta

SEQ ID NO: 315900 - DNA, 12 bp, Artificial Sequence
  Oligonucleotide primer for the detection of SNP TSC0027152
ttatttggttgt

SEQ ID NO: 315901 - DNA, 12 bp, Artificial Sequence
  Oligonucleotide primer for the detection of SNP TSC0027152
ttatttggttgc

SEQ ID NO: 315902 - DNA, 12 bp, Artificial Sequence
  Oligonucleotide primer for the detection of SNP TSC0027154
aaacatatattc

SEQ ID NO: 315903 - DNA, 12 bp, Artificial Sequence
  Oligonucleotide primer for the detection of SNP TSC0027154
tatgtgtattga

SEQ ID NO: 315904 - DNA, 12 bp, Artificial Sequence
  Oligonucleotide primer for the detection of SNP TSC0027155
atcaccactata

SEQ ID NO: 315905 - DNA, 12 bp, Artificial Sequence
  Oligonucleotide primer for the detection of SNP TSC0027155
aaaaacattacc

SEQ ID NO: 315906 - DNA, 12 bp, Artificial Sequence
  Oligonucleotide primer for the detection of SNP TSC0027155
attattattatg

SEQ ID NO: 315907 - DNA, 12 bp, Artificial Sequence
  Oligonucleotide primer for the detection of SNP TSC0027157
aaatcaaaaaaa

SEQ ID NO: 315908 - DNA, 12 bp, Artificial Sequence
  Oligonucleotide primer for the detection of SNP TSC0027157
gataaaaatatt

SEQ ID NO: 315909 - DNA, 12 bp, Artificial Sequence
  Oligonucleotide primer for the detection of SNP TSC0027157
aataaaaatacc

SEQ ID NO: 315910 - DNA, 12 bp, Artificial Sequence
  Oligonucleotide primer for the detection of SNP TSC0027157
aggttagaaggg

SEQ ID NO: 315911 - DNA, 12 bp, Artificial Sequence
  Oligonucleotide primer for the detection of SNP TSC0027159
actcctaccact

SEQ ID NO: 315912 - DNA, 12 bp, Artificial Sequence
  Oligonucleotide primer for the detection of SNP TSC0027160
ttctattaacac

SEQ ID NO: 315913 - DNA, 12 bp, Artificial Sequence
  Oligonucleotide primer for the detection of SNP TSC0027160
attataatatta

SEQ ID NO: 315914 - DNA, 12 bp, Artificial Sequence
  Oligonucleotide primer for the detection of SNP TSC0027160
actacaatatca

SEQ ID NO: 315915 - DNA, 12 bp, Artificial Sequence
  Oligonucleotide primer for the detection of SNP TSC0027160
ttttgttaatat

SEQ ID NO: 315916 - DNA, 12 bp, Artificial Sequence
  Oligonucleotide primer for the detection of SNP TSC0027162
ataatactccaa

SEQ ID NO: 315917 - DNA, 12 bp, Artificial Sequence
  Oligonucleotide primer for the detection of SNP TSC0027162
gatgatgtttta

SEQ ID NO: 315918 - DNA, 12 bp, Artificial Sequence
  Oligonucleotide primer for the detection of SNP TSC0027163
taaactactcca

SEQ ID NO: 315919 - DNA, 12 bp, Artificial Sequence
  Oligonucleotide primer for the detection of SNP TSC0027163
tttgaaggattt

SEQ ID NO: 315920 - DNA, 12 bp, Artificial Sequence
  Oligonucleotide primer for the detection of SNP TSC0027163
ttaaaaaaccta

SEQ ID NO: 315921 - DNA, 12 bp, Artificial Sequence
  Oligonucleotide primer for the detection of SNP TSC0027163
aattgttttatt

SEQ ID NO: 315922 - DNA, 12 bp, Artificial Sequence
  Oligonucleotide primer for the detection of SNP TSC0027164
cccaactccatt

SEQ ID NO: 315923 - DNA, 12 bp, Artificial Sequence
  Oligonucleotide primer for the detection of SNP TSC0027164
attgaatttaga

SEQ ID NO: 315924 - DNA, 12 bp, Artificial Sequence
  Oligonucleotide primer for the detection of SNP TSC0027165
cctaaaaaaaac

SEQ ID NO: 315925 - DNA, 12 bp, Artificial Sequence
  Oligonucleotide primer for the detection of SNP TSC0027165
agtttaagaagt

SEQ ID NO: 315926 - DNA, 12 bp, Artificial Sequence
  Oligonucleotide primer for the detection of SNP TSC0027166
ataaattctaac

SEQ ID NO: 315927 - DNA, 12 bp, Artificial Sequence
  Oligonucleotide primer for the detection of SNP TSC0027166
gttattttgtag

SEQ ID NO: 315928 - DNA, 12 bp, Artificial Sequence
  Oligonucleotide primer for the detection of SNP TSC0027166
gttatttcgtag

SEQ ID NO: 315929 - DNA, 12 bp, Artificial Sequence
  Oligonucleotide primer for the detection of SNP TSC0027170
tattacacatac

SEQ ID NO: 315930 - DNA, 12 bp, Artificial Sequence
  Oligonucleotide primer for the detection of SNP TSC0027171
aaaattcatcct

SEQ ID NO: 315931 - DNA, 12 bp, Artificial Sequence
  Oligonucleotide primer for the detection of SNP TSC0027171
ttagataattta

SEQ ID NO: 315932 - DNA, 12 bp, Artificial Sequence
  Oligonucleotide primer for the detection of SNP TSC0027172
accataacaaac

SEQ ID NO: 315933 - DNA, 12 bp, Artificial Sequence
  Oligonucleotide primer for the detection of SNP TSC0027172
tttattatgtaa

SEQ ID NO: 315934 - DNA, 12 bp, Artificial Sequence
  Oligonucleotide primer for the detection of SNP TSC0027173
acacataccacc

SEQ ID NO: 315935 - DNA, 12 bp, Artificial Sequence
  Oligonucleotide primer for the detection of SNP TSC0027173
aaattagttagg

SEQ ID NO: 315936 - DNA, 12 bp, Artificial Sequence
  Oligonucleotide primer for the detection of SNP TSC0027175
tttacaaaataa

SEQ ID NO: 315937 - DNA, 12 bp, Artificial Sequence
  Oligonucleotide primer for the detection of SNP TSC0027175
ttaaaggggaat

SEQ ID NO: 315938 - DNA, 12 bp, Artificial Sequence
  Oligonucleotide primer for the detection of SNP TSC0027175
gtttgtaggatg

SEQ ID NO: 315939 - DNA, 12 bp, Artificial Sequence
  Oligonucleotide primer for the detection of SNP TSC0027176
aatactccacaa

SEQ ID NO: 315940 - DNA, 12 bp, Artificial Sequence
  Oligonucleotide primer for the detection of SNP TSC0027176
aaattagatttg

SEQ ID NO: 315941 - DNA, 12 bp, Artificial Sequence
  Oligonucleotide primer for the detection of SNP TSC0027178
aaatcacccatc

SEQ ID NO: 315942 - DNA, 12 bp, Artificial Sequence
  Oligonucleotide primer for the detection of SNP TSC0027178
gattagggtggg

SEQ ID NO: 315943 - DNA, 12 bp, Artificial Sequence
  Oligonucleotide primer for the detection of SNP TSC0027178
gattagggcggg

SEQ ID NO: 315944 - DNA, 12 bp, Artificial Sequence
  Oligonucleotide primer for the detection of SNP TSC0027182
gaatataatatt

SEQ ID NO: 315945 - DNA, 12 bp, Artificial Sequence
  Oligonucleotide primer for the detection of SNP TSC0027182
gaatataatatc

SEQ ID NO: 315946 - DNA, 12 bp, Artificial Sequence
  Oligonucleotide primer for the detection of SNP TSC0027182
taaatacaatat

SEQ ID NO: 315947 - DNA, 12 bp, Artificial Sequence
  Oligonucleotide primer for the detection of SNP TSC0027182
tagagaatataa

SEQ ID NO: 315948 - DNA, 12 bp, Artificial Sequence
  Oligonucleotide primer for the detection of SNP TSC0027183
atcaaccctaaa

SEQ ID NO: 315949 - DNA, 12 bp, Artificial Sequence
  Oligonucleotide primer for the detection of SNP TSC0027185
aataaatacata

SEQ ID NO: 315950 - DNA, 12 bp, Artificial Sequence
  Oligonucleotide primer for the detection of SNP TSC0027190
atacaaatattt

SEQ ID NO: 315951 - DNA, 12 bp, Artificial Sequence
  Oligonucleotide primer for the detection of SNP TSC0027190
tgtaggtattaa

SEQ ID NO: 315952 - DNA, 12 bp, Artificial Sequence
  Oligonucleotide primer for the detection of SNP TSC0027191
cctcccaaaaat

SEQ ID NO: 315953 - DNA, 12 bp, Artificial Sequence
  Oligonucleotide primer for the detection of SNP TSC0027191
agggtggtgtta

SEQ ID NO: 315954 - DNA, 12 bp, Artificial Sequence
  Oligonucleotide primer for the detection of SNP TSC0027191
aaaataatacca

SEQ ID NO: 315955 - DNA, 12 bp, Artificial Sequence
  Oligonucleotide primer for the detection of SNP TSC0027193
aaaaaattctac

SEQ ID NO: 315956 - DNA, 12 bp, Artificial Sequence
  Oligonucleotide primer for the detection of SNP TSC0027193
tggataaggtaa

SEQ ID NO: 315957 - DNA, 12 bp, Artificial Sequence
  Oligonucleotide primer for the detection of SNP TSC0027194
aacttttctttc

SEQ ID NO: 315958 - DNA, 12 bp, Artificial Sequence
  Oligonucleotide primer for the detection of SNP TSC0027194
agattaattaaa

SEQ ID NO: 315959 - DNA, 12 bp, Artificial Sequence
  Oligonucleotide primer for the detection of SNP TSC0027201
caactactttat

SEQ ID NO: 315960 - DNA, 12 bp, Artificial Sequence
  Oligonucleotide primer for the detection of SNP TSC0027201
cgactactttat

SEQ ID NO: 315961 - DNA, 12 bp, Artificial Sequence
  Oligonucleotide primer for the detection of SNP TSC0027202
aatttatagtga

SEQ ID NO: 315962 - DNA, 12 bp, Artificial Sequence
  Oligonucleotide primer for the detection of SNP TSC0027202
aatccacaataa

SEQ ID NO: 315963 - DNA, 12 bp, Artificial Sequence
  Oligonucleotide primer for the detection of SNP TSC0027202
tatgtttattag

SEQ ID NO: 315964 - DNA, 12 bp, Artificial Sequence
  Oligonucleotide primer for the detection of SNP TSC0027203
atccccacttaa

SEQ ID NO: 315965 - DNA, 12 bp, Artificial Sequence
  Oligonucleotide primer for the detection of SNP TSC0027203
ttattttgttat

SEQ ID NO: 315966 - DNA, 12 bp, Artificial Sequence
  Oligonucleotide primer for the detection of SNP TSC0027203
ttatttcgttat

SEQ ID NO: 315967 - DNA, 12 bp, Artificial Sequence
  Oligonucleotide primer for the detection of SNP TSC0027203
ccacttcatcac

SEQ ID NO: 315968 - DNA, 12 bp, Artificial Sequence
  Oligonucleotide primer for the detection of SNP TSC0027203
ccacttcgtcac

SEQ ID NO: 315969 - DNA, 12 bp, Artificial Sequence
  Oligonucleotide primer for the detection of SNP TSC0027203
atttttatttaa

SEQ ID NO: 315970 - DNA, 12 bp, Artificial Sequence
  Oligonucleotide primer for the detection of SNP TSC0027204
aaaaaaaacctt

SEQ ID NO: 315971 - DNA, 12 bp, Artificial Sequence
  Oligonucleotide primer for the detection of SNP TSC0027204
tttcgggtttta

SEQ ID NO: 315972 - DNA, 12 bp, Artificial Sequence
  Oligonucleotide primer for the detection of SNP TSC0027205
aataaaaatcct

SEQ ID NO: 315973 - DNA, 12 bp, Artificial Sequence
  Oligonucleotide primer for the detection of SNP TSC0027205
ttgaatttttaa

SEQ ID NO: 315974 - DNA, 12 bp, Artificial Sequence
  Oligonucleotide primer for the detection of SNP TSC0027206
ataaaactttca

SEQ ID NO: 315975 - DNA, 12 bp, Artificial Sequence
  Oligonucleotide primer for the detection of SNP TSC0027206
acacttttcaaa

SEQ ID NO: 315976 - DNA, 12 bp, Artificial Sequence
  Oligonucleotide primer for the detection of SNP TSC0027206
tgtggggttttt

SEQ ID NO: 315977 - DNA, 12 bp, Artificial Sequence
  Oligonucleotide primer for the detection of SNP TSC0027214
cccaaaaaaact

SEQ ID NO: 315978 - DNA, 12 bp, Artificial Sequence
  Oligonucleotide primer for the detection of SNP TSC0027214
cccgaaaaaact

SEQ ID NO: 315979 - DNA, 12 bp, Artificial Sequence
  Oligonucleotide primer for the detection of SNP TSC0027214
ttttattgaggg

SEQ ID NO: 315980 - DNA, 12 bp, Artificial Sequence
  Oligonucleotide primer for the detection of SNP TSC0027214
ttttatcgaggg

SEQ ID NO: 315981 - DNA, 12 bp, Artificial Sequence
  Oligonucleotide primer for the detection of SNP TSC0027214
cttcaccaaaaa

SEQ ID NO: 315982 - DNA, 12 bp, Artificial Sequence
  Oligonucleotide primer for the detection of SNP TSC0027214
cttcaccgaaaa

SEQ ID NO: 315983 - DNA, 12 bp, Artificial Sequence
  Oligonucleotide primer for the detection of SNP TSC0027214
tttgggggggtt

SEQ ID NO: 315984 - DNA, 12 bp, Artificial Sequence
  Oligonucleotide primer for the detection of SNP TSC0027214
ttcgggggggtt

SEQ ID NO: 315985 - DNA, 12 bp, Artificial Sequence
  Oligonucleotide primer for the detection of SNP TSC0027215
atgtgggatatt

SEQ ID NO: 315986 - DNA, 12 bp, Artificial Sequence
  Oligonucleotide primer for the detection of SNP TSC0027215
atataaaacatc

SEQ ID NO: 315987 - DNA, 12 bp, Artificial Sequence
  Oligonucleotide primer for the detection of SNP TSC0027215
agggttatagaa

SEQ ID NO: 315988 - DNA, 12 bp, Artificial Sequence
  Oligonucleotide primer for the detection of SNP TSC0027216
aactccacattt

SEQ ID NO: 315989 - DNA, 12 bp, Artificial Sequence
  Oligonucleotide primer for the detection of SNP TSC0027216
ggaaggagtttt

SEQ ID NO: 315990 - DNA, 12 bp, Artificial Sequence
  Oligonucleotide primer for the detection of SNP TSC0027217
tttgagtaaatt

SEQ ID NO: 315991 - DNA, 12 bp, Artificial Sequence
  Oligonucleotide primer for the detection of SNP TSC0027217
atcctaaataaa

SEQ ID NO: 315992 - DNA, 12 bp, Artificial Sequence
  Oligonucleotide primer for the detection of SNP TSC0027217
attggaattagg

SEQ ID NO: 315993 - DNA, 12 bp, Artificial Sequence
  Oligonucleotide primer for the detection of SNP TSC0027222
aatctaccatca

SEQ ID NO: 315994 - DNA, 12 bp, Artificial Sequence
  Oligonucleotide primer for the detection of SNP TSC0027222
ggttagtgttat

SEQ ID NO: 315995 - DNA, 12 bp, Artificial Sequence
  Oligonucleotide primer for the detection of SNP TSC0027222
aatcaatatcat

SEQ ID NO: 315996 - DNA, 12 bp, Artificial Sequence
  Oligonucleotide primer for the detection of SNP TSC0027222
agtttgttatta

SEQ ID NO: 315997 - DNA, 12 bp, Artificial Sequence
  Oligonucleotide primer for the detection of SNP TSC0027226
attttaaaaaac

SEQ ID NO: 315998 - DNA, 12 bp, Artificial Sequence
  Oligonucleotide primer for the detection of SNP TSC0027226
gaaggtagagta

SEQ ID NO: 315999 - DNA, 12 bp, Artificial Sequence
  Oligonucleotide primer for the detection of SNP TSC0027229
aacctaacttcc

SEQ ID NO: 316000 - DNA, 12 bp, Artificial Sequence
  Oligonucleotide primer for the detection of SNP TSC0027229
aatatgtttttt

SEQ ID NO: 316001 - DNA, 12 bp, Artificial Sequence
  Oligonucleotide primer for the detection of SNP TSC0027229
aatacgtttttt

SEQ ID NO: 316002 - DNA, 12 bp, Artificial Sequence
  Oligonukleotid-Primer
aatatgtttttc

SEQ ID NO: 316003 - DNA, 12 bp, Artificial Sequence
  Oligonucleotide primer for the detection of SNP TSC0027229
aatacgtttttc

SEQ ID NO: 316004 - DNA, 12 bp, Artificial Sequence
  Oligonucleotide primer for the detection of SNP TSC0027229
aacacactctcc

SEQ ID NO: 316005 - DNA, 12 bp, Artificial Sequence
  Oligonucleotide primer for the detection of SNP TSC0027229
aacacgctctcc

SEQ ID NO: 316006 - DNA, 12 bp, Artificial Sequence
  Oligonucleotide primer for the detection of SNP TSC0027229
ggtttggttttc

SEQ ID NO: 316007 - DNA, 12 bp, Artificial Sequence
  Oligonucleotide primer for the detection of SNP TSC0027231
aataaacttaaa

SEQ ID NO: 316008 - DNA, 12 bp, Artificial Sequence
  Oligonucleotide primer for the detection of SNP TSC0027231
ttcgtttggttt

SEQ ID NO: 316009 - DNA, 12 bp, Artificial Sequence
  Oligonucleotide primer for the detection of SNP TSC0027231
tcccacctaact

SEQ ID NO: 316010 - DNA, 12 bp, Artificial Sequence
  Oligonucleotide primer for the detection of SNP TSC0027231
tcccgcctaact

SEQ ID NO: 316011 - DNA, 12 bp, Artificial Sequence
  Oligonucleotide primer for the detection of SNP TSC0027231
gtggatttgagt

SEQ ID NO: 316012 - DNA, 12 bp, Artificial Sequence
  Oligonucleotide primer for the detection of SNP TSC0027232
gggggagaggtt

SEQ ID NO: 316013 - DNA, 12 bp, Artificial Sequence
  Oligonucleotide primer for the detection of SNP TSC0027232
aaatgattgaga

SEQ ID NO: 316014 - DNA, 12 bp, Artificial Sequence
  Oligonucleotide primer for the detection of SNP TSC0027233
ccaaaaattcaa

SEQ ID NO: 316015 - DNA, 12 bp, Artificial Sequence
  Oligonucleotide primer for the detection of SNP TSC0027233
ccaaaaattcga

SEQ ID NO: 316016 - DNA, 12 bp, Artificial Sequence
  Oligonucleotide primer for the detection of SNP TSC0027233
tgtttagttgat

SEQ ID NO: 316017 - DNA, 12 bp, Artificial Sequence
  Oligonucleotide primer for the detection of SNP TSC0027233
ttacctaactaa

SEQ ID NO: 316018 - DNA, 12 bp, Artificial Sequence
  Oligonucleotide primer for the detection of SNP TSC0027233
tttaggagtttg

SEQ ID NO: 316019 - DNA, 12 bp, Artificial Sequence
  Oligonucleotide primer for the detection of SNP TSC0027233
tttaggagttcg

SEQ ID NO: 316020 - DNA, 12 bp, Artificial Sequence
  Oligonucleotide primer for the detection of SNP TSC0027234
acaaaaaaatta

SEQ ID NO: 316021 - DNA, 12 bp, Artificial Sequence
  Oligonucleotide primer for the detection of SNP TSC0027234
tcctaaactcaa

SEQ ID NO: 316022 - DNA, 12 bp, Artificial Sequence
  Oligonucleotide primer for the detection of SNP TSC0027234
gtaggaggattg

SEQ ID NO: 316023 - DNA, 12 bp, Artificial Sequence
  Oligonucleotide primer for the detection of SNP TSC0027235
taaaaaatgttt

SEQ ID NO: 316024 - DNA, 12 bp, Artificial Sequence
  Oligonucleotide primer for the detection of SNP TSC0027235
atgttggggttt

SEQ ID NO: 316025 - DNA, 12 bp, Artificial Sequence
  Oligonucleotide primer for the detection of SNP TSC0027236
aactttaaaaac

SEQ ID NO: 316026 - DNA, 12 bp, Artificial Sequence
  Oligonucleotide primer for the detection of SNP TSC0027236
ttgttttgggtg

SEQ ID NO: 316027 - DNA, 12 bp, Artificial Sequence
  Oligonucleotide primer for the detection of SNP TSC0027236
ttgttttgggcg

SEQ ID NO: 316028 - DNA, 12 bp, Artificial Sequence
  Oligonucleotide primer for the detection of SNP TSC0027237
acaacctccccc

SEQ ID NO: 316029 - DNA, 12 bp, Artificial Sequence
  Oligonucleotide primer for the detection of SNP TSC0027237
gggatgttgatg

SEQ ID NO: 316030 - DNA, 12 bp, Artificial Sequence
  Oligonucleotide primer for the detection of SNP TSC0027239
actatactatac

SEQ ID NO: 316031 - DNA, 12 bp, Artificial Sequence
  Oligonucleotide primer for the detection of SNP TSC0027239
gtatatatggta

SEQ ID NO: 316032 - DNA, 12 bp, Artificial Sequence
  Oligonucleotide primer for the detection of SNP TSC0027240
tttattcttttt

SEQ ID NO: 316033 - DNA, 12 bp, Artificial Sequence
  Oligonucleotide primer for the detection of SNP TSC0027240
tagagagataga

SEQ ID NO: 316034 - DNA, 12 bp, Artificial Sequence
  Oligonucleotide primer for the detection of SNP TSC0027241
aataatatcata

SEQ ID NO: 316035 - DNA, 12 bp, Artificial Sequence
  Oligonucleotide primer for the detection of SNP TSC0027241
tccttaatttaa

SEQ ID NO: 316036 - DNA, 12 bp, Artificial Sequence
  Oligonucleotide primer for the detection of SNP TSC0027241
tggtattatatt

SEQ ID NO: 316037 - DNA, 12 bp, Artificial Sequence
  Oligonucleotide primer for the detection of SNP TSC0027246
atattccccacc

SEQ ID NO: 316038 - DNA, 12 bp, Artificial Sequence
  Oligonucleotide primer for the detection of SNP TSC0027246
ttggttttttgg

SEQ ID NO: 316039 - DNA, 12 bp, Artificial Sequence
  Oligonucleotide primer for the detection of SNP TSC0027252
actcctacccaa

SEQ ID NO: 316040 - DNA, 12 bp, Artificial Sequence
  Oligonucleotide primer for the detection of SNP TSC0027252
ttagaattgttt

SEQ ID NO: 316041 - DNA, 12 bp, Artificial Sequence
  Oligonucleotide primer for the detection of SNP TSC0027252
ctaaaactaccc

SEQ ID NO: 316042 - DNA, 12 bp, Artificial Sequence
  Oligonucleotide primer for the detection of SNP TSC0027252
gtttttgtttag

SEQ ID NO: 316043 - DNA, 12 bp, Artificial Sequence
  Oligonucleotide primer for the detection of SNP TSC0027256
taacctcatata

SEQ ID NO: 316044 - DNA, 12 bp, Artificial Sequence
  Oligonucleotide primer for the detection of SNP TSC0027256
aagtgatttttt

SEQ ID NO: 316045 - DNA, 12 bp, Artificial Sequence
  Oligonucleotide primer for the detection of SNP TSC0027256
aaataatttcct

SEQ ID NO: 316046 - DNA, 12 bp, Artificial Sequence
  Oligonucleotide primer for the detection of SNP TSC0027256
tagttttatgta

SEQ ID NO: 316047 - DNA, 12 bp, Artificial Sequence
  Oligonucleotide primer for the detection of SNP TSC0027257
taattggggatt

SEQ ID NO: 316048 - DNA, 12 bp, Artificial Sequence
  Oligonucleotide primer for the detection of SNP TSC0027257
taatcggggatt

SEQ ID NO: 316049 - DNA, 12 bp, Artificial Sequence
  Oligonucleotide primer for the detection of SNP TSC0027257
ccaatcaaaaac

SEQ ID NO: 316050 - DNA, 12 bp, Artificial Sequence
  Oligonucleotide primer for the detection of SNP TSC0027257
ccaatcgaaaac

SEQ ID NO: 316051 - DNA, 12 bp, Artificial Sequence
  Oligonucleotide primer for the detection of SNP TSC0027257
taagggtagggg

SEQ ID NO: 316052 - DNA, 12 bp, Artificial Sequence
  Oligonucleotide primer for the detection of SNP TSC0027258
ttcaatcatttt

SEQ ID NO: 316053 - DNA, 12 bp, Artificial Sequence
  Oligonucleotide primer for the detection of SNP TSC0027258
ttagtatagtta

SEQ ID NO: 316054 - DNA, 12 bp, Artificial Sequence
  Oligonucleotide primer for the detection of SNP TSC0027258
ctaatacaacta

SEQ ID NO: 316055 - DNA, 12 bp, Artificial Sequence
  Oligonucleotide primer for the detection of SNP TSC0027258
tttaattatttt

SEQ ID NO: 316056 - DNA, 12 bp, Artificial Sequence
  Oligonucleotide primer for the detection of SNP TSC0027261
ttatgaaattat

SEQ ID NO: 316057 - DNA, 12 bp, Artificial Sequence
  Oligonucleotide primer for the detection of SNP TSC0027261
ccataaaatcac

SEQ ID NO: 316058 - DNA, 12 bp, Artificial Sequence
  Oligonucleotide primer for the detection of SNP TSC0027261
tttggaggtgaa

SEQ ID NO: 316059 - DNA, 12 bp, Artificial Sequence
  Oligonucleotide primer for the detection of SNP TSC0027263
ctaatacctatc

SEQ ID NO: 316060 - DNA, 12 bp, Artificial Sequence
  Oligonucleotide primer for the detection of SNP TSC0027263
tttagttatggt

SEQ ID NO: 316061 - DNA, 12 bp, Artificial Sequence
  Oligonucleotide primer for the detection of SNP TSC0027263
tctaaccataac

SEQ ID NO: 316062 - DNA, 12 bp, Artificial Sequence
  Oligonucleotide primer for the detection of SNP TSC0027264
aaccaaaaaaac

SEQ ID NO: 316063 - DNA, 12 bp, Artificial Sequence
  Oligonucleotide primer for the detection of SNP TSC0027264
aaccgaaaaaac

SEQ ID NO: 316064 - DNA, 12 bp, Artificial Sequence
  Oligonucleotide primer for the detection of SNP TSC0027264
gttaggtgttgg

SEQ ID NO: 316065 - DNA, 12 bp, Artificial Sequence
  Oligonucleotide primer for the detection of SNP TSC0027265
aaaatcaatacc

SEQ ID NO: 316066 - DNA, 12 bp, Artificial Sequence
  Oligonucleotide primer for the detection of SNP TSC0027265
accaacacctaa

SEQ ID NO: 316067 - DNA, 12 bp, Artificial Sequence
  Oligonucleotide primer for the detection of SNP TSC0027265
gaagttagtgtt

SEQ ID NO: 316068 - DNA, 12 bp, Artificial Sequence
  Oligonucleotide primer for the detection of SNP TSC0027265
gaagttagtgtc

SEQ ID NO: 316069 - DNA, 12 bp, Artificial Sequence
  Oligonucleotide primer for the detection of SNP TSC0027266
tttaatggtatt

SEQ ID NO: 316070 - DNA, 12 bp, Artificial Sequence
  Oligonucleotide primer for the detection of SNP TSC0027266
tttaacggtatt

SEQ ID NO: 316071 - DNA, 12 bp, Artificial Sequence
  Oligonucleotide primer for the detection of SNP TSC0027266
ctaacaacacta

SEQ ID NO: 316072 - DNA, 12 bp, Artificial Sequence
  Oligonucleotide primer for the detection of SNP TSC0027266
ctaacgacacta

SEQ ID NO: 316073 - DNA, 12 bp, Artificial Sequence
  Oligonucleotide primer for the detection of SNP TSC0027266
ggtgggtggaag

SEQ ID NO: 316074 - DNA, 12 bp, Artificial Sequence
  Oligonucleotide primer for the detection of SNP TSC0027267
aattaaattaca

SEQ ID NO: 316075 - DNA, 12 bp, Artificial Sequence
  Oligonucleotide primer for the detection of SNP TSC0027267
tttttaatatat

SEQ ID NO: 316076 - DNA, 12 bp, Artificial Sequence
  Oligonucleotide primer for the detection of SNP TSC0027267
cctcaatatata

SEQ ID NO: 316077 - DNA, 12 bp, Artificial Sequence
  Oligonucleotide primer for the detection of SNP TSC0027267
attgggttatat

SEQ ID NO: 316078 - DNA, 12 bp, Artificial Sequence
  Oligonucleotide primer for the detection of SNP TSC0027271
ccccctccccca

SEQ ID NO: 316079 - DNA, 12 bp, Artificial Sequence
  Oligonukleotid-Primer
attttgatgtgg

SEQ ID NO: 316080 - DNA, 12 bp, Artificial Sequence
  Oligonucleotide primer for the detection of SNP TSC0027271
atcttaatataa

SEQ ID NO: 316081 - DNA, 12 bp, Artificial Sequence
  Oligonucleotide primer for the detection of SNP TSC0027274
ccctcttcctta

SEQ ID NO: 316082 - DNA, 12 bp, Artificial Sequence
  Oligonucleotide primer for the detection of SNP TSC0027274
atggggtggttt

SEQ ID NO: 316083 - DNA, 12 bp, Artificial Sequence
  Oligonucleotide primer for the detection of SNP TSC0027274
accataaaataa

SEQ ID NO: 316084 - DNA, 12 bp, Artificial Sequence
  Oligonucleotide primer for the detection of SNP TSC0027276
aaatcaattact

SEQ ID NO: 316085 - DNA, 12 bp, Artificial Sequence
  Oligonucleotide primer for the detection of SNP TSC0027276
agtttatattta

SEQ ID NO: 316086 - DNA, 12 bp, Artificial Sequence
  Oligonucleotide primer for the detection of SNP TSC0027277
aacataaataat

SEQ ID NO: 316087 - DNA, 12 bp, Artificial Sequence
  Oligonucleotide primer for the detection of SNP TSC0027277
agtagtaagtaa

SEQ ID NO: 316088 - DNA, 12 bp, Artificial Sequence
  Oligonucleotide primer for the detection of SNP TSC0027278
taaaaactcctc

SEQ ID NO: 316089 - DNA, 12 bp, Artificial Sequence
  Oligonucleotide primer for the detection of SNP TSC0027278
taagagggagaa

SEQ ID NO: 316090 - DNA, 12 bp, Artificial Sequence
  Oligonucleotide primer for the detection of SNP TSC0027279
tttattttggaa

SEQ ID NO: 316091 - DNA, 12 bp, Artificial Sequence
  Oligonukleotid-Primer
ttaaaaaaccac

SEQ ID NO: 316092 - DNA, 12 bp, Artificial Sequence
  Oligonucleotide primer for the detection of SNP TSC0027280
tggggtaaggat

SEQ ID NO: 316093 - DNA, 12 bp, Artificial Sequence
  Oligonucleotide primer for the detection of SNP TSC0027280
ttaagagattat

SEQ ID NO: 316094 - DNA, 12 bp, Artificial Sequence
  Oligonucleotide primer for the detection of SNP TSC0027281
caactacatctt

SEQ ID NO: 316095 - DNA, 12 bp, Artificial Sequence
  Oligonucleotide primer for the detection of SNP TSC0027281
gagaatagtttt

SEQ ID NO: 316096 - DNA, 12 bp, Artificial Sequence
  Oligonucleotide primer for the detection of SNP TSC0027281
aaaacaactcta

SEQ ID NO: 316097 - DNA, 12 bp, Artificial Sequence
  Oligonucleotide primer for the detection of SNP TSC0027281
aattgtattttt

SEQ ID NO: 316098 - DNA, 12 bp, Artificial Sequence
  Oligonucleotide primer for the detection of SNP TSC0027281
aattgtattttc

SEQ ID NO: 316099 - DNA, 12 bp, Artificial Sequence
  Oligonucleotide primer for the detection of SNP TSC0027282
caatcatccatc

SEQ ID NO: 316100 - DNA, 12 bp, Artificial Sequence
  Oligonucleotide primer for the detection of SNP TSC0027282
caatcgtccatc

SEQ ID NO: 316101 - DNA, 12 bp, Artificial Sequence
  Oligonucleotide primer for the detection of SNP TSC0027282
tttagggtatgg

SEQ ID NO: 316102 - DNA, 12 bp, Artificial Sequence
  Oligonucleotide primer for the detection of SNP TSC0027284
ctccaaactact

SEQ ID NO: 316103 - DNA, 12 bp, Artificial Sequence
  Oligonucleotide primer for the detection of SNP TSC0027284
aaaaggtttgga

SEQ ID NO: 316104 - DNA, 12 bp, Artificial Sequence
  Oligonucleotide primer for the detection of SNP TSC0027285
aaaacacaaaat

SEQ ID NO: 316105 - DNA, 12 bp, Artificial Sequence
  Oligonucleotide primer for the detection of SNP TSC0027285
aactttaactaa

SEQ ID NO: 316106 - DNA, 12 bp, Artificial Sequence
  Oligonucleotide primer for the detection of SNP TSC0027285
agggtatagagt

SEQ ID NO: 316107 - DNA, 12 bp, Artificial Sequence
  Oligonucleotide primer for the detection of SNP TSC0027286
caatctaaatac

SEQ ID NO: 316108 - DNA, 12 bp, Artificial Sequence
  Oligonucleotide primer for the detection of SNP TSC0027286
aataagttttta

SEQ ID NO: 316109 - DNA, 12 bp, Artificial Sequence
  Oligonucleotide primer for the detection of SNP TSC0027287
acatcatataaa

SEQ ID NO: 316110 - DNA, 12 bp, Artificial Sequence
  Oligonucleotide primer for the detection of SNP TSC0027287
gttttatatatg

SEQ ID NO: 316111 - DNA, 12 bp, Artificial Sequence
  Oligonucleotide primer for the detection of SNP TSC0027287
accccatatata

SEQ ID NO: 316112 - DNA, 12 bp, Artificial Sequence
  Oligonucleotide primer for the detection of SNP TSC0027287
gtattatgtgag

SEQ ID NO: 316113 - DNA, 12 bp, Artificial Sequence
  Oligonucleotide primer for the detection of SNP TSC0027288
aaattaatcata

SEQ ID NO: 316114 - DNA, 12 bp, Artificial Sequence
  Oligonucleotide primer for the detection of SNP TSC0027288
attagttatatt

SEQ ID NO: 316115 - DNA, 12 bp, Artificial Sequence
  Oligonucleotide primer for the detection of SNP TSC0027289
tagaggttgggt

SEQ ID NO: 316116 - DNA, 12 bp, Artificial Sequence
  Oligonucleotide primer for the detection of SNP TSC0027289
taaaaactaaac

SEQ ID NO: 316117 - DNA, 12 bp, Artificial Sequence
  Oligonucleotide primer for the detection of SNP TSC0027289
aagtatgagtta

SEQ ID NO: 316118 - DNA, 12 bp, Artificial Sequence
  Oligonucleotide primer for the detection of SNP TSC0027290
tcttatttttat

SEQ ID NO: 316119 - DNA, 12 bp, Artificial Sequence
  Oligonucleotide primer for the detection of SNP TSC0027290
aagtaattaatt

SEQ ID NO: 316120 - DNA, 12 bp, Artificial Sequence
  Oligonucleotide primer for the detection of SNP TSC0027294
aaccccacactc

SEQ ID NO: 316121 - DNA, 12 bp, Artificial Sequence
  Oligonucleotide primer for the detection of SNP TSC0027294
ttgttttaagaa

SEQ ID NO: 316122 - DNA, 12 bp, Artificial Sequence
  Oligonucleotide primer for the detection of SNP TSC0027295
taaataatacac

SEQ ID NO: 316123 - DNA, 12 bp, Artificial Sequence
  Oligonucleotide primer for the detection of SNP TSC0027295
atttatatagta

SEQ ID NO: 316124 - DNA, 12 bp, Artificial Sequence
  Oligonucleotide primer for the detection of SNP TSC0027297
taaactttaaat

SEQ ID NO: 316125 - DNA, 12 bp, Artificial Sequence
  Oligonucleotide primer for the detection of SNP TSC0027297
tttatttcaatt

SEQ ID NO: 316126 - DNA, 12 bp, Artificial Sequence
  Oligonucleotide primer for the detection of SNP TSC0027297
aaattttggatt

SEQ ID NO: 316127 - DNA, 12 bp, Artificial Sequence
  Oligonucleotide primer for the detection of SNP TSC0027298
ctaaacccaaca

SEQ ID NO: 316128 - DNA, 12 bp, Artificial Sequence
  Oligonucleotide primer for the detection of SNP TSC0027298
tttttaggggag

SEQ ID NO: 316129 - DNA, 12 bp, Artificial Sequence
  Oligonucleotide primer for the detection of SNP TSC0027298
tcttcaaaaaaa

SEQ ID NO: 316130 - DNA, 12 bp, Artificial Sequence
  Oligonucleotide primer for the detection of SNP TSC0027298
tggatttagtat

SEQ ID NO: 316131 - DNA, 12 bp, Artificial Sequence
  Oligonucleotide primer for the detection of SNP TSC0027299
attaaaaaacga

SEQ ID NO: 316132 - DNA, 12 bp, Artificial Sequence
  Oligonucleotide primer for the detection of SNP TSC0027299
attttatttgtt

SEQ ID NO: 316133 - DNA, 12 bp, Artificial Sequence
  Oligonucleotide primer for the detection of SNP TSC0027299
catcccacttac

SEQ ID NO: 316134 - DNA, 12 bp, Artificial Sequence
  Oligonucleotide primer for the detection of SNP TSC0027299
gttagagagtgg

SEQ ID NO: 316135 - DNA, 12 bp, Artificial Sequence
  Oligonucleotide primer for the detection of SNP TSC0027299
gttagagagcgg

SEQ ID NO: 316136 - DNA, 12 bp, Artificial Sequence
  Oligonucleotide primer for the detection of SNP TSC0027300
acttttacaaat

SEQ ID NO: 316137 - DNA, 12 bp, Artificial Sequence
  Oligonucleotide primer for the detection of SNP TSC0027300
attagtatgaaa

SEQ ID NO: 316138 - DNA, 12 bp, Artificial Sequence
  Oligonucleotide primer for the detection of SNP TSC0027301
ccctaaaacttt

SEQ ID NO: 316139 - DNA, 12 bp, Artificial Sequence
  Oligonucleotide primer for the detection of SNP TSC0027302
aattaactaaat

SEQ ID NO: 316140 - DNA, 12 bp, Artificial Sequence
  Oligonucleotide primer for the detection of SNP TSC0027302
tggtgtatgtta

SEQ ID NO: 316141 - DNA, 12 bp, Artificial Sequence
  Oligonucleotide primer for the detection of SNP TSC0027302
tggcgtatgtta

SEQ ID NO: 316142 - DNA, 12 bp, Artificial Sequence
  Oligonucleotide primer for the detection of SNP TSC0027306
ccaacaactctt

SEQ ID NO: 316143 - DNA, 12 bp, Artificial Sequence
  Oligonucleotide primer for the detection of SNP TSC0027306
tttttgtagtgg

SEQ ID NO: 316144 - DNA, 12 bp, Artificial Sequence
  Oligonucleotide primer for the detection of SNP TSC0027306
tttctacaataa

SEQ ID NO: 316145 - DNA, 12 bp, Artificial Sequence
  Oligonucleotide primer for the detection of SNP TSC0027306
ttaataattttt

SEQ ID NO: 316146 - DNA, 12 bp, Artificial Sequence
  Oligonucleotide primer for the detection of SNP TSC0027307
tatcaccaacac

SEQ ID NO: 316147 - DNA, 12 bp, Artificial Sequence
  Oligonucleotide primer for the detection of SNP TSC0027307
aagttaggttag

SEQ ID NO: 316148 - DNA, 12 bp, Artificial Sequence
  Oligonucleotide primer for the detection of SNP TSC0027309
aaaatcctaaaa

SEQ ID NO: 316149 - DNA, 12 bp, Artificial Sequence
  Oligonucleotide primer for the detection of SNP TSC0027309
gggtaggagggg

SEQ ID NO: 316150 - DNA, 12 bp, Artificial Sequence
  Oligonucleotide primer for the detection of SNP TSC0027309
gagttttggggt

SEQ ID NO: 316151 - DNA, 12 bp, Artificial Sequence
  Oligonucleotide primer for the detection of SNP TSC0027311
aaactaaactac

SEQ ID NO: 316152 - DNA, 12 bp, Artificial Sequence
  Oligonucleotide primer for the detection of SNP TSC0027311
gagatagatgat

SEQ ID NO: 316153 - DNA, 12 bp, Artificial Sequence
  Oligonucleotide primer for the detection of SNP TSC0027312
taaataaccttc

SEQ ID NO: 316154 - DNA, 12 bp, Artificial Sequence
  Oligonucleotide primer for the detection of SNP TSC0027312
ggttagattata

SEQ ID NO: 316155 - DNA, 12 bp, Artificial Sequence
  Oligonucleotide primer for the detection of SNP TSC0027312
tagatgattttt

SEQ ID NO: 316156 - DNA, 12 bp, Artificial Sequence
  Oligonucleotide primer for the detection of SNP TSC0027313
taaatacaatta

SEQ ID NO: 316157 - DNA, 12 bp, Artificial Sequence
  Oligonucleotide primer for the detection of SNP TSC0027313
ggatagataggt

SEQ ID NO: 316158 - DNA, 12 bp, Artificial Sequence
  Oligonucleotide primer for the detection of SNP TSC0027313
taaatgtagtta

SEQ ID NO: 316159 - DNA, 12 bp, Artificial Sequence
  Oligonucleotide primer for the detection of SNP TSC0027314
aatttcccaaca

SEQ ID NO: 316160 - DNA, 12 bp, Artificial Sequence
  Oligonucleotide primer for the detection of SNP TSC0027314
gttataaattat

SEQ ID NO: 316161 - DNA, 12 bp, Artificial Sequence
  Oligonucleotide primer for the detection of SNP TSC0027314
gttataaattac

SEQ ID NO: 316162 - DNA, 12 bp, Artificial Sequence
  Oligonucleotide primer for the detection of SNP TSC0027314
attataaatcac

SEQ ID NO: 316163 - DNA, 12 bp, Artificial Sequence
  Oligonucleotide primer for the detection of SNP TSC0027314
tgattttttagt

SEQ ID NO: 316164 - DNA, 12 bp, Artificial Sequence
  Oligonucleotide primer for the detection of SNP TSC0027315
ttttaacaaaac

SEQ ID NO: 316165 - DNA, 12 bp, Artificial Sequence
  Oligonucleotide primer for the detection of SNP TSC0027315
ggttagatttag

SEQ ID NO: 316166 - DNA, 12 bp, Artificial Sequence
  Oligonucleotide primer for the detection of SNP TSC0027315
aatcaaatccaa

SEQ ID NO: 316167 - DNA, 12 bp, Artificial Sequence
  Oligonucleotide primer for the detection of SNP TSC0027315
ttttggtagggt

SEQ ID NO: 316168 - DNA, 12 bp, Artificial Sequence
  Oligonucleotide primer for the detection of SNP TSC0027316
aaaaccaaaaat

SEQ ID NO: 316169 - DNA, 12 bp, Artificial Sequence
  Oligonucleotide primer for the detection of SNP TSC0027316
tgttagtagtag

SEQ ID NO: 316170 - DNA, 12 bp, Artificial Sequence
  Oligonucleotide primer for the detection of SNP TSC0027316
tatcaacaacaa

SEQ ID NO: 316171 - DNA, 12 bp, Artificial Sequence
  Oligonucleotide primer for the detection of SNP TSC0027316
agaattaggagt

SEQ ID NO: 316172 - DNA, 12 bp, Artificial Sequence
  Oligonucleotide primer for the detection of SNP TSC0027317
gagtaatgagaa

SEQ ID NO: 316173 - DNA, 12 bp, Artificial Sequence
  Oligonucleotide primer for the detection of SNP TSC0027317
aaacaataaaaa

SEQ ID NO: 316174 - DNA, 12 bp, Artificial Sequence
  Oligonucleotide primer for the detection of SNP TSC0027318
taaaaaacatcc

SEQ ID NO: 316175 - DNA, 12 bp, Artificial Sequence
  Oligonucleotide primer for the detection of SNP TSC0027318
taaaaaacgtcc

SEQ ID NO: 316176 - DNA, 12 bp, Artificial Sequence
  Oligonucleotide primer for the detection of SNP TSC0027318
aatttagtttaa

SEQ ID NO: 316177 - DNA, 12 bp, Artificial Sequence
  Oligonucleotide primer for the detection of SNP TSC0027321
ttactttatacc

SEQ ID NO: 316178 - DNA, 12 bp, Artificial Sequence
  Oligonucleotide primer for the detection of SNP TSC0027321
aatggtttaata

SEQ ID NO: 316179 - DNA, 12 bp, Artificial Sequence
  Oligonucleotide primer for the detection of SNP TSC0027321
aataatctaata

SEQ ID NO: 316180 - DNA, 12 bp, Artificial Sequence
  Oligonucleotide primer for the detection of SNP TSC0027322
accttacctaac

SEQ ID NO: 316181 - DNA, 12 bp, Artificial Sequence
  Oligonucleotide primer for the detection of SNP TSC0027322
ttataggggatg

SEQ ID NO: 316182 - DNA, 12 bp, Artificial Sequence
  Oligonucleotide primer for the detection of SNP TSC0027324
ccactctaacta

SEQ ID NO: 316183 - DNA, 12 bp, Artificial Sequence
  Oligonucleotide primer for the detection of SNP TSC0027324
ccaccccctacc

SEQ ID NO: 316184 - DNA, 12 bp, Artificial Sequence
  Oligonucleotide primer for the detection of SNP TSC0027324
ttattttggttg

SEQ ID NO: 316185 - DNA, 12 bp, Artificial Sequence
  Oligonucleotide primer for the detection of SNP TSC0027326
aagtagggagtt

SEQ ID NO: 316186 - DNA, 12 bp, Artificial Sequence
  Oligonucleotide primer for the detection of SNP TSC0027326
aagtagggagtc

SEQ ID NO: 316187 - DNA, 12 bp, Artificial Sequence
  Oligonucleotide primer for the detection of SNP TSC0027326
aaacaaaaaacc

SEQ ID NO: 316188 - DNA, 12 bp, Artificial Sequence
  Oligonucleotide primer for the detection of SNP TSC0027326
gggaagaagaag

SEQ ID NO: 316189 - DNA, 12 bp, Artificial Sequence
  Oligonucleotide primer for the detection of SNP TSC0027328
caataaaacaat

SEQ ID NO: 316190 - DNA, 12 bp, Artificial Sequence
  Oligonucleotide primer for the detection of SNP TSC0027328
agttttattata

SEQ ID NO: 316191 - DNA, 12 bp, Artificial Sequence
  Oligonucleotide primer for the detection of SNP TSC0027329
tttctcacctca

SEQ ID NO: 316192 - DNA, 12 bp, Artificial Sequence
  Oligonucleotide primer for the detection of SNP TSC0027329
gattgtttgtag

SEQ ID NO: 316193 - DNA, 12 bp, Artificial Sequence
  Oligonucleotide primer for the detection of SNP TSC0027329
gatcgtttgtag

SEQ ID NO: 316194 - DNA, 12 bp, Artificial Sequence
  Oligonucleotide primer for the detection of SNP TSC0027329
gattgttcgtag

SEQ ID NO: 316195 - DNA, 12 bp, Artificial Sequence
  Oligonucleotide primer for the detection of SNP TSC0027329
gatcgttcgtag

SEQ ID NO: 316196 - DNA, 12 bp, Artificial Sequence
  Oligonucleotide primer for the detection of SNP TSC0027329
tccacaaaaaaa

SEQ ID NO: 316197 - DNA, 12 bp, Artificial Sequence
  Oligonucleotide primer for the detection of SNP TSC0027329
tccgcaaaaaaa

SEQ ID NO: 316198 - DNA, 12 bp, Artificial Sequence
  Oligonucleotide primer for the detection of SNP TSC0027330
actacttctaca

SEQ ID NO: 316199 - DNA, 12 bp, Artificial Sequence
  Oligonucleotide primer for the detection of SNP TSC0027330
gtaaatggtttt

SEQ ID NO: 316200 - DNA, 12 bp, Artificial Sequence
  Oligonucleotide primer for the detection of SNP TSC0027330
gtaaacggtttt

SEQ ID NO: 316201 - DNA, 12 bp, Artificial Sequence
  Oligonucleotide primer for the detection of SNP TSC0027330
acaaacaacccc

SEQ ID NO: 316202 - DNA, 12 bp, Artificial Sequence
  Oligonucleotide primer for the detection of SNP TSC0027330
acaaacgacccc

SEQ ID NO: 316203 - DNA, 12 bp, Artificial Sequence
  Oligonucleotide primer for the detection of SNP TSC0027331
aatttcccccat

SEQ ID NO: 316204 - DNA, 12 bp, Artificial Sequence
  Oligonukleotid-Primer
attatgagaata

SEQ ID NO: 316205 - DNA, 12 bp, Artificial Sequence
  Oligonucleotide primer for the detection of SNP TSC0027331
attacgagaata

SEQ ID NO: 316206 - DNA, 12 bp, Artificial Sequence
  Oligonucleotide primer for the detection of SNP TSC0027332
aaacatctaatc

SEQ ID NO: 316207 - DNA, 12 bp, Artificial Sequence
  Oligonucleotide primer for the detection of SNP TSC0027332
aaacgtctaatc

SEQ ID NO: 316208 - DNA, 12 bp, Artificial Sequence
  Oligonucleotide primer for the detection of SNP TSC0027332
agtattttttgg

SEQ ID NO: 316209 - DNA, 12 bp, Artificial Sequence
  Oligonucleotide primer for the detection of SNP TSC0027332
agtatttttcgg

SEQ ID NO: 316210 - DNA, 12 bp, Artificial Sequence
  Oligonucleotide primer for the detection of SNP TSC0027332
aacactccccaa

SEQ ID NO: 316211 - DNA, 12 bp, Artificial Sequence
  Oligonucleotide primer for the detection of SNP TSC0027332
aacactccccga

SEQ ID NO: 316212 - DNA, 12 bp, Artificial Sequence
  Oligonucleotide primer for the detection of SNP TSC0027332
gggtgtttgatt

SEQ ID NO: 316213 - DNA, 12 bp, Artificial Sequence
  Oligonucleotide primer for the detection of SNP TSC0027332
gggcgtttgatt

SEQ ID NO: 316214 - DNA, 12 bp, Artificial Sequence
  Oligonucleotide primer for the detection of SNP TSC0027333
aactcaacacat

SEQ ID NO: 316215 - DNA, 12 bp, Artificial Sequence
  Oligonucleotide primer for the detection of SNP TSC0027333
gttgatatatga

SEQ ID NO: 316216 - DNA, 12 bp, Artificial Sequence
  Oligonucleotide primer for the detection of SNP TSC0027333
actaacatataa

SEQ ID NO: 316217 - DNA, 12 bp, Artificial Sequence
  Oligonucleotide primer for the detection of SNP TSC0027335
accacccaaata

SEQ ID NO: 316218 - DNA, 12 bp, Artificial Sequence
  Oligonucleotide primer for the detection of SNP TSC0027335
accacccgaata

SEQ ID NO: 316219 - DNA, 12 bp, Artificial Sequence
  Oligonucleotide primer for the detection of SNP TSC0027335
ttggtaatttta

SEQ ID NO: 316220 - DNA, 12 bp, Artificial Sequence
  Oligonucleotide primer for the detection of SNP TSC0027335
taataattccaa

SEQ ID NO: 316221 - DNA, 12 bp, Artificial Sequence
  Oligonucleotide primer for the detection of SNP TSC0027335
agttatttgaat

SEQ ID NO: 316222 - DNA, 12 bp, Artificial Sequence
  Oligonucleotide primer for the detection of SNP TSC0027335
agttattcgaat

SEQ ID NO: 316223 - DNA, 12 bp, Artificial Sequence
  Oligonucleotide primer for the detection of SNP TSC0027336
ccaaattcctta

SEQ ID NO: 316224 - DNA, 12 bp, Artificial Sequence
  Oligonucleotide primer for the detection of SNP TSC0027336
gtagggagtgtt

SEQ ID NO: 316225 - DNA, 12 bp, Artificial Sequence
  Oligonucleotide primer for the detection of SNP TSC0027337
taaaataacctc

SEQ ID NO: 316226 - DNA, 12 bp, Artificial Sequence
  Oligonucleotide primer for the detection of SNP TSC0027337
atgtggtgttaa

SEQ ID NO: 316227 - DNA, 12 bp, Artificial Sequence
  Oligonucleotide primer for the detection of SNP TSC0027337
atataataccaa

SEQ ID NO: 316228 - DNA, 12 bp, Artificial Sequence
  Oligonucleotide primer for the detection of SNP TSC0027337
tggagtgatttt

SEQ ID NO: 316229 - DNA, 12 bp, Artificial Sequence
  Oligonucleotide primer for the detection of SNP TSC0027338
acaaaaatctac

SEQ ID NO: 316230 - DNA, 12 bp, Artificial Sequence
  Oligonucleotide primer for the detection of SNP TSC0027346
attttacataaa

SEQ ID NO: 316231 - DNA, 12 bp, Artificial Sequence
  Oligonucleotide primer for the detection of SNP TSC0027346
ttctacttaaat

SEQ ID NO: 316232 - DNA, 12 bp, Artificial Sequence
  Oligonucleotide primer for the detection of SNP TSC0027346
gttttgtatgag

SEQ ID NO: 316233 - DNA, 12 bp, Artificial Sequence
  Oligonucleotide primer for the detection of SNP TSC0027348
tcacacacacac

SEQ ID NO: 316234 - DNA, 12 bp, Artificial Sequence
  Oligonucleotide primer for the detection of SNP TSC0027348
tcacacacgcac

SEQ ID NO: 316235 - DNA, 12 bp, Artificial Sequence
  Oligonucleotide primer for the detection of SNP TSC0027348
gtgagtgaatga

SEQ ID NO: 316236 - DNA, 12 bp, Artificial Sequence
  Oligonucleotide primer for the detection of SNP TSC0027350
agattttaattt

SEQ ID NO: 316237 - DNA, 12 bp, Artificial Sequence
  Oligonucleotide primer for the detection of SNP TSC0027350
agaaaggttttt

SEQ ID NO: 316238 - DNA, 12 bp, Artificial Sequence
  Oligonucleotide primer for the detection of SNP TSC0027351
ataatggtgtgt

SEQ ID NO: 316239 - DNA, 12 bp, Artificial Sequence
  Oligonucleotide primer for the detection of SNP TSC0027351
caataatatata

SEQ ID NO: 316240 - DNA, 12 bp, Artificial Sequence
  Oligonucleotide primer for the detection of SNP TSC0027351
agatagataata

SEQ ID NO: 316241 - DNA, 12 bp, Artificial Sequence
  Oligonucleotide primer for the detection of SNP TSC0027352
aaaaataacaac

SEQ ID NO: 316242 - DNA, 12 bp, Artificial Sequence
  Oligonucleotide primer for the detection of SNP TSC0027352
aaaaataacgac

SEQ ID NO: 316243 - DNA, 12 bp, Artificial Sequence
  Oligonucleotide primer for the detection of SNP TSC0027352
ttgttttaaaga

SEQ ID NO: 316244 - DNA, 12 bp, Artificial Sequence
  Oligonucleotide primer for the detection of SNP TSC0027354
tcctaaacactc

SEQ ID NO: 316245 - DNA, 12 bp, Artificial Sequence
  Oligonucleotide primer for the detection of SNP TSC0027354
tgtggtttatag

SEQ ID NO: 316246 - DNA, 12 bp, Artificial Sequence
  Oligonucleotide primer for the detection of SNP TSC0027354
tataacccacaa

SEQ ID NO: 316247 - DNA, 12 bp, Artificial Sequence
  Oligonucleotide primer for the detection of SNP TSC0027354
ttttaagtattt

SEQ ID NO: 316248 - DNA, 12 bp, Artificial Sequence
  Oligonucleotide primer for the detection of SNP TSC0027355
atccaaatatcc

SEQ ID NO: 316249 - DNA, 12 bp, Artificial Sequence
  Oligonucleotide primer for the detection of SNP TSC0027355
ttatagggagtg

SEQ ID NO: 316250 - DNA, 12 bp, Artificial Sequence
  Oligonucleotide primer for the detection of SNP TSC0027356
taactacatcca

SEQ ID NO: 316251 - DNA, 12 bp, Artificial Sequence
  Oligonucleotide primer for the detection of SNP TSC0027356
tgtttaggatat

SEQ ID NO: 316252 - DNA, 12 bp, Artificial Sequence
  Oligonucleotide primer for the detection of SNP TSC0027356
atacttaaaaca

SEQ ID NO: 316253 - DNA, 12 bp, Artificial Sequence
  Oligonucleotide primer for the detection of SNP TSC0027356
atagttgtattt

SEQ ID NO: 316254 - DNA, 12 bp, Artificial Sequence
  Oligonucleotide primer for the detection of SNP TSC0027358
tcaatattatca

SEQ ID NO: 316255 - DNA, 12 bp, Artificial Sequence
  Oligonucleotide primer for the detection of SNP TSC0027358
aattatttaatt

SEQ ID NO: 316256 - DNA, 12 bp, Artificial Sequence
  Oligonucleotide primer for the detection of SNP TSC0027358
aattatttaatc

SEQ ID NO: 316257 - DNA, 12 bp, Artificial Sequence
  Oligonucleotide primer for the detection of SNP TSC0027358
tttagtgttgtt

SEQ ID NO: 316258 - DNA, 12 bp, Artificial Sequence
  Oligonucleotide primer for the detection of SNP TSC0027359
atttattaaaaa

SEQ ID NO: 316259 - DNA, 12 bp, Artificial Sequence
  Oligonucleotide primer for the detection of SNP TSC0027359
aatagtttttag

SEQ ID NO: 316260 - DNA, 12 bp, Artificial Sequence
  Oligonucleotide primer for the detection of SNP TSC0027359
aacaaccttcaa

SEQ ID NO: 316261 - DNA, 12 bp, Artificial Sequence
  Oligonucleotide primer for the detection of SNP TSC0027359
atttgttagaaa

SEQ ID NO: 316262 - DNA, 12 bp, Artificial Sequence
  Oligonucleotide primer for the detection of SNP TSC0027360
taaattttaaaa

SEQ ID NO: 316263 - DNA, 12 bp, Artificial Sequence
  Oligonucleotide primer for the detection of SNP TSC0027360
ttaataattatg

SEQ ID NO: 316264 - DNA, 12 bp, Artificial Sequence
  Oligonucleotide primer for the detection of SNP TSC0027360
ctaataatcata

SEQ ID NO: 316265 - DNA, 12 bp, Artificial Sequence
  Oligonucleotide primer for the detection of SNP TSC0027360
ataaattttaag

SEQ ID NO: 316266 - DNA, 12 bp, Artificial Sequence
  Oligonucleotide primer for the detection of SNP TSC0027361
aataaattttaa

SEQ ID NO: 316267 - DNA, 12 bp, Artificial Sequence
  Oligonucleotide primer for the detection of SNP TSC0027361
aataattatgtt

SEQ ID NO: 316268 - DNA, 12 bp, Artificial Sequence
  Oligonucleotide primer for the detection of SNP TSC0027361
taataatcatac

SEQ ID NO: 316269 - DNA, 12 bp, Artificial Sequence
  Oligonucleotide primer for the detection of SNP TSC0027363
tatcttataaaa

SEQ ID NO: 316270 - DNA, 12 bp, Artificial Sequence
  Oligonucleotide primer for the detection of SNP TSC0027363
ttaaaggttata

SEQ ID NO: 316271 - DNA, 12 bp, Artificial Sequence
  Oligonucleotide primer for the detection of SNP TSC0027363
ttgttttgtagg

SEQ ID NO: 316272 - DNA, 12 bp, Artificial Sequence
  Oligonucleotide primer for the detection of SNP TSC0027364
ttatttgattga

SEQ ID NO: 316273 - DNA, 12 bp, Artificial Sequence
  Oligonucleotide primer for the detection of SNP TSC0027368
tttttgataata

SEQ ID NO: 316274 - DNA, 12 bp, Artificial Sequence
  Oligonucleotide primer for the detection of SNP TSC0027368
tttctaataata

SEQ ID NO: 316275 - DNA, 12 bp, Artificial Sequence
  Oligonucleotide primer for the detection of SNP TSC0027368
aatgatttggtg

SEQ ID NO: 316276 - DNA, 12 bp, Artificial Sequence
  Oligonucleotide primer for the detection of SNP TSC0027369
attaacacaata

SEQ ID NO: 316277 - DNA, 12 bp, Artificial Sequence
  Oligonucleotide primer for the detection of SNP TSC0027369
attaacgcaata

SEQ ID NO: 316278 - DNA, 12 bp, Artificial Sequence
  Oligonucleotide primer for the detection of SNP TSC0027369
tatacaaaatcc

SEQ ID NO: 316279 - DNA, 12 bp, Artificial Sequence
  Oligonucleotide primer for the detection of SNP TSC0027369
gttggtgtaatg

SEQ ID NO: 316280 - DNA, 12 bp, Artificial Sequence
  Oligonucleotide primer for the detection of SNP TSC0027369
gttggcgtaatg

SEQ ID NO: 316281 - DNA, 12 bp, Artificial Sequence
  Oligonucleotide primer for the detection of SNP TSC0027377
ctttataaactt

SEQ ID NO: 316282 - DNA, 12 bp, Artificial Sequence
  Oligonucleotide primer for the detection of SNP TSC0027377
tattggattaaa

SEQ ID NO: 316283 - DNA, 12 bp, Artificial Sequence
  Oligonucleotide primer for the detection of SNP TSC0027378
taggatttttat

SEQ ID NO: 316284 - DNA, 12 bp, Artificial Sequence
  Oligonucleotide primer for the detection of SNP TSC0027378
caaaatctccac

SEQ ID NO: 316285 - DNA, 12 bp, Artificial Sequence
  Oligonucleotide primer for the detection of SNP TSC0027378
ggtaggggggta

SEQ ID NO: 316286 - DNA, 12 bp, Artificial Sequence
  Oligonucleotide primer for the detection of SNP TSC0027379
ttaataccaatt

SEQ ID NO: 316287 - DNA, 12 bp, Artificial Sequence
  Oligonucleotide primer for the detection of SNP TSC0027379
ttattggtataa

SEQ ID NO: 316288 - DNA, 12 bp, Artificial Sequence
  Oligonucleotide primer for the detection of SNP TSC0027380
aatattgagtta

SEQ ID NO: 316289 - DNA, 12 bp, Artificial Sequence
  Oligonucleotide primer for the detection of SNP TSC0027380
aatatcgagtta

SEQ ID NO: 316290 - DNA, 12 bp, Artificial Sequence
  Oligonucleotide primer for the detection of SNP TSC0027381
ccacaacccaat

SEQ ID NO: 316291 - DNA, 12 bp, Artificial Sequence
  Oligonucleotide primer for the detection of SNP TSC0027381
tgggtttttggg

SEQ ID NO: 316292 - DNA, 12 bp, Artificial Sequence
  Oligonucleotide primer for the detection of SNP TSC0027382
tccttaatattt

SEQ ID NO: 316293 - DNA, 12 bp, Artificial Sequence
  Oligonucleotide primer for the detection of SNP TSC0027382
tctctttaaaaa

SEQ ID NO: 316294 - DNA, 12 bp, Artificial Sequence
  Oligonucleotide primer for the detection of SNP TSC0027382
tttttaatattt

SEQ ID NO: 316295 - DNA, 12 bp, Artificial Sequence
  Oligonucleotide primer for the detection of SNP TSC0027383
taacccataacc

SEQ ID NO: 316296 - DNA, 12 bp, Artificial Sequence
  Oligonucleotide primer for the detection of SNP TSC0027383
cccttaattttt

SEQ ID NO: 316297 - DNA, 12 bp, Artificial Sequence
  Oligonukleotid-Primer
tggtttatgatt

SEQ ID NO: 316298 - DNA, 12 bp, Artificial Sequence
  Oligonucleotide primer for the detection of SNP TSC0027387
acttaaaattct

SEQ ID NO: 316299 - DNA, 12 bp, Artificial Sequence
  Oligonucleotide primer for the detection of SNP TSC0027387
ttcatattcttt

SEQ ID NO: 316300 - DNA, 12 bp, Artificial Sequence
  Oligonucleotide primer for the detection of SNP TSC0027387
atttagaatttt

SEQ ID NO: 316301 - DNA, 12 bp, Artificial Sequence
  Oligonukleotid-Primer
aaactacactaa

SEQ ID NO: 316302 - DNA, 12 bp, Artificial Sequence
  Oligonucleotide primer for the detection of SNP TSC0027388
aaactacgctaa

SEQ ID NO: 316303 - DNA, 12 bp, Artificial Sequence
  Oligonucleotide primer for the detection of SNP TSC0027389
acttcttccttt

SEQ ID NO: 316304 - DNA, 12 bp, Artificial Sequence
  Oligonucleotide primer for the detection of SNP TSC0027389
taatattgttag

SEQ ID NO: 316305 - DNA, 12 bp, Artificial Sequence
  Oligonukleotid-Primer
acatctatctat

SEQ ID NO: 316306 - DNA, 12 bp, Artificial Sequence
  Oligonucleotide primer for the detection of SNP TSC0027390
atttaaaattta

SEQ ID NO: 316307 - DNA, 12 bp, Artificial Sequence
  Oligonucleotide primer for the detection of SNP TSC0027390
actcaaaaccca

SEQ ID NO: 316308 - DNA, 12 bp, Artificial Sequence
  Oligonucleotide primer for the detection of SNP TSC0027390
atatttgtttat

SEQ ID NO: 316309 - DNA, 12 bp, Artificial Sequence
  Oligonucleotide primer for the detection of SNP TSC0027391
aatctacgaaac

SEQ ID NO: 316310 - DNA, 12 bp, Artificial Sequence
  Oligonucleotide primer for the detection of SNP TSC0027391
atattggatttg

SEQ ID NO: 316311 - DNA, 12 bp, Artificial Sequence
  Oligonucleotide primer for the detection of SNP TSC0027391
acactaaaccta

SEQ ID NO: 316312 - DNA, 12 bp, Artificial Sequence
  Oligonucleotide primer for the detection of SNP TSC0027391
ggtttatgaggt

SEQ ID NO: 316313 - DNA, 12 bp, Artificial Sequence
  Oligonucleotide primer for the detection of SNP TSC0027391
ggtttacgaggt

SEQ ID NO: 316314 - DNA, 12 bp, Artificial Sequence
  Oligonucleotide primer for the detection of SNP TSC0027392
attacaacaaaa

SEQ ID NO: 316315 - DNA, 12 bp, Artificial Sequence
  Oligonucleotide primer for the detection of SNP TSC0027392
ccaccttaccct

SEQ ID NO: 316316 - DNA, 12 bp, Artificial Sequence
  Oligonucleotide primer for the detection of SNP TSC0027392
attatagtaggg

SEQ ID NO: 316317 - DNA, 12 bp, Artificial Sequence
  Oligonucleotide primer for the detection of SNP TSC0027394
ccaactcaatcc

SEQ ID NO: 316318 - DNA, 12 bp, Artificial Sequence
  Oligonucleotide primer for the detection of SNP TSC0027394
agattgggttgg

SEQ ID NO: 316319 - DNA, 12 bp, Artificial Sequence
  Oligonucleotide primer for the detection of SNP TSC0027395
ttctataactca

SEQ ID NO: 316320 - DNA, 12 bp, Artificial Sequence
  Oligonucleotide primer for the detection of SNP TSC0027395
gagggtgttttt

SEQ ID NO: 316321 - DNA, 12 bp, Artificial Sequence
  Oligonucleotide primer for the detection of SNP TSC0027395
gagggtgttttc

SEQ ID NO: 316322 - DNA, 12 bp, Artificial Sequence
  Oligonucleotide primer for the detection of SNP TSC0027397
ttaccattaact

SEQ ID NO: 316323 - DNA, 12 bp, Artificial Sequence
  Oligonucleotide primer for the detection of SNP TSC0027397
taatttggttta

SEQ ID NO: 316324 - DNA, 12 bp, Artificial Sequence
  Oligonucleotide primer for the detection of SNP TSC0027398
ataacaaccaca

SEQ ID NO: 316325 - DNA, 12 bp, Artificial Sequence
  Oligonucleotide primer for the detection of SNP TSC0027398
ataacaaccacg

SEQ ID NO: 316326 - DNA, 12 bp, Artificial Sequence
  Oligonucleotide primer for the detection of SNP TSC0027398
ttggaagtttgt

SEQ ID NO: 316327 - DNA, 12 bp, Artificial Sequence
  Oligonucleotide primer for the detection of SNP TSC0027398
ctaaaaacctac

SEQ ID NO: 316328 - DNA, 12 bp, Artificial Sequence
  Oligonucleotide primer for the detection of SNP TSC0027398
atagtagttatg

SEQ ID NO: 316329 - DNA, 12 bp, Artificial Sequence
  Oligonucleotide primer for the detection of SNP TSC0027398
atagtagttacg

SEQ ID NO: 316330 - DNA, 12 bp, Artificial Sequence
  Oligonucleotide primer for the detection of SNP TSC0027401
atttataaactt

SEQ ID NO: 316331 - DNA, 12 bp, Artificial Sequence
  Oligonucleotide primer for the detection of SNP TSC0027401
taatgttttaag

SEQ ID NO: 316332 - DNA, 12 bp, Artificial Sequence
  Oligonucleotide primer for the detection of SNP TSC0027402
attccaaatacc

SEQ ID NO: 316333 - DNA, 12 bp, Artificial Sequence
  Oligonucleotide primer for the detection of SNP TSC0027402
tttatgtggtag

SEQ ID NO: 316334 - DNA, 12 bp, Artificial Sequence
  Oligonucleotide primer for the detection of SNP TSC0027402
tttacgtggtag

SEQ ID NO: 316335 - DNA, 12 bp, Artificial Sequence
  Oligonucleotide primer for the detection of SNP TSC0027403
tacacaacacat

SEQ ID NO: 316336 - DNA, 12 bp, Artificial Sequence
  Oligonucleotide primer for the detection of SNP TSC0027403
tacacaacacgt

SEQ ID NO: 316337 - DNA, 12 bp, Artificial Sequence
  Oligonucleotide primer for the detection of SNP TSC0027403
tacacaacgcat

SEQ ID NO: 316338 - DNA, 12 bp, Artificial Sequence
  Oligonucleotide primer for the detection of SNP TSC0027403
tacacgacacat

SEQ ID NO: 316339 - DNA, 12 bp, Artificial Sequence
  Oligonucleotide primer for the detection of SNP TSC0027403
tacacaacgcgt

SEQ ID NO: 316340 - DNA, 12 bp, Artificial Sequence
  Oligonucleotide primer for the detection of SNP TSC0027403
tacacgacacgt

SEQ ID NO: 316341 - DNA, 12 bp, Artificial Sequence
  Oligonucleotide primer for the detection of SNP TSC0027403
tacacgacgcat

SEQ ID NO: 316342 - DNA, 12 bp, Artificial Sequence
  Oligonucleotide primer for the detection of SNP TSC0027403
tacacgacgcgt

SEQ ID NO: 316343 - DNA, 12 bp, Artificial Sequence
  Oligonucleotide primer for the detection of SNP TSC0027403
tgtatggtgtgt

SEQ ID NO: 316344 - DNA, 12 bp, Artificial Sequence
  Oligonucleotide primer for the detection of SNP TSC0027403
tgtacggtgtgt

SEQ ID NO: 316345 - DNA, 12 bp, Artificial Sequence
  Oligonucleotide primer for the detection of SNP TSC0027403
tgtatggcgtgt

SEQ ID NO: 316346 - DNA, 12 bp, Artificial Sequence
  Oligonucleotide primer for the detection of SNP TSC0027403
tgtatggtgcgt

SEQ ID NO: 316347 - DNA, 12 bp, Artificial Sequence
  Oligonucleotide primer for the detection of SNP TSC0027403
tgtacggcgtgt

SEQ ID NO: 316348 - DNA, 12 bp, Artificial Sequence
  Oligonucleotide primer for the detection of SNP TSC0027403
tgtacggtgcgt

SEQ ID NO: 316349 - DNA, 12 bp, Artificial Sequence
  Oligonucleotide primer for the detection of SNP TSC0027403
tgtatggcgcgt

SEQ ID NO: 316350 - DNA, 12 bp, Artificial Sequence
  Oligonucleotide primer for the detection of SNP TSC0027403
tgtacggcgcgt

SEQ ID NO: 316351 - DNA, 12 bp, Artificial Sequence
  Oligonucleotide primer for the detection of SNP TSC0027404
tatacacaacac

SEQ ID NO: 316352 - DNA, 12 bp, Artificial Sequence
  Oligonucleotide primer for the detection of SNP TSC0027404
tatacacaacgc

SEQ ID NO: 316353 - DNA, 12 bp, Artificial Sequence
  Oligonucleotide primer for the detection of SNP TSC0027404
tatacacgacac

SEQ ID NO: 316354 - DNA, 12 bp, Artificial Sequence
  Oligonucleotide primer for the detection of SNP TSC0027404
tatacacgacgc

SEQ ID NO: 316355 - DNA, 12 bp, Artificial Sequence
  Oligonucleotide primer for the detection of SNP TSC0027404
tgtgtatggtgt

SEQ ID NO: 316356 - DNA, 12 bp, Artificial Sequence
  Oligonucleotide primer for the detection of SNP TSC0027404
tgtgtacggtgt

SEQ ID NO: 316357 - DNA, 12 bp, Artificial Sequence
  Oligonucleotide primer for the detection of SNP TSC0027404
tgtgtatggcgt

SEQ ID NO: 316358 - DNA, 12 bp, Artificial Sequence
  Oligonukleotid-Primer
tgtgtatggtgc

SEQ ID NO: 316359 - DNA, 12 bp, Artificial Sequence
  Oligonucleotide primer for the detection of SNP TSC0027404
tgtgtacggcgt

SEQ ID NO: 316360 - DNA, 12 bp, Artificial Sequence
  Oligonucleotide primer for the detection of SNP TSC0027404
tgtgtacggtgc

SEQ ID NO: 316361 - DNA, 12 bp, Artificial Sequence
  Oligonucleotide primer for the detection of SNP TSC0027404
tgtgtatggcgc

SEQ ID NO: 316362 - DNA, 12 bp, Artificial Sequence
  Oligonucleotide primer for the detection of SNP TSC0027404
tgtgtacggcgc

SEQ ID NO: 316363 - DNA, 12 bp, Artificial Sequence
  Oligonucleotide primer for the detection of SNP TSC0027410
ccaaccaaatac

SEQ ID NO: 316364 - DNA, 12 bp, Artificial Sequence
  Oligonucleotide primer for the detection of SNP TSC0027410
ccaaccgaatac

SEQ ID NO: 316365 - DNA, 12 bp, Artificial Sequence
  Oligonucleotide primer for the detection of SNP TSC0027410
aacaacacccca

SEQ ID NO: 316366 - DNA, 12 bp, Artificial Sequence
  Oligonucleotide primer for the detection of SNP TSC0027410
gacaacacccca

SEQ ID NO: 316367 - DNA, 12 bp, Artificial Sequence
  Oligonucleotide primer for the detection of SNP TSC0027410
ttaattgggtgt

SEQ ID NO: 316368 - DNA, 12 bp, Artificial Sequence
  Oligonucleotide primer for the detection of SNP TSC0027410
ttaatcgggtgt

SEQ ID NO: 316369 - DNA, 12 bp, Artificial Sequence
  Oligonucleotide primer for the detection of SNP TSC0027411
aatcttttcaac

SEQ ID NO: 316370 - DNA, 12 bp, Artificial Sequence
  Oligonucleotide primer for the detection of SNP TSC0027411
attttagaaatg

SEQ ID NO: 316371 - DNA, 12 bp, Artificial Sequence
  Oligonucleotide primer for the detection of SNP TSC0027411
acttcaaaaata

SEQ ID NO: 316372 - DNA, 12 bp, Artificial Sequence
  Oligonucleotide primer for the detection of SNP TSC0027411
ggtttttttaat

SEQ ID NO: 316373 - DNA, 12 bp, Artificial Sequence
  Oligonucleotide primer for the detection of SNP TSC0027413
aatataacacta

SEQ ID NO: 316374 - DNA, 12 bp, Artificial Sequence
  Oligonucleotide primer for the detection of SNP TSC0027413
tgtcgtttgttt

SEQ ID NO: 316375 - DNA, 12 bp, Artificial Sequence
  Oligonucleotide primer for the detection of SNP TSC0027413
ataccatctatc

SEQ ID NO: 316376 - DNA, 12 bp, Artificial Sequence
  Oligonucleotide primer for the detection of SNP TSC0027413
ataccgtctatc

SEQ ID NO: 316377 - DNA, 12 bp, Artificial Sequence
  Oligonucleotide primer for the detection of SNP TSC0027413
gaatatgatatt

SEQ ID NO: 316378 - DNA, 12 bp, Artificial Sequence
  Oligonucleotide primer for the detection of SNP TSC0027415
acgactcactac

SEQ ID NO: 316379 - DNA, 12 bp, Artificial Sequence
  Oligonucleotide primer for the detection of SNP TSC0027415
gcgactcactac

SEQ ID NO: 316380 - DNA, 12 bp, Artificial Sequence
  Oligonucleotide primer for the detection of SNP TSC0027417
attaccaaacaa

SEQ ID NO: 316381 - DNA, 12 bp, Artificial Sequence
  Oligonucleotide primer for the detection of SNP TSC0027417
cttattttctat

SEQ ID NO: 316382 - DNA, 12 bp, Artificial Sequence
  Oligonucleotide primer for the detection of SNP TSC0027417
aattattaagta

SEQ ID NO: 316383 - DNA, 12 bp, Artificial Sequence
  Oligonucleotide primer for the detection of SNP TSC0027418
gagagagagagt

SEQ ID NO: 316384 - DNA, 12 bp, Artificial Sequence
  Oligonucleotide primer for the detection of SNP TSC0027420
ctaccttaacct

SEQ ID NO: 316385 - DNA, 12 bp, Artificial Sequence
  Oligonucleotide primer for the detection of SNP TSC0027421
gaatgttatttt

SEQ ID NO: 316386 - DNA, 12 bp, Artificial Sequence
  Oligonucleotide primer for the detection of SNP TSC0027421
gaacgttatttt

SEQ ID NO: 316387 - DNA, 12 bp, Artificial Sequence
  Oligonucleotide primer for the detection of SNP TSC0027422
caacatttttac

SEQ ID NO: 316388 - DNA, 12 bp, Artificial Sequence
  Oligonucleotide primer for the detection of SNP TSC0027422
ggaaatagcgtt

SEQ ID NO: 316389 - DNA, 12 bp, Artificial Sequence
  Oligonucleotide primer for the detection of SNP TSC0027422
aaaaaaataacg

SEQ ID NO: 316390 - DNA, 12 bp, Artificial Sequence
  Oligonucleotide primer for the detection of SNP TSC0027423
tacctcactaaa

SEQ ID NO: 316391 - DNA, 12 bp, Artificial Sequence
  Oligonucleotide primer for the detection of SNP TSC0027423
gatgaggggttt

SEQ ID NO: 316392 - DNA, 12 bp, Artificial Sequence
  Oligonucleotide primer for the detection of SNP TSC0027423
tgttttattgga

SEQ ID NO: 316393 - DNA, 12 bp, Artificial Sequence
  Oligonucleotide primer for the detection of SNP TSC0027424
aataattctctt

SEQ ID NO: 316394 - DNA, 12 bp, Artificial Sequence
  Oligonucleotide primer for the detection of SNP TSC0027424
tatgttttagga

SEQ ID NO: 316395 - DNA, 12 bp, Artificial Sequence
  Oligonucleotide primer for the detection of SNP TSC0027425
taaaaatttacc

SEQ ID NO: 316396 - DNA, 12 bp, Artificial Sequence
  Oligonucleotide primer for the detection of SNP TSC0027425
caatacatttac

SEQ ID NO: 316397 - DNA, 12 bp, Artificial Sequence
  Oligonucleotide primer for the detection of SNP TSC0027425
ggagatttgttt

SEQ ID NO: 316398 - DNA, 12 bp, Artificial Sequence
  Oligonucleotide primer for the detection of SNP TSC0027426
ccccttcaattt

SEQ ID NO: 316399 - DNA, 12 bp, Artificial Sequence
  Oligonucleotide primer for the detection of SNP TSC0027426
taaattaagagt

SEQ ID NO: 316400 - DNA, 12 bp, Artificial Sequence
  Oligonucleotide primer for the detection of SNP TSC0027426
taaactaaaaac

SEQ ID NO: 316401 - DNA, 12 bp, Artificial Sequence
  Oligonucleotide primer for the detection of SNP TSC0027429
taaatactcctc

SEQ ID NO: 316402 - DNA, 12 bp, Artificial Sequence
  Oligonucleotide primer for the detection of SNP TSC0027429
gttgttttaaga

SEQ ID NO: 316403 - DNA, 12 bp, Artificial Sequence
  Oligonucleotide primer for the detection of SNP TSC0027430
acaataccttta

SEQ ID NO: 316404 - DNA, 12 bp, Artificial Sequence
  Oligonucleotide primer for the detection of SNP TSC0027430
ggaattgatttg

SEQ ID NO: 316405 - DNA, 12 bp, Artificial Sequence
  Oligonucleotide primer for the detection of SNP TSC0027430
aaaattaactta

SEQ ID NO: 316406 - DNA, 12 bp, Artificial Sequence
  Oligonucleotide primer for the detection of SNP TSC0027430
atagtgttttta

SEQ ID NO: 316407 - DNA, 12 bp, Artificial Sequence
  Oligonucleotide primer for the detection of SNP TSC0027431
gttgaatttgaa

SEQ ID NO: 316408 - DNA, 12 bp, Artificial Sequence
  Oligonucleotide primer for the detection of SNP TSC0027432
atacttcaatta

SEQ ID NO: 316409 - DNA, 12 bp, Artificial Sequence
  Oligonucleotide primer for the detection of SNP TSC0027432
aagaattaaata

SEQ ID NO: 316410 - DNA, 12 bp, Artificial Sequence
  Oligonucleotide primer for the detection of SNP TSC0027432
tatattttaatt

SEQ ID NO: 316411 - DNA, 12 bp, Artificial Sequence
  Oligonucleotide primer for the detection of SNP TSC0027435
cctatctaaaat

SEQ ID NO: 316412 - DNA, 12 bp, Artificial Sequence
  Oligonucleotide primer for the detection of SNP TSC0027435
ttttgatagtag

SEQ ID NO: 316413 - DNA, 12 bp, Artificial Sequence
  Oligonucleotide primer for the detection of SNP TSC0027440
atatttttcaac

SEQ ID NO: 316414 - DNA, 12 bp, Artificial Sequence
  Oligonucleotide primer for the detection of SNP TSC0027440
atatttttcgac

SEQ ID NO: 316415 - DNA, 12 bp, Artificial Sequence
  Oligonucleotide primer for the detection of SNP TSC0027440
tatttttataaa

SEQ ID NO: 316416 - DNA, 12 bp, Artificial Sequence
  Oligonucleotide primer for the detection of SNP TSC0027440
catttttacaaa

SEQ ID NO: 316417 - DNA, 12 bp, Artificial Sequence
  Oligonucleotide primer for the detection of SNP TSC0027440
atgttttttgat

SEQ ID NO: 316418 - DNA, 12 bp, Artificial Sequence
  Oligonucleotide primer for the detection of SNP TSC0027440
atgtttttcgat

SEQ ID NO: 316419 - DNA, 12 bp, Artificial Sequence
  Oligonucleotide primer for the detection of SNP TSC0027444
attaatacttcc

SEQ ID NO: 316420 - DNA, 12 bp, Artificial Sequence
  Oligonucleotide primer for the detection of SNP TSC0027444
ttcccaataaaa

SEQ ID NO: 316421 - DNA, 12 bp, Artificial Sequence
  Oligonucleotide primer for the detection of SNP TSC0027445
cctaactcccca

SEQ ID NO: 316422 - DNA, 12 bp, Artificial Sequence
  Oligonucleotide primer for the detection of SNP TSC0027445
gagaaaggtgta

SEQ ID NO: 316423 - DNA, 12 bp, Artificial Sequence
  Oligonucleotide primer for the detection of SNP TSC0027446
aaaataatatcc

SEQ ID NO: 316424 - DNA, 12 bp, Artificial Sequence
  Oligonucleotide primer for the detection of SNP TSC0027447
ttaataaaatta

SEQ ID NO: 316425 - DNA, 12 bp, Artificial Sequence
  Oligonucleotide primer for the detection of SNP TSC0027447
aaagtaaaagga

SEQ ID NO: 316426 - DNA, 12 bp, Artificial Sequence
  Oligonucleotide primer for the detection of SNP TSC0027447
gttggtagagtt

SEQ ID NO: 316427 - DNA, 12 bp, Artificial Sequence
  Oligonucleotide primer for the detection of SNP TSC0027448
tccacttactca

SEQ ID NO: 316428 - DNA, 12 bp, Artificial Sequence
  Oligonucleotide primer for the detection of SNP TSC0027448
tccgcttactca

SEQ ID NO: 316429 - DNA, 12 bp, Artificial Sequence
  Oligonucleotide primer for the detection of SNP TSC0027448
tttagtaatatt

SEQ ID NO: 316430 - DNA, 12 bp, Artificial Sequence
  Oligonucleotide primer for the detection of SNP TSC0027448
aatctaataaca

SEQ ID NO: 316431 - DNA, 12 bp, Artificial Sequence
  Oligonucleotide primer for the detection of SNP TSC0027448
tttcgtttattt

SEQ ID NO: 316432 - DNA, 12 bp, Artificial Sequence
  Oligonucleotide primer for the detection of SNP TSC0027450
tcaacttccatt

SEQ ID NO: 316433 - DNA, 12 bp, Artificial Sequence
  Oligonucleotide primer for the detection of SNP TSC0027450
tattatttagaa

SEQ ID NO: 316434 - DNA, 12 bp, Artificial Sequence
  Oligonucleotide primer for the detection of SNP TSC0027451
acttccattctt

SEQ ID NO: 316435 - DNA, 12 bp, Artificial Sequence
  Oligonucleotide primer for the detection of SNP TSC0027451
ttgtattattta

SEQ ID NO: 316436 - DNA, 12 bp, Artificial Sequence
  Oligonucleotide primer for the detection of SNP TSC0027452
ataacaactaat

SEQ ID NO: 316437 - DNA, 12 bp, Artificial Sequence
  Oligonucleotide primer for the detection of SNP TSC0027452
gttttatgagta

SEQ ID NO: 316438 - DNA, 12 bp, Artificial Sequence
  Oligonucleotide primer for the detection of SNP TSC0027452
accccataaata

SEQ ID NO: 316439 - DNA, 12 bp, Artificial Sequence
  Oligonucleotide primer for the detection of SNP TSC0027452
gtgatagttaat

SEQ ID NO: 316440 - DNA, 12 bp, Artificial Sequence
  Oligonucleotide primer for the detection of SNP TSC0027453
tacaacactacc

SEQ ID NO: 316441 - DNA, 12 bp, Artificial Sequence
  Oligonucleotide primer for the detection of SNP TSC0027453
tattgttagaaa

SEQ ID NO: 316442 - DNA, 12 bp, Artificial Sequence
  Oligonucleotide primer for the detection of SNP TSC0027454
taatacatcaac

SEQ ID NO: 316443 - DNA, 12 bp, Artificial Sequence
  Oligonucleotide primer for the detection of SNP TSC0027454
agataggatttg

SEQ ID NO: 316444 - DNA, 12 bp, Artificial Sequence
  Oligonucleotide primer for the detection of SNP TSC0027455
taattactatta

SEQ ID NO: 316445 - DNA, 12 bp, Artificial Sequence
  Oligonucleotide primer for the detection of SNP TSC0027455
ttgaaaagtaaa

SEQ ID NO: 316446 - DNA, 12 bp, Artificial Sequence
  Oligonucleotide primer for the detection of SNP TSC0027455
tagttattgttg

SEQ ID NO: 316447 - DNA, 12 bp, Artificial Sequence
  Oligonucleotide primer for the detection of SNP TSC0027456
tcaacaccttca

SEQ ID NO: 316448 - DNA, 12 bp, Artificial Sequence
  Oligonucleotide primer for the detection of SNP TSC0027456
tcaacaccttcg

SEQ ID NO: 316449 - DNA, 12 bp, Artificial Sequence
  Oligonucleotide primer for the detection of SNP TSC0027456
ggggtttggttt

SEQ ID NO: 316450 - DNA, 12 bp, Artificial Sequence
  Oligonucleotide primer for the detection of SNP TSC0027456
aaaacctaactc

SEQ ID NO: 316451 - DNA, 12 bp, Artificial Sequence
  Oligonucleotide primer for the detection of SNP TSC0027456
ttaatatttttg

SEQ ID NO: 316452 - DNA, 12 bp, Artificial Sequence
  Oligonucleotide primer for the detection of SNP TSC0027456
ttaatattttcg

SEQ ID NO: 316453 - DNA, 12 bp, Artificial Sequence
  Oligonucleotide primer for the detection of SNP TSC0027457
tcctctactttc

SEQ ID NO: 316454 - DNA, 12 bp, Artificial Sequence
  Oligonucleotide primer for the detection of SNP TSC0027458
gttttttattta

SEQ ID NO: 316455 - DNA, 12 bp, Artificial Sequence
  Oligonucleotide primer for the detection of SNP TSC0027459
taaacacccact

SEQ ID NO: 316456 - DNA, 12 bp, Artificial Sequence
  Oligonucleotide primer for the detection of SNP TSC0027459
taaacacccgct

SEQ ID NO: 316457 - DNA, 12 bp, Artificial Sequence
  Oligonucleotide primer for the detection of SNP TSC0027459
taaacgcccact

SEQ ID NO: 316458 - DNA, 12 bp, Artificial Sequence
  Oligonucleotide primer for the detection of SNP TSC0027459
taaacgcccgct

SEQ ID NO: 316459 - DNA, 12 bp, Artificial Sequence
  Oligonucleotide primer for the detection of SNP TSC0027459
ggttttttattg

SEQ ID NO: 316460 - DNA, 12 bp, Artificial Sequence
  Oligonucleotide primer for the detection of SNP TSC0027460
catacaccaccg

SEQ ID NO: 316461 - DNA, 12 bp, Artificial Sequence
  Oligonucleotide primer for the detection of SNP TSC0027460
cgtacaccacca

SEQ ID NO: 316462 - DNA, 12 bp, Artificial Sequence
  Oligonucleotide primer for the detection of SNP TSC0027460
cgtacaccaccg

SEQ ID NO: 316463 - DNA, 12 bp, Artificial Sequence
  Oligonukleotid-Primer
tgtgtattattg

SEQ ID NO: 316464 - DNA, 12 bp, Artificial Sequence
  Oligonucleotide primer for the detection of SNP TSC0027460
cgtgtattattg

SEQ ID NO: 316465 - DNA, 12 bp, Artificial Sequence
  Oligonucleotide primer for the detection of SNP TSC0027460
tgtgtattatcg

SEQ ID NO: 316466 - DNA, 12 bp, Artificial Sequence
  Oligonucleotide primer for the detection of SNP TSC0027460
cgtgtattatcg

SEQ ID NO: 316467 - DNA, 12 bp, Artificial Sequence
  Oligonucleotide primer for the detection of SNP TSC0027461
ctcctatcaaaa

SEQ ID NO: 316468 - DNA, 12 bp, Artificial Sequence
  Oligonucleotide primer for the detection of SNP TSC0027461
gtttttttgttc

SEQ ID NO: 316469 - DNA, 12 bp, Artificial Sequence
  Oligonucleotide primer for the detection of SNP TSC0027461
aaaacttctcta

SEQ ID NO: 316470 - DNA, 12 bp, Artificial Sequence
  Oligonucleotide primer for the detection of SNP TSC0027461
ggttttttgtta

SEQ ID NO: 316471 - DNA, 12 bp, Artificial Sequence
  Oligonucleotide primer for the detection of SNP TSC0027462
aaaaactctacc

SEQ ID NO: 316472 - DNA, 12 bp, Artificial Sequence
  Oligonucleotide primer for the detection of SNP TSC0027462
ttctctactcca

SEQ ID NO: 316473 - DNA, 12 bp, Artificial Sequence
  Oligonucleotide primer for the detection of SNP TSC0027462
ttctctactccg

SEQ ID NO: 316474 - DNA, 12 bp, Artificial Sequence
  Oligonucleotide primer for the detection of SNP TSC0027462
aggggttttgtt

SEQ ID NO: 316475 - DNA, 12 bp, Artificial Sequence
  Oligonucleotide primer for the detection of SNP TSC0027463
agttttagttac

SEQ ID NO: 316476 - DNA, 12 bp, Artificial Sequence
  Oligonucleotide primer for the detection of SNP TSC0027464
aaactacaaaaa

SEQ ID NO: 316477 - DNA, 12 bp, Artificial Sequence
  Oligonucleotide primer for the detection of SNP TSC0027464
aaactacgaaaa

SEQ ID NO: 316478 - DNA, 12 bp, Artificial Sequence
  Oligonucleotide primer for the detection of SNP TSC0027464
taggtaataagt

SEQ ID NO: 316479 - DNA, 12 bp, Artificial Sequence
  Oligonucleotide primer for the detection of SNP TSC0027464
taaacaacaaac

SEQ ID NO: 316480 - DNA, 12 bp, Artificial Sequence
  Oligonucleotide primer for the detection of SNP TSC0027464
aattgtgaggat

SEQ ID NO: 316481 - DNA, 12 bp, Artificial Sequence
  Oligonucleotide primer for the detection of SNP TSC0027464
aattgcgaggat

SEQ ID NO: 316482 - DNA, 12 bp, Artificial Sequence
  Oligonucleotide primer for the detection of SNP TSC0027464
aattgtgaggac

SEQ ID NO: 316483 - DNA, 12 bp, Artificial Sequence
  Oligonucleotide primer for the detection of SNP TSC0027464
aattgcgaggac

SEQ ID NO: 316484 - DNA, 12 bp, Artificial Sequence
  Oligonucleotide primer for the detection of SNP TSC0027468
gggggtttagat

SEQ ID NO: 316485 - DNA, 12 bp, Artificial Sequence
  Oligonucleotide primer for the detection of SNP TSC0027468
aaaaactcaaac

SEQ ID NO: 316486 - DNA, 12 bp, Artificial Sequence
  Oligonucleotide primer for the detection of SNP TSC0027468
tttagaggatgg

SEQ ID NO: 316487 - DNA, 12 bp, Artificial Sequence
  Oligonucleotide primer for the detection of SNP TSC0027469
caaaattaaaaa

SEQ ID NO: 316488 - DNA, 12 bp, Artificial Sequence
  Oligonucleotide primer for the detection of SNP TSC0027469
atattagaatgg

SEQ ID NO: 316489 - DNA, 12 bp, Artificial Sequence
  Oligonucleotide primer for the detection of SNP TSC0027469
atatcaaaataa

SEQ ID NO: 316490 - DNA, 12 bp, Artificial Sequence
  Oligonucleotide primer for the detection of SNP TSC0027469
ataggattagag

SEQ ID NO: 316491 - DNA, 12 bp, Artificial Sequence
  Oligonucleotide primer for the detection of SNP TSC0027470
tatcatatatcc

SEQ ID NO: 316492 - DNA, 12 bp, Artificial Sequence
  Oligonucleotide primer for the detection of SNP TSC0027470
tatcgtatatcc

SEQ ID NO: 316493 - DNA, 12 bp, Artificial Sequence
  Oligonucleotide primer for the detection of SNP TSC0027470
gatggtaatgta

SEQ ID NO: 316494 - DNA, 12 bp, Artificial Sequence
  Oligonucleotide primer for the detection of SNP TSC0027471
aactatctccaa

SEQ ID NO: 316495 - DNA, 12 bp, Artificial Sequence
  Oligonucleotide primer for the detection of SNP TSC0027471
taggaattgttg

SEQ ID NO: 316496 - DNA, 12 bp, Artificial Sequence
  Oligonucleotide primer for the detection of SNP TSC0027471
taggaatcgttg

SEQ ID NO: 316497 - DNA, 12 bp, Artificial Sequence
  Oligonucleotide primer for the detection of SNP TSC0027471
taaaaaccatta

SEQ ID NO: 316498 - DNA, 12 bp, Artificial Sequence
  Oligonucleotide primer for the detection of SNP TSC0027471
taaaaaccgtta

SEQ ID NO: 316499 - DNA, 12 bp, Artificial Sequence
  Oligonucleotide primer for the detection of SNP TSC0027471
tgtttttagttt

SEQ ID NO: 316500 - DNA, 12 bp, Artificial Sequence
  Oligonucleotide primer for the detection of SNP TSC0027472
tcactaaaacct

SEQ ID NO: 316501 - DNA, 12 bp, Artificial Sequence
  Oligonucleotide primer for the detection of SNP TSC0027472
atttaggaggta

SEQ ID NO: 316502 - DNA, 12 bp, Artificial Sequence
  Oligonucleotide primer for the detection of SNP TSC0027473
catctttataaa

SEQ ID NO: 316503 - DNA, 12 bp, Artificial Sequence
  Oligonucleotide primer for the detection of SNP TSC0027473
tttgattatttt

SEQ ID NO: 316504 - DNA, 12 bp, Artificial Sequence
  Oligonucleotide primer for the detection of SNP TSC0027473
tttaaccatttt

SEQ ID NO: 316505 - DNA, 12 bp, Artificial Sequence
  Oligonucleotide primer for the detection of SNP TSC0027474
taacaatttcat

SEQ ID NO: 316506 - DNA, 12 bp, Artificial Sequence
  Oligonucleotide primer for the detection of SNP TSC0027474
gtattaattgga

SEQ ID NO: 316507 - DNA, 12 bp, Artificial Sequence
  Oligonucleotide primer for the detection of SNP TSC0027475
ttttaaaactaa

SEQ ID NO: 316508 - DNA, 12 bp, Artificial Sequence
  Oligonucleotide primer for the detection of SNP TSC0027475
tggtttgagtat

SEQ ID NO: 316509 - DNA, 12 bp, Artificial Sequence
  Oligonucleotide primer for the detection of SNP TSC0027475
taacctaaacac

SEQ ID NO: 316510 - DNA, 12 bp, Artificial Sequence
  Oligonucleotide primer for the detection of SNP TSC0027475
ttttggagttgg

SEQ ID NO: 316511 - DNA, 12 bp, Artificial Sequence
  Oligonucleotide primer for the detection of SNP TSC0027476
tttaggtttgat

SEQ ID NO: 316512 - DNA, 12 bp, Artificial Sequence
  Oligonucleotide primer for the detection of SNP TSC0027476
cccaaacctaac

SEQ ID NO: 316513 - DNA, 12 bp, Artificial Sequence
  Oligonucleotide primer for the detection of SNP TSC0027476
attagaagagtg

SEQ ID NO: 316514 - DNA, 12 bp, Artificial Sequence
  Oligonucleotide primer for the detection of SNP TSC0027476
attagaagagcg

SEQ ID NO: 316515 - DNA, 12 bp, Artificial Sequence
  Oligonucleotide primer for the detection of SNP TSC0027477
tcacattttaca

SEQ ID NO: 316516 - DNA, 12 bp, Artificial Sequence
  Oligonucleotide primer for the detection of SNP TSC0027477
tgattttgtttt

SEQ ID NO: 316517 - DNA, 12 bp, Artificial Sequence
  Oligonucleotide primer for the detection of SNP TSC0027477
atcttaacttta

SEQ ID NO: 316518 - DNA, 12 bp, Artificial Sequence
  Oligonucleotide primer for the detection of SNP TSC0027477
tatattttatat

SEQ ID NO: 316519 - DNA, 12 bp, Artificial Sequence
  Oligonucleotide primer for the detection of SNP TSC0027477
tatattttatac

SEQ ID NO: 316520 - DNA, 12 bp, Artificial Sequence
  Oligonucleotide primer for the detection of SNP TSC0027478
ccattctcacct

SEQ ID NO: 316521 - DNA, 12 bp, Artificial Sequence
  Oligonucleotide primer for the detection of SNP TSC0027478
ccattctcgcct

SEQ ID NO: 316522 - DNA, 12 bp, Artificial Sequence
  Oligonucleotide primer for the detection of SNP TSC0027478
ttagtagggaag

SEQ ID NO: 316523 - DNA, 12 bp, Artificial Sequence
  Oligonucleotide primer for the detection of SNP TSC0027479
caactttccaca

SEQ ID NO: 316524 - DNA, 12 bp, Artificial Sequence
  Oligonucleotide primer for the detection of SNP TSC0027479
ataaggggaaat

SEQ ID NO: 316525 - DNA, 12 bp, Artificial Sequence
  Oligonucleotide primer for the detection of SNP TSC0027480
caaacattcaat

SEQ ID NO: 316526 - DNA, 12 bp, Artificial Sequence
  Oligonucleotide primer for the detection of SNP TSC0027480
tacatcttacaa

SEQ ID NO: 316527 - DNA, 12 bp, Artificial Sequence
  Oligonucleotide primer for the detection of SNP TSC0027480
aatatttagttt

SEQ ID NO: 316528 - DNA, 12 bp, Artificial Sequence
  Oligonucleotide primer for the detection of SNP TSC0027480
aatatttagttc

SEQ ID NO: 316529 - DNA, 12 bp, Artificial Sequence
  Oligonucleotide primer for the detection of SNP TSC0027481
cataccctacat

SEQ ID NO: 316530 - DNA, 12 bp, Artificial Sequence
  Oligonucleotide primer for the detection of SNP TSC0027481
tttatttttccc

SEQ ID NO: 316531 - DNA, 12 bp, Artificial Sequence
  Oligonucleotide primer for the detection of SNP TSC0027481
tatattttgtat

SEQ ID NO: 316532 - DNA, 12 bp, Artificial Sequence
  Oligonucleotide primer for the detection of SNP TSC0027482
accacactccac

SEQ ID NO: 316533 - DNA, 12 bp, Artificial Sequence
  Oligonucleotide primer for the detection of SNP TSC0027482
aaggataaaaac

SEQ ID NO: 316534 - DNA, 12 bp, Artificial Sequence
  Oligonucleotide primer for the detection of SNP TSC0027483
aactattctaaa

SEQ ID NO: 316535 - DNA, 12 bp, Artificial Sequence
  Oligonucleotide primer for the detection of SNP TSC0027483
ggtaatgtttat

SEQ ID NO: 316536 - DNA, 12 bp, Artificial Sequence
  Oligonucleotide primer for the detection of SNP TSC0027483
gattgttttgaa

SEQ ID NO: 316537 - DNA, 12 bp, Artificial Sequence
  Oligonucleotide primer for the detection of SNP TSC0027487
tatttgtttttc

SEQ ID NO: 316538 - DNA, 12 bp, Artificial Sequence
  Oligonucleotide primer for the detection of SNP TSC0027487
catctatccccc

SEQ ID NO: 316539 - DNA, 12 bp, Artificial Sequence
  Oligonucleotide primer for the detection of SNP TSC0027487
aggtttatggag

SEQ ID NO: 316540 - DNA, 12 bp, Artificial Sequence
  Oligonucleotide primer for the detection of SNP TSC0027488
tgagtaatgata

SEQ ID NO: 316541 - DNA, 12 bp, Artificial Sequence
  Oligonucleotide primer for the detection of SNP TSC0027488
tgagtaacgata

SEQ ID NO: 316542 - DNA, 12 bp, Artificial Sequence
  Oligonucleotide primer for the detection of SNP TSC0027489
tataatcaaaaa

SEQ ID NO: 316543 - DNA, 12 bp, Artificial Sequence
  Oligonucleotide primer for the detection of SNP TSC0027489
tataatcgaaaa

SEQ ID NO: 316544 - DNA, 12 bp, Artificial Sequence
  Oligonukleotid-Primer
aggaggatttta

SEQ ID NO: 316545 - DNA, 12 bp, Artificial Sequence
  Oligonucleotide primer for the detection of SNP TSC0027489
gtgattgagagt

SEQ ID NO: 316546 - DNA, 12 bp, Artificial Sequence
  Oligonucleotide primer for the detection of SNP TSC0027489
gtgatcgagagt

SEQ ID NO: 316547 - DNA, 12 bp, Artificial Sequence
  Oligonucleotide primer for the detection of SNP TSC0027490
gatatttaagta

SEQ ID NO: 316548 - DNA, 12 bp, Artificial Sequence
  Oligonukleotid-Primer
atataaacaact

SEQ ID NO: 316549 - DNA, 12 bp, Artificial Sequence
  Oligonucleotide primer for the detection of SNP TSC0027491
atataaacgact

SEQ ID NO: 316550 - DNA, 12 bp, Artificial Sequence
  Oligonucleotide primer for the detection of SNP TSC0027491
gatgttgttggg

SEQ ID NO: 316551 - DNA, 12 bp, Artificial Sequence
  Oligonucleotide primer for the detection of SNP TSC0027493
tacacactaaac

SEQ ID NO: 316552 - DNA, 12 bp, Artificial Sequence
  Oligonucleotide primer for the detection of SNP TSC0027493
ttgattgattta

SEQ ID NO: 316553 - DNA, 12 bp, Artificial Sequence
  Oligonucleotide primer for the detection of SNP TSC0027495
aaacatctctct

SEQ ID NO: 316554 - DNA, 12 bp, Artificial Sequence
  Oligonucleotide primer for the detection of SNP TSC0027495
ttagttgttgta

SEQ ID NO: 316555 - DNA, 12 bp, Artificial Sequence
  Oligonucleotide primer for the detection of SNP TSC0027496
ctctaaaaatta

SEQ ID NO: 316556 - DNA, 12 bp, Artificial Sequence
  Oligonukleotid-Primer
tttgataatttt

SEQ ID NO: 316557 - DNA, 12 bp, Artificial Sequence
  Oligonucleotide primer for the detection of SNP TSC0027496
ttcgataatttt

SEQ ID NO: 316558 - DNA, 12 bp, Artificial Sequence
  Oligonucleotide primer for the detection of SNP TSC0027496
ttcaacaatctc

SEQ ID NO: 316559 - DNA, 12 bp, Artificial Sequence
  Oligonucleotide primer for the detection of SNP TSC0027496
ttcgacaatctc

SEQ ID NO: 316560 - DNA, 12 bp, Artificial Sequence
  Oligonucleotide primer for the detection of SNP TSC0027496
ttttgaaggttg

SEQ ID NO: 316561 - DNA, 12 bp, Artificial Sequence
  Oligonucleotide primer for the detection of SNP TSC0027497
ttgtatttttga

SEQ ID NO: 316562 - DNA, 12 bp, Artificial Sequence
  Oligonucleotide primer for the detection of SNP TSC0027502
aaagagttaaag

SEQ ID NO: 316563 - DNA, 12 bp, Artificial Sequence
  Oligonucleotide primer for the detection of SNP TSC0027503
catccaccaaca

SEQ ID NO: 316564 - DNA, 12 bp, Artificial Sequence
  Oligonucleotide primer for the detection of SNP TSC0027503
catccaccaacg

SEQ ID NO: 316565 - DNA, 12 bp, Artificial Sequence
  Oligonucleotide primer for the detection of SNP TSC0027503
agagggtgggag

SEQ ID NO: 316566 - DNA, 12 bp, Artificial Sequence
  Oligonucleotide primer for the detection of SNP TSC0027503
tatttattaatg

SEQ ID NO: 316567 - DNA, 12 bp, Artificial Sequence
  Oligonucleotide primer for the detection of SNP TSC0027503
tatttattaacg

SEQ ID NO: 316568 - DNA, 12 bp, Artificial Sequence
  Oligonucleotide primer for the detection of SNP TSC0027505
ccactaataaac

SEQ ID NO: 316569 - DNA, 12 bp, Artificial Sequence
  Oligonucleotide primer for the detection of SNP TSC0027505
tgggaaaagagg

SEQ ID NO: 316570 - DNA, 12 bp, Artificial Sequence
  Oligonucleotide primer for the detection of SNP TSC0027505
ttattgataggt

SEQ ID NO: 316571 - DNA, 12 bp, Artificial Sequence
  Oligonucleotide primer for the detection of SNP TSC0027506
aaatcaaaactc

SEQ ID NO: 316572 - DNA, 12 bp, Artificial Sequence
  Oligonucleotide primer for the detection of SNP TSC0027506
atgattaattta

SEQ ID NO: 316573 - DNA, 12 bp, Artificial Sequence
  Oligonucleotide primer for the detection of SNP TSC0027509
ataaaatctata

SEQ ID NO: 316574 - DNA, 12 bp, Artificial Sequence
  Oligonucleotide primer for the detection of SNP TSC0027509
gttagttaggtt

SEQ ID NO: 316575 - DNA, 12 bp, Artificial Sequence
  Oligonucleotide primer for the detection of SNP TSC0027509
accaattaaatt

SEQ ID NO: 316576 - DNA, 12 bp, Artificial Sequence
  Oligonucleotide primer for the detection of SNP TSC0027509
gtgaaatttgtg

SEQ ID NO: 316577 - DNA, 12 bp, Artificial Sequence
  Oligonucleotide primer for the detection of SNP TSC0027510
atcttccatact

SEQ ID NO: 316578 - DNA, 12 bp, Artificial Sequence
  Oligonucleotide primer for the detection of SNP TSC0027510
tgttatgtttaa

SEQ ID NO: 316579 - DNA, 12 bp, Artificial Sequence
  Oligonucleotide primer for the detection of SNP TSC0027510
tacctaaaaaaa

SEQ ID NO: 316580 - DNA, 12 bp, Artificial Sequence
  Oligonucleotide primer for the detection of SNP TSC0027513
tttaaacataat

SEQ ID NO: 316581 - DNA, 12 bp, Artificial Sequence
  Oligonucleotide primer for the detection of SNP TSC0027514
tgaattaatttt

SEQ ID NO: 316582 - DNA, 12 bp, Artificial Sequence
  Oligonucleotide primer for the detection of SNP TSC0027514
taaatcaattcc

SEQ ID NO: 316583 - DNA, 12 bp, Artificial Sequence
  Oligonucleotide primer for the detection of SNP TSC0027514
tattattgaaga

SEQ ID NO: 316584 - DNA, 12 bp, Artificial Sequence
  Oligonucleotide primer for the detection of SNP TSC0027515
caaaaaacacca

SEQ ID NO: 316585 - DNA, 12 bp, Artificial Sequence
  Oligonucleotide primer for the detection of SNP TSC0027515
tttgttttgtgt

SEQ ID NO: 316586 - DNA, 12 bp, Artificial Sequence
  Oligonucleotide primer for the detection of SNP TSC0027515
tttgtttcgtgt

SEQ ID NO: 316587 - DNA, 12 bp, Artificial Sequence
  Oligonucleotide primer for the detection of SNP TSC0027515
ctacttcgtaca

SEQ ID NO: 316588 - DNA, 12 bp, Artificial Sequence
  Oligonucleotide primer for the detection of SNP TSC0027515
taggaagtatta

SEQ ID NO: 316589 - DNA, 12 bp, Artificial Sequence
  Oligonucleotide primer for the detection of SNP TSC0027516
aaacacctaaaa

SEQ ID NO: 316590 - DNA, 12 bp, Artificial Sequence
  Oligonucleotide primer for the detection of SNP TSC0027516
gtaagtggttta

SEQ ID NO: 316591 - DNA, 12 bp, Artificial Sequence
  Oligonucleotide primer for the detection of SNP TSC0027516
acaaataaccca

SEQ ID NO: 316592 - DNA, 12 bp, Artificial Sequence
  Oligonucleotide primer for the detection of SNP TSC0027516
ggatatttgggg

SEQ ID NO: 316593 - DNA, 12 bp, Artificial Sequence
  Oligonucleotide primer for the detection of SNP TSC0027518
caaataccatac

SEQ ID NO: 316594 - DNA, 12 bp, Artificial Sequence
  Oligonucleotide primer for the detection of SNP TSC0027518
tatagtagtaaa

SEQ ID NO: 316595 - DNA, 12 bp, Artificial Sequence
  Oligonucleotide primer for the detection of SNP TSC0027519
ccaaattcaaca

SEQ ID NO: 316596 - DNA, 12 bp, Artificial Sequence
  Oligonucleotide primer for the detection of SNP TSC0027519
ccaaattcaacg

SEQ ID NO: 316597 - DNA, 12 bp, Artificial Sequence
  Oligonucleotide primer for the detection of SNP TSC0027519
ccgaattcaaca

SEQ ID NO: 316598 - DNA, 12 bp, Artificial Sequence
  Oligonucleotide primer for the detection of SNP TSC0027519
ccgaattcaacg

SEQ ID NO: 316599 - DNA, 12 bp, Artificial Sequence
  Oligonucleotide primer for the detection of SNP TSC0027519
ggagatttgttg

SEQ ID NO: 316600 - DNA, 12 bp, Artificial Sequence
  Oligonucleotide primer for the detection of SNP TSC0027520
ctataataaacc

SEQ ID NO: 316601 - DNA, 12 bp, Artificial Sequence
  Oligonucleotide primer for the detection of SNP TSC0027520
gttttgtggttg

SEQ ID NO: 316602 - DNA, 12 bp, Artificial Sequence
  Oligonucleotide primer for the detection of SNP TSC0027520
gttttgtggtcg

SEQ ID NO: 316603 - DNA, 12 bp, Artificial Sequence
  Oligonucleotide primer for the detection of SNP TSC0027520
attttataacca

SEQ ID NO: 316604 - DNA, 12 bp, Artificial Sequence
  Oligonucleotide primer for the detection of SNP TSC0027520
attttataaccg

SEQ ID NO: 316605 - DNA, 12 bp, Artificial Sequence
  Oligonucleotide primer for the detection of SNP TSC0027520
ttatgatgggtt

SEQ ID NO: 316606 - DNA, 12 bp, Artificial Sequence
  Oligonucleotide primer for the detection of SNP TSC0027521
atatagtgatgg

SEQ ID NO: 316607 - DNA, 12 bp, Artificial Sequence
  Oligonucleotide primer for the detection of SNP TSC0027522
tttgtttgatga

SEQ ID NO: 316608 - DNA, 12 bp, Artificial Sequence
  Oligonucleotide primer for the detection of SNP TSC0027523
aaacaataacct

SEQ ID NO: 316609 - DNA, 12 bp, Artificial Sequence
  Oligonucleotide primer for the detection of SNP TSC0027524
aaatctaacaaa

SEQ ID NO: 316610 - DNA, 12 bp, Artificial Sequence
  Oligonucleotide primer for the detection of SNP TSC0027524
tttgatttcgta

SEQ ID NO: 316611 - DNA, 12 bp, Artificial Sequence
  Oligonucleotide primer for the detection of SNP TSC0027525
caactaaaaatt

SEQ ID NO: 316612 - DNA, 12 bp, Artificial Sequence
  Oligonucleotide primer for the detection of SNP TSC0027525
atattatataaa

SEQ ID NO: 316613 - DNA, 12 bp, Artificial Sequence
  Oligonucleotide primer for the detection of SNP TSC0027526
taaattcatcta

SEQ ID NO: 316614 - DNA, 12 bp, Artificial Sequence
  Oligonucleotide primer for the detection of SNP TSC0027526
atttttagaaga

SEQ ID NO: 316615 - DNA, 12 bp, Artificial Sequence
  Oligonucleotide primer for the detection of SNP TSC0027526
actctcaaaaaa

SEQ ID NO: 316616 - DNA, 12 bp, Artificial Sequence
  Oligonucleotide primer for the detection of SNP TSC0027526
tgagtttatttg

SEQ ID NO: 316617 - DNA, 12 bp, Artificial Sequence
  Oligonucleotide primer for the detection of SNP TSC0027527
tccatttccctt

SEQ ID NO: 316618 - DNA, 12 bp, Artificial Sequence
  Oligonucleotide primer for the detection of SNP TSC0027527
tccgtttccctt

SEQ ID NO: 316619 - DNA, 12 bp, Artificial Sequence
  Oligonucleotide primer for the detection of SNP TSC0027527
aaattaagattg

SEQ ID NO: 316620 - DNA, 12 bp, Artificial Sequence
  Oligonucleotide primer for the detection of SNP TSC0027528
tcaataataata

SEQ ID NO: 316621 - DNA, 12 bp, Artificial Sequence
  Oligonucleotide primer for the detection of SNP TSC0027528
tcgataataata

SEQ ID NO: 316622 - DNA, 12 bp, Artificial Sequence
  Oligonucleotide primer for the detection of SNP TSC0027528
aagattgataag

SEQ ID NO: 316623 - DNA, 12 bp, Artificial Sequence
  Oligonucleotide primer for the detection of SNP TSC0027528
ttgataatggtg

SEQ ID NO: 316624 - DNA, 12 bp, Artificial Sequence
  Oligonucleotide primer for the detection of SNP TSC0027528
tcgataatggtg

SEQ ID NO: 316625 - DNA, 12 bp, Artificial Sequence
  Oligonucleotide primer for the detection of SNP TSC0027529
tataggtattat

SEQ ID NO: 316626 - DNA, 12 bp, Artificial Sequence
  Oligonucleotide primer for the detection of SNP TSC0027529
cataaacatcat

SEQ ID NO: 316627 - DNA, 12 bp, Artificial Sequence
  Oligonucleotide primer for the detection of SNP TSC0027531
tacgaaaaacct

SEQ ID NO: 316628 - DNA, 12 bp, Artificial Sequence
  Oligonucleotide primer for the detection of SNP TSC0027531
ttaggggttagg

SEQ ID NO: 316629 - DNA, 12 bp, Artificial Sequence
  Oligonucleotide primer for the detection of SNP TSC0027531
tcaaaaaccaaa

SEQ ID NO: 316630 - DNA, 12 bp, Artificial Sequence
  Oligonucleotide primer for the detection of SNP TSC0027531
tgtgggaagttt

SEQ ID NO: 316631 - DNA, 12 bp, Artificial Sequence
  Oligonucleotide primer for the detection of SNP TSC0027531
tgcgggaagttt

SEQ ID NO: 316632 - DNA, 12 bp, Artificial Sequence
  Oligonucleotide primer for the detection of SNP TSC0027534
tattttactctc

SEQ ID NO: 316633 - DNA, 12 bp, Artificial Sequence
  Oligonucleotide primer for the detection of SNP TSC0027534
ttgagatgagag

SEQ ID NO: 316634 - DNA, 12 bp, Artificial Sequence
  Oligonucleotide primer for the detection of SNP TSC0027535
atattttaggtt

SEQ ID NO: 316635 - DNA, 12 bp, Artificial Sequence
  Oligonucleotide primer for the detection of SNP TSC0027535
atattttaaatt

SEQ ID NO: 316636 - DNA, 12 bp, Artificial Sequence
  Oligonucleotide primer for the detection of SNP TSC0027535
ttaaaatgtaaa

SEQ ID NO: 316637 - DNA, 12 bp, Artificial Sequence
  Oligonucleotide primer for the detection of SNP TSC0027536
ccattaaccttc

SEQ ID NO: 316638 - DNA, 12 bp, Artificial Sequence
  Oligonucleotide primer for the detection of SNP TSC0027536
gtttatttttgg

SEQ ID NO: 316639 - DNA, 12 bp, Artificial Sequence
  Oligonucleotide primer for the detection of SNP TSC0027536
attcatttttaa

SEQ ID NO: 316640 - DNA, 12 bp, Artificial Sequence
  Oligonucleotide primer for the detection of SNP TSC0027537
acaaaaccaaac

SEQ ID NO: 316641 - DNA, 12 bp, Artificial Sequence
  Oligonucleotide primer for the detection of SNP TSC0027537
tgttgtgtttgg

SEQ ID NO: 316642 - DNA, 12 bp, Artificial Sequence
  Oligonucleotide primer for the detection of SNP TSC0027537
cgttgtgtttgg

SEQ ID NO: 316643 - DNA, 12 bp, Artificial Sequence
  Oligonucleotide primer for the detection of SNP TSC0027537
tgtcgtgtttgg

SEQ ID NO: 316644 - DNA, 12 bp, Artificial Sequence
  Oligonucleotide primer for the detection of SNP TSC0027537
tgttgcgtttgg

SEQ ID NO: 316645 - DNA, 12 bp, Artificial Sequence
  Oligonukleotid-Primer
cgtcgtgtttgg

SEQ ID NO: 316646 - DNA, 12 bp, Artificial Sequence
  Oligonucleotide primer for the detection of SNP TSC0027537
cgttgcgtttgg

SEQ ID NO: 316647 - DNA, 12 bp, Artificial Sequence
  Oligonucleotide primer for the detection of SNP TSC0027537
tgtcgcgtttgg

SEQ ID NO: 316648 - DNA, 12 bp, Artificial Sequence
  Oligonucleotide primer for the detection of SNP TSC0027537
cgtcgcgtttgg

SEQ ID NO: 316649 - DNA, 12 bp, Artificial Sequence
  Oligonucleotide primer for the detection of SNP TSC0027538
aatatttctact

SEQ ID NO: 316650 - DNA, 12 bp, Artificial Sequence
  Oligonucleotide primer for the detection of SNP TSC0027538
agggttgtgtaa

SEQ ID NO: 316651 - DNA, 12 bp, Artificial Sequence
  Oligonucleotide primer for the detection of SNP TSC0027542
aatatgaaataa

SEQ ID NO: 316652 - DNA, 12 bp, Artificial Sequence
  Oligonucleotide primer for the detection of SNP TSC0027543
tacttctttata

SEQ ID NO: 316653 - DNA, 12 bp, Artificial Sequence
  Oligonucleotide primer for the detection of SNP TSC0027543
gtgtgttttgtt

SEQ ID NO: 316654 - DNA, 12 bp, Artificial Sequence
  Oligonucleotide primer for the detection of SNP TSC0027543
gtgtgtttcgtt

SEQ ID NO: 316655 - DNA, 12 bp, Artificial Sequence
  Oligonucleotide primer for the detection of SNP TSC0027543
atatatctcacc

SEQ ID NO: 316656 - DNA, 12 bp, Artificial Sequence
  Oligonucleotide primer for the detection of SNP TSC0027543
atatatctcgcc

SEQ ID NO: 316657 - DNA, 12 bp, Artificial Sequence
  Oligonucleotide primer for the detection of SNP TSC0027544
aaaaactcaaat

SEQ ID NO: 316658 - DNA, 12 bp, Artificial Sequence
  Oligonucleotide primer for the detection of SNP TSC0027544
gagtaggagagg

SEQ ID NO: 316659 - DNA, 12 bp, Artificial Sequence
  Oligonucleotide primer for the detection of SNP TSC0027545
ttcataatatac

SEQ ID NO: 316660 - DNA, 12 bp, Artificial Sequence
  Oligonucleotide primer for the detection of SNP TSC0027545
ttaaatatagtt

SEQ ID NO: 316661 - DNA, 12 bp, Artificial Sequence
  Oligonucleotide primer for the detection of SNP TSC0027546
tataaacttata

SEQ ID NO: 316662 - DNA, 12 bp, Artificial Sequence
  Oligonucleotide primer for the detection of SNP TSC0027546
tttaaggaagtt

SEQ ID NO: 316663 - DNA, 12 bp, Artificial Sequence
  Oligonucleotide primer for the detection of SNP TSC0027546
tataaatttgta

SEQ ID NO: 316664 - DNA, 12 bp, Artificial Sequence
  Oligonucleotide primer for the detection of SNP TSC0027550
ttttgaatatgt

SEQ ID NO: 316665 - DNA, 12 bp, Artificial Sequence
  Oligonucleotide primer for the detection of SNP TSC0027550
ttttgaatatgc

SEQ ID NO: 316666 - DNA, 12 bp, Artificial Sequence
  Oligonucleotide primer for the detection of SNP TSC0027550
ctttaaacatac

SEQ ID NO: 316667 - DNA, 12 bp, Artificial Sequence
  Oligonucleotide primer for the detection of SNP TSC0027554
taaaaaatatta

SEQ ID NO: 316668 - DNA, 12 bp, Artificial Sequence
  Oligonucleotide primer for the detection of SNP TSC0027555
aatttaagagta

SEQ ID NO: 316669 - DNA, 12 bp, Artificial Sequence
  Oligonucleotide primer for the detection of SNP TSC0027556
tttatttctaaa

SEQ ID NO: 316670 - DNA, 12 bp, Artificial Sequence
  Oligonucleotide primer for the detection of SNP TSC0027556
gtaagattttgt

SEQ ID NO: 316671 - DNA, 12 bp, Artificial Sequence
  Oligonucleotide primer for the detection of SNP TSC0027556
acaaaaccttat

SEQ ID NO: 316672 - DNA, 12 bp, Artificial Sequence
  Oligonucleotide primer for the detection of SNP TSC0027556
tttgtttttaga

SEQ ID NO: 316673 - DNA, 12 bp, Artificial Sequence
  Oligonucleotide primer for the detection of SNP TSC0027557
aacctctcttcc

SEQ ID NO: 316674 - DNA, 12 bp, Artificial Sequence
  Oligonucleotide primer for the detection of SNP TSC0027557
gagaggatagag

SEQ ID NO: 316675 - DNA, 12 bp, Artificial Sequence
  Oligonucleotide primer for the detection of SNP TSC0027559
tccaatcccccc

SEQ ID NO: 316676 - DNA, 12 bp, Artificial Sequence
  Oligonucleotide primer for the detection of SNP TSC0027559
gtattggtgggg

SEQ ID NO: 316677 - DNA, 12 bp, Artificial Sequence
  Oligonucleotide primer for the detection of SNP TSC0027559
gtattggcgggg

SEQ ID NO: 316678 - DNA, 12 bp, Artificial Sequence
  Oligonucleotide primer for the detection of SNP TSC0027559
cactaacaaaaa

SEQ ID NO: 316679 - DNA, 12 bp, Artificial Sequence
  Oligonucleotide primer for the detection of SNP TSC0027559
cactaacgaaaa

SEQ ID NO: 316680 - DNA, 12 bp, Artificial Sequence
  Oligonucleotide primer for the detection of SNP TSC0027560
aacccaaaatat

SEQ ID NO: 316681 - DNA, 12 bp, Artificial Sequence
  Oligonucleotide primer for the detection of SNP TSC0027560
ttggggtattta

SEQ ID NO: 316682 - DNA, 12 bp, Artificial Sequence
  Oligonucleotide primer for the detection of SNP TSC0027562
gggagtaggaag

SEQ ID NO: 316683 - DNA, 12 bp, Artificial Sequence
  Oligonucleotide primer for the detection of SNP TSC0027562
gaagggtagttt

SEQ ID NO: 316684 - DNA, 12 bp, Artificial Sequence
  Oligonucleotide primer for the detection of SNP TSC0027563
actcttcccaaa

SEQ ID NO: 316685 - DNA, 12 bp, Artificial Sequence
  Oligonucleotide primer for the detection of SNP TSC0027563
tgaatggttgtt

SEQ ID NO: 316686 - DNA, 12 bp, Artificial Sequence
  Oligonucleotide primer for the detection of SNP TSC0027563
tgaacggttgtt

SEQ ID NO: 316687 - DNA, 12 bp, Artificial Sequence
  Oligonucleotide primer for the detection of SNP TSC0027563
tgaatggtcgtt

SEQ ID NO: 316688 - DNA, 12 bp, Artificial Sequence
  Oligonucleotide primer for the detection of SNP TSC0027563
tgaacggtcgtt

SEQ ID NO: 316689 - DNA, 12 bp, Artificial Sequence
  Oligonucleotide primer for the detection of SNP TSC0027563
taaacaatcacc

SEQ ID NO: 316690 - DNA, 12 bp, Artificial Sequence
  Oligonucleotide primer for the detection of SNP TSC0027563
taaacaatcgcc

SEQ ID NO: 316691 - DNA, 12 bp, Artificial Sequence
  Oligonucleotide primer for the detection of SNP TSC0027563
taaacgatcacc

SEQ ID NO: 316692 - DNA, 12 bp, Artificial Sequence
  Oligonucleotide primer for the detection of SNP TSC0027563
taaacgatcgcc

SEQ ID NO: 316693 - DNA, 12 bp, Artificial Sequence
  Oligonucleotide primer for the detection of SNP TSC0027563
gttttttttagg

SEQ ID NO: 316694 - DNA, 12 bp, Artificial Sequence
  Oligonucleotide primer for the detection of SNP TSC0027564
ccattacatttc

SEQ ID NO: 316695 - DNA, 12 bp, Artificial Sequence
  Oligonucleotide primer for the detection of SNP TSC0027564
aagttaattaat

SEQ ID NO: 316696 - DNA, 12 bp, Artificial Sequence
  Oligonucleotide primer for the detection of SNP TSC0027564
aaactaattaat

SEQ ID NO: 316697 - DNA, 12 bp, Artificial Sequence
  Oligonucleotide primer for the detection of SNP TSC0027564
ttattatatttt

SEQ ID NO: 316698 - DNA, 12 bp, Artificial Sequence
  Oligonucleotide primer for the detection of SNP TSC0027565
tctctcttccca

SEQ ID NO: 316699 - DNA, 12 bp, Artificial Sequence
  Oligonucleotide primer for the detection of SNP TSC0027565
agaagggaaagg

SEQ ID NO: 316700 - DNA, 12 bp, Artificial Sequence
  Oligonucleotide primer for the detection of SNP TSC0027566
actacaaaacaa

SEQ ID NO: 316701 - DNA, 12 bp, Artificial Sequence
  Oligonucleotide primer for the detection of SNP TSC0027566
tattttaggagt

SEQ ID NO: 316702 - DNA, 12 bp, Artificial Sequence
  Oligonucleotide primer for the detection of SNP TSC0027566
ctaaaaataaaa

SEQ ID NO: 316703 - DNA, 12 bp, Artificial Sequence
  Oligonucleotide primer for the detection of SNP TSC0027566
gttgtagagtag

SEQ ID NO: 316704 - DNA, 12 bp, Artificial Sequence
  Oligonucleotide primer for the detection of SNP TSC0027567
ccaaacaaatac

SEQ ID NO: 316705 - DNA, 12 bp, Artificial Sequence
  Oligonucleotide primer for the detection of SNP TSC0027567
gttggtataggg

SEQ ID NO: 316706 - DNA, 12 bp, Artificial Sequence
  Oligonucleotide primer for the detection of SNP TSC0027567
gtcggtataggg

SEQ ID NO: 316707 - DNA, 12 bp, Artificial Sequence
  Oligonucleotide primer for the detection of SNP TSC0027567
accaacacaaaa

SEQ ID NO: 316708 - DNA, 12 bp, Artificial Sequence
  Oligonucleotide primer for the detection of SNP TSC0027567
accgacacaaaa

SEQ ID NO: 316709 - DNA, 12 bp, Artificial Sequence
  Oligonucleotide primer for the detection of SNP TSC0027568
taataacaaatt

SEQ ID NO: 316710 - DNA, 12 bp, Artificial Sequence
  Oligonucleotide primer for the detection of SNP TSC0027568
tggttattttta

SEQ ID NO: 316711 - DNA, 12 bp, Artificial Sequence
  Oligonucleotide primer for the detection of SNP TSC0027569
cccaccactaca

SEQ ID NO: 316712 - DNA, 12 bp, Artificial Sequence
  Oligonucleotide primer for the detection of SNP TSC0027569
aaaataattagt

SEQ ID NO: 316713 - DNA, 12 bp, Artificial Sequence
  Oligonucleotide primer for the detection of SNP TSC0027569
aaaacaattaac

SEQ ID NO: 316714 - DNA, 12 bp, Artificial Sequence
  Oligonucleotide primer for the detection of SNP TSC0027570
tatatatacgca

SEQ ID NO: 316715 - DNA, 12 bp, Artificial Sequence
  Oligonucleotide primer for the detection of SNP TSC0027570
tatatatacgcg

SEQ ID NO: 316716 - DNA, 12 bp, Artificial Sequence
  Oligonucleotide primer for the detection of SNP TSC0027571
aactcacacacc

SEQ ID NO: 316717 - DNA, 12 bp, Artificial Sequence
  Oligonucleotide primer for the detection of SNP TSC0027571
aagtttagtaaa

SEQ ID NO: 316718 - DNA, 12 bp, Artificial Sequence
  Oligonucleotide primer for the detection of SNP TSC0027572
tcaaatacctaa

SEQ ID NO: 316719 - DNA, 12 bp, Artificial Sequence
  Oligonucleotide primer for the detection of SNP TSC0027572
tatttaaagatt

SEQ ID NO: 316720 - DNA, 12 bp, Artificial Sequence
  Oligonucleotide primer for the detection of SNP TSC0027572
tatccaaaaatc

SEQ ID NO: 316721 - DNA, 12 bp, Artificial Sequence
  Oligonucleotide primer for the detection of SNP TSC0027572
ttaaatatttgg

SEQ ID NO: 316722 - DNA, 12 bp, Artificial Sequence
  Oligonucleotide primer for the detection of SNP TSC0027579
ctaacactaccc

SEQ ID NO: 316723 - DNA, 12 bp, Artificial Sequence
  Oligonucleotide primer for the detection of SNP TSC0027579
gtggttggttag

SEQ ID NO: 316724 - DNA, 12 bp, Artificial Sequence
  Oligonucleotide primer for the detection of SNP TSC0027580
tttaattacacc

SEQ ID NO: 316725 - DNA, 12 bp, Artificial Sequence
  Oligonucleotide primer for the detection of SNP TSC0027580
tatgattaggtg

SEQ ID NO: 316726 - DNA, 12 bp, Artificial Sequence
  Oligonucleotide primer for the detection of SNP TSC0027581
tttaactaatat

SEQ ID NO: 316727 - DNA, 12 bp, Artificial Sequence
  Oligonucleotide primer for the detection of SNP TSC0027581
atttatttaaaa

SEQ ID NO: 316728 - DNA, 12 bp, Artificial Sequence
  Oligonucleotide primer for the detection of SNP TSC0027581
attcactcaaaa

SEQ ID NO: 316729 - DNA, 12 bp, Artificial Sequence
  Oligonucleotide primer for the detection of SNP TSC0027581
tttagttggtgt

SEQ ID NO: 316730 - DNA, 12 bp, Artificial Sequence
  Oligonucleotide primer for the detection of SNP TSC0027582
ttttttgattgt

SEQ ID NO: 316731 - DNA, 12 bp, Artificial Sequence
  Oligonucleotide primer for the detection of SNP TSC0027582
ttttttgatcgt

SEQ ID NO: 316732 - DNA, 12 bp, Artificial Sequence
  Oligonucleotide primer for the detection of SNP TSC0027582
acttcctaacca

SEQ ID NO: 316733 - DNA, 12 bp, Artificial Sequence
  Oligonucleotide primer for the detection of SNP TSC0027582
acttcctaaccg

SEQ ID NO: 316734 - DNA, 12 bp, Artificial Sequence
  Oligonukleotid-Primer
gtttagggtggg

SEQ ID NO: 316735 - DNA, 12 bp, Artificial Sequence
  Oligonucleotide primer for the detection of SNP TSC0027583
taatgtattttg

SEQ ID NO: 316736 - DNA, 12 bp, Artificial Sequence
  Oligonucleotide primer for the detection of SNP TSC0027586
aaatatacctaa

SEQ ID NO: 316737 - DNA, 12 bp, Artificial Sequence
  Oligonucleotide primer for the detection of SNP TSC0027586
tatatttatatt

SEQ ID NO: 316738 - DNA, 12 bp, Artificial Sequence
  Oligonukleotid-Primer
tatatccatact

SEQ ID NO: 316739 - DNA, 12 bp, Artificial Sequence
  Oligonucleotide primer for the detection of SNP TSC0027586
aatatgtttagt

SEQ ID NO: 316740 - DNA, 12 bp, Artificial Sequence
  Oligonucleotide primer for the detection of SNP TSC0027587
taccactatctc

SEQ ID NO: 316741 - DNA, 12 bp, Artificial Sequence
  Oligonucleotide primer for the detection of SNP TSC0027587
tttggatattta

SEQ ID NO: 316742 - DNA, 12 bp, Artificial Sequence
  Oligonukleotid-Primer
tcaaccaataaa

SEQ ID NO: 316743 - DNA, 12 bp, Artificial Sequence
  Oligonucleotide primer for the detection of SNP TSC0027588
ttaaatgagaag

SEQ ID NO: 316744 - DNA, 12 bp, Artificial Sequence
  Oligonucleotide primer for the detection of SNP TSC0027588
tagttaataaat

SEQ ID NO: 316745 - DNA, 12 bp, Artificial Sequence
  Oligonucleotide primer for the detection of SNP TSC0027589
ttttttagtaaa

SEQ ID NO: 316746 - DNA, 12 bp, Artificial Sequence
  Oligonukleotid-Primer
caattaacatca

SEQ ID NO: 316747 - DNA, 12 bp, Artificial Sequence
  Oligonucleotide primer for the detection of SNP TSC0027590
tattaaaaagtt

SEQ ID NO: 316748 - DNA, 12 bp, Artificial Sequence
  Oligonucleotide primer for the detection of SNP TSC0027590
cattaaaaaatt

SEQ ID NO: 316749 - DNA, 12 bp, Artificial Sequence
  Oligonucleotide primer for the detection of SNP TSC0027590
taattgatatta

SEQ ID NO: 316750 - DNA, 12 bp, Artificial Sequence
  Oligonucleotide primer for the detection of SNP TSC0027591
cttaaaaaaaaa

SEQ ID NO: 316751 - DNA, 12 bp, Artificial Sequence
  Oligonucleotide primer for the detection of SNP TSC0027591
agtgaaaaaaaa

SEQ ID NO: 316752 - DNA, 12 bp, Artificial Sequence
  Oligonucleotide primer for the detection of SNP TSC0027592
cataaattactt

SEQ ID NO: 316753 - DNA, 12 bp, Artificial Sequence
  Oligonucleotide primer for the detection of SNP TSC0027592
aagttaagttat

SEQ ID NO: 316754 - DNA, 12 bp, Artificial Sequence
  Oligonucleotide primer for the detection of SNP TSC0027592
aaatcaaatcac

SEQ ID NO: 316755 - DNA, 12 bp, Artificial Sequence
  Oligonucleotide primer for the detection of SNP TSC0027592
tatgaattattt

SEQ ID NO: 316756 - DNA, 12 bp, Artificial Sequence
  Oligonucleotide primer for the detection of SNP TSC0027593
cccctacaaaac

SEQ ID NO: 316757 - DNA, 12 bp, Artificial Sequence
  Oligonucleotide primer for the detection of SNP TSC0027593
ttttgtaggggg

SEQ ID NO: 316758 - DNA, 12 bp, Artificial Sequence
  Oligonucleotide primer for the detection of SNP TSC0027593
tttttataaaat

SEQ ID NO: 316759 - DNA, 12 bp, Artificial Sequence
  Oligonucleotide primer for the detection of SNP TSC0027593
tttttataaaac

SEQ ID NO: 316760 - DNA, 12 bp, Artificial Sequence
  Oligonucleotide primer for the detection of SNP TSC0027595
taccataaatta

SEQ ID NO: 316761 - DNA, 12 bp, Artificial Sequence
  Oligonucleotide primer for the detection of SNP TSC0027595
taccgtaaatta

SEQ ID NO: 316762 - DNA, 12 bp, Artificial Sequence
  Oligonucleotide primer for the detection of SNP TSC0027595
aggggataggga

SEQ ID NO: 316763 - DNA, 12 bp, Artificial Sequence
  Oligonucleotide primer for the detection of SNP TSC0027595
ttgtgagttgtt

SEQ ID NO: 316764 - DNA, 12 bp, Artificial Sequence
  Oligonucleotide primer for the detection of SNP TSC0027595
tcgtgagttgtt

SEQ ID NO: 316765 - DNA, 12 bp, Artificial Sequence
  Oligonucleotide primer for the detection of SNP TSC0027595
ttgtgagttgtc

SEQ ID NO: 316766 - DNA, 12 bp, Artificial Sequence
  Oligonucleotide primer for the detection of SNP TSC0027595
tcgtgagttgtc

SEQ ID NO: 316767 - DNA, 12 bp, Artificial Sequence
  Oligonucleotide primer for the detection of SNP TSC0027596
tccatctatcta

SEQ ID NO: 316768 - DNA, 12 bp, Artificial Sequence
  Oligonucleotide primer for the detection of SNP TSC0027596
gatagttagtta

SEQ ID NO: 316769 - DNA, 12 bp, Artificial Sequence
  Oligonucleotide primer for the detection of SNP TSC0027596
ataactaactaa

SEQ ID NO: 316770 - DNA, 12 bp, Artificial Sequence
  Oligonucleotide primer for the detection of SNP TSC0027597
tatagagtgaga

SEQ ID NO: 316771 - DNA, 12 bp, Artificial Sequence
  Oligonucleotide primer for the detection of SNP TSC0027598
acaaataaaacc

SEQ ID NO: 316772 - DNA, 12 bp, Artificial Sequence
  Oligonucleotide primer for the detection of SNP TSC0027598
gagtttttgttg

SEQ ID NO: 316773 - DNA, 12 bp, Artificial Sequence
  Oligonucleotide primer for the detection of SNP TSC0027598
aaatccctacta

SEQ ID NO: 316774 - DNA, 12 bp, Artificial Sequence
  Oligonucleotide primer for the detection of SNP TSC0027598
gtaagtgaagtt

SEQ ID NO: 316775 - DNA, 12 bp, Artificial Sequence
  Oligonucleotide primer for the detection of SNP TSC0027600
aagttaatttaa

SEQ ID NO: 316776 - DNA, 12 bp, Artificial Sequence
  Oligonucleotide primer for the detection of SNP TSC0027602
aataatacctaa

SEQ ID NO: 316777 - DNA, 12 bp, Artificial Sequence
  Oligonucleotide primer for the detection of SNP TSC0027602
acatttactcta

SEQ ID NO: 316778 - DNA, 12 bp, Artificial Sequence
  Oligonucleotide primer for the detection of SNP TSC0027602
atggtatttggt

SEQ ID NO: 316779 - DNA, 12 bp, Artificial Sequence
  Oligonucleotide primer for the detection of SNP TSC0027602
atggtatttggc

SEQ ID NO: 316780 - DNA, 12 bp, Artificial Sequence
  Oligonucleotide primer for the detection of SNP TSC0027605
atttaaactaac

SEQ ID NO: 316781 - DNA, 12 bp, Artificial Sequence
  Oligonucleotide primer for the detection of SNP TSC0027605
attaatatttgg

SEQ ID NO: 316782 - DNA, 12 bp, Artificial Sequence
  Oligonucleotide primer for the detection of SNP TSC0027605
atcaatatctaa

SEQ ID NO: 316783 - DNA, 12 bp, Artificial Sequence
  Oligonucleotide primer for the detection of SNP TSC0027605
atttggattaat

SEQ ID NO: 316784 - DNA, 12 bp, Artificial Sequence
  Oligonucleotide primer for the detection of SNP TSC0027606
ataagatattta

SEQ ID NO: 316785 - DNA, 12 bp, Artificial Sequence
  Oligonucleotide primer for the detection of SNP TSC0027607
aatatacatatc

SEQ ID NO: 316786 - DNA, 12 bp, Artificial Sequence
  Oligonucleotide primer for the detection of SNP TSC0027607
ttttttgaatga

SEQ ID NO: 316787 - DNA, 12 bp, Artificial Sequence
  Oligonucleotide primer for the detection of SNP TSC0027607
ctccctaaataa

SEQ ID NO: 316788 - DNA, 12 bp, Artificial Sequence
  Oligonucleotide primer for the detection of SNP TSC0027607
gatgtgtatgtt

SEQ ID NO: 316789 - DNA, 12 bp, Artificial Sequence
  Oligonucleotide primer for the detection of SNP TSC0027608
atacacctcccc

SEQ ID NO: 316790 - DNA, 12 bp, Artificial Sequence
  Oligonucleotide primer for the detection of SNP TSC0027609
aatccaactctt

SEQ ID NO: 316791 - DNA, 12 bp, Artificial Sequence
  Oligonucleotide primer for the detection of SNP TSC0027609
tttatcgattta

SEQ ID NO: 316792 - DNA, 12 bp, Artificial Sequence
  Oligonucleotide primer for the detection of SNP TSC0027609
ccaccaacccaa

SEQ ID NO: 316793 - DNA, 12 bp, Artificial Sequence
  Oligonucleotide primer for the detection of SNP TSC0027609
ccaccgacccaa

SEQ ID NO: 316794 - DNA, 12 bp, Artificial Sequence
  Oligonucleotide primer for the detection of SNP TSC0027614
actaaaatacta

SEQ ID NO: 316795 - DNA, 12 bp, Artificial Sequence
  Oligonucleotide primer for the detection of SNP TSC0027614
ttttttggaagg

SEQ ID NO: 316796 - DNA, 12 bp, Artificial Sequence
  Oligonucleotide primer for the detection of SNP TSC0027614
cctctaaaaaaa

SEQ ID NO: 316797 - DNA, 12 bp, Artificial Sequence
  Oligonucleotide primer for the detection of SNP TSC0027614
gttaagatgtta

SEQ ID NO: 316798 - DNA, 12 bp, Artificial Sequence
  Oligonucleotide primer for the detection of SNP TSC0027615
taaaatttgaaa

SEQ ID NO: 316799 - DNA, 12 bp, Artificial Sequence
  Oligonucleotide primer for the detection of SNP TSC0027616
attcaaataata

SEQ ID NO: 316800 - DNA, 12 bp, Artificial Sequence
  Oligonucleotide primer for the detection of SNP TSC0027616
ttaataatgaat

SEQ ID NO: 316801 - DNA, 12 bp, Artificial Sequence
  Oligonucleotide primer for the detection of SNP TSC0027616
ttaacaataaat

SEQ ID NO: 316802 - DNA, 12 bp, Artificial Sequence
  Oligonucleotide primer for the detection of SNP TSC0027617
tcatcacaatca

SEQ ID NO: 316803 - DNA, 12 bp, Artificial Sequence
  Oligonucleotide primer for the detection of SNP TSC0027617
tgatgattgagt

SEQ ID NO: 316804 - DNA, 12 bp, Artificial Sequence
  Oligonucleotide primer for the detection of SNP TSC0027617
taataattaaat

SEQ ID NO: 316805 - DNA, 12 bp, Artificial Sequence
  Oligonucleotide primer for the detection of SNP TSC0027617
ttattataatta

SEQ ID NO: 316806 - DNA, 12 bp, Artificial Sequence
  Oligonucleotide primer for the detection of SNP TSC0027618
catcaacaatca

SEQ ID NO: 316807 - DNA, 12 bp, Artificial Sequence
  Oligonucleotide primer for the detection of SNP TSC0027618
catcgacaatca

SEQ ID NO: 316808 - DNA, 12 bp, Artificial Sequence
  Oligonucleotide primer for the detection of SNP TSC0027618
tattgataatta

SEQ ID NO: 316809 - DNA, 12 bp, Artificial Sequence
  Oligonucleotide primer for the detection of SNP TSC0027618
tatcgataatta

SEQ ID NO: 316810 - DNA, 12 bp, Artificial Sequence
  Oligonucleotide primer for the detection of SNP TSC0027619
cgcactcaatca

SEQ ID NO: 316811 - DNA, 12 bp, Artificial Sequence
  Oligonucleotide primer for the detection of SNP TSC0027619
tgtgatgattgt

SEQ ID NO: 316812 - DNA, 12 bp, Artificial Sequence
  Oligonucleotide primer for the detection of SNP TSC0027619
tgcgatgattgt

SEQ ID NO: 316813 - DNA, 12 bp, Artificial Sequence
  Oligonucleotide primer for the detection of SNP TSC0027619
tacaataattat

SEQ ID NO: 316814 - DNA, 12 bp, Artificial Sequence
  Oligonucleotide primer for the detection of SNP TSC0027619
tacgataattat

SEQ ID NO: 316815 - DNA, 12 bp, Artificial Sequence
  Oligonucleotide primer for the detection of SNP TSC0027619
tgtatttaatta

SEQ ID NO: 316816 - DNA, 12 bp, Artificial Sequence
  Oligonucleotide primer for the detection of SNP TSC0027619
cgtatttaatta

SEQ ID NO: 316817 - DNA, 12 bp, Artificial Sequence
  Oligonucleotide primer for the detection of SNP TSC0027620
actaatacatct

SEQ ID NO: 316818 - DNA, 12 bp, Artificial Sequence
  Oligonucleotide primer for the detection of SNP TSC0027620
attttagggtta

SEQ ID NO: 316819 - DNA, 12 bp, Artificial Sequence
  Oligonucleotide primer for the detection of SNP TSC0027622
atttcctatctc

SEQ ID NO: 316820 - DNA, 12 bp, Artificial Sequence
  Oligonucleotide primer for the detection of SNP TSC0027622
ttgtttgaatta

SEQ ID NO: 316821 - DNA, 12 bp, Artificial Sequence
  Oligonucleotide primer for the detection of SNP TSC0027622
ttgttcgaatta

SEQ ID NO: 316822 - DNA, 12 bp, Artificial Sequence
  Oligonucleotide primer for the detection of SNP TSC0027623
tttttatatata

SEQ ID NO: 316823 - DNA, 12 bp, Artificial Sequence
  Oligonucleotide primer for the detection of SNP TSC0027626
ataattctcttt

SEQ ID NO: 316824 - DNA, 12 bp, Artificial Sequence
  Oligonucleotide primer for the detection of SNP TSC0027626
atttattaggaa

SEQ ID NO: 316825 - DNA, 12 bp, Artificial Sequence
  Oligonucleotide primer for the detection of SNP TSC0027627
atcaaacttaat

SEQ ID NO: 316826 - DNA, 12 bp, Artificial Sequence
  Oligonucleotide primer for the detection of SNP TSC0027627
agaaataggaaa

SEQ ID NO: 316827 - DNA, 12 bp, Artificial Sequence
  Oligonucleotide primer for the detection of SNP TSC0027627
gttaaatttaat

SEQ ID NO: 316828 - DNA, 12 bp, Artificial Sequence
  Oligonucleotide primer for the detection of SNP TSC0027628
atctacatttac

SEQ ID NO: 316829 - DNA, 12 bp, Artificial Sequence
  Oligonucleotide primer for the detection of SNP TSC0027628
aaattttagagg

SEQ ID NO: 316830 - DNA, 12 bp, Artificial Sequence
  Oligonucleotide primer for the detection of SNP TSC0027629
cactctatcacc

SEQ ID NO: 316831 - DNA, 12 bp, Artificial Sequence
  Oligonucleotide primer for the detection of SNP TSC0027629
cactctatcgcc

SEQ ID NO: 316832 - DNA, 12 bp, Artificial Sequence
  Oligonucleotide primer for the detection of SNP TSC0027629
actataccccaa

SEQ ID NO: 316833 - DNA, 12 bp, Artificial Sequence
  Oligonucleotide primer for the detection of SNP TSC0027629
tattttgttgtt

SEQ ID NO: 316834 - DNA, 12 bp, Artificial Sequence
  Oligonucleotide primer for the detection of SNP TSC0027629
tattttgtcgtt

SEQ ID NO: 316835 - DNA, 12 bp, Artificial Sequence
  Oligonucleotide primer for the detection of SNP TSC0027630
acataccaaaca

SEQ ID NO: 316836 - DNA, 12 bp, Artificial Sequence
  Oligonucleotide primer for the detection of SNP TSC0027630
ttattttagagt

SEQ ID NO: 316837 - DNA, 12 bp, Artificial Sequence
  Oligonucleotide primer for the detection of SNP TSC0027630
tatgttaagtat

SEQ ID NO: 316838 - DNA, 12 bp, Artificial Sequence
  Oligonucleotide primer for the detection of SNP TSC0027630
tatgttaagtac

SEQ ID NO: 316839 - DNA, 12 bp, Artificial Sequence
  Oligonukleotid-Primer
ttttttaaccat

SEQ ID NO: 316840 - DNA, 12 bp, Artificial Sequence
  Oligonucleotide primer for the detection of SNP TSC0027631
ttggtatgtaat

SEQ ID NO: 316841 - DNA, 12 bp, Artificial Sequence
  Oligonucleotide primer for the detection of SNP TSC0027631
ttaacatataac

SEQ ID NO: 316842 - DNA, 12 bp, Artificial Sequence
  Oligonucleotide primer for the detection of SNP TSC0027631
ttttttaattat

SEQ ID NO: 316843 - DNA, 12 bp, Artificial Sequence
  Oligonukleotid-Primer
atttcctaatat

SEQ ID NO: 316844 - DNA, 12 bp, Artificial Sequence
  Oligonucleotide primer for the detection of SNP TSC0027633
taaagagaatta

SEQ ID NO: 316845 - DNA, 12 bp, Artificial Sequence
  Oligonucleotide primer for the detection of SNP TSC0027634
tgaatgattgag

SEQ ID NO: 316846 - DNA, 12 bp, Artificial Sequence
  Oligonucleotide primer for the detection of SNP TSC0027637
aaaaacttaaat

SEQ ID NO: 316847 - DNA, 12 bp, Artificial Sequence
  Oligonucleotide primer for the detection of SNP TSC0027637
gtatagaagaaa

SEQ ID NO: 316848 - DNA, 12 bp, Artificial Sequence
  Oligonucleotide primer for the detection of SNP TSC0027642
caaattataacc

SEQ ID NO: 316849 - DNA, 12 bp, Artificial Sequence
  Oligonucleotide primer for the detection of SNP TSC0027642
ttaaaagtggtt

SEQ ID NO: 316850 - DNA, 12 bp, Artificial Sequence
  Oligonucleotide primer for the detection of SNP TSC0027642
caaaaataacta

SEQ ID NO: 316851 - DNA, 12 bp, Artificial Sequence
  Oligonukleotid-Primer
taaattgtaatt

SEQ ID NO: 316852 - DNA, 12 bp, Artificial Sequence
  Oligonucleotide primer for the detection of SNP TSC0027642
taaattgtaatc

SEQ ID NO: 316853 - DNA, 12 bp, Artificial Sequence
  Oligonucleotide primer for the detection of SNP TSC0027643
aaacctatttca

SEQ ID NO: 316854 - DNA, 12 bp, Artificial Sequence
  Oligonucleotide primer for the detection of SNP TSC0027643
gaattggtagtt

SEQ ID NO: 316855 - DNA, 12 bp, Artificial Sequence
  Oligonucleotide primer for the detection of SNP TSC0027643
aaattaataatt

SEQ ID NO: 316856 - DNA, 12 bp, Artificial Sequence
  Oligonucleotide primer for the detection of SNP TSC0027644
attaaaactttt

SEQ ID NO: 316857 - DNA, 12 bp, Artificial Sequence
  Oligonucleotide primer for the detection of SNP TSC0027644
gtttttttggtg

SEQ ID NO: 316858 - DNA, 12 bp, Artificial Sequence
  Oligonucleotide primer for the detection of SNP TSC0027645
ggtttggtgtag

SEQ ID NO: 316859 - DNA, 12 bp, Artificial Sequence
  Oligonukleotid-Primer
caaaaccttctc

SEQ ID NO: 316860 - DNA, 12 bp, Artificial Sequence
  Oligonucleotide primer for the detection of SNP TSC0027646
gagtttgtgttg

SEQ ID NO: 316861 - DNA, 12 bp, Artificial Sequence
  Oligonucleotide primer for the detection of SNP TSC0027646
gagttcgtgttg

SEQ ID NO: 316862 - DNA, 12 bp, Artificial Sequence
  Oligonucleotide primer for the detection of SNP TSC0027646
gagtttgtgtcg

SEQ ID NO: 316863 - DNA, 12 bp, Artificial Sequence
  Oligonucleotide primer for the detection of SNP TSC0027646
gagttcgtgtcg

SEQ ID NO: 316864 - DNA, 12 bp, Artificial Sequence
  Oligonucleotide primer for the detection of SNP TSC0027647
aaaacctacaat

SEQ ID NO: 316865 - DNA, 12 bp, Artificial Sequence
  Oligonucleotide primer for the detection of SNP TSC0027647
ttttttgaagag

SEQ ID NO: 316866 - DNA, 12 bp, Artificial Sequence
  Oligonucleotide primer for the detection of SNP TSC0027647
ttccctaaaaaa

SEQ ID NO: 316867 - DNA, 12 bp, Artificial Sequence
  Oligonucleotide primer for the detection of SNP TSC0027647
gaaatttatagt

SEQ ID NO: 316868 - DNA, 12 bp, Artificial Sequence
  Oligonucleotide primer for the detection of SNP TSC0027648
aataaaaatatc

SEQ ID NO: 316869 - DNA, 12 bp, Artificial Sequence
  Oligonucleotide primer for the detection of SNP TSC0027650
tataataaatat

SEQ ID NO: 316870 - DNA, 12 bp, Artificial Sequence
  Oligonucleotide primer for the detection of SNP TSC0027650
aattttagtaaa

SEQ ID NO: 316871 - DNA, 12 bp, Artificial Sequence
  Oligonucleotide primer for the detection of SNP TSC0027651
atttaaatgtag

SEQ ID NO: 316872 - DNA, 12 bp, Artificial Sequence
  Oligonucleotide primer for the detection of SNP TSC0027651
acttaaatacaa

SEQ ID NO: 316873 - DNA, 12 bp, Artificial Sequence
  Oligonucleotide primer for the detection of SNP TSC0027651
tttaggaagagt

SEQ ID NO: 316874 - DNA, 12 bp, Artificial Sequence
  Oligonucleotide primer for the detection of SNP TSC0027660
taccacataacc

SEQ ID NO: 316875 - DNA, 12 bp, Artificial Sequence
  Oligonucleotide primer for the detection of SNP TSC0027660
ggatagagttag

SEQ ID NO: 316876 - DNA, 12 bp, Artificial Sequence
  Oligonucleotide primer for the detection of SNP TSC0027660
tattatatgatt

SEQ ID NO: 316877 - DNA, 12 bp, Artificial Sequence
  Oligonucleotide primer for the detection of SNP TSC0027662
aattaactcaac

SEQ ID NO: 316878 - DNA, 12 bp, Artificial Sequence
  Oligonucleotide primer for the detection of SNP TSC0027662
attttataaata

SEQ ID NO: 316879 - DNA, 12 bp, Artificial Sequence
  Oligonucleotide primer for the detection of SNP TSC0027664
tttccaaatcta

SEQ ID NO: 316880 - DNA, 12 bp, Artificial Sequence
  Oligonucleotide primer for the detection of SNP TSC0027664
gaatttgtttta

SEQ ID NO: 316881 - DNA, 12 bp, Artificial Sequence
  Oligonucleotide primer for the detection of SNP TSC0027664
gaattcgtttta

SEQ ID NO: 316882 - DNA, 12 bp, Artificial Sequence
  Oligonucleotide primer for the detection of SNP TSC0027664
aaatccacctta

SEQ ID NO: 316883 - DNA, 12 bp, Artificial Sequence
  Oligonucleotide primer for the detection of SNP TSC0027664
aaatccgcctta

SEQ ID NO: 316884 - DNA, 12 bp, Artificial Sequence
  Oligonucleotide primer for the detection of SNP TSC0027665
ataaattaccca

SEQ ID NO: 316885 - DNA, 12 bp, Artificial Sequence
  Oligonucleotide primer for the detection of SNP TSC0027665
aggaatatttga

SEQ ID NO: 316886 - DNA, 12 bp, Artificial Sequence
  Oligonucleotide primer for the detection of SNP TSC0027665
aaatacttaaaa

SEQ ID NO: 316887 - DNA, 12 bp, Artificial Sequence
  Oligonucleotide primer for the detection of SNP TSC0027665
aataaattattt

SEQ ID NO: 316888 - DNA, 12 bp, Artificial Sequence
  Oligonucleotide primer for the detection of SNP TSC0027667
aactaatcaaac

SEQ ID NO: 316889 - DNA, 12 bp, Artificial Sequence
  Oligonucleotide primer for the detection of SNP TSC0027667
ggatttttgttg

SEQ ID NO: 316890 - DNA, 12 bp, Artificial Sequence
  Oligonucleotide primer for the detection of SNP TSC0027668
aaattttttgaa

SEQ ID NO: 316891 - DNA, 12 bp, Artificial Sequence
  Oligonucleotide primer for the detection of SNP TSC0027670
aaccctatctcc

SEQ ID NO: 316892 - DNA, 12 bp, Artificial Sequence
  Oligonucleotide primer for the detection of SNP TSC0027670
ttatatttttaa

SEQ ID NO: 316893 - DNA, 12 bp, Artificial Sequence
  Oligonucleotide primer for the detection of SNP TSC0027672
caacaacacaat

SEQ ID NO: 316894 - DNA, 12 bp, Artificial Sequence
  Oligonucleotide primer for the detection of SNP TSC0027672
caacgacacaat

SEQ ID NO: 316895 - DNA, 12 bp, Artificial Sequence
  Oligonucleotide primer for the detection of SNP TSC0027672
ttgtagtaagtt

SEQ ID NO: 316896 - DNA, 12 bp, Artificial Sequence
  Oligonucleotide primer for the detection of SNP TSC0027672
agtggtataatt

SEQ ID NO: 316897 - DNA, 12 bp, Artificial Sequence
  Oligonucleotide primer for the detection of SNP TSC0027672
agcggtataatt

SEQ ID NO: 316898 - DNA, 12 bp, Artificial Sequence
  Oligonucleotide primer for the detection of SNP TSC0027674
ttttttaaaacc

SEQ ID NO: 316899 - DNA, 12 bp, Artificial Sequence
  Oligonucleotide primer for the detection of SNP TSC0027676
tgtgtgtgtgta

SEQ ID NO: 316900 - DNA, 12 bp, Artificial Sequence
  Oligonucleotide primer for the detection of SNP TSC0027677
cattttttaccc

SEQ ID NO: 316901 - DNA, 12 bp, Artificial Sequence
  Oligonucleotide primer for the detection of SNP TSC0027678
actttaaccata

SEQ ID NO: 316902 - DNA, 12 bp, Artificial Sequence
  Oligonucleotide primer for the detection of SNP TSC0027678
agtaaagtaagg

SEQ ID NO: 316903 - DNA, 12 bp, Artificial Sequence
  Oligonucleotide primer for the detection of SNP TSC0027679
aataattttttt

SEQ ID NO: 316904 - DNA, 12 bp, Artificial Sequence
  Oligonucleotide primer for the detection of SNP TSC0027679
caaaataacttt

SEQ ID NO: 316905 - DNA, 12 bp, Artificial Sequence
  Oligonucleotide primer for the detection of SNP TSC0027680
cctctacctccc

SEQ ID NO: 316906 - DNA, 12 bp, Artificial Sequence
  Oligonucleotide primer for the detection of SNP TSC0027680
tttgtttgaatt

SEQ ID NO: 316907 - DNA, 12 bp, Artificial Sequence
  Oligonucleotide primer for the detection of SNP TSC0027680
tttgtttgaatc

SEQ ID NO: 316908 - DNA, 12 bp, Artificial Sequence
  Oligonucleotide primer for the detection of SNP TSC0027680
tttacttaaacc

SEQ ID NO: 316909 - DNA, 12 bp, Artificial Sequence
  Oligonucleotide primer for the detection of SNP TSC0027681
aatcttaactca

SEQ ID NO: 316910 - DNA, 12 bp, Artificial Sequence
  Oligonucleotide primer for the detection of SNP TSC0027682
aactttaaacaa

SEQ ID NO: 316911 - DNA, 12 bp, Artificial Sequence
  Oligonucleotide primer for the detection of SNP TSC0027682
gagaagaatttt

SEQ ID NO: 316912 - DNA, 12 bp, Artificial Sequence
  Oligonucleotide primer for the detection of SNP TSC0027682
gattttgagtaa

SEQ ID NO: 316913 - DNA, 12 bp, Artificial Sequence
  Oligonucleotide primer for the detection of SNP TSC0027690
tatacaatcacc

SEQ ID NO: 316914 - DNA, 12 bp, Artificial Sequence
  Oligonucleotide primer for the detection of SNP TSC0027690
ttagttagaggg

SEQ ID NO: 316915 - DNA, 12 bp, Artificial Sequence
  Oligonucleotide primer for the detection of SNP TSC0027690
ccaaccaaaaaa

SEQ ID NO: 316916 - DNA, 12 bp, Artificial Sequence
  Oligonucleotide primer for the detection of SNP TSC0027690
tatgtaattatt

SEQ ID NO: 316917 - DNA, 12 bp, Artificial Sequence
  Oligonucleotide primer for the detection of SNP TSC0027696
ttaaacattaat

SEQ ID NO: 316918 - DNA, 12 bp, Artificial Sequence
  Oligonucleotide primer for the detection of SNP TSC0027696
aagtttgtaaga

SEQ ID NO: 316919 - DNA, 12 bp, Artificial Sequence
  Oligonucleotide primer for the detection of SNP TSC0027697
cctactcaaatc

SEQ ID NO: 316920 - DNA, 12 bp, Artificial Sequence
  Oligonucleotide primer for the detection of SNP TSC0027697
cctactcgaatc

SEQ ID NO: 316921 - DNA, 12 bp, Artificial Sequence
  Oligonucleotide primer for the detection of SNP TSC0027697
atttattaaagg

SEQ ID NO: 316922 - DNA, 12 bp, Artificial Sequence
  Oligonucleotide primer for the detection of SNP TSC0027698
aaacttcttaca

SEQ ID NO: 316923 - DNA, 12 bp, Artificial Sequence
  Oligonucleotide primer for the detection of SNP TSC0027698
atgtggtgatat

SEQ ID NO: 316924 - DNA, 12 bp, Artificial Sequence
  Oligonucleotide primer for the detection of SNP TSC0027698
acgtggtgatat

SEQ ID NO: 316925 - DNA, 12 bp, Artificial Sequence
  Oligonucleotide primer for the detection of SNP TSC0027698
acgtaataacat

SEQ ID NO: 316926 - DNA, 12 bp, Artificial Sequence
  Oligonucleotide primer for the detection of SNP TSC0027700
ataacacataac

SEQ ID NO: 316927 - DNA, 12 bp, Artificial Sequence
  Oligonucleotide primer for the detection of SNP TSC0027700
tttttttgggaa

SEQ ID NO: 316928 - DNA, 12 bp, Artificial Sequence
  Oligonucleotide primer for the detection of SNP TSC0027700
tttctttaaaaa

SEQ ID NO: 316929 - DNA, 12 bp, Artificial Sequence
  Oligonucleotide primer for the detection of SNP TSC0027700
atgatatatggt

SEQ ID NO: 316930 - DNA, 12 bp, Artificial Sequence
  Oligonucleotide primer for the detection of SNP TSC0027701
cattctataaca

SEQ ID NO: 316931 - DNA, 12 bp, Artificial Sequence
  Oligonucleotide primer for the detection of SNP TSC0027701
cattctataacg

SEQ ID NO: 316932 - DNA, 12 bp, Artificial Sequence
  Oligonucleotide primer for the detection of SNP TSC0027701
atattttgtgtt

SEQ ID NO: 316933 - DNA, 12 bp, Artificial Sequence
  Oligonucleotide primer for the detection of SNP TSC0027701
acatcctatatc

SEQ ID NO: 316934 - DNA, 12 bp, Artificial Sequence
  Oligonucleotide primer for the detection of SNP TSC0027701
tattttgtggtg

SEQ ID NO: 316935 - DNA, 12 bp, Artificial Sequence
  Oligonucleotide primer for the detection of SNP TSC0027701
tattttgtggcg

SEQ ID NO: 316936 - DNA, 12 bp, Artificial Sequence
  Oligonucleotide primer for the detection of SNP TSC0027702
catcccacactc

SEQ ID NO: 316937 - DNA, 12 bp, Artificial Sequence
  Oligonucleotide primer for the detection of SNP TSC0027702
catcccacgctc

SEQ ID NO: 316938 - DNA, 12 bp, Artificial Sequence
  Oligonucleotide primer for the detection of SNP TSC0027702
cgtcccacactc

SEQ ID NO: 316939 - DNA, 12 bp, Artificial Sequence
  Oligonucleotide primer for the detection of SNP TSC0027702
cgtcccacgctc

SEQ ID NO: 316940 - DNA, 12 bp, Artificial Sequence
  Oligonucleotide primer for the detection of SNP TSC0027702
gttatagaatgt

SEQ ID NO: 316941 - DNA, 12 bp, Artificial Sequence
  Oligonucleotide primer for the detection of SNP TSC0027702
ccacaaaataca

SEQ ID NO: 316942 - DNA, 12 bp, Artificial Sequence
  Oligonucleotide primer for the detection of SNP TSC0027702
tgttttatgttt

SEQ ID NO: 316943 - DNA, 12 bp, Artificial Sequence
  Oligonucleotide primer for the detection of SNP TSC0027702
cgttttatgttt

SEQ ID NO: 316944 - DNA, 12 bp, Artificial Sequence
  Oligonucleotide primer for the detection of SNP TSC0027702
tgttttacgttt

SEQ ID NO: 316945 - DNA, 12 bp, Artificial Sequence
  Oligonucleotide primer for the detection of SNP TSC0027702
tgttttatgttc

SEQ ID NO: 316946 - DNA, 12 bp, Artificial Sequence
  Oligonucleotide primer for the detection of SNP TSC0027702
cgttttacgttt

SEQ ID NO: 316947 - DNA, 12 bp, Artificial Sequence
  Oligonucleotide primer for the detection of SNP TSC0027702
cgttttatgttc

SEQ ID NO: 316948 - DNA, 12 bp, Artificial Sequence
  Oligonukleotid-Primer
tgttttacgttc

SEQ ID NO: 316949 - DNA, 12 bp, Artificial Sequence
  Oligonucleotide primer for the detection of SNP TSC0027702
cgttttacgttc

SEQ ID NO: 316950 - DNA, 12 bp, Artificial Sequence
  Oligonucleotide primer for the detection of SNP TSC0027703
ttctcaaccact

SEQ ID NO: 316951 - DNA, 12 bp, Artificial Sequence
  Oligonucleotide primer for the detection of SNP TSC0027703
aaaagaataaaa

SEQ ID NO: 316952 - DNA, 12 bp, Artificial Sequence
  Oligonukleotid-Primer
acatctttttcc

SEQ ID NO: 316953 - DNA, 12 bp, Artificial Sequence
  Oligonucleotide primer for the detection of SNP TSC0027704
tgggagaaagta

SEQ ID NO: 316954 - DNA, 12 bp, Artificial Sequence
  Oligonucleotide primer for the detection of SNP TSC0027704
cgggagaaagta

SEQ ID NO: 316955 - DNA, 12 bp, Artificial Sequence
  Oligonucleotide primer for the detection of SNP TSC0027705
tgttgtgattta

SEQ ID NO: 316956 - DNA, 12 bp, Artificial Sequence
  Oligonukleotid-Primer
taaaatttatct

SEQ ID NO: 316957 - DNA, 12 bp, Artificial Sequence
  Oligonucleotide primer for the detection of SNP TSC0027710
tgagatttattt

SEQ ID NO: 316958 - DNA, 12 bp, Artificial Sequence
  Oligonucleotide primer for the detection of SNP TSC0027711
ctcaaaattcac

SEQ ID NO: 316959 - DNA, 12 bp, Artificial Sequence
  Oligonucleotide primer for the detection of SNP TSC0027711
tgtaagatttga

SEQ ID NO: 316960 - DNA, 12 bp, Artificial Sequence
  Oligonukleotid-Primer
acatcttcctcc

SEQ ID NO: 316961 - DNA, 12 bp, Artificial Sequence
  Oligonucleotide primer for the detection of SNP TSC0027712
gaatttgggttg

SEQ ID NO: 316962 - DNA, 12 bp, Artificial Sequence
  Oligonucleotide primer for the detection of SNP TSC0027712
gaattcgggttg

SEQ ID NO: 316963 - DNA, 12 bp, Artificial Sequence
  Oligonucleotide primer for the detection of SNP TSC0027723
aatacttttaaa

SEQ ID NO: 316964 - DNA, 12 bp, Artificial Sequence
  Oligonucleotide primer for the detection of SNP TSC0027723
tggtgtttttaa

SEQ ID NO: 316965 - DNA, 12 bp, Artificial Sequence
  Oligonucleotide primer for the detection of SNP TSC0027724
ataaaacaatac

SEQ ID NO: 316966 - DNA, 12 bp, Artificial Sequence
  Oligonucleotide primer for the detection of SNP TSC0027724
ttgtttatagga

SEQ ID NO: 316967 - DNA, 12 bp, Artificial Sequence
  Oligonucleotide primer for the detection of SNP TSC0027727
taacacccaaaa

SEQ ID NO: 316968 - DNA, 12 bp, Artificial Sequence
  Oligonucleotide primer for the detection of SNP TSC0027727
taacacccgaaa

SEQ ID NO: 316969 - DNA, 12 bp, Artificial Sequence
  Oligonucleotide primer for the detection of SNP TSC0027727
ggtttatggttt

SEQ ID NO: 316970 - DNA, 12 bp, Artificial Sequence
  Oligonucleotide primer for the detection of SNP TSC0027727
ggtttacggttt

SEQ ID NO: 316971 - DNA, 12 bp, Artificial Sequence
  Oligonucleotide primer for the detection of SNP TSC0027727
aactcacaatct

SEQ ID NO: 316972 - DNA, 12 bp, Artificial Sequence
  Oligonucleotide primer for the detection of SNP TSC0027727
aactcacgatct

SEQ ID NO: 316973 - DNA, 12 bp, Artificial Sequence
  Oligonucleotide primer for the detection of SNP TSC0027727
tagtatttgggg

SEQ ID NO: 316974 - DNA, 12 bp, Artificial Sequence
  Oligonucleotide primer for the detection of SNP TSC0027727
tagtattcgggg

SEQ ID NO: 316975 - DNA, 12 bp, Artificial Sequence
  Oligonucleotide primer for the detection of SNP TSC0027729
aaaaaccttact

SEQ ID NO: 316976 - DNA, 12 bp, Artificial Sequence
  Oligonucleotide primer for the detection of SNP TSC0027729
ttgtgtggttta

SEQ ID NO: 316977 - DNA, 12 bp, Artificial Sequence
  Oligonucleotide primer for the detection of SNP TSC0027729
ttgtgcggttta

SEQ ID NO: 316978 - DNA, 12 bp, Artificial Sequence
  Oligonucleotide primer for the detection of SNP TSC0027731
aataaaacccta

SEQ ID NO: 316979 - DNA, 12 bp, Artificial Sequence
  Oligonucleotide primer for the detection of SNP TSC0027731
ttttttcttaaa

SEQ ID NO: 316980 - DNA, 12 bp, Artificial Sequence
  Oligonucleotide primer for the detection of SNP TSC0027731
tagtgagatttt

SEQ ID NO: 316981 - DNA, 12 bp, Artificial Sequence
  Oligonucleotide primer for the detection of SNP TSC0027732
ctctacaaaaaa

SEQ ID NO: 316982 - DNA, 12 bp, Artificial Sequence
  Oligonucleotide primer for the detection of SNP TSC0027734
aaccaactaatt

SEQ ID NO: 316983 - DNA, 12 bp, Artificial Sequence
  Oligonucleotide primer for the detection of SNP TSC0027734
ggaaattataga

SEQ ID NO: 316984 - DNA, 12 bp, Artificial Sequence
  Oligonucleotide primer for the detection of SNP TSC0027734
gattagttaatt

SEQ ID NO: 316985 - DNA, 12 bp, Artificial Sequence
  Oligonucleotide primer for the detection of SNP TSC0027735
taggttaggtat

SEQ ID NO: 316986 - DNA, 12 bp, Artificial Sequence
  Oligonucleotide primer for the detection of SNP TSC0027735
taggttaggtac

SEQ ID NO: 316987 - DNA, 12 bp, Artificial Sequence
  Oligonucleotide primer for the detection of SNP TSC0027735
acaaaccaaaca

SEQ ID NO: 316988 - DNA, 12 bp, Artificial Sequence
  Oligonucleotide primer for the detection of SNP TSC0027740
ataaaccttata

SEQ ID NO: 316989 - DNA, 12 bp, Artificial Sequence
  Oligonucleotide primer for the detection of SNP TSC0027740
tagtgaggtgat

SEQ ID NO: 316990 - DNA, 12 bp, Artificial Sequence
  Oligonucleotide primer for the detection of SNP TSC0027740
tagtgaggtgac

SEQ ID NO: 316991 - DNA, 12 bp, Artificial Sequence
  Oligonucleotide primer for the detection of SNP TSC0027740
caataaaataac

SEQ ID NO: 316992 - DNA, 12 bp, Artificial Sequence
  Oligonucleotide primer for the detection of SNP TSC0027740
atgagttttgtg

SEQ ID NO: 316993 - DNA, 12 bp, Artificial Sequence
  Oligonucleotide primer for the detection of SNP TSC0027741
ttacatcctcac

SEQ ID NO: 316994 - DNA, 12 bp, Artificial Sequence
  Oligonucleotide primer for the detection of SNP TSC0027741
ttacatcctcgc

SEQ ID NO: 316995 - DNA, 12 bp, Artificial Sequence
  Oligonucleotide primer for the detection of SNP TSC0027741
attctctttcta

SEQ ID NO: 316996 - DNA, 12 bp, Artificial Sequence
  Oligonucleotide primer for the detection of SNP TSC0027741
ttgtatttttgt

SEQ ID NO: 316997 - DNA, 12 bp, Artificial Sequence
  Oligonucleotide primer for the detection of SNP TSC0027741
ttgtattttcgt

SEQ ID NO: 316998 - DNA, 12 bp, Artificial Sequence
  Oligonucleotide primer for the detection of SNP TSC0027742
aaatacataaat

SEQ ID NO: 316999 - DNA, 12 bp, Artificial Sequence
  Oligonucleotide primer for the detection of SNP TSC0027742
ttgtgtttagtt

SEQ ID NO: 317000 - DNA, 12 bp, Artificial Sequence
  Oligonucleotide primer for the detection of SNP TSC0027742
ttgcgtttagtt

SEQ ID NO: 317001 - DNA, 12 bp, Artificial Sequence
  Oligonucleotide primer for the detection of SNP TSC0027742
actacgctcaac

SEQ ID NO: 317002 - DNA, 12 bp, Artificial Sequence
  Oligonucleotide primer for the detection of SNP TSC0027742
aaatatataagt

SEQ ID NO: 317003 - DNA, 12 bp, Artificial Sequence
  Oligonucleotide primer for the detection of SNP TSC0027743
tcccttacccac

SEQ ID NO: 317004 - DNA, 12 bp, Artificial Sequence
  Oligonucleotide primer for the detection of SNP TSC0027743
agaggtatgagg

SEQ ID NO: 317005 - DNA, 12 bp, Artificial Sequence
  Oligonucleotide primer for the detection of SNP TSC0027750
atctctacaaac

SEQ ID NO: 317006 - DNA, 12 bp, Artificial Sequence
  Oligonucleotide primer for the detection of SNP TSC0027750
ggataaagatgg

SEQ ID NO: 317007 - DNA, 12 bp, Artificial Sequence
  Oligonucleotide primer for the detection of SNP TSC0027753
ctaatttctcat

SEQ ID NO: 317008 - DNA, 12 bp, Artificial Sequence
  Oligonucleotide primer for the detection of SNP TSC0027753
ttagagtttggg

SEQ ID NO: 317009 - DNA, 12 bp, Artificial Sequence
  Oligonucleotide primer for the detection of SNP TSC0027754
ataacctacaaa

SEQ ID NO: 317010 - DNA, 12 bp, Artificial Sequence
  Oligonucleotide primer for the detection of SNP TSC0027754
ttagggttttgg

SEQ ID NO: 317011 - DNA, 12 bp, Artificial Sequence
  Oligonucleotide primer for the detection of SNP TSC0027754
agtaatttgtag

SEQ ID NO: 317012 - DNA, 12 bp, Artificial Sequence
  Oligonucleotide primer for the detection of SNP TSC0027760
cacacacatacg

SEQ ID NO: 317013 - DNA, 12 bp, Artificial Sequence
  Oligonucleotide primer for the detection of SNP TSC0027760
gtatatatatat

SEQ ID NO: 317014 - DNA, 12 bp, Artificial Sequence
  Oligonucleotide primer for the detection of SNP TSC0027760
tatatatatgtg

SEQ ID NO: 317015 - DNA, 12 bp, Artificial Sequence
  Oligonucleotide primer for the detection of SNP TSC0027760
tatatatatgcg

SEQ ID NO: 317016 - DNA, 12 bp, Artificial Sequence
  Oligonucleotide primer for the detection of SNP TSC0027763
tttcgtaggtgg

SEQ ID NO: 317017 - DNA, 12 bp, Artificial Sequence
  Oligonucleotide primer for the detection of SNP TSC0027763
ccccacaaataa

SEQ ID NO: 317018 - DNA, 12 bp, Artificial Sequence
  Oligonucleotide primer for the detection of SNP TSC0027763
ccccgcaaataa

SEQ ID NO: 317019 - DNA, 12 bp, Artificial Sequence
  Oligonucleotide primer for the detection of SNP TSC0027763
gtgatatatatt

SEQ ID NO: 317020 - DNA, 12 bp, Artificial Sequence
  Oligonucleotide primer for the detection of SNP TSC0027765
atattttttata

SEQ ID NO: 317021 - DNA, 12 bp, Artificial Sequence
  Oligonucleotide primer for the detection of SNP TSC0027765
gaaatgttattt

SEQ ID NO: 317022 - DNA, 12 bp, Artificial Sequence
  Oligonucleotide primer for the detection of SNP TSC0027765
gaaacgttattt

SEQ ID NO: 317023 - DNA, 12 bp, Artificial Sequence
  Oligonucleotide primer for the detection of SNP TSC0027765
taaaacaccatc

SEQ ID NO: 317024 - DNA, 12 bp, Artificial Sequence
  Oligonucleotide primer for the detection of SNP TSC0027765
taaaacgccatc

SEQ ID NO: 317025 - DNA, 12 bp, Artificial Sequence
  Oligonucleotide primer for the detection of SNP TSC0027768
ccttcttaaaaa

SEQ ID NO: 317026 - DNA, 12 bp, Artificial Sequence
  Oligonucleotide primer for the detection of SNP TSC0027768
aaggaaaatatt

SEQ ID NO: 317027 - DNA, 12 bp, Artificial Sequence
  Oligonucleotide primer for the detection of SNP TSC0027768
aaaaaatatcaa

SEQ ID NO: 317028 - DNA, 12 bp, Artificial Sequence
  Oligonucleotide primer for the detection of SNP TSC0027770
tacaaacataaa

SEQ ID NO: 317029 - DNA, 12 bp, Artificial Sequence
  Oligonucleotide primer for the detection of SNP TSC0027770
ttggttaggtgt

SEQ ID NO: 317030 - DNA, 12 bp, Artificial Sequence
  Oligonucleotide primer for the detection of SNP TSC0027770
tataggtatgag

SEQ ID NO: 317031 - DNA, 12 bp, Artificial Sequence
  Oligonucleotide primer for the detection of SNP TSC0027771
tagtagagatga

SEQ ID NO: 317032 - DNA, 12 bp, Artificial Sequence
  Oligonucleotide primer for the detection of SNP TSC0027772
aatatgaggaaa

SEQ ID NO: 317033 - DNA, 12 bp, Artificial Sequence
  Oligonucleotide primer for the detection of SNP TSC0027773
ggttgagatagg

SEQ ID NO: 317034 - DNA, 12 bp, Artificial Sequence
  Oligonucleotide primer for the detection of SNP TSC0027773
atttaagtaatt

SEQ ID NO: 317035 - DNA, 12 bp, Artificial Sequence
  Oligonucleotide primer for the detection of SNP TSC0027776
atttaccatatt

SEQ ID NO: 317036 - DNA, 12 bp, Artificial Sequence
  Oligonucleotide primer for the detection of SNP TSC0027777
gttgggtgtggt

SEQ ID NO: 317037 - DNA, 12 bp, Artificial Sequence
  Oligonucleotide primer for the detection of SNP TSC0027777
actaaatataat

SEQ ID NO: 317038 - DNA, 12 bp, Artificial Sequence
  Oligonucleotide primer for the detection of SNP TSC0027777
attataggtgag

SEQ ID NO: 317039 - DNA, 12 bp, Artificial Sequence
  Oligonucleotide primer for the detection of SNP TSC0027782
tattgttgttta

SEQ ID NO: 317040 - DNA, 12 bp, Artificial Sequence
  Oligonucleotide primer for the detection of SNP TSC0027782
tattgtcgttta

SEQ ID NO: 317041 - DNA, 12 bp, Artificial Sequence
  Oligonucleotide primer for the detection of SNP TSC0027784
gattgggtgggg

SEQ ID NO: 317042 - DNA, 12 bp, Artificial Sequence
  Oligonucleotide primer for the detection of SNP TSC0027784
tagaagtgagtt

SEQ ID NO: 317043 - DNA, 12 bp, Artificial Sequence
  Oligonucleotide primer for the detection of SNP TSC0027785
aactccattttc

SEQ ID NO: 317044 - DNA, 12 bp, Artificial Sequence
  Oligonucleotide primer for the detection of SNP TSC0027785
gttgagaagtta

SEQ ID NO: 317045 - DNA, 12 bp, Artificial Sequence
  Oligonucleotide primer for the detection of SNP TSC0027786
ataaattactat

SEQ ID NO: 317046 - DNA, 12 bp, Artificial Sequence
  Oligonucleotide primer for the detection of SNP TSC0027786
aaaaataaaaga

SEQ ID NO: 317047 - DNA, 12 bp, Artificial Sequence
  Oligonucleotide primer for the detection of SNP TSC0027788
tattattagttt

SEQ ID NO: 317048 - DNA, 12 bp, Artificial Sequence
  Oligonucleotide primer for the detection of SNP TSC0027788
cactattaactt

SEQ ID NO: 317049 - DNA, 12 bp, Artificial Sequence
  Oligonucleotide primer for the detection of SNP TSC0027798
aaaatacctata

SEQ ID NO: 317050 - DNA, 12 bp, Artificial Sequence
  Oligonucleotide primer for the detection of SNP TSC0027798
ggagttaaggga

SEQ ID NO: 317051 - DNA, 12 bp, Artificial Sequence
  Oligonucleotide primer for the detection of SNP TSC0027798
ggggtgtttgtg

SEQ ID NO: 317052 - DNA, 12 bp, Artificial Sequence
  Oligonucleotide primer for the detection of SNP TSC0027802
tacatacttttt

SEQ ID NO: 317053 - DNA, 12 bp, Artificial Sequence
  Oligonucleotide primer for the detection of SNP TSC0027802
atagaagagtag

SEQ ID NO: 317054 - DNA, 12 bp, Artificial Sequence
  Oligonucleotide primer for the detection of SNP TSC0027802
acaaaaaaataa

SEQ ID NO: 317055 - DNA, 12 bp, Artificial Sequence
  Oligonucleotide primer for the detection of SNP TSC0027802
tatatgtttttt

SEQ ID NO: 317056 - DNA, 12 bp, Artificial Sequence
  Oligonucleotide primer for the detection of SNP TSC0027803
aaaggatgagaa

SEQ ID NO: 317057 - DNA, 12 bp, Artificial Sequence
  Oligonucleotide primer for the detection of SNP TSC0027804
ccgccccaaaat

SEQ ID NO: 317058 - DNA, 12 bp, Artificial Sequence
  Oligonucleotide primer for the detection of SNP TSC0027804
ccgccccgaaat

SEQ ID NO: 317059 - DNA, 12 bp, Artificial Sequence
  Oligonucleotide primer for the detection of SNP TSC0027804
tttagtgaaaat

SEQ ID NO: 317060 - DNA, 12 bp, Artificial Sequence
  Oligonucleotide primer for the detection of SNP TSC0027804
tttagcgaaaat

SEQ ID NO: 317061 - DNA, 12 bp, Artificial Sequence
  Oligonucleotide primer for the detection of SNP TSC0027804
actcaacgaaaa

SEQ ID NO: 317062 - DNA, 12 bp, Artificial Sequence
  Oligonucleotide primer for the detection of SNP TSC0027804
tgttttgagatt

SEQ ID NO: 317063 - DNA, 12 bp, Artificial Sequence
  Oligonucleotide primer for the detection of SNP TSC0027804
cgttttgagatt

SEQ ID NO: 317064 - DNA, 12 bp, Artificial Sequence
  Oligonucleotide primer for the detection of SNP TSC0027804
tgtttcgagatt

SEQ ID NO: 317065 - DNA, 12 bp, Artificial Sequence
  Oligonucleotide primer for the detection of SNP TSC0027804
cgtttcgagatt

SEQ ID NO: 317066 - DNA, 12 bp, Artificial Sequence
  Oligonucleotide primer for the detection of SNP TSC0027805
actaaatcacca

SEQ ID NO: 317067 - DNA, 12 bp, Artificial Sequence
  Oligonucleotide primer for the detection of SNP TSC0027805
actaaatcaccg

SEQ ID NO: 317068 - DNA, 12 bp, Artificial Sequence
  Oligonucleotide primer for the detection of SNP TSC0027805
gctaaatcacca

SEQ ID NO: 317069 - DNA, 12 bp, Artificial Sequence
  Oligonucleotide primer for the detection of SNP TSC0027805
gctaaatcaccg

SEQ ID NO: 317070 - DNA, 12 bp, Artificial Sequence
  Oligonucleotide primer for the detection of SNP TSC0027805
gaaaatagattt

SEQ ID NO: 317071 - DNA, 12 bp, Artificial Sequence
  Oligonucleotide primer for the detection of SNP TSC0027805
aaaaacaaatct

SEQ ID NO: 317072 - DNA, 12 bp, Artificial Sequence
  Oligonucleotide primer for the detection of SNP TSC0027805
gaaaacaaatct

SEQ ID NO: 317073 - DNA, 12 bp, Artificial Sequence
  Oligonucleotide primer for the detection of SNP TSC0027805
gttaagttattg

SEQ ID NO: 317074 - DNA, 12 bp, Artificial Sequence
  Oligonucleotide primer for the detection of SNP TSC0027805
gttaagttatcg

SEQ ID NO: 317075 - DNA, 12 bp, Artificial Sequence
  Oligonucleotide primer for the detection of SNP TSC0027806
ccccacccccca

SEQ ID NO: 317076 - DNA, 12 bp, Artificial Sequence
  Oligonucleotide primer for the detection of SNP TSC0027806
ccccgcccccca

SEQ ID NO: 317077 - DNA, 12 bp, Artificial Sequence
  Oligonucleotide primer for the detection of SNP TSC0027806
tgggtgtggtga

SEQ ID NO: 317078 - DNA, 12 bp, Artificial Sequence
  Oligonucleotide primer for the detection of SNP TSC0027806
tgggcgtggtga

SEQ ID NO: 317079 - DNA, 12 bp, Artificial Sequence
  Oligonucleotide primer for the detection of SNP TSC0027806
tgggtgcggtga

SEQ ID NO: 317080 - DNA, 12 bp, Artificial Sequence
  Oligonucleotide primer for the detection of SNP TSC0027806
tgggtgtggcga

SEQ ID NO: 317081 - DNA, 12 bp, Artificial Sequence
  Oligonucleotide primer for the detection of SNP TSC0027806
tgggcgcggtga

SEQ ID NO: 317082 - DNA, 12 bp, Artificial Sequence
  Oligonucleotide primer for the detection of SNP TSC0027806
tgggcgtggcga

SEQ ID NO: 317083 - DNA, 12 bp, Artificial Sequence
  Oligonucleotide primer for the detection of SNP TSC0027806
tgggtgcggcga

SEQ ID NO: 317084 - DNA, 12 bp, Artificial Sequence
  Oligonucleotide primer for the detection of SNP TSC0027806
tgggcgcggcga

SEQ ID NO: 317085 - DNA, 12 bp, Artificial Sequence
  Oligonucleotide primer for the detection of SNP TSC0027806
aaacacaacgaa

SEQ ID NO: 317086 - DNA, 12 bp, Artificial Sequence
  Oligonucleotide primer for the detection of SNP TSC0027806
aaacgcaacaaa

SEQ ID NO: 317087 - DNA, 12 bp, Artificial Sequence
  Oligonucleotide primer for the detection of SNP TSC0027806
aaacacgacgaa

SEQ ID NO: 317088 - DNA, 12 bp, Artificial Sequence
  Oligonucleotide primer for the detection of SNP TSC0027806
aaacgcaacgaa

SEQ ID NO: 317089 - DNA, 12 bp, Artificial Sequence
  Oligonucleotide primer for the detection of SNP TSC0027806
aaacgcgacaaa

SEQ ID NO: 317090 - DNA, 12 bp, Artificial Sequence
  Oligonucleotide primer for the detection of SNP TSC0027806
aaacgcgacgaa

SEQ ID NO: 317091 - DNA, 12 bp, Artificial Sequence
  Oligonucleotide primer for the detection of SNP TSC0027806
cgttttttattt

SEQ ID NO: 317092 - DNA, 12 bp, Artificial Sequence
  Oligonucleotide primer for the detection of SNP TSC0027806
tgttttttattc

SEQ ID NO: 317093 - DNA, 12 bp, Artificial Sequence
  Oligonucleotide primer for the detection of SNP TSC0027806
cgttttttattc

SEQ ID NO: 317094 - DNA, 12 bp, Artificial Sequence
  Oligonucleotide primer for the detection of SNP TSC0027807
caaacatacccc

SEQ ID NO: 317095 - DNA, 12 bp, Artificial Sequence
  Oligonucleotide primer for the detection of SNP TSC0027807
caaacgtacccc

SEQ ID NO: 317096 - DNA, 12 bp, Artificial Sequence
  Oligonucleotide primer for the detection of SNP TSC0027807
ggtggggtaagg

SEQ ID NO: 317097 - DNA, 12 bp, Artificial Sequence
  Oligonucleotide primer for the detection of SNP TSC0027807
ggcggggtaagg

SEQ ID NO: 317098 - DNA, 12 bp, Artificial Sequence
  Oligonucleotide primer for the detection of SNP TSC0027809
atatcatcaact

SEQ ID NO: 317099 - DNA, 12 bp, Artificial Sequence
  Oligonucleotide primer for the detection of SNP TSC0027809
atatcatcgact

SEQ ID NO: 317100 - DNA, 12 bp, Artificial Sequence
  Oligonucleotide primer for the detection of SNP TSC0027809
aaaattttttag

SEQ ID NO: 317101 - DNA, 12 bp, Artificial Sequence
  Oligonucleotide primer for the detection of SNP TSC0027810
ttctatcttact

SEQ ID NO: 317102 - DNA, 12 bp, Artificial Sequence
  Oligonucleotide primer for the detection of SNP TSC0027810
ggatgaaaaggg

SEQ ID NO: 317103 - DNA, 12 bp, Artificial Sequence
  Oligonucleotide primer for the detection of SNP TSC0027810
ggacgaaaaggg

SEQ ID NO: 317104 - DNA, 12 bp, Artificial Sequence
  Oligonucleotide primer for the detection of SNP TSC0027811
gtatttagtaag

SEQ ID NO: 317105 - DNA, 12 bp, Artificial Sequence
  Oligonucleotide primer for the detection of SNP TSC0027813
taacccaattaa

SEQ ID NO: 317106 - DNA, 12 bp, Artificial Sequence
  Oligonucleotide primer for the detection of SNP TSC0027813
accccttaactt

SEQ ID NO: 317107 - DNA, 12 bp, Artificial Sequence
  Oligonucleotide primer for the detection of SNP TSC0027813
tgatttagttgg

SEQ ID NO: 317108 - DNA, 12 bp, Artificial Sequence
  Oligonucleotide primer for the detection of SNP TSC0027815
cataacacccaa

SEQ ID NO: 317109 - DNA, 12 bp, Artificial Sequence
  Oligonucleotide primer for the detection of SNP TSC0027815
cataacgcccaa

SEQ ID NO: 317110 - DNA, 12 bp, Artificial Sequence
  Oligonucleotide primer for the detection of SNP TSC0027815
aaatactctccc

SEQ ID NO: 317111 - DNA, 12 bp, Artificial Sequence
  Oligonucleotide primer for the detection of SNP TSC0027815
tatggtgtttag

SEQ ID NO: 317112 - DNA, 12 bp, Artificial Sequence
  Oligonucleotide primer for the detection of SNP TSC0027815
tatggcgtttag

SEQ ID NO: 317113 - DNA, 12 bp, Artificial Sequence
  Oligonucleotide primer for the detection of SNP TSC0027816
tataaaccataa

SEQ ID NO: 317114 - DNA, 12 bp, Artificial Sequence
  Oligonukleotid-Primer
tttgggttgggt

SEQ ID NO: 317115 - DNA, 12 bp, Artificial Sequence
  Oligonucleotide primer for the detection of SNP TSC0027816
ttcgggttgggt

SEQ ID NO: 317116 - DNA, 12 bp, Artificial Sequence
  Oligonucleotide primer for the detection of SNP TSC0027816
tttgggttgggc

SEQ ID NO: 317117 - DNA, 12 bp, Artificial Sequence
  Oligonucleotide primer for the detection of SNP TSC0027816
ttcgggttgggc

SEQ ID NO: 317118 - DNA, 12 bp, Artificial Sequence
  Oligonucleotide primer for the detection of SNP TSC0027816
ccccaaactaaa

SEQ ID NO: 317119 - DNA, 12 bp, Artificial Sequence
  Oligonucleotide primer for the detection of SNP TSC0027816
ccccgaactaaa

SEQ ID NO: 317120 - DNA, 12 bp, Artificial Sequence
  Oligonucleotide primer for the detection of SNP TSC0027817
atgatagggtgg

SEQ ID NO: 317121 - DNA, 12 bp, Artificial Sequence
  Oligonucleotide primer for the detection of SNP TSC0027817
ataacaaaataa

SEQ ID NO: 317122 - DNA, 12 bp, Artificial Sequence
  Oligonucleotide primer for the detection of SNP TSC0027818
attaacccacct

SEQ ID NO: 317123 - DNA, 12 bp, Artificial Sequence
  Oligonucleotide primer for the detection of SNP TSC0027818
gataaattgaaa

SEQ ID NO: 317124 - DNA, 12 bp, Artificial Sequence
  Oligonucleotide primer for the detection of SNP TSC0027818
gataaatcgaaa

SEQ ID NO: 317125 - DNA, 12 bp, Artificial Sequence
  Oligonucleotide primer for the detection of SNP TSC0027820
caaattcacctt

SEQ ID NO: 317126 - DNA, 12 bp, Artificial Sequence
  Oligonucleotide primer for the detection of SNP TSC0027820
tttggataggaa

SEQ ID NO: 317127 - DNA, 12 bp, Artificial Sequence
  Oligonucleotide primer for the detection of SNP TSC0027820
ttcggataggaa

SEQ ID NO: 317128 - DNA, 12 bp, Artificial Sequence
  Oligonucleotide primer for the detection of SNP TSC0027821
gtgggatttgta

SEQ ID NO: 317129 - DNA, 12 bp, Artificial Sequence
  Oligonucleotide primer for the detection of SNP TSC0027821
gtgggattcgta

SEQ ID NO: 317130 - DNA, 12 bp, Artificial Sequence
  Oligonucleotide primer for the detection of SNP TSC0027821
ataaaatccaca

SEQ ID NO: 317131 - DNA, 12 bp, Artificial Sequence
  Oligonucleotide primer for the detection of SNP TSC0027821
ataaaatccgca

SEQ ID NO: 317132 - DNA, 12 bp, Artificial Sequence
  Oligonucleotide primer for the detection of SNP TSC0027821
ttaataggtagt

SEQ ID NO: 317133 - DNA, 12 bp, Artificial Sequence
  Oligonucleotide primer for the detection of SNP TSC0027822
catcattcccct

SEQ ID NO: 317134 - DNA, 12 bp, Artificial Sequence
  Oligonucleotide primer for the detection of SNP TSC0027822
aggtttttaagt

SEQ ID NO: 317135 - DNA, 12 bp, Artificial Sequence
  Oligonucleotide primer for the detection of SNP TSC0027822
aaaacttccaaa

SEQ ID NO: 317136 - DNA, 12 bp, Artificial Sequence
  Oligonucleotide primer for the detection of SNP TSC0027825
ttatccaacccc

SEQ ID NO: 317137 - DNA, 12 bp, Artificial Sequence
  Oligonucleotide primer for the detection of SNP TSC0027825
tagggtataggt

SEQ ID NO: 317138 - DNA, 12 bp, Artificial Sequence
  Oligonucleotide primer for the detection of SNP TSC0027828
ctaaacattacc

SEQ ID NO: 317139 - DNA, 12 bp, Artificial Sequence
  Oligonucleotide primer for the detection of SNP TSC0027828
ctaaacgttacc

SEQ ID NO: 317140 - DNA, 12 bp, Artificial Sequence
  Oligonucleotide primer for the detection of SNP TSC0027828
attaagtattta

SEQ ID NO: 317141 - DNA, 12 bp, Artificial Sequence
  Oligonucleotide primer for the detection of SNP TSC0027828
accaaacaccca

SEQ ID NO: 317142 - DNA, 12 bp, Artificial Sequence
  Oligonucleotide primer for the detection of SNP TSC0027828
ttgaatgttgtt

SEQ ID NO: 317143 - DNA, 12 bp, Artificial Sequence
  Oligonucleotide primer for the detection of SNP TSC0027828
ttgaacgttgtt

SEQ ID NO: 317144 - DNA, 12 bp, Artificial Sequence
  Oligonucleotide primer for the detection of SNP TSC0027828
ttgaatgttgtc

SEQ ID NO: 317145 - DNA, 12 bp, Artificial Sequence
  Oligonucleotide primer for the detection of SNP TSC0027828
ttgaacgttgtc

SEQ ID NO: 317146 - DNA, 12 bp, Artificial Sequence
  Oligonucleotide primer for the detection of SNP TSC0027829
aatataaatact

SEQ ID NO: 317147 - DNA, 12 bp, Artificial Sequence
  Oligonucleotide primer for the detection of SNP TSC0027829
gatataaatact

SEQ ID NO: 317148 - DNA, 12 bp, Artificial Sequence
  Oligonucleotide primer for the detection of SNP TSC0027829
tagatatattta

SEQ ID NO: 317149 - DNA, 12 bp, Artificial Sequence
  Oligonucleotide primer for the detection of SNP TSC0027829
caaacacatcca

SEQ ID NO: 317150 - DNA, 12 bp, Artificial Sequence
  Oligonucleotide primer for the detection of SNP TSC0027829
ggtgtgggtgtt

SEQ ID NO: 317151 - DNA, 12 bp, Artificial Sequence
  Oligonucleotide primer for the detection of SNP TSC0027830
tttaaaacaaat

SEQ ID NO: 317152 - DNA, 12 bp, Artificial Sequence
  Oligonucleotide primer for the detection of SNP TSC0027831
actccccctaca

SEQ ID NO: 317153 - DNA, 12 bp, Artificial Sequence
  Oligonucleotide primer for the detection of SNP TSC0027831
actccccctacg

SEQ ID NO: 317154 - DNA, 12 bp, Artificial Sequence
  Oligonucleotide primer for the detection of SNP TSC0027831
aggtttggaaat

SEQ ID NO: 317155 - DNA, 12 bp, Artificial Sequence
  Oligonucleotide primer for the detection of SNP TSC0027831
ttttttttacgt

SEQ ID NO: 317156 - DNA, 12 bp, Artificial Sequence
  Oligonucleotide primer for the detection of SNP TSC0027833
ttcaaaaaaact

SEQ ID NO: 317157 - DNA, 12 bp, Artificial Sequence
  Oligonucleotide primer for the detection of SNP TSC0027833
tgaggtatatta

SEQ ID NO: 317158 - DNA, 12 bp, Artificial Sequence
  Oligonucleotide primer for the detection of SNP TSC0027834
atataaaccata

SEQ ID NO: 317159 - DNA, 12 bp, Artificial Sequence
  Oligonucleotide primer for the detection of SNP TSC0027834
ataaggattatt

SEQ ID NO: 317160 - DNA, 12 bp, Artificial Sequence
  Oligonucleotide primer for the detection of SNP TSC0027834
ataaaaatcatt

SEQ ID NO: 317161 - DNA, 12 bp, Artificial Sequence
  Oligonucleotide primer for the detection of SNP TSC0027834
gtgtgggttatg

SEQ ID NO: 317162 - DNA, 12 bp, Artificial Sequence
  Oligonucleotide primer for the detection of SNP TSC0027835
cttaacctcttt

SEQ ID NO: 317163 - DNA, 12 bp, Artificial Sequence
  Oligonucleotide primer for the detection of SNP TSC0027835
ggggaataggag

SEQ ID NO: 317164 - DNA, 12 bp, Artificial Sequence
  Oligonucleotide primer for the detection of SNP TSC0027837
tttaccaaaaac

SEQ ID NO: 317165 - DNA, 12 bp, Artificial Sequence
  Oligonucleotide primer for the detection of SNP TSC0027837
gaattaaatttt

SEQ ID NO: 317166 - DNA, 12 bp, Artificial Sequence
  Oligonucleotide primer for the detection of SNP TSC0027837
aaaccaaaccct

SEQ ID NO: 317167 - DNA, 12 bp, Artificial Sequence
  Oligonucleotide primer for the detection of SNP TSC0027837
ttgttagaggtt

SEQ ID NO: 317168 - DNA, 12 bp, Artificial Sequence
  Oligonucleotide primer for the detection of SNP TSC0027841
ctattaaatttt

SEQ ID NO: 317169 - DNA, 12 bp, Artificial Sequence
  Oligonucleotide primer for the detection of SNP TSC0027841
gggtggggaaaa

SEQ ID NO: 317170 - DNA, 12 bp, Artificial Sequence
  Oligonucleotide primer for the detection of SNP TSC0027851
acgaaaccaaaa

SEQ ID NO: 317171 - DNA, 12 bp, Artificial Sequence
  Oligonucleotide primer for the detection of SNP TSC0027851
gtttttattgtt

SEQ ID NO: 317172 - DNA, 12 bp, Artificial Sequence
  Oligonucleotide primer for the detection of SNP TSC0027851
acctccactacc

SEQ ID NO: 317173 - DNA, 12 bp, Artificial Sequence
  Oligonucleotide primer for the detection of SNP TSC0027851
gtggggttaggg

SEQ ID NO: 317174 - DNA, 12 bp, Artificial Sequence
  Oligonucleotide primer for the detection of SNP TSC0027851
gcggggttaggg

SEQ ID NO: 317175 - DNA, 12 bp, Artificial Sequence
  Oligonucleotide primer for the detection of SNP TSC0027852
aataacttaacc

SEQ ID NO: 317176 - DNA, 12 bp, Artificial Sequence
  Oligonucleotide primer for the detection of SNP TSC0027852
gttgtaatggag

SEQ ID NO: 317177 - DNA, 12 bp, Artificial Sequence
  Oligonucleotide primer for the detection of SNP TSC0027852
ggtaatttggtt

SEQ ID NO: 317178 - DNA, 12 bp, Artificial Sequence
  Oligonucleotide primer for the detection of SNP TSC0027855
caaaattaatcc

SEQ ID NO: 317179 - DNA, 12 bp, Artificial Sequence
  Oligonucleotide primer for the detection of SNP TSC0027855
agaatttattta

SEQ ID NO: 317180 - DNA, 12 bp, Artificial Sequence
  Oligonucleotide primer for the detection of SNP TSC0027856
caccaactccaa

SEQ ID NO: 317181 - DNA, 12 bp, Artificial Sequence
  Oligonucleotide primer for the detection of SNP TSC0027856
cgccaactccaa

SEQ ID NO: 317182 - DNA, 12 bp, Artificial Sequence
  Oligonucleotide primer for the detection of SNP TSC0027856
caatccttaacc

SEQ ID NO: 317183 - DNA, 12 bp, Artificial Sequence
  Oligonucleotide primer for the detection of SNP TSC0027856
tgttagttttag

SEQ ID NO: 317184 - DNA, 12 bp, Artificial Sequence
  Oligonucleotide primer for the detection of SNP TSC0027856
cgttagttttag

SEQ ID NO: 317185 - DNA, 12 bp, Artificial Sequence
  Oligonucleotide primer for the detection of SNP TSC0027857
ccccaaaaaccc

SEQ ID NO: 317186 - DNA, 12 bp, Artificial Sequence
  Oligonucleotide primer for the detection of SNP TSC0027857
ccccgaaaaccc

SEQ ID NO: 317187 - DNA, 12 bp, Artificial Sequence
  Oligonukleotid-Primer
gtttagtggatg

SEQ ID NO: 317188 - DNA, 12 bp, Artificial Sequence
  Oligonucleotide primer for the detection of SNP TSC0027857
acttaataaata

SEQ ID NO: 317189 - DNA, 12 bp, Artificial Sequence
  Oligonucleotide primer for the detection of SNP TSC0027857
ttttgaggattt

SEQ ID NO: 317190 - DNA, 12 bp, Artificial Sequence
  Oligonucleotide primer for the detection of SNP TSC0027857
tttcgaggattt

SEQ ID NO: 317191 - DNA, 12 bp, Artificial Sequence
  Oligonucleotide primer for the detection of SNP TSC0027858
cattacattcac

SEQ ID NO: 317192 - DNA, 12 bp, Artificial Sequence
  Oligonucleotide primer for the detection of SNP TSC0027858
ggtgtaggggaa

SEQ ID NO: 317193 - DNA, 12 bp, Artificial Sequence
  Oligonucleotide primer for the detection of SNP TSC0027859
taatatctctaa

SEQ ID NO: 317194 - DNA, 12 bp, Artificial Sequence
  Oligonucleotide primer for the detection of SNP TSC0027859
agaagtatttat

SEQ ID NO: 317195 - DNA, 12 bp, Artificial Sequence
  Oligonucleotide primer for the detection of SNP TSC0027859
taaaaatattta

SEQ ID NO: 317196 - DNA, 12 bp, Artificial Sequence
  Oligonucleotide primer for the detection of SNP TSC0027859
tgatatttttgg

SEQ ID NO: 317197 - DNA, 12 bp, Artificial Sequence
  Oligonucleotide primer for the detection of SNP TSC0027860
atcttcacaccc

SEQ ID NO: 317198 - DNA, 12 bp, Artificial Sequence
  Oligonucleotide primer for the detection of SNP TSC0027861
taaaaactaatc

SEQ ID NO: 317199 - DNA, 12 bp, Artificial Sequence
  Oligonucleotide primer for the detection of SNP TSC0027861
ggttaagtgtta

SEQ ID NO: 317200 - DNA, 12 bp, Artificial Sequence
  Oligonucleotide primer for the detection of SNP TSC0027861
ggttaagcgtta

SEQ ID NO: 317201 - DNA, 12 bp, Artificial Sequence
  Oligonucleotide primer for the detection of SNP TSC0027861
aaccaaacatca

SEQ ID NO: 317202 - DNA, 12 bp, Artificial Sequence
  Oligonucleotide primer for the detection of SNP TSC0027861
aaccaaacgtca

SEQ ID NO: 317203 - DNA, 12 bp, Artificial Sequence
  Oligonucleotide primer for the detection of SNP TSC0027861
tgagagttgatt

SEQ ID NO: 317204 - DNA, 12 bp, Artificial Sequence
  Oligonucleotide primer for the detection of SNP TSC0027863
atattacccatt

SEQ ID NO: 317205 - DNA, 12 bp, Artificial Sequence
  Oligonucleotide primer for the detection of SNP TSC0027863
atattacccgtt

SEQ ID NO: 317206 - DNA, 12 bp, Artificial Sequence
  Oligonucleotide primer for the detection of SNP TSC0027863
gtgatttttatg

SEQ ID NO: 317207 - DNA, 12 bp, Artificial Sequence
  Oligonucleotide primer for the detection of SNP TSC0027863
ataactctcata

SEQ ID NO: 317208 - DNA, 12 bp, Artificial Sequence
  Oligonucleotide primer for the detection of SNP TSC0027863
gtgttgtttgtt

SEQ ID NO: 317209 - DNA, 12 bp, Artificial Sequence
  Oligonucleotide primer for the detection of SNP TSC0027863
gtgttgttcgtt

SEQ ID NO: 317210 - DNA, 12 bp, Artificial Sequence
  Oligonucleotide primer for the detection of SNP TSC0027866
tttttataaaag

SEQ ID NO: 317211 - DNA, 12 bp, Artificial Sequence
  Oligonucleotide primer for the detection of SNP TSC0027867
taaataaattat

SEQ ID NO: 317212 - DNA, 12 bp, Artificial Sequence
  Oligonucleotide primer for the detection of SNP TSC0027868
cttaaaacccct

SEQ ID NO: 317213 - DNA, 12 bp, Artificial Sequence
  Oligonucleotide primer for the detection of SNP TSC0027869
aaaaatatcccc

SEQ ID NO: 317214 - DNA, 12 bp, Artificial Sequence
  Oligonucleotide primer for the detection of SNP TSC0027869
tttaaagttttg

SEQ ID NO: 317215 - DNA, 12 bp, Artificial Sequence
  Oligonucleotide primer for the detection of SNP TSC0027869
cccaaaactcta

SEQ ID NO: 317216 - DNA, 12 bp, Artificial Sequence
  Oligonucleotide primer for the detection of SNP TSC0027870
tttctcaaataa

SEQ ID NO: 317217 - DNA, 12 bp, Artificial Sequence
  Oligonucleotide primer for the detection of SNP TSC0027870
aatgatgggaag

SEQ ID NO: 317218 - DNA, 12 bp, Artificial Sequence
  Oligonucleotide primer for the detection of SNP TSC0027870
tttttagatgat

SEQ ID NO: 317219 - DNA, 12 bp, Artificial Sequence
  Oligonucleotide primer for the detection of SNP TSC0027871
tctttttatttt

SEQ ID NO: 317220 - DNA, 12 bp, Artificial Sequence
  Oligonucleotide primer for the detection of SNP TSC0027874
ggtataatatat

SEQ ID NO: 317221 - DNA, 12 bp, Artificial Sequence
  Oligonucleotide primer for the detection of SNP TSC0027874
aatataacatat

SEQ ID NO: 317222 - DNA, 12 bp, Artificial Sequence
  Oligonucleotide primer for the detection of SNP TSC0027874
gatttgattttg

SEQ ID NO: 317223 - DNA, 12 bp, Artificial Sequence
  Oligonucleotide primer for the detection of SNP TSC0027874
gattcgattttg

SEQ ID NO: 317224 - DNA, 12 bp, Artificial Sequence
  Oligonucleotide primer for the detection of SNP TSC0027877
tcaaaaataata

SEQ ID NO: 317225 - DNA, 12 bp, Artificial Sequence
  Oligonucleotide primer for the detection of SNP TSC0027877
aatacatccctt

SEQ ID NO: 317226 - DNA, 12 bp, Artificial Sequence
  Oligonucleotide primer for the detection of SNP TSC0027877
ttaaagatgata

SEQ ID NO: 317227 - DNA, 12 bp, Artificial Sequence
  Oligonucleotide primer for the detection of SNP TSC0027878
agttgtattttt

SEQ ID NO: 317228 - DNA, 12 bp, Artificial Sequence
  Oligonucleotide primer for the detection of SNP TSC0027881
acaaaatacttc

SEQ ID NO: 317229 - DNA, 12 bp, Artificial Sequence
  Oligonucleotide primer for the detection of SNP TSC0027881
gaaatttaatta

SEQ ID NO: 317230 - DNA, 12 bp, Artificial Sequence
  Oligonucleotide primer for the detection of SNP TSC0027882
aaaaacaacaac

SEQ ID NO: 317231 - DNA, 12 bp, Artificial Sequence
  Oligonucleotide primer for the detection of SNP TSC0027882
tagtttttgggg

SEQ ID NO: 317232 - DNA, 12 bp, Artificial Sequence
  Oligonucleotide primer for the detection of SNP TSC0027882
tagttttcgggg

SEQ ID NO: 317233 - DNA, 12 bp, Artificial Sequence
  Oligonucleotide primer for the detection of SNP TSC0027883
ctttaaacaaac

SEQ ID NO: 317234 - DNA, 12 bp, Artificial Sequence
  Oligonucleotide primer for the detection of SNP TSC0027883
tagatttttata

SEQ ID NO: 317235 - DNA, 12 bp, Artificial Sequence
  Oligonucleotide primer for the detection of SNP TSC0027883
caaatctccaca

SEQ ID NO: 317236 - DNA, 12 bp, Artificial Sequence
  Oligonucleotide primer for the detection of SNP TSC0027883
ttttgagtaagt

SEQ ID NO: 317237 - DNA, 12 bp, Artificial Sequence
  Oligonucleotide primer for the detection of SNP TSC0027884
acacccaaaaca

SEQ ID NO: 317238 - DNA, 12 bp, Artificial Sequence
  Oligonucleotide primer for the detection of SNP TSC0027884
acacccaaaacg

SEQ ID NO: 317239 - DNA, 12 bp, Artificial Sequence
  Oligonucleotide primer for the detection of SNP TSC0027884
ctcaactaaaac

SEQ ID NO: 317240 - DNA, 12 bp, Artificial Sequence
  Oligonucleotide primer for the detection of SNP TSC0027884
ctcgactaaaac

SEQ ID NO: 317241 - DNA, 12 bp, Artificial Sequence
  Oligonucleotide primer for the detection of SNP TSC0027884
atatttagggtg

SEQ ID NO: 317242 - DNA, 12 bp, Artificial Sequence
  Oligonucleotide primer for the detection of SNP TSC0027884
atatttagggcg

SEQ ID NO: 317243 - DNA, 12 bp, Artificial Sequence
  Oligonucleotide primer for the detection of SNP TSC0027885
aatcaaaaaaac

SEQ ID NO: 317244 - DNA, 12 bp, Artificial Sequence
  Oligonucleotide primer for the detection of SNP TSC0027885
ggggtttgggtt

SEQ ID NO: 317245 - DNA, 12 bp, Artificial Sequence
  Oligonucleotide primer for the detection of SNP TSC0027885
aaaacttaaact

SEQ ID NO: 317246 - DNA, 12 bp, Artificial Sequence
  Oligonucleotide primer for the detection of SNP TSC0027885
gattaaggaagt

SEQ ID NO: 317247 - DNA, 12 bp, Artificial Sequence
  Oligonucleotide primer for the detection of SNP TSC0027886
tcctcaacttac

SEQ ID NO: 317248 - DNA, 12 bp, Artificial Sequence
  Oligonucleotide primer for the detection of SNP TSC0027888
tcatcaaaaaat

SEQ ID NO: 317249 - DNA, 12 bp, Artificial Sequence
  Oligonucleotide primer for the detection of SNP TSC0027888
attgataaaaag

SEQ ID NO: 317250 - DNA, 12 bp, Artificial Sequence
  Oligonucleotide primer for the detection of SNP TSC0027890
caactcatctat

SEQ ID NO: 317251 - DNA, 12 bp, Artificial Sequence
  Oligonucleotide primer for the detection of SNP TSC0027890
tgaagtaaagta

SEQ ID NO: 317252 - DNA, 12 bp, Artificial Sequence
  Oligonucleotide primer for the detection of SNP TSC0027891
ctccttttccaa

SEQ ID NO: 317253 - DNA, 12 bp, Artificial Sequence
  Oligonucleotide primer for the detection of SNP TSC0027891
tttgggaataat

SEQ ID NO: 317254 - DNA, 12 bp, Artificial Sequence
  Oligonucleotide primer for the detection of SNP TSC0027894
cctatccccacc

SEQ ID NO: 317255 - DNA, 12 bp, Artificial Sequence
  Oligonucleotide primer for the detection of SNP TSC0027894
tggggttttgat

SEQ ID NO: 317256 - DNA, 12 bp, Artificial Sequence
  Oligonucleotide primer for the detection of SNP TSC0027896
acaaattcttac

SEQ ID NO: 317257 - DNA, 12 bp, Artificial Sequence
  Oligonucleotide primer for the detection of SNP TSC0027896
atagtaggttta

SEQ ID NO: 317258 - DNA, 12 bp, Artificial Sequence
  Oligonucleotide primer for the detection of SNP TSC0027897
aatattaatttt

SEQ ID NO: 317259 - DNA, 12 bp, Artificial Sequence
  Oligonucleotide primer for the detection of SNP TSC0027897
tttattatttta

SEQ ID NO: 317260 - DNA, 12 bp, Artificial Sequence
  Oligonucleotide primer for the detection of SNP TSC0027898
aatttaattata

SEQ ID NO: 317261 - DNA, 12 bp, Artificial Sequence
  Oligonucleotide primer for the detection of SNP TSC0027898
aactcaaccata

SEQ ID NO: 317262 - DNA, 12 bp, Artificial Sequence
  Oligonucleotide primer for the detection of SNP TSC0027898
atgaaaataaat

SEQ ID NO: 317263 - DNA, 12 bp, Artificial Sequence
  Oligonucleotide primer for the detection of SNP TSC0027899
tatattcaaact

SEQ ID NO: 317264 - DNA, 12 bp, Artificial Sequence
  Oligonucleotide primer for the detection of SNP TSC0027899
tatttttataag

SEQ ID NO: 317265 - DNA, 12 bp, Artificial Sequence
  Oligonucleotide primer for the detection of SNP TSC0027901
aaactcttaaat

SEQ ID NO: 317266 - DNA, 12 bp, Artificial Sequence
  Oligonucleotide primer for the detection of SNP TSC0027901
tataagaaaaaa

SEQ ID NO: 317267 - DNA, 12 bp, Artificial Sequence
  Oligonucleotide primer for the detection of SNP TSC0027902
ttttctttctat

SEQ ID NO: 317268 - DNA, 12 bp, Artificial Sequence
  Oligonucleotide primer for the detection of SNP TSC0027902
gatatatatatg

SEQ ID NO: 317269 - DNA, 12 bp, Artificial Sequence
  Oligonucleotide primer for the detection of SNP TSC0027903
ctaactaccaat

SEQ ID NO: 317270 - DNA, 12 bp, Artificial Sequence
  Oligonucleotide primer for the detection of SNP TSC0027903
tatttagagagg

SEQ ID NO: 317271 - DNA, 12 bp, Artificial Sequence
  Oligonucleotide primer for the detection of SNP TSC0027903
tatccaaaaaaa

SEQ ID NO: 317272 - DNA, 12 bp, Artificial Sequence
  Oligonucleotide primer for the detection of SNP TSC0027903
ttgattgttagt

SEQ ID NO: 317273 - DNA, 12 bp, Artificial Sequence
  Oligonucleotide primer for the detection of SNP TSC0027904
accccatattaa

SEQ ID NO: 317274 - DNA, 12 bp, Artificial Sequence
  Oligonucleotide primer for the detection of SNP TSC0027904
aattttagcgtt

SEQ ID NO: 317275 - DNA, 12 bp, Artificial Sequence
  Oligonucleotide primer for the detection of SNP TSC0027904
aaccccaacact

SEQ ID NO: 317276 - DNA, 12 bp, Artificial Sequence
  Oligonucleotide primer for the detection of SNP TSC0027904
aaccccaacgct

SEQ ID NO: 317277 - DNA, 12 bp, Artificial Sequence
  Oligonucleotide primer for the detection of SNP TSC0027904
attttatgttga

SEQ ID NO: 317278 - DNA, 12 bp, Artificial Sequence
  Oligonucleotide primer for the detection of SNP TSC0027905
atttttttatgg

SEQ ID NO: 317279 - DNA, 12 bp, Artificial Sequence
  Oligonucleotide primer for the detection of SNP TSC0027905
atttttttacgg

SEQ ID NO: 317280 - DNA, 12 bp, Artificial Sequence
  Oligonucleotide primer for the detection of SNP TSC0027905
actccctcacaa

SEQ ID NO: 317281 - DNA, 12 bp, Artificial Sequence
  Oligonucleotide primer for the detection of SNP TSC0027905
actccctcacga

SEQ ID NO: 317282 - DNA, 12 bp, Artificial Sequence
  Oligonucleotide primer for the detection of SNP TSC0027906
cctctcatcaac

SEQ ID NO: 317283 - DNA, 12 bp, Artificial Sequence
  Oligonucleotide primer for the detection of SNP TSC0027906
attaggtttagg

SEQ ID NO: 317284 - DNA, 12 bp, Artificial Sequence
  Oligonucleotide primer for the detection of SNP TSC0027907
aataaaccacaa

SEQ ID NO: 317285 - DNA, 12 bp, Artificial Sequence
  Oligonucleotide primer for the detection of SNP TSC0027907
tttagggattgg

SEQ ID NO: 317286 - DNA, 12 bp, Artificial Sequence
  Oligonucleotide primer for the detection of SNP TSC0027907
agtgagttatag

SEQ ID NO: 317287 - DNA, 12 bp, Artificial Sequence
  Oligonucleotide primer for the detection of SNP TSC0027908
taccaaaatttc

SEQ ID NO: 317288 - DNA, 12 bp, Artificial Sequence
  Oligonucleotide primer for the detection of SNP TSC0027908
taccgaaatttc

SEQ ID NO: 317289 - DNA, 12 bp, Artificial Sequence
  Oligonucleotide primer for the detection of SNP TSC0027908
gttggggggaag

SEQ ID NO: 317290 - DNA, 12 bp, Artificial Sequence
  Oligonucleotide primer for the detection of SNP TSC0027908
gtcggggggaag

SEQ ID NO: 317291 - DNA, 12 bp, Artificial Sequence
  Oligonucleotide primer for the detection of SNP TSC0027908
tgttgagatttt

SEQ ID NO: 317292 - DNA, 12 bp, Artificial Sequence
  Oligonucleotide primer for the detection of SNP TSC0027908
tgtcgagatttt

SEQ ID NO: 317293 - DNA, 12 bp, Artificial Sequence
  Oligonucleotide primer for the detection of SNP TSC0027912
actctaccacta

SEQ ID NO: 317294 - DNA, 12 bp, Artificial Sequence
  Oligonucleotide primer for the detection of SNP TSC0027912
aggaattttgtt

SEQ ID NO: 317295 - DNA, 12 bp, Artificial Sequence
  Oligonucleotide primer for the detection of SNP TSC0027912
acaaaaatctta

SEQ ID NO: 317296 - DNA, 12 bp, Artificial Sequence
  Oligonukleotid-Primer
aattttattatt

SEQ ID NO: 317297 - DNA, 12 bp, Artificial Sequence
  Oligonucleotide primer for the detection of SNP TSC0027916
taacccccatcc

SEQ ID NO: 317298 - DNA, 12 bp, Artificial Sequence
  Oligonucleotide primer for the detection of SNP TSC0027916
taacccccgtcc

SEQ ID NO: 317299 - DNA, 12 bp, Artificial Sequence
  Oligonucleotide primer for the detection of SNP TSC0027917
tctcccaacctt

SEQ ID NO: 317300 - DNA, 12 bp, Artificial Sequence
  Oligonukleotid-Primer
ttttaattttgg

SEQ ID NO: 317301 - DNA, 12 bp, Artificial Sequence
  Oligonucleotide primer for the detection of SNP TSC0027919
aattaaaaaaca

SEQ ID NO: 317302 - DNA, 12 bp, Artificial Sequence
  Oligonucleotide primer for the detection of SNP TSC0027919
ctctcaaatact

SEQ ID NO: 317303 - DNA, 12 bp, Artificial Sequence
  Oligonucleotide primer for the detection of SNP TSC0027919
ggttaggagata

SEQ ID NO: 317304 - DNA, 12 bp, Artificial Sequence
  Oligonukleotid-Primer
gaatgtattagg

SEQ ID NO: 317305 - DNA, 12 bp, Artificial Sequence
  Oligonucleotide primer for the detection of SNP TSC0027922
accaatacaaaa

SEQ ID NO: 317306 - DNA, 12 bp, Artificial Sequence
  Oligonucleotide primer for the detection of SNP TSC0027922
accgatacaaaa

SEQ ID NO: 317307 - DNA, 12 bp, Artificial Sequence
  Oligonucleotide primer for the detection of SNP TSC0027922
ttaatgataaat

SEQ ID NO: 317308 - DNA, 12 bp, Artificial Sequence
  Oligonucleotide primer for the detection of SNP TSC0027922
cccaataataaa

SEQ ID NO: 317309 - DNA, 12 bp, Artificial Sequence
  Oligonucleotide primer for the detection of SNP TSC0027922
attgatgtaaga

SEQ ID NO: 317310 - DNA, 12 bp, Artificial Sequence
  Oligonucleotide primer for the detection of SNP TSC0027922
atcgatgtaaga

SEQ ID NO: 317311 - DNA, 12 bp, Artificial Sequence
  Oligonucleotide primer for the detection of SNP TSC0027923
tattatacataa

SEQ ID NO: 317312 - DNA, 12 bp, Artificial Sequence
  Oligonucleotide primer for the detection of SNP TSC0027923
tattatacgtaa

SEQ ID NO: 317313 - DNA, 12 bp, Artificial Sequence
  Oligonucleotide primer for the detection of SNP TSC0027923
tttagtagatat

SEQ ID NO: 317314 - DNA, 12 bp, Artificial Sequence
  Oligonucleotide primer for the detection of SNP TSC0027923
tccaacaaacac

SEQ ID NO: 317315 - DNA, 12 bp, Artificial Sequence
  Oligonucleotide primer for the detection of SNP TSC0027923
tgttgtgtgtag

SEQ ID NO: 317316 - DNA, 12 bp, Artificial Sequence
  Oligonucleotide primer for the detection of SNP TSC0027923
tgttgtgcgtag

SEQ ID NO: 317317 - DNA, 12 bp, Artificial Sequence
  Oligonucleotide primer for the detection of SNP TSC0027929
tatatatctttc

SEQ ID NO: 317318 - DNA, 12 bp, Artificial Sequence
  Oligonucleotide primer for the detection of SNP TSC0027929
atattattttta

SEQ ID NO: 317319 - DNA, 12 bp, Artificial Sequence
  Oligonucleotide primer for the detection of SNP TSC0027930
caataatctctt

SEQ ID NO: 317320 - DNA, 12 bp, Artificial Sequence
  Oligonucleotide primer for the detection of SNP TSC0027930
tagtataaaatt

SEQ ID NO: 317321 - DNA, 12 bp, Artificial Sequence
  Oligonucleotide primer for the detection of SNP TSC0027931
atattattttct

SEQ ID NO: 317322 - DNA, 12 bp, Artificial Sequence
  Oligonucleotide primer for the detection of SNP TSC0027931
attacctataaa

SEQ ID NO: 317323 - DNA, 12 bp, Artificial Sequence
  Oligonucleotide primer for the detection of SNP TSC0027932
caaaaaattatt

SEQ ID NO: 317324 - DNA, 12 bp, Artificial Sequence
  Oligonucleotide primer for the detection of SNP TSC0027933
taactaaaaatt

SEQ ID NO: 317325 - DNA, 12 bp, Artificial Sequence
  Oligonucleotide primer for the detection of SNP TSC0027933
tgttgtagttaa

SEQ ID NO: 317326 - DNA, 12 bp, Artificial Sequence
  Oligonucleotide primer for the detection of SNP TSC0027934
caccaataacta

SEQ ID NO: 317327 - DNA, 12 bp, Artificial Sequence
  Oligonucleotide primer for the detection of SNP TSC0027934
ttttgtgggttg

SEQ ID NO: 317328 - DNA, 12 bp, Artificial Sequence
  Oligonucleotide primer for the detection of SNP TSC0027934
ttttgtgggtcg

SEQ ID NO: 317329 - DNA, 12 bp, Artificial Sequence
  Oligonucleotide primer for the detection of SNP TSC0027934
ccttataaacca

SEQ ID NO: 317330 - DNA, 12 bp, Artificial Sequence
  Oligonucleotide primer for the detection of SNP TSC0027934
ccttataaaccg

SEQ ID NO: 317331 - DNA, 12 bp, Artificial Sequence
  Oligonucleotide primer for the detection of SNP TSC0027935
gaataaaaaaat

SEQ ID NO: 317332 - DNA, 12 bp, Artificial Sequence
  Oligonucleotide primer for the detection of SNP TSC0027935
gatttgagtatg

SEQ ID NO: 317333 - DNA, 12 bp, Artificial Sequence
  Oligonucleotide primer for the detection of SNP TSC0027936
ataatccaccta

SEQ ID NO: 317334 - DNA, 12 bp, Artificial Sequence
  Oligonucleotide primer for the detection of SNP TSC0027936
gtaatccaccta

SEQ ID NO: 317335 - DNA, 12 bp, Artificial Sequence
  Oligonucleotide primer for the detection of SNP TSC0027936
attttgggatgt

SEQ ID NO: 317336 - DNA, 12 bp, Artificial Sequence
  Oligonucleotide primer for the detection of SNP TSC0027936
actttaaaatac

SEQ ID NO: 317337 - DNA, 12 bp, Artificial Sequence
  Oligonucleotide primer for the detection of SNP TSC0027936
gtgatttatttg

SEQ ID NO: 317338 - DNA, 12 bp, Artificial Sequence
  Oligonucleotide primer for the detection of SNP TSC0027940
ctctttctttcc

SEQ ID NO: 317339 - DNA, 12 bp, Artificial Sequence
  Oligonucleotide primer for the detection of SNP TSC0027940
gaaaagaaaaga

SEQ ID NO: 317340 - DNA, 12 bp, Artificial Sequence
  Oligonucleotide primer for the detection of SNP TSC0027941
aaccattacacc

SEQ ID NO: 317341 - DNA, 12 bp, Artificial Sequence
  Oligonucleotide primer for the detection of SNP TSC0027941
ttttgagattgg

SEQ ID NO: 317342 - DNA, 12 bp, Artificial Sequence
  Oligonucleotide primer for the detection of SNP TSC0027941
ttttaaaattaa

SEQ ID NO: 317343 - DNA, 12 bp, Artificial Sequence
  Oligonucleotide primer for the detection of SNP TSC0027943
tctttctctctc

SEQ ID NO: 317344 - DNA, 12 bp, Artificial Sequence
  Oligonucleotide primer for the detection of SNP TSC0027943
agtttatagttt

SEQ ID NO: 317345 - DNA, 12 bp, Artificial Sequence
  Oligonucleotide primer for the detection of SNP TSC0027943
acccacaactca

SEQ ID NO: 317346 - DNA, 12 bp, Artificial Sequence
  Oligonucleotide primer for the detection of SNP TSC0027944
cttacaataaca

SEQ ID NO: 317347 - DNA, 12 bp, Artificial Sequence
  Oligonucleotide primer for the detection of SNP TSC0027944
taggggttttat

SEQ ID NO: 317348 - DNA, 12 bp, Artificial Sequence
  Oligonucleotide primer for the detection of SNP TSC0027944
caaaaatcttat

SEQ ID NO: 317349 - DNA, 12 bp, Artificial Sequence
  Oligonucleotide primer for the detection of SNP TSC0027944
tttatagtagta

SEQ ID NO: 317350 - DNA, 12 bp, Artificial Sequence
  Oligonucleotide primer for the detection of SNP TSC0027945
acccccatcata

SEQ ID NO: 317351 - DNA, 12 bp, Artificial Sequence
  Oligonucleotide primer for the detection of SNP TSC0027945
gcccccatcata

SEQ ID NO: 317352 - DNA, 12 bp, Artificial Sequence
  Oligonucleotide primer for the detection of SNP TSC0027945
aggggtggtagg

SEQ ID NO: 317353 - DNA, 12 bp, Artificial Sequence
  Oligonucleotide primer for the detection of SNP TSC0027949
ataacaaaatta

SEQ ID NO: 317354 - DNA, 12 bp, Artificial Sequence
  Oligonucleotide primer for the detection of SNP TSC0027949
ataacgaaatta

SEQ ID NO: 317355 - DNA, 12 bp, Artificial Sequence
  Oligonucleotide primer for the detection of SNP TSC0027949
gttagagggatt

SEQ ID NO: 317356 - DNA, 12 bp, Artificial Sequence
  Oligonucleotide primer for the detection of SNP TSC0027949
attaaaaaaact

SEQ ID NO: 317357 - DNA, 12 bp, Artificial Sequence
  Oligonucleotide primer for the detection of SNP TSC0027949
gtaatgaagtta

SEQ ID NO: 317358 - DNA, 12 bp, Artificial Sequence
  Oligonucleotide primer for the detection of SNP TSC0027949
gtaacgaagtta

SEQ ID NO: 317359 - DNA, 12 bp, Artificial Sequence
  Oligonucleotide primer for the detection of SNP TSC0027951
ttgaagaatatt

SEQ ID NO: 317360 - DNA, 12 bp, Artificial Sequence
  Oligonucleotide primer for the detection of SNP TSC0027952
attactttaaat

SEQ ID NO: 317361 - DNA, 12 bp, Artificial Sequence
  Oligonucleotide primer for the detection of SNP TSC0027952
tgttaggagaaa

SEQ ID NO: 317362 - DNA, 12 bp, Artificial Sequence
  Oligonucleotide primer for the detection of SNP TSC0027952
gttgttttaaat

SEQ ID NO: 317363 - DNA, 12 bp, Artificial Sequence
  Oligonucleotide primer for the detection of SNP TSC0027953
ttaaaataacat

SEQ ID NO: 317364 - DNA, 12 bp, Artificial Sequence
  Oligonucleotide primer for the detection of SNP TSC0027953
ttttttgaattt

SEQ ID NO: 317365 - DNA, 12 bp, Artificial Sequence
  Oligonucleotide primer for the detection of SNP TSC0027953
actttctaaact

SEQ ID NO: 317366 - DNA, 12 bp, Artificial Sequence
  Oligonucleotide primer for the detection of SNP TSC0027954
tccttcaactaa

SEQ ID NO: 317367 - DNA, 12 bp, Artificial Sequence
  Oligonucleotide primer for the detection of SNP TSC0027954
attttggttaag

SEQ ID NO: 317368 - DNA, 12 bp, Artificial Sequence
  Oligonucleotide primer for the detection of SNP TSC0027954
attttaaccaaa

SEQ ID NO: 317369 - DNA, 12 bp, Artificial Sequence
  Oligonucleotide primer for the detection of SNP TSC0027954
tttttaattgat

SEQ ID NO: 317370 - DNA, 12 bp, Artificial Sequence
  Oligonucleotide primer for the detection of SNP TSC0027956
acaacccctcac

SEQ ID NO: 317371 - DNA, 12 bp, Artificial Sequence
  Oligonucleotide primer for the detection of SNP TSC0027956
tttttaggaagg

SEQ ID NO: 317372 - DNA, 12 bp, Artificial Sequence
  Oligonucleotide primer for the detection of SNP TSC0027957
aaccgactaaac

SEQ ID NO: 317373 - DNA, 12 bp, Artificial Sequence
  Oligonucleotide primer for the detection of SNP TSC0027957
tattgttatgaa

SEQ ID NO: 317374 - DNA, 12 bp, Artificial Sequence
  Oligonucleotide primer for the detection of SNP TSC0027958
tattaccttcaa

SEQ ID NO: 317375 - DNA, 12 bp, Artificial Sequence
  Oligonucleotide primer for the detection of SNP TSC0027958
tggttattagtt

SEQ ID NO: 317376 - DNA, 12 bp, Artificial Sequence
  Oligonucleotide primer for the detection of SNP TSC0027958
taaccaccaatt

SEQ ID NO: 317377 - DNA, 12 bp, Artificial Sequence
  Oligonucleotide primer for the detection of SNP TSC0027959
gagttttaatta

SEQ ID NO: 317378 - DNA, 12 bp, Artificial Sequence
  Oligonucleotide primer for the detection of SNP TSC0027959
aaattttaatta

SEQ ID NO: 317379 - DNA, 12 bp, Artificial Sequence
  Oligonucleotide primer for the detection of SNP TSC0027959
tttaaaagattt

SEQ ID NO: 317380 - DNA, 12 bp, Artificial Sequence
  Oligonucleotide primer for the detection of SNP TSC0027961
cctactaaaatc

SEQ ID NO: 317381 - DNA, 12 bp, Artificial Sequence
  Oligonucleotide primer for the detection of SNP TSC0027961
gttgagtttttt

SEQ ID NO: 317382 - DNA, 12 bp, Artificial Sequence
  Oligonucleotide primer for the detection of SNP TSC0027961
attaaatcctct

SEQ ID NO: 317383 - DNA, 12 bp, Artificial Sequence
  Oligonucleotide primer for the detection of SNP TSC0027962
aacaaaaaaatc

SEQ ID NO: 317384 - DNA, 12 bp, Artificial Sequence
  Oligonucleotide primer for the detection of SNP TSC0027963
gtttataggatg

SEQ ID NO: 317385 - DNA, 12 bp, Artificial Sequence
  Oligonucleotide primer for the detection of SNP TSC0027964
cctacaaactta

SEQ ID NO: 317386 - DNA, 12 bp, Artificial Sequence
  Oligonucleotide primer for the detection of SNP TSC0027964
gtagagaaaaat

SEQ ID NO: 317387 - DNA, 12 bp, Artificial Sequence
  Oligonucleotide primer for the detection of SNP TSC0027965
tgtataaaatta

SEQ ID NO: 317388 - DNA, 12 bp, Artificial Sequence
  Oligonucleotide primer for the detection of SNP TSC0027969
acctcccaaaat

SEQ ID NO: 317389 - DNA, 12 bp, Artificial Sequence
  Oligonucleotide primer for the detection of SNP TSC0027969
tttgtaagttta

SEQ ID NO: 317390 - DNA, 12 bp, Artificial Sequence
  Oligonucleotide primer for the detection of SNP TSC0027970
tctaaaattaat

SEQ ID NO: 317391 - DNA, 12 bp, Artificial Sequence
  Oligonucleotide primer for the detection of SNP TSC0027970
ttataggtgtga

SEQ ID NO: 317392 - DNA, 12 bp, Artificial Sequence
  Oligonucleotide primer for the detection of SNP TSC0027970
ttataggcgtga

SEQ ID NO: 317393 - DNA, 12 bp, Artificial Sequence
  Oligonucleotide primer for the detection of SNP TSC0027971
acctacaaataa

SEQ ID NO: 317394 - DNA, 12 bp, Artificial Sequence
  Oligonucleotide primer for the detection of SNP TSC0027971
ttattaatttta

SEQ ID NO: 317395 - DNA, 12 bp, Artificial Sequence
  Oligonucleotide primer for the detection of SNP TSC0027971
caccaaccccaa

SEQ ID NO: 317396 - DNA, 12 bp, Artificial Sequence
  Oligonucleotide primer for the detection of SNP TSC0027971
atttataagtgg

SEQ ID NO: 317397 - DNA, 12 bp, Artificial Sequence
  Oligonucleotide primer for the detection of SNP TSC0027972
taataatatttc

SEQ ID NO: 317398 - DNA, 12 bp, Artificial Sequence
  Oligonucleotide primer for the detection of SNP TSC0027972
gagttaggttag

SEQ ID NO: 317399 - DNA, 12 bp, Artificial Sequence
  Oligonucleotide primer for the detection of SNP TSC0027974
tctaaattatac

SEQ ID NO: 317400 - DNA, 12 bp, Artificial Sequence
  Oligonucleotide primer for the detection of SNP TSC0027974
gagaagggaggg

SEQ ID NO: 317401 - DNA, 12 bp, Artificial Sequence
  Oligonucleotide primer for the detection of SNP TSC0027981
acaattatactt

SEQ ID NO: 317402 - DNA, 12 bp, Artificial Sequence
  Oligonucleotide primer for the detection of SNP TSC0027981
tttaagttagga

SEQ ID NO: 317403 - DNA, 12 bp, Artificial Sequence
  Oligonucleotide primer for the detection of SNP TSC0027982
ttgagttttgga

SEQ ID NO: 317404 - DNA, 12 bp, Artificial Sequence
  Oligonucleotide primer for the detection of SNP TSC0027982
ttgagtttcgga

SEQ ID NO: 317405 - DNA, 12 bp, Artificial Sequence
  Oligonucleotide primer for the detection of SNP TSC0027982
ctaaattccaaa

SEQ ID NO: 317406 - DNA, 12 bp, Artificial Sequence
  Oligonucleotide primer for the detection of SNP TSC0027982
ctaaattccgaa

SEQ ID NO: 317407 - DNA, 12 bp, Artificial Sequence
  Oligonucleotide primer for the detection of SNP TSC0027982
gtaaggtagtaa

SEQ ID NO: 317408 - DNA, 12 bp, Artificial Sequence
  Oligonucleotide primer for the detection of SNP TSC0027985
cctcattcttat

SEQ ID NO: 317409 - DNA, 12 bp, Artificial Sequence
  Oligonucleotide primer for the detection of SNP TSC0027985
tgtttttagaga

SEQ ID NO: 317410 - DNA, 12 bp, Artificial Sequence
  Oligonucleotide primer for the detection of SNP TSC0027986
ccaaacacacaa

SEQ ID NO: 317411 - DNA, 12 bp, Artificial Sequence
  Oligonucleotide primer for the detection of SNP TSC0027986
taggttattttt

SEQ ID NO: 317412 - DNA, 12 bp, Artificial Sequence
  Oligonucleotide primer for the detection of SNP TSC0027986
caaactatttcc

SEQ ID NO: 317413 - DNA, 12 bp, Artificial Sequence
  Oligonucleotide primer for the detection of SNP TSC0027986
ttagatatataa

SEQ ID NO: 317414 - DNA, 12 bp, Artificial Sequence
  Oligonucleotide primer for the detection of SNP TSC0027988
aaattattattt

SEQ ID NO: 317415 - DNA, 12 bp, Artificial Sequence
  Oligonucleotide primer for the detection of SNP TSC0027988
gagtaattgggt

SEQ ID NO: 317416 - DNA, 12 bp, Artificial Sequence
  Oligonucleotide primer for the detection of SNP TSC0027988
aaacaattaaac

SEQ ID NO: 317417 - DNA, 12 bp, Artificial Sequence
  Oligonukleotid-Primer
ggattattattt

SEQ ID NO: 317418 - DNA, 12 bp, Artificial Sequence
  Oligonucleotide primer for the detection of SNP TSC0027991
acaaataatact

SEQ ID NO: 317419 - DNA, 12 bp, Artificial Sequence
  Oligonucleotide primer for the detection of SNP TSC0027991
tagagtaaagtg

SEQ ID NO: 317420 - DNA, 12 bp, Artificial Sequence
  Oligonucleotide primer for the detection of SNP TSC0027992
tacattcttaat

SEQ ID NO: 317421 - DNA, 12 bp, Artificial Sequence
  Oligonukleotid-Primer
gattgaggtaag

SEQ ID NO: 317422 - DNA, 12 bp, Artificial Sequence
  Oligonucleotide primer for the detection of SNP TSC0028000
aaaaaccttatt

SEQ ID NO: 317423 - DNA, 12 bp, Artificial Sequence
  Oligonucleotide primer for the detection of SNP TSC0028000
tttaggtaaata

SEQ ID NO: 317424 - DNA, 12 bp, Artificial Sequence
  Oligonucleotide primer for the detection of SNP TSC0028002
tcaaattcttac

SEQ ID NO: 317425 - DNA, 12 bp, Artificial Sequence
  Oligonukleotid-Primer
ttatggttgaag

SEQ ID NO: 317426 - DNA, 12 bp, Artificial Sequence
  Oligonucleotide primer for the detection of SNP TSC0028003
aactcataaaaa

SEQ ID NO: 317427 - DNA, 12 bp, Artificial Sequence
  Oligonucleotide primer for the detection of SNP TSC0028004
aatatcctacta

SEQ ID NO: 317428 - DNA, 12 bp, Artificial Sequence
  Oligonucleotide primer for the detection of SNP TSC0028004
tgttgtaatttt

SEQ ID NO: 317429 - DNA, 12 bp, Artificial Sequence
  Oligonukleotid-Primer
tattacaacctt

SEQ ID NO: 317430 - DNA, 12 bp, Artificial Sequence
  Oligonucleotide primer for the detection of SNP TSC0028004
ggtgttttattg

SEQ ID NO: 317431 - DNA, 12 bp, Artificial Sequence
  Oligonucleotide primer for the detection of SNP TSC0028006
tactccaaccca

SEQ ID NO: 317432 - DNA, 12 bp, Artificial Sequence
  Oligonucleotide primer for the detection of SNP TSC0028006
agtggaggggat

SEQ ID NO: 317433 - DNA, 12 bp, Artificial Sequence
  Oligonucleotide primer for the detection of SNP TSC0028006
atgttttagttt

SEQ ID NO: 317434 - DNA, 12 bp, Artificial Sequence
  Oligonucleotide primer for the detection of SNP TSC0028010
ttacataattcc

SEQ ID NO: 317435 - DNA, 12 bp, Artificial Sequence
  Oligonucleotide primer for the detection of SNP TSC0028010
taggaagtttta

SEQ ID NO: 317436 - DNA, 12 bp, Artificial Sequence
  Oligonucleotide primer for the detection of SNP TSC0028015
tgggtaatatgg

SEQ ID NO: 317437 - DNA, 12 bp, Artificial Sequence
  Oligonucleotide primer for the detection of SNP TSC0028015
tgggtaatacgg

SEQ ID NO: 317438 - DNA, 12 bp, Artificial Sequence
  Oligonucleotide primer for the detection of SNP TSC0028015
taaacaacacaa

SEQ ID NO: 317439 - DNA, 12 bp, Artificial Sequence
  Oligonucleotide primer for the detection of SNP TSC0028015
taaacaacacga

SEQ ID NO: 317440 - DNA, 12 bp, Artificial Sequence
  Oligonucleotide primer for the detection of SNP TSC0028015
gtatgggggttt

SEQ ID NO: 317441 - DNA, 12 bp, Artificial Sequence
  Oligonucleotide primer for the detection of SNP TSC0028015
gtatgggggttc

SEQ ID NO: 317442 - DNA, 12 bp, Artificial Sequence
  Oligonucleotide primer for the detection of SNP TSC0028020
ctaaaactaact

SEQ ID NO: 317443 - DNA, 12 bp, Artificial Sequence
  Oligonucleotide primer for the detection of SNP TSC0028020
atttgtattaaa

SEQ ID NO: 317444 - DNA, 12 bp, Artificial Sequence
  Oligonucleotide primer for the detection of SNP TSC0028020
attcgtattaaa

SEQ ID NO: 317445 - DNA, 12 bp, Artificial Sequence
  Oligonucleotide primer for the detection of SNP TSC0028021
aattctaaaata

SEQ ID NO: 317446 - DNA, 12 bp, Artificial Sequence
  Oligonucleotide primer for the detection of SNP TSC0028021
agaaaatgagag

SEQ ID NO: 317447 - DNA, 12 bp, Artificial Sequence
  Oligonucleotide primer for the detection of SNP TSC0028021
attttaaaatgt

SEQ ID NO: 317448 - DNA, 12 bp, Artificial Sequence
  Oligonucleotide primer for the detection of SNP TSC0028023
caaacacatttt

SEQ ID NO: 317449 - DNA, 12 bp, Artificial Sequence
  Oligonucleotide primer for the detection of SNP TSC0028023
cgaacacatttt

SEQ ID NO: 317450 - DNA, 12 bp, Artificial Sequence
  Oligonucleotide primer for the detection of SNP TSC0028023
gaagttagattt

SEQ ID NO: 317451 - DNA, 12 bp, Artificial Sequence
  Oligonucleotide primer for the detection of SNP TSC0028023
ataaaactaaat

SEQ ID NO: 317452 - DNA, 12 bp, Artificial Sequence
  Oligonucleotide primer for the detection of SNP TSC0028023
agtatatttttt

SEQ ID NO: 317453 - DNA, 12 bp, Artificial Sequence
  Oligonucleotide primer for the detection of SNP TSC0028024
tccatccaccac

SEQ ID NO: 317454 - DNA, 12 bp, Artificial Sequence
  Oligonucleotide primer for the detection of SNP TSC0028024
tccatccaccgc

SEQ ID NO: 317455 - DNA, 12 bp, Artificial Sequence
  Oligonucleotide primer for the detection of SNP TSC0028024
ttttttattcgg

SEQ ID NO: 317456 - DNA, 12 bp, Artificial Sequence
  Oligonucleotide primer for the detection of SNP TSC0028026
aactatctcata

SEQ ID NO: 317457 - DNA, 12 bp, Artificial Sequence
  Oligonucleotide primer for the detection of SNP TSC0028026
aactatctcgta

SEQ ID NO: 317458 - DNA, 12 bp, Artificial Sequence
  Oligonucleotide primer for the detection of SNP TSC0028026
tttttgttagta

SEQ ID NO: 317459 - DNA, 12 bp, Artificial Sequence
  Oligonucleotide primer for the detection of SNP TSC0028026
tttctaccaaca

SEQ ID NO: 317460 - DNA, 12 bp, Artificial Sequence
  Oligonucleotide primer for the detection of SNP TSC0028026
agttattttgtg

SEQ ID NO: 317461 - DNA, 12 bp, Artificial Sequence
  Oligonucleotide primer for the detection of SNP TSC0028026
agttatttcgtg

SEQ ID NO: 317462 - DNA, 12 bp, Artificial Sequence
  Oligonucleotide primer for the detection of SNP TSC0028027
aactcctaacta

SEQ ID NO: 317463 - DNA, 12 bp, Artificial Sequence
  Oligonucleotide primer for the detection of SNP TSC0028027
ggaagtgggggt

SEQ ID NO: 317464 - DNA, 12 bp, Artificial Sequence
  Oligonucleotide primer for the detection of SNP TSC0028027
ggaagcgggggt

SEQ ID NO: 317465 - DNA, 12 bp, Artificial Sequence
  Oligonucleotide primer for the detection of SNP TSC0028027
gatttttagtta

SEQ ID NO: 317466 - DNA, 12 bp, Artificial Sequence
  Oligonucleotide primer for the detection of SNP TSC0028035
ataaaaacccta

SEQ ID NO: 317467 - DNA, 12 bp, Artificial Sequence
  Oligonucleotide primer for the detection of SNP TSC0028035
ttgaggttagtg

SEQ ID NO: 317468 - DNA, 12 bp, Artificial Sequence
  Oligonucleotide primer for the detection of SNP TSC0028035
ggtggaaatttt

SEQ ID NO: 317469 - DNA, 12 bp, Artificial Sequence
  Oligonucleotide primer for the detection of SNP TSC0028036
gtgtagtaagta

SEQ ID NO: 317470 - DNA, 12 bp, Artificial Sequence
  Oligonucleotide primer for the detection of SNP TSC0028037
atctaaataaat

SEQ ID NO: 317471 - DNA, 12 bp, Artificial Sequence
  Oligonucleotide primer for the detection of SNP TSC0028037
gatatttttgtt

SEQ ID NO: 317472 - DNA, 12 bp, Artificial Sequence
  Oligonucleotide primer for the detection of SNP TSC0028037
taatatttctat

SEQ ID NO: 317473 - DNA, 12 bp, Artificial Sequence
  Oligonucleotide primer for the detection of SNP TSC0028037
atttaggtaaat

SEQ ID NO: 317474 - DNA, 12 bp, Artificial Sequence
  Oligonucleotide primer for the detection of SNP TSC0028039
cctctaataaaa

SEQ ID NO: 317475 - DNA, 12 bp, Artificial Sequence
  Oligonucleotide primer for the detection of SNP TSC0028039
tttttagttaag

SEQ ID NO: 317476 - DNA, 12 bp, Artificial Sequence
  Oligonucleotide primer for the detection of SNP TSC0028039
tccttaactaaa

SEQ ID NO: 317477 - DNA, 12 bp, Artificial Sequence
  Oligonucleotide primer for the detection of SNP TSC0028039
tttttggtgagg

SEQ ID NO: 317478 - DNA, 12 bp, Artificial Sequence
  Oligonucleotide primer for the detection of SNP TSC0028043
ttaaaaaatact

SEQ ID NO: 317479 - DNA, 12 bp, Artificial Sequence
  Oligonucleotide primer for the detection of SNP TSC0028043
cctaacccttca

SEQ ID NO: 317480 - DNA, 12 bp, Artificial Sequence
  Oligonucleotide primer for the detection of SNP TSC0028043
ttgggaaatgtt

SEQ ID NO: 317481 - DNA, 12 bp, Artificial Sequence
  Oligonucleotide primer for the detection of SNP TSC0028045
ttcaatacttca

SEQ ID NO: 317482 - DNA, 12 bp, Artificial Sequence
  Oligonucleotide primer for the detection of SNP TSC0028045
ttcgatacttca

SEQ ID NO: 317483 - DNA, 12 bp, Artificial Sequence
  Oligonucleotide primer for the detection of SNP TSC0028045
ttttttgaaggt

SEQ ID NO: 317484 - DNA, 12 bp, Artificial Sequence
  Oligonucleotide primer for the detection of SNP TSC0028045
cttctaaaaaca

SEQ ID NO: 317485 - DNA, 12 bp, Artificial Sequence
  Oligonucleotide primer for the detection of SNP TSC0028045
ttgatgttttat

SEQ ID NO: 317486 - DNA, 12 bp, Artificial Sequence
  Oligonucleotide primer for the detection of SNP TSC0028045
tcgatgttttat

SEQ ID NO: 317487 - DNA, 12 bp, Artificial Sequence
  Oligonucleotide primer for the detection of SNP TSC0028046
actacataacat

SEQ ID NO: 317488 - DNA, 12 bp, Artificial Sequence
  Oligonucleotide primer for the detection of SNP TSC0028046
tatgtagttaaa

SEQ ID NO: 317489 - DNA, 12 bp, Artificial Sequence
  Oligonucleotide primer for the detection of SNP TSC0028049
acttaaaatatt

SEQ ID NO: 317490 - DNA, 12 bp, Artificial Sequence
  Oligonucleotide primer for the detection of SNP TSC0028053
tcccaactattc

SEQ ID NO: 317491 - DNA, 12 bp, Artificial Sequence
  Oligonucleotide primer for the detection of SNP TSC0028053
tgtgttgaagtg

SEQ ID NO: 317492 - DNA, 12 bp, Artificial Sequence
  Oligonucleotide primer for the detection of SNP TSC0028054
aaaatcctaact

SEQ ID NO: 317493 - DNA, 12 bp, Artificial Sequence
  Oligonucleotide primer for the detection of SNP TSC0028055
cctcaaaaaaac

SEQ ID NO: 317494 - DNA, 12 bp, Artificial Sequence
  Oligonucleotide primer for the detection of SNP TSC0028055
ttttaattatgg

SEQ ID NO: 317495 - DNA, 12 bp, Artificial Sequence
  Oligonucleotide primer for the detection of SNP TSC0028056
tcttattaaact

SEQ ID NO: 317496 - DNA, 12 bp, Artificial Sequence
  Oligonucleotide primer for the detection of SNP TSC0028056
gtttttatttag

SEQ ID NO: 317497 - DNA, 12 bp, Artificial Sequence
  Oligonucleotide primer for the detection of SNP TSC0028061
caaaaactttcc

SEQ ID NO: 317498 - DNA, 12 bp, Artificial Sequence
  Oligonucleotide primer for the detection of SNP TSC0028061
tagtagtttaaa

SEQ ID NO: 317499 - DNA, 12 bp, Artificial Sequence
  Oligonucleotide primer for the detection of SNP TSC0028062
ttccaataccac

SEQ ID NO: 317500 - DNA, 12 bp, Artificial Sequence
  Oligonucleotide primer for the detection of SNP TSC0028062
ggttttttgtaa

SEQ ID NO: 317501 - DNA, 12 bp, Artificial Sequence
  Oligonucleotide primer for the detection of SNP TSC0028065
acaaaaactacc

SEQ ID NO: 317502 - DNA, 12 bp, Artificial Sequence
  Oligonucleotide primer for the detection of SNP TSC0028065
tggttggggtta

SEQ ID NO: 317503 - DNA, 12 bp, Artificial Sequence
  Oligonucleotide primer for the detection of SNP TSC0028066
tataataaatac

SEQ ID NO: 317504 - DNA, 12 bp, Artificial Sequence
  Oligonucleotide primer for the detection of SNP TSC0028066
ttggaggttata

SEQ ID NO: 317505 - DNA, 12 bp, Artificial Sequence
  Oligonucleotide primer for the detection of SNP TSC0028066
tcggaggttata

SEQ ID NO: 317506 - DNA, 12 bp, Artificial Sequence
  Oligonucleotide primer for the detection of SNP TSC0028067
actaataaaaac

SEQ ID NO: 317507 - DNA, 12 bp, Artificial Sequence
  Oligonucleotide primer for the detection of SNP TSC0028067
aggaattggggg

SEQ ID NO: 317508 - DNA, 12 bp, Artificial Sequence
  Oligonucleotide primer for the detection of SNP TSC0028071
ttattctctcta

SEQ ID NO: 317509 - DNA, 12 bp, Artificial Sequence
  Oligonucleotide primer for the detection of SNP TSC0028071
ttaagtagaagg

SEQ ID NO: 317510 - DNA, 12 bp, Artificial Sequence
  Oligonucleotide primer for the detection of SNP TSC0028071
taaacaaaaaaa

SEQ ID NO: 317511 - DNA, 12 bp, Artificial Sequence
  Oligonucleotide primer for the detection of SNP TSC0028072
ttccatttaaac

SEQ ID NO: 317512 - DNA, 12 bp, Artificial Sequence
  Oligonucleotide primer for the detection of SNP TSC0028072
ttccgtttaaac

SEQ ID NO: 317513 - DNA, 12 bp, Artificial Sequence
  Oligonucleotide primer for the detection of SNP TSC0028072
tttagagaaggg

SEQ ID NO: 317514 - DNA, 12 bp, Artificial Sequence
  Oligonucleotide primer for the detection of SNP TSC0028072
ttttgtttaggt

SEQ ID NO: 317515 - DNA, 12 bp, Artificial Sequence
  Oligonucleotide primer for the detection of SNP TSC0028072
tttcgtttaggt

SEQ ID NO: 317516 - DNA, 12 bp, Artificial Sequence
  Oligonucleotide primer for the detection of SNP TSC0028073
atcaaaaaaaca

SEQ ID NO: 317517 - DNA, 12 bp, Artificial Sequence
  Oligonucleotide primer for the detection of SNP TSC0028073
tatagataaaat

SEQ ID NO: 317518 - DNA, 12 bp, Artificial Sequence
  Oligonucleotide primer for the detection of SNP TSC0028073
cataaataaaac

SEQ ID NO: 317519 - DNA, 12 bp, Artificial Sequence
  Oligonucleotide primer for the detection of SNP TSC0028073
taaaggaatatc

SEQ ID NO: 317520 - DNA, 12 bp, Artificial Sequence
  Oligonucleotide primer for the detection of SNP TSC0028075
acacatttaccc

SEQ ID NO: 317521 - DNA, 12 bp, Artificial Sequence
  Oligonucleotide primer for the detection of SNP TSC0028075
tctcacctcctc

SEQ ID NO: 317522 - DNA, 12 bp, Artificial Sequence
  Oligonukleotid-Primer
gtatatttgttt

SEQ ID NO: 317523 - DNA, 12 bp, Artificial Sequence
  Oligonucleotide primer for the detection of SNP TSC0028079
aaataaactata

SEQ ID NO: 317524 - DNA, 12 bp, Artificial Sequence
  Oligonucleotide primer for the detection of SNP TSC0028079
gtttatgatttt

SEQ ID NO: 317525 - DNA, 12 bp, Artificial Sequence
  Oligonucleotide primer for the detection of SNP TSC0028079
tatctataattt

SEQ ID NO: 317526 - DNA, 12 bp, Artificial Sequence
  Oligonucleotide primer for the detection of SNP TSC0028079
ggtaaattgtgt

SEQ ID NO: 317527 - DNA, 12 bp, Artificial Sequence
  Oligonucleotide primer for the detection of SNP TSC0028080
tataatccccaa

SEQ ID NO: 317528 - DNA, 12 bp, Artificial Sequence
  Oligonucleotide primer for the detection of SNP TSC0028080
agtgaaaataag

SEQ ID NO: 317529 - DNA, 12 bp, Artificial Sequence
  Oligonucleotide primer for the detection of SNP TSC0028081
tatttttaaact

SEQ ID NO: 317530 - DNA, 12 bp, Artificial Sequence
  Oligonucleotide primer for the detection of SNP TSC0028081
aggaaagaggga

SEQ ID NO: 317531 - DNA, 12 bp, Artificial Sequence
  Oligonucleotide primer for the detection of SNP TSC0028084
gttaaaattaaa

SEQ ID NO: 317532 - DNA, 12 bp, Artificial Sequence
  Oligonucleotide primer for the detection of SNP TSC0028084
accaaaattaaa

SEQ ID NO: 317533 - DNA, 12 bp, Artificial Sequence
  Oligonucleotide primer for the detection of SNP TSC0028084
ggatggggagat

SEQ ID NO: 317534 - DNA, 12 bp, Artificial Sequence
  Oligonucleotide primer for the detection of SNP TSC0028086
tatactaccatt

SEQ ID NO: 317535 - DNA, 12 bp, Artificial Sequence
  Oligonucleotide primer for the detection of SNP TSC0028086
gttttgttgtga

SEQ ID NO: 317536 - DNA, 12 bp, Artificial Sequence
  Oligonucleotide primer for the detection of SNP TSC0028086
attttactataa

SEQ ID NO: 317537 - DNA, 12 bp, Artificial Sequence
  Oligonucleotide primer for the detection of SNP TSC0028086
gttttactataa

SEQ ID NO: 317538 - DNA, 12 bp, Artificial Sequence
  Oligonucleotide primer for the detection of SNP TSC0028086
tgtgttgttatt

SEQ ID NO: 317539 - DNA, 12 bp, Artificial Sequence
  Oligonucleotide primer for the detection of SNP TSC0028087
taaaacacccac

SEQ ID NO: 317540 - DNA, 12 bp, Artificial Sequence
  Oligonucleotide primer for the detection of SNP TSC0028087
tttaatatttta

SEQ ID NO: 317541 - DNA, 12 bp, Artificial Sequence
  Oligonucleotide primer for the detection of SNP TSC0028088
gtttagatagtt

SEQ ID NO: 317542 - DNA, 12 bp, Artificial Sequence
  Oligonucleotide primer for the detection of SNP TSC0028089
taatactcaaca

SEQ ID NO: 317543 - DNA, 12 bp, Artificial Sequence
  Oligonucleotide primer for the detection of SNP TSC0028089
ttggaaggaagt

SEQ ID NO: 317544 - DNA, 12 bp, Artificial Sequence
  Oligonucleotide primer for the detection of SNP TSC0028089
tggtatttagta

SEQ ID NO: 317545 - DNA, 12 bp, Artificial Sequence
  Oligonucleotide primer for the detection of SNP TSC0028092
atagttagaaga

SEQ ID NO: 317546 - DNA, 12 bp, Artificial Sequence
  Oligonucleotide primer for the detection of SNP TSC0028093
attcaaaccttc

SEQ ID NO: 317547 - DNA, 12 bp, Artificial Sequence
  Oligonucleotide primer for the detection of SNP TSC0028093
ctctctactata

SEQ ID NO: 317548 - DNA, 12 bp, Artificial Sequence
  Oligonucleotide primer for the detection of SNP TSC0028093
atttaaattttt

SEQ ID NO: 317549 - DNA, 12 bp, Artificial Sequence
  Oligonucleotide primer for the detection of SNP TSC0028094
taaataaggttg

SEQ ID NO: 317550 - DNA, 12 bp, Artificial Sequence
  Oligonucleotide primer for the detection of SNP TSC0028096
cccttctttaac

SEQ ID NO: 317551 - DNA, 12 bp, Artificial Sequence
  Oligonucleotide primer for the detection of SNP TSC0028096
gaggtgttaggt

SEQ ID NO: 317552 - DNA, 12 bp, Artificial Sequence
  Oligonucleotide primer for the detection of SNP TSC0028096
gaggcgttaggt

SEQ ID NO: 317553 - DNA, 12 bp, Artificial Sequence
  Oligonucleotide primer for the detection of SNP TSC0028096
aaaacaccaaac

SEQ ID NO: 317554 - DNA, 12 bp, Artificial Sequence
  Oligonucleotide primer for the detection of SNP TSC0028096
aaaacgccaaac

SEQ ID NO: 317555 - DNA, 12 bp, Artificial Sequence
  Oligonucleotide primer for the detection of SNP TSC0028100
acacaaaccttt

SEQ ID NO: 317556 - DNA, 12 bp, Artificial Sequence
  Oligonucleotide primer for the detection of SNP TSC0028100
ggaggtggtata

SEQ ID NO: 317557 - DNA, 12 bp, Artificial Sequence
  Oligonucleotide primer for the detection of SNP TSC0028104
aaatacttccat

SEQ ID NO: 317558 - DNA, 12 bp, Artificial Sequence
  Oligonucleotide primer for the detection of SNP TSC0028104
tttgagagaaga

SEQ ID NO: 317559 - DNA, 12 bp, Artificial Sequence
  Oligonucleotide primer for the detection of SNP TSC0028107
caaacaacaaat

SEQ ID NO: 317560 - DNA, 12 bp, Artificial Sequence
  Oligonucleotide primer for the detection of SNP TSC0028107
ggatttttttag

SEQ ID NO: 317561 - DNA, 12 bp, Artificial Sequence
  Oligonucleotide primer for the detection of SNP TSC0028108
aatactcaaacc

SEQ ID NO: 317562 - DNA, 12 bp, Artificial Sequence
  Oligonucleotide primer for the detection of SNP TSC0028108
tgttagagtggg

SEQ ID NO: 317563 - DNA, 12 bp, Artificial Sequence
  Oligonucleotide primer for the detection of SNP TSC0028109
atttaaaaaccc

SEQ ID NO: 317564 - DNA, 12 bp, Artificial Sequence
  Oligonucleotide primer for the detection of SNP TSC0028109
tataggttgaga

SEQ ID NO: 317565 - DNA, 12 bp, Artificial Sequence
  Oligonucleotide primer for the detection of SNP TSC0028115
tcttcttcttct

SEQ ID NO: 317566 - DNA, 12 bp, Artificial Sequence
  Oligonucleotide primer for the detection of SNP TSC0028115
tgttttaaaaaa

SEQ ID NO: 317567 - DNA, 12 bp, Artificial Sequence
  Oligonucleotide primer for the detection of SNP TSC0028115
gcctcaaaaaaa

SEQ ID NO: 317568 - DNA, 12 bp, Artificial Sequence
  Oligonucleotide primer for the detection of SNP TSC0028116
cactaaaaaact

SEQ ID NO: 317569 - DNA, 12 bp, Artificial Sequence
  Oligonucleotide primer for the detection of SNP TSC0028116
tttgagttttta

SEQ ID NO: 317570 - DNA, 12 bp, Artificial Sequence
  Oligonucleotide primer for the detection of SNP TSC0028117
aacaaaaaatcc

SEQ ID NO: 317571 - DNA, 12 bp, Artificial Sequence
  Oligonucleotide primer for the detection of SNP TSC0028117
aagttgtgggaa

SEQ ID NO: 317572 - DNA, 12 bp, Artificial Sequence
  Oligonucleotide primer for the detection of SNP TSC0028118
tccttaataatt

SEQ ID NO: 317573 - DNA, 12 bp, Artificial Sequence
  Oligonucleotide primer for the detection of SNP TSC0028118
taaggaaatata

SEQ ID NO: 317574 - DNA, 12 bp, Artificial Sequence
  Oligonucleotide primer for the detection of SNP TSC0028118
tttttaatgatt

SEQ ID NO: 317575 - DNA, 12 bp, Artificial Sequence
  Oligonucleotide primer for the detection of SNP TSC0028119
ttattagagttt

SEQ ID NO: 317576 - DNA, 12 bp, Artificial Sequence
  Oligonucleotide primer for the detection of SNP TSC0028119
taccattaaaac

SEQ ID NO: 317577 - DNA, 12 bp, Artificial Sequence
  Oligonucleotide primer for the detection of SNP TSC0028119
gtaataaaagag

SEQ ID NO: 317578 - DNA, 12 bp, Artificial Sequence
  Oligonucleotide primer for the detection of SNP TSC0028121
ttagaggagttt

SEQ ID NO: 317579 - DNA, 12 bp, Artificial Sequence
  Oligonucleotide primer for the detection of SNP TSC0028121
ccaaaaaaattc

SEQ ID NO: 317580 - DNA, 12 bp, Artificial Sequence
  Oligonucleotide primer for the detection of SNP TSC0028121
tgattaagaggg

SEQ ID NO: 317581 - DNA, 12 bp, Artificial Sequence
  Oligonucleotide primer for the detection of SNP TSC0028124
aactcaatacac

SEQ ID NO: 317582 - DNA, 12 bp, Artificial Sequence
  Oligonucleotide primer for the detection of SNP TSC0028124
aactcgatacac

SEQ ID NO: 317583 - DNA, 12 bp, Artificial Sequence
  Oligonucleotide primer for the detection of SNP TSC0028125
caaaacccccaa

SEQ ID NO: 317584 - DNA, 12 bp, Artificial Sequence
  Oligonucleotide primer for the detection of SNP TSC0028125
ggtggtaggtgg

SEQ ID NO: 317585 - DNA, 12 bp, Artificial Sequence
  Oligonucleotide primer for the detection of SNP TSC0028125
aataacaaataa

SEQ ID NO: 317586 - DNA, 12 bp, Artificial Sequence
  Oligonucleotide primer for the detection of SNP TSC0028125
ttagggttttta

SEQ ID NO: 317587 - DNA, 12 bp, Artificial Sequence
  Oligonucleotide primer for the detection of SNP TSC0028130
tttgagttgttg

SEQ ID NO: 317588 - DNA, 12 bp, Artificial Sequence
  Oligonucleotide primer for the detection of SNP TSC0028130
tttgagtcgttg

SEQ ID NO: 317589 - DNA, 12 bp, Artificial Sequence
  Oligonucleotide primer for the detection of SNP TSC0028130
tttgagttgtcg

SEQ ID NO: 317590 - DNA, 12 bp, Artificial Sequence
  Oligonucleotide primer for the detection of SNP TSC0028130
tttgagtcgtcg

SEQ ID NO: 317591 - DNA, 12 bp, Artificial Sequence
  Oligonucleotide primer for the detection of SNP TSC0028130
cctaaaccatca

SEQ ID NO: 317592 - DNA, 12 bp, Artificial Sequence
  Oligonucleotide primer for the detection of SNP TSC0028130
cctaaaccatcg

SEQ ID NO: 317593 - DNA, 12 bp, Artificial Sequence
  Oligonucleotide primer for the detection of SNP TSC0028130
cctaaaccgtca

SEQ ID NO: 317594 - DNA, 12 bp, Artificial Sequence
  Oligonucleotide primer for the detection of SNP TSC0028130
cctaaaccgtcg

SEQ ID NO: 317595 - DNA, 12 bp, Artificial Sequence
  Oligonucleotide primer for the detection of SNP TSC0028130
ttgaggattggt

SEQ ID NO: 317596 - DNA, 12 bp, Artificial Sequence
  Oligonucleotide primer for the detection of SNP TSC0028131
acccaaaaccct

SEQ ID NO: 317597 - DNA, 12 bp, Artificial Sequence
  Oligonucleotide primer for the detection of SNP TSC0028131
aggagagataga

SEQ ID NO: 317598 - DNA, 12 bp, Artificial Sequence
  Oligonucleotide primer for the detection of SNP TSC0028132
acacaaccaaca

SEQ ID NO: 317599 - DNA, 12 bp, Artificial Sequence
  Oligonucleotide primer for the detection of SNP TSC0028132
tctattactccc

SEQ ID NO: 317600 - DNA, 12 bp, Artificial Sequence
  Oligonucleotide primer for the detection of SNP TSC0028132
gtatagttagta

SEQ ID NO: 317601 - DNA, 12 bp, Artificial Sequence
  Oligonucleotide primer for the detection of SNP TSC0028133
attcttatttaa

SEQ ID NO: 317602 - DNA, 12 bp, Artificial Sequence
  Oligonucleotide primer for the detection of SNP TSC0028133
ttttttaggatt

SEQ ID NO: 317603 - DNA, 12 bp, Artificial Sequence
  Oligonucleotide primer for the detection of SNP TSC0028133
cttcccaaaatt

SEQ ID NO: 317604 - DNA, 12 bp, Artificial Sequence
  Oligonucleotide primer for the detection of SNP TSC0028134
atacctattatt

SEQ ID NO: 317605 - DNA, 12 bp, Artificial Sequence
  Oligonucleotide primer for the detection of SNP TSC0028134
gatgttatttaa

SEQ ID NO: 317606 - DNA, 12 bp, Artificial Sequence
  Oligonucleotide primer for the detection of SNP TSC0028135
ctcatattatct

SEQ ID NO: 317607 - DNA, 12 bp, Artificial Sequence
  Oligonucleotide primer for the detection of SNP TSC0028135
tgggttgtttaa

SEQ ID NO: 317608 - DNA, 12 bp, Artificial Sequence
  Oligonucleotide primer for the detection of SNP TSC0028137
tttataccaaaa

SEQ ID NO: 317609 - DNA, 12 bp, Artificial Sequence
  Oligonucleotide primer for the detection of SNP TSC0028137
ttagtatgagtt

SEQ ID NO: 317610 - DNA, 12 bp, Artificial Sequence
  Oligonucleotide primer for the detection of SNP TSC0028137
ttaatataaatt

SEQ ID NO: 317611 - DNA, 12 bp, Artificial Sequence
  Oligonucleotide primer for the detection of SNP TSC0028138
aaaaaatacata

SEQ ID NO: 317612 - DNA, 12 bp, Artificial Sequence
  Oligonucleotide primer for the detection of SNP TSC0028138
ataatcttttca

SEQ ID NO: 317613 - DNA, 12 bp, Artificial Sequence
  Oligonucleotide primer for the detection of SNP TSC0028138
aaaatgtatatt

SEQ ID NO: 317614 - DNA, 12 bp, Artificial Sequence
  Oligonucleotide primer for the detection of SNP TSC0028140
taaacgtaataa

SEQ ID NO: 317615 - DNA, 12 bp, Artificial Sequence
  Oligonucleotide primer for the detection of SNP TSC0028140
gttattattgtt

SEQ ID NO: 317616 - DNA, 12 bp, Artificial Sequence
  Oligonucleotide primer for the detection of SNP TSC0028140
accaccactacc

SEQ ID NO: 317617 - DNA, 12 bp, Artificial Sequence
  Oligonucleotide primer for the detection of SNP TSC0028140
gccaccactacc

SEQ ID NO: 317618 - DNA, 12 bp, Artificial Sequence
  Oligonucleotide primer for the detection of SNP TSC0028141
aatcacttacac

SEQ ID NO: 317619 - DNA, 12 bp, Artificial Sequence
  Oligonucleotide primer for the detection of SNP TSC0028141
aaaggtaaagag

SEQ ID NO: 317620 - DNA, 12 bp, Artificial Sequence
  Oligonucleotide primer for the detection of SNP TSC0028142
taccccttattc

SEQ ID NO: 317621 - DNA, 12 bp, Artificial Sequence
  Oligonucleotide primer for the detection of SNP TSC0028142
atgaatatgttg

SEQ ID NO: 317622 - DNA, 12 bp, Artificial Sequence
  Oligonucleotide primer for the detection of SNP TSC0028143
acacatatttcc

SEQ ID NO: 317623 - DNA, 12 bp, Artificial Sequence
  Oligonucleotide primer for the detection of SNP TSC0028143
tatgtaatagat

SEQ ID NO: 317624 - DNA, 12 bp, Artificial Sequence
  Oligonucleotide primer for the detection of SNP TSC0028143
atatataacaaa

SEQ ID NO: 317625 - DNA, 12 bp, Artificial Sequence
  Oligonucleotide primer for the detection of SNP TSC0028145
aaaaatacacct

SEQ ID NO: 317626 - DNA, 12 bp, Artificial Sequence
  Oligonucleotide primer for the detection of SNP TSC0028145
aaaaatacgcct

SEQ ID NO: 317627 - DNA, 12 bp, Artificial Sequence
  Oligonucleotide primer for the detection of SNP TSC0028145
atatttatttaa

SEQ ID NO: 317628 - DNA, 12 bp, Artificial Sequence
  Oligonucleotide primer for the detection of SNP TSC0028146
atttgtaaagta

SEQ ID NO: 317629 - DNA, 12 bp, Artificial Sequence
  Oligonucleotide primer for the detection of SNP TSC0028146
attcgtaaagta

SEQ ID NO: 317630 - DNA, 12 bp, Artificial Sequence
  Oligonucleotide primer for the detection of SNP TSC0028147
aaactctctaac

SEQ ID NO: 317631 - DNA, 12 bp, Artificial Sequence
  Oligonucleotide primer for the detection of SNP TSC0028147
gtttttagtagg

SEQ ID NO: 317632 - DNA, 12 bp, Artificial Sequence
  Oligonucleotide primer for the detection of SNP TSC0028148
tagtgaaggaaa

SEQ ID NO: 317633 - DNA, 12 bp, Artificial Sequence
  Oligonucleotide primer for the detection of SNP TSC0028148
tttggaaaggtt

SEQ ID NO: 317634 - DNA, 12 bp, Artificial Sequence
  Oligonucleotide primer for the detection of SNP TSC0028151
aacccctatcac

SEQ ID NO: 317635 - DNA, 12 bp, Artificial Sequence
  Oligonucleotide primer for the detection of SNP TSC0028151
gaagatagtata

SEQ ID NO: 317636 - DNA, 12 bp, Artificial Sequence
  Oligonucleotide primer for the detection of SNP TSC0028151
aaaaacaacaca

SEQ ID NO: 317637 - DNA, 12 bp, Artificial Sequence
  Oligonucleotide primer for the detection of SNP TSC0028151
ggtttttgttat

SEQ ID NO: 317638 - DNA, 12 bp, Artificial Sequence
  Oligonucleotide primer for the detection of SNP TSC0028152
aatatatacttt

SEQ ID NO: 317639 - DNA, 12 bp, Artificial Sequence
  Oligonucleotide primer for the detection of SNP TSC0028152
ggaaaaatgtta

SEQ ID NO: 317640 - DNA, 12 bp, Artificial Sequence
  Oligonucleotide primer for the detection of SNP TSC0028153
aataataattca

SEQ ID NO: 317641 - DNA, 12 bp, Artificial Sequence
  Oligonucleotide primer for the detection of SNP TSC0028153
aataataattcg

SEQ ID NO: 317642 - DNA, 12 bp, Artificial Sequence
  Oligonucleotide primer for the detection of SNP TSC0028153
ccatcttaaaaa

SEQ ID NO: 317643 - DNA, 12 bp, Artificial Sequence
  Oligonucleotide primer for the detection of SNP TSC0028153
gatggtggtttg

SEQ ID NO: 317644 - DNA, 12 bp, Artificial Sequence
  Oligonucleotide primer for the detection of SNP TSC0028153
gatggtggttcg

SEQ ID NO: 317645 - DNA, 12 bp, Artificial Sequence
  Oligonucleotide primer for the detection of SNP TSC0028154
atataacaaact

SEQ ID NO: 317646 - DNA, 12 bp, Artificial Sequence
  Oligonucleotide primer for the detection of SNP TSC0028154
attatgtttggg

SEQ ID NO: 317647 - DNA, 12 bp, Artificial Sequence
  Oligonukleotid-Primer
attacgtttggg

SEQ ID NO: 317648 - DNA, 12 bp, Artificial Sequence
  Oligonucleotide primer for the detection of SNP TSC0028155
acaatacactcc

SEQ ID NO: 317649 - DNA, 12 bp, Artificial Sequence
  Oligonucleotide primer for the detection of SNP TSC0028155
ggtgagtttgtg

SEQ ID NO: 317650 - DNA, 12 bp, Artificial Sequence
  Oligonucleotide primer for the detection of SNP TSC0028155
aataaacctata

SEQ ID NO: 317651 - DNA, 12 bp, Artificial Sequence
  Oligonucleotide primer for the detection of SNP TSC0028155
ataatatatttt

SEQ ID NO: 317652 - DNA, 12 bp, Artificial Sequence
  Oligonucleotide primer for the detection of SNP TSC0028155
ataatatatttc

SEQ ID NO: 317653 - DNA, 12 bp, Artificial Sequence
  Oligonucleotide primer for the detection of SNP TSC0028156
ctccaaaaaaca

SEQ ID NO: 317654 - DNA, 12 bp, Artificial Sequence
  Oligonucleotide primer for the detection of SNP TSC0028156
tgtggggtgatg

SEQ ID NO: 317655 - DNA, 12 bp, Artificial Sequence
  Oligonucleotide primer for the detection of SNP TSC0028156
tttttagggggt

SEQ ID NO: 317656 - DNA, 12 bp, Artificial Sequence
  Oligonucleotide primer for the detection of SNP TSC0028157
tacaaaaactaa

SEQ ID NO: 317657 - DNA, 12 bp, Artificial Sequence
  Oligonucleotide primer for the detection of SNP TSC0028157
taatgatttggt

SEQ ID NO: 317658 - DNA, 12 bp, Artificial Sequence
  Oligonucleotide primer for the detection of SNP TSC0028157
taacgatttggt

SEQ ID NO: 317659 - DNA, 12 bp, Artificial Sequence
  Oligonucleotide primer for the detection of SNP TSC0028157
taatgattcggt

SEQ ID NO: 317660 - DNA, 12 bp, Artificial Sequence
  Oligonucleotide primer for the detection of SNP TSC0028157
taacgattcggt

SEQ ID NO: 317661 - DNA, 12 bp, Artificial Sequence
  Oligonucleotide primer for the detection of SNP TSC0028157
caacaacccaac

SEQ ID NO: 317662 - DNA, 12 bp, Artificial Sequence
  Oligonucleotide primer for the detection of SNP TSC0028157
caacaacccgac

SEQ ID NO: 317663 - DNA, 12 bp, Artificial Sequence
  Oligonucleotide primer for the detection of SNP TSC0028157
caacgacccaac

SEQ ID NO: 317664 - DNA, 12 bp, Artificial Sequence
  Oligonucleotide primer for the detection of SNP TSC0028157
caacgacccgac

SEQ ID NO: 317665 - DNA, 12 bp, Artificial Sequence
  Oligonucleotide primer for the detection of SNP TSC0028157
ataagaattaat

SEQ ID NO: 317666 - DNA, 12 bp, Artificial Sequence
  Oligonucleotide primer for the detection of SNP TSC0028157
ataagaattaac

SEQ ID NO: 317667 - DNA, 12 bp, Artificial Sequence
  Oligonucleotide primer for the detection of SNP TSC0028158
aaaacaacacac

SEQ ID NO: 317668 - DNA, 12 bp, Artificial Sequence
  Oligonucleotide primer for the detection of SNP TSC0028158
taaggtatattg

SEQ ID NO: 317669 - DNA, 12 bp, Artificial Sequence
  Oligonucleotide primer for the detection of SNP TSC0028161
aacccaaactat

SEQ ID NO: 317670 - DNA, 12 bp, Artificial Sequence
  Oligonucleotide primer for the detection of SNP TSC0028161
tttgtttgtgta

SEQ ID NO: 317671 - DNA, 12 bp, Artificial Sequence
  Oligonucleotide primer for the detection of SNP TSC0028161
tttgttcgtgta

SEQ ID NO: 317672 - DNA, 12 bp, Artificial Sequence
  Oligonucleotide primer for the detection of SNP TSC0028164
tcccactaccaa

SEQ ID NO: 317673 - DNA, 12 bp, Artificial Sequence
  Oligonucleotide primer for the detection of SNP TSC0028164
tcccgctaccaa

SEQ ID NO: 317674 - DNA, 12 bp, Artificial Sequence
  Oligonucleotide primer for the detection of SNP TSC0028164
taggagatgttt

SEQ ID NO: 317675 - DNA, 12 bp, Artificial Sequence
  Oligonucleotide primer for the detection of SNP TSC0028164
ttttgttgttag

SEQ ID NO: 317676 - DNA, 12 bp, Artificial Sequence
  Oligonucleotide primer for the detection of SNP TSC0028164
tttcgttgttag

SEQ ID NO: 317677 - DNA, 12 bp, Artificial Sequence
  Oligonucleotide primer for the detection of SNP TSC0028166
aacttttatttc

SEQ ID NO: 317678 - DNA, 12 bp, Artificial Sequence
  Oligonucleotide primer for the detection of SNP TSC0028167
tctatctttctt

SEQ ID NO: 317679 - DNA, 12 bp, Artificial Sequence
  Oligonucleotide primer for the detection of SNP TSC0028167
agaaaagaaaag

SEQ ID NO: 317680 - DNA, 12 bp, Artificial Sequence
  Oligonucleotide primer for the detection of SNP TSC0028168
aaaattaaacca

SEQ ID NO: 317681 - DNA, 12 bp, Artificial Sequence
  Oligonucleotide primer for the detection of SNP TSC0028168
aggttaatttat

SEQ ID NO: 317682 - DNA, 12 bp, Artificial Sequence
  Oligonucleotide primer for the detection of SNP TSC0028168
ggggttagatta

SEQ ID NO: 317683 - DNA, 12 bp, Artificial Sequence
  Oligonucleotide primer for the detection of SNP TSC0028169
tctaacatataa

SEQ ID NO: 317684 - DNA, 12 bp, Artificial Sequence
  Oligonucleotide primer for the detection of SNP TSC0028169
gattattgggga

SEQ ID NO: 317685 - DNA, 12 bp, Artificial Sequence
  Oligonucleotide primer for the detection of SNP TSC0028170
aacctacttcta

SEQ ID NO: 317686 - DNA, 12 bp, Artificial Sequence
  Oligonucleotide primer for the detection of SNP TSC0028170
tttagtggttaa

SEQ ID NO: 317687 - DNA, 12 bp, Artificial Sequence
  Oligonucleotide primer for the detection of SNP TSC0028170
ccaataatcaaa

SEQ ID NO: 317688 - DNA, 12 bp, Artificial Sequence
  Oligonucleotide primer for the detection of SNP TSC0028170
agtttgtttttg

SEQ ID NO: 317689 - DNA, 12 bp, Artificial Sequence
  Oligonucleotide primer for the detection of SNP TSC0028171
ctattaaaaatc

SEQ ID NO: 317690 - DNA, 12 bp, Artificial Sequence
  Oligonucleotide primer for the detection of SNP TSC0028171
tattgatttgta

SEQ ID NO: 317691 - DNA, 12 bp, Artificial Sequence
  Oligonucleotide primer for the detection of SNP TSC0028172
catcttttaaaa

SEQ ID NO: 317692 - DNA, 12 bp, Artificial Sequence
  Oligonucleotide primer for the detection of SNP TSC0028172
cgtcttttaaaa

SEQ ID NO: 317693 - DNA, 12 bp, Artificial Sequence
  Oligonucleotide primer for the detection of SNP TSC0028172
tgttttttaagg

SEQ ID NO: 317694 - DNA, 12 bp, Artificial Sequence
  Oligonucleotide primer for the detection of SNP TSC0028172
cgttttttaagg

SEQ ID NO: 317695 - DNA, 12 bp, Artificial Sequence
  Oligonucleotide primer for the detection of SNP TSC0028173
ttaaactctacc

SEQ ID NO: 317696 - DNA, 12 bp, Artificial Sequence
  Oligonucleotide primer for the detection of SNP TSC0028174
aaaaattactca

SEQ ID NO: 317697 - DNA, 12 bp, Artificial Sequence
  Oligonucleotide primer for the detection of SNP TSC0028174
tattattataat

SEQ ID NO: 317698 - DNA, 12 bp, Artificial Sequence
  Oligonucleotide primer for the detection of SNP TSC0028174
tattattacaac

SEQ ID NO: 317699 - DNA, 12 bp, Artificial Sequence
  Oligonucleotide primer for the detection of SNP TSC0028174
taaagattattt

SEQ ID NO: 317700 - DNA, 12 bp, Artificial Sequence
  Oligonucleotide primer for the detection of SNP TSC0028175
caataaataaat

SEQ ID NO: 317701 - DNA, 12 bp, Artificial Sequence
  Oligonucleotide primer for the detection of SNP TSC0028175
ttatgggaggta

SEQ ID NO: 317702 - DNA, 12 bp, Artificial Sequence
  Oligonucleotide primer for the detection of SNP TSC0028181
catctacctact

SEQ ID NO: 317703 - DNA, 12 bp, Artificial Sequence
  Oligonucleotide primer for the detection of SNP TSC0028181
cgtctacctact

SEQ ID NO: 317704 - DNA, 12 bp, Artificial Sequence
  Oligonucleotide primer for the detection of SNP TSC0028181
tgtagagtaagg

SEQ ID NO: 317705 - DNA, 12 bp, Artificial Sequence
  Oligonucleotide primer for the detection of SNP TSC0028181
tacaaaacaaaa

SEQ ID NO: 317706 - DNA, 12 bp, Artificial Sequence
  Oligonucleotide primer for the detection of SNP TSC0028181
tgtttatttgtt

SEQ ID NO: 317707 - DNA, 12 bp, Artificial Sequence
  Oligonucleotide primer for the detection of SNP TSC0028181
cgtttatttgtt

SEQ ID NO: 317708 - DNA, 12 bp, Artificial Sequence
  Oligonucleotide primer for the detection of SNP TSC0028182
ccctacccacct

SEQ ID NO: 317709 - DNA, 12 bp, Artificial Sequence
  Oligonucleotide primer for the detection of SNP TSC0028183
ataataaaactt

SEQ ID NO: 317710 - DNA, 12 bp, Artificial Sequence
  Oligonucleotide primer for the detection of SNP TSC0028183
gtaataaaactt

SEQ ID NO: 317711 - DNA, 12 bp, Artificial Sequence
  Oligonucleotide primer for the detection of SNP TSC0028183
attatattagaa

SEQ ID NO: 317712 - DNA, 12 bp, Artificial Sequence
  Oligonucleotide primer for the detection of SNP TSC0028184
ctaacaacatca

SEQ ID NO: 317713 - DNA, 12 bp, Artificial Sequence
  Oligonucleotide primer for the detection of SNP TSC0028184
agatgttttttt

SEQ ID NO: 317714 - DNA, 12 bp, Artificial Sequence
  Oligonucleotide primer for the detection of SNP TSC0028184
aaataccttctc

SEQ ID NO: 317715 - DNA, 12 bp, Artificial Sequence
  Oligonucleotide primer for the detection of SNP TSC0028184
ttaataatatta

SEQ ID NO: 317716 - DNA, 12 bp, Artificial Sequence
  Oligonucleotide primer for the detection of SNP TSC0028185
cctatcacttta

SEQ ID NO: 317717 - DNA, 12 bp, Artificial Sequence
  Oligonucleotide primer for the detection of SNP TSC0028185
taaaggtttttt

SEQ ID NO: 317718 - DNA, 12 bp, Artificial Sequence
  Oligonucleotide primer for the detection of SNP TSC0028185
caaaaactttct

SEQ ID NO: 317719 - DNA, 12 bp, Artificial Sequence
  Oligonucleotide primer for the detection of SNP TSC0028185
tttgttattttg

SEQ ID NO: 317720 - DNA, 12 bp, Artificial Sequence
  Oligonucleotide primer for the detection of SNP TSC0028196
taaaccccaaaa

SEQ ID NO: 317721 - DNA, 12 bp, Artificial Sequence
  Oligonucleotide primer for the detection of SNP TSC0028196
taaaccccgaaa

SEQ ID NO: 317722 - DNA, 12 bp, Artificial Sequence
  Oligonucleotide primer for the detection of SNP TSC0028196
tagtgagtgtgt

SEQ ID NO: 317723 - DNA, 12 bp, Artificial Sequence
  Oligonucleotide primer for the detection of SNP TSC0028196
tagcgagtgtgt

SEQ ID NO: 317724 - DNA, 12 bp, Artificial Sequence
  Oligonukleotid-Primer
caacaaatatat

SEQ ID NO: 317725 - DNA, 12 bp, Artificial Sequence
  Oligonucleotide primer for the detection of SNP TSC0028196
caacgaatatat

SEQ ID NO: 317726 - DNA, 12 bp, Artificial Sequence
  Oligonucleotide primer for the detection of SNP TSC0028196
tgggtttcggga

SEQ ID NO: 317727 - DNA, 12 bp, Artificial Sequence
  Oligonucleotide primer for the detection of SNP TSC0028207
aacaaataattc

SEQ ID NO: 317728 - DNA, 12 bp, Artificial Sequence
  Oligonucleotide primer for the detection of SNP TSC0028207
aacctccaaaaa

SEQ ID NO: 317729 - DNA, 12 bp, Artificial Sequence
  Oligonucleotide primer for the detection of SNP TSC0028207
gatagatggttt

SEQ ID NO: 317730 - DNA, 12 bp, Artificial Sequence
  Oligonucleotide primer for the detection of SNP TSC0028208
aaactacaacca

SEQ ID NO: 317731 - DNA, 12 bp, Artificial Sequence
  Oligonucleotide primer for the detection of SNP TSC0028208
aaactacgacca

SEQ ID NO: 317732 - DNA, 12 bp, Artificial Sequence
  Oligonucleotide primer for the detection of SNP TSC0028208
ggatattgggtt

SEQ ID NO: 317733 - DNA, 12 bp, Artificial Sequence
  Oligonucleotide primer for the detection of SNP TSC0028208
aaaaatactaaa

SEQ ID NO: 317734 - DNA, 12 bp, Artificial Sequence
  Oligonucleotide primer for the detection of SNP TSC0028208
aaaattatgatt

SEQ ID NO: 317735 - DNA, 12 bp, Artificial Sequence
  Oligonucleotide primer for the detection of SNP TSC0028208
aaaattacgatt

SEQ ID NO: 317736 - DNA, 12 bp, Artificial Sequence
  Oligonucleotide primer for the detection of SNP TSC0028210
attcacttaaaa

SEQ ID NO: 317737 - DNA, 12 bp, Artificial Sequence
  Oligonucleotide primer for the detection of SNP TSC0028210
tacttttactta

SEQ ID NO: 317738 - DNA, 12 bp, Artificial Sequence
  Oligonucleotide primer for the detection of SNP TSC0028210
gtttatttggaa

SEQ ID NO: 317739 - DNA, 12 bp, Artificial Sequence
  Oligonucleotide primer for the detection of SNP TSC0028216
attaaacaacta

SEQ ID NO: 317740 - DNA, 12 bp, Artificial Sequence
  Oligonucleotide primer for the detection of SNP TSC0028216
attaaacgacta

SEQ ID NO: 317741 - DNA, 12 bp, Artificial Sequence
  Oligonucleotide primer for the detection of SNP TSC0028216
tatttggtatat

SEQ ID NO: 317742 - DNA, 12 bp, Artificial Sequence
  Oligonucleotide primer for the detection of SNP TSC0028216
atctaacacata

SEQ ID NO: 317743 - DNA, 12 bp, Artificial Sequence
  Oligonucleotide primer for the detection of SNP TSC0028216
attggatggtta

SEQ ID NO: 317744 - DNA, 12 bp, Artificial Sequence
  Oligonucleotide primer for the detection of SNP TSC0028216
attggacggtta

SEQ ID NO: 317745 - DNA, 12 bp, Artificial Sequence
  Oligonucleotide primer for the detection of SNP TSC0028217
ccaaataaatat

SEQ ID NO: 317746 - DNA, 12 bp, Artificial Sequence
  Oligonucleotide primer for the detection of SNP TSC0028217
tattggggggta

SEQ ID NO: 317747 - DNA, 12 bp, Artificial Sequence
  Oligonucleotide primer for the detection of SNP TSC0028218
aattcttatttt

SEQ ID NO: 317748 - DNA, 12 bp, Artificial Sequence
  Oligonucleotide primer for the detection of SNP TSC0028218
ataggttgtggg

SEQ ID NO: 317749 - DNA, 12 bp, Artificial Sequence
  Oligonucleotide primer for the detection of SNP TSC0028225
cactatataatt

SEQ ID NO: 317750 - DNA, 12 bp, Artificial Sequence
  Oligonucleotide primer for the detection of SNP TSC0028225
gtaaggaagggg

SEQ ID NO: 317751 - DNA, 12 bp, Artificial Sequence
  Oligonucleotide primer for the detection of SNP TSC0028226
tccctaataatt

SEQ ID NO: 317752 - DNA, 12 bp, Artificial Sequence
  Oligonucleotide primer for the detection of SNP TSC0028226
aattgttggaaa

SEQ ID NO: 317753 - DNA, 12 bp, Artificial Sequence
  Oligonucleotide primer for the detection of SNP TSC0028229
cttaaataatcc

SEQ ID NO: 317754 - DNA, 12 bp, Artificial Sequence
  Oligonucleotide primer for the detection of SNP TSC0028229
aggttaaggcgg

SEQ ID NO: 317755 - DNA, 12 bp, Artificial Sequence
  Oligonucleotide primer for the detection of SNP TSC0028233
attatctcctcc

SEQ ID NO: 317756 - DNA, 12 bp, Artificial Sequence
  Oligonucleotide primer for the detection of SNP TSC0028233
aattttgtaaag

SEQ ID NO: 317757 - DNA, 12 bp, Artificial Sequence
  Oligonucleotide primer for the detection of SNP TSC0028233
aattttacaaaa

SEQ ID NO: 317758 - DNA, 12 bp, Artificial Sequence
  Oligonucleotide primer for the detection of SNP TSC0028234
taaaacctaatt

SEQ ID NO: 317759 - DNA, 12 bp, Artificial Sequence
  Oligonucleotide primer for the detection of SNP TSC0028234
ttgtggtattgg

SEQ ID NO: 317760 - DNA, 12 bp, Artificial Sequence
  Oligonucleotide primer for the detection of SNP TSC0028234
ctataacattaa

SEQ ID NO: 317761 - DNA, 12 bp, Artificial Sequence
  Oligonucleotide primer for the detection of SNP TSC0028234
taaagtttgatt

SEQ ID NO: 317762 - DNA, 12 bp, Artificial Sequence
  Oligonucleotide primer for the detection of SNP TSC0028236
tattccttatcc

SEQ ID NO: 317763 - DNA, 12 bp, Artificial Sequence
  Oligonucleotide primer for the detection of SNP TSC0028236
ttaggaaaaatg

SEQ ID NO: 317764 - DNA, 12 bp, Artificial Sequence
  Oligonucleotide primer for the detection of SNP TSC0028237
tattttttttgg

SEQ ID NO: 317765 - DNA, 12 bp, Artificial Sequence
  Oligonucleotide primer for the detection of SNP TSC0028238
ttgttttttata

SEQ ID NO: 317766 - DNA, 12 bp, Artificial Sequence
  Oligonucleotide primer for the detection of SNP TSC0028247
aactataaattc

SEQ ID NO: 317767 - DNA, 12 bp, Artificial Sequence
  Oligonucleotide primer for the detection of SNP TSC0028247
atattgttttaa

SEQ ID NO: 317768 - DNA, 12 bp, Artificial Sequence
  Oligonucleotide primer for the detection of SNP TSC0028248
ttcataccccta

SEQ ID NO: 317769 - DNA, 12 bp, Artificial Sequence
  Oligonucleotide primer for the detection of SNP TSC0028248
tttataagattg

SEQ ID NO: 317770 - DNA, 12 bp, Artificial Sequence
  Oligonucleotide primer for the detection of SNP TSC0028248
tttataaaatta

SEQ ID NO: 317771 - DNA, 12 bp, Artificial Sequence
  Oligonucleotide primer for the detection of SNP TSC0028254
aaaaaattcaat

SEQ ID NO: 317772 - DNA, 12 bp, Artificial Sequence
  Oligonucleotide primer for the detection of SNP TSC0028254
aaaaaattcgat

SEQ ID NO: 317773 - DNA, 12 bp, Artificial Sequence
  Oligonucleotide primer for the detection of SNP TSC0028254
taagagagagta

SEQ ID NO: 317774 - DNA, 12 bp, Artificial Sequence
  Oligonucleotide primer for the detection of SNP TSC0028264
tattttaggtga

SEQ ID NO: 317775 - DNA, 12 bp, Artificial Sequence
  Oligonucleotide primer for the detection of SNP TSC0028265
cttatctaaccc

SEQ ID NO: 317776 - DNA, 12 bp, Artificial Sequence
  Oligonucleotide primer for the detection of SNP TSC0028266
ggttgattttat

SEQ ID NO: 317777 - DNA, 12 bp, Artificial Sequence
  Oligonucleotide primer for the detection of SNP TSC0028266
attaattccata

SEQ ID NO: 317778 - DNA, 12 bp, Artificial Sequence
  Oligonucleotide primer for the detection of SNP TSC0028266
tagagtagtaaa

SEQ ID NO: 317779 - DNA, 12 bp, Artificial Sequence
  Oligonucleotide primer for the detection of SNP TSC0028270
acatactataaa

SEQ ID NO: 317780 - DNA, 12 bp, Artificial Sequence
  Oligonucleotide primer for the detection of SNP TSC0028270
ttttttcgattt

SEQ ID NO: 317781 - DNA, 12 bp, Artificial Sequence
  Oligonucleotide primer for the detection of SNP TSC0028270
ctcccccaaccc

SEQ ID NO: 317782 - DNA, 12 bp, Artificial Sequence
  Oligonucleotide primer for the detection of SNP TSC0028270
ctcccccgaccc

SEQ ID NO: 317783 - DNA, 12 bp, Artificial Sequence
  Oligonucleotide primer for the detection of SNP TSC0028270
atatgttgtgag

SEQ ID NO: 317784 - DNA, 12 bp, Artificial Sequence
  Oligonucleotide primer for the detection of SNP TSC0028271
caacatctttac

SEQ ID NO: 317785 - DNA, 12 bp, Artificial Sequence
  Oligonucleotide primer for the detection of SNP TSC0028271
ttgagggtgggg

SEQ ID NO: 317786 - DNA, 12 bp, Artificial Sequence
  Oligonucleotide primer for the detection of SNP TSC0028271
taatatttttat

SEQ ID NO: 317787 - DNA, 12 bp, Artificial Sequence
  Oligonucleotide primer for the detection of SNP TSC0028272
atacctttccta

SEQ ID NO: 317788 - DNA, 12 bp, Artificial Sequence
  Oligonucleotide primer for the detection of SNP TSC0028272
ttgggaaaggag

SEQ ID NO: 317789 - DNA, 12 bp, Artificial Sequence
  Oligonucleotide primer for the detection of SNP TSC0028274
tatttttctccc

SEQ ID NO: 317790 - DNA, 12 bp, Artificial Sequence
  Oligonucleotide primer for the detection of SNP TSC0028274
aggttttgaagg

SEQ ID NO: 317791 - DNA, 12 bp, Artificial Sequence
  Oligonucleotide primer for the detection of SNP TSC0028275
ttattgtattag

SEQ ID NO: 317792 - DNA, 12 bp, Artificial Sequence
  Oligonucleotide primer for the detection of SNP TSC0028282
aacataacatat

SEQ ID NO: 317793 - DNA, 12 bp, Artificial Sequence
  Oligonucleotide primer for the detection of SNP TSC0028282
aacataacgtat

SEQ ID NO: 317794 - DNA, 12 bp, Artificial Sequence
  Oligonucleotide primer for the detection of SNP TSC0028282
aacgtaacatat

SEQ ID NO: 317795 - DNA, 12 bp, Artificial Sequence
  Oligonucleotide primer for the detection of SNP TSC0028282
aacgtaacgtat

SEQ ID NO: 317796 - DNA, 12 bp, Artificial Sequence
  Oligonucleotide primer for the detection of SNP TSC0028282
gtatggtattag

SEQ ID NO: 317797 - DNA, 12 bp, Artificial Sequence
  Oligonucleotide primer for the detection of SNP TSC0028282
gtacggtattag

SEQ ID NO: 317798 - DNA, 12 bp, Artificial Sequence
  Oligonucleotide primer for the detection of SNP TSC0028282
acacaacaccaa

SEQ ID NO: 317799 - DNA, 12 bp, Artificial Sequence
  Oligonucleotide primer for the detection of SNP TSC0028282
acacgacaccaa

SEQ ID NO: 317800 - DNA, 12 bp, Artificial Sequence
  Oligonucleotide primer for the detection of SNP TSC0028282
agtgtggtgtgt

SEQ ID NO: 317801 - DNA, 12 bp, Artificial Sequence
  Oligonucleotide primer for the detection of SNP TSC0028282
agcgtggtgtgt

SEQ ID NO: 317802 - DNA, 12 bp, Artificial Sequence
  Oligonucleotide primer for the detection of SNP TSC0028282
agtgtggcgtgt

SEQ ID NO: 317803 - DNA, 12 bp, Artificial Sequence
  Oligonucleotide primer for the detection of SNP TSC0028282
agcgtggcgtgt

SEQ ID NO: 317804 - DNA, 12 bp, Artificial Sequence
  Oligonucleotide primer for the detection of SNP TSC0028283
atatacacacac

SEQ ID NO: 317805 - DNA, 12 bp, Artificial Sequence
  Oligonucleotide primer for the detection of SNP TSC0028283
atatacacacgc

SEQ ID NO: 317806 - DNA, 12 bp, Artificial Sequence
  Oligonucleotide primer for the detection of SNP TSC0028283
atatacacgcac

SEQ ID NO: 317807 - DNA, 12 bp, Artificial Sequence
  Oligonucleotide primer for the detection of SNP TSC0028283
atatacgcacac

SEQ ID NO: 317808 - DNA, 12 bp, Artificial Sequence
  Oligonucleotide primer for the detection of SNP TSC0028283
atatacacgcgc

SEQ ID NO: 317809 - DNA, 12 bp, Artificial Sequence
  Oligonucleotide primer for the detection of SNP TSC0028283
atatacgcacgc

SEQ ID NO: 317810 - DNA, 12 bp, Artificial Sequence
  Oligonucleotide primer for the detection of SNP TSC0028283
atatacgcgcac

SEQ ID NO: 317811 - DNA, 12 bp, Artificial Sequence
  Oligonucleotide primer for the detection of SNP TSC0028283
atatacgcgcgc

SEQ ID NO: 317812 - DNA, 12 bp, Artificial Sequence
  Oligonucleotide primer for the detection of SNP TSC0028283
tgtatgtatgtg

SEQ ID NO: 317813 - DNA, 12 bp, Artificial Sequence
  Oligonucleotide primer for the detection of SNP TSC0028283
tgtacgtatgtg

SEQ ID NO: 317814 - DNA, 12 bp, Artificial Sequence
  Oligonucleotide primer for the detection of SNP TSC0028283
tatacacatata

SEQ ID NO: 317815 - DNA, 12 bp, Artificial Sequence
  Oligonucleotide primer for the detection of SNP TSC0028283
tatacgcatata

SEQ ID NO: 317816 - DNA, 12 bp, Artificial Sequence
  Oligonucleotide primer for the detection of SNP TSC0028284
tgtatgtgtgtg

SEQ ID NO: 317817 - DNA, 12 bp, Artificial Sequence
  Oligonukleotid-Primer
tgtatgcgtgtg

SEQ ID NO: 317818 - DNA, 12 bp, Artificial Sequence
  Oligonucleotide primer for the detection of SNP TSC0028284
tgtatgtgcgtg

SEQ ID NO: 317819 - DNA, 12 bp, Artificial Sequence
  Oligonucleotide primer for the detection of SNP TSC0028284
tgtatgtgtgcg

SEQ ID NO: 317820 - DNA, 12 bp, Artificial Sequence
  Oligonucleotide primer for the detection of SNP TSC0028284
tgtatgcgcgtg

SEQ ID NO: 317821 - DNA, 12 bp, Artificial Sequence
  Oligonucleotide primer for the detection of SNP TSC0028284
tgtatgcgtgcg

SEQ ID NO: 317822 - DNA, 12 bp, Artificial Sequence
  Oligonucleotide primer for the detection of SNP TSC0028284
tgtatgtgcgcg

SEQ ID NO: 317823 - DNA, 12 bp, Artificial Sequence
  Oligonucleotide primer for the detection of SNP TSC0028284
tgtatgcgcgcg

SEQ ID NO: 317824 - DNA, 12 bp, Artificial Sequence
  Oligonucleotide primer for the detection of SNP TSC0028284
tacatacacaca

SEQ ID NO: 317825 - DNA, 12 bp, Artificial Sequence
  Oligonucleotide primer for the detection of SNP TSC0028284
tacatacacacg

SEQ ID NO: 317826 - DNA, 12 bp, Artificial Sequence
  Oligonucleotide primer for the detection of SNP TSC0028284
tacatacacgca

SEQ ID NO: 317827 - DNA, 12 bp, Artificial Sequence
  Oligonucleotide primer for the detection of SNP TSC0028284
tacatacgcaca

SEQ ID NO: 317828 - DNA, 12 bp, Artificial Sequence
  Oligonucleotide primer for the detection of SNP TSC0028284
tacatacacgcg

SEQ ID NO: 317829 - DNA, 12 bp, Artificial Sequence
  Oligonucleotide primer for the detection of SNP TSC0028284
tacatacgcacg

SEQ ID NO: 317830 - DNA, 12 bp, Artificial Sequence
  Oligonucleotide primer for the detection of SNP TSC0028284
tacatacgcgca

SEQ ID NO: 317831 - DNA, 12 bp, Artificial Sequence
  Oligonucleotide primer for the detection of SNP TSC0028284
tacatacgcgcg

SEQ ID NO: 317832 - DNA, 12 bp, Artificial Sequence
  Oligonucleotide primer for the detection of SNP TSC0028285
tcaaaaatttaa

SEQ ID NO: 317833 - DNA, 12 bp, Artificial Sequence
  Oligonucleotide primer for the detection of SNP TSC0028285
tcgaaaatttaa

SEQ ID NO: 317834 - DNA, 12 bp, Artificial Sequence
  Oligonucleotide primer for the detection of SNP TSC0028285
attgggttattt

SEQ ID NO: 317835 - DNA, 12 bp, Artificial Sequence
  Oligonucleotide primer for the detection of SNP TSC0028285
actaaattattt

SEQ ID NO: 317836 - DNA, 12 bp, Artificial Sequence
  Oligonucleotide primer for the detection of SNP TSC0028285
ttgaaagtttga

SEQ ID NO: 317837 - DNA, 12 bp, Artificial Sequence
  Oligonucleotide primer for the detection of SNP TSC0028285
tcgaaagtttga

SEQ ID NO: 317838 - DNA, 12 bp, Artificial Sequence
  Oligonucleotide primer for the detection of SNP TSC0028286
cttattcactaa

SEQ ID NO: 317839 - DNA, 12 bp, Artificial Sequence
  Oligonucleotide primer for the detection of SNP TSC0028286
cgtgttattttt

SEQ ID NO: 317840 - DNA, 12 bp, Artificial Sequence
  Oligonucleotide primer for the detection of SNP TSC0028286
catactattctt

SEQ ID NO: 317841 - DNA, 12 bp, Artificial Sequence
  Oligonucleotide primer for the detection of SNP TSC0028286
cgtactattctt

SEQ ID NO: 317842 - DNA, 12 bp, Artificial Sequence
  Oligonucleotide primer for the detection of SNP TSC0028286
tttatttattaa

SEQ ID NO: 317843 - DNA, 12 bp, Artificial Sequence
  Oligonucleotide primer for the detection of SNP TSC0028287
ctcacctcttac

SEQ ID NO: 317844 - DNA, 12 bp, Artificial Sequence
  Oligonucleotide primer for the detection of SNP TSC0028287
tgaggttatata

SEQ ID NO: 317845 - DNA, 12 bp, Artificial Sequence
  Oligonucleotide primer for the detection of SNP TSC0028293
gttattgtgttg

SEQ ID NO: 317846 - DNA, 12 bp, Artificial Sequence
  Oligonucleotide primer for the detection of SNP TSC0028296
ccccccacacct

SEQ ID NO: 317847 - DNA, 12 bp, Artificial Sequence
  Oligonucleotide primer for the detection of SNP TSC0028296
ccccccgcacct

SEQ ID NO: 317848 - DNA, 12 bp, Artificial Sequence
  Oligonucleotide primer for the detection of SNP TSC0028296
gtggattattgg

SEQ ID NO: 317849 - DNA, 12 bp, Artificial Sequence
  Oligonucleotide primer for the detection of SNP TSC0028296
gtggattatcgg

SEQ ID NO: 317850 - DNA, 12 bp, Artificial Sequence
  Oligonucleotide primer for the detection of SNP TSC0028298
ttatgagaagtt

SEQ ID NO: 317851 - DNA, 12 bp, Artificial Sequence
  Oligonucleotide primer for the detection of SNP TSC0028298
atgggagaaatt

SEQ ID NO: 317852 - DNA, 12 bp, Artificial Sequence
  Oligonucleotide primer for the detection of SNP TSC0028303
ctacttaaaact

SEQ ID NO: 317853 - DNA, 12 bp, Artificial Sequence
  Oligonucleotide primer for the detection of SNP TSC0028303
ttttgtttttgg

SEQ ID NO: 317854 - DNA, 12 bp, Artificial Sequence
  Oligonucleotide primer for the detection of SNP TSC0028303
ttttgttttcgg

SEQ ID NO: 317855 - DNA, 12 bp, Artificial Sequence
  Oligonucleotide primer for the detection of SNP TSC0028305
tacttctaaaac

SEQ ID NO: 317856 - DNA, 12 bp, Artificial Sequence
  Oligonucleotide primer for the detection of SNP TSC0028308
ataaacatctcc

SEQ ID NO: 317857 - DNA, 12 bp, Artificial Sequence
  Oligonucleotide primer for the detection of SNP TSC0028308
ataaacgtctcc

SEQ ID NO: 317858 - DNA, 12 bp, Artificial Sequence
  Oligonucleotide primer for the detection of SNP TSC0028308
gttatggagtta

SEQ ID NO: 317859 - DNA, 12 bp, Artificial Sequence
  Oligonucleotide primer for the detection of SNP TSC0028308
actataaaatca

SEQ ID NO: 317860 - DNA, 12 bp, Artificial Sequence
  Oligonucleotide primer for the detection of SNP TSC0028308
gtgaatgttttt

SEQ ID NO: 317861 - DNA, 12 bp, Artificial Sequence
  Oligonucleotide primer for the detection of SNP TSC0028308
gtgaacgttttt

SEQ ID NO: 317862 - DNA, 12 bp, Artificial Sequence
  Oligonucleotide primer for the detection of SNP TSC0028309
ttaatattggat

SEQ ID NO: 317863 - DNA, 12 bp, Artificial Sequence
  Oligonucleotide primer for the detection of SNP TSC0028309
attaatattaaa

SEQ ID NO: 317864 - DNA, 12 bp, Artificial Sequence
  Oligonucleotide primer for the detection of SNP TSC0028309
aaatataaatag

SEQ ID NO: 317865 - DNA, 12 bp, Artificial Sequence
  Oligonucleotide primer for the detection of SNP TSC0028310
aaatatccataa

SEQ ID NO: 317866 - DNA, 12 bp, Artificial Sequence
  Oligonucleotide primer for the detection of SNP TSC0028310
aagtgaaatagg

SEQ ID NO: 317867 - DNA, 12 bp, Artificial Sequence
  Oligonucleotide primer for the detection of SNP TSC0028310
ttagatatttat

SEQ ID NO: 317868 - DNA, 12 bp, Artificial Sequence
  Oligonucleotide primer for the detection of SNP TSC0028311
taacttcaaata

SEQ ID NO: 317869 - DNA, 12 bp, Artificial Sequence
  Oligonucleotide primer for the detection of SNP TSC0028311
aaatagggttat

SEQ ID NO: 317870 - DNA, 12 bp, Artificial Sequence
  Oligonucleotide primer for the detection of SNP TSC0028311
ataaaaccataa

SEQ ID NO: 317871 - DNA, 12 bp, Artificial Sequence
  Oligonucleotide primer for the detection of SNP TSC0028311
atggttttagat

SEQ ID NO: 317872 - DNA, 12 bp, Artificial Sequence
  Oligonucleotide primer for the detection of SNP TSC0028313
aaacataatact

SEQ ID NO: 317873 - DNA, 12 bp, Artificial Sequence
  Oligonucleotide primer for the detection of SNP TSC0028314
gtatggtgttgg

SEQ ID NO: 317874 - DNA, 12 bp, Artificial Sequence
  Oligonucleotide primer for the detection of SNP TSC0028314
acataatactaa

SEQ ID NO: 317875 - DNA, 12 bp, Artificial Sequence
  Oligonucleotide primer for the detection of SNP TSC0028318
aaaaaacaactt

SEQ ID NO: 317876 - DNA, 12 bp, Artificial Sequence
  Oligonucleotide primer for the detection of SNP TSC0028318
ttcctcttcccc

SEQ ID NO: 317877 - DNA, 12 bp, Artificial Sequence
  Oligonucleotide primer for the detection of SNP TSC0028318
aagaggtagttt

SEQ ID NO: 317878 - DNA, 12 bp, Artificial Sequence
  Oligonucleotide primer for the detection of SNP TSC0028320
ctatatttctac

SEQ ID NO: 317879 - DNA, 12 bp, Artificial Sequence
  Oligonucleotide primer for the detection of SNP TSC0028320
tatgtgtttaag

SEQ ID NO: 317880 - DNA, 12 bp, Artificial Sequence
  Oligonucleotide primer for the detection of SNP TSC0028320
tatgcgtttaag

SEQ ID NO: 317881 - DNA, 12 bp, Artificial Sequence
  Oligonucleotide primer for the detection of SNP TSC0028322
caaatatacacc

SEQ ID NO: 317882 - DNA, 12 bp, Artificial Sequence
  Oligonucleotide primer for the detection of SNP TSC0028322
caaatatacgcc

SEQ ID NO: 317883 - DNA, 12 bp, Artificial Sequence
  Oligonucleotide primer for the detection of SNP TSC0028328
ataactcactaa

SEQ ID NO: 317884 - DNA, 12 bp, Artificial Sequence
  Oligonucleotide primer for the detection of SNP TSC0028328
atttattttgta

SEQ ID NO: 317885 - DNA, 12 bp, Artificial Sequence
  Oligonucleotide primer for the detection of SNP TSC0028328
atttatttcgta

SEQ ID NO: 317886 - DNA, 12 bp, Artificial Sequence
  Oligonucleotide primer for the detection of SNP TSC0028328
attcattccata

SEQ ID NO: 317887 - DNA, 12 bp, Artificial Sequence
  Oligonucleotide primer for the detection of SNP TSC0028328
attcattccgta

SEQ ID NO: 317888 - DNA, 12 bp, Artificial Sequence
  Oligonucleotide primer for the detection of SNP TSC0028328
gtggtttattag

SEQ ID NO: 317889 - DNA, 12 bp, Artificial Sequence
  Oligonucleotide primer for the detection of SNP TSC0028330
tcgaaaatttct

SEQ ID NO: 317890 - DNA, 12 bp, Artificial Sequence
  Oligonukleotid-Primer
agtttaaaggga

SEQ ID NO: 317891 - DNA, 12 bp, Artificial Sequence
  Oligonucleotide primer for the detection of SNP TSC0028330
ttgaaggttttt

SEQ ID NO: 317892 - DNA, 12 bp, Artificial Sequence
  Oligonucleotide primer for the detection of SNP TSC0028330
tcgaaggttttt

SEQ ID NO: 317893 - DNA, 12 bp, Artificial Sequence
  Oligonucleotide primer for the detection of SNP TSC0028332
tctaccctccaa

SEQ ID NO: 317894 - DNA, 12 bp, Artificial Sequence
  Oligonucleotide primer for the detection of SNP TSC0028332
ttccccaacaat

SEQ ID NO: 317895 - DNA, 12 bp, Artificial Sequence
  Oligonucleotide primer for the detection of SNP TSC0028333
gtggttttgttt

SEQ ID NO: 317896 - DNA, 12 bp, Artificial Sequence
  Oligonucleotide primer for the detection of SNP TSC0028333
ataattttattt

SEQ ID NO: 317897 - DNA, 12 bp, Artificial Sequence
  Oligonucleotide primer for the detection of SNP TSC0028333
agaggaataaaa

SEQ ID NO: 317898 - DNA, 12 bp, Artificial Sequence
  Oligonucleotide primer for the detection of SNP TSC0028334
tcattttctcat

SEQ ID NO: 317899 - DNA, 12 bp, Artificial Sequence
  Oligonucleotide primer for the detection of SNP TSC0028334
atttgggaatgg

SEQ ID NO: 317900 - DNA, 12 bp, Artificial Sequence
  Oligonucleotide primer for the detection of SNP TSC0028336
aatttttaacct

SEQ ID NO: 317901 - DNA, 12 bp, Artificial Sequence
  Oligonucleotide primer for the detection of SNP TSC0028337
tttctaccacac

SEQ ID NO: 317902 - DNA, 12 bp, Artificial Sequence
  Oligonukleotid-Primer
aaattttttggg

SEQ ID NO: 317903 - DNA, 12 bp, Artificial Sequence
  Oligonucleotide primer for the detection of SNP TSC0028338
atattattatta

SEQ ID NO: 317904 - DNA, 12 bp, Artificial Sequence
  Oligonucleotide primer for the detection of SNP TSC0028338
atactattatta

SEQ ID NO: 317905 - DNA, 12 bp, Artificial Sequence
  Oligonucleotide primer for the detection of SNP TSC0028338
aaataagtttaa

SEQ ID NO: 317906 - DNA, 12 bp, Artificial Sequence
  Oligonukleotid-Primer
caaacttcaatt

SEQ ID NO: 317907 - DNA, 12 bp, Artificial Sequence
  Oligonucleotide primer for the detection of SNP TSC0028339
taagtttatata

SEQ ID NO: 317908 - DNA, 12 bp, Artificial Sequence
  Oligonucleotide primer for the detection of SNP TSC0028340
attccttacaaa

SEQ ID NO: 317909 - DNA, 12 bp, Artificial Sequence
  Oligonucleotide primer for the detection of SNP TSC0028340
atagtgtttgat

SEQ ID NO: 317910 - DNA, 12 bp, Artificial Sequence
  Oligonucleotide primer for the detection of SNP TSC0028340
atagtgttcgat

SEQ ID NO: 317911 - DNA, 12 bp, Artificial Sequence
  Oligonucleotide primer for the detection of SNP TSC0028340
atagtgtttgac

SEQ ID NO: 317912 - DNA, 12 bp, Artificial Sequence
  Oligonucleotide primer for the detection of SNP TSC0028340
atagtgttcgac

SEQ ID NO: 317913 - DNA, 12 bp, Artificial Sequence
  Oligonucleotide primer for the detection of SNP TSC0028340
acaatacccaac

SEQ ID NO: 317914 - DNA, 12 bp, Artificial Sequence
  Oligonucleotide primer for the detection of SNP TSC0028340
acaatacccgac

SEQ ID NO: 317915 - DNA, 12 bp, Artificial Sequence
  Oligonucleotide primer for the detection of SNP TSC0028340
tgttttttgtag

SEQ ID NO: 317916 - DNA, 12 bp, Artificial Sequence
  Oligonucleotide primer for the detection of SNP TSC0028341
aaacactcaaat

SEQ ID NO: 317917 - DNA, 12 bp, Artificial Sequence
  Oligonucleotide primer for the detection of SNP TSC0028341
agttaagtttaa

SEQ ID NO: 317918 - DNA, 12 bp, Artificial Sequence
  Oligonucleotide primer for the detection of SNP TSC0028342
aaaatatccaat

SEQ ID NO: 317919 - DNA, 12 bp, Artificial Sequence
  Oligonucleotide primer for the detection of SNP TSC0028342
ggattttttaag

SEQ ID NO: 317920 - DNA, 12 bp, Artificial Sequence
  Oligonucleotide primer for the detection of SNP TSC0028343
taaatccaatct

SEQ ID NO: 317921 - DNA, 12 bp, Artificial Sequence
  Oligonucleotide primer for the detection of SNP TSC0028343
tttttgaggttt

SEQ ID NO: 317922 - DNA, 12 bp, Artificial Sequence
  Oligonucleotide primer for the detection of SNP TSC0028343
ttttcgaggttt

SEQ ID NO: 317923 - DNA, 12 bp, Artificial Sequence
  Oligonucleotide primer for the detection of SNP TSC0028343
acccccaaaatc

SEQ ID NO: 317924 - DNA, 12 bp, Artificial Sequence
  Oligonucleotide primer for the detection of SNP TSC0028343
acccccgaaatc

SEQ ID NO: 317925 - DNA, 12 bp, Artificial Sequence
  Oligonucleotide primer for the detection of SNP TSC0028343
tgagtttaattt

SEQ ID NO: 317926 - DNA, 12 bp, Artificial Sequence
  Oligonucleotide primer for the detection of SNP TSC0028344
agtttaaaatat

SEQ ID NO: 317927 - DNA, 12 bp, Artificial Sequence
  Oligonucleotide primer for the detection of SNP TSC0028344
caacccaaaata

SEQ ID NO: 317928 - DNA, 12 bp, Artificial Sequence
  Oligonucleotide primer for the detection of SNP TSC0028344
tagtaaaaaggt

SEQ ID NO: 317929 - DNA, 12 bp, Artificial Sequence
  Oligonucleotide primer for the detection of SNP TSC0028345
atacttttttac

SEQ ID NO: 317930 - DNA, 12 bp, Artificial Sequence
  Oligonucleotide primer for the detection of SNP TSC0028345
gaagaaatattt

SEQ ID NO: 317931 - DNA, 12 bp, Artificial Sequence
  Oligonucleotide primer for the detection of SNP TSC0028347
aaaaacccatat

SEQ ID NO: 317932 - DNA, 12 bp, Artificial Sequence
  Oligonucleotide primer for the detection of SNP TSC0028347
aaaaacccgtat

SEQ ID NO: 317933 - DNA, 12 bp, Artificial Sequence
  Oligonucleotide primer for the detection of SNP TSC0028347
ttgttgttgatt

SEQ ID NO: 317934 - DNA, 12 bp, Artificial Sequence
  Oligonucleotide primer for the detection of SNP TSC0028347
ctactactaact

SEQ ID NO: 317935 - DNA, 12 bp, Artificial Sequence
  Oligonucleotide primer for the detection of SNP TSC0028347
gggaatttgtgt

SEQ ID NO: 317936 - DNA, 12 bp, Artificial Sequence
  Oligonucleotide primer for the detection of SNP TSC0028347
gggaattcgtgt

SEQ ID NO: 317937 - DNA, 12 bp, Artificial Sequence
  Oligonucleotide primer for the detection of SNP TSC0028348
atttatcttaac

SEQ ID NO: 317938 - DNA, 12 bp, Artificial Sequence
  Oligonucleotide primer for the detection of SNP TSC0028348
tttatgtataag

SEQ ID NO: 317939 - DNA, 12 bp, Artificial Sequence
  Oligonucleotide primer for the detection of SNP TSC0028348
tttacgtataag

SEQ ID NO: 317940 - DNA, 12 bp, Artificial Sequence
  Oligonucleotide primer for the detection of SNP TSC0028348
tctacacacaaa

SEQ ID NO: 317941 - DNA, 12 bp, Artificial Sequence
  Oligonucleotide primer for the detection of SNP TSC0028348
tctacgcacaaa

SEQ ID NO: 317942 - DNA, 12 bp, Artificial Sequence
  Oligonucleotide primer for the detection of SNP TSC0028348
atttattttggt

SEQ ID NO: 317943 - DNA, 12 bp, Artificial Sequence
  Oligonucleotide primer for the detection of SNP TSC0028348
atttattttggc

SEQ ID NO: 317944 - DNA, 12 bp, Artificial Sequence
  Oligonucleotide primer for the detection of SNP TSC0028349
aaactaaaccac

SEQ ID NO: 317945 - DNA, 12 bp, Artificial Sequence
  Oligonucleotide primer for the detection of SNP TSC0028349
tttagaggtaga

SEQ ID NO: 317946 - DNA, 12 bp, Artificial Sequence
  Oligonucleotide primer for the detection of SNP TSC0028350
ttttataggttg

SEQ ID NO: 317947 - DNA, 12 bp, Artificial Sequence
  Oligonucleotide primer for the detection of SNP TSC0028351
ccaaatccctcc

SEQ ID NO: 317948 - DNA, 12 bp, Artificial Sequence
  Oligonucleotide primer for the detection of SNP TSC0028351
tagattataggg

SEQ ID NO: 317949 - DNA, 12 bp, Artificial Sequence
  Oligonucleotide primer for the detection of SNP TSC0028352
aacaaacaaccc

SEQ ID NO: 317950 - DNA, 12 bp, Artificial Sequence
  Oligonucleotide primer for the detection of SNP TSC0028353
tccctaccaaac

SEQ ID NO: 317951 - DNA, 12 bp, Artificial Sequence
  Oligonucleotide primer for the detection of SNP TSC0028353
attgttttggaa

SEQ ID NO: 317952 - DNA, 12 bp, Artificial Sequence
  Oligonucleotide primer for the detection of SNP TSC0028353
attgtttcggaa

SEQ ID NO: 317953 - DNA, 12 bp, Artificial Sequence
  Oligonucleotide primer for the detection of SNP TSC0028355
ttataattacaa

SEQ ID NO: 317954 - DNA, 12 bp, Artificial Sequence
  Oligonucleotide primer for the detection of SNP TSC0028355
ttatgagtatag

SEQ ID NO: 317955 - DNA, 12 bp, Artificial Sequence
  Oligonucleotide primer for the detection of SNP TSC0028355
ttacgagtatag

SEQ ID NO: 317956 - DNA, 12 bp, Artificial Sequence
  Oligonucleotide primer for the detection of SNP TSC0028355
cacaaacacaaa

SEQ ID NO: 317957 - DNA, 12 bp, Artificial Sequence
  Oligonucleotide primer for the detection of SNP TSC0028355
cacgaacacaaa

SEQ ID NO: 317958 - DNA, 12 bp, Artificial Sequence
  Oligonucleotide primer for the detection of SNP TSC0028355
ttatggttatag

SEQ ID NO: 317959 - DNA, 12 bp, Artificial Sequence
  Oligonucleotide primer for the detection of SNP TSC0028356
ctaaatcctcac

SEQ ID NO: 317960 - DNA, 12 bp, Artificial Sequence
  Oligonucleotide primer for the detection of SNP TSC0028356
gtttggttaggt

SEQ ID NO: 317961 - DNA, 12 bp, Artificial Sequence
  Oligonucleotide primer for the detection of SNP TSC0028356
tttaaccaaata

SEQ ID NO: 317962 - DNA, 12 bp, Artificial Sequence
  Oligonucleotide primer for the detection of SNP TSC0028356
ttggatttttat

SEQ ID NO: 317963 - DNA, 12 bp, Artificial Sequence
  Oligonucleotide primer for the detection of SNP TSC0028356
ttggatttttac

SEQ ID NO: 317964 - DNA, 12 bp, Artificial Sequence
  Oligonucleotide primer for the detection of SNP TSC0028357
acctttaataaa

SEQ ID NO: 317965 - DNA, 12 bp, Artificial Sequence
  Oligonucleotide primer for the detection of SNP TSC0028357
ttccaaacttcc

SEQ ID NO: 317966 - DNA, 12 bp, Artificial Sequence
  Oligonucleotide primer for the detection of SNP TSC0028357
atttttgataga

SEQ ID NO: 317967 - DNA, 12 bp, Artificial Sequence
  Oligonucleotide primer for the detection of SNP TSC0028358
aaactccaaccc

SEQ ID NO: 317968 - DNA, 12 bp, Artificial Sequence
  Oligonucleotide primer for the detection of SNP TSC0028358
gaatttaggtgg

SEQ ID NO: 317969 - DNA, 12 bp, Artificial Sequence
  Oligonucleotide primer for the detection of SNP TSC0028358
aaacccaaataa

SEQ ID NO: 317970 - DNA, 12 bp, Artificial Sequence
  Oligonucleotide primer for the detection of SNP TSC0028358
aggttttagttt

SEQ ID NO: 317971 - DNA, 12 bp, Artificial Sequence
  Oligonucleotide primer for the detection of SNP TSC0028359
aaagttagtgaa

SEQ ID NO: 317972 - DNA, 12 bp, Artificial Sequence
  Oligonucleotide primer for the detection of SNP TSC0028359
aaaatcaataaa

SEQ ID NO: 317973 - DNA, 12 bp, Artificial Sequence
  Oligonucleotide primer for the detection of SNP TSC0028359
gaggttaaatat

SEQ ID NO: 317974 - DNA, 12 bp, Artificial Sequence
  Oligonucleotide primer for the detection of SNP TSC0028360
caacaatcacac

SEQ ID NO: 317975 - DNA, 12 bp, Artificial Sequence
  Oligonucleotide primer for the detection of SNP TSC0028360
ttgggacgtttg

SEQ ID NO: 317976 - DNA, 12 bp, Artificial Sequence
  Oligonucleotide primer for the detection of SNP TSC0028364
agagttgggttg

SEQ ID NO: 317977 - DNA, 12 bp, Artificial Sequence
  Oligonucleotide primer for the detection of SNP TSC0028364
agagttgggtcg

SEQ ID NO: 317978 - DNA, 12 bp, Artificial Sequence
  Oligonucleotide primer for the detection of SNP TSC0028364
aaaattaaaccg

SEQ ID NO: 317979 - DNA, 12 bp, Artificial Sequence
  Oligonukleotid-Primer
tgggtgtggagg

SEQ ID NO: 317980 - DNA, 12 bp, Artificial Sequence
  Oligonucleotide primer for the detection of SNP TSC0028364
cgggtgtggagg

SEQ ID NO: 317981 - DNA, 12 bp, Artificial Sequence
  Oligonucleotide primer for the detection of SNP TSC0028365
aaacatttacaa

SEQ ID NO: 317982 - DNA, 12 bp, Artificial Sequence
  Oligonucleotide primer for the detection of SNP TSC0028365
aaacgtttacaa

SEQ ID NO: 317983 - DNA, 12 bp, Artificial Sequence
  Oligonucleotide primer for the detection of SNP TSC0028365
ttggttttgggg

SEQ ID NO: 317984 - DNA, 12 bp, Artificial Sequence
  Oligonucleotide primer for the detection of SNP TSC0028365
ttaaccctaaaa

SEQ ID NO: 317985 - DNA, 12 bp, Artificial Sequence
  Oligonucleotide primer for the detection of SNP TSC0028365
agatgtttgtag

SEQ ID NO: 317986 - DNA, 12 bp, Artificial Sequence
  Oligonucleotide primer for the detection of SNP TSC0028365
agacgtttgtag

SEQ ID NO: 317987 - DNA, 12 bp, Artificial Sequence
  Oligonucleotide primer for the detection of SNP TSC0028366
gttagggaggtt

SEQ ID NO: 317988 - DNA, 12 bp, Artificial Sequence
  Oligonucleotide primer for the detection of SNP TSC0028366
atcaaaaaaatt

SEQ ID NO: 317989 - DNA, 12 bp, Artificial Sequence
  Oligonucleotide primer for the detection of SNP TSC0028366
gggtttaagaag

SEQ ID NO: 317990 - DNA, 12 bp, Artificial Sequence
  Oligonucleotide primer for the detection of SNP TSC0028367
aaatccattaca

SEQ ID NO: 317991 - DNA, 12 bp, Artificial Sequence
  Oligonucleotide primer for the detection of SNP TSC0028367
gttgttgtattt

SEQ ID NO: 317992 - DNA, 12 bp, Artificial Sequence
  Oligonucleotide primer for the detection of SNP TSC0028367
attactacatct

SEQ ID NO: 317993 - DNA, 12 bp, Artificial Sequence
  Oligonucleotide primer for the detection of SNP TSC0028368
aacctccctctt

SEQ ID NO: 317994 - DNA, 12 bp, Artificial Sequence
  Oligonucleotide primer for the detection of SNP TSC0028368
ttgggtagaggg

SEQ ID NO: 317995 - DNA, 12 bp, Artificial Sequence
  Oligonucleotide primer for the detection of SNP TSC0028368
tcgggtagaggg

SEQ ID NO: 317996 - DNA, 12 bp, Artificial Sequence
  Oligonucleotide primer for the detection of SNP TSC0028369
ctctctccacac

SEQ ID NO: 317997 - DNA, 12 bp, Artificial Sequence
  Oligonucleotide primer for the detection of SNP TSC0028369
ctctctccacgc

SEQ ID NO: 317998 - DNA, 12 bp, Artificial Sequence
  Oligonucleotide primer for the detection of SNP TSC0028369
aggtgtatatag

SEQ ID NO: 317999 - DNA, 12 bp, Artificial Sequence
  Oligonucleotide primer for the detection of SNP TSC0028369
aaatacacataa

SEQ ID NO: 318000 - DNA, 12 bp, Artificial Sequence
  Oligonucleotide primer for the detection of SNP TSC0028370
caatattcctac

SEQ ID NO: 318001 - DNA, 12 bp, Artificial Sequence
  Oligonucleotide primer for the detection of SNP TSC0028370
cgatattcctac

SEQ ID NO: 318002 - DNA, 12 bp, Artificial Sequence
  Oligonucleotide primer for the detection of SNP TSC0028372
ataattccaata

SEQ ID NO: 318003 - DNA, 12 bp, Artificial Sequence
  Oligonucleotide primer for the detection of SNP TSC0028377
ttaataagatga

SEQ ID NO: 318004 - DNA, 12 bp, Artificial Sequence
  Oligonucleotide primer for the detection of SNP TSC0028377
taacaaaataaa

SEQ ID NO: 318005 - DNA, 12 bp, Artificial Sequence
  Oligonucleotide primer for the detection of SNP TSC0028377
agggagtataag

SEQ ID NO: 318006 - DNA, 12 bp, Artificial Sequence
  Oligonucleotide primer for the detection of SNP TSC0028378
aaaaacccctct

SEQ ID NO: 318007 - DNA, 12 bp, Artificial Sequence
  Oligonucleotide primer for the detection of SNP TSC0028378
gggttgagggtt

SEQ ID NO: 318008 - DNA, 12 bp, Artificial Sequence
  Oligonucleotide primer for the detection of SNP TSC0028387
aacaattctaca

SEQ ID NO: 318009 - DNA, 12 bp, Artificial Sequence
  Oligonucleotide primer for the detection of SNP TSC0028387
tttgtttttgat

SEQ ID NO: 318010 - DNA, 12 bp, Artificial Sequence
  Oligonucleotide primer for the detection of SNP TSC0028387
tttgtttttgac

SEQ ID NO: 318011 - DNA, 12 bp, Artificial Sequence
  Oligonucleotide primer for the detection of SNP TSC0028387
ccttatttttaa

SEQ ID NO: 318012 - DNA, 12 bp, Artificial Sequence
  Oligonucleotide primer for the detection of SNP TSC0028387
agtaattttgta

SEQ ID NO: 318013 - DNA, 12 bp, Artificial Sequence
  Oligonucleotide primer for the detection of SNP TSC0028388
ttttattaattg

SEQ ID NO: 318014 - DNA, 12 bp, Artificial Sequence
  Oligonucleotide primer for the detection of SNP TSC0028388
ttttattaatcg

SEQ ID NO: 318015 - DNA, 12 bp, Artificial Sequence
  Oligonucleotide primer for the detection of SNP TSC0028388
ctccaccaacca

SEQ ID NO: 318016 - DNA, 12 bp, Artificial Sequence
  Oligonucleotide primer for the detection of SNP TSC0028388
ctccaccaaccg

SEQ ID NO: 318017 - DNA, 12 bp, Artificial Sequence
  Oligonucleotide primer for the detection of SNP TSC0028388
gggaggggggtg

SEQ ID NO: 318018 - DNA, 12 bp, Artificial Sequence
  Oligonucleotide primer for the detection of SNP TSC0028389
cccccaattctt

SEQ ID NO: 318019 - DNA, 12 bp, Artificial Sequence
  Oligonucleotide primer for the detection of SNP TSC0028389
ggaagagggttt

SEQ ID NO: 318020 - DNA, 12 bp, Artificial Sequence
  Oligonucleotide primer for the detection of SNP TSC0028397
aacccaacatat

SEQ ID NO: 318021 - DNA, 12 bp, Artificial Sequence
  Oligonucleotide primer for the detection of SNP TSC0028397
ttgtggttaggg

SEQ ID NO: 318022 - DNA, 12 bp, Artificial Sequence
  Oligonucleotide primer for the detection of SNP TSC0028398
tatatttaattt

SEQ ID NO: 318023 - DNA, 12 bp, Artificial Sequence
  Oligonucleotide primer for the detection of SNP TSC0028398
cacatttaactc

SEQ ID NO: 318024 - DNA, 12 bp, Artificial Sequence
  Oligonucleotide primer for the detection of SNP TSC0028398
tgaagagattta

SEQ ID NO: 318025 - DNA, 12 bp, Artificial Sequence
  Oligonucleotide primer for the detection of SNP TSC0028402
ctaaaaacaaac

SEQ ID NO: 318026 - DNA, 12 bp, Artificial Sequence
  Oligonucleotide primer for the detection of SNP TSC0028402
agagtatatttg

SEQ ID NO: 318027 - DNA, 12 bp, Artificial Sequence
  Oligonucleotide primer for the detection of SNP TSC0028402
aaaacatattta

SEQ ID NO: 318028 - DNA, 12 bp, Artificial Sequence
  Oligonucleotide primer for the detection of SNP TSC0028402
ttagaaatagat

SEQ ID NO: 318029 - DNA, 12 bp, Artificial Sequence
  Oligonucleotide primer for the detection of SNP TSC0028403
aaaacaatacac

SEQ ID NO: 318030 - DNA, 12 bp, Artificial Sequence
  Oligonucleotide primer for the detection of SNP TSC0028403
ttaagtgtttta

SEQ ID NO: 318031 - DNA, 12 bp, Artificial Sequence
  Oligonucleotide primer for the detection of SNP TSC0028406
ccaactctaaaa

SEQ ID NO: 318032 - DNA, 12 bp, Artificial Sequence
  Oligonucleotide primer for the detection of SNP TSC0028406
ctcctaaaccct

SEQ ID NO: 318033 - DNA, 12 bp, Artificial Sequence
  Oligonucleotide primer for the detection of SNP TSC0028406
ttagttttggga

SEQ ID NO: 318034 - DNA, 12 bp, Artificial Sequence
  Oligonucleotide primer for the detection of SNP TSC0028407
tactatatttat

SEQ ID NO: 318035 - DNA, 12 bp, Artificial Sequence
  Oligonucleotide primer for the detection of SNP TSC0028407
tgtagttttagg

SEQ ID NO: 318036 - DNA, 12 bp, Artificial Sequence
  Oligonucleotide primer for the detection of SNP TSC0028407
cgtagttttagg

SEQ ID NO: 318037 - DNA, 12 bp, Artificial Sequence
  Oligonucleotide primer for the detection of SNP TSC0028408
attcatcaaaac

SEQ ID NO: 318038 - DNA, 12 bp, Artificial Sequence
  Oligonucleotide primer for the detection of SNP TSC0028408
tgttgttgagta

SEQ ID NO: 318039 - DNA, 12 bp, Artificial Sequence
  Oligonucleotide primer for the detection of SNP TSC0028408
cgttgttgagta

SEQ ID NO: 318040 - DNA, 12 bp, Artificial Sequence
  Oligonucleotide primer for the detection of SNP TSC0028409
aaatattttttc

SEQ ID NO: 318041 - DNA, 12 bp, Artificial Sequence
  Oligonucleotide primer for the detection of SNP TSC0028409
gattaaatatta

SEQ ID NO: 318042 - DNA, 12 bp, Artificial Sequence
  Oligonucleotide primer for the detection of SNP TSC0028410
aaatacaaacct

SEQ ID NO: 318043 - DNA, 12 bp, Artificial Sequence
  Oligonucleotide primer for the detection of SNP TSC0028410
aagtttttatta

SEQ ID NO: 318044 - DNA, 12 bp, Artificial Sequence
  Oligonucleotide primer for the detection of SNP TSC0028412
tccccaaataac

SEQ ID NO: 318045 - DNA, 12 bp, Artificial Sequence
  Oligonucleotide primer for the detection of SNP TSC0028412
ttttggggtttc

SEQ ID NO: 318046 - DNA, 12 bp, Artificial Sequence
  Oligonucleotide primer for the detection of SNP TSC0028412
tcctaaaatccc

SEQ ID NO: 318047 - DNA, 12 bp, Artificial Sequence
  Oligonucleotide primer for the detection of SNP TSC0028412
tttttaggtggt

SEQ ID NO: 318048 - DNA, 12 bp, Artificial Sequence
  Oligonucleotide primer for the detection of SNP TSC0028412
tttttaggtggc

SEQ ID NO: 318049 - DNA, 12 bp, Artificial Sequence
  Oligonucleotide primer for the detection of SNP TSC0028413
ttttttttgaag

SEQ ID NO: 318050 - DNA, 12 bp, Artificial Sequence
  Oligonucleotide primer for the detection of SNP TSC0028415
tctaccaaaaca

SEQ ID NO: 318051 - DNA, 12 bp, Artificial Sequence
  Oligonucleotide primer for the detection of SNP TSC0028415
aaaatggagggg

SEQ ID NO: 318052 - DNA, 12 bp, Artificial Sequence
  Oligonucleotide primer for the detection of SNP TSC0028416
tcctcaaaaata

SEQ ID NO: 318053 - DNA, 12 bp, Artificial Sequence
  Oligonucleotide primer for the detection of SNP TSC0028416
taggtttgtgtt

SEQ ID NO: 318054 - DNA, 12 bp, Artificial Sequence
  Oligonucleotide primer for the detection of SNP TSC0028416
taggtttgcgtt

SEQ ID NO: 318055 - DNA, 12 bp, Artificial Sequence
  Oligonucleotide primer for the detection of SNP TSC0028416
caaacttacact

SEQ ID NO: 318056 - DNA, 12 bp, Artificial Sequence
  Oligonucleotide primer for the detection of SNP TSC0028416
caaacttacgct

SEQ ID NO: 318057 - DNA, 12 bp, Artificial Sequence
  Oligonucleotide primer for the detection of SNP TSC0028416
tttttagaggtg

SEQ ID NO: 318058 - DNA, 12 bp, Artificial Sequence
  Oligonucleotide primer for the detection of SNP TSC0028419
aacaaactccaa

SEQ ID NO: 318059 - DNA, 12 bp, Artificial Sequence
  Oligonucleotide primer for the detection of SNP TSC0028419
ccaatttattcc

SEQ ID NO: 318060 - DNA, 12 bp, Artificial Sequence
  Oligonucleotide primer for the detection of SNP TSC0028419
gataggttttag

SEQ ID NO: 318061 - DNA, 12 bp, Artificial Sequence
  Oligonucleotide primer for the detection of SNP TSC0028420
tatacccttcct

SEQ ID NO: 318062 - DNA, 12 bp, Artificial Sequence
  Oligonucleotide primer for the detection of SNP TSC0028421
ttggtgttatgg

SEQ ID NO: 318063 - DNA, 12 bp, Artificial Sequence
  Oligonucleotide primer for the detection of SNP TSC0028421
tcggtgttatgg

SEQ ID NO: 318064 - DNA, 12 bp, Artificial Sequence
  Oligonucleotide primer for the detection of SNP TSC0028421
ccaatatcataa

SEQ ID NO: 318065 - DNA, 12 bp, Artificial Sequence
  Oligonucleotide primer for the detection of SNP TSC0028421
ccgatatcataa

SEQ ID NO: 318066 - DNA, 12 bp, Artificial Sequence
  Oligonucleotide primer for the detection of SNP TSC0028421
gattataggtat

SEQ ID NO: 318067 - DNA, 12 bp, Artificial Sequence
  Oligonucleotide primer for the detection of SNP TSC0028422
taaacaatttca

SEQ ID NO: 318068 - DNA, 12 bp, Artificial Sequence
  Oligonucleotide primer for the detection of SNP TSC0028422
tttattagttat

SEQ ID NO: 318069 - DNA, 12 bp, Artificial Sequence
  Oligonucleotide primer for the detection of SNP TSC0028422
cccactaaccat

SEQ ID NO: 318070 - DNA, 12 bp, Artificial Sequence
  Oligonucleotide primer for the detection of SNP TSC0028422
ggtaattttatt

SEQ ID NO: 318071 - DNA, 12 bp, Artificial Sequence
  Oligonucleotide primer for the detection of SNP TSC0028423
aaaataaacaat

SEQ ID NO: 318072 - DNA, 12 bp, Artificial Sequence
  Oligonucleotide primer for the detection of SNP TSC0028423
agttatgaatga

SEQ ID NO: 318073 - DNA, 12 bp, Artificial Sequence
  Oligonucleotide primer for the detection of SNP TSC0028424
aaacctaaccct

SEQ ID NO: 318074 - DNA, 12 bp, Artificial Sequence
  Oligonucleotide primer for the detection of SNP TSC0028428
tccctcccacac

SEQ ID NO: 318075 - DNA, 12 bp, Artificial Sequence
  Oligonucleotide primer for the detection of SNP TSC0028428
tggaagtaaatg

SEQ ID NO: 318076 - DNA, 12 bp, Artificial Sequence
  Oligonucleotide primer for the detection of SNP TSC0028431
agtttttagaat

SEQ ID NO: 318077 - DNA, 12 bp, Artificial Sequence
  Oligonucleotide primer for the detection of SNP TSC0028431
aactcccaaaat

SEQ ID NO: 318078 - DNA, 12 bp, Artificial Sequence
  Oligonucleotide primer for the detection of SNP TSC0028431
gggtgggggatg

SEQ ID NO: 318079 - DNA, 12 bp, Artificial Sequence
  Oligonucleotide primer for the detection of SNP TSC0028433
ctctaaataaaa

SEQ ID NO: 318080 - DNA, 12 bp, Artificial Sequence
  Oligonucleotide primer for the detection of SNP TSC0028433
tttaggatagtt

SEQ ID NO: 318081 - DNA, 12 bp, Artificial Sequence
  Oligonucleotide primer for the detection of SNP TSC0028433
cccaaaacaatc

SEQ ID NO: 318082 - DNA, 12 bp, Artificial Sequence
  Oligonucleotide primer for the detection of SNP TSC0028433
ttttgagtggga

SEQ ID NO: 318083 - DNA, 12 bp, Artificial Sequence
  Oligonucleotide primer for the detection of SNP TSC0028435
acacaataaatt

SEQ ID NO: 318084 - DNA, 12 bp, Artificial Sequence
  Oligonucleotide primer for the detection of SNP TSC0028435
gtatttttatga

SEQ ID NO: 318085 - DNA, 12 bp, Artificial Sequence
  Oligonucleotide primer for the detection of SNP TSC0028436
tttacactccta

SEQ ID NO: 318086 - DNA, 12 bp, Artificial Sequence
  Oligonucleotide primer for the detection of SNP TSC0028436
tagtagattttt

SEQ ID NO: 318087 - DNA, 12 bp, Artificial Sequence
  Oligonucleotide primer for the detection of SNP TSC0028436
caataaattctc

SEQ ID NO: 318088 - DNA, 12 bp, Artificial Sequence
  Oligonukleotid-Primer
gtttgtattttt

SEQ ID NO: 318089 - DNA, 12 bp, Artificial Sequence
  Oligonucleotide primer for the detection of SNP TSC0028438
aaaaaatactca

SEQ ID NO: 318090 - DNA, 12 bp, Artificial Sequence
  Oligonucleotide primer for the detection of SNP TSC0028438
acccaataccac

SEQ ID NO: 318091 - DNA, 12 bp, Artificial Sequence
  Oligonucleotide primer for the detection of SNP TSC0028438
agggggtgttta

SEQ ID NO: 318092 - DNA, 12 bp, Artificial Sequence
  Oligonukleotid-Primer
cctattctaaaa

SEQ ID NO: 318093 - DNA, 12 bp, Artificial Sequence
  Oligonucleotide primer for the detection of SNP TSC0028439
tttttagtagta

SEQ ID NO: 318094 - DNA, 12 bp, Artificial Sequence
  Oligonucleotide primer for the detection of SNP TSC0028440
acttatcttctt

SEQ ID NO: 318095 - DNA, 12 bp, Artificial Sequence
  Oligonucleotide primer for the detection of SNP TSC0028444
aatcaaattcta

SEQ ID NO: 318096 - DNA, 12 bp, Artificial Sequence
  Oligonukleotid-Primer
ggttagatttta

SEQ ID NO: 318097 - DNA, 12 bp, Artificial Sequence
  Oligonucleotide primer for the detection of SNP TSC0028444
aattaaatttta

SEQ ID NO: 318098 - DNA, 12 bp, Artificial Sequence
  Oligonucleotide primer for the detection of SNP TSC0028444
gattagattttg

SEQ ID NO: 318099 - DNA, 12 bp, Artificial Sequence
  Oligonucleotide primer for the detection of SNP TSC0028445
catatatccccc

SEQ ID NO: 318100 - DNA, 12 bp, Artificial Sequence
  Oligonucleotide primer for the detection of SNP TSC0028445
tggtttttaggg

SEQ ID NO: 318101 - DNA, 12 bp, Artificial Sequence
  Oligonucleotide primer for the detection of SNP TSC0028447
aatctcttttac

SEQ ID NO: 318102 - DNA, 12 bp, Artificial Sequence
  Oligonucleotide primer for the detection of SNP TSC0028448
ccctaaccttta

SEQ ID NO: 318103 - DNA, 12 bp, Artificial Sequence
  Oligonucleotide primer for the detection of SNP TSC0028448
aatatgttatta

SEQ ID NO: 318104 - DNA, 12 bp, Artificial Sequence
  Oligonucleotide primer for the detection of SNP TSC0028448
aatatactatta

SEQ ID NO: 318105 - DNA, 12 bp, Artificial Sequence
  Oligonucleotide primer for the detection of SNP TSC0028448
ttttggtttttg

SEQ ID NO: 318106 - DNA, 12 bp, Artificial Sequence
  Oligonucleotide primer for the detection of SNP TSC0028449
aaaaatttaaca

SEQ ID NO: 318107 - DNA, 12 bp, Artificial Sequence
  Oligonucleotide primer for the detection of SNP TSC0028449
ggaaaaatttag

SEQ ID NO: 318108 - DNA, 12 bp, Artificial Sequence
  Oligonucleotide primer for the detection of SNP TSC0028449
ggatttaatatt

SEQ ID NO: 318109 - DNA, 12 bp, Artificial Sequence
  Oligonucleotide primer for the detection of SNP TSC0028450
attgtattttat

SEQ ID NO: 318110 - DNA, 12 bp, Artificial Sequence
  Oligonucleotide primer for the detection of SNP TSC0028450
attacattctac

SEQ ID NO: 318111 - DNA, 12 bp, Artificial Sequence
  Oligonucleotide primer for the detection of SNP TSC0028450
agatatagagag

SEQ ID NO: 318112 - DNA, 12 bp, Artificial Sequence
  Oligonucleotide primer for the detection of SNP TSC0028452
aacccaactcaa

SEQ ID NO: 318113 - DNA, 12 bp, Artificial Sequence
  Oligonucleotide primer for the detection of SNP TSC0028452
gtgtgggtggta

SEQ ID NO: 318114 - DNA, 12 bp, Artificial Sequence
  Oligonucleotide primer for the detection of SNP TSC0028452
gtttagtttagt

SEQ ID NO: 318115 - DNA, 12 bp, Artificial Sequence
  Oligonucleotide primer for the detection of SNP TSC0028453
taaatctccaaa

SEQ ID NO: 318116 - DNA, 12 bp, Artificial Sequence
  Oligonucleotide primer for the detection of SNP TSC0028453
ttcccctcatct

SEQ ID NO: 318117 - DNA, 12 bp, Artificial Sequence
  Oligonucleotide primer for the detection of SNP TSC0028453
tgaatttttaga

SEQ ID NO: 318118 - DNA, 12 bp, Artificial Sequence
  Oligonucleotide primer for the detection of SNP TSC0028455
acctacaatccc

SEQ ID NO: 318119 - DNA, 12 bp, Artificial Sequence
  Oligonucleotide primer for the detection of SNP TSC0028455
gcctacaatccc

SEQ ID NO: 318120 - DNA, 12 bp, Artificial Sequence
  Oligonucleotide primer for the detection of SNP TSC0028455
tatagtttagag

SEQ ID NO: 318121 - DNA, 12 bp, Artificial Sequence
  Oligonucleotide primer for the detection of SNP TSC0028456
accaaaataatc

SEQ ID NO: 318122 - DNA, 12 bp, Artificial Sequence
  Oligonucleotide primer for the detection of SNP TSC0028456
ggttaggagttc

SEQ ID NO: 318123 - DNA, 12 bp, Artificial Sequence
  Oligonucleotide primer for the detection of SNP TSC0028456
aatcaaaaattc

SEQ ID NO: 318124 - DNA, 12 bp, Artificial Sequence
  Oligonucleotide primer for the detection of SNP TSC0028457
ctcctcaccaaa

SEQ ID NO: 318125 - DNA, 12 bp, Artificial Sequence
  Oligonucleotide primer for the detection of SNP TSC0028457
ggagaagttgtt

SEQ ID NO: 318126 - DNA, 12 bp, Artificial Sequence
  Oligonucleotide primer for the detection of SNP TSC0028457
gaaaaaactact

SEQ ID NO: 318127 - DNA, 12 bp, Artificial Sequence
  Oligonucleotide primer for the detection of SNP TSC0028457
tttttttattaa

SEQ ID NO: 318128 - DNA, 12 bp, Artificial Sequence
  Oligonucleotide primer for the detection of SNP TSC0028459
ttaactaatttc

SEQ ID NO: 318129 - DNA, 12 bp, Artificial Sequence
  Oligonucleotide primer for the detection of SNP TSC0028459
gttaagtagatt

SEQ ID NO: 318130 - DNA, 12 bp, Artificial Sequence
  Oligonucleotide primer for the detection of SNP TSC0028459
attaaataaact

SEQ ID NO: 318131 - DNA, 12 bp, Artificial Sequence
  Oligonucleotide primer for the detection of SNP TSC0028460
tgaaagtttgtg

SEQ ID NO: 318132 - DNA, 12 bp, Artificial Sequence
  Oligonucleotide primer for the detection of SNP TSC0028461
taacaaacatac

SEQ ID NO: 318133 - DNA, 12 bp, Artificial Sequence
  Oligonucleotide primer for the detection of SNP TSC0028461
atatgtgtagaa

SEQ ID NO: 318134 - DNA, 12 bp, Artificial Sequence
  Oligonucleotide primer for the detection of SNP TSC0028461
acatatacaaaa

SEQ ID NO: 318135 - DNA, 12 bp, Artificial Sequence
  Oligonucleotide primer for the detection of SNP TSC0028461
taataaatatgt

SEQ ID NO: 318136 - DNA, 12 bp, Artificial Sequence
  Oligonucleotide primer for the detection of SNP TSC0028462
tcatctttataa

SEQ ID NO: 318137 - DNA, 12 bp, Artificial Sequence
  Oligonucleotide primer for the detection of SNP TSC0028462
ttatgtattttt

SEQ ID NO: 318138 - DNA, 12 bp, Artificial Sequence
  Oligonucleotide primer for the detection of SNP TSC0028462
ccatatatcccc

SEQ ID NO: 318139 - DNA, 12 bp, Artificial Sequence
  Oligonucleotide primer for the detection of SNP TSC0028462
ttatttttatgg

SEQ ID NO: 318140 - DNA, 12 bp, Artificial Sequence
  Oligonucleotide primer for the detection of SNP TSC0028463
aaaaatatctac

SEQ ID NO: 318141 - DNA, 12 bp, Artificial Sequence
  Oligonucleotide primer for the detection of SNP TSC0028463
tttgtatagtaa

SEQ ID NO: 318142 - DNA, 12 bp, Artificial Sequence
  Oligonucleotide primer for the detection of SNP TSC0028464
acatctatatac

SEQ ID NO: 318143 - DNA, 12 bp, Artificial Sequence
  Oligonucleotide primer for the detection of SNP TSC0028464
agtttaagaaga

SEQ ID NO: 318144 - DNA, 12 bp, Artificial Sequence
  Oligonucleotide primer for the detection of SNP TSC0028473
aggattttagtt

SEQ ID NO: 318145 - DNA, 12 bp, Artificial Sequence
  Oligonucleotide primer for the detection of SNP TSC0028473
aaaattccaatt

SEQ ID NO: 318146 - DNA, 12 bp, Artificial Sequence
  Oligonucleotide primer for the detection of SNP TSC0028473
aggaaatagata

SEQ ID NO: 318147 - DNA, 12 bp, Artificial Sequence
  Oligonucleotide primer for the detection of SNP TSC0028478
caaaaatacttt

SEQ ID NO: 318148 - DNA, 12 bp, Artificial Sequence
  Oligonucleotide primer for the detection of SNP TSC0028478
gtttttagaaga

SEQ ID NO: 318149 - DNA, 12 bp, Artificial Sequence
  Oligonucleotide primer for the detection of SNP TSC0028479
tttctacatttc

SEQ ID NO: 318150 - DNA, 12 bp, Artificial Sequence
  Oligonucleotide primer for the detection of SNP TSC0028479
tttggtatttaa

SEQ ID NO: 318151 - DNA, 12 bp, Artificial Sequence
  Oligonucleotide primer for the detection of SNP TSC0028479
cttaacacccaa

SEQ ID NO: 318152 - DNA, 12 bp, Artificial Sequence
  Oligonucleotide primer for the detection of SNP TSC0028480
agaattgtatta

SEQ ID NO: 318153 - DNA, 12 bp, Artificial Sequence
  Oligonucleotide primer for the detection of SNP TSC0028480
agaatcgtatta

SEQ ID NO: 318154 - DNA, 12 bp, Artificial Sequence
  Oligonucleotide primer for the detection of SNP TSC0028481
ttctctcaattc

SEQ ID NO: 318155 - DNA, 12 bp, Artificial Sequence
  Oligonucleotide primer for the detection of SNP TSC0028481
ttctctcgattc

SEQ ID NO: 318156 - DNA, 12 bp, Artificial Sequence
  Oligonucleotide primer for the detection of SNP TSC0028481
agggaaaggagg

SEQ ID NO: 318157 - DNA, 12 bp, Artificial Sequence
  Oligonucleotide primer for the detection of SNP TSC0028482
accccctaatac

SEQ ID NO: 318158 - DNA, 12 bp, Artificial Sequence
  Oligonucleotide primer for the detection of SNP TSC0028482
ttgggggttagg

SEQ ID NO: 318159 - DNA, 12 bp, Artificial Sequence
  Oligonucleotide primer for the detection of SNP TSC0028484
aaaacctccaac

SEQ ID NO: 318160 - DNA, 12 bp, Artificial Sequence
  Oligonucleotide primer for the detection of SNP TSC0028484
ttctttctataa

SEQ ID NO: 318161 - DNA, 12 bp, Artificial Sequence
  Oligonucleotide primer for the detection of SNP TSC0028484
agagtttttaat

SEQ ID NO: 318162 - DNA, 12 bp, Artificial Sequence
  Oligonucleotide primer for the detection of SNP TSC0028484
agagtttttaac

SEQ ID NO: 318163 - DNA, 12 bp, Artificial Sequence
  Oligonucleotide primer for the detection of SNP TSC0028485
atttttatttag

SEQ ID NO: 318164 - DNA, 12 bp, Artificial Sequence
  Oligonucleotide primer for the detection of SNP TSC0028486
ctttaaacaaat

SEQ ID NO: 318165 - DNA, 12 bp, Artificial Sequence
  Oligonucleotide primer for the detection of SNP TSC0028486
gaagaggttaag

SEQ ID NO: 318166 - DNA, 12 bp, Artificial Sequence
  Oligonucleotide primer for the detection of SNP TSC0028489
tatttccaattt

SEQ ID NO: 318167 - DNA, 12 bp, Artificial Sequence
  Oligonucleotide primer for the detection of SNP TSC0028489
atgtaattataa

SEQ ID NO: 318168 - DNA, 12 bp, Artificial Sequence
  Oligonucleotide primer for the detection of SNP TSC0028490
accaaaaaaatt

SEQ ID NO: 318169 - DNA, 12 bp, Artificial Sequence
  Oligonucleotide primer for the detection of SNP TSC0028490
atagattttttt

SEQ ID NO: 318170 - DNA, 12 bp, Artificial Sequence
  Oligonucleotide primer for the detection of SNP TSC0028490
acaaatttttcc

SEQ ID NO: 318171 - DNA, 12 bp, Artificial Sequence
  Oligonucleotide primer for the detection of SNP TSC0028490
gttaaaggagtt

SEQ ID NO: 318172 - DNA, 12 bp, Artificial Sequence
  Oligonucleotide primer for the detection of SNP TSC0028491
ttttaggatatg

SEQ ID NO: 318173 - DNA, 12 bp, Artificial Sequence
  Oligonucleotide primer for the detection of SNP TSC0028491
ttccaaaacata

SEQ ID NO: 318174 - DNA, 12 bp, Artificial Sequence
  Oligonucleotide primer for the detection of SNP TSC0028491
tttgtgttgaat

SEQ ID NO: 318175 - DNA, 12 bp, Artificial Sequence
  Oligonucleotide primer for the detection of SNP TSC0028492
atatactttaat

SEQ ID NO: 318176 - DNA, 12 bp, Artificial Sequence
  Oligonucleotide primer for the detection of SNP TSC0028492
atttgtttttag

SEQ ID NO: 318177 - DNA, 12 bp, Artificial Sequence
  Oligonucleotide primer for the detection of SNP TSC0028495
acaaacacacac

SEQ ID NO: 318178 - DNA, 12 bp, Artificial Sequence
  Oligonucleotide primer for the detection of SNP TSC0028495
tgtgtgtatgtg

SEQ ID NO: 318179 - DNA, 12 bp, Artificial Sequence
  Oligonucleotide primer for the detection of SNP TSC0028503
taatccacctac

SEQ ID NO: 318180 - DNA, 12 bp, Artificial Sequence
  Oligonucleotide primer for the detection of SNP TSC0028503
taatccgcctac

SEQ ID NO: 318181 - DNA, 12 bp, Artificial Sequence
  Oligonucleotide primer for the detection of SNP TSC0028503
ttgggaggttag

SEQ ID NO: 318182 - DNA, 12 bp, Artificial Sequence
  Oligonucleotide primer for the detection of SNP TSC0028504
aagtgtcgggat

SEQ ID NO: 318183 - DNA, 12 bp, Artificial Sequence
  Oligonucleotide primer for the detection of SNP TSC0028504
aaataccaaaat

SEQ ID NO: 318184 - DNA, 12 bp, Artificial Sequence
  Oligonucleotide primer for the detection of SNP TSC0028504
aaataccgaaat

SEQ ID NO: 318185 - DNA, 12 bp, Artificial Sequence
  Oligonucleotide primer for the detection of SNP TSC0028506
aaaactaataac

SEQ ID NO: 318186 - DNA, 12 bp, Artificial Sequence
  Oligonucleotide primer for the detection of SNP TSC0028506
ggatgtgtagtg

SEQ ID NO: 318187 - DNA, 12 bp, Artificial Sequence
  Oligonucleotide primer for the detection of SNP TSC0028506
ggatgtgtagcg

SEQ ID NO: 318188 - DNA, 12 bp, Artificial Sequence
  Oligonucleotide primer for the detection of SNP TSC0028506
aatatacaacaa

SEQ ID NO: 318189 - DNA, 12 bp, Artificial Sequence
  Oligonucleotide primer for the detection of SNP TSC0028506
aatatacaacga

SEQ ID NO: 318190 - DNA, 12 bp, Artificial Sequence
  Oligonucleotide primer for the detection of SNP TSC0028506
aggttggtggtt

SEQ ID NO: 318191 - DNA, 12 bp, Artificial Sequence
  Oligonucleotide primer for the detection of SNP TSC0028510
ccccaacccacc

SEQ ID NO: 318192 - DNA, 12 bp, Artificial Sequence
  Oligonucleotide primer for the detection of SNP TSC0028510
attaggtgatgg

SEQ ID NO: 318193 - DNA, 12 bp, Artificial Sequence
  Oligonucleotide primer for the detection of SNP TSC0028511
accccaactcca

SEQ ID NO: 318194 - DNA, 12 bp, Artificial Sequence
  Oligonucleotide primer for the detection of SNP TSC0028511
tttagtttaggt

SEQ ID NO: 318195 - DNA, 12 bp, Artificial Sequence
  Oligonucleotide primer for the detection of SNP TSC0028511
tttagtttaggc

SEQ ID NO: 318196 - DNA, 12 bp, Artificial Sequence
  Oligonucleotide primer for the detection of SNP TSC0028511
ttcaacccaaac

SEQ ID NO: 318197 - DNA, 12 bp, Artificial Sequence
  Oligonucleotide primer for the detection of SNP TSC0028514
ccaacctaccat

SEQ ID NO: 318198 - DNA, 12 bp, Artificial Sequence
  Oligonucleotide primer for the detection of SNP TSC0028514
ttttgatgggaa

SEQ ID NO: 318199 - DNA, 12 bp, Artificial Sequence
  Oligonucleotide primer for the detection of SNP TSC0028515
acactaccatat

SEQ ID NO: 318200 - DNA, 12 bp, Artificial Sequence
  Oligonucleotide primer for the detection of SNP TSC0028515
acgctaccatat

SEQ ID NO: 318201 - DNA, 12 bp, Artificial Sequence
  Oligonucleotide primer for the detection of SNP TSC0028515
ttttatgatgta

SEQ ID NO: 318202 - DNA, 12 bp, Artificial Sequence
  Oligonucleotide primer for the detection of SNP TSC0028515
ttttacgatgta

SEQ ID NO: 318203 - DNA, 12 bp, Artificial Sequence
  Oligonucleotide primer for the detection of SNP TSC0028515
ttttatgacgta

SEQ ID NO: 318204 - DNA, 12 bp, Artificial Sequence
  Oligonucleotide primer for the detection of SNP TSC0028515
ttttacgacgta

SEQ ID NO: 318205 - DNA, 12 bp, Artificial Sequence
  Oligonucleotide primer for the detection of SNP TSC0028516
aatattcttctt

SEQ ID NO: 318206 - DNA, 12 bp, Artificial Sequence
  Oligonucleotide primer for the detection of SNP TSC0028516
tgtatggtttgg

SEQ ID NO: 318207 - DNA, 12 bp, Artificial Sequence
  Oligonucleotide primer for the detection of SNP TSC0028518
tagagtggatgg

SEQ ID NO: 318208 - DNA, 12 bp, Artificial Sequence
  Oligonucleotide primer for the detection of SNP TSC0028518
tagttgtaaaat

SEQ ID NO: 318209 - DNA, 12 bp, Artificial Sequence
  Oligonucleotide primer for the detection of SNP TSC0028520
aacctaccccaa

SEQ ID NO: 318210 - DNA, 12 bp, Artificial Sequence
  Oligonucleotide primer for the detection of SNP TSC0028520
tttcaaaaaaaa

SEQ ID NO: 318211 - DNA, 12 bp, Artificial Sequence
  Oligonucleotide primer for the detection of SNP TSC0028520
ggtttgttttag

SEQ ID NO: 318212 - DNA, 12 bp, Artificial Sequence
  Oligonucleotide primer for the detection of SNP TSC0028521
cccaaacctacc

SEQ ID NO: 318213 - DNA, 12 bp, Artificial Sequence
  Oligonucleotide primer for the detection of SNP TSC0028521
ggataaggggaa

SEQ ID NO: 318214 - DNA, 12 bp, Artificial Sequence
  Oligonucleotide primer for the detection of SNP TSC0028522
gttttgttggta

SEQ ID NO: 318215 - DNA, 12 bp, Artificial Sequence
  Oligonucleotide primer for the detection of SNP TSC0028522
accctactaaca

SEQ ID NO: 318216 - DNA, 12 bp, Artificial Sequence
  Oligonucleotide primer for the detection of SNP TSC0028522
ttggagaggggt

SEQ ID NO: 318217 - DNA, 12 bp, Artificial Sequence
  Oligonucleotide primer for the detection of SNP TSC0028522
tcggagaggggt

SEQ ID NO: 318218 - DNA, 12 bp, Artificial Sequence
  Oligonucleotide primer for the detection of SNP TSC0028523
taacaactttcc

SEQ ID NO: 318219 - DNA, 12 bp, Artificial Sequence
  Oligonucleotide primer for the detection of SNP TSC0028523
tatgttttattt

SEQ ID NO: 318220 - DNA, 12 bp, Artificial Sequence
  Oligonucleotide primer for the detection of SNP TSC0028523
atatcttactta

SEQ ID NO: 318221 - DNA, 12 bp, Artificial Sequence
  Oligonucleotide primer for the detection of SNP TSC0028524
cttcaacaccac

SEQ ID NO: 318222 - DNA, 12 bp, Artificial Sequence
  Oligonucleotide primer for the detection of SNP TSC0028524
gttttgtattgg

SEQ ID NO: 318223 - DNA, 12 bp, Artificial Sequence
  Oligonucleotide primer for the detection of SNP TSC0028527
tcctactttaaa

SEQ ID NO: 318224 - DNA, 12 bp, Artificial Sequence
  Oligonucleotide primer for the detection of SNP TSC0028527
tagtagaggatt

SEQ ID NO: 318225 - DNA, 12 bp, Artificial Sequence
  Oligonucleotide primer for the detection of SNP TSC0028528
atttcactccta

SEQ ID NO: 318226 - DNA, 12 bp, Artificial Sequence
  Oligonucleotide primer for the detection of SNP TSC0028528
tgataataaagt

SEQ ID NO: 318227 - DNA, 12 bp, Artificial Sequence
  Oligonucleotide primer for the detection of SNP TSC0028531
cttctaaaacta

SEQ ID NO: 318228 - DNA, 12 bp, Artificial Sequence
  Oligonucleotide primer for the detection of SNP TSC0028531
atttttagtgtt

SEQ ID NO: 318229 - DNA, 12 bp, Artificial Sequence
  Oligonukleotid-Primer
atttttagcgtt

SEQ ID NO: 318230 - DNA, 12 bp, Artificial Sequence
  Oligonucleotide primer for the detection of SNP TSC0028531
aaaccttcaaca

SEQ ID NO: 318231 - DNA, 12 bp, Artificial Sequence
  Oligonucleotide primer for the detection of SNP TSC0028531
aaaccttcaacg

SEQ ID NO: 318232 - DNA, 12 bp, Artificial Sequence
  Oligonucleotide primer for the detection of SNP TSC0028531
tttaaagttgtt

SEQ ID NO: 318233 - DNA, 12 bp, Artificial Sequence
  Oligonucleotide primer for the detection of SNP TSC0028532
tcccaaaacaac

SEQ ID NO: 318234 - DNA, 12 bp, Artificial Sequence
  Oligonucleotide primer for the detection of SNP TSC0028532
tctcattcccaa

SEQ ID NO: 318235 - DNA, 12 bp, Artificial Sequence
  Oligonucleotide primer for the detection of SNP TSC0028533
tatttcttaaca

SEQ ID NO: 318236 - DNA, 12 bp, Artificial Sequence
  Oligonucleotide primer for the detection of SNP TSC0028533
catccctaaaaa

SEQ ID NO: 318237 - DNA, 12 bp, Artificial Sequence
  Oligonucleotide primer for the detection of SNP TSC0028533
ttgttttttgat

SEQ ID NO: 318238 - DNA, 12 bp, Artificial Sequence
  Oligonucleotide primer for the detection of SNP TSC0028535
tctaattattat

SEQ ID NO: 318239 - DNA, 12 bp, Artificial Sequence
  Oligonucleotide primer for the detection of SNP TSC0028535
tttggttgttat

SEQ ID NO: 318240 - DNA, 12 bp, Artificial Sequence
  Oligonucleotide primer for the detection of SNP TSC0028536
ttaccaaacaac

SEQ ID NO: 318241 - DNA, 12 bp, Artificial Sequence
  Oligonucleotide primer for the detection of SNP TSC0028536
agttaaaaggtg

SEQ ID NO: 318242 - DNA, 12 bp, Artificial Sequence
  Oligonucleotide primer for the detection of SNP TSC0028536
ttgttaggtagt

SEQ ID NO: 318243 - DNA, 12 bp, Artificial Sequence
  Oligonucleotide primer for the detection of SNP TSC0028537
agttttttatgt

SEQ ID NO: 318244 - DNA, 12 bp, Artificial Sequence
  Oligonucleotide primer for the detection of SNP TSC0028537
agttttttacgt

SEQ ID NO: 318245 - DNA, 12 bp, Artificial Sequence
  Oligonucleotide primer for the detection of SNP TSC0028537
aactccccacat

SEQ ID NO: 318246 - DNA, 12 bp, Artificial Sequence
  Oligonucleotide primer for the detection of SNP TSC0028537
aactccccacgt

SEQ ID NO: 318247 - DNA, 12 bp, Artificial Sequence
  Oligonucleotide primer for the detection of SNP TSC0028537
taaatagggaaa

SEQ ID NO: 318248 - DNA, 12 bp, Artificial Sequence
  Oligonucleotide primer for the detection of SNP TSC0028538
tttctattttta

SEQ ID NO: 318249 - DNA, 12 bp, Artificial Sequence
  Oligonucleotide primer for the detection of SNP TSC0028538
ggaagaagttat

SEQ ID NO: 318250 - DNA, 12 bp, Artificial Sequence
  Oligonucleotide primer for the detection of SNP TSC0028539
tcctataaatac

SEQ ID NO: 318251 - DNA, 12 bp, Artificial Sequence
  Oligonucleotide primer for the detection of SNP TSC0028539
tgtaggaagtgg

SEQ ID NO: 318252 - DNA, 12 bp, Artificial Sequence
  Oligonucleotide primer for the detection of SNP TSC0028539
ttttgtaaatat

SEQ ID NO: 318253 - DNA, 12 bp, Artificial Sequence
  Oligonucleotide primer for the detection of SNP TSC0028544
tgtttgatttat

SEQ ID NO: 318254 - DNA, 12 bp, Artificial Sequence
  Oligonucleotide primer for the detection of SNP TSC0028544
atttaatttata

SEQ ID NO: 318255 - DNA, 12 bp, Artificial Sequence
  Oligonucleotide primer for the detection of SNP TSC0028544
aatttttaggat

SEQ ID NO: 318256 - DNA, 12 bp, Artificial Sequence
  Oligonucleotide primer for the detection of SNP TSC0028545
ttttaataaaac

SEQ ID NO: 318257 - DNA, 12 bp, Artificial Sequence
  Oligonucleotide primer for the detection of SNP TSC0028546
ttttttagatgg

SEQ ID NO: 318258 - DNA, 12 bp, Artificial Sequence
  Oligonucleotide primer for the detection of SNP TSC0028548
aaccttaaaata

SEQ ID NO: 318259 - DNA, 12 bp, Artificial Sequence
  Oligonucleotide primer for the detection of SNP TSC0028548
taattttataat

SEQ ID NO: 318260 - DNA, 12 bp, Artificial Sequence
  Oligonucleotide primer for the detection of SNP TSC0028548
taactccataat

SEQ ID NO: 318261 - DNA, 12 bp, Artificial Sequence
  Oligonucleotide primer for the detection of SNP TSC0028548
aattttaagatg

SEQ ID NO: 318262 - DNA, 12 bp, Artificial Sequence
  Oligonucleotide primer for the detection of SNP TSC0028551
taaaaatcccac

SEQ ID NO: 318263 - DNA, 12 bp, Artificial Sequence
  Oligonucleotide primer for the detection of SNP TSC0028551
tgttgttttaga

SEQ ID NO: 318264 - DNA, 12 bp, Artificial Sequence
  Oligonucleotide primer for the detection of SNP TSC0028551
cgttgttttaga

SEQ ID NO: 318265 - DNA, 12 bp, Artificial Sequence
  Oligonucleotide primer for the detection of SNP TSC0028552
tattattttaga

SEQ ID NO: 318266 - DNA, 12 bp, Artificial Sequence
  Oligonucleotide primer for the detection of SNP TSC0028552
catcactccaaa

SEQ ID NO: 318267 - DNA, 12 bp, Artificial Sequence
  Oligonucleotide primer for the detection of SNP TSC0028552
tggttttgtagt

SEQ ID NO: 318268 - DNA, 12 bp, Artificial Sequence
  Oligonucleotide primer for the detection of SNP TSC0028553
tcatatcaaaac

SEQ ID NO: 318269 - DNA, 12 bp, Artificial Sequence
  Oligonucleotide primer for the detection of SNP TSC0028553
aaatattctttt

SEQ ID NO: 318270 - DNA, 12 bp, Artificial Sequence
  Oligonucleotide primer for the detection of SNP TSC0028553
tatgttaaaatt

SEQ ID NO: 318271 - DNA, 12 bp, Artificial Sequence
  Oligonucleotide primer for the detection of SNP TSC0028554
caaatccccata

SEQ ID NO: 318272 - DNA, 12 bp, Artificial Sequence
  Oligonucleotide primer for the detection of SNP TSC0028554
cgaatccccata

SEQ ID NO: 318273 - DNA, 12 bp, Artificial Sequence
  Oligonucleotide primer for the detection of SNP TSC0028554
gtttgtagggtt

SEQ ID NO: 318274 - DNA, 12 bp, Artificial Sequence
  Oligonucleotide primer for the detection of SNP TSC0028554
aacctacaaaac

SEQ ID NO: 318275 - DNA, 12 bp, Artificial Sequence
  Oligonucleotide primer for the detection of SNP TSC0028556
aaaaaccaccaa

SEQ ID NO: 318276 - DNA, 12 bp, Artificial Sequence
  Oligonucleotide primer for the detection of SNP TSC0028556
tagtttttgttg

SEQ ID NO: 318277 - DNA, 12 bp, Artificial Sequence
  Oligonucleotide primer for the detection of SNP TSC0028556
tagttttcgttg

SEQ ID NO: 318278 - DNA, 12 bp, Artificial Sequence
  Oligonucleotide primer for the detection of SNP TSC0028556
tagtttttgtcg

SEQ ID NO: 318279 - DNA, 12 bp, Artificial Sequence
  Oligonucleotide primer for the detection of SNP TSC0028556
tagttttcgtcg

SEQ ID NO: 318280 - DNA, 12 bp, Artificial Sequence
  Oligonucleotide primer for the detection of SNP TSC0028556
caacccccacca

SEQ ID NO: 318281 - DNA, 12 bp, Artificial Sequence
  Oligonucleotide primer for the detection of SNP TSC0028556
caacccccaccg

SEQ ID NO: 318282 - DNA, 12 bp, Artificial Sequence
  Oligonucleotide primer for the detection of SNP TSC0028556
caacccccgcca

SEQ ID NO: 318283 - DNA, 12 bp, Artificial Sequence
  Oligonucleotide primer for the detection of SNP TSC0028556
caacccccgccg

SEQ ID NO: 318284 - DNA, 12 bp, Artificial Sequence
  Oligonucleotide primer for the detection of SNP TSC0028556
aggagttattag

SEQ ID NO: 318285 - DNA, 12 bp, Artificial Sequence
  Oligonucleotide primer for the detection of SNP TSC0028557
aaaaccccatct

SEQ ID NO: 318286 - DNA, 12 bp, Artificial Sequence
  Oligonucleotide primer for the detection of SNP TSC0028557
aaaaccccgtct

SEQ ID NO: 318287 - DNA, 12 bp, Artificial Sequence
  Oligonucleotide primer for the detection of SNP TSC0028557
gtatttttagta

SEQ ID NO: 318288 - DNA, 12 bp, Artificial Sequence
  Oligonucleotide primer for the detection of SNP TSC0028558
atacacaactta

SEQ ID NO: 318289 - DNA, 12 bp, Artificial Sequence
  Oligonucleotide primer for the detection of SNP TSC0028558
atacgcaactta

SEQ ID NO: 318290 - DNA, 12 bp, Artificial Sequence
  Oligonucleotide primer for the detection of SNP TSC0028558
tgttttaagttg

SEQ ID NO: 318291 - DNA, 12 bp, Artificial Sequence
  Oligonucleotide primer for the detection of SNP TSC0028558
tattttaaacta

SEQ ID NO: 318292 - DNA, 12 bp, Artificial Sequence
  Oligonucleotide primer for the detection of SNP TSC0028558
gtatgtaatttg

SEQ ID NO: 318293 - DNA, 12 bp, Artificial Sequence
  Oligonucleotide primer for the detection of SNP TSC0028558
gtacgtaatttg

SEQ ID NO: 318294 - DNA, 12 bp, Artificial Sequence
  Oligonucleotide primer for the detection of SNP TSC0028559
acacaataaaac

SEQ ID NO: 318295 - DNA, 12 bp, Artificial Sequence
  Oligonucleotide primer for the detection of SNP TSC0028559
acacgataaaac

SEQ ID NO: 318296 - DNA, 12 bp, Artificial Sequence
  Oligonucleotide primer for the detection of SNP TSC0028559
atatggtgaaat

SEQ ID NO: 318297 - DNA, 12 bp, Artificial Sequence
  Oligonucleotide primer for the detection of SNP TSC0028559
atacggtgaaat

SEQ ID NO: 318298 - DNA, 12 bp, Artificial Sequence
  Oligonucleotide primer for the detection of SNP TSC0028559
atatggtgaaac

SEQ ID NO: 318299 - DNA, 12 bp, Artificial Sequence
  Oligonucleotide primer for the detection of SNP TSC0028559
atacggtgaaac

SEQ ID NO: 318300 - DNA, 12 bp, Artificial Sequence
  Oligonucleotide primer for the detection of SNP TSC0028560
actatactcaaa

SEQ ID NO: 318301 - DNA, 12 bp, Artificial Sequence
  Oligonucleotide primer for the detection of SNP TSC0028560
gctatactcaaa

SEQ ID NO: 318302 - DNA, 12 bp, Artificial Sequence
  Oligonukleotid-Primer
tagtttgagttt

SEQ ID NO: 318303 - DNA, 12 bp, Artificial Sequence
  Oligonucleotide primer for the detection of SNP TSC0028560
tagttcgagttt

SEQ ID NO: 318304 - DNA, 12 bp, Artificial Sequence
  Oligonucleotide primer for the detection of SNP TSC0028560
actcaactcaaa

SEQ ID NO: 318305 - DNA, 12 bp, Artificial Sequence
  Oligonucleotide primer for the detection of SNP TSC0028560
actcaactcgaa

SEQ ID NO: 318306 - DNA, 12 bp, Artificial Sequence
  Oligonucleotide primer for the detection of SNP TSC0028560
gttatgtttaga

SEQ ID NO: 318307 - DNA, 12 bp, Artificial Sequence
  Oligonucleotide primer for the detection of SNP TSC0028561
ccaaaaatactc

SEQ ID NO: 318308 - DNA, 12 bp, Artificial Sequence
  Oligonucleotide primer for the detection of SNP TSC0028561
ttggtatatttt

SEQ ID NO: 318309 - DNA, 12 bp, Artificial Sequence
  Oligonucleotide primer for the detection of SNP TSC0028561
ttggtatatttc

SEQ ID NO: 318310 - DNA, 12 bp, Artificial Sequence
  Oligonucleotide primer for the detection of SNP TSC0028562
aacaattattcc

SEQ ID NO: 318311 - DNA, 12 bp, Artificial Sequence
  Oligonucleotide primer for the detection of SNP TSC0028562
aacgattattcc

SEQ ID NO: 318312 - DNA, 12 bp, Artificial Sequence
  Oligonucleotide primer for the detection of SNP TSC0028562
attggtttttaa

SEQ ID NO: 318313 - DNA, 12 bp, Artificial Sequence
  Oligonucleotide primer for the detection of SNP TSC0028565
aataatataaat

SEQ ID NO: 318314 - DNA, 12 bp, Artificial Sequence
  Oligonucleotide primer for the detection of SNP TSC0028566
gaggatgtaata

SEQ ID NO: 318315 - DNA, 12 bp, Artificial Sequence
  Oligonucleotide primer for the detection of SNP TSC0028566
gaggacgtaata

SEQ ID NO: 318316 - DNA, 12 bp, Artificial Sequence
  Oligonucleotide primer for the detection of SNP TSC0028567
ctaatattctac

SEQ ID NO: 318317 - DNA, 12 bp, Artificial Sequence
  Oligonucleotide primer for the detection of SNP TSC0028567
gatgagtgatat

SEQ ID NO: 318318 - DNA, 12 bp, Artificial Sequence
  Oligonucleotide primer for the detection of SNP TSC0028567
aataaataatat

SEQ ID NO: 318319 - DNA, 12 bp, Artificial Sequence
  Oligonucleotide primer for the detection of SNP TSC0028567
taatgttttgtt

SEQ ID NO: 318320 - DNA, 12 bp, Artificial Sequence
  Oligonucleotide primer for the detection of SNP TSC0028568
aataagtttgga

SEQ ID NO: 318321 - DNA, 12 bp, Artificial Sequence
  Oligonucleotide primer for the detection of SNP TSC0028569
cctttacatata

SEQ ID NO: 318322 - DNA, 12 bp, Artificial Sequence
  Oligonucleotide primer for the detection of SNP TSC0028569
cctttacgtata

SEQ ID NO: 318323 - DNA, 12 bp, Artificial Sequence
  Oligonucleotide primer for the detection of SNP TSC0028569
tttttatgtata

SEQ ID NO: 318324 - DNA, 12 bp, Artificial Sequence
  Oligonucleotide primer for the detection of SNP TSC0028569
tttttacgtata

SEQ ID NO: 318325 - DNA, 12 bp, Artificial Sequence
  Oligonucleotide primer for the detection of SNP TSC0028570
tcactacttttc

SEQ ID NO: 318326 - DNA, 12 bp, Artificial Sequence
  Oligonucleotide primer for the detection of SNP TSC0028571
catttcttatat

SEQ ID NO: 318327 - DNA, 12 bp, Artificial Sequence
  Oligonucleotide primer for the detection of SNP TSC0028571
aattaattgtga

SEQ ID NO: 318328 - DNA, 12 bp, Artificial Sequence
  Oligonucleotide primer for the detection of SNP TSC0028575
acaaatataccc

SEQ ID NO: 318329 - DNA, 12 bp, Artificial Sequence
  Oligonucleotide primer for the detection of SNP TSC0028575
attttgagagaa

SEQ ID NO: 318330 - DNA, 12 bp, Artificial Sequence
  Oligonucleotide primer for the detection of SNP TSC0028576
tctaaaaataaa

SEQ ID NO: 318331 - DNA, 12 bp, Artificial Sequence
  Oligonucleotide primer for the detection of SNP TSC0028576
tcttctaatttc

SEQ ID NO: 318332 - DNA, 12 bp, Artificial Sequence
  Oligonucleotide primer for the detection of SNP TSC0028576
tttgggggtaga

SEQ ID NO: 318333 - DNA, 12 bp, Artificial Sequence
  Oligonucleotide primer for the detection of SNP TSC0028589
actaaacaaaac

SEQ ID NO: 318334 - DNA, 12 bp, Artificial Sequence
  Oligonucleotide primer for the detection of SNP TSC0028592
tatcctataccc

SEQ ID NO: 318335 - DNA, 12 bp, Artificial Sequence
  Oligonucleotide primer for the detection of SNP TSC0028592
ctaaacatctca

SEQ ID NO: 318336 - DNA, 12 bp, Artificial Sequence
  Oligonucleotide primer for the detection of SNP TSC0028594
aaatttgaatta

SEQ ID NO: 318337 - DNA, 12 bp, Artificial Sequence
  Oligonucleotide primer for the detection of SNP TSC0028595
ttccctataaat

SEQ ID NO: 318338 - DNA, 12 bp, Artificial Sequence
  Oligonucleotide primer for the detection of SNP TSC0028595
ataattaattta

SEQ ID NO: 318339 - DNA, 12 bp, Artificial Sequence
  Oligonucleotide primer for the detection of SNP TSC0028596
aagattatatat

SEQ ID NO: 318340 - DNA, 12 bp, Artificial Sequence
  Oligonucleotide primer for the detection of SNP TSC0028596
aaaaccacatac

SEQ ID NO: 318341 - DNA, 12 bp, Artificial Sequence
  Oligonucleotide primer for the detection of SNP TSC0028596
ttttggggaagt

SEQ ID NO: 318342 - DNA, 12 bp, Artificial Sequence
  Oligonucleotide primer for the detection of SNP TSC0028599
atactctaccac

SEQ ID NO: 318343 - DNA, 12 bp, Artificial Sequence
  Oligonucleotide primer for the detection of SNP TSC0028600
aacttaaaatct

SEQ ID NO: 318344 - DNA, 12 bp, Artificial Sequence
  Oligonucleotide primer for the detection of SNP TSC0028600
atttagagaaga

SEQ ID NO: 318345 - DNA, 12 bp, Artificial Sequence
  Oligonucleotide primer for the detection of SNP TSC0028601
acatttatattt

SEQ ID NO: 318346 - DNA, 12 bp, Artificial Sequence
  Oligonucleotide primer for the detection of SNP TSC0028601
aagtagaagatt

SEQ ID NO: 318347 - DNA, 12 bp, Artificial Sequence
  Oligonucleotide primer for the detection of SNP TSC0028603
attatactaaaa

SEQ ID NO: 318348 - DNA, 12 bp, Artificial Sequence
  Oligonucleotide primer for the detection of SNP TSC0028603
gttatactaaaa

SEQ ID NO: 318349 - DNA, 12 bp, Artificial Sequence
  Oligonucleotide primer for the detection of SNP TSC0028603
tataagatagat

SEQ ID NO: 318350 - DNA, 12 bp, Artificial Sequence
  Oligonucleotide primer for the detection of SNP TSC0028603
cacaaaacaaac

SEQ ID NO: 318351 - DNA, 12 bp, Artificial Sequence
  Oligonucleotide primer for the detection of SNP TSC0028603
gttgtgttgaag

SEQ ID NO: 318352 - DNA, 12 bp, Artificial Sequence
  Oligonucleotide primer for the detection of SNP TSC0028604
tctacattattt

SEQ ID NO: 318353 - DNA, 12 bp, Artificial Sequence
  Oligonucleotide primer for the detection of SNP TSC0028604
ttttgggttata

SEQ ID NO: 318354 - DNA, 12 bp, Artificial Sequence
  Oligonucleotide primer for the detection of SNP TSC0028604
cttaaatcataa

SEQ ID NO: 318355 - DNA, 12 bp, Artificial Sequence
  Oligonucleotide primer for the detection of SNP TSC0028607
attctacatctt

SEQ ID NO: 318356 - DNA, 12 bp, Artificial Sequence
  Oligonucleotide primer for the detection of SNP TSC0028607
attctacgtctt

SEQ ID NO: 318357 - DNA, 12 bp, Artificial Sequence
  Oligonucleotide primer for the detection of SNP TSC0028607
atagaggaagaa

SEQ ID NO: 318358 - DNA, 12 bp, Artificial Sequence
  Oligonucleotide primer for the detection of SNP TSC0028608
tccttattttat

SEQ ID NO: 318359 - DNA, 12 bp, Artificial Sequence
  Oligonucleotide primer for the detection of SNP TSC0028608
gaatgaatgaat

SEQ ID NO: 318360 - DNA, 12 bp, Artificial Sequence
  Oligonucleotide primer for the detection of SNP TSC0028611
tcaataactacc

SEQ ID NO: 318361 - DNA, 12 bp, Artificial Sequence
  Oligonucleotide primer for the detection of SNP TSC0028611
ggtttattattg

SEQ ID NO: 318362 - DNA, 12 bp, Artificial Sequence
  Oligonucleotide primer for the detection of SNP TSC0028612
tataaaaatctt

SEQ ID NO: 318363 - DNA, 12 bp, Artificial Sequence
  Oligonucleotide primer for the detection of SNP TSC0028612
taattaaataga

SEQ ID NO: 318364 - DNA, 12 bp, Artificial Sequence
  Oligonucleotide primer for the detection of SNP TSC0028616
aataccaccatc

SEQ ID NO: 318365 - DNA, 12 bp, Artificial Sequence
  Oligonucleotide primer for the detection of SNP TSC0028616
tgatttaagggg

SEQ ID NO: 318366 - DNA, 12 bp, Artificial Sequence
  Oligonucleotide primer for the detection of SNP TSC0028617
cccaaaaaccaa

SEQ ID NO: 318367 - DNA, 12 bp, Artificial Sequence
  Oligonucleotide primer for the detection of SNP TSC0028617
tttggattaaat

SEQ ID NO: 318368 - DNA, 12 bp, Artificial Sequence
  Oligonucleotide primer for the detection of SNP TSC0028617
ttaaatcaaata

SEQ ID NO: 318369 - DNA, 12 bp, Artificial Sequence
  Oligonucleotide primer for the detection of SNP TSC0028617
tttaagagttaa

SEQ ID NO: 318370 - DNA, 12 bp, Artificial Sequence
  Oligonucleotide primer for the detection of SNP TSC0028618
tctatataaaac

SEQ ID NO: 318371 - DNA, 12 bp, Artificial Sequence
  Oligonucleotide primer for the detection of SNP TSC0028618
tggttataatta

SEQ ID NO: 318372 - DNA, 12 bp, Artificial Sequence
  Oligonucleotide primer for the detection of SNP TSC0028620
cctacctctaca

SEQ ID NO: 318373 - DNA, 12 bp, Artificial Sequence
  Oligonucleotide primer for the detection of SNP TSC0028620
taaaattaggtt

SEQ ID NO: 318374 - DNA, 12 bp, Artificial Sequence
  Oligonucleotide primer for the detection of SNP TSC0028621
cataacaaaaac

SEQ ID NO: 318375 - DNA, 12 bp, Artificial Sequence
  Oligonucleotide primer for the detection of SNP TSC0028621
ttattttttaaa

SEQ ID NO: 318376 - DNA, 12 bp, Artificial Sequence
  Oligonucleotide primer for the detection of SNP TSC0028622
caaaccaaactt

SEQ ID NO: 318377 - DNA, 12 bp, Artificial Sequence
  Oligonucleotide primer for the detection of SNP TSC0028622
ggttaggaaaaa

SEQ ID NO: 318378 - DNA, 12 bp, Artificial Sequence
  Oligonucleotide primer for the detection of SNP TSC0028624
aactccctctcc

SEQ ID NO: 318379 - DNA, 12 bp, Artificial Sequence
  Oligonucleotide primer for the detection of SNP TSC0028624
tagagttattaa

SEQ ID NO: 318380 - DNA, 12 bp, Artificial Sequence
  Oligonucleotide primer for the detection of SNP TSC0028626
acaaacacccac

SEQ ID NO: 318381 - DNA, 12 bp, Artificial Sequence
  Oligonucleotide primer for the detection of SNP TSC0028626
agttgggtgtgg

SEQ ID NO: 318382 - DNA, 12 bp, Artificial Sequence
  Oligonucleotide primer for the detection of SNP TSC0028626
agttgggcgtgg

SEQ ID NO: 318383 - DNA, 12 bp, Artificial Sequence
  Oligonucleotide primer for the detection of SNP TSC0028627
atccttcctttc

SEQ ID NO: 318384 - DNA, 12 bp, Artificial Sequence
  Oligonucleotide primer for the detection of SNP TSC0028627
ttaatggtaagg

SEQ ID NO: 318385 - DNA, 12 bp, Artificial Sequence
  Oligonucleotide primer for the detection of SNP TSC0028628
acaacaaatttt

SEQ ID NO: 318386 - DNA, 12 bp, Artificial Sequence
  Oligonucleotide primer for the detection of SNP TSC0028628
aactcaccccaa

SEQ ID NO: 318387 - DNA, 12 bp, Artificial Sequence
  Oligonucleotide primer for the detection of SNP TSC0028628
aactcgccccaa

SEQ ID NO: 318388 - DNA, 12 bp, Artificial Sequence
  Oligonucleotide primer for the detection of SNP TSC0028629
ttacatacttac

SEQ ID NO: 318389 - DNA, 12 bp, Artificial Sequence
  Oligonucleotide primer for the detection of SNP TSC0028629
aacccataatct

SEQ ID NO: 318390 - DNA, 12 bp, Artificial Sequence
  Oligonucleotide primer for the detection of SNP TSC0028629
ttgtatatttat

SEQ ID NO: 318391 - DNA, 12 bp, Artificial Sequence
  Oligonucleotide primer for the detection of SNP TSC0028630
tgttgattttga

SEQ ID NO: 318392 - DNA, 12 bp, Artificial Sequence
  Oligonucleotide primer for the detection of SNP TSC0028634
aatccataaact

SEQ ID NO: 318393 - DNA, 12 bp, Artificial Sequence
  Oligonucleotide primer for the detection of SNP TSC0028634
gaaattatttga

SEQ ID NO: 318394 - DNA, 12 bp, Artificial Sequence
  Oligonucleotide primer for the detection of SNP TSC0028635
cctacaaactat

SEQ ID NO: 318395 - DNA, 12 bp, Artificial Sequence
  Oligonucleotide primer for the detection of SNP TSC0028635
tttttggtttaa

SEQ ID NO: 318396 - DNA, 12 bp, Artificial Sequence
  Oligonucleotide primer for the detection of SNP TSC0028636
aatggaaagtat

SEQ ID NO: 318397 - DNA, 12 bp, Artificial Sequence
  Oligonucleotide primer for the detection of SNP TSC0028636
aatggaaagtac

SEQ ID NO: 318398 - DNA, 12 bp, Artificial Sequence
  Oligonucleotide primer for the detection of SNP TSC0028636
ttaatagagaag

SEQ ID NO: 318399 - DNA, 12 bp, Artificial Sequence
  Oligonucleotide primer for the detection of SNP TSC0028637
cctaaattccaa

SEQ ID NO: 318400 - DNA, 12 bp, Artificial Sequence
  Oligonucleotide primer for the detection of SNP TSC0028637
ttgattgtggaa

SEQ ID NO: 318401 - DNA, 12 bp, Artificial Sequence
  Oligonucleotide primer for the detection of SNP TSC0028637
ttgatcgtggaa

SEQ ID NO: 318402 - DNA, 12 bp, Artificial Sequence
  Oligonucleotide primer for the detection of SNP TSC0028637
ctaaccataaaa

SEQ ID NO: 318403 - DNA, 12 bp, Artificial Sequence
  Oligonucleotide primer for the detection of SNP TSC0028637
ctaaccgtaaaa

SEQ ID NO: 318404 - DNA, 12 bp, Artificial Sequence
  Oligonucleotide primer for the detection of SNP TSC0028637
tttggattttag

SEQ ID NO: 318405 - DNA, 12 bp, Artificial Sequence
  Oligonucleotide primer for the detection of SNP TSC0028638
cataccatcata

SEQ ID NO: 318406 - DNA, 12 bp, Artificial Sequence
  Oligonucleotide primer for the detection of SNP TSC0028638
aatagatttagt

SEQ ID NO: 318407 - DNA, 12 bp, Artificial Sequence
  Oligonucleotide primer for the detection of SNP TSC0028638
aacaaacttaat

SEQ ID NO: 318408 - DNA, 12 bp, Artificial Sequence
  Oligonucleotide primer for the detection of SNP TSC0028638
tatgttattata

SEQ ID NO: 318409 - DNA, 12 bp, Artificial Sequence
  Oligonucleotide primer for the detection of SNP TSC0028642
aaccttccttaa

SEQ ID NO: 318410 - DNA, 12 bp, Artificial Sequence
  Oligonucleotide primer for the detection of SNP TSC0028642
ggttttgggttt

SEQ ID NO: 318411 - DNA, 12 bp, Artificial Sequence
  Oligonucleotide primer for the detection of SNP TSC0028642
ggtttcgggttt

SEQ ID NO: 318412 - DNA, 12 bp, Artificial Sequence
  Oligonucleotide primer for the detection of SNP TSC0028642
aattccaaactc

SEQ ID NO: 318413 - DNA, 12 bp, Artificial Sequence
  Oligonucleotide primer for the detection of SNP TSC0028642
aattccgaactc

SEQ ID NO: 318414 - DNA, 12 bp, Artificial Sequence
  Oligonucleotide primer for the detection of SNP TSC0028643
tccaattacccc

SEQ ID NO: 318415 - DNA, 12 bp, Artificial Sequence
  Oligonucleotide primer for the detection of SNP TSC0028643
gtaaggatttgg

SEQ ID NO: 318416 - DNA, 12 bp, Artificial Sequence
  Oligonucleotide primer for the detection of SNP TSC0028645
ttctctacctac

SEQ ID NO: 318417 - DNA, 12 bp, Artificial Sequence
  Oligonucleotide primer for the detection of SNP TSC0028645
tgtgtttgtgtg

SEQ ID NO: 318418 - DNA, 12 bp, Artificial Sequence
  Oligonucleotide primer for the detection of SNP TSC0028646
cctctcacctca

SEQ ID NO: 318419 - DNA, 12 bp, Artificial Sequence
  Oligonucleotide primer for the detection of SNP TSC0028648
attatctttatc

SEQ ID NO: 318420 - DNA, 12 bp, Artificial Sequence
  Oligonucleotide primer for the detection of SNP TSC0028648
tgaagagaataa

SEQ ID NO: 318421 - DNA, 12 bp, Artificial Sequence
  Oligonucleotide primer for the detection of SNP TSC0028648
cgaagagaataa

SEQ ID NO: 318422 - DNA, 12 bp, Artificial Sequence
  Oligonucleotide primer for the detection of SNP TSC0028649
taacatccttaa

SEQ ID NO: 318423 - DNA, 12 bp, Artificial Sequence
  Oligonucleotide primer for the detection of SNP TSC0028649
acttattctctt

SEQ ID NO: 318424 - DNA, 12 bp, Artificial Sequence
  Oligonucleotide primer for the detection of SNP TSC0028652
taatctcatttt

SEQ ID NO: 318425 - DNA, 12 bp, Artificial Sequence
  Oligonucleotide primer for the detection of SNP TSC0028652
ttattatttgtg

SEQ ID NO: 318426 - DNA, 12 bp, Artificial Sequence
  Oligonucleotide primer for the detection of SNP TSC0028653
atatcaacttct

SEQ ID NO: 318427 - DNA, 12 bp, Artificial Sequence
  Oligonucleotide primer for the detection of SNP TSC0028653
ttatatagaata

SEQ ID NO: 318428 - DNA, 12 bp, Artificial Sequence
  Oligonucleotide primer for the detection of SNP TSC0028654
ttataaattaat

SEQ ID NO: 318429 - DNA, 12 bp, Artificial Sequence
  Oligonucleotide primer for the detection of SNP TSC0028654
tttttgttgtaa

SEQ ID NO: 318430 - DNA, 12 bp, Artificial Sequence
  Oligonucleotide primer for the detection of SNP TSC0028654
tttttattataa

SEQ ID NO: 318431 - DNA, 12 bp, Artificial Sequence
  Oligonucleotide primer for the detection of SNP TSC0028654
ttatgaattaat

SEQ ID NO: 318432 - DNA, 12 bp, Artificial Sequence
  Oligonucleotide primer for the detection of SNP TSC0028655
actcaccattat

SEQ ID NO: 318433 - DNA, 12 bp, Artificial Sequence
  Oligonucleotide primer for the detection of SNP TSC0028655
ttttatgttagg

SEQ ID NO: 318434 - DNA, 12 bp, Artificial Sequence
  Oligonucleotide primer for the detection of SNP TSC0028656
acctaaataaca

SEQ ID NO: 318435 - DNA, 12 bp, Artificial Sequence
  Oligonucleotide primer for the detection of SNP TSC0028656
tggggttttatt

SEQ ID NO: 318436 - DNA, 12 bp, Artificial Sequence
  Oligonucleotide primer for the detection of SNP TSC0028656
taaaatctcact

SEQ ID NO: 318437 - DNA, 12 bp, Artificial Sequence
  Oligonucleotide primer for the detection of SNP TSC0028657
aattccataatc

SEQ ID NO: 318438 - DNA, 12 bp, Artificial Sequence
  Oligonucleotide primer for the detection of SNP TSC0028657
atagtggttgga

SEQ ID NO: 318439 - DNA, 12 bp, Artificial Sequence
  Oligonucleotide primer for the detection of SNP TSC0028657
atagtggtcgga

SEQ ID NO: 318440 - DNA, 12 bp, Artificial Sequence
  Oligonucleotide primer for the detection of SNP TSC0028658
ctctaaccaccc

SEQ ID NO: 318441 - DNA, 12 bp, Artificial Sequence
  Oligonucleotide primer for the detection of SNP TSC0028658
ctctaaccgccc

SEQ ID NO: 318442 - DNA, 12 bp, Artificial Sequence
  Oligonucleotide primer for the detection of SNP TSC0028658
ggttttgtaagg

SEQ ID NO: 318443 - DNA, 12 bp, Artificial Sequence
  Oligonucleotide primer for the detection of SNP TSC0028658
aaccctacaaaa

SEQ ID NO: 318444 - DNA, 12 bp, Artificial Sequence
  Oligonucleotide primer for the detection of SNP TSC0028658
ttttgattgttt

SEQ ID NO: 318445 - DNA, 12 bp, Artificial Sequence
  Oligonucleotide primer for the detection of SNP TSC0028658
ttttgatcgttt

SEQ ID NO: 318446 - DNA, 12 bp, Artificial Sequence
  Oligonucleotide primer for the detection of SNP TSC0028659
gataggatttta

SEQ ID NO: 318447 - DNA, 12 bp, Artificial Sequence
  Oligonucleotide primer for the detection of SNP TSC0028660
attataggtata

SEQ ID NO: 318448 - DNA, 12 bp, Artificial Sequence
  Oligonucleotide primer for the detection of SNP TSC0028663
ccctatcaacct

SEQ ID NO: 318449 - DNA, 12 bp, Artificial Sequence
  Oligonucleotide primer for the detection of SNP TSC0028663
tataaaagatgt

SEQ ID NO: 318450 - DNA, 12 bp, Artificial Sequence
  Oligonucleotide primer for the detection of SNP TSC0028663
cacaaaaaatat

SEQ ID NO: 318451 - DNA, 12 bp, Artificial Sequence
  Oligonucleotide primer for the detection of SNP TSC0028663
ttttgttagttt

SEQ ID NO: 318452 - DNA, 12 bp, Artificial Sequence
  Oligonucleotide primer for the detection of SNP TSC0028664
acacaaccaaac

SEQ ID NO: 318453 - DNA, 12 bp, Artificial Sequence
  Oligonucleotide primer for the detection of SNP TSC0028664
gaagtttgttgg

SEQ ID NO: 318454 - DNA, 12 bp, Artificial Sequence
  Oligonucleotide primer for the detection of SNP TSC0028664
gaagtttgtcgg

SEQ ID NO: 318455 - DNA, 12 bp, Artificial Sequence
  Oligonukleotid-Primer
aaaacctaccaa

SEQ ID NO: 318456 - DNA, 12 bp, Artificial Sequence
  Oligonucleotide primer for the detection of SNP TSC0028664
aaaacctaccga

SEQ ID NO: 318457 - DNA, 12 bp, Artificial Sequence
  Oligonucleotide primer for the detection of SNP TSC0028664
gtatagttaaat

SEQ ID NO: 318458 - DNA, 12 bp, Artificial Sequence
  Oligonucleotide primer for the detection of SNP TSC0028664
gtatagttaaac

SEQ ID NO: 318459 - DNA, 12 bp, Artificial Sequence
  Oligonucleotide primer for the detection of SNP TSC0028665
gaaaaaaatacc

SEQ ID NO: 318460 - DNA, 12 bp, Artificial Sequence
  Oligonucleotide primer for the detection of SNP TSC0028665
tttttggttatg

SEQ ID NO: 318461 - DNA, 12 bp, Artificial Sequence
  Oligonucleotide primer for the detection of SNP TSC0028665
ttttcggttatg

SEQ ID NO: 318462 - DNA, 12 bp, Artificial Sequence
  Oligonucleotide primer for the detection of SNP TSC0028665
tcttcaaccata

SEQ ID NO: 318463 - DNA, 12 bp, Artificial Sequence
  Oligonucleotide primer for the detection of SNP TSC0028665
tcttcgaccata

SEQ ID NO: 318464 - DNA, 12 bp, Artificial Sequence
  Oligonucleotide primer for the detection of SNP TSC0028665
gggaggagtgtt

SEQ ID NO: 318465 - DNA, 12 bp, Artificial Sequence
  Oligonucleotide primer for the detection of SNP TSC0028666
atttacaataat

SEQ ID NO: 318466 - DNA, 12 bp, Artificial Sequence
  Oligonucleotide primer for the detection of SNP TSC0028666
attttttgtttt

SEQ ID NO: 318467 - DNA, 12 bp, Artificial Sequence
  Oligonucleotide primer for the detection of SNP TSC0028666
atcccctatctt

SEQ ID NO: 318468 - DNA, 12 bp, Artificial Sequence
  Oligonucleotide primer for the detection of SNP TSC0028666
atttatagtagt

SEQ ID NO: 318469 - DNA, 12 bp, Artificial Sequence
  Oligonucleotide primer for the detection of SNP TSC0028667
actatttacaat

SEQ ID NO: 318470 - DNA, 12 bp, Artificial Sequence
  Oligonucleotide primer for the detection of SNP TSC0028667
gctatttacaat

SEQ ID NO: 318471 - DNA, 12 bp, Artificial Sequence
  Oligonucleotide primer for the detection of SNP TSC0028668
tgtattttgagg

SEQ ID NO: 318472 - DNA, 12 bp, Artificial Sequence
  Oligonucleotide primer for the detection of SNP TSC0028669
gttaggaggaaa

SEQ ID NO: 318473 - DNA, 12 bp, Artificial Sequence
  Oligonucleotide primer for the detection of SNP TSC0028673
acaaaattatat

SEQ ID NO: 318474 - DNA, 12 bp, Artificial Sequence
  Oligonucleotide primer for the detection of SNP TSC0028673
atattgtattta

SEQ ID NO: 318475 - DNA, 12 bp, Artificial Sequence
  Oligonucleotide primer for the detection of SNP TSC0028677
aacttcaaatcc

SEQ ID NO: 318476 - DNA, 12 bp, Artificial Sequence
  Oligonucleotide primer for the detection of SNP TSC0028677
aacttcgaatcc

SEQ ID NO: 318477 - DNA, 12 bp, Artificial Sequence
  Oligonucleotide primer for the detection of SNP TSC0028677
gttgttattttg

SEQ ID NO: 318478 - DNA, 12 bp, Artificial Sequence
  Oligonucleotide primer for the detection of SNP TSC0028677
gttgttatttcg

SEQ ID NO: 318479 - DNA, 12 bp, Artificial Sequence
  Oligonucleotide primer for the detection of SNP TSC0028677
actattacctca

SEQ ID NO: 318480 - DNA, 12 bp, Artificial Sequence
  Oligonucleotide primer for the detection of SNP TSC0028677
actattacctcg

SEQ ID NO: 318481 - DNA, 12 bp, Artificial Sequence
  Oligonucleotide primer for the detection of SNP TSC0028677
gctattacctca

SEQ ID NO: 318482 - DNA, 12 bp, Artificial Sequence
  Oligonucleotide primer for the detection of SNP TSC0028677
gctattacctcg

SEQ ID NO: 318483 - DNA, 12 bp, Artificial Sequence
  Oligonucleotide primer for the detection of SNP TSC0028677
agttttgaattt

SEQ ID NO: 318484 - DNA, 12 bp, Artificial Sequence
  Oligonucleotide primer for the detection of SNP TSC0028677
agtttcgaattt

SEQ ID NO: 318485 - DNA, 12 bp, Artificial Sequence
  Oligonucleotide primer for the detection of SNP TSC0028678
atacattcccca

SEQ ID NO: 318486 - DNA, 12 bp, Artificial Sequence
  Oligonucleotide primer for the detection of SNP TSC0028678
ttgaatgagttt

SEQ ID NO: 318487 - DNA, 12 bp, Artificial Sequence
  Oligonucleotide primer for the detection of SNP TSC0028678
ctaaataaattc

SEQ ID NO: 318488 - DNA, 12 bp, Artificial Sequence
  Oligonucleotide primer for the detection of SNP TSC0028678
gtgtatttttta

SEQ ID NO: 318489 - DNA, 12 bp, Artificial Sequence
  Oligonucleotide primer for the detection of SNP TSC0028679
ccttatccaaca

SEQ ID NO: 318490 - DNA, 12 bp, Artificial Sequence
  Oligonucleotide primer for the detection of SNP TSC0028679
ggggtgttattt

SEQ ID NO: 318491 - DNA, 12 bp, Artificial Sequence
  Oligonucleotide primer for the detection of SNP TSC0028679
aaaatatcatcc

SEQ ID NO: 318492 - DNA, 12 bp, Artificial Sequence
  Oligonucleotide primer for the detection of SNP TSC0028680
cccaaccttcta

SEQ ID NO: 318493 - DNA, 12 bp, Artificial Sequence
  Oligonucleotide primer for the detection of SNP TSC0028680
tgtgaaaatgat

SEQ ID NO: 318494 - DNA, 12 bp, Artificial Sequence
  Oligonucleotide primer for the detection of SNP TSC0028680
tgtgaaaatgac

SEQ ID NO: 318495 - DNA, 12 bp, Artificial Sequence
  Oligonucleotide primer for the detection of SNP TSC0028682
ctcaattcacta

SEQ ID NO: 318496 - DNA, 12 bp, Artificial Sequence
  Oligonucleotide primer for the detection of SNP TSC0028684
actaaaaacacc

SEQ ID NO: 318497 - DNA, 12 bp, Artificial Sequence
  Oligonucleotide primer for the detection of SNP TSC0028684
taagtaattatt

SEQ ID NO: 318498 - DNA, 12 bp, Artificial Sequence
  Oligonucleotide primer for the detection of SNP TSC0028684
aataatcattaa

SEQ ID NO: 318499 - DNA, 12 bp, Artificial Sequence
  Oligonucleotide primer for the detection of SNP TSC0028684
gttaaagatatt

SEQ ID NO: 318500 - DNA, 12 bp, Artificial Sequence
  Oligonucleotide primer for the detection of SNP TSC0028686
ttataaataaag

SEQ ID NO: 318501 - DNA, 12 bp, Artificial Sequence
  Oligonucleotide primer for the detection of SNP TSC0028692
cctaaaatacat

SEQ ID NO: 318502 - DNA, 12 bp, Artificial Sequence
  Oligonucleotide primer for the detection of SNP TSC0028692
cctaaaatacgt

SEQ ID NO: 318503 - DNA, 12 bp, Artificial Sequence
  Oligonucleotide primer for the detection of SNP TSC0028692
ttgaggagatgt

SEQ ID NO: 318504 - DNA, 12 bp, Artificial Sequence
  Oligonucleotide primer for the detection of SNP TSC0028692
tttggagtgtgt

SEQ ID NO: 318505 - DNA, 12 bp, Artificial Sequence
  Oligonucleotide primer for the detection of SNP TSC0028692
tttggagtgcgt

SEQ ID NO: 318506 - DNA, 12 bp, Artificial Sequence
  Oligonucleotide primer for the detection of SNP TSC0028693
acacatcctaaa

SEQ ID NO: 318507 - DNA, 12 bp, Artificial Sequence
  Oligonucleotide primer for the detection of SNP TSC0028693
acacgtcctaaa

SEQ ID NO: 318508 - DNA, 12 bp, Artificial Sequence
  Oligonucleotide primer for the detection of SNP TSC0028693
atttgaggttat

SEQ ID NO: 318509 - DNA, 12 bp, Artificial Sequence
  Oligonucleotide primer for the detection of SNP TSC0028693
attcgaggttat

SEQ ID NO: 318510 - DNA, 12 bp, Artificial Sequence
  Oligonucleotide primer for the detection of SNP TSC0028693
acccaaaatcac

SEQ ID NO: 318511 - DNA, 12 bp, Artificial Sequence
  Oligonucleotide primer for the detection of SNP TSC0028693
acccgaaatcac

SEQ ID NO: 318512 - DNA, 12 bp, Artificial Sequence
  Oligonucleotide primer for the detection of SNP TSC0028693
atatgttttggg

SEQ ID NO: 318513 - DNA, 12 bp, Artificial Sequence
  Oligonucleotide primer for the detection of SNP TSC0028693
atacgttttggg

SEQ ID NO: 318514 - DNA, 12 bp, Artificial Sequence
  Oligonucleotide primer for the detection of SNP TSC0028694
tccaaataaact

SEQ ID NO: 318515 - DNA, 12 bp, Artificial Sequence
  Oligonucleotide primer for the detection of SNP TSC0028694
tttattattaaa

SEQ ID NO: 318516 - DNA, 12 bp, Artificial Sequence
  Oligonucleotide primer for the detection of SNP TSC0028696
taacaataaaac

SEQ ID NO: 318517 - DNA, 12 bp, Artificial Sequence
  Oligonucleotide primer for the detection of SNP TSC0028696
tttttgagataa

SEQ ID NO: 318518 - DNA, 12 bp, Artificial Sequence
  Oligonucleotide primer for the detection of SNP TSC0028697
acctataatcat

SEQ ID NO: 318519 - DNA, 12 bp, Artificial Sequence
  Oligonucleotide primer for the detection of SNP TSC0028697
tcgagtagttgg

SEQ ID NO: 318520 - DNA, 12 bp, Artificial Sequence
  Oligonucleotide primer for the detection of SNP TSC0028699
cataccctcaac

SEQ ID NO: 318521 - DNA, 12 bp, Artificial Sequence
  Oligonucleotide primer for the detection of SNP TSC0028699
cataccctcgac

SEQ ID NO: 318522 - DNA, 12 bp, Artificial Sequence
  Oligonucleotide primer for the detection of SNP TSC0028699
ggtagattatgg

SEQ ID NO: 318523 - DNA, 12 bp, Artificial Sequence
  Oligonucleotide primer for the detection of SNP TSC0028700
cctctaacaccc

SEQ ID NO: 318524 - DNA, 12 bp, Artificial Sequence
  Oligonucleotide primer for the detection of SNP TSC0028700
agtagaggtgag

SEQ ID NO: 318525 - DNA, 12 bp, Artificial Sequence
  Oligonucleotide primer for the detection of SNP TSC0028702
gttttgatttga

SEQ ID NO: 318526 - DNA, 12 bp, Artificial Sequence
  Oligonucleotide primer for the detection of SNP TSC0028702
ctctaatttaaa

SEQ ID NO: 318527 - DNA, 12 bp, Artificial Sequence
  Oligonucleotide primer for the detection of SNP TSC0028702
atatagtagttg

SEQ ID NO: 318528 - DNA, 12 bp, Artificial Sequence
  Oligonucleotide primer for the detection of SNP TSC0028709
aaacaccaaaac

SEQ ID NO: 318529 - DNA, 12 bp, Artificial Sequence
  Oligonucleotide primer for the detection of SNP TSC0028709
gaacaccaaaac

SEQ ID NO: 318530 - DNA, 12 bp, Artificial Sequence
  Oligonucleotide primer for the detection of SNP TSC0028709
ggatagttatga

SEQ ID NO: 318531 - DNA, 12 bp, Artificial Sequence
  Oligonucleotide primer for the detection of SNP TSC0028709
aaacaactataa

SEQ ID NO: 318532 - DNA, 12 bp, Artificial Sequence
  Oligonukleotid-Primer
gagtattaggat

SEQ ID NO: 318533 - DNA, 12 bp, Artificial Sequence
  Oligonucleotide primer for the detection of SNP TSC0028713
aaatttccaaca

SEQ ID NO: 318534 - DNA, 12 bp, Artificial Sequence
  Oligonucleotide primer for the detection of SNP TSC0028713
aaatttccaacg

SEQ ID NO: 318535 - DNA, 12 bp, Artificial Sequence
  Oligonucleotide primer for the detection of SNP TSC0028713
ttttagagaaag

SEQ ID NO: 318536 - DNA, 12 bp, Artificial Sequence
  Oligonucleotide primer for the detection of SNP TSC0028713
taagtttttaat

SEQ ID NO: 318537 - DNA, 12 bp, Artificial Sequence
  Oligonucleotide primer for the detection of SNP TSC0028713
taagtttttaac

SEQ ID NO: 318538 - DNA, 12 bp, Artificial Sequence
  Oligonucleotide primer for the detection of SNP TSC0028714
tctaaaaaacat

SEQ ID NO: 318539 - DNA, 12 bp, Artificial Sequence
  Oligonucleotide primer for the detection of SNP TSC0028714
tctaaaaaacgt

SEQ ID NO: 318540 - DNA, 12 bp, Artificial Sequence
  Oligonucleotide primer for the detection of SNP TSC0028714
tggtagagtgga

SEQ ID NO: 318541 - DNA, 12 bp, Artificial Sequence
  Oligonucleotide primer for the detection of SNP TSC0028715
taccaaattcac

SEQ ID NO: 318542 - DNA, 12 bp, Artificial Sequence
  Oligonucleotide primer for the detection of SNP TSC0028715
gatggtaatgga

SEQ ID NO: 318543 - DNA, 12 bp, Artificial Sequence
  Oligonucleotide primer for the detection of SNP TSC0028716
tcctccaacaaa

SEQ ID NO: 318544 - DNA, 12 bp, Artificial Sequence
  Oligonucleotide primer for the detection of SNP TSC0028716
tcctccaacgaa

SEQ ID NO: 318545 - DNA, 12 bp, Artificial Sequence
  Oligonucleotide primer for the detection of SNP TSC0028716
tcctccgacaaa

SEQ ID NO: 318546 - DNA, 12 bp, Artificial Sequence
  Oligonucleotide primer for the detection of SNP TSC0028716
tcctccgacgaa

SEQ ID NO: 318547 - DNA, 12 bp, Artificial Sequence
  Oligonucleotide primer for the detection of SNP TSC0028716
tttattaaagat

SEQ ID NO: 318548 - DNA, 12 bp, Artificial Sequence
  Oligonucleotide primer for the detection of SNP TSC0028716
ttcaccaaaaac

SEQ ID NO: 318549 - DNA, 12 bp, Artificial Sequence
  Oligonucleotide primer for the detection of SNP TSC0028716
ttttttggtggg

SEQ ID NO: 318550 - DNA, 12 bp, Artificial Sequence
  Oligonucleotide primer for the detection of SNP TSC0028716
tttttcggtggg

SEQ ID NO: 318551 - DNA, 12 bp, Artificial Sequence
  Oligonucleotide primer for the detection of SNP TSC0028716
ttttttggcggg

SEQ ID NO: 318552 - DNA, 12 bp, Artificial Sequence
  Oligonucleotide primer for the detection of SNP TSC0028716
tttttcggcggg

SEQ ID NO: 318553 - DNA, 12 bp, Artificial Sequence
  Oligonucleotide primer for the detection of SNP TSC0028718
agttgtgtgata

SEQ ID NO: 318554 - DNA, 12 bp, Artificial Sequence
  Oligonucleotide primer for the detection of SNP TSC0028718
agttgtgcgata

SEQ ID NO: 318555 - DNA, 12 bp, Artificial Sequence
  Oligonucleotide primer for the detection of SNP TSC0028719
attataataaat

SEQ ID NO: 318556 - DNA, 12 bp, Artificial Sequence
  Oligonucleotide primer for the detection of SNP TSC0028719
atatttagtttg

SEQ ID NO: 318557 - DNA, 12 bp, Artificial Sequence
  Oligonucleotide primer for the detection of SNP TSC0028719
atacctaatcta

SEQ ID NO: 318558 - DNA, 12 bp, Artificial Sequence
  Oligonucleotide primer for the detection of SNP TSC0028719
attgtaataaat

SEQ ID NO: 318559 - DNA, 12 bp, Artificial Sequence
  Oligonucleotide primer for the detection of SNP TSC0028722
tctaaacacctc

SEQ ID NO: 318560 - DNA, 12 bp, Artificial Sequence
  Oligonucleotide primer for the detection of SNP TSC0028722
gtgtgagagaag

SEQ ID NO: 318561 - DNA, 12 bp, Artificial Sequence
  Oligonucleotide primer for the detection of SNP TSC0028727
ttctaaaaacta

SEQ ID NO: 318562 - DNA, 12 bp, Artificial Sequence
  Oligonucleotide primer for the detection of SNP TSC0028727
atcttctaaatt

SEQ ID NO: 318563 - DNA, 12 bp, Artificial Sequence
  Oligonucleotide primer for the detection of SNP TSC0028727
tttttaaagatt

SEQ ID NO: 318564 - DNA, 12 bp, Artificial Sequence
  Oligonucleotide primer for the detection of SNP TSC0028732
caccccaattcc

SEQ ID NO: 318565 - DNA, 12 bp, Artificial Sequence
  Oligonucleotide primer for the detection of SNP TSC0028732
ttaagatgggtg

SEQ ID NO: 318566 - DNA, 12 bp, Artificial Sequence
  Oligonucleotide primer for the detection of SNP TSC0028732
ttaagacgggtg

SEQ ID NO: 318567 - DNA, 12 bp, Artificial Sequence
  Oligonucleotide primer for the detection of SNP TSC0028732
ttaagatgggcg

SEQ ID NO: 318568 - DNA, 12 bp, Artificial Sequence
  Oligonucleotide primer for the detection of SNP TSC0028732
ttaagacgggcg

SEQ ID NO: 318569 - DNA, 12 bp, Artificial Sequence
  Oligonucleotide primer for the detection of SNP TSC0028734
attttactaacc

SEQ ID NO: 318570 - DNA, 12 bp, Artificial Sequence
  Oligonucleotide primer for the detection of SNP TSC0028734
tttttttagaag

SEQ ID NO: 318571 - DNA, 12 bp, Artificial Sequence
  Oligonucleotide primer for the detection of SNP TSC0028736
caaaatacgaaa

SEQ ID NO: 318572 - DNA, 12 bp, Artificial Sequence
  Oligonucleotide primer for the detection of SNP TSC0028736
tctcccctctcc

SEQ ID NO: 318573 - DNA, 12 bp, Artificial Sequence
  Oligonucleotide primer for the detection of SNP TSC0028736
aaatagaatgtg

SEQ ID NO: 318574 - DNA, 12 bp, Artificial Sequence
  Oligonucleotide primer for the detection of SNP TSC0028736
aaatagaatgcg

SEQ ID NO: 318575 - DNA, 12 bp, Artificial Sequence
  Oligonucleotide primer for the detection of SNP TSC0028742
attttgagtggg

SEQ ID NO: 318576 - DNA, 12 bp, Artificial Sequence
  Oligonucleotide primer for the detection of SNP TSC0028742
gagaaaatattt

SEQ ID NO: 318577 - DNA, 12 bp, Artificial Sequence
  Oligonucleotide primer for the detection of SNP TSC0028743
cccaattttttt

SEQ ID NO: 318578 - DNA, 12 bp, Artificial Sequence
  Oligonucleotide primer for the detection of SNP TSC0028743
cccgattttttt

SEQ ID NO: 318579 - DNA, 12 bp, Artificial Sequence
  Oligonucleotide primer for the detection of SNP TSC0028743
caaacaaacaaa

SEQ ID NO: 318580 - DNA, 12 bp, Artificial Sequence
  Oligonucleotide primer for the detection of SNP TSC0028743
ttcggttttttt

SEQ ID NO: 318581 - DNA, 12 bp, Artificial Sequence
  Oligonucleotide primer for the detection of SNP TSC0028748
aacacaacctaa

SEQ ID NO: 318582 - DNA, 12 bp, Artificial Sequence
  Oligonucleotide primer for the detection of SNP TSC0028748
ttgttgttgttt

SEQ ID NO: 318583 - DNA, 12 bp, Artificial Sequence
  Oligonucleotide primer for the detection of SNP TSC0028748
ttactattattt

SEQ ID NO: 318584 - DNA, 12 bp, Artificial Sequence
  Oligonucleotide primer for the detection of SNP TSC0028748
aatataatttaa

SEQ ID NO: 318585 - DNA, 12 bp, Artificial Sequence
  Oligonucleotide primer for the detection of SNP TSC0028749
aaactactatct

SEQ ID NO: 318586 - DNA, 12 bp, Artificial Sequence
  Oligonucleotide primer for the detection of SNP TSC0028749
gggttaatataa

SEQ ID NO: 318587 - DNA, 12 bp, Artificial Sequence
  Oligonucleotide primer for the detection of SNP TSC0028749
aaatcaacacaa

SEQ ID NO: 318588 - DNA, 12 bp, Artificial Sequence
  Oligonucleotide primer for the detection of SNP TSC0028749
aaattattgttt

SEQ ID NO: 318589 - DNA, 12 bp, Artificial Sequence
  Oligonucleotide primer for the detection of SNP TSC0028750
agattagtttta

SEQ ID NO: 318590 - DNA, 12 bp, Artificial Sequence
  Oligonucleotide primer for the detection of SNP TSC0028751
accttccaccta

SEQ ID NO: 318591 - DNA, 12 bp, Artificial Sequence
  Oligonucleotide primer for the detection of SNP TSC0028753
tcctatatactt

SEQ ID NO: 318592 - DNA, 12 bp, Artificial Sequence
  Oligonucleotide primer for the detection of SNP TSC0028753
gttagttttgta

SEQ ID NO: 318593 - DNA, 12 bp, Artificial Sequence
  Oligonucleotide primer for the detection of SNP TSC0028753
atcaactctaca

SEQ ID NO: 318594 - DNA, 12 bp, Artificial Sequence
  Oligonucleotide primer for the detection of SNP TSC0028754
actataaaacac

SEQ ID NO: 318595 - DNA, 12 bp, Artificial Sequence
  Oligonucleotide primer for the detection of SNP TSC0028754
gaggttgttttt

SEQ ID NO: 318596 - DNA, 12 bp, Artificial Sequence
  Oligonucleotide primer for the detection of SNP TSC0028756
acccctaccctc

SEQ ID NO: 318597 - DNA, 12 bp, Artificial Sequence
  Oligonucleotide primer for the detection of SNP TSC0028756
tttggaattttt

SEQ ID NO: 318598 - DNA, 12 bp, Artificial Sequence
  Oligonucleotide primer for the detection of SNP TSC0028756
tttggaattttc

SEQ ID NO: 318599 - DNA, 12 bp, Artificial Sequence
  Oligonucleotide primer for the detection of SNP TSC0028756
ctacctaaaatt

SEQ ID NO: 318600 - DNA, 12 bp, Artificial Sequence
  Oligonucleotide primer for the detection of SNP TSC0028758
ataacttcataa

SEQ ID NO: 318601 - DNA, 12 bp, Artificial Sequence
  Oligonucleotide primer for the detection of SNP TSC0028758
tggttaggtgat

SEQ ID NO: 318602 - DNA, 12 bp, Artificial Sequence
  Oligonucleotide primer for the detection of SNP TSC0028758
gtgattttataa

SEQ ID NO: 318603 - DNA, 12 bp, Artificial Sequence
  Oligonucleotide primer for the detection of SNP TSC0028759
cccacttaacca

SEQ ID NO: 318604 - DNA, 12 bp, Artificial Sequence
  Oligonucleotide primer for the detection of SNP TSC0028759
cccacttaaccg

SEQ ID NO: 318605 - DNA, 12 bp, Artificial Sequence
  Oligonucleotide primer for the detection of SNP TSC0028759
tttttagtattt

SEQ ID NO: 318606 - DNA, 12 bp, Artificial Sequence
  Oligonucleotide primer for the detection of SNP TSC0028759
ccccccaacacc

SEQ ID NO: 318607 - DNA, 12 bp, Artificial Sequence
  Oligonucleotide primer for the detection of SNP TSC0028759
tttatttggtcg

SEQ ID NO: 318608 - DNA, 12 bp, Artificial Sequence
  Oligonucleotide primer for the detection of SNP TSC0028760
gggttatgatgt

SEQ ID NO: 318609 - DNA, 12 bp, Artificial Sequence
  Oligonucleotide primer for the detection of SNP TSC0028760
agatgttggggg

SEQ ID NO: 318610 - DNA, 12 bp, Artificial Sequence
  Oligonucleotide primer for the detection of SNP TSC0028762
tacttaaccaat

SEQ ID NO: 318611 - DNA, 12 bp, Artificial Sequence
  Oligonucleotide primer for the detection of SNP TSC0028762
agtggaggttta

SEQ ID NO: 318612 - DNA, 12 bp, Artificial Sequence
  Oligonucleotide primer for the detection of SNP TSC0028764
atttttccaaaa

SEQ ID NO: 318613 - DNA, 12 bp, Artificial Sequence
  Oligonucleotide primer for the detection of SNP TSC0028764
tttattacctaa

SEQ ID NO: 318614 - DNA, 12 bp, Artificial Sequence
  Oligonucleotide primer for the detection of SNP TSC0028764
atttttttaaag

SEQ ID NO: 318615 - DNA, 12 bp, Artificial Sequence
  Oligonucleotide primer for the detection of SNP TSC0028768
aatcatttcttt

SEQ ID NO: 318616 - DNA, 12 bp, Artificial Sequence
  Oligonucleotide primer for the detection of SNP TSC0028768
gatcatttcttt

SEQ ID NO: 318617 - DNA, 12 bp, Artificial Sequence
  Oligonucleotide primer for the detection of SNP TSC0028770
ggggttttgttg

SEQ ID NO: 318618 - DNA, 12 bp, Artificial Sequence
  Oligonucleotide primer for the detection of SNP TSC0028771
tctttcccctcc

SEQ ID NO: 318619 - DNA, 12 bp, Artificial Sequence
  Oligonucleotide primer for the detection of SNP TSC0028771
gtagaagttaag

SEQ ID NO: 318620 - DNA, 12 bp, Artificial Sequence
  Oligonucleotide primer for the detection of SNP TSC0028771
acaaaaattaaa

SEQ ID NO: 318621 - DNA, 12 bp, Artificial Sequence
  Oligonucleotide primer for the detection of SNP TSC0028773
ctaacgaaaaat

SEQ ID NO: 318622 - DNA, 12 bp, Artificial Sequence
  Oligonucleotide primer for the detection of SNP TSC0028773
aaatttttttta

SEQ ID NO: 318623 - DNA, 12 bp, Artificial Sequence
  Oligonucleotide primer for the detection of SNP TSC0028774
tataattataat

SEQ ID NO: 318624 - DNA, 12 bp, Artificial Sequence
  Oligonucleotide primer for the detection of SNP TSC0028774
ggtgttgggggg

SEQ ID NO: 318625 - DNA, 12 bp, Artificial Sequence
  Oligonucleotide primer for the detection of SNP TSC0028774
ggtgtcgggggg

SEQ ID NO: 318626 - DNA, 12 bp, Artificial Sequence
  Oligonucleotide primer for the detection of SNP TSC0028775
aggtgttggggg

SEQ ID NO: 318627 - DNA, 12 bp, Artificial Sequence
  Oligonucleotide primer for the detection of SNP TSC0028775
aggtgtcggggg

SEQ ID NO: 318628 - DNA, 12 bp, Artificial Sequence
  Oligonucleotide primer for the detection of SNP TSC0028775
aaataccgaaaa

SEQ ID NO: 318629 - DNA, 12 bp, Artificial Sequence
  Oligonukleotid-Primer
aggttatgatgt

SEQ ID NO: 318630 - DNA, 12 bp, Artificial Sequence
  Oligonucleotide primer for the detection of SNP TSC0028776
ccccaacacctc

SEQ ID NO: 318631 - DNA, 12 bp, Artificial Sequence
  Oligonucleotide primer for the detection of SNP TSC0028776
aattttatttgg

SEQ ID NO: 318632 - DNA, 12 bp, Artificial Sequence
  Oligonucleotide primer for the detection of SNP TSC0028776
aaccccacctaa

SEQ ID NO: 318633 - DNA, 12 bp, Artificial Sequence
  Oligonukleotid-Primer
caactttataaa

SEQ ID NO: 318634 - DNA, 12 bp, Artificial Sequence
  Oligonucleotide primer for the detection of SNP TSC0028780
ttcgattttatt

SEQ ID NO: 318635 - DNA, 12 bp, Artificial Sequence
  Oligonucleotide primer for the detection of SNP TSC0028780
tttgattttatc

SEQ ID NO: 318636 - DNA, 12 bp, Artificial Sequence
  Oligonucleotide primer for the detection of SNP TSC0028780
ttcgattttatc

SEQ ID NO: 318637 - DNA, 12 bp, Artificial Sequence
  Oligonucleotide primer for the detection of SNP TSC0028780
atttcaactcca

SEQ ID NO: 318638 - DNA, 12 bp, Artificial Sequence
  Oligonucleotide primer for the detection of SNP TSC0028780
atttcgactcca

SEQ ID NO: 318639 - DNA, 12 bp, Artificial Sequence
  Oligonucleotide primer for the detection of SNP TSC0028780
gtttcaactcca

SEQ ID NO: 318640 - DNA, 12 bp, Artificial Sequence
  Oligonucleotide primer for the detection of SNP TSC0028780
gtttcgactcca

SEQ ID NO: 318641 - DNA, 12 bp, Artificial Sequence
  Oligonucleotide primer for the detection of SNP TSC0028780
ttagttttgtga

SEQ ID NO: 318642 - DNA, 12 bp, Artificial Sequence
  Oligonucleotide primer for the detection of SNP TSC0028781
cataattctctt

SEQ ID NO: 318643 - DNA, 12 bp, Artificial Sequence
  Oligonucleotide primer for the detection of SNP TSC0028781
gttgagagatag

SEQ ID NO: 318644 - DNA, 12 bp, Artificial Sequence
  Oligonucleotide primer for the detection of SNP TSC0028784
ataaaataactt

SEQ ID NO: 318645 - DNA, 12 bp, Artificial Sequence
  Oligonucleotide primer for the detection of SNP TSC0028784
gtgttagagaga

SEQ ID NO: 318646 - DNA, 12 bp, Artificial Sequence
  Oligonucleotide primer for the detection of SNP TSC0028784
gcgttagagaga

SEQ ID NO: 318647 - DNA, 12 bp, Artificial Sequence
  Oligonucleotide primer for the detection of SNP TSC0028785
ctaaaccaaaat

SEQ ID NO: 318648 - DNA, 12 bp, Artificial Sequence
  Oligonucleotide primer for the detection of SNP TSC0028786
tctcctcctact

SEQ ID NO: 318649 - DNA, 12 bp, Artificial Sequence
  Oligonucleotide primer for the detection of SNP TSC0028786
tttttttaattg

SEQ ID NO: 318650 - DNA, 12 bp, Artificial Sequence
  Oligonucleotide primer for the detection of SNP TSC0028787
accttctaccat

SEQ ID NO: 318651 - DNA, 12 bp, Artificial Sequence
  Oligonucleotide primer for the detection of SNP TSC0028787
taatgttaatga

SEQ ID NO: 318652 - DNA, 12 bp, Artificial Sequence
  Oligonucleotide primer for the detection of SNP TSC0028788
aaaaatccatat

SEQ ID NO: 318653 - DNA, 12 bp, Artificial Sequence
  Oligonucleotide primer for the detection of SNP TSC0028788
aaaaatccgtat

SEQ ID NO: 318654 - DNA, 12 bp, Artificial Sequence
  Oligonucleotide primer for the detection of SNP TSC0028788
ggttttatggaa

SEQ ID NO: 318655 - DNA, 12 bp, Artificial Sequence
  Oligonucleotide primer for the detection of SNP TSC0028790
tccctaccaccc

SEQ ID NO: 318656 - DNA, 12 bp, Artificial Sequence
  Oligonucleotide primer for the detection of SNP TSC0028790
agggtgagtggg

SEQ ID NO: 318657 - DNA, 12 bp, Artificial Sequence
  Oligonucleotide primer for the detection of SNP TSC0028791
catcaaaccaac

SEQ ID NO: 318658 - DNA, 12 bp, Artificial Sequence
  Oligonucleotide primer for the detection of SNP TSC0028791
gaggggttatgg

SEQ ID NO: 318659 - DNA, 12 bp, Artificial Sequence
  Oligonucleotide primer for the detection of SNP TSC0028792
atattatcactc

SEQ ID NO: 318660 - DNA, 12 bp, Artificial Sequence
  Oligonucleotide primer for the detection of SNP TSC0028792
taattattatgg

SEQ ID NO: 318661 - DNA, 12 bp, Artificial Sequence
  Oligonucleotide primer for the detection of SNP TSC0028792
taattattacgg

SEQ ID NO: 318662 - DNA, 12 bp, Artificial Sequence
  Oligonucleotide primer for the detection of SNP TSC0028792
taaccatcacaa

SEQ ID NO: 318663 - DNA, 12 bp, Artificial Sequence
  Oligonucleotide primer for the detection of SNP TSC0028792
taaccatcacga

SEQ ID NO: 318664 - DNA, 12 bp, Artificial Sequence
  Oligonucleotide primer for the detection of SNP TSC0028792
atattattattt

SEQ ID NO: 318665 - DNA, 12 bp, Artificial Sequence
  Oligonucleotide primer for the detection of SNP TSC0028793
aaattacccttc

SEQ ID NO: 318666 - DNA, 12 bp, Artificial Sequence
  Oligonucleotide primer for the detection of SNP TSC0028793
aaggatatagta

SEQ ID NO: 318667 - DNA, 12 bp, Artificial Sequence
  Oligonucleotide primer for the detection of SNP TSC0028794
aattcccattaa

SEQ ID NO: 318668 - DNA, 12 bp, Artificial Sequence
  Oligonucleotide primer for the detection of SNP TSC0028794
aattcccgttaa

SEQ ID NO: 318669 - DNA, 12 bp, Artificial Sequence
  Oligonucleotide primer for the detection of SNP TSC0028794
cctcatccaaac

SEQ ID NO: 318670 - DNA, 12 bp, Artificial Sequence
  Oligonucleotide primer for the detection of SNP TSC0028794
agtttttgttgg

SEQ ID NO: 318671 - DNA, 12 bp, Artificial Sequence
  Oligonucleotide primer for the detection of SNP TSC0028794
agttttcgttgg

SEQ ID NO: 318672 - DNA, 12 bp, Artificial Sequence
  Oligonucleotide primer for the detection of SNP TSC0028799
cttaatttccta

SEQ ID NO: 318673 - DNA, 12 bp, Artificial Sequence
  Oligonucleotide primer for the detection of SNP TSC0028799
caatttaaatac

SEQ ID NO: 318674 - DNA, 12 bp, Artificial Sequence
  Oligonucleotide primer for the detection of SNP TSC0028800
acaaacaactat

SEQ ID NO: 318675 - DNA, 12 bp, Artificial Sequence
  Oligonucleotide primer for the detection of SNP TSC0028801
actattctaaaa

SEQ ID NO: 318676 - DNA, 12 bp, Artificial Sequence
  Oligonucleotide primer for the detection of SNP TSC0028801
gttatgttggtt

SEQ ID NO: 318677 - DNA, 12 bp, Artificial Sequence
  Oligonucleotide primer for the detection of SNP TSC0028801
accatattaact

SEQ ID NO: 318678 - DNA, 12 bp, Artificial Sequence
  Oligonucleotide primer for the detection of SNP TSC0028801
attattttggaa

SEQ ID NO: 318679 - DNA, 12 bp, Artificial Sequence
  Oligonucleotide primer for the detection of SNP TSC0028805
ccaaaaaactct

SEQ ID NO: 318680 - DNA, 12 bp, Artificial Sequence
  Oligonucleotide primer for the detection of SNP TSC0028805
taaagggggaag

SEQ ID NO: 318681 - DNA, 12 bp, Artificial Sequence
  Oligonucleotide primer for the detection of SNP TSC0028806
tatcaatcctta

SEQ ID NO: 318682 - DNA, 12 bp, Artificial Sequence
  Oligonucleotide primer for the detection of SNP TSC0028806
tatcgatcctta

SEQ ID NO: 318683 - DNA, 12 bp, Artificial Sequence
  Oligonucleotide primer for the detection of SNP TSC0028806
ttatggataggt

SEQ ID NO: 318684 - DNA, 12 bp, Artificial Sequence
  Oligonucleotide primer for the detection of SNP TSC0028806
ctataaacaaat

SEQ ID NO: 318685 - DNA, 12 bp, Artificial Sequence
  Oligonucleotide primer for the detection of SNP TSC0028806
tatcggttttta

SEQ ID NO: 318686 - DNA, 12 bp, Artificial Sequence
  Oligonucleotide primer for the detection of SNP TSC0028807
ataaaaatcacc

SEQ ID NO: 318687 - DNA, 12 bp, Artificial Sequence
  Oligonucleotide primer for the detection of SNP TSC0028807
tgtttagtattg

SEQ ID NO: 318688 - DNA, 12 bp, Artificial Sequence
  Oligonucleotide primer for the detection of SNP TSC0028808
gtagttaaaata

SEQ ID NO: 318689 - DNA, 12 bp, Artificial Sequence
  Oligonucleotide primer for the detection of SNP TSC0028815
taattacaacac

SEQ ID NO: 318690 - DNA, 12 bp, Artificial Sequence
  Oligonucleotide primer for the detection of SNP TSC0028815
taagatgggaaa

SEQ ID NO: 318691 - DNA, 12 bp, Artificial Sequence
  Oligonucleotide primer for the detection of SNP TSC0028816
tttaaccattaa

SEQ ID NO: 318692 - DNA, 12 bp, Artificial Sequence
  Oligonucleotide primer for the detection of SNP TSC0028816
attaagaagttt

SEQ ID NO: 318693 - DNA, 12 bp, Artificial Sequence
  Oligonucleotide primer for the detection of SNP TSC0028816
actaaaaaactt

SEQ ID NO: 318694 - DNA, 12 bp, Artificial Sequence
  Oligonucleotide primer for the detection of SNP TSC0028816
tttaattattga

SEQ ID NO: 318695 - DNA, 12 bp, Artificial Sequence
  Oligonucleotide primer for the detection of SNP TSC0028817
atctctatcata

SEQ ID NO: 318696 - DNA, 12 bp, Artificial Sequence
  Oligonucleotide primer for the detection of SNP TSC0028817
aaaaacttctct

SEQ ID NO: 318697 - DNA, 12 bp, Artificial Sequence
  Oligonucleotide primer for the detection of SNP TSC0028821
cttctccctacc

SEQ ID NO: 318698 - DNA, 12 bp, Artificial Sequence
  Oligonucleotide primer for the detection of SNP TSC0028823
ttttaacgaaat

SEQ ID NO: 318699 - DNA, 12 bp, Artificial Sequence
  Oligonucleotide primer for the detection of SNP TSC0028823
cttacccccccc

SEQ ID NO: 318700 - DNA, 12 bp, Artificial Sequence
  Oligonucleotide primer for the detection of SNP TSC0028823
ttttggcggggt

SEQ ID NO: 318701 - DNA, 12 bp, Artificial Sequence
  Oligonucleotide primer for the detection of SNP TSC0028824
aatcccactaaa

SEQ ID NO: 318702 - DNA, 12 bp, Artificial Sequence
  Oligonucleotide primer for the detection of SNP TSC0028824
aatcccgctaaa

SEQ ID NO: 318703 - DNA, 12 bp, Artificial Sequence
  Oligonucleotide primer for the detection of SNP TSC0028824
gatcccactaaa

SEQ ID NO: 318704 - DNA, 12 bp, Artificial Sequence
  Oligonucleotide primer for the detection of SNP TSC0028824
gatcccgctaaa

SEQ ID NO: 318705 - DNA, 12 bp, Artificial Sequence
  Oligonucleotide primer for the detection of SNP TSC0028824
ttgggtggtttt

SEQ ID NO: 318706 - DNA, 12 bp, Artificial Sequence
  Oligonucleotide primer for the detection of SNP TSC0028824
tcgggtggtttt

SEQ ID NO: 318707 - DNA, 12 bp, Artificial Sequence
  Oligonucleotide primer for the detection of SNP TSC0028824
ccgaataactct

SEQ ID NO: 318708 - DNA, 12 bp, Artificial Sequence
  Oligonucleotide primer for the detection of SNP TSC0028824
gattttgttggg

SEQ ID NO: 318709 - DNA, 12 bp, Artificial Sequence
  Oligonucleotide primer for the detection of SNP TSC0028824
gatttcgttggg

SEQ ID NO: 318710 - DNA, 12 bp, Artificial Sequence
  Oligonucleotide primer for the detection of SNP TSC0028825
tataaccaacaa

SEQ ID NO: 318711 - DNA, 12 bp, Artificial Sequence
  Oligonucleotide primer for the detection of SNP TSC0028825
tataaccaacga

SEQ ID NO: 318712 - DNA, 12 bp, Artificial Sequence
  Oligonucleotide primer for the detection of SNP TSC0028825
gttgttagtttg

SEQ ID NO: 318713 - DNA, 12 bp, Artificial Sequence
  Oligonucleotide primer for the detection of SNP TSC0028825
gtcgttagtttg

SEQ ID NO: 318714 - DNA, 12 bp, Artificial Sequence
  Oligonucleotide primer for the detection of SNP TSC0028825
accactaaccta

SEQ ID NO: 318715 - DNA, 12 bp, Artificial Sequence
  Oligonucleotide primer for the detection of SNP TSC0028825
accgctaaccta

SEQ ID NO: 318716 - DNA, 12 bp, Artificial Sequence
  Oligonucleotide primer for the detection of SNP TSC0028825
tgtgattagtgg

SEQ ID NO: 318717 - DNA, 12 bp, Artificial Sequence
  Oligonucleotide primer for the detection of SNP TSC0028825
tgtgattagcgg

SEQ ID NO: 318718 - DNA, 12 bp, Artificial Sequence
  Oligonukleotid-Primer
tcctaactctaa

SEQ ID NO: 318719 - DNA, 12 bp, Artificial Sequence
  Oligonucleotide primer for the detection of SNP TSC0028826
tacaatttttta

SEQ ID NO: 318720 - DNA, 12 bp, Artificial Sequence
  Oligonucleotide primer for the detection of SNP TSC0028826
gttttggtttta

SEQ ID NO: 318721 - DNA, 12 bp, Artificial Sequence
  Oligonucleotide primer for the detection of SNP TSC0028827
ttaaaattacta

SEQ ID NO: 318722 - DNA, 12 bp, Artificial Sequence
  Oligonucleotide primer for the detection of SNP TSC0028827
ttatcactattc

SEQ ID NO: 318723 - DNA, 12 bp, Artificial Sequence
  Oligonucleotide primer for the detection of SNP TSC0028827
ttggggttattg

SEQ ID NO: 318724 - DNA, 12 bp, Artificial Sequence
  Oligonucleotide primer for the detection of SNP TSC0028828
tcatcctaaaac

SEQ ID NO: 318725 - DNA, 12 bp, Artificial Sequence
  Oligonucleotide primer for the detection of SNP TSC0028828
ttgaaatttttg

SEQ ID NO: 318726 - DNA, 12 bp, Artificial Sequence
  Oligonucleotide primer for the detection of SNP TSC0028828
ctaaaatcttta

SEQ ID NO: 318727 - DNA, 12 bp, Artificial Sequence
  Oligonucleotide primer for the detection of SNP TSC0028829
acaaaatcaaaa

SEQ ID NO: 318728 - DNA, 12 bp, Artificial Sequence
  Oligonucleotide primer for the detection of SNP TSC0028829
tggagggaggat

SEQ ID NO: 318729 - DNA, 12 bp, Artificial Sequence
  Oligonucleotide primer for the detection of SNP TSC0028829
gtagggttaagg

SEQ ID NO: 318730 - DNA, 12 bp, Artificial Sequence
  Oligonucleotide primer for the detection of SNP TSC0028833
atacacacacca

SEQ ID NO: 318731 - DNA, 12 bp, Artificial Sequence
  Oligonucleotide primer for the detection of SNP TSC0028833
tgggagatggtt

SEQ ID NO: 318732 - DNA, 12 bp, Artificial Sequence
  Oligonucleotide primer for the detection of SNP TSC0028833
tgggagacggtt

SEQ ID NO: 318733 - DNA, 12 bp, Artificial Sequence
  Oligonucleotide primer for the detection of SNP TSC0028833
aaaacaactaaa

SEQ ID NO: 318734 - DNA, 12 bp, Artificial Sequence
  Oligonucleotide primer for the detection of SNP TSC0028833
aaaacgactaaa

SEQ ID NO: 318735 - DNA, 12 bp, Artificial Sequence
  Oligonucleotide primer for the detection of SNP TSC0028833
atatatattatt

SEQ ID NO: 318736 - DNA, 12 bp, Artificial Sequence
  Oligonucleotide primer for the detection of SNP TSC0028834
acaccctcctac

SEQ ID NO: 318737 - DNA, 12 bp, Artificial Sequence
  Oligonucleotide primer for the detection of SNP TSC0028834
ttttagtagtgg

SEQ ID NO: 318738 - DNA, 12 bp, Artificial Sequence
  Oligonucleotide primer for the detection of SNP TSC0028840
tcccactacttc

SEQ ID NO: 318739 - DNA, 12 bp, Artificial Sequence
  Oligonucleotide primer for the detection of SNP TSC0028840
tcccgctacttc

SEQ ID NO: 318740 - DNA, 12 bp, Artificial Sequence
  Oligonucleotide primer for the detection of SNP TSC0028840
tatgaagtttaa

SEQ ID NO: 318741 - DNA, 12 bp, Artificial Sequence
  Oligonucleotide primer for the detection of SNP TSC0028841
atataaactaac

SEQ ID NO: 318742 - DNA, 12 bp, Artificial Sequence
  Oligonucleotide primer for the detection of SNP TSC0028841
agtgtatgatgg

SEQ ID NO: 318743 - DNA, 12 bp, Artificial Sequence
  Oligonucleotide primer for the detection of SNP TSC0028841
aatacataataa

SEQ ID NO: 318744 - DNA, 12 bp, Artificial Sequence
  Oligonucleotide primer for the detection of SNP TSC0028841
gtataagttgat

SEQ ID NO: 318745 - DNA, 12 bp, Artificial Sequence
  Oligonucleotide primer for the detection of SNP TSC0028843
aatactctcacc

SEQ ID NO: 318746 - DNA, 12 bp, Artificial Sequence
  Oligonucleotide primer for the detection of SNP TSC0028843
acttttccctta

SEQ ID NO: 318747 - DNA, 12 bp, Artificial Sequence
  Oligonucleotide primer for the detection of SNP TSC0028843
agtatttttatt

SEQ ID NO: 318748 - DNA, 12 bp, Artificial Sequence
  Oligonucleotide primer for the detection of SNP TSC0028844
tcattattcaac

SEQ ID NO: 318749 - DNA, 12 bp, Artificial Sequence
  Oligonucleotide primer for the detection of SNP TSC0028844
aattgtttatga

SEQ ID NO: 318750 - DNA, 12 bp, Artificial Sequence
  Oligonucleotide primer for the detection of SNP TSC0028844
aattattcataa

SEQ ID NO: 318751 - DNA, 12 bp, Artificial Sequence
  Oligonucleotide primer for the detection of SNP TSC0028845
ctaaaacttttc

SEQ ID NO: 318752 - DNA, 12 bp, Artificial Sequence
  Oligonucleotide primer for the detection of SNP TSC0028845
tgagagataaag

SEQ ID NO: 318753 - DNA, 12 bp, Artificial Sequence
  Oligonucleotide primer for the detection of SNP TSC0028850
tacaaaaacacc

SEQ ID NO: 318754 - DNA, 12 bp, Artificial Sequence
  Oligonucleotide primer for the detection of SNP TSC0028850
tacaaaaacgcc

SEQ ID NO: 318755 - DNA, 12 bp, Artificial Sequence
  Oligonucleotide primer for the detection of SNP TSC0028851
aaactctaaaat

SEQ ID NO: 318756 - DNA, 12 bp, Artificial Sequence
  Oligonucleotide primer for the detection of SNP TSC0028851
tagaatttaagg

SEQ ID NO: 318757 - DNA, 12 bp, Artificial Sequence
  Oligonucleotide primer for the detection of SNP TSC0028852
aactttctaaac

SEQ ID NO: 318758 - DNA, 12 bp, Artificial Sequence
  Oligonucleotide primer for the detection of SNP TSC0028852
aaagatatttta

SEQ ID NO: 318759 - DNA, 12 bp, Artificial Sequence
  Oligonucleotide primer for the detection of SNP TSC0028855
atcatttaaacc

SEQ ID NO: 318760 - DNA, 12 bp, Artificial Sequence
  Oligonucleotide primer for the detection of SNP TSC0028855
taatttttatta

SEQ ID NO: 318761 - DNA, 12 bp, Artificial Sequence
  Oligonucleotide primer for the detection of SNP TSC0028855
caacctccacca

SEQ ID NO: 318762 - DNA, 12 bp, Artificial Sequence
  Oligonucleotide primer for the detection of SNP TSC0028855
attatttgaatt

SEQ ID NO: 318763 - DNA, 12 bp, Artificial Sequence
  Oligonucleotide primer for the detection of SNP TSC0028856
actaacctaacc

SEQ ID NO: 318764 - DNA, 12 bp, Artificial Sequence
  Oligonucleotide primer for the detection of SNP TSC0028856
ggggttttttta

SEQ ID NO: 318765 - DNA, 12 bp, Artificial Sequence
  Oligonucleotide primer for the detection of SNP TSC0028857
tcctataatccc

SEQ ID NO: 318766 - DNA, 12 bp, Artificial Sequence
  Oligonucleotide primer for the detection of SNP TSC0028857
tagttttttaaa

SEQ ID NO: 318767 - DNA, 12 bp, Artificial Sequence
  Oligonucleotide primer for the detection of SNP TSC0028863
aattaacaatta

SEQ ID NO: 318768 - DNA, 12 bp, Artificial Sequence
  Oligonucleotide primer for the detection of SNP TSC0028863
ggtaaaattaga

SEQ ID NO: 318769 - DNA, 12 bp, Artificial Sequence
  Oligonucleotide primer for the detection of SNP TSC0028875
tttcattctcct

SEQ ID NO: 318770 - DNA, 12 bp, Artificial Sequence
  Oligonucleotide primer for the detection of SNP TSC0028875
gtttagagtaag

SEQ ID NO: 318771 - DNA, 12 bp, Artificial Sequence
  Oligonucleotide primer for the detection of SNP TSC0028875
attcaaaacaaa

SEQ ID NO: 318772 - DNA, 12 bp, Artificial Sequence
  Oligonucleotide primer for the detection of SNP TSC0028876
attccacaaaaa

SEQ ID NO: 318773 - DNA, 12 bp, Artificial Sequence
  Oligonucleotide primer for the detection of SNP TSC0028876
aagtaaaggggt

SEQ ID NO: 318774 - DNA, 12 bp, Artificial Sequence
  Oligonucleotide primer for the detection of SNP TSC0028876
gttttatagagg

SEQ ID NO: 318775 - DNA, 12 bp, Artificial Sequence
  Oligonucleotide primer for the detection of SNP TSC0028877
tgtttagattgg

SEQ ID NO: 318776 - DNA, 12 bp, Artificial Sequence
  Oligonucleotide primer for the detection of SNP TSC0028877
taggagtttggg

SEQ ID NO: 318777 - DNA, 12 bp, Artificial Sequence
  Oligonucleotide primer for the detection of SNP TSC0028878
atatttactccc

SEQ ID NO: 318778 - DNA, 12 bp, Artificial Sequence
  Oligonucleotide primer for the detection of SNP TSC0028878
tgtttgttaagt

SEQ ID NO: 318779 - DNA, 12 bp, Artificial Sequence
  Oligonucleotide primer for the detection of SNP TSC0028878
tacctaccaaat

SEQ ID NO: 318780 - DNA, 12 bp, Artificial Sequence
  Oligonucleotide primer for the detection of SNP TSC0028878
gtgtttgttttt

SEQ ID NO: 318781 - DNA, 12 bp, Artificial Sequence
  Oligonucleotide primer for the detection of SNP TSC0028882
aaaacgaaaata

SEQ ID NO: 318782 - DNA, 12 bp, Artificial Sequence
  Oligonucleotide primer for the detection of SNP TSC0028882
gaaacaaaaata

SEQ ID NO: 318783 - DNA, 12 bp, Artificial Sequence
  Oligonucleotide primer for the detection of SNP TSC0028882
gaaacgaaaata

SEQ ID NO: 318784 - DNA, 12 bp, Artificial Sequence
  Oligonucleotide primer for the detection of SNP TSC0028882
tagttttgaaaa

SEQ ID NO: 318785 - DNA, 12 bp, Artificial Sequence
  Oligonucleotide primer for the detection of SNP TSC0028882
caaccctaaaaa

SEQ ID NO: 318786 - DNA, 12 bp, Artificial Sequence
  Oligonucleotide primer for the detection of SNP TSC0028882
tgaagtgagagt

SEQ ID NO: 318787 - DNA, 12 bp, Artificial Sequence
  Oligonucleotide primer for the detection of SNP TSC0028882
cgaagtgagagt

SEQ ID NO: 318788 - DNA, 12 bp, Artificial Sequence
  Oligonucleotide primer for the detection of SNP TSC0028882
tgaagcgagagt

SEQ ID NO: 318789 - DNA, 12 bp, Artificial Sequence
  Oligonucleotide primer for the detection of SNP TSC0028882
cgaagcgagagt

SEQ ID NO: 318790 - DNA, 12 bp, Artificial Sequence
  Oligonucleotide primer for the detection of SNP TSC0028887
ttcaactcaaaa

SEQ ID NO: 318791 - DNA, 12 bp, Artificial Sequence
  Oligonucleotide primer for the detection of SNP TSC0028887
ttttttggtaat

SEQ ID NO: 318792 - DNA, 12 bp, Artificial Sequence
  Oligonucleotide primer for the detection of SNP TSC0028887
ttttctaacaac

SEQ ID NO: 318793 - DNA, 12 bp, Artificial Sequence
  Oligonucleotide primer for the detection of SNP TSC0028887
tttaatttagaa

SEQ ID NO: 318794 - DNA, 12 bp, Artificial Sequence
  Oligonucleotide primer for the detection of SNP TSC0028888
attaaacaaaca

SEQ ID NO: 318795 - DNA, 12 bp, Artificial Sequence
  Oligonucleotide primer for the detection of SNP TSC0028888
attaaacgaaca

SEQ ID NO: 318796 - DNA, 12 bp, Artificial Sequence
  Oligonucleotide primer for the detection of SNP TSC0028888
gtggaaataatt

SEQ ID NO: 318797 - DNA, 12 bp, Artificial Sequence
  Oligonucleotide primer for the detection of SNP TSC0028888
attggatgggta

SEQ ID NO: 318798 - DNA, 12 bp, Artificial Sequence
  Oligonucleotide primer for the detection of SNP TSC0028888
attggacgggta

SEQ ID NO: 318799 - DNA, 12 bp, Artificial Sequence
  Oligonucleotide primer for the detection of SNP TSC0028892
ataaaaacaaat

SEQ ID NO: 318800 - DNA, 12 bp, Artificial Sequence
  Oligonucleotide primer for the detection of SNP TSC0028892
gttatttatgag

SEQ ID NO: 318801 - DNA, 12 bp, Artificial Sequence
  Oligonucleotide primer for the detection of SNP TSC0028893
aataactaaatt

SEQ ID NO: 318802 - DNA, 12 bp, Artificial Sequence
  Oligonucleotide primer for the detection of SNP TSC0028893
tgaatttagtaa

SEQ ID NO: 318803 - DNA, 12 bp, Artificial Sequence
  Oligonucleotide primer for the detection of SNP TSC0028898
atttaagttaga

SEQ ID NO: 318804 - DNA, 12 bp, Artificial Sequence
  Oligonucleotide primer for the detection of SNP TSC0028899
ccgcaccccccc

SEQ ID NO: 318805 - DNA, 12 bp, Artificial Sequence
  Oligonucleotide primer for the detection of SNP TSC0028899
cattctctttaa

SEQ ID NO: 318806 - DNA, 12 bp, Artificial Sequence
  Oligonucleotide primer for the detection of SNP TSC0028899
tcgtattttttt

SEQ ID NO: 318807 - DNA, 12 bp, Artificial Sequence
  Oligonucleotide primer for the detection of SNP TSC0028899
ttgtattttttc

SEQ ID NO: 318808 - DNA, 12 bp, Artificial Sequence
  Oligonucleotide primer for the detection of SNP TSC0028899
tcgtattttttc

SEQ ID NO: 318809 - DNA, 12 bp, Artificial Sequence
  Oligonucleotide primer for the detection of SNP TSC0028900
taaaatacatac

SEQ ID NO: 318810 - DNA, 12 bp, Artificial Sequence
  Oligonucleotide primer for the detection of SNP TSC0028902
aatactatacca

SEQ ID NO: 318811 - DNA, 12 bp, Artificial Sequence
  Oligonucleotide primer for the detection of SNP TSC0028902
gagtaggaaagg

SEQ ID NO: 318812 - DNA, 12 bp, Artificial Sequence
  Oligonucleotide primer for the detection of SNP TSC0028902
tattatattatt

SEQ ID NO: 318813 - DNA, 12 bp, Artificial Sequence
  Oligonucleotide primer for the detection of SNP TSC0028904
aaacaataactc

SEQ ID NO: 318814 - DNA, 12 bp, Artificial Sequence
  Oligonucleotide primer for the detection of SNP TSC0028904
aaacgataactc

SEQ ID NO: 318815 - DNA, 12 bp, Artificial Sequence
  Oligonucleotide primer for the detection of SNP TSC0028904
tgggattttagg

SEQ ID NO: 318816 - DNA, 12 bp, Artificial Sequence
  Oligonucleotide primer for the detection of SNP TSC0028904
taaaatttcaaa

SEQ ID NO: 318817 - DNA, 12 bp, Artificial Sequence
  Oligonucleotide primer for the detection of SNP TSC0028904
gagtggtggttt

SEQ ID NO: 318818 - DNA, 12 bp, Artificial Sequence
  Oligonucleotide primer for the detection of SNP TSC0028904
gagcggtggttt

SEQ ID NO: 318819 - DNA, 12 bp, Artificial Sequence
  Oligonucleotide primer for the detection of SNP TSC0028909
acaaaaataacc

SEQ ID NO: 318820 - DNA, 12 bp, Artificial Sequence
  Oligonucleotide primer for the detection of SNP TSC0028909
gtttgagttttg

SEQ ID NO: 318821 - DNA, 12 bp, Artificial Sequence
  Oligonucleotide primer for the detection of SNP TSC0028909
acttaaattcta

SEQ ID NO: 318822 - DNA, 12 bp, Artificial Sequence
  Oligonucleotide primer for the detection of SNP TSC0028909
ataaggatggtt

SEQ ID NO: 318823 - DNA, 12 bp, Artificial Sequence
  Oligonukleotid-Primer
aataccccaccc

SEQ ID NO: 318824 - DNA, 12 bp, Artificial Sequence
  Oligonucleotide primer for the detection of SNP TSC0028910
tttgtggttagg

SEQ ID NO: 318825 - DNA, 12 bp, Artificial Sequence
  Oligonucleotide primer for the detection of SNP TSC0028910
cttataaccaaa

SEQ ID NO: 318826 - DNA, 12 bp, Artificial Sequence
  Oligonucleotide primer for the detection of SNP TSC0028910
aatgttttattt

SEQ ID NO: 318827 - DNA, 12 bp, Artificial Sequence
  Oligonucleotide primer for the detection of SNP TSC0028911
ggttaggggggt

SEQ ID NO: 318828 - DNA, 12 bp, Artificial Sequence
  Oligonucleotide primer for the detection of SNP TSC0028911
gtaaaaatgttt

SEQ ID NO: 318829 - DNA, 12 bp, Artificial Sequence
  Oligonucleotide primer for the detection of SNP TSC0028915
tctttaatatca

SEQ ID NO: 318830 - DNA, 12 bp, Artificial Sequence
  Oligonucleotide primer for the detection of SNP TSC0028915
gtgagtaggggt

SEQ ID NO: 318831 - DNA, 12 bp, Artificial Sequence
  Oligonucleotide primer for the detection of SNP TSC0028915
ttttttagtgtt

SEQ ID NO: 318832 - DNA, 12 bp, Artificial Sequence
  Oligonucleotide primer for the detection of SNP TSC0028916
tcaccattaatt

SEQ ID NO: 318833 - DNA, 12 bp, Artificial Sequence
  Oligonucleotide primer for the detection of SNP TSC0028916
ttagtaatttag

SEQ ID NO: 318834 - DNA, 12 bp, Artificial Sequence
  Oligonucleotide primer for the detection of SNP TSC0028917
taatccctttac

SEQ ID NO: 318835 - DNA, 12 bp, Artificial Sequence
  Oligonucleotide primer for the detection of SNP TSC0028917
ttatttttatga

SEQ ID NO: 318836 - DNA, 12 bp, Artificial Sequence
  Oligonucleotide primer for the detection of SNP TSC0028918
cttacactcaat

SEQ ID NO: 318837 - DNA, 12 bp, Artificial Sequence
  Oligonucleotide primer for the detection of SNP TSC0028918
atgttagaagat

SEQ ID NO: 318838 - DNA, 12 bp, Artificial Sequence
  Oligonucleotide primer for the detection of SNP TSC0028918
acgttagaagat

SEQ ID NO: 318839 - DNA, 12 bp, Artificial Sequence
  Oligonucleotide primer for the detection of SNP TSC0028918
acgtcaaaaaac

SEQ ID NO: 318840 - DNA, 12 bp, Artificial Sequence
  Oligonucleotide primer for the detection of SNP TSC0028918
tttatatttagt

SEQ ID NO: 318841 - DNA, 12 bp, Artificial Sequence
  Oligonucleotide primer for the detection of SNP TSC0028920
taaaataaccac

SEQ ID NO: 318842 - DNA, 12 bp, Artificial Sequence
  Oligonucleotide primer for the detection of SNP TSC0028920
ttgtggttagta

SEQ ID NO: 318843 - DNA, 12 bp, Artificial Sequence
  Oligonucleotide primer for the detection of SNP TSC0028921
taatactcaacc

SEQ ID NO: 318844 - DNA, 12 bp, Artificial Sequence
  Oligonucleotide primer for the detection of SNP TSC0028921
taatactcgacc

SEQ ID NO: 318845 - DNA, 12 bp, Artificial Sequence
  Oligonucleotide primer for the detection of SNP TSC0028921
attaagtaatat

SEQ ID NO: 318846 - DNA, 12 bp, Artificial Sequence
  Oligonucleotide primer for the detection of SNP TSC0028921
aaccaaataata

SEQ ID NO: 318847 - DNA, 12 bp, Artificial Sequence
  Oligonucleotide primer for the detection of SNP TSC0028921
tggtgtttgatt

SEQ ID NO: 318848 - DNA, 12 bp, Artificial Sequence
  Oligonucleotide primer for the detection of SNP TSC0028921
tggtgttcgatt

SEQ ID NO: 318849 - DNA, 12 bp, Artificial Sequence
  Oligonucleotide primer for the detection of SNP TSC0028921
tggtgtttgatc

SEQ ID NO: 318850 - DNA, 12 bp, Artificial Sequence
  Oligonucleotide primer for the detection of SNP TSC0028921
tggtgttcgatc

SEQ ID NO: 318851 - DNA, 12 bp, Artificial Sequence
  Oligonucleotide primer for the detection of SNP TSC0028922
ttctatttatac

SEQ ID NO: 318852 - DNA, 12 bp, Artificial Sequence
  Oligonucleotide primer for the detection of SNP TSC0028922
ttgttaaagtta

SEQ ID NO: 318853 - DNA, 12 bp, Artificial Sequence
  Oligonucleotide primer for the detection of SNP TSC0028922
ttatcaaaatca

SEQ ID NO: 318854 - DNA, 12 bp, Artificial Sequence
  Oligonucleotide primer for the detection of SNP TSC0028922
ttttatttatat

SEQ ID NO: 318855 - DNA, 12 bp, Artificial Sequence
  Oligonucleotide primer for the detection of SNP TSC0028923
tttctcttctaa

SEQ ID NO: 318856 - DNA, 12 bp, Artificial Sequence
  Oligonucleotide primer for the detection of SNP TSC0028923
tattatattggt

SEQ ID NO: 318857 - DNA, 12 bp, Artificial Sequence
  Oligonucleotide primer for the detection of SNP TSC0028923
tactatattaat

SEQ ID NO: 318858 - DNA, 12 bp, Artificial Sequence
  Oligonucleotide primer for the detection of SNP TSC0028924
tctaaccctcat

SEQ ID NO: 318859 - DNA, 12 bp, Artificial Sequence
  Oligonucleotide primer for the detection of SNP TSC0028924
tctaaccctcgt

SEQ ID NO: 318860 - DNA, 12 bp, Artificial Sequence
  Oligonucleotide primer for the detection of SNP TSC0028924
ttgggtttttgt

SEQ ID NO: 318861 - DNA, 12 bp, Artificial Sequence
  Oligonucleotide primer for the detection of SNP TSC0028924
ctaaacccttac

SEQ ID NO: 318862 - DNA, 12 bp, Artificial Sequence
  Oligonucleotide primer for the detection of SNP TSC0028924
tttagtttttgt

SEQ ID NO: 318863 - DNA, 12 bp, Artificial Sequence
  Oligonucleotide primer for the detection of SNP TSC0028924
tttagttttcgt

SEQ ID NO: 318864 - DNA, 12 bp, Artificial Sequence
  Oligonucleotide primer for the detection of SNP TSC0028925
tataattaaacc

SEQ ID NO: 318865 - DNA, 12 bp, Artificial Sequence
  Oligonucleotide primer for the detection of SNP TSC0028927
aattaaatcaaa

SEQ ID NO: 318866 - DNA, 12 bp, Artificial Sequence
  Oligonucleotide primer for the detection of SNP TSC0028927
tggattttgtgt

SEQ ID NO: 318867 - DNA, 12 bp, Artificial Sequence
  Oligonucleotide primer for the detection of SNP TSC0028927
tggattttgcgt

SEQ ID NO: 318868 - DNA, 12 bp, Artificial Sequence
  Oligonucleotide primer for the detection of SNP TSC0028927
taaattctacat

SEQ ID NO: 318869 - DNA, 12 bp, Artificial Sequence
  Oligonucleotide primer for the detection of SNP TSC0028927
taaattctacgt

SEQ ID NO: 318870 - DNA, 12 bp, Artificial Sequence
  Oligonucleotide primer for the detection of SNP TSC0028927
aattgggttaag

SEQ ID NO: 318871 - DNA, 12 bp, Artificial Sequence
  Oligonucleotide primer for the detection of SNP TSC0028928
aaccccttcctc

SEQ ID NO: 318872 - DNA, 12 bp, Artificial Sequence
  Oligonucleotide primer for the detection of SNP TSC0028928
aatttaggggat

SEQ ID NO: 318873 - DNA, 12 bp, Artificial Sequence
  Oligonucleotide primer for the detection of SNP TSC0028928
aatttaggggac

SEQ ID NO: 318874 - DNA, 12 bp, Artificial Sequence
  Oligonucleotide primer for the detection of SNP TSC0028928
aattcaaaaaac

SEQ ID NO: 318875 - DNA, 12 bp, Artificial Sequence
  Oligonucleotide primer for the detection of SNP TSC0028928
aatttttttttc

SEQ ID NO: 318876 - DNA, 12 bp, Artificial Sequence
  Oligonucleotide primer for the detection of SNP TSC0028930
cacttctccctc

SEQ ID NO: 318877 - DNA, 12 bp, Artificial Sequence
  Oligonucleotide primer for the detection of SNP TSC0028930
cgcttctccctc

SEQ ID NO: 318878 - DNA, 12 bp, Artificial Sequence
  Oligonucleotide primer for the detection of SNP TSC0028930
ttgtttgtgatg

SEQ ID NO: 318879 - DNA, 12 bp, Artificial Sequence
  Oligonucleotide primer for the detection of SNP TSC0028931
cctaaccccact

SEQ ID NO: 318880 - DNA, 12 bp, Artificial Sequence
  Oligonucleotide primer for the detection of SNP TSC0028931
cctaaccccgct

SEQ ID NO: 318881 - DNA, 12 bp, Artificial Sequence
  Oligonucleotide primer for the detection of SNP TSC0028931
gatgagagggag

SEQ ID NO: 318882 - DNA, 12 bp, Artificial Sequence
  Oligonucleotide primer for the detection of SNP TSC0028933
actaaaaatcct

SEQ ID NO: 318883 - DNA, 12 bp, Artificial Sequence
  Oligonucleotide primer for the detection of SNP TSC0028933
taagatttgagt

SEQ ID NO: 318884 - DNA, 12 bp, Artificial Sequence
  Oligonucleotide primer for the detection of SNP TSC0028933
caaaacctaaat

SEQ ID NO: 318885 - DNA, 12 bp, Artificial Sequence
  Oligonucleotide primer for the detection of SNP TSC0028933
gttagggatttt

SEQ ID NO: 318886 - DNA, 12 bp, Artificial Sequence
  Oligonucleotide primer for the detection of SNP TSC0028934
cccactaaattc

SEQ ID NO: 318887 - DNA, 12 bp, Artificial Sequence
  Oligonucleotide primer for the detection of SNP TSC0028934
ttaaaggtgaga

SEQ ID NO: 318888 - DNA, 12 bp, Artificial Sequence
  Oligonucleotide primer for the detection of SNP TSC0028934
ttaaaggcgaga

SEQ ID NO: 318889 - DNA, 12 bp, Artificial Sequence
  Oligonucleotide primer for the detection of SNP TSC0028934
tttattaggttt

SEQ ID NO: 318890 - DNA, 12 bp, Artificial Sequence
  Oligonucleotide primer for the detection of SNP TSC0028935
tcctatctactt

SEQ ID NO: 318891 - DNA, 12 bp, Artificial Sequence
  Oligonucleotide primer for the detection of SNP TSC0028935
gagtgatgaggg

SEQ ID NO: 318892 - DNA, 12 bp, Artificial Sequence
  Oligonucleotide primer for the detection of SNP TSC0028936
gaaagttaaata

SEQ ID NO: 318893 - DNA, 12 bp, Artificial Sequence
  Oligonucleotide primer for the detection of SNP TSC0028936
aaaaattaaaca

SEQ ID NO: 318894 - DNA, 12 bp, Artificial Sequence
  Oligonucleotide primer for the detection of SNP TSC0028936
aaggaaaagaat

SEQ ID NO: 318895 - DNA, 12 bp, Artificial Sequence
  Oligonucleotide primer for the detection of SNP TSC0028937
aacaaacctaat

SEQ ID NO: 318896 - DNA, 12 bp, Artificial Sequence
  Oligonucleotide primer for the detection of SNP TSC0028943
ttgatagaattt

SEQ ID NO: 318897 - DNA, 12 bp, Artificial Sequence
  Oligonucleotide primer for the detection of SNP TSC0028943
tttaggatatat

SEQ ID NO: 318898 - DNA, 12 bp, Artificial Sequence
  Oligonucleotide primer for the detection of SNP TSC0028944
catcctaacatc

SEQ ID NO: 318899 - DNA, 12 bp, Artificial Sequence
  Oligonucleotide primer for the detection of SNP TSC0028944
cgtcctaacatc

SEQ ID NO: 318900 - DNA, 12 bp, Artificial Sequence
  Oligonucleotide primer for the detection of SNP TSC0028944
tgagtgtgttga

SEQ ID NO: 318901 - DNA, 12 bp, Artificial Sequence
  Oligonucleotide primer for the detection of SNP TSC0028946
aacaacacttac

SEQ ID NO: 318902 - DNA, 12 bp, Artificial Sequence
  Oligonucleotide primer for the detection of SNP TSC0028946
gggtaatattag

SEQ ID NO: 318903 - DNA, 12 bp, Artificial Sequence
  Oligonucleotide primer for the detection of SNP TSC0028946
aataacactaaa

SEQ ID NO: 318904 - DNA, 12 bp, Artificial Sequence
  Oligonukleotid-Primer
aatagtatttat

SEQ ID NO: 318905 - DNA, 12 bp, Artificial Sequence
  Oligonucleotide primer for the detection of SNP TSC0028947
atacacaaacat

SEQ ID NO: 318906 - DNA, 12 bp, Artificial Sequence
  Oligonucleotide primer for the detection of SNP TSC0028947
atatttttttaa

SEQ ID NO: 318907 - DNA, 12 bp, Artificial Sequence
  Oligonucleotide primer for the detection of SNP TSC0028947
atactctttcaa

SEQ ID NO: 318908 - DNA, 12 bp, Artificial Sequence
  Oligonucleotide primer for the detection of SNP TSC0028947
atatataagtat

SEQ ID NO: 318909 - DNA, 12 bp, Artificial Sequence
  Oligonucleotide primer for the detection of SNP TSC0028948
aattcctcccta

SEQ ID NO: 318910 - DNA, 12 bp, Artificial Sequence
  Oligonucleotide primer for the detection of SNP TSC0028948
tttagtgagttt

SEQ ID NO: 318911 - DNA, 12 bp, Artificial Sequence
  Oligonucleotide primer for the detection of SNP TSC0028948
tccaataaaccc

SEQ ID NO: 318912 - DNA, 12 bp, Artificial Sequence
  Oligonucleotide primer for the detection of SNP TSC0028949
taatgttaaatt

SEQ ID NO: 318913 - DNA, 12 bp, Artificial Sequence
  Oligonucleotide primer for the detection of SNP TSC0028949
tgaaatgtaaag

SEQ ID NO: 318914 - DNA, 12 bp, Artificial Sequence
  Oligonucleotide primer for the detection of SNP TSC0028951
aataaataccat

SEQ ID NO: 318915 - DNA, 12 bp, Artificial Sequence
  Oligonucleotide primer for the detection of SNP TSC0028951
ttttatataaaa

SEQ ID NO: 318916 - DNA, 12 bp, Artificial Sequence
  Oligonucleotide primer for the detection of SNP TSC0028953
ccacctataaac

SEQ ID NO: 318917 - DNA, 12 bp, Artificial Sequence
  Oligonucleotide primer for the detection of SNP TSC0028953
tttatatatgga

SEQ ID NO: 318918 - DNA, 12 bp, Artificial Sequence
  Oligonucleotide primer for the detection of SNP TSC0028953
ttcatacataaa

SEQ ID NO: 318919 - DNA, 12 bp, Artificial Sequence
  Oligonucleotide primer for the detection of SNP TSC0028953
ttatttgtgaat

SEQ ID NO: 318920 - DNA, 12 bp, Artificial Sequence
  Oligonucleotide primer for the detection of SNP TSC0028956
attacttctttt

SEQ ID NO: 318921 - DNA, 12 bp, Artificial Sequence
  Oligonucleotide primer for the detection of SNP TSC0028956
ttatatttatta

SEQ ID NO: 318922 - DNA, 12 bp, Artificial Sequence
  Oligonucleotide primer for the detection of SNP TSC0028959
tccctatctcac

SEQ ID NO: 318923 - DNA, 12 bp, Artificial Sequence
  Oligonucleotide primer for the detection of SNP TSC0028959
aagggtggttaa

SEQ ID NO: 318924 - DNA, 12 bp, Artificial Sequence
  Oligonucleotide primer for the detection of SNP TSC0028961
tttctctcttaa

SEQ ID NO: 318925 - DNA, 12 bp, Artificial Sequence
  Oligonucleotide primer for the detection of SNP TSC0028961
accataaatttc

SEQ ID NO: 318926 - DNA, 12 bp, Artificial Sequence
  Oligonucleotide primer for the detection of SNP TSC0028963
cttaacattccc

SEQ ID NO: 318927 - DNA, 12 bp, Artificial Sequence
  Oligonucleotide primer for the detection of SNP TSC0028963
ataggttatata

SEQ ID NO: 318928 - DNA, 12 bp, Artificial Sequence
  Oligonucleotide primer for the detection of SNP TSC0028963
acaaaccatata

SEQ ID NO: 318929 - DNA, 12 bp, Artificial Sequence
  Oligonucleotide primer for the detection of SNP TSC0028964
ctatcaaataac

SEQ ID NO: 318930 - DNA, 12 bp, Artificial Sequence
  Oligonucleotide primer for the detection of SNP TSC0028964
ggtaattttaga

SEQ ID NO: 318931 - DNA, 12 bp, Artificial Sequence
  Oligonucleotide primer for the detection of SNP TSC0028965
ctcatatataaa

SEQ ID NO: 318932 - DNA, 12 bp, Artificial Sequence
  Oligonucleotide primer for the detection of SNP TSC0028965
aataacacaata

SEQ ID NO: 318933 - DNA, 12 bp, Artificial Sequence
  Oligonucleotide primer for the detection of SNP TSC0028965
atatataaattt

SEQ ID NO: 318934 - DNA, 12 bp, Artificial Sequence
  Oligonucleotide primer for the detection of SNP TSC0028966
ctcttaactaaa

SEQ ID NO: 318935 - DNA, 12 bp, Artificial Sequence
  Oligonucleotide primer for the detection of SNP TSC0028966
tgtagtaatata

SEQ ID NO: 318936 - DNA, 12 bp, Artificial Sequence
  Oligonucleotide primer for the detection of SNP TSC0028966
cgtagtaatata

SEQ ID NO: 318937 - DNA, 12 bp, Artificial Sequence
  Oligonucleotide primer for the detection of SNP TSC0028967
ataaacatatac

SEQ ID NO: 318938 - DNA, 12 bp, Artificial Sequence
  Oligonucleotide primer for the detection of SNP TSC0028967
taaaatattttt

SEQ ID NO: 318939 - DNA, 12 bp, Artificial Sequence
  Oligonucleotide primer for the detection of SNP TSC0028967
aatacaaaatac

SEQ ID NO: 318940 - DNA, 12 bp, Artificial Sequence
  Oligonucleotide primer for the detection of SNP TSC0028967
tatgtatttttt

SEQ ID NO: 318941 - DNA, 12 bp, Artificial Sequence
  Oligonucleotide primer for the detection of SNP TSC0028968
tcatattccatt

SEQ ID NO: 318942 - DNA, 12 bp, Artificial Sequence
  Oligonucleotide primer for the detection of SNP TSC0028968
tttgagttgatg

SEQ ID NO: 318943 - DNA, 12 bp, Artificial Sequence
  Oligonucleotide primer for the detection of SNP TSC0028971
caaaaaataaac

SEQ ID NO: 318944 - DNA, 12 bp, Artificial Sequence
  Oligonucleotide primer for the detection of SNP TSC0028971
gatgaaattata

SEQ ID NO: 318945 - DNA, 12 bp, Artificial Sequence
  Oligonucleotide primer for the detection of SNP TSC0028972
accttctacaat

SEQ ID NO: 318946 - DNA, 12 bp, Artificial Sequence
  Oligonucleotide primer for the detection of SNP TSC0028972
gtatgaggtagg

SEQ ID NO: 318947 - DNA, 12 bp, Artificial Sequence
  Oligonucleotide primer for the detection of SNP TSC0028972
acataaaacaaa

SEQ ID NO: 318948 - DNA, 12 bp, Artificial Sequence
  Oligonucleotide primer for the detection of SNP TSC0028974
aaccctactcct

SEQ ID NO: 318949 - DNA, 12 bp, Artificial Sequence
  Oligonucleotide primer for the detection of SNP TSC0028974
agggagtatttg

SEQ ID NO: 318950 - DNA, 12 bp, Artificial Sequence
  Oligonucleotide primer for the detection of SNP TSC0028974
aaaaaacatcta

SEQ ID NO: 318951 - DNA, 12 bp, Artificial Sequence
  Oligonucleotide primer for the detection of SNP TSC0028975
gtggtggtgtgt

SEQ ID NO: 318952 - DNA, 12 bp, Artificial Sequence
  Oligonucleotide primer for the detection of SNP TSC0028975
tgggattagagg

SEQ ID NO: 318953 - DNA, 12 bp, Artificial Sequence
  Oligonucleotide primer for the detection of SNP TSC0028976
cctaaaataaat

SEQ ID NO: 318954 - DNA, 12 bp, Artificial Sequence
  Oligonucleotide primer for the detection of SNP TSC0028976
attattaggtaa

SEQ ID NO: 318955 - DNA, 12 bp, Artificial Sequence
  Oligonucleotide primer for the detection of SNP TSC0028979
aaccaacaaaac

SEQ ID NO: 318956 - DNA, 12 bp, Artificial Sequence
  Oligonucleotide primer for the detection of SNP TSC0028979
aaccaacgaaac

SEQ ID NO: 318957 - DNA, 12 bp, Artificial Sequence
  Oligonucleotide primer for the detection of SNP TSC0028980
aaatctaaacaa

SEQ ID NO: 318958 - DNA, 12 bp, Artificial Sequence
  Oligonucleotide primer for the detection of SNP TSC0028980
caaaacttccct

SEQ ID NO: 318959 - DNA, 12 bp, Artificial Sequence
  Oligonucleotide primer for the detection of SNP TSC0028980
aagtttgggtaa

SEQ ID NO: 318960 - DNA, 12 bp, Artificial Sequence
  Oligonucleotide primer for the detection of SNP TSC0028981
caaatctactaa

SEQ ID NO: 318961 - DNA, 12 bp, Artificial Sequence
  Oligonucleotide primer for the detection of SNP TSC0028982
taatttaaaaaa

SEQ ID NO: 318962 - DNA, 12 bp, Artificial Sequence
  Oligonucleotide primer for the detection of SNP TSC0028982
atcttaatcttt

SEQ ID NO: 318963 - DNA, 12 bp, Artificial Sequence
  Oligonucleotide primer for the detection of SNP TSC0028988
aatccacttttt

SEQ ID NO: 318964 - DNA, 12 bp, Artificial Sequence
  Oligonucleotide primer for the detection of SNP TSC0028988
ttttggatttga

SEQ ID NO: 318965 - DNA, 12 bp, Artificial Sequence
  Oligonucleotide primer for the detection of SNP TSC0028988
ctttaaacttaa

SEQ ID NO: 318966 - DNA, 12 bp, Artificial Sequence
  Oligonucleotide primer for the detection of SNP TSC0028995
tatacttctcac

SEQ ID NO: 318967 - DNA, 12 bp, Artificial Sequence
  Oligonucleotide primer for the detection of SNP TSC0028995
aaagtgttttta

SEQ ID NO: 318968 - DNA, 12 bp, Artificial Sequence
  Oligonucleotide primer for the detection of SNP TSC0028996
atattaaaacac

SEQ ID NO: 318969 - DNA, 12 bp, Artificial Sequence
  Oligonucleotide primer for the detection of SNP TSC0028996
atatgtatatat

SEQ ID NO: 318970 - DNA, 12 bp, Artificial Sequence
  Oligonucleotide primer for the detection of SNP TSC0028996
atgttaaaatat

SEQ ID NO: 318971 - DNA, 12 bp, Artificial Sequence
  Oligonucleotide primer for the detection of SNP TSC0028997
caaattttatat

SEQ ID NO: 318972 - DNA, 12 bp, Artificial Sequence
  Oligonucleotide primer for the detection of SNP TSC0028997
cgaattttatat

SEQ ID NO: 318973 - DNA, 12 bp, Artificial Sequence
  Oligonucleotide primer for the detection of SNP TSC0028997
atttttattaaa

SEQ ID NO: 318974 - DNA, 12 bp, Artificial Sequence
  Oligonucleotide primer for the detection of SNP TSC0028997
atctctactaaa

SEQ ID NO: 318975 - DNA, 12 bp, Artificial Sequence
  Oligonucleotide primer for the detection of SNP TSC0028997
tgaattttgtat

SEQ ID NO: 318976 - DNA, 12 bp, Artificial Sequence
  Oligonucleotide primer for the detection of SNP TSC0028997
cgaattttgtat

SEQ ID NO: 318977 - DNA, 12 bp, Artificial Sequence
  Oligonucleotide primer for the detection of SNP TSC0028998
acaatctcaact

SEQ ID NO: 318978 - DNA, 12 bp, Artificial Sequence
  Oligonucleotide primer for the detection of SNP TSC0028998
acgatctcaact

SEQ ID NO: 318979 - DNA, 12 bp, Artificial Sequence
  Oligonucleotide primer for the detection of SNP TSC0028998
tagaggttgtag

SEQ ID NO: 318980 - DNA, 12 bp, Artificial Sequence
  Oligonucleotide primer for the detection of SNP TSC0029002
tatcctaaaatt

SEQ ID NO: 318981 - DNA, 12 bp, Artificial Sequence
  Oligonucleotide primer for the detection of SNP TSC0029002
gtttgtgtcgta

SEQ ID NO: 318982 - DNA, 12 bp, Artificial Sequence
  Oligonucleotide primer for the detection of SNP TSC0029002
atctataccaca

SEQ ID NO: 318983 - DNA, 12 bp, Artificial Sequence
  Oligonucleotide primer for the detection of SNP TSC0029002
atctataccgca

SEQ ID NO: 318984 - DNA, 12 bp, Artificial Sequence
  Oligonucleotide primer for the detection of SNP TSC0029002
tgttttggggtt

SEQ ID NO: 318985 - DNA, 12 bp, Artificial Sequence
  Oligonucleotide primer for the detection of SNP TSC0029004
tctaacaacctc

SEQ ID NO: 318986 - DNA, 12 bp, Artificial Sequence
  Oligonucleotide primer for the detection of SNP TSC0029004
ttgttgttggag

SEQ ID NO: 318987 - DNA, 12 bp, Artificial Sequence
  Oligonucleotide primer for the detection of SNP TSC0029004
ttactactaaaa

SEQ ID NO: 318988 - DNA, 12 bp, Artificial Sequence
  Oligonucleotide primer for the detection of SNP TSC0029004
tttgatagtttt

SEQ ID NO: 318989 - DNA, 12 bp, Artificial Sequence
  Oligonucleotide primer for the detection of SNP TSC0029005
tattttgttaaa

SEQ ID NO: 318990 - DNA, 12 bp, Artificial Sequence
  Oligonucleotide primer for the detection of SNP TSC0029005
tatttcgttaaa

SEQ ID NO: 318991 - DNA, 12 bp, Artificial Sequence
  Oligonucleotide primer for the detection of SNP TSC0029014
ctaattcccaaa

SEQ ID NO: 318992 - DNA, 12 bp, Artificial Sequence
  Oligonucleotide primer for the detection of SNP TSC0029014
ttttagggttgg

SEQ ID NO: 318993 - DNA, 12 bp, Artificial Sequence
  Oligonucleotide primer for the detection of SNP TSC0029015
tgattggttata

SEQ ID NO: 318994 - DNA, 12 bp, Artificial Sequence
  Oligonucleotide primer for the detection of SNP TSC0029016
aaacatttattt

SEQ ID NO: 318995 - DNA, 12 bp, Artificial Sequence
  Oligonucleotide primer for the detection of SNP TSC0029016
aagaataagtaa

SEQ ID NO: 318996 - DNA, 12 bp, Artificial Sequence
  Oligonucleotide primer for the detection of SNP TSC0029016
aaatatttattt

SEQ ID NO: 318997 - DNA, 12 bp, Artificial Sequence
  Oligonucleotide primer for the detection of SNP TSC0029017
ataacttatttt

SEQ ID NO: 318998 - DNA, 12 bp, Artificial Sequence
  Oligonucleotide primer for the detection of SNP TSC0029019
ctttctttctta

SEQ ID NO: 318999 - DNA, 12 bp, Artificial Sequence
  Oligonucleotide primer for the detection of SNP TSC0029020
acaaacaaccaa

SEQ ID NO: 319000 - DNA, 12 bp, Artificial Sequence
  Oligonucleotide primer for the detection of SNP TSC0029020
cttaatttttta

SEQ ID NO: 319001 - DNA, 12 bp, Artificial Sequence
  Oligonucleotide primer for the detection of SNP TSC0029020
ataaataattaa

SEQ ID NO: 319002 - DNA, 12 bp, Artificial Sequence
  Oligonucleotide primer for the detection of SNP TSC0029021
ttaattctaaat

SEQ ID NO: 319003 - DNA, 12 bp, Artificial Sequence
  Oligonucleotide primer for the detection of SNP TSC0029022
attaaatttagt

SEQ ID NO: 319004 - DNA, 12 bp, Artificial Sequence
  Oligonucleotide primer for the detection of SNP TSC0029022
aatcaaactcaa

SEQ ID NO: 319005 - DNA, 12 bp, Artificial Sequence
  Oligonucleotide primer for the detection of SNP TSC0029022
gaaggttagaga

SEQ ID NO: 319006 - DNA, 12 bp, Artificial Sequence
  Oligonucleotide primer for the detection of SNP TSC0029023
tcctctatccct

SEQ ID NO: 319007 - DNA, 12 bp, Artificial Sequence
  Oligonucleotide primer for the detection of SNP TSC0029023
ttttagagtaag

SEQ ID NO: 319008 - DNA, 12 bp, Artificial Sequence
  Oligonucleotide primer for the detection of SNP TSC0029023
tttcaaaacaaa

SEQ ID NO: 319009 - DNA, 12 bp, Artificial Sequence
  Oligonucleotide primer for the detection of SNP TSC0029029
ttatttaatttc

SEQ ID NO: 319010 - DNA, 12 bp, Artificial Sequence
  Oligonucleotide primer for the detection of SNP TSC0029029
ctatctaacttc

SEQ ID NO: 319011 - DNA, 12 bp, Artificial Sequence
  Oligonucleotide primer for the detection of SNP TSC0029029
tatgaatttttt

SEQ ID NO: 319012 - DNA, 12 bp, Artificial Sequence
  Oligonucleotide primer for the detection of SNP TSC0029030
tataccctaatc

SEQ ID NO: 319013 - DNA, 12 bp, Artificial Sequence
  Oligonucleotide primer for the detection of SNP TSC0029030
taatgtataggg

SEQ ID NO: 319014 - DNA, 12 bp, Artificial Sequence
  Oligonucleotide primer for the detection of SNP TSC0029031
aaaacaaaacta

SEQ ID NO: 319015 - DNA, 12 bp, Artificial Sequence
  Oligonucleotide primer for the detection of SNP TSC0029031
taaattgggaat

SEQ ID NO: 319016 - DNA, 12 bp, Artificial Sequence
  Oligonucleotide primer for the detection of SNP TSC0029031
taaatcgggaat

SEQ ID NO: 319017 - DNA, 12 bp, Artificial Sequence
  Oligonucleotide primer for the detection of SNP TSC0029031
caaaccgaaaac

SEQ ID NO: 319018 - DNA, 12 bp, Artificial Sequence
  Oligonucleotide primer for the detection of SNP TSC0029031
aaagtaaagtta

SEQ ID NO: 319019 - DNA, 12 bp, Artificial Sequence
  Oligonucleotide primer for the detection of SNP TSC0029032
aaatacatttta

SEQ ID NO: 319020 - DNA, 12 bp, Artificial Sequence
  Oligonucleotide primer for the detection of SNP TSC0029032
aactttactttt

SEQ ID NO: 319021 - DNA, 12 bp, Artificial Sequence
  Oligonucleotide primer for the detection of SNP TSC0029032
aaatatatttta

SEQ ID NO: 319022 - DNA, 12 bp, Artificial Sequence
  Oligonucleotide primer for the detection of SNP TSC0029033
aaatttaaaaat

SEQ ID NO: 319023 - DNA, 12 bp, Artificial Sequence
  Oligonucleotide primer for the detection of SNP TSC0029033
gtgtaataatta

SEQ ID NO: 319024 - DNA, 12 bp, Artificial Sequence
  Oligonucleotide primer for the detection of SNP TSC0029034
aaaacaataatt

SEQ ID NO: 319025 - DNA, 12 bp, Artificial Sequence
  Oligonucleotide primer for the detection of SNP TSC0029034
atttttaatgga

SEQ ID NO: 319026 - DNA, 12 bp, Artificial Sequence
  Oligonucleotide primer for the detection of SNP TSC0029035
gttatggtaggg

SEQ ID NO: 319027 - DNA, 12 bp, Artificial Sequence
  Oligonucleotide primer for the detection of SNP TSC0029035
aaggttatagag

SEQ ID NO: 319028 - DNA, 12 bp, Artificial Sequence
  Oligonucleotide primer for the detection of SNP TSC0029036
tttccttaacca

SEQ ID NO: 319029 - DNA, 12 bp, Artificial Sequence
  Oligonucleotide primer for the detection of SNP TSC0029036
attgtttattga

SEQ ID NO: 319030 - DNA, 12 bp, Artificial Sequence
  Oligonucleotide primer for the detection of SNP TSC0029037
aaaccctacctc

SEQ ID NO: 319031 - DNA, 12 bp, Artificial Sequence
  Oligonucleotide primer for the detection of SNP TSC0029037
gttaatttagta

SEQ ID NO: 319032 - DNA, 12 bp, Artificial Sequence
  Oligonucleotide primer for the detection of SNP TSC0029039
cctccataacca

SEQ ID NO: 319033 - DNA, 12 bp, Artificial Sequence
  Oligonucleotide primer for the detection of SNP TSC0029039
tggaagaagagt

SEQ ID NO: 319034 - DNA, 12 bp, Artificial Sequence
  Oligonucleotide primer for the detection of SNP TSC0029039
tttttatagtta

SEQ ID NO: 319035 - DNA, 12 bp, Artificial Sequence
  Oligonucleotide primer for the detection of SNP TSC0029040
tacctctttctc

SEQ ID NO: 319036 - DNA, 12 bp, Artificial Sequence
  Oligonucleotide primer for the detection of SNP TSC0029040
gtattgagtatg

SEQ ID NO: 319037 - DNA, 12 bp, Artificial Sequence
  Oligonucleotide primer for the detection of SNP TSC0029040
gtatcgagtatg

SEQ ID NO: 319038 - DNA, 12 bp, Artificial Sequence
  Oligonucleotide primer for the detection of SNP TSC0029040
gtattgagtacg

SEQ ID NO: 319039 - DNA, 12 bp, Artificial Sequence
  Oligonucleotide primer for the detection of SNP TSC0029040
gtatcgagtacg

SEQ ID NO: 319040 - DNA, 12 bp, Artificial Sequence
  Oligonucleotide primer for the detection of SNP TSC0029046
taattttcttaa

SEQ ID NO: 319041 - DNA, 12 bp, Artificial Sequence
  Oligonucleotide primer for the detection of SNP TSC0029046
agattcgtttag

SEQ ID NO: 319042 - DNA, 12 bp, Artificial Sequence
  Oligonucleotide primer for the detection of SNP TSC0029046
aattcatccaaa

SEQ ID NO: 319043 - DNA, 12 bp, Artificial Sequence
  Oligonucleotide primer for the detection of SNP TSC0029046
aattcgtccaaa

SEQ ID NO: 319044 - DNA, 12 bp, Artificial Sequence
  Oligonucleotide primer for the detection of SNP TSC0029047
aatatatataag

SEQ ID NO: 319045 - DNA, 12 bp, Artificial Sequence
  Oligonucleotide primer for the detection of SNP TSC0029048
aataacaataaa

SEQ ID NO: 319046 - DNA, 12 bp, Artificial Sequence
  Oligonucleotide primer for the detection of SNP TSC0029048
gttatagatttt

SEQ ID NO: 319047 - DNA, 12 bp, Artificial Sequence
  Oligonucleotide primer for the detection of SNP TSC0029048
accacaaaccct

SEQ ID NO: 319048 - DNA, 12 bp, Artificial Sequence
  Oligonucleotide primer for the detection of SNP TSC0029048
agtggtagtgag

SEQ ID NO: 319049 - DNA, 12 bp, Artificial Sequence
  Oligonucleotide primer for the detection of SNP TSC0029049
accctctaactt

SEQ ID NO: 319050 - DNA, 12 bp, Artificial Sequence
  Oligonucleotide primer for the detection of SNP TSC0029049
ggaggtagattg

SEQ ID NO: 319051 - DNA, 12 bp, Artificial Sequence
  Oligonucleotide primer for the detection of SNP TSC0029050
ttctataaccca

SEQ ID NO: 319052 - DNA, 12 bp, Artificial Sequence
  Oligonucleotide primer for the detection of SNP TSC0029050
ggtttgatgttg

SEQ ID NO: 319053 - DNA, 12 bp, Artificial Sequence
  Oligonucleotide primer for the detection of SNP TSC0029050
aacttaatacta

SEQ ID NO: 319054 - DNA, 12 bp, Artificial Sequence
  Oligonucleotide primer for the detection of SNP TSC0029050
tttttgtgattt

SEQ ID NO: 319055 - DNA, 12 bp, Artificial Sequence
  Oligonucleotide primer for the detection of SNP TSC0029053
caaaaaactcca

SEQ ID NO: 319056 - DNA, 12 bp, Artificial Sequence
  Oligonucleotide primer for the detection of SNP TSC0029053
caaaaaactccg

SEQ ID NO: 319057 - DNA, 12 bp, Artificial Sequence
  Oligonukleotid-Primer
cgaaaaactcca

SEQ ID NO: 319058 - DNA, 12 bp, Artificial Sequence
  Oligonucleotide primer for the detection of SNP TSC0029053
cgaaaaactccg

SEQ ID NO: 319059 - DNA, 12 bp, Artificial Sequence
  Oligonucleotide primer for the detection of SNP TSC0029053
gtttagtattgt

SEQ ID NO: 319060 - DNA, 12 bp, Artificial Sequence
  Oligonucleotide primer for the detection of SNP TSC0029053
gtttagtattgc

SEQ ID NO: 319061 - DNA, 12 bp, Artificial Sequence
  Oligonucleotide primer for the detection of SNP TSC0029053
acccaacactac

SEQ ID NO: 319062 - DNA, 12 bp, Artificial Sequence
  Oligonucleotide primer for the detection of SNP TSC0029053
tggaagattttg

SEQ ID NO: 319063 - DNA, 12 bp, Artificial Sequence
  Oligonucleotide primer for the detection of SNP TSC0029053
cggaagattttg

SEQ ID NO: 319064 - DNA, 12 bp, Artificial Sequence
  Oligonucleotide primer for the detection of SNP TSC0029053
tggaagatttcg

SEQ ID NO: 319065 - DNA, 12 bp, Artificial Sequence
  Oligonucleotide primer for the detection of SNP TSC0029053
cggaagatttcg

SEQ ID NO: 319066 - DNA, 12 bp, Artificial Sequence
  Oligonucleotide primer for the detection of SNP TSC0029055
tttctcccctac

SEQ ID NO: 319067 - DNA, 12 bp, Artificial Sequence
  Oligonucleotide primer for the detection of SNP TSC0029055
agtaaggatggg

SEQ ID NO: 319068 - DNA, 12 bp, Artificial Sequence
  Oligonucleotide primer for the detection of SNP TSC0029056
tttgtttttgga

SEQ ID NO: 319069 - DNA, 12 bp, Artificial Sequence
  Oligonucleotide primer for the detection of SNP TSC0029056
cctatccctaaa

SEQ ID NO: 319070 - DNA, 12 bp, Artificial Sequence
  Oligonucleotide primer for the detection of SNP TSC0029056
agaagagaagtt

SEQ ID NO: 319071 - DNA, 12 bp, Artificial Sequence
  Oligonucleotide primer for the detection of SNP TSC0029057
aaaagtgagaat

SEQ ID NO: 319072 - DNA, 12 bp, Artificial Sequence
  Oligonucleotide primer for the detection of SNP TSC0029057
agggatgaagaa

SEQ ID NO: 319073 - DNA, 12 bp, Artificial Sequence
  Oligonucleotide primer for the detection of SNP TSC0029058
tcactccatctc

SEQ ID NO: 319074 - DNA, 12 bp, Artificial Sequence
  Oligonucleotide primer for the detection of SNP TSC0029058
gtaggggtagag

SEQ ID NO: 319075 - DNA, 12 bp, Artificial Sequence
  Oligonucleotide primer for the detection of SNP TSC0029059
aatattatgttt

SEQ ID NO: 319076 - DNA, 12 bp, Artificial Sequence
  Oligonucleotide primer for the detection of SNP TSC0029059
aatattacgttt

SEQ ID NO: 319077 - DNA, 12 bp, Artificial Sequence
  Oligonucleotide primer for the detection of SNP TSC0029059
aaaatatcacac

SEQ ID NO: 319078 - DNA, 12 bp, Artificial Sequence
  Oligonucleotide primer for the detection of SNP TSC0029059
aaaatatcacgc

SEQ ID NO: 319079 - DNA, 12 bp, Artificial Sequence
  Oligonucleotide primer for the detection of SNP TSC0029059
ttattttgtttc

SEQ ID NO: 319080 - DNA, 12 bp, Artificial Sequence
  Oligonucleotide primer for the detection of SNP TSC0029060
ttacctccccat

SEQ ID NO: 319081 - DNA, 12 bp, Artificial Sequence
  Oligonucleotide primer for the detection of SNP TSC0029060
atgtgatttttt

SEQ ID NO: 319082 - DNA, 12 bp, Artificial Sequence
  Oligonucleotide primer for the detection of SNP TSC0029061
tccaaaaaccaa

SEQ ID NO: 319083 - DNA, 12 bp, Artificial Sequence
  Oligonucleotide primer for the detection of SNP TSC0029061
gttaagtatttt

SEQ ID NO: 319084 - DNA, 12 bp, Artificial Sequence
  Oligonucleotide primer for the detection of SNP TSC0029061
attaaacacttt

SEQ ID NO: 319085 - DNA, 12 bp, Artificial Sequence
  Oligonucleotide primer for the detection of SNP TSC0029061
gtttaaaggtta

SEQ ID NO: 319086 - DNA, 12 bp, Artificial Sequence
  Oligonucleotide primer for the detection of SNP TSC0029063
tggagcgtgtga

SEQ ID NO: 319087 - DNA, 12 bp, Artificial Sequence
  Oligonucleotide primer for the detection of SNP TSC0029063
taaaacgtataa

SEQ ID NO: 319088 - DNA, 12 bp, Artificial Sequence
  Oligonucleotide primer for the detection of SNP TSC0029063
aatgaagtggat

SEQ ID NO: 319089 - DNA, 12 bp, Artificial Sequence
  Oligonucleotide primer for the detection of SNP TSC0029067
gtgtttttggtt

SEQ ID NO: 319090 - DNA, 12 bp, Artificial Sequence
  Oligonucleotide primer for the detection of SNP TSC0029067
atatttctaact

SEQ ID NO: 319091 - DNA, 12 bp, Artificial Sequence
  Oligonucleotide primer for the detection of SNP TSC0029067
attttttaggaa

SEQ ID NO: 319092 - DNA, 12 bp, Artificial Sequence
  Oligonucleotide primer for the detection of SNP TSC0029068
atattccaacct

SEQ ID NO: 319093 - DNA, 12 bp, Artificial Sequence
  Oligonucleotide primer for the detection of SNP TSC0029068
aagtaggagaaa

SEQ ID NO: 319094 - DNA, 12 bp, Artificial Sequence
  Oligonucleotide primer for the detection of SNP TSC0029069
acatataaacta

SEQ ID NO: 319095 - DNA, 12 bp, Artificial Sequence
  Oligonucleotide primer for the detection of SNP TSC0029069
tatgtattatgt

SEQ ID NO: 319096 - DNA, 12 bp, Artificial Sequence
  Oligonucleotide primer for the detection of SNP TSC0029069
catatatcatac

SEQ ID NO: 319097 - DNA, 12 bp, Artificial Sequence
  Oligonucleotide primer for the detection of SNP TSC0029069
atatatgagttg

SEQ ID NO: 319098 - DNA, 12 bp, Artificial Sequence
  Oligonucleotide primer for the detection of SNP TSC0029070
caactcatatat

SEQ ID NO: 319099 - DNA, 12 bp, Artificial Sequence
  Oligonucleotide primer for the detection of SNP TSC0029070
ggaaagtgttta

SEQ ID NO: 319100 - DNA, 12 bp, Artificial Sequence
  Oligonucleotide primer for the detection of SNP TSC0029077
tttctatcctcc

SEQ ID NO: 319101 - DNA, 12 bp, Artificial Sequence
  Oligonucleotide primer for the detection of SNP TSC0029077
ttggtagggggg

SEQ ID NO: 319102 - DNA, 12 bp, Artificial Sequence
  Oligonucleotide primer for the detection of SNP TSC0029077
tcggtagggggg

SEQ ID NO: 319103 - DNA, 12 bp, Artificial Sequence
  Oligonucleotide primer for the detection of SNP TSC0029077
ccgataaaaaaa

SEQ ID NO: 319104 - DNA, 12 bp, Artificial Sequence
  Oligonucleotide primer for the detection of SNP TSC0029078
acaattccaatc

SEQ ID NO: 319105 - DNA, 12 bp, Artificial Sequence
  Oligonucleotide primer for the detection of SNP TSC0029078
gagtaaatttta

SEQ ID NO: 319106 - DNA, 12 bp, Artificial Sequence
  Oligonucleotide primer for the detection of SNP TSC0029078
aaacaaatccca

SEQ ID NO: 319107 - DNA, 12 bp, Artificial Sequence
  Oligonucleotide primer for the detection of SNP TSC0029078
ataattttaatt

SEQ ID NO: 319108 - DNA, 12 bp, Artificial Sequence
  Oligonucleotide primer for the detection of SNP TSC0029080
ggggagagtaaa

SEQ ID NO: 319109 - DNA, 12 bp, Artificial Sequence
  Oligonucleotide primer for the detection of SNP TSC0029085
tatattccctac

SEQ ID NO: 319110 - DNA, 12 bp, Artificial Sequence
  Oligonucleotide primer for the detection of SNP TSC0029085
aaatgttttaag

SEQ ID NO: 319111 - DNA, 12 bp, Artificial Sequence
  Oligonucleotide primer for the detection of SNP TSC0029085
aaatatttcaaa

SEQ ID NO: 319112 - DNA, 12 bp, Artificial Sequence
  Oligonucleotide primer for the detection of SNP TSC0029085
tatgttttttgt

SEQ ID NO: 319113 - DNA, 12 bp, Artificial Sequence
  Oligonucleotide primer for the detection of SNP TSC0029087
aatttttaatat

SEQ ID NO: 319114 - DNA, 12 bp, Artificial Sequence
  Oligonucleotide primer for the detection of SNP TSC0029088
ggtagattttta

SEQ ID NO: 319115 - DNA, 12 bp, Artificial Sequence
  Oligonucleotide primer for the detection of SNP TSC0029089
cattcataaacc

SEQ ID NO: 319116 - DNA, 12 bp, Artificial Sequence
  Oligonucleotide primer for the detection of SNP TSC0029089
cattcgtaaacc

SEQ ID NO: 319117 - DNA, 12 bp, Artificial Sequence
  Oligonucleotide primer for the detection of SNP TSC0029089
cgttcataaacc

SEQ ID NO: 319118 - DNA, 12 bp, Artificial Sequence
  Oligonucleotide primer for the detection of SNP TSC0029089
cgttcgtaaacc

SEQ ID NO: 319119 - DNA, 12 bp, Artificial Sequence
  Oligonucleotide primer for the detection of SNP TSC0029089
gagattatatta

SEQ ID NO: 319120 - DNA, 12 bp, Artificial Sequence
  Oligonucleotide primer for the detection of SNP TSC0029090
cccataaaatac

SEQ ID NO: 319121 - DNA, 12 bp, Artificial Sequence
  Oligonucleotide primer for the detection of SNP TSC0029090
cccgtaaaatac

SEQ ID NO: 319122 - DNA, 12 bp, Artificial Sequence
  Oligonucleotide primer for the detection of SNP TSC0029091
atcctttcccca

SEQ ID NO: 319123 - DNA, 12 bp, Artificial Sequence
  Oligonucleotide primer for the detection of SNP TSC0029091
gttgggggtttt

SEQ ID NO: 319124 - DNA, 12 bp, Artificial Sequence
  Oligonucleotide primer for the detection of SNP TSC0029091
attaaaaactct

SEQ ID NO: 319125 - DNA, 12 bp, Artificial Sequence
  Oligonucleotide primer for the detection of SNP TSC0029095
aaaacctcaaac

SEQ ID NO: 319126 - DNA, 12 bp, Artificial Sequence
  Oligonucleotide primer for the detection of SNP TSC0029095
tcaatactcata

SEQ ID NO: 319127 - DNA, 12 bp, Artificial Sequence
  Oligonucleotide primer for the detection of SNP TSC0029095
gggattttaggt

SEQ ID NO: 319128 - DNA, 12 bp, Artificial Sequence
  Oligonucleotide primer for the detection of SNP TSC0029096
aaataactcaat

SEQ ID NO: 319129 - DNA, 12 bp, Artificial Sequence
  Oligonucleotide primer for the detection of SNP TSC0029096
tttttggtttcg

SEQ ID NO: 319130 - DNA, 12 bp, Artificial Sequence
  Oligonucleotide primer for the detection of SNP TSC0029096
cccctaacccca

SEQ ID NO: 319131 - DNA, 12 bp, Artificial Sequence
  Oligonucleotide primer for the detection of SNP TSC0029096
cccctaaccccg

SEQ ID NO: 319132 - DNA, 12 bp, Artificial Sequence
  Oligonucleotide primer for the detection of SNP TSC0029096
aaataatttagt

SEQ ID NO: 319133 - DNA, 12 bp, Artificial Sequence
  Oligonucleotide primer for the detection of SNP TSC0029097
caccactacttc

SEQ ID NO: 319134 - DNA, 12 bp, Artificial Sequence
  Oligonucleotide primer for the detection of SNP TSC0029098
acaaacctccca

SEQ ID NO: 319135 - DNA, 12 bp, Artificial Sequence
  Oligonucleotide primer for the detection of SNP TSC0029098
gtagaagtagtg

SEQ ID NO: 319136 - DNA, 12 bp, Artificial Sequence
  Oligonucleotide primer for the detection of SNP TSC0029098
ataaaaacaata

SEQ ID NO: 319137 - DNA, 12 bp, Artificial Sequence
  Oligonucleotide primer for the detection of SNP TSC0029098
gtagatttttta

SEQ ID NO: 319138 - DNA, 12 bp, Artificial Sequence
  Oligonucleotide primer for the detection of SNP TSC0029101
ccaaaaaatctc

SEQ ID NO: 319139 - DNA, 12 bp, Artificial Sequence
  Oligonucleotide primer for the detection of SNP TSC0029101
tttatatgtaag

SEQ ID NO: 319140 - DNA, 12 bp, Artificial Sequence
  Oligonucleotide primer for the detection of SNP TSC0029103
agggttaatgag

SEQ ID NO: 319141 - DNA, 12 bp, Artificial Sequence
  Oligonucleotide primer for the detection of SNP TSC0029104
ccctccaaattt

SEQ ID NO: 319142 - DNA, 12 bp, Artificial Sequence
  Oligonucleotide primer for the detection of SNP TSC0029104
accccttaaata

SEQ ID NO: 319143 - DNA, 12 bp, Artificial Sequence
  Oligonucleotide primer for the detection of SNP TSC0029105
acatacaaacac

SEQ ID NO: 319144 - DNA, 12 bp, Artificial Sequence
  Oligonucleotide primer for the detection of SNP TSC0029105
agaattttgtgg

SEQ ID NO: 319145 - DNA, 12 bp, Artificial Sequence
  Oligonucleotide primer for the detection of SNP TSC0029106
aaaccacccaaa

SEQ ID NO: 319146 - DNA, 12 bp, Artificial Sequence
  Oligonucleotide primer for the detection of SNP TSC0029106
tattaattggat

SEQ ID NO: 319147 - DNA, 12 bp, Artificial Sequence
  Oligonucleotide primer for the detection of SNP TSC0029106
tattaattggac

SEQ ID NO: 319148 - DNA, 12 bp, Artificial Sequence
  Oligonucleotide primer for the detection of SNP TSC0029106
tatcaattaaac

SEQ ID NO: 319149 - DNA, 12 bp, Artificial Sequence
  Oligonucleotide primer for the detection of SNP TSC0029106
aaattatttaga

SEQ ID NO: 319150 - DNA, 12 bp, Artificial Sequence
  Oligonucleotide primer for the detection of SNP TSC0029107
ataaaaccacca

SEQ ID NO: 319151 - DNA, 12 bp, Artificial Sequence
  Oligonucleotide primer for the detection of SNP TSC0029107
aagtggagatat

SEQ ID NO: 319152 - DNA, 12 bp, Artificial Sequence
  Oligonucleotide primer for the detection of SNP TSC0029107
aagcggagatat

SEQ ID NO: 319153 - DNA, 12 bp, Artificial Sequence
  Oligonucleotide primer for the detection of SNP TSC0029107
aaacgaaaatac

SEQ ID NO: 319154 - DNA, 12 bp, Artificial Sequence
  Oligonucleotide primer for the detection of SNP TSC0029107
atggagttatta

SEQ ID NO: 319155 - DNA, 12 bp, Artificial Sequence
  Oligonucleotide primer for the detection of SNP TSC0029108
ctcaaaccctcc

SEQ ID NO: 319156 - DNA, 12 bp, Artificial Sequence
  Oligonucleotide primer for the detection of SNP TSC0029108
ctcgaaccctcc

SEQ ID NO: 319157 - DNA, 12 bp, Artificial Sequence
  Oligonucleotide primer for the detection of SNP TSC0029108
tttggtttgtgg

SEQ ID NO: 319158 - DNA, 12 bp, Artificial Sequence
  Oligonukleotid-Primer
ttcggtttgtgg

SEQ ID NO: 319159 - DNA, 12 bp, Artificial Sequence
  Oligonucleotide primer for the detection of SNP TSC0029108
tttggttcgtgg

SEQ ID NO: 319160 - DNA, 12 bp, Artificial Sequence
  Oligonucleotide primer for the detection of SNP TSC0029108
tttggtttgcgg

SEQ ID NO: 319161 - DNA, 12 bp, Artificial Sequence
  Oligonucleotide primer for the detection of SNP TSC0029108
ttcggttcgtgg

SEQ ID NO: 319162 - DNA, 12 bp, Artificial Sequence
  Oligonucleotide primer for the detection of SNP TSC0029108
ttcggtttgcgg

SEQ ID NO: 319163 - DNA, 12 bp, Artificial Sequence
  Oligonucleotide primer for the detection of SNP TSC0029108
tttggttcgcgg

SEQ ID NO: 319164 - DNA, 12 bp, Artificial Sequence
  Oligonucleotide primer for the detection of SNP TSC0029108
ttcggttcgcgg

SEQ ID NO: 319165 - DNA, 12 bp, Artificial Sequence
  Oligonucleotide primer for the detection of SNP TSC0029108
cccaactcacaa

SEQ ID NO: 319166 - DNA, 12 bp, Artificial Sequence
  Oligonucleotide primer for the detection of SNP TSC0029108
cccaactcacga

SEQ ID NO: 319167 - DNA, 12 bp, Artificial Sequence
  Oligonucleotide primer for the detection of SNP TSC0029108
cccaactcgcaa

SEQ ID NO: 319168 - DNA, 12 bp, Artificial Sequence
  Oligonucleotide primer for the detection of SNP TSC0029108
cccgactcacaa

SEQ ID NO: 319169 - DNA, 12 bp, Artificial Sequence
  Oligonucleotide primer for the detection of SNP TSC0029108
cccaactcgcga

SEQ ID NO: 319170 - DNA, 12 bp, Artificial Sequence
  Oligonucleotide primer for the detection of SNP TSC0029108
cccgactcacga

SEQ ID NO: 319171 - DNA, 12 bp, Artificial Sequence
  Oligonucleotide primer for the detection of SNP TSC0029108
cccgactcgcaa

SEQ ID NO: 319172 - DNA, 12 bp, Artificial Sequence
  Oligonucleotide primer for the detection of SNP TSC0029108
cccgactcgcga

SEQ ID NO: 319173 - DNA, 12 bp, Artificial Sequence
  Oligonucleotide primer for the detection of SNP TSC0029108
ttcgaatttttt

SEQ ID NO: 319174 - DNA, 12 bp, Artificial Sequence
  Oligonucleotide primer for the detection of SNP TSC0029108
tttgaatttttc

SEQ ID NO: 319175 - DNA, 12 bp, Artificial Sequence
  Oligonucleotide primer for the detection of SNP TSC0029108
ttcgaatttttc

SEQ ID NO: 319176 - DNA, 12 bp, Artificial Sequence
  Oligonucleotide primer for the detection of SNP TSC0029109
aaaaaaacgacg

SEQ ID NO: 319177 - DNA, 12 bp, Artificial Sequence
  Oligonucleotide primer for the detection of SNP TSC0029109
tagttgttaggt

SEQ ID NO: 319178 - DNA, 12 bp, Artificial Sequence
  Oligonucleotide primer for the detection of SNP TSC0029109
tagtcgttaggt

SEQ ID NO: 319179 - DNA, 12 bp, Artificial Sequence
  Oligonucleotide primer for the detection of SNP TSC0029109
aaccaccaaata

SEQ ID NO: 319180 - DNA, 12 bp, Artificial Sequence
  Oligonucleotide primer for the detection of SNP TSC0029109
aaccgccaaata

SEQ ID NO: 319181 - DNA, 12 bp, Artificial Sequence
  Oligonucleotide primer for the detection of SNP TSC0029109
aggggatggtgt

SEQ ID NO: 319182 - DNA, 12 bp, Artificial Sequence
  Oligonucleotide primer for the detection of SNP TSC0029109
aggggacggtgt

SEQ ID NO: 319183 - DNA, 12 bp, Artificial Sequence
  Oligonucleotide primer for the detection of SNP TSC0029109
aggggatggcgt

SEQ ID NO: 319184 - DNA, 12 bp, Artificial Sequence
  Oligonucleotide primer for the detection of SNP TSC0029109
aggggacggcgt

SEQ ID NO: 319185 - DNA, 12 bp, Artificial Sequence
  Oligonucleotide primer for the detection of SNP TSC0029109
aggggatggtgc

SEQ ID NO: 319186 - DNA, 12 bp, Artificial Sequence
  Oligonucleotide primer for the detection of SNP TSC0029109
aggggacggtgc

SEQ ID NO: 319187 - DNA, 12 bp, Artificial Sequence
  Oligonucleotide primer for the detection of SNP TSC0029109
aggggatggcgc

SEQ ID NO: 319188 - DNA, 12 bp, Artificial Sequence
  Oligonucleotide primer for the detection of SNP TSC0029109
aggggacggcgc

SEQ ID NO: 319189 - DNA, 12 bp, Artificial Sequence
  Oligonucleotide primer for the detection of SNP TSC0029111
tttatgagatgt

SEQ ID NO: 319190 - DNA, 12 bp, Artificial Sequence
  Oligonucleotide primer for the detection of SNP TSC0029111
tccataaaatat

SEQ ID NO: 319191 - DNA, 12 bp, Artificial Sequence
  Oligonucleotide primer for the detection of SNP TSC0029111
aggagaagtagg

SEQ ID NO: 319192 - DNA, 12 bp, Artificial Sequence
  Oligonucleotide primer for the detection of SNP TSC0029112
catacaatatta

SEQ ID NO: 319193 - DNA, 12 bp, Artificial Sequence
  Oligonucleotide primer for the detection of SNP TSC0029112
ttttttttagtc

SEQ ID NO: 319194 - DNA, 12 bp, Artificial Sequence
  Oligonucleotide primer for the detection of SNP TSC0029112
tcccttccaatc

SEQ ID NO: 319195 - DNA, 12 bp, Artificial Sequence
  Oligonucleotide primer for the detection of SNP TSC0029112
ttatataatgtt

SEQ ID NO: 319196 - DNA, 12 bp, Artificial Sequence
  Oligonucleotide primer for the detection of SNP TSC0029113
aaaatctcaaaa

SEQ ID NO: 319197 - DNA, 12 bp, Artificial Sequence
  Oligonucleotide primer for the detection of SNP TSC0029113
ccaccctctaaa

SEQ ID NO: 319198 - DNA, 12 bp, Artificial Sequence
  Oligonucleotide primer for the detection of SNP TSC0029113
ggagttttaaaa

SEQ ID NO: 319199 - DNA, 12 bp, Artificial Sequence
  Oligonucleotide primer for the detection of SNP TSC0029114
aaaaaatcccta

SEQ ID NO: 319200 - DNA, 12 bp, Artificial Sequence
  Oligonucleotide primer for the detection of SNP TSC0029114
ttttagagttag

SEQ ID NO: 319201 - DNA, 12 bp, Artificial Sequence
  Oligonucleotide primer for the detection of SNP TSC0029114
tctcaaaatcaa

SEQ ID NO: 319202 - DNA, 12 bp, Artificial Sequence
  Oligonucleotide primer for the detection of SNP TSC0029114
gaaaaatttttg

SEQ ID NO: 319203 - DNA, 12 bp, Artificial Sequence
  Oligonukleotid-Primer
cctttcattttc

SEQ ID NO: 319204 - DNA, 12 bp, Artificial Sequence
  Oligonucleotide primer for the detection of SNP TSC0029115
cctttcgttttc

SEQ ID NO: 319205 - DNA, 12 bp, Artificial Sequence
  Oligonucleotide primer for the detection of SNP TSC0029115
taattgtaatta

SEQ ID NO: 319206 - DNA, 12 bp, Artificial Sequence
  Oligonucleotide primer for the detection of SNP TSC0029115
taactataacca

SEQ ID NO: 319207 - DNA, 12 bp, Artificial Sequence
  Oligonucleotide primer for the detection of SNP TSC0029116
aaatcatacatt

SEQ ID NO: 319208 - DNA, 12 bp, Artificial Sequence
  Oligonucleotide primer for the detection of SNP TSC0029116
gaatcatacatt

SEQ ID NO: 319209 - DNA, 12 bp, Artificial Sequence
  Oligonucleotide primer for the detection of SNP TSC0029116
aaagggatttgg

SEQ ID NO: 319210 - DNA, 12 bp, Artificial Sequence
  Oligonucleotide primer for the detection of SNP TSC0029117
tttttggagtag

SEQ ID NO: 319211 - DNA, 12 bp, Artificial Sequence
  Oligonucleotide primer for the detection of SNP TSC0029117
ttttcggagtag

SEQ ID NO: 319212 - DNA, 12 bp, Artificial Sequence
  Oligonucleotide primer for the detection of SNP TSC0029118
ccacaacattaa

SEQ ID NO: 319213 - DNA, 12 bp, Artificial Sequence
  Oligonucleotide primer for the detection of SNP TSC0029118
ccacgacattaa

SEQ ID NO: 319214 - DNA, 12 bp, Artificial Sequence
  Oligonucleotide primer for the detection of SNP TSC0029118
aatcaccatacc

SEQ ID NO: 319215 - DNA, 12 bp, Artificial Sequence
  Oligonucleotide primer for the detection of SNP TSC0029118
aatcaccgtacc

SEQ ID NO: 319216 - DNA, 12 bp, Artificial Sequence
  Oligonucleotide primer for the detection of SNP TSC0029118
ttatggtattgg

SEQ ID NO: 319217 - DNA, 12 bp, Artificial Sequence
  Oligonucleotide primer for the detection of SNP TSC0029118
ttacggtattgg

SEQ ID NO: 319218 - DNA, 12 bp, Artificial Sequence
  Oligonucleotide primer for the detection of SNP TSC0029121
gaatagaaaagt

SEQ ID NO: 319219 - DNA, 12 bp, Artificial Sequence
  Oligonucleotide primer for the detection of SNP TSC0029122
aacaaactattt

SEQ ID NO: 319220 - DNA, 12 bp, Artificial Sequence
  Oligonucleotide primer for the detection of SNP TSC0029122
tttttgttttga

SEQ ID NO: 319221 - DNA, 12 bp, Artificial Sequence
  Oligonucleotide primer for the detection of SNP TSC0029122
tttctattctaa

SEQ ID NO: 319222 - DNA, 12 bp, Artificial Sequence
  Oligonucleotide primer for the detection of SNP TSC0029122
ggtaagttgttt

SEQ ID NO: 319223 - DNA, 12 bp, Artificial Sequence
  Oligonucleotide primer for the detection of SNP TSC0029123
tatacaaacatt

SEQ ID NO: 319224 - DNA, 12 bp, Artificial Sequence
  Oligonucleotide primer for the detection of SNP TSC0029123
attttgtgttta

SEQ ID NO: 319225 - DNA, 12 bp, Artificial Sequence
  Oligonucleotide primer for the detection of SNP TSC0029124
tacttttcatta

SEQ ID NO: 319226 - DNA, 12 bp, Artificial Sequence
  Oligonucleotide primer for the detection of SNP TSC0029124
tttaataagggt

SEQ ID NO: 319227 - DNA, 12 bp, Artificial Sequence
  Oligonucleotide primer for the detection of SNP TSC0029124
tccaacaaaaat

SEQ ID NO: 319228 - DNA, 12 bp, Artificial Sequence
  Oligonucleotide primer for the detection of SNP TSC0029125
taaaaatcatac

SEQ ID NO: 319229 - DNA, 12 bp, Artificial Sequence
  Oligonucleotide primer for the detection of SNP TSC0029125
tttttttttaac

SEQ ID NO: 319230 - DNA, 12 bp, Artificial Sequence
  Oligonucleotide primer for the detection of SNP TSC0029125
acttttctttaa

SEQ ID NO: 319231 - DNA, 12 bp, Artificial Sequence
  Oligonucleotide primer for the detection of SNP TSC0029125
taaaggttatgt

SEQ ID NO: 319232 - DNA, 12 bp, Artificial Sequence
  Oligonucleotide primer for the detection of SNP TSC0029126
acataaaacatt

SEQ ID NO: 319233 - DNA, 12 bp, Artificial Sequence
  Oligonucleotide primer for the detection of SNP TSC0029126
acataaaacgtt

SEQ ID NO: 319234 - DNA, 12 bp, Artificial Sequence
  Oligonucleotide primer for the detection of SNP TSC0029126
gttgaaatttta

SEQ ID NO: 319235 - DNA, 12 bp, Artificial Sequence
  Oligonucleotide primer for the detection of SNP TSC0029127
aaaatctatcaa

SEQ ID NO: 319236 - DNA, 12 bp, Artificial Sequence
  Oligonucleotide primer for the detection of SNP TSC0029127
attttagtaaga

SEQ ID NO: 319237 - DNA, 12 bp, Artificial Sequence
  Oligonucleotide primer for the detection of SNP TSC0029127
atttcaacaaaa

SEQ ID NO: 319238 - DNA, 12 bp, Artificial Sequence
  Oligonucleotide primer for the detection of SNP TSC0029127
aaaatttattag

SEQ ID NO: 319239 - DNA, 12 bp, Artificial Sequence
  Oligonucleotide primer for the detection of SNP TSC0029130
cataaatataac

SEQ ID NO: 319240 - DNA, 12 bp, Artificial Sequence
  Oligonucleotide primer for the detection of SNP TSC0029130
agggtagttttg

SEQ ID NO: 319241 - DNA, 12 bp, Artificial Sequence
  Oligonucleotide primer for the detection of SNP TSC0029130
aaaacaatttta

SEQ ID NO: 319242 - DNA, 12 bp, Artificial Sequence
  Oligonucleotide primer for the detection of SNP TSC0029130
tataaatatgat

SEQ ID NO: 319243 - DNA, 12 bp, Artificial Sequence
  Oligonucleotide primer for the detection of SNP TSC0029131
ataaacacacat

SEQ ID NO: 319244 - DNA, 12 bp, Artificial Sequence
  Oligonucleotide primer for the detection of SNP TSC0029131
tgtgtgtttgtg

SEQ ID NO: 319245 - DNA, 12 bp, Artificial Sequence
  Oligonucleotide primer for the detection of SNP TSC0029133
aaaatcaattat

SEQ ID NO: 319246 - DNA, 12 bp, Artificial Sequence
  Oligonucleotide primer for the detection of SNP TSC0029133
tggtattatgta

SEQ ID NO: 319247 - DNA, 12 bp, Artificial Sequence
  Oligonucleotide primer for the detection of SNP TSC0029134
aaaatctaatca

SEQ ID NO: 319248 - DNA, 12 bp, Artificial Sequence
  Oligonucleotide primer for the detection of SNP TSC0029134
gagaataggtat

SEQ ID NO: 319249 - DNA, 12 bp, Artificial Sequence
  Oligonucleotide primer for the detection of SNP TSC0029134
ggaatttggtta

SEQ ID NO: 319250 - DNA, 12 bp, Artificial Sequence
  Oligonucleotide primer for the detection of SNP TSC0029135
ctctcctcataa

SEQ ID NO: 319251 - DNA, 12 bp, Artificial Sequence
  Oligonucleotide primer for the detection of SNP TSC0029135
ggaatattattt

SEQ ID NO: 319252 - DNA, 12 bp, Artificial Sequence
  Oligonucleotide primer for the detection of SNP TSC0029135
aaatattattca

SEQ ID NO: 319253 - DNA, 12 bp, Artificial Sequence
  Oligonucleotide primer for the detection of SNP TSC0029136
ccccacctcaaa

SEQ ID NO: 319254 - DNA, 12 bp, Artificial Sequence
  Oligonucleotide primer for the detection of SNP TSC0029136
tagagataaaag

SEQ ID NO: 319255 - DNA, 12 bp, Artificial Sequence
  Oligonucleotide primer for the detection of SNP TSC0029136
aagttttatttt

SEQ ID NO: 319256 - DNA, 12 bp, Artificial Sequence
  Oligonucleotide primer for the detection of SNP TSC0029137
aaaaactaccac

SEQ ID NO: 319257 - DNA, 12 bp, Artificial Sequence
  Oligonucleotide primer for the detection of SNP TSC0029137
aaaaactaccgc

SEQ ID NO: 319258 - DNA, 12 bp, Artificial Sequence
  Oligonucleotide primer for the detection of SNP TSC0029137
aatggagtaaga

SEQ ID NO: 319259 - DNA, 12 bp, Artificial Sequence
  Oligonucleotide primer for the detection of SNP TSC0029137
aacggagtaaga

SEQ ID NO: 319260 - DNA, 12 bp, Artificial Sequence
  Oligonucleotide primer for the detection of SNP TSC0029139
atacatcatccc

SEQ ID NO: 319261 - DNA, 12 bp, Artificial Sequence
  Oligonucleotide primer for the detection of SNP TSC0029139
gggaatagattt

SEQ ID NO: 319262 - DNA, 12 bp, Artificial Sequence
  Oligonucleotide primer for the detection of SNP TSC0029139
taaaaaacaaac

SEQ ID NO: 319263 - DNA, 12 bp, Artificial Sequence
  Oligonucleotide primer for the detection of SNP TSC0029139
gtgtattatttt

SEQ ID NO: 319264 - DNA, 12 bp, Artificial Sequence
  Oligonucleotide primer for the detection of SNP TSC0029139
gtgtattatttc

SEQ ID NO: 319265 - DNA, 12 bp, Artificial Sequence
  Oligonucleotide primer for the detection of SNP TSC0029142
aataacacctac

SEQ ID NO: 319266 - DNA, 12 bp, Artificial Sequence
  Oligonucleotide primer for the detection of SNP TSC0029143
taaatttcaacc

SEQ ID NO: 319267 - DNA, 12 bp, Artificial Sequence
  Oligonucleotide primer for the detection of SNP TSC0029143
aaggttgaaatt

SEQ ID NO: 319268 - DNA, 12 bp, Artificial Sequence
  Oligonucleotide primer for the detection of SNP TSC0029143
aaggttgaaatc

SEQ ID NO: 319269 - DNA, 12 bp, Artificial Sequence
  Oligonucleotide primer for the detection of SNP TSC0029143
ggttttagtttt

SEQ ID NO: 319270 - DNA, 12 bp, Artificial Sequence
  Oligonucleotide primer for the detection of SNP TSC0029144
ccaaaatttccc

SEQ ID NO: 319271 - DNA, 12 bp, Artificial Sequence
  Oligonucleotide primer for the detection of SNP TSC0029144
cctacctcccca

SEQ ID NO: 319272 - DNA, 12 bp, Artificial Sequence
  Oligonucleotide primer for the detection of SNP TSC0029144
ttaaggtttttt

SEQ ID NO: 319273 - DNA, 12 bp, Artificial Sequence
  Oligonucleotide primer for the detection of SNP TSC0029145
gttgggtgtttg

SEQ ID NO: 319274 - DNA, 12 bp, Artificial Sequence
  Oligonucleotide primer for the detection of SNP TSC0029145
gtcgggtgtttg

SEQ ID NO: 319275 - DNA, 12 bp, Artificial Sequence
  Oligonucleotide primer for the detection of SNP TSC0029145
gttgggtgttcg

SEQ ID NO: 319276 - DNA, 12 bp, Artificial Sequence
  Oligonucleotide primer for the detection of SNP TSC0029145
gtcgggtgttcg

SEQ ID NO: 319277 - DNA, 12 bp, Artificial Sequence
  Oligonucleotide primer for the detection of SNP TSC0029146
acataaatttac

SEQ ID NO: 319278 - DNA, 12 bp, Artificial Sequence
  Oligonucleotide primer for the detection of SNP TSC0029146
taagagggtttg

SEQ ID NO: 319279 - DNA, 12 bp, Artificial Sequence
  Oligonucleotide primer for the detection of SNP TSC0029151
atccttaaaata

SEQ ID NO: 319280 - DNA, 12 bp, Artificial Sequence
  Oligonucleotide primer for the detection of SNP TSC0029151
acaaaaataaat

SEQ ID NO: 319281 - DNA, 12 bp, Artificial Sequence
  Oligonucleotide primer for the detection of SNP TSC0029152
aattctctaaat

SEQ ID NO: 319282 - DNA, 12 bp, Artificial Sequence
  Oligonucleotide primer for the detection of SNP TSC0029152
gtgagtttgggg

SEQ ID NO: 319283 - DNA, 12 bp, Artificial Sequence
  Oligonucleotide primer for the detection of SNP TSC0029154
ctaaaaattcca

SEQ ID NO: 319284 - DNA, 12 bp, Artificial Sequence
  Oligonucleotide primer for the detection of SNP TSC0029154
ataagtttgatt

SEQ ID NO: 319285 - DNA, 12 bp, Artificial Sequence
  Oligonucleotide primer for the detection of SNP TSC0029154
ataagtttgatc

SEQ ID NO: 319286 - DNA, 12 bp, Artificial Sequence
  Oligonucleotide primer for the detection of SNP TSC0029154
ttgggaatttta

SEQ ID NO: 319287 - DNA, 12 bp, Artificial Sequence
  Oligonucleotide primer for the detection of SNP TSC0029155
accccaacaata

SEQ ID NO: 319288 - DNA, 12 bp, Artificial Sequence
  Oligonucleotide primer for the detection of SNP TSC0029155
accccaacgata

SEQ ID NO: 319289 - DNA, 12 bp, Artificial Sequence
  Oligonucleotide primer for the detection of SNP TSC0029155
accccgacaata

SEQ ID NO: 319290 - DNA, 12 bp, Artificial Sequence
  Oligonucleotide primer for the detection of SNP TSC0029155
accccgacgata

SEQ ID NO: 319291 - DNA, 12 bp, Artificial Sequence
  Oligonucleotide primer for the detection of SNP TSC0029155
ttgtttttgatt

SEQ ID NO: 319292 - DNA, 12 bp, Artificial Sequence
  Oligonucleotide primer for the detection of SNP TSC0029155
tcgtttttgatt

SEQ ID NO: 319293 - DNA, 12 bp, Artificial Sequence
  Oligonucleotide primer for the detection of SNP TSC0029155
tcacccctaact

SEQ ID NO: 319294 - DNA, 12 bp, Artificial Sequence
  Oligonucleotide primer for the detection of SNP TSC0029155
tcgcccctaact

SEQ ID NO: 319295 - DNA, 12 bp, Artificial Sequence
  Oligonucleotide primer for the detection of SNP TSC0029155
tattttggtgat

SEQ ID NO: 319296 - DNA, 12 bp, Artificial Sequence
  Oligonucleotide primer for the detection of SNP TSC0029155
tatttcggtgat

SEQ ID NO: 319297 - DNA, 12 bp, Artificial Sequence
  Oligonucleotide primer for the detection of SNP TSC0029155
tattttggcgat

SEQ ID NO: 319298 - DNA, 12 bp, Artificial Sequence
  Oligonucleotide primer for the detection of SNP TSC0029155
tatttcggcgat

SEQ ID NO: 319299 - DNA, 12 bp, Artificial Sequence
  Oligonucleotide primer for the detection of SNP TSC0029156
cttaacctccac

SEQ ID NO: 319300 - DNA, 12 bp, Artificial Sequence
  Oligonucleotide primer for the detection of SNP TSC0029156
tttagaagaaag

SEQ ID NO: 319301 - DNA, 12 bp, Artificial Sequence
  Oligonucleotide primer for the detection of SNP TSC0029157
ttgagggttttt

SEQ ID NO: 319302 - DNA, 12 bp, Artificial Sequence
  Oligonucleotide primer for the detection of SNP TSC0029157
tcctaaaaatcc

SEQ ID NO: 319303 - DNA, 12 bp, Artificial Sequence
  Oligonucleotide primer for the detection of SNP TSC0029157
gagggtagaggt

SEQ ID NO: 319304 - DNA, 12 bp, Artificial Sequence
  Oligonucleotide primer for the detection of SNP TSC0029158
tttgtatttttg

SEQ ID NO: 319305 - DNA, 12 bp, Artificial Sequence
  Oligonucleotide primer for the detection of SNP TSC0029158
tctatatttcta

SEQ ID NO: 319306 - DNA, 12 bp, Artificial Sequence
  Oligonucleotide primer for the detection of SNP TSC0029158
atagaaaaggta

SEQ ID NO: 319307 - DNA, 12 bp, Artificial Sequence
  Oligonucleotide primer for the detection of SNP TSC0029159
attttactctta

SEQ ID NO: 319308 - DNA, 12 bp, Artificial Sequence
  Oligonucleotide primer for the detection of SNP TSC0029159
gggagtttaaaa

SEQ ID NO: 319309 - DNA, 12 bp, Artificial Sequence
  Oligonucleotide primer for the detection of SNP TSC0029160
atttagtaatag

SEQ ID NO: 319310 - DNA, 12 bp, Artificial Sequence
  Oligonucleotide primer for the detection of SNP TSC0029160
acctaataacaa

SEQ ID NO: 319311 - DNA, 12 bp, Artificial Sequence
  Oligonucleotide primer for the detection of SNP TSC0029160
atttaaagggga

SEQ ID NO: 319312 - DNA, 12 bp, Artificial Sequence
  Oligonucleotide primer for the detection of SNP TSC0029161
aaaatacctatc

SEQ ID NO: 319313 - DNA, 12 bp, Artificial Sequence
  Oligonucleotide primer for the detection of SNP TSC0029161
tttatatagagt

SEQ ID NO: 319314 - DNA, 12 bp, Artificial Sequence
  Oligonucleotide primer for the detection of SNP TSC0029161
tcacacaaaata

SEQ ID NO: 319315 - DNA, 12 bp, Artificial Sequence
  Oligonucleotide primer for the detection of SNP TSC0029162
tatcaaacatct

SEQ ID NO: 319316 - DNA, 12 bp, Artificial Sequence
  Oligonucleotide primer for the detection of SNP TSC0029162
tatcgaacatct

SEQ ID NO: 319317 - DNA, 12 bp, Artificial Sequence
  Oligonucleotide primer for the detection of SNP TSC0029162
ttgttgtgtgtg

SEQ ID NO: 319318 - DNA, 12 bp, Artificial Sequence
  Oligonucleotide primer for the detection of SNP TSC0029164
ttaacttctaaa

SEQ ID NO: 319319 - DNA, 12 bp, Artificial Sequence
  Oligonucleotide primer for the detection of SNP TSC0029164
ttgaattatata

SEQ ID NO: 319320 - DNA, 12 bp, Artificial Sequence
  Oligonucleotide primer for the detection of SNP TSC0029164
ctaaattacaca

SEQ ID NO: 319321 - DNA, 12 bp, Artificial Sequence
  Oligonucleotide primer for the detection of SNP TSC0029164
ttagtttttgga

SEQ ID NO: 319322 - DNA, 12 bp, Artificial Sequence
  Oligonucleotide primer for the detection of SNP TSC0029167
acctccacctcc

SEQ ID NO: 319323 - DNA, 12 bp, Artificial Sequence
  Oligonucleotide primer for the detection of SNP TSC0029168
ttaattaattaa

SEQ ID NO: 319324 - DNA, 12 bp, Artificial Sequence
  Oligonucleotide primer for the detection of SNP TSC0029168
ccaaccaaccaa

SEQ ID NO: 319325 - DNA, 12 bp, Artificial Sequence
  Oligonucleotide primer for the detection of SNP TSC0029169
ggttttttgtag

SEQ ID NO: 319326 - DNA, 12 bp, Artificial Sequence
  Oligonucleotide primer for the detection of SNP TSC0029169
aatctcctataa

SEQ ID NO: 319327 - DNA, 12 bp, Artificial Sequence
  Oligonucleotide primer for the detection of SNP TSC0029170
caaaatccaaac

SEQ ID NO: 319328 - DNA, 12 bp, Artificial Sequence
  Oligonucleotide primer for the detection of SNP TSC0029170
cgaaatccaaac

SEQ ID NO: 319329 - DNA, 12 bp, Artificial Sequence
  Oligonucleotide primer for the detection of SNP TSC0029170
gttgttggtgat

SEQ ID NO: 319330 - DNA, 12 bp, Artificial Sequence
  Oligonucleotide primer for the detection of SNP TSC0029170
gtcgttggtgat

SEQ ID NO: 319331 - DNA, 12 bp, Artificial Sequence
  Oligonucleotide primer for the detection of SNP TSC0029170
gttgtcggtgat

SEQ ID NO: 319332 - DNA, 12 bp, Artificial Sequence
  Oligonucleotide primer for the detection of SNP TSC0029170
gtcgtcggtgat

SEQ ID NO: 319333 - DNA, 12 bp, Artificial Sequence
  Oligonucleotide primer for the detection of SNP TSC0029170
aaccaccaataa

SEQ ID NO: 319334 - DNA, 12 bp, Artificial Sequence
  Oligonucleotide primer for the detection of SNP TSC0029170
aaccaccgataa

SEQ ID NO: 319335 - DNA, 12 bp, Artificial Sequence
  Oligonucleotide primer for the detection of SNP TSC0029170
aaccgccaataa

SEQ ID NO: 319336 - DNA, 12 bp, Artificial Sequence
  Oligonucleotide primer for the detection of SNP TSC0029170
gaccaccaataa

SEQ ID NO: 319337 - DNA, 12 bp, Artificial Sequence
  Oligonucleotide primer for the detection of SNP TSC0029170
aaccgccgataa

SEQ ID NO: 319338 - DNA, 12 bp, Artificial Sequence
  Oligonucleotide primer for the detection of SNP TSC0029170
gaccaccgataa

SEQ ID NO: 319339 - DNA, 12 bp, Artificial Sequence
  Oligonucleotide primer for the detection of SNP TSC0029170
gaccgccaataa

SEQ ID NO: 319340 - DNA, 12 bp, Artificial Sequence
  Oligonucleotide primer for the detection of SNP TSC0029170
gaccgccgataa

SEQ ID NO: 319341 - DNA, 12 bp, Artificial Sequence
  Oligonucleotide primer for the detection of SNP TSC0029170
ggggtttaggtt

SEQ ID NO: 319342 - DNA, 12 bp, Artificial Sequence
  Oligonucleotide primer for the detection of SNP TSC0029171
tatttatcttcc

SEQ ID NO: 319343 - DNA, 12 bp, Artificial Sequence
  Oligonucleotide primer for the detection of SNP TSC0029171
gtattggaatgg

SEQ ID NO: 319344 - DNA, 12 bp, Artificial Sequence
  Oligonucleotide primer for the detection of SNP TSC0029171
acactaaaataa

SEQ ID NO: 319345 - DNA, 12 bp, Artificial Sequence
  Oligonucleotide primer for the detection of SNP TSC0029172
ataactaacaca

SEQ ID NO: 319346 - DNA, 12 bp, Artificial Sequence
  Oligonucleotide primer for the detection of SNP TSC0029172
aatgaggatttt

SEQ ID NO: 319347 - DNA, 12 bp, Artificial Sequence
  Oligonucleotide primer for the detection of SNP TSC0029172
aataaaaattcc

SEQ ID NO: 319348 - DNA, 12 bp, Artificial Sequence
  Oligonucleotide primer for the detection of SNP TSC0029172
atagttgatata

SEQ ID NO: 319349 - DNA, 12 bp, Artificial Sequence
  Oligonucleotide primer for the detection of SNP TSC0029174
taataaatcaac

SEQ ID NO: 319350 - DNA, 12 bp, Artificial Sequence
  Oligonucleotide primer for the detection of SNP TSC0029174
tcctactccatc

SEQ ID NO: 319351 - DNA, 12 bp, Artificial Sequence
  Oligonucleotide primer for the detection of SNP TSC0029174
taatgaattagt

SEQ ID NO: 319352 - DNA, 12 bp, Artificial Sequence
  Oligonucleotide primer for the detection of SNP TSC0029175
atacttattaat

SEQ ID NO: 319353 - DNA, 12 bp, Artificial Sequence
  Oligonucleotide primer for the detection of SNP TSC0029175
tcttactttcca

SEQ ID NO: 319354 - DNA, 12 bp, Artificial Sequence
  Oligonucleotide primer for the detection of SNP TSC0029175
atgtttattagt

SEQ ID NO: 319355 - DNA, 12 bp, Artificial Sequence
  Oligonucleotide primer for the detection of SNP TSC0029176
acaatttactaa

SEQ ID NO: 319356 - DNA, 12 bp, Artificial Sequence
  Oligonucleotide primer for the detection of SNP TSC0029176
gtgttttttatt

SEQ ID NO: 319357 - DNA, 12 bp, Artificial Sequence
  Oligonukleotid-Primer
atacctctcacc

SEQ ID NO: 319358 - DNA, 12 bp, Artificial Sequence
  Oligonucleotide primer for the detection of SNP TSC0029176
ataatttattgg

SEQ ID NO: 319359 - DNA, 12 bp, Artificial Sequence
  Oligonucleotide primer for the detection of SNP TSC0029177
ccacccacctta

SEQ ID NO: 319360 - DNA, 12 bp, Artificial Sequence
  Oligonucleotide primer for the detection of SNP TSC0029179
aatacaatatcc

SEQ ID NO: 319361 - DNA, 12 bp, Artificial Sequence
  Oligonukleotid-Primer
aagaaggtgatg

SEQ ID NO: 319362 - DNA, 12 bp, Artificial Sequence
  Oligonucleotide primer for the detection of SNP TSC0029180
taattctcttaa

SEQ ID NO: 319363 - DNA, 12 bp, Artificial Sequence
  Oligonucleotide primer for the detection of SNP TSC0029180
taaatttttggg

SEQ ID NO: 319364 - DNA, 12 bp, Artificial Sequence
  Oligonucleotide primer for the detection of SNP TSC0029180
caaactcctaaa

SEQ ID NO: 319365 - DNA, 12 bp, Artificial Sequence
  Oligonukleotid-Primer
actatcctcttc

SEQ ID NO: 319366 - DNA, 12 bp, Artificial Sequence
  Oligonucleotide primer for the detection of SNP TSC0029181
ttatttatagaa

SEQ ID NO: 319367 - DNA, 12 bp, Artificial Sequence
  Oligonucleotide primer for the detection of SNP TSC0029182
attttagttata

SEQ ID NO: 319368 - DNA, 12 bp, Artificial Sequence
  Oligonucleotide primer for the detection of SNP TSC0029183
aattaaatccaa

SEQ ID NO: 319369 - DNA, 12 bp, Artificial Sequence
  Oligonukleotid-Primer
ttaaaaaatata

SEQ ID NO: 319370 - DNA, 12 bp, Artificial Sequence
  Oligonucleotide primer for the detection of SNP TSC0029183
tcaaaaaacata

SEQ ID NO: 319371 - DNA, 12 bp, Artificial Sequence
  Oligonucleotide primer for the detection of SNP TSC0029183
aattaaatttaa

SEQ ID NO: 319372 - DNA, 12 bp, Artificial Sequence
  Oligonucleotide primer for the detection of SNP TSC0029184
accaaataaaac

SEQ ID NO: 319373 - DNA, 12 bp, Artificial Sequence
  Oligonucleotide primer for the detection of SNP TSC0029184
acccaaactata

SEQ ID NO: 319374 - DNA, 12 bp, Artificial Sequence
  Oligonucleotide primer for the detection of SNP TSC0029184
attaggtggagt

SEQ ID NO: 319375 - DNA, 12 bp, Artificial Sequence
  Oligonucleotide primer for the detection of SNP TSC0029184
attaggtggagc

SEQ ID NO: 319376 - DNA, 12 bp, Artificial Sequence
  Oligonucleotide primer for the detection of SNP TSC0029185
ataaacacaatc

SEQ ID NO: 319377 - DNA, 12 bp, Artificial Sequence
  Oligonucleotide primer for the detection of SNP TSC0029185
ataaacacgatc

SEQ ID NO: 319378 - DNA, 12 bp, Artificial Sequence
  Oligonucleotide primer for the detection of SNP TSC0029186
tcatacttttat

SEQ ID NO: 319379 - DNA, 12 bp, Artificial Sequence
  Oligonucleotide primer for the detection of SNP TSC0029186
tcgtacttttat

SEQ ID NO: 319380 - DNA, 12 bp, Artificial Sequence
  Oligonucleotide primer for the detection of SNP TSC0029186
tttttaaaataa

SEQ ID NO: 319381 - DNA, 12 bp, Artificial Sequence
  Oligonucleotide primer for the detection of SNP TSC0029187
ttttaatcatct

SEQ ID NO: 319382 - DNA, 12 bp, Artificial Sequence
  Oligonucleotide primer for the detection of SNP TSC0029187
ttaagaattttt

SEQ ID NO: 319383 - DNA, 12 bp, Artificial Sequence
  Oligonucleotide primer for the detection of SNP TSC0029187
ttaaaaattttc

SEQ ID NO: 319384 - DNA, 12 bp, Artificial Sequence
  Oligonucleotide primer for the detection of SNP TSC0029188
atgaagttatat

SEQ ID NO: 319385 - DNA, 12 bp, Artificial Sequence
  Oligonucleotide primer for the detection of SNP TSC0029188
agagttaagggg

SEQ ID NO: 319386 - DNA, 12 bp, Artificial Sequence
  Oligonucleotide primer for the detection of SNP TSC0029189
tgttgtttagtt

SEQ ID NO: 319387 - DNA, 12 bp, Artificial Sequence
  Oligonucleotide primer for the detection of SNP TSC0029189
ttactacccaac

SEQ ID NO: 319388 - DNA, 12 bp, Artificial Sequence
  Oligonucleotide primer for the detection of SNP TSC0029189
ttaagtagggag

SEQ ID NO: 319389 - DNA, 12 bp, Artificial Sequence
  Oligonucleotide primer for the detection of SNP TSC0029190
taataatttttt

SEQ ID NO: 319390 - DNA, 12 bp, Artificial Sequence
  Oligonucleotide primer for the detection of SNP TSC0029190
atgttaattttt

SEQ ID NO: 319391 - DNA, 12 bp, Artificial Sequence
  Oligonucleotide primer for the detection of SNP TSC0029190
tgataatttttt

SEQ ID NO: 319392 - DNA, 12 bp, Artificial Sequence
  Oligonucleotide primer for the detection of SNP TSC0029191
aatttttggtag

SEQ ID NO: 319393 - DNA, 12 bp, Artificial Sequence
  Oligonucleotide primer for the detection of SNP TSC0029192
atcacaacatcc

SEQ ID NO: 319394 - DNA, 12 bp, Artificial Sequence
  Oligonucleotide primer for the detection of SNP TSC0029192
gtttaaatagta

SEQ ID NO: 319395 - DNA, 12 bp, Artificial Sequence
  Oligonucleotide primer for the detection of SNP TSC0029193
tttctactaaac

SEQ ID NO: 319396 - DNA, 12 bp, Artificial Sequence
  Oligonucleotide primer for the detection of SNP TSC0029193
atgggtgatatg

SEQ ID NO: 319397 - DNA, 12 bp, Artificial Sequence
  Oligonucleotide primer for the detection of SNP TSC0029193
atgggcgatatg

SEQ ID NO: 319398 - DNA, 12 bp, Artificial Sequence
  Oligonucleotide primer for the detection of SNP TSC0029193
taaacaacataa

SEQ ID NO: 319399 - DNA, 12 bp, Artificial Sequence
  Oligonucleotide primer for the detection of SNP TSC0029193
taaacgacataa

SEQ ID NO: 319400 - DNA, 12 bp, Artificial Sequence
  Oligonucleotide primer for the detection of SNP TSC0029194
taaaactaaaat

SEQ ID NO: 319401 - DNA, 12 bp, Artificial Sequence
  Oligonucleotide primer for the detection of SNP TSC0029194
ttttattttgaa

SEQ ID NO: 319402 - DNA, 12 bp, Artificial Sequence
  Oligonucleotide primer for the detection of SNP TSC0029194
ttttactctaaa

SEQ ID NO: 319403 - DNA, 12 bp, Artificial Sequence
  Oligonucleotide primer for the detection of SNP TSC0029194
taaggttggaat

SEQ ID NO: 319404 - DNA, 12 bp, Artificial Sequence
  Oligonucleotide primer for the detection of SNP TSC0029195
tttaccatatta

SEQ ID NO: 319405 - DNA, 12 bp, Artificial Sequence
  Oligonucleotide primer for the detection of SNP TSC0029195
ttgaggttagtt

SEQ ID NO: 319406 - DNA, 12 bp, Artificial Sequence
  Oligonucleotide primer for the detection of SNP TSC0029196
tcacatttaaaa

SEQ ID NO: 319407 - DNA, 12 bp, Artificial Sequence
  Oligonucleotide primer for the detection of SNP TSC0029196
aaaaaaattttg

SEQ ID NO: 319408 - DNA, 12 bp, Artificial Sequence
  Oligonucleotide primer for the detection of SNP TSC0029196
aaaaatcctaaa

SEQ ID NO: 319409 - DNA, 12 bp, Artificial Sequence
  Oligonucleotide primer for the detection of SNP TSC0029197
tatatattatta

SEQ ID NO: 319410 - DNA, 12 bp, Artificial Sequence
  Oligonucleotide primer for the detection of SNP TSC0029197
cacataccacca

SEQ ID NO: 319411 - DNA, 12 bp, Artificial Sequence
  Oligonucleotide primer for the detection of SNP TSC0029197
ataaaaagagtt

SEQ ID NO: 319412 - DNA, 12 bp, Artificial Sequence
  Oligonucleotide primer for the detection of SNP TSC0029197
ataaaaagagtc

SEQ ID NO: 319413 - DNA, 12 bp, Artificial Sequence
  Oligonucleotide primer for the detection of SNP TSC0029199
ctaattctcccc

SEQ ID NO: 319414 - DNA, 12 bp, Artificial Sequence
  Oligonucleotide primer for the detection of SNP TSC0029199
tggatggtttta

SEQ ID NO: 319415 - DNA, 12 bp, Artificial Sequence
  Oligonucleotide primer for the detection of SNP TSC0029199
cggatggtttta

SEQ ID NO: 319416 - DNA, 12 bp, Artificial Sequence
  Oligonucleotide primer for the detection of SNP TSC0029200
aattccaaacaa

SEQ ID NO: 319417 - DNA, 12 bp, Artificial Sequence
  Oligonucleotide primer for the detection of SNP TSC0029200
tgtattatatgt

SEQ ID NO: 319418 - DNA, 12 bp, Artificial Sequence
  Oligonucleotide primer for the detection of SNP TSC0029200
tatactacatac

SEQ ID NO: 319419 - DNA, 12 bp, Artificial Sequence
  Oligonucleotide primer for the detection of SNP TSC0029205
ttatatcatcta

SEQ ID NO: 319420 - DNA, 12 bp, Artificial Sequence
  Oligonucleotide primer for the detection of SNP TSC0029205
tatagataataa

SEQ ID NO: 319421 - DNA, 12 bp, Artificial Sequence
  Oligonucleotide primer for the detection of SNP TSC0029205
cataaacaataa

SEQ ID NO: 319422 - DNA, 12 bp, Artificial Sequence
  Oligonucleotide primer for the detection of SNP TSC0029205
ttatattatttg

SEQ ID NO: 319423 - DNA, 12 bp, Artificial Sequence
  Oligonucleotide primer for the detection of SNP TSC0029206
ttggttgtaggt

SEQ ID NO: 319424 - DNA, 12 bp, Artificial Sequence
  Oligonucleotide primer for the detection of SNP TSC0029206
tcggttgtaggt

SEQ ID NO: 319425 - DNA, 12 bp, Artificial Sequence
  Oligonucleotide primer for the detection of SNP TSC0029206
tcaactacaaat

SEQ ID NO: 319426 - DNA, 12 bp, Artificial Sequence
  Oligonucleotide primer for the detection of SNP TSC0029206
tcgactacaaat

SEQ ID NO: 319427 - DNA, 12 bp, Artificial Sequence
  Oligonucleotide primer for the detection of SNP TSC0029206
ggaattgaagga

SEQ ID NO: 319428 - DNA, 12 bp, Artificial Sequence
  Oligonucleotide primer for the detection of SNP TSC0029208
taactaaaataa

SEQ ID NO: 319429 - DNA, 12 bp, Artificial Sequence
  Oligonucleotide primer for the detection of SNP TSC0029208
taatctttatta

SEQ ID NO: 319430 - DNA, 12 bp, Artificial Sequence
  Oligonucleotide primer for the detection of SNP TSC0029208
agttaagatggt

SEQ ID NO: 319431 - DNA, 12 bp, Artificial Sequence
  Oligonucleotide primer for the detection of SNP TSC0029209
tctttaccaaac

SEQ ID NO: 319432 - DNA, 12 bp, Artificial Sequence
  Oligonucleotide primer for the detection of SNP TSC0029209
ttttgatattgg

SEQ ID NO: 319433 - DNA, 12 bp, Artificial Sequence
  Oligonucleotide primer for the detection of SNP TSC0029209
ttctaatactaa

SEQ ID NO: 319434 - DNA, 12 bp, Artificial Sequence
  Oligonucleotide primer for the detection of SNP TSC0029210
ccttatctttac

SEQ ID NO: 319435 - DNA, 12 bp, Artificial Sequence
  Oligonucleotide primer for the detection of SNP TSC0029210
agatagaagaag

SEQ ID NO: 319436 - DNA, 12 bp, Artificial Sequence
  Oligonucleotide primer for the detection of SNP TSC0029212
aaacttcctttt

SEQ ID NO: 319437 - DNA, 12 bp, Artificial Sequence
  Oligonucleotide primer for the detection of SNP TSC0029213
aaattaacctct

SEQ ID NO: 319438 - DNA, 12 bp, Artificial Sequence
  Oligonucleotide primer for the detection of SNP TSC0029213
taggtatttaga

SEQ ID NO: 319439 - DNA, 12 bp, Artificial Sequence
  Oligonucleotide primer for the detection of SNP TSC0029218
ctacaaccccat

SEQ ID NO: 319440 - DNA, 12 bp, Artificial Sequence
  Oligonucleotide primer for the detection of SNP TSC0029218
ctacaaccccgt

SEQ ID NO: 319441 - DNA, 12 bp, Artificial Sequence
  Oligonucleotide primer for the detection of SNP TSC0029218
tgatgtttagaa

SEQ ID NO: 319442 - DNA, 12 bp, Artificial Sequence
  Oligonucleotide primer for the detection of SNP TSC0029218
cgatgtttagaa

SEQ ID NO: 319443 - DNA, 12 bp, Artificial Sequence
  Oligonucleotide primer for the detection of SNP TSC0029219
ccacaaccctaa

SEQ ID NO: 319444 - DNA, 12 bp, Artificial Sequence
  Oligonucleotide primer for the detection of SNP TSC0029219
gtgaggtgttgt

SEQ ID NO: 319445 - DNA, 12 bp, Artificial Sequence
  Oligonucleotide primer for the detection of SNP TSC0029219
ataaaatactat

SEQ ID NO: 319446 - DNA, 12 bp, Artificial Sequence
  Oligonucleotide primer for the detection of SNP TSC0029219
attataatttta

SEQ ID NO: 319447 - DNA, 12 bp, Artificial Sequence
  Oligonucleotide primer for the detection of SNP TSC0029220
tttaatcatctc

SEQ ID NO: 319448 - DNA, 12 bp, Artificial Sequence
  Oligonucleotide primer for the detection of SNP TSC0029220
gagaagagttgg

SEQ ID NO: 319449 - DNA, 12 bp, Artificial Sequence
  Oligonucleotide primer for the detection of SNP TSC0029220
tttggttatttt

SEQ ID NO: 319450 - DNA, 12 bp, Artificial Sequence
  Oligonucleotide primer for the detection of SNP TSC0029221
aacaaaaaaaac

SEQ ID NO: 319451 - DNA, 12 bp, Artificial Sequence
  Oligonucleotide primer for the detection of SNP TSC0029221
cctcctcctcta

SEQ ID NO: 319452 - DNA, 12 bp, Artificial Sequence
  Oligonucleotide primer for the detection of SNP TSC0029221
tagggagagttt

SEQ ID NO: 319453 - DNA, 12 bp, Artificial Sequence
  Oligonucleotide primer for the detection of SNP TSC0029223
caaaactccatc

SEQ ID NO: 319454 - DNA, 12 bp, Artificial Sequence
  Oligonucleotide primer for the detection of SNP TSC0029225
acaacccccaaa

SEQ ID NO: 319455 - DNA, 12 bp, Artificial Sequence
  Oligonucleotide primer for the detection of SNP TSC0029225
tagtttttttaa

SEQ ID NO: 319456 - DNA, 12 bp, Artificial Sequence
  Oligonucleotide primer for the detection of SNP TSC0029225
caactctcccaa

SEQ ID NO: 319457 - DNA, 12 bp, Artificial Sequence
  Oligonucleotide primer for the detection of SNP TSC0029225
gtagtttttaga

SEQ ID NO: 319458 - DNA, 12 bp, Artificial Sequence
  Oligonucleotide primer for the detection of SNP TSC0029226
ttggattaagtg

SEQ ID NO: 319459 - DNA, 12 bp, Artificial Sequence
  Oligonucleotide primer for the detection of SNP TSC0029229
cctactttctcc

SEQ ID NO: 319460 - DNA, 12 bp, Artificial Sequence
  Oligonucleotide primer for the detection of SNP TSC0029229
gtaggagtaaga

SEQ ID NO: 319461 - DNA, 12 bp, Artificial Sequence
  Oligonucleotide primer for the detection of SNP TSC0029232
cctcctctcctt

SEQ ID NO: 319462 - DNA, 12 bp, Artificial Sequence
  Oligonucleotide primer for the detection of SNP TSC0029232
atgaggggaatt

SEQ ID NO: 319463 - DNA, 12 bp, Artificial Sequence
  Oligonucleotide primer for the detection of SNP TSC0029233
atacccaactcc

SEQ ID NO: 319464 - DNA, 12 bp, Artificial Sequence
  Oligonucleotide primer for the detection of SNP TSC0029233
atacccgactcc

SEQ ID NO: 319465 - DNA, 12 bp, Artificial Sequence
  Oligonucleotide primer for the detection of SNP TSC0029233
gagtattgagga

SEQ ID NO: 319466 - DNA, 12 bp, Artificial Sequence
  Oligonucleotide primer for the detection of SNP TSC0029233
gagtatcgagga

SEQ ID NO: 319467 - DNA, 12 bp, Artificial Sequence
  Oligonucleotide primer for the detection of SNP TSC0029234
atcttaactcac

SEQ ID NO: 319468 - DNA, 12 bp, Artificial Sequence
  Oligonucleotide primer for the detection of SNP TSC0029234
gtgtggtaagga

SEQ ID NO: 319469 - DNA, 12 bp, Artificial Sequence
  Oligonucleotide primer for the detection of SNP TSC0029237
aatttatggatt

SEQ ID NO: 319470 - DNA, 12 bp, Artificial Sequence
  Oligonucleotide primer for the detection of SNP TSC0029237
taaaggagaaaa

SEQ ID NO: 319471 - DNA, 12 bp, Artificial Sequence
  Oligonucleotide primer for the detection of SNP TSC0029238
ttaaagagagag

SEQ ID NO: 319472 - DNA, 12 bp, Artificial Sequence
  Oligonucleotide primer for the detection of SNP TSC0029239
attaaaatattc

SEQ ID NO: 319473 - DNA, 12 bp, Artificial Sequence
  Oligonucleotide primer for the detection of SNP TSC0029239
tatttattaaat

SEQ ID NO: 319474 - DNA, 12 bp, Artificial Sequence
  Oligonucleotide primer for the detection of SNP TSC0029239
acacctatcaaa

SEQ ID NO: 319475 - DNA, 12 bp, Artificial Sequence
  Oligonucleotide primer for the detection of SNP TSC0029239
ttgaaatatttt

SEQ ID NO: 319476 - DNA, 12 bp, Artificial Sequence
  Oligonucleotide primer for the detection of SNP TSC0029240
aaatttctacct

SEQ ID NO: 319477 - DNA, 12 bp, Artificial Sequence
  Oligonucleotide primer for the detection of SNP TSC0029240
tatgagtaaaaa

SEQ ID NO: 319478 - DNA, 12 bp, Artificial Sequence
  Oligonucleotide primer for the detection of SNP TSC0029242
aattaaattcta

SEQ ID NO: 319479 - DNA, 12 bp, Artificial Sequence
  Oligonucleotide primer for the detection of SNP TSC0029242
aaaggggatagt

SEQ ID NO: 319480 - DNA, 12 bp, Artificial Sequence
  Oligonucleotide primer for the detection of SNP TSC0029242
attaagttttgt

SEQ ID NO: 319481 - DNA, 12 bp, Artificial Sequence
  Oligonucleotide primer for the detection of SNP TSC0029247
ctacacatctta

SEQ ID NO: 319482 - DNA, 12 bp, Artificial Sequence
  Oligonucleotide primer for the detection of SNP TSC0029247
aggtttttatta

SEQ ID NO: 319483 - DNA, 12 bp, Artificial Sequence
  Oligonucleotide primer for the detection of SNP TSC0029248
aacttaaattaa

SEQ ID NO: 319484 - DNA, 12 bp, Artificial Sequence
  Oligonucleotide primer for the detection of SNP TSC0029248
ttgagtattggt

SEQ ID NO: 319485 - DNA, 12 bp, Artificial Sequence
  Oligonucleotide primer for the detection of SNP TSC0029248
taaacattaata

SEQ ID NO: 319486 - DNA, 12 bp, Artificial Sequence
  Oligonucleotide primer for the detection of SNP TSC0029248
agtttgagttga

SEQ ID NO: 319487 - DNA, 12 bp, Artificial Sequence
  Oligonucleotide primer for the detection of SNP TSC0029249
ttgattaaagta

SEQ ID NO: 319488 - DNA, 12 bp, Artificial Sequence
  Oligonucleotide primer for the detection of SNP TSC0029250
taattggttaga

SEQ ID NO: 319489 - DNA, 12 bp, Artificial Sequence
  Oligonucleotide primer for the detection of SNP TSC0029251
ctcaaactacct

SEQ ID NO: 319490 - DNA, 12 bp, Artificial Sequence
  Oligonucleotide primer for the detection of SNP TSC0029251
gagagaaattaa

SEQ ID NO: 319491 - DNA, 12 bp, Artificial Sequence
  Oligonucleotide primer for the detection of SNP TSC0029252
tttcataaaaat

SEQ ID NO: 319492 - DNA, 12 bp, Artificial Sequence
  Oligonucleotide primer for the detection of SNP TSC0029252
ttatggtggtgt

SEQ ID NO: 319493 - DNA, 12 bp, Artificial Sequence
  Oligonucleotide primer for the detection of SNP TSC0029253
aatacaaaaaac

SEQ ID NO: 319494 - DNA, 12 bp, Artificial Sequence
  Oligonucleotide primer for the detection of SNP TSC0029253
aggattatggtg

SEQ ID NO: 319495 - DNA, 12 bp, Artificial Sequence
  Oligonucleotide primer for the detection of SNP TSC0029254
aaaatttttaga

SEQ ID NO: 319496 - DNA, 12 bp, Artificial Sequence
  Oligonucleotide primer for the detection of SNP TSC0029254
aaaatctctaaa

SEQ ID NO: 319497 - DNA, 12 bp, Artificial Sequence
  Oligonucleotide primer for the detection of SNP TSC0029254
tttattttatat

SEQ ID NO: 319498 - DNA, 12 bp, Artificial Sequence
  Oligonucleotide primer for the detection of SNP TSC0029262
attttgtttagg

SEQ ID NO: 319499 - DNA, 12 bp, Artificial Sequence
  Oligonucleotide primer for the detection of SNP TSC0029262
actttacccaaa

SEQ ID NO: 319500 - DNA, 12 bp, Artificial Sequence
  Oligonucleotide primer for the detection of SNP TSC0029262
gttaggaaggtt

SEQ ID NO: 319501 - DNA, 12 bp, Artificial Sequence
  Oligonucleotide primer for the detection of SNP TSC0029263
aacaataaaact

SEQ ID NO: 319502 - DNA, 12 bp, Artificial Sequence
  Oligonucleotide primer for the detection of SNP TSC0029263
tttatggttgga

SEQ ID NO: 319503 - DNA, 12 bp, Artificial Sequence
  Oligonucleotide primer for the detection of SNP TSC0029263
tttacggttgga

SEQ ID NO: 319504 - DNA, 12 bp, Artificial Sequence
  Oligonucleotide primer for the detection of SNP TSC0029263
tccacaattaaa

SEQ ID NO: 319505 - DNA, 12 bp, Artificial Sequence
  Oligonucleotide primer for the detection of SNP TSC0029263
tccacgattaaa

SEQ ID NO: 319506 - DNA, 12 bp, Artificial Sequence
  Oligonukleotid-Primer
agtagtgaagtt

SEQ ID NO: 319507 - DNA, 12 bp, Artificial Sequence
  Oligonucleotide primer for the detection of SNP TSC0029264
aacttaaaaacc

SEQ ID NO: 319508 - DNA, 12 bp, Artificial Sequence
  Oligonucleotide primer for the detection of SNP TSC0029264
aaggaaaggaag

SEQ ID NO: 319509 - DNA, 12 bp, Artificial Sequence
  Oligonucleotide primer for the detection of SNP TSC0029264
gatttgggggtt

SEQ ID NO: 319510 - DNA, 12 bp, Artificial Sequence
  Oligonukleotid-Primer
ccataaaccccc

SEQ ID NO: 319511 - DNA, 12 bp, Artificial Sequence
  Oligonucleotide primer for the detection of SNP TSC0029265
ttaagttagtag

SEQ ID NO: 319512 - DNA, 12 bp, Artificial Sequence
  Oligonucleotide primer for the detection of SNP TSC0029265
ccaaatcaacaa

SEQ ID NO: 319513 - DNA, 12 bp, Artificial Sequence
  Oligonucleotide primer for the detection of SNP TSC0029265
ttataaattttt

SEQ ID NO: 319514 - DNA, 12 bp, Artificial Sequence
  Oligonucleotide primer for the detection of SNP TSC0029266
cctaacaataat

SEQ ID NO: 319515 - DNA, 12 bp, Artificial Sequence
  Oligonucleotide primer for the detection of SNP TSC0029266
tatttgttgtga

SEQ ID NO: 319516 - DNA, 12 bp, Artificial Sequence
  Oligonucleotide primer for the detection of SNP TSC0029266
tatttgtcgtga

SEQ ID NO: 319517 - DNA, 12 bp, Artificial Sequence
  Oligonucleotide primer for the detection of SNP TSC0029270
tatttataattt

SEQ ID NO: 319518 - DNA, 12 bp, Artificial Sequence
  Oligonucleotide primer for the detection of SNP TSC0029270
cacccacaatcc

SEQ ID NO: 319519 - DNA, 12 bp, Artificial Sequence
  Oligonucleotide primer for the detection of SNP TSC0029271
ctaaaaaataca

SEQ ID NO: 319520 - DNA, 12 bp, Artificial Sequence
  Oligonucleotide primer for the detection of SNP TSC0029271
ggttgaaaaagg

SEQ ID NO: 319521 - DNA, 12 bp, Artificial Sequence
  Oligonucleotide primer for the detection of SNP TSC0029271
ttagagagtgta

SEQ ID NO: 319522 - DNA, 12 bp, Artificial Sequence
  Oligonucleotide primer for the detection of SNP TSC0029276
tttttatatatc

SEQ ID NO: 319523 - DNA, 12 bp, Artificial Sequence
  Oligonucleotide primer for the detection of SNP TSC0029276
gatttttaaagg

SEQ ID NO: 319524 - DNA, 12 bp, Artificial Sequence
  Oligonucleotide primer for the detection of SNP TSC0029279
agagaagttttt

SEQ ID NO: 319525 - DNA, 12 bp, Artificial Sequence
  Oligonucleotide primer for the detection of SNP TSC0029280
ttagaatgttta

SEQ ID NO: 319526 - DNA, 12 bp, Artificial Sequence
  Oligonucleotide primer for the detection of SNP TSC0029280
ccaaaatatcca

SEQ ID NO: 319527 - DNA, 12 bp, Artificial Sequence
  Oligonucleotide primer for the detection of SNP TSC0029281
cacctaaataat

SEQ ID NO: 319528 - DNA, 12 bp, Artificial Sequence
  Oligonucleotide primer for the detection of SNP TSC0029281
cgcctaaataat

SEQ ID NO: 319529 - DNA, 12 bp, Artificial Sequence
  Oligonucleotide primer for the detection of SNP TSC0029281
ggattttatgtg

SEQ ID NO: 319530 - DNA, 12 bp, Artificial Sequence
  Oligonucleotide primer for the detection of SNP TSC0029281
ggattttatgcg

SEQ ID NO: 319531 - DNA, 12 bp, Artificial Sequence
  Oligonucleotide primer for the detection of SNP TSC0029282
tgggtgtgttgg

SEQ ID NO: 319532 - DNA, 12 bp, Artificial Sequence
  Oligonucleotide primer for the detection of SNP TSC0029282
cgggtgtgttgg

SEQ ID NO: 319533 - DNA, 12 bp, Artificial Sequence
  Oligonucleotide primer for the detection of SNP TSC0029282
tgggcgtgttgg

SEQ ID NO: 319534 - DNA, 12 bp, Artificial Sequence
  Oligonucleotide primer for the detection of SNP TSC0029282
tgggtgcgttgg

SEQ ID NO: 319535 - DNA, 12 bp, Artificial Sequence
  Oligonucleotide primer for the detection of SNP TSC0029282
cgggcgtgttgg

SEQ ID NO: 319536 - DNA, 12 bp, Artificial Sequence
  Oligonucleotide primer for the detection of SNP TSC0029282
cgggtgcgttgg

SEQ ID NO: 319537 - DNA, 12 bp, Artificial Sequence
  Oligonucleotide primer for the detection of SNP TSC0029282
tgggcgcgttgg

SEQ ID NO: 319538 - DNA, 12 bp, Artificial Sequence
  Oligonucleotide primer for the detection of SNP TSC0029282
cgggcgcgttgg

SEQ ID NO: 319539 - DNA, 12 bp, Artificial Sequence
  Oligonucleotide primer for the detection of SNP TSC0029288
tacaatcaacca

SEQ ID NO: 319540 - DNA, 12 bp, Artificial Sequence
  Oligonucleotide primer for the detection of SNP TSC0029288
ccaacaacccca

SEQ ID NO: 319541 - DNA, 12 bp, Artificial Sequence
  Oligonucleotide primer for the detection of SNP TSC0029288
ttgtagttagtt

SEQ ID NO: 319542 - DNA, 12 bp, Artificial Sequence
  Oligonucleotide primer for the detection of SNP TSC0029289
aacaaccccaat

SEQ ID NO: 319543 - DNA, 12 bp, Artificial Sequence
  Oligonucleotide primer for the detection of SNP TSC0029289
tttttgtagtta

SEQ ID NO: 319544 - DNA, 12 bp, Artificial Sequence
  Oligonucleotide primer for the detection of SNP TSC0029290
aaaaccccaatc

SEQ ID NO: 319545 - DNA, 12 bp, Artificial Sequence
  Oligonucleotide primer for the detection of SNP TSC0029290
aaaaccccgatc

SEQ ID NO: 319546 - DNA, 12 bp, Artificial Sequence
  Oligonucleotide primer for the detection of SNP TSC0029290
ggagagtgtgag

SEQ ID NO: 319547 - DNA, 12 bp, Artificial Sequence
  Oligonucleotide primer for the detection of SNP TSC0029290
ggagagcgtgag

SEQ ID NO: 319548 - DNA, 12 bp, Artificial Sequence
  Oligonucleotide primer for the detection of SNP TSC0029290
aaaaaacgtaaa

SEQ ID NO: 319549 - DNA, 12 bp, Artificial Sequence
  Oligonucleotide primer for the detection of SNP TSC0029290
aggattttggtt

SEQ ID NO: 319550 - DNA, 12 bp, Artificial Sequence
  Oligonucleotide primer for the detection of SNP TSC0029290
aggatttcggtt

SEQ ID NO: 319551 - DNA, 12 bp, Artificial Sequence
  Oligonucleotide primer for the detection of SNP TSC0029291
aaaattaactca

SEQ ID NO: 319552 - DNA, 12 bp, Artificial Sequence
  Oligonucleotide primer for the detection of SNP TSC0029291
gtttttataatt

SEQ ID NO: 319553 - DNA, 12 bp, Artificial Sequence
  Oligonucleotide primer for the detection of SNP TSC0029291
atctccataatt

SEQ ID NO: 319554 - DNA, 12 bp, Artificial Sequence
  Oligonucleotide primer for the detection of SNP TSC0029291
ggaattggttta

SEQ ID NO: 319555 - DNA, 12 bp, Artificial Sequence
  Oligonucleotide primer for the detection of SNP TSC0029292
aaatacacacac

SEQ ID NO: 319556 - DNA, 12 bp, Artificial Sequence
  Oligonucleotide primer for the detection of SNP TSC0029293
tttctaaaaatc

SEQ ID NO: 319557 - DNA, 12 bp, Artificial Sequence
  Oligonucleotide primer for the detection of SNP TSC0029293
atagttgttaag

SEQ ID NO: 319558 - DNA, 12 bp, Artificial Sequence
  Oligonucleotide primer for the detection of SNP TSC0029294
gggtattatttt

SEQ ID NO: 319559 - DNA, 12 bp, Artificial Sequence
  Oligonucleotide primer for the detection of SNP TSC0029294
aaacatcatctt

SEQ ID NO: 319560 - DNA, 12 bp, Artificial Sequence
  Oligonucleotide primer for the detection of SNP TSC0029294
ttataagggaat

SEQ ID NO: 319561 - DNA, 12 bp, Artificial Sequence
  Oligonucleotide primer for the detection of SNP TSC0029295
catatttattaa

SEQ ID NO: 319562 - DNA, 12 bp, Artificial Sequence
  Oligonucleotide primer for the detection of SNP TSC0029295
tttgagtttttt

SEQ ID NO: 319563 - DNA, 12 bp, Artificial Sequence
  Oligonucleotide primer for the detection of SNP TSC0029295
tttgagtttttc

SEQ ID NO: 319564 - DNA, 12 bp, Artificial Sequence
  Oligonucleotide primer for the detection of SNP TSC0029295
cttaaatttctc

SEQ ID NO: 319565 - DNA, 12 bp, Artificial Sequence
  Oligonucleotide primer for the detection of SNP TSC0029296
attataaaaacc

SEQ ID NO: 319566 - DNA, 12 bp, Artificial Sequence
  Oligonucleotide primer for the detection of SNP TSC0029296
tttggtttatta

SEQ ID NO: 319567 - DNA, 12 bp, Artificial Sequence
  Oligonucleotide primer for the detection of SNP TSC0029297
tcatttcattta

SEQ ID NO: 319568 - DNA, 12 bp, Artificial Sequence
  Oligonucleotide primer for the detection of SNP TSC0029297
tattattcataa

SEQ ID NO: 319569 - DNA, 12 bp, Artificial Sequence
  Oligonucleotide primer for the detection of SNP TSC0029297
ttattttatttg

SEQ ID NO: 319570 - DNA, 12 bp, Artificial Sequence
  Oligonucleotide primer for the detection of SNP TSC0029299
ctaattctacaa

SEQ ID NO: 319571 - DNA, 12 bp, Artificial Sequence
  Oligonucleotide primer for the detection of SNP TSC0029299
agtttgtgtgat

SEQ ID NO: 319572 - DNA, 12 bp, Artificial Sequence
  Oligonucleotide primer for the detection of SNP TSC0029299
ttaattttgtag

SEQ ID NO: 319573 - DNA, 12 bp, Artificial Sequence
  Oligonucleotide primer for the detection of SNP TSC0029300
catactccaaac

SEQ ID NO: 319574 - DNA, 12 bp, Artificial Sequence
  Oligonucleotide primer for the detection of SNP TSC0029300
tagtggttttgg

SEQ ID NO: 319575 - DNA, 12 bp, Artificial Sequence
  Oligonucleotide primer for the detection of SNP TSC0029300
caataattctaa

SEQ ID NO: 319576 - DNA, 12 bp, Artificial Sequence
  Oligonucleotide primer for the detection of SNP TSC0029300
tatgttttagat

SEQ ID NO: 319577 - DNA, 12 bp, Artificial Sequence
  Oligonucleotide primer for the detection of SNP TSC0029302
tccaatacttta

SEQ ID NO: 319578 - DNA, 12 bp, Artificial Sequence
  Oligonucleotide primer for the detection of SNP TSC0029302
agaaatatttag

SEQ ID NO: 319579 - DNA, 12 bp, Artificial Sequence
  Oligonucleotide primer for the detection of SNP TSC0029303
agaaagtaaggg

SEQ ID NO: 319580 - DNA, 12 bp, Artificial Sequence
  Oligonucleotide primer for the detection of SNP TSC0029305
caaaaactaccc

SEQ ID NO: 319581 - DNA, 12 bp, Artificial Sequence
  Oligonucleotide primer for the detection of SNP TSC0029305
cgaaaactaccc

SEQ ID NO: 319582 - DNA, 12 bp, Artificial Sequence
  Oligonucleotide primer for the detection of SNP TSC0029305
tgttggtgtagg

SEQ ID NO: 319583 - DNA, 12 bp, Artificial Sequence
  Oligonucleotide primer for the detection of SNP TSC0029305
tactaatataaa

SEQ ID NO: 319584 - DNA, 12 bp, Artificial Sequence
  Oligonucleotide primer for the detection of SNP TSC0029305
tgggagttgttt

SEQ ID NO: 319585 - DNA, 12 bp, Artificial Sequence
  Oligonucleotide primer for the detection of SNP TSC0029305
cgggagttgttt

SEQ ID NO: 319586 - DNA, 12 bp, Artificial Sequence
  Oligonucleotide primer for the detection of SNP TSC0029305
tgggagttgttc

SEQ ID NO: 319587 - DNA, 12 bp, Artificial Sequence
  Oligonucleotide primer for the detection of SNP TSC0029305
cgggagttgttc

SEQ ID NO: 319588 - DNA, 12 bp, Artificial Sequence
  Oligonucleotide primer for the detection of SNP TSC0029306
aaacaaccttca

SEQ ID NO: 319589 - DNA, 12 bp, Artificial Sequence
  Oligonucleotide primer for the detection of SNP TSC0029306
gaacaaccttca

SEQ ID NO: 319590 - DNA, 12 bp, Artificial Sequence
  Oligonucleotide primer for the detection of SNP TSC0029306
tggttagttgtg

SEQ ID NO: 319591 - DNA, 12 bp, Artificial Sequence
  Oligonucleotide primer for the detection of SNP TSC0029306
tggttagtcgtg

SEQ ID NO: 319592 - DNA, 12 bp, Artificial Sequence
  Oligonucleotide primer for the detection of SNP TSC0029306
tggttagttgcg

SEQ ID NO: 319593 - DNA, 12 bp, Artificial Sequence
  Oligonucleotide primer for the detection of SNP TSC0029306
tggttagtcgcg

SEQ ID NO: 319594 - DNA, 12 bp, Artificial Sequence
  Oligonucleotide primer for the detection of SNP TSC0029306
taatcaaccaca

SEQ ID NO: 319595 - DNA, 12 bp, Artificial Sequence
  Oligonucleotide primer for the detection of SNP TSC0029306
taatcaaccacg

SEQ ID NO: 319596 - DNA, 12 bp, Artificial Sequence
  Oligonucleotide primer for the detection of SNP TSC0029306
taatcaaccgca

SEQ ID NO: 319597 - DNA, 12 bp, Artificial Sequence
  Oligonucleotide primer for the detection of SNP TSC0029306
taatcaaccgcg

SEQ ID NO: 319598 - DNA, 12 bp, Artificial Sequence
  Oligonucleotide primer for the detection of SNP TSC0029306
tgagtagttttt

SEQ ID NO: 319599 - DNA, 12 bp, Artificial Sequence
  Oligonucleotide primer for the detection of SNP TSC0029306
cgagtagttttt

SEQ ID NO: 319600 - DNA, 12 bp, Artificial Sequence
  Oligonucleotide primer for the detection of SNP TSC0029307
actctaccactt

SEQ ID NO: 319601 - DNA, 12 bp, Artificial Sequence
  Oligonucleotide primer for the detection of SNP TSC0029307
aagattaaatag

SEQ ID NO: 319602 - DNA, 12 bp, Artificial Sequence
  Oligonucleotide primer for the detection of SNP TSC0029311
acctaaatttcc

SEQ ID NO: 319603 - DNA, 12 bp, Artificial Sequence
  Oligonucleotide primer for the detection of SNP TSC0029311
taggatattttg

SEQ ID NO: 319604 - DNA, 12 bp, Artificial Sequence
  Oligonucleotide primer for the detection of SNP TSC0029312
cccattattacc

SEQ ID NO: 319605 - DNA, 12 bp, Artificial Sequence
  Oligonucleotide primer for the detection of SNP TSC0029313
tcctcacccacc

SEQ ID NO: 319606 - DNA, 12 bp, Artificial Sequence
  Oligonucleotide primer for the detection of SNP TSC0029313
agttggggagtg

SEQ ID NO: 319607 - DNA, 12 bp, Artificial Sequence
  Oligonucleotide primer for the detection of SNP TSC0029313
agttggggagcg

SEQ ID NO: 319608 - DNA, 12 bp, Artificial Sequence
  Oligonucleotide primer for the detection of SNP TSC0029313
aactaaaaaaca

SEQ ID NO: 319609 - DNA, 12 bp, Artificial Sequence
  Oligonucleotide primer for the detection of SNP TSC0029313
aactaaaaaacg

SEQ ID NO: 319610 - DNA, 12 bp, Artificial Sequence
  Oligonucleotide primer for the detection of SNP TSC0029315
ctaatcttttat

SEQ ID NO: 319611 - DNA, 12 bp, Artificial Sequence
  Oligonucleotide primer for the detection of SNP TSC0029315
gagttataggta

SEQ ID NO: 319612 - DNA, 12 bp, Artificial Sequence
  Oligonucleotide primer for the detection of SNP TSC0029317
atcaattttttt

SEQ ID NO: 319613 - DNA, 12 bp, Artificial Sequence
  Oligonucleotide primer for the detection of SNP TSC0029317
ggatgagaattt

SEQ ID NO: 319614 - DNA, 12 bp, Artificial Sequence
  Oligonucleotide primer for the detection of SNP TSC0029317
aaataaaaattt

SEQ ID NO: 319615 - DNA, 12 bp, Artificial Sequence
  Oligonucleotide primer for the detection of SNP TSC0029317
gttaattttttt

SEQ ID NO: 319616 - DNA, 12 bp, Artificial Sequence
  Oligonucleotide primer for the detection of SNP TSC0029322
aaacactaactc

SEQ ID NO: 319617 - DNA, 12 bp, Artificial Sequence
  Oligonucleotide primer for the detection of SNP TSC0029322
ctcctacactta

SEQ ID NO: 319618 - DNA, 12 bp, Artificial Sequence
  Oligonucleotide primer for the detection of SNP TSC0029322
agatattgattt

SEQ ID NO: 319619 - DNA, 12 bp, Artificial Sequence
  Oligonucleotide primer for the detection of SNP TSC0029325
ttatttaataac

SEQ ID NO: 319620 - DNA, 12 bp, Artificial Sequence
  Oligonucleotide primer for the detection of SNP TSC0029325
gaatagttataa

SEQ ID NO: 319621 - DNA, 12 bp, Artificial Sequence
  Oligonucleotide primer for the detection of SNP TSC0029326
ttaaataaaatt

SEQ ID NO: 319622 - DNA, 12 bp, Artificial Sequence
  Oligonucleotide primer for the detection of SNP TSC0029326
attgataagaga

SEQ ID NO: 319623 - DNA, 12 bp, Artificial Sequence
  Oligonucleotide primer for the detection of SNP TSC0029327
aaatagtattag

SEQ ID NO: 319624 - DNA, 12 bp, Artificial Sequence
  Oligonucleotide primer for the detection of SNP TSC0029329
ttcacctcacac

SEQ ID NO: 319625 - DNA, 12 bp, Artificial Sequence
  Oligonucleotide primer for the detection of SNP TSC0029329
gttggatgaatg

SEQ ID NO: 319626 - DNA, 12 bp, Artificial Sequence
  Oligonucleotide primer for the detection of SNP TSC0029329
gttggatgaacg

SEQ ID NO: 319627 - DNA, 12 bp, Artificial Sequence
  Oligonucleotide primer for the detection of SNP TSC0029329
actaaataaaca

SEQ ID NO: 319628 - DNA, 12 bp, Artificial Sequence
  Oligonucleotide primer for the detection of SNP TSC0029329
actaaataaacg

SEQ ID NO: 319629 - DNA, 12 bp, Artificial Sequence
  Oligonucleotide primer for the detection of SNP TSC0029333
attatcaaacaa

SEQ ID NO: 319630 - DNA, 12 bp, Artificial Sequence
  Oligonucleotide primer for the detection of SNP TSC0029333
tcccaaccatcc

SEQ ID NO: 319631 - DNA, 12 bp, Artificial Sequence
  Oligonucleotide primer for the detection of SNP TSC0029333
gttgttaggtag

SEQ ID NO: 319632 - DNA, 12 bp, Artificial Sequence
  Oligonucleotide primer for the detection of SNP TSC0029334
acaaaaaccaat

SEQ ID NO: 319633 - DNA, 12 bp, Artificial Sequence
  Oligonucleotide primer for the detection of SNP TSC0029334
acaaaaaccgat

SEQ ID NO: 319634 - DNA, 12 bp, Artificial Sequence
  Oligonucleotide primer for the detection of SNP TSC0029334
tgttggaggtga

SEQ ID NO: 319635 - DNA, 12 bp, Artificial Sequence
  Oligonucleotide primer for the detection of SNP TSC0029334
tactaaaaataa

SEQ ID NO: 319636 - DNA, 12 bp, Artificial Sequence
  Oligonucleotide primer for the detection of SNP TSC0029334
gtaaaagttggt

SEQ ID NO: 319637 - DNA, 12 bp, Artificial Sequence
  Oligonucleotide primer for the detection of SNP TSC0029334
gtaaaagtcggt

SEQ ID NO: 319638 - DNA, 12 bp, Artificial Sequence
  Oligonucleotide primer for the detection of SNP TSC0029335
taaaaactaatt

SEQ ID NO: 319639 - DNA, 12 bp, Artificial Sequence
  Oligonucleotide primer for the detection of SNP TSC0029337
ttcctctatccc

SEQ ID NO: 319640 - DNA, 12 bp, Artificial Sequence
  Oligonucleotide primer for the detection of SNP TSC0029337
gttagggatttg

SEQ ID NO: 319641 - DNA, 12 bp, Artificial Sequence
  Oligonucleotide primer for the detection of SNP TSC0029337
atcaaaaactta

SEQ ID NO: 319642 - DNA, 12 bp, Artificial Sequence
  Oligonucleotide primer for the detection of SNP TSC0029340
tgggtaatagag

SEQ ID NO: 319643 - DNA, 12 bp, Artificial Sequence
  Oligonucleotide primer for the detection of SNP TSC0029341
tcaatacatttt

SEQ ID NO: 319644 - DNA, 12 bp, Artificial Sequence
  Oligonucleotide primer for the detection of SNP TSC0029341
tcgatacatttt

SEQ ID NO: 319645 - DNA, 12 bp, Artificial Sequence
  Oligonucleotide primer for the detection of SNP TSC0029341
ttatagttttaa

SEQ ID NO: 319646 - DNA, 12 bp, Artificial Sequence
  Oligonucleotide primer for the detection of SNP TSC0029341
ccacaacttcaa

SEQ ID NO: 319647 - DNA, 12 bp, Artificial Sequence
  Oligonucleotide primer for the detection of SNP TSC0029341
tcggtatatttt

SEQ ID NO: 319648 - DNA, 12 bp, Artificial Sequence
  Oligonucleotide primer for the detection of SNP TSC0029343
gaagtgaaggag

SEQ ID NO: 319649 - DNA, 12 bp, Artificial Sequence
  Oligonucleotide primer for the detection of SNP TSC0029344
acttcacaaaac

SEQ ID NO: 319650 - DNA, 12 bp, Artificial Sequence
  Oligonucleotide primer for the detection of SNP TSC0029344
tagtatattaaa

SEQ ID NO: 319651 - DNA, 12 bp, Artificial Sequence
  Oligonucleotide primer for the detection of SNP TSC0029345
atcatcccaact

SEQ ID NO: 319652 - DNA, 12 bp, Artificial Sequence
  Oligonucleotide primer for the detection of SNP TSC0029345
ttatttaagaag

SEQ ID NO: 319653 - DNA, 12 bp, Artificial Sequence
  Oligonucleotide primer for the detection of SNP TSC0029345
ccattcaaaaaa

SEQ ID NO: 319654 - DNA, 12 bp, Artificial Sequence
  Oligonucleotide primer for the detection of SNP TSC0029345
gttattttaatt

SEQ ID NO: 319655 - DNA, 12 bp, Artificial Sequence
  Oligonucleotide primer for the detection of SNP TSC0029347
taaacgacacaa

SEQ ID NO: 319656 - DNA, 12 bp, Artificial Sequence
  Oligonucleotide primer for the detection of SNP TSC0029347
taaacgacacga

SEQ ID NO: 319657 - DNA, 12 bp, Artificial Sequence
  Oligonucleotide primer for the detection of SNP TSC0029347
gttagatgtttc

SEQ ID NO: 319658 - DNA, 12 bp, Artificial Sequence
  Oligonucleotide primer for the detection of SNP TSC0029347
accaaatacccc

SEQ ID NO: 319659 - DNA, 12 bp, Artificial Sequence
  Oligonucleotide primer for the detection of SNP TSC0029347
ggatgatatggt

SEQ ID NO: 319660 - DNA, 12 bp, Artificial Sequence
  Oligonucleotide primer for the detection of SNP TSC0029347
ggacgatatggt

SEQ ID NO: 319661 - DNA, 12 bp, Artificial Sequence
  Oligonucleotide primer for the detection of SNP TSC0029347
ggatgatacggt

SEQ ID NO: 319662 - DNA, 12 bp, Artificial Sequence
  Oligonucleotide primer for the detection of SNP TSC0029347
ggacgatacggt

SEQ ID NO: 319663 - DNA, 12 bp, Artificial Sequence
  Oligonucleotide primer for the detection of SNP TSC0029349
ccctatctctac

SEQ ID NO: 319664 - DNA, 12 bp, Artificial Sequence
  Oligonucleotide primer for the detection of SNP TSC0029349
tttaaaattttt

SEQ ID NO: 319665 - DNA, 12 bp, Artificial Sequence
  Oligonucleotide primer for the detection of SNP TSC0029350
tggttttaagtg

SEQ ID NO: 319666 - DNA, 12 bp, Artificial Sequence
  Oligonucleotide primer for the detection of SNP TSC0029350
tggttttaagcg

SEQ ID NO: 319667 - DNA, 12 bp, Artificial Sequence
  Oligonucleotide primer for the detection of SNP TSC0029351
aactaaatcaaa

SEQ ID NO: 319668 - DNA, 12 bp, Artificial Sequence
  Oligonucleotide primer for the detection of SNP TSC0029351
gggattgtgggt

SEQ ID NO: 319669 - DNA, 12 bp, Artificial Sequence
  Oligonucleotide primer for the detection of SNP TSC0029351
agttgggttaaa

SEQ ID NO: 319670 - DNA, 12 bp, Artificial Sequence
  Oligonucleotide primer for the detection of SNP TSC0029352
acgcataaaaaa

SEQ ID NO: 319671 - DNA, 12 bp, Artificial Sequence
  Oligonucleotide primer for the detection of SNP TSC0029352
gtatgtattttt

SEQ ID NO: 319672 - DNA, 12 bp, Artificial Sequence
  Oligonucleotide primer for the detection of SNP TSC0029352
gtacgtattttt

SEQ ID NO: 319673 - DNA, 12 bp, Artificial Sequence
  Oligonucleotide primer for the detection of SNP TSC0029352
acacacatttcc

SEQ ID NO: 319674 - DNA, 12 bp, Artificial Sequence
  Oligonucleotide primer for the detection of SNP TSC0029352
acacgcatttcc

SEQ ID NO: 319675 - DNA, 12 bp, Artificial Sequence
  Oligonucleotide primer for the detection of SNP TSC0029352
atgtataaagga

SEQ ID NO: 319676 - DNA, 12 bp, Artificial Sequence
  Oligonucleotide primer for the detection of SNP TSC0029352
acgtataaagga

SEQ ID NO: 319677 - DNA, 12 bp, Artificial Sequence
  Oligonucleotide primer for the detection of SNP TSC0029353
ccaaattcctac

SEQ ID NO: 319678 - DNA, 12 bp, Artificial Sequence
  Oligonucleotide primer for the detection of SNP TSC0029353
tggaataatgtg

SEQ ID NO: 319679 - DNA, 12 bp, Artificial Sequence
  Oligonucleotide primer for the detection of SNP TSC0029354
acctaaaattat

SEQ ID NO: 319680 - DNA, 12 bp, Artificial Sequence
  Oligonucleotide primer for the detection of SNP TSC0029354
tctattttctaa

SEQ ID NO: 319681 - DNA, 12 bp, Artificial Sequence
  Oligonucleotide primer for the detection of SNP TSC0029354
gtttaagattat

SEQ ID NO: 319682 - DNA, 12 bp, Artificial Sequence
  Oligonucleotide primer for the detection of SNP TSC0029357
ttaaaataacac

SEQ ID NO: 319683 - DNA, 12 bp, Artificial Sequence
  Oligonucleotide primer for the detection of SNP TSC0029357
gagaattttaga

SEQ ID NO: 319684 - DNA, 12 bp, Artificial Sequence
  Oligonucleotide primer for the detection of SNP TSC0029358
tcttccattcct

SEQ ID NO: 319685 - DNA, 12 bp, Artificial Sequence
  Oligonucleotide primer for the detection of SNP TSC0029358
ttcaactcacaa

SEQ ID NO: 319686 - DNA, 12 bp, Artificial Sequence
  Oligonucleotide primer for the detection of SNP TSC0029359
acaaaaccacac

SEQ ID NO: 319687 - DNA, 12 bp, Artificial Sequence
  Oligonucleotide primer for the detection of SNP TSC0029360
tattcccatttt

SEQ ID NO: 319688 - DNA, 12 bp, Artificial Sequence
  Oligonucleotide primer for the detection of SNP TSC0029360
tattcccgtttt

SEQ ID NO: 319689 - DNA, 12 bp, Artificial Sequence
  Oligonucleotide primer for the detection of SNP TSC0029362
cataaaacttcc

SEQ ID NO: 319690 - DNA, 12 bp, Artificial Sequence
  Oligonucleotide primer for the detection of SNP TSC0029363
taaactaaccac

SEQ ID NO: 319691 - DNA, 12 bp, Artificial Sequence
  Oligonucleotide primer for the detection of SNP TSC0029363
gtttagtgtgta

SEQ ID NO: 319692 - DNA, 12 bp, Artificial Sequence
  Oligonucleotide primer for the detection of SNP TSC0029363
acccaatataca

SEQ ID NO: 319693 - DNA, 12 bp, Artificial Sequence
  Oligonucleotide primer for the detection of SNP TSC0029363
gcccaatataca

SEQ ID NO: 319694 - DNA, 12 bp, Artificial Sequence
  Oligonucleotide primer for the detection of SNP TSC0029363
tgagttggttat

SEQ ID NO: 319695 - DNA, 12 bp, Artificial Sequence
  Oligonucleotide primer for the detection of SNP TSC0029366
aaaccctatttc

SEQ ID NO: 319696 - DNA, 12 bp, Artificial Sequence
  Oligonucleotide primer for the detection of SNP TSC0029367
tgattagaattt

SEQ ID NO: 319697 - DNA, 12 bp, Artificial Sequence
  Oligonucleotide primer for the detection of SNP TSC0029367
aatcaaaattta

SEQ ID NO: 319698 - DNA, 12 bp, Artificial Sequence
  Oligonucleotide primer for the detection of SNP TSC0029368
accccttttttc

SEQ ID NO: 319699 - DNA, 12 bp, Artificial Sequence
  Oligonucleotide primer for the detection of SNP TSC0029368
ggagagaagtag

SEQ ID NO: 319700 - DNA, 12 bp, Artificial Sequence
  Oligonucleotide primer for the detection of SNP TSC0029372
acacaaatatcc

SEQ ID NO: 319701 - DNA, 12 bp, Artificial Sequence
  Oligonucleotide primer for the detection of SNP TSC0029372
atatttttggtg

SEQ ID NO: 319702 - DNA, 12 bp, Artificial Sequence
  Oligonucleotide primer for the detection of SNP TSC0029372
atattttcggtg

SEQ ID NO: 319703 - DNA, 12 bp, Artificial Sequence
  Oligonucleotide primer for the detection of SNP TSC0029372
acactcccaata

SEQ ID NO: 319704 - DNA, 12 bp, Artificial Sequence
  Oligonucleotide primer for the detection of SNP TSC0029372
acactcccgata

SEQ ID NO: 319705 - DNA, 12 bp, Artificial Sequence
  Oligonucleotide primer for the detection of SNP TSC0029372
gtatagatattt

SEQ ID NO: 319706 - DNA, 12 bp, Artificial Sequence
  Oligonucleotide primer for the detection of SNP TSC0029373
taataaccaaat

SEQ ID NO: 319707 - DNA, 12 bp, Artificial Sequence
  Oligonucleotide primer for the detection of SNP TSC0029373
tttgtagaaata

SEQ ID NO: 319708 - DNA, 12 bp, Artificial Sequence
  Oligonucleotide primer for the detection of SNP TSC0029374
tcctcctaaact

SEQ ID NO: 319709 - DNA, 12 bp, Artificial Sequence
  Oligonucleotide primer for the detection of SNP TSC0029374
gatttggggagg

SEQ ID NO: 319710 - DNA, 12 bp, Artificial Sequence
  Oligonucleotide primer for the detection of SNP TSC0029375
atcccaacttct

SEQ ID NO: 319711 - DNA, 12 bp, Artificial Sequence
  Oligonucleotide primer for the detection of SNP TSC0029375
gttttgatagtt

SEQ ID NO: 319712 - DNA, 12 bp, Artificial Sequence
  Oligonucleotide primer for the detection of SNP TSC0029375
gttttgatagtc

SEQ ID NO: 319713 - DNA, 12 bp, Artificial Sequence
  Oligonucleotide primer for the detection of SNP TSC0029375
tcctaataacca

SEQ ID NO: 319714 - DNA, 12 bp, Artificial Sequence
  Oligonucleotide primer for the detection of SNP TSC0029375
tcctaataaccg

SEQ ID NO: 319715 - DNA, 12 bp, Artificial Sequence
  Oligonucleotide primer for the detection of SNP TSC0029376
atccatctccct

SEQ ID NO: 319716 - DNA, 12 bp, Artificial Sequence
  Oligonucleotide primer for the detection of SNP TSC0029376
ttgtgggtgaag

SEQ ID NO: 319717 - DNA, 12 bp, Artificial Sequence
  Oligonucleotide primer for the detection of SNP TSC0029377
tttttgatagtt

SEQ ID NO: 319718 - DNA, 12 bp, Artificial Sequence
  Oligonucleotide primer for the detection of SNP TSC0029377
tttctaataatt

SEQ ID NO: 319719 - DNA, 12 bp, Artificial Sequence
  Oligonucleotide primer for the detection of SNP TSC0029377
aggaaatatata

SEQ ID NO: 319720 - DNA, 12 bp, Artificial Sequence
  Oligonucleotide primer for the detection of SNP TSC0029378
taaatcaaatac

SEQ ID NO: 319721 - DNA, 12 bp, Artificial Sequence
  Oligonucleotide primer for the detection of SNP TSC0029378
agtaatgggttg

SEQ ID NO: 319722 - DNA, 12 bp, Artificial Sequence
  Oligonucleotide primer for the detection of SNP TSC0029378
agtaatgggtcg

SEQ ID NO: 319723 - DNA, 12 bp, Artificial Sequence
  Oligonucleotide primer for the detection of SNP TSC0029380
tacatttcaaaa

SEQ ID NO: 319724 - DNA, 12 bp, Artificial Sequence
  Oligonucleotide primer for the detection of SNP TSC0029380
ggaatttttttt

SEQ ID NO: 319725 - DNA, 12 bp, Artificial Sequence
  Oligonucleotide primer for the detection of SNP TSC0029380
aaacttttccta

SEQ ID NO: 319726 - DNA, 12 bp, Artificial Sequence
  Oligonucleotide primer for the detection of SNP TSC0029381
ttctccaaaatc

SEQ ID NO: 319727 - DNA, 12 bp, Artificial Sequence
  Oligonucleotide primer for the detection of SNP TSC0029381
gataattaggtt

SEQ ID NO: 319728 - DNA, 12 bp, Artificial Sequence
  Oligonucleotide primer for the detection of SNP TSC0029381
aacaaccaaatt

SEQ ID NO: 319729 - DNA, 12 bp, Artificial Sequence
  Oligonucleotide primer for the detection of SNP TSC0029381
ttttttagagtt

SEQ ID NO: 319730 - DNA, 12 bp, Artificial Sequence
  Oligonucleotide primer for the detection of SNP TSC0029382
ctaaccataccc

SEQ ID NO: 319731 - DNA, 12 bp, Artificial Sequence
  Oligonucleotide primer for the detection of SNP TSC0029382
taaatgtttgtg

SEQ ID NO: 319732 - DNA, 12 bp, Artificial Sequence
  Oligonucleotide primer for the detection of SNP TSC0029382
taaatgtttgcg

SEQ ID NO: 319733 - DNA, 12 bp, Artificial Sequence
  Oligonucleotide primer for the detection of SNP TSC0029383
attattttgttg

SEQ ID NO: 319734 - DNA, 12 bp, Artificial Sequence
  Oligonucleotide primer for the detection of SNP TSC0029384
acacctcccccc

SEQ ID NO: 319735 - DNA, 12 bp, Artificial Sequence
  Oligonucleotide primer for the detection of SNP TSC0029385
taattatagttt

SEQ ID NO: 319736 - DNA, 12 bp, Artificial Sequence
  Oligonucleotide primer for the detection of SNP TSC0029385
aaacaatcacaa

SEQ ID NO: 319737 - DNA, 12 bp, Artificial Sequence
  Oligonucleotide primer for the detection of SNP TSC0029385
ataaggtgagtt

SEQ ID NO: 319738 - DNA, 12 bp, Artificial Sequence
  Oligonucleotide primer for the detection of SNP TSC0029385
ataaggtgagtc

SEQ ID NO: 319739 - DNA, 12 bp, Artificial Sequence
  Oligonucleotide primer for the detection of SNP TSC0029386
taaaataatata

SEQ ID NO: 319740 - DNA, 12 bp, Artificial Sequence
  Oligonucleotide primer for the detection of SNP TSC0029386
ttatttatatgg

SEQ ID NO: 319741 - DNA, 12 bp, Artificial Sequence
  Oligonucleotide primer for the detection of SNP TSC0029387
cattaatataat

SEQ ID NO: 319742 - DNA, 12 bp, Artificial Sequence
  Oligonucleotide primer for the detection of SNP TSC0029387
attaaatttgaa

SEQ ID NO: 319743 - DNA, 12 bp, Artificial Sequence
  Oligonucleotide primer for the detection of SNP TSC0029388
aaatacaaatat

SEQ ID NO: 319744 - DNA, 12 bp, Artificial Sequence
  Oligonucleotide primer for the detection of SNP TSC0029388
agttattttaga

SEQ ID NO: 319745 - DNA, 12 bp, Artificial Sequence
  Oligonucleotide primer for the detection of SNP TSC0029388
aaccattttaaa

SEQ ID NO: 319746 - DNA, 12 bp, Artificial Sequence
  Oligonucleotide primer for the detection of SNP TSC0029388
gaatataaatgt

SEQ ID NO: 319747 - DNA, 12 bp, Artificial Sequence
  Oligonucleotide primer for the detection of SNP TSC0029389
aaggaaaaatta

SEQ ID NO: 319748 - DNA, 12 bp, Artificial Sequence
  Oligonucleotide primer for the detection of SNP TSC0029390
aaaatcacacca

SEQ ID NO: 319749 - DNA, 12 bp, Artificial Sequence
  Oligonucleotide primer for the detection of SNP TSC0029390
aaaatcacgcca

SEQ ID NO: 319750 - DNA, 12 bp, Artificial Sequence
  Oligonucleotide primer for the detection of SNP TSC0029390
aaaatcgcacca

SEQ ID NO: 319751 - DNA, 12 bp, Artificial Sequence
  Oligonucleotide primer for the detection of SNP TSC0029390
gaaatcacacca

SEQ ID NO: 319752 - DNA, 12 bp, Artificial Sequence
  Oligonucleotide primer for the detection of SNP TSC0029390
aaaatcgcgcca

SEQ ID NO: 319753 - DNA, 12 bp, Artificial Sequence
  Oligonucleotide primer for the detection of SNP TSC0029390
gaaatcacgcca

SEQ ID NO: 319754 - DNA, 12 bp, Artificial Sequence
  Oligonucleotide primer for the detection of SNP TSC0029390
gaaatcgcacca

SEQ ID NO: 319755 - DNA, 12 bp, Artificial Sequence
  Oligonucleotide primer for the detection of SNP TSC0029390
gaaatcgcgcca

SEQ ID NO: 319756 - DNA, 12 bp, Artificial Sequence
  Oligonucleotide primer for the detection of SNP TSC0029390
caaacttcatta

SEQ ID NO: 319757 - DNA, 12 bp, Artificial Sequence
  Oligonucleotide primer for the detection of SNP TSC0029390
gattgtgttatt

SEQ ID NO: 319758 - DNA, 12 bp, Artificial Sequence
  Oligonucleotide primer for the detection of SNP TSC0029390
gatcgtgttatt

SEQ ID NO: 319759 - DNA, 12 bp, Artificial Sequence
  Oligonucleotide primer for the detection of SNP TSC0029390
gattgcgttatt

SEQ ID NO: 319760 - DNA, 12 bp, Artificial Sequence
  Oligonucleotide primer for the detection of SNP TSC0029390
gatcgcgttatt

SEQ ID NO: 319761 - DNA, 12 bp, Artificial Sequence
  Oligonucleotide primer for the detection of SNP TSC0029390
gattgtgttatc

SEQ ID NO: 319762 - DNA, 12 bp, Artificial Sequence
  Oligonucleotide primer for the detection of SNP TSC0029390
gatcgtgttatc

SEQ ID NO: 319763 - DNA, 12 bp, Artificial Sequence
  Oligonucleotide primer for the detection of SNP TSC0029390
gattgcgttatc

SEQ ID NO: 319764 - DNA, 12 bp, Artificial Sequence
  Oligonucleotide primer for the detection of SNP TSC0029390
gatcgcgttatc

SEQ ID NO: 319765 - DNA, 12 bp, Artificial Sequence
  Oligonucleotide primer for the detection of SNP TSC0029391
acaacaaattcc

SEQ ID NO: 319766 - DNA, 12 bp, Artificial Sequence
  Oligonucleotide primer for the detection of SNP TSC0029391
taggggttagaa

SEQ ID NO: 319767 - DNA, 12 bp, Artificial Sequence
  Oligonucleotide primer for the detection of SNP TSC0029392
gtatggttggtt

SEQ ID NO: 319768 - DNA, 12 bp, Artificial Sequence
  Oligonucleotide primer for the detection of SNP TSC0029392
gtacggttggtt

SEQ ID NO: 319769 - DNA, 12 bp, Artificial Sequence
  Oligonucleotide primer for the detection of SNP TSC0029392
acacaattaatc

SEQ ID NO: 319770 - DNA, 12 bp, Artificial Sequence
  Oligonucleotide primer for the detection of SNP TSC0029392
acacgattaatc

SEQ ID NO: 319771 - DNA, 12 bp, Artificial Sequence
  Oligonucleotide primer for the detection of SNP TSC0029396
actctccacctc

SEQ ID NO: 319772 - DNA, 12 bp, Artificial Sequence
  Oligonucleotide primer for the detection of SNP TSC0029396
aaatgttaatag

SEQ ID NO: 319773 - DNA, 12 bp, Artificial Sequence
  Oligonucleotide primer for the detection of SNP TSC0029397
taaatatctata

SEQ ID NO: 319774 - DNA, 12 bp, Artificial Sequence
  Oligonucleotide primer for the detection of SNP TSC0029397
aataaactcccc

SEQ ID NO: 319775 - DNA, 12 bp, Artificial Sequence
  Oligonucleotide primer for the detection of SNP TSC0029397
atagatatttat

SEQ ID NO: 319776 - DNA, 12 bp, Artificial Sequence
  Oligonucleotide primer for the detection of SNP TSC0029398
ttccaaccttct

SEQ ID NO: 319777 - DNA, 12 bp, Artificial Sequence
  Oligonucleotide primer for the detection of SNP TSC0029398
tggatatttgtg

SEQ ID NO: 319778 - DNA, 12 bp, Artificial Sequence
  Oligonucleotide primer for the detection of SNP TSC0029399
caaactactatc

SEQ ID NO: 319779 - DNA, 12 bp, Artificial Sequence
  Oligonucleotide primer for the detection of SNP TSC0029399
agtgatttgtga

SEQ ID NO: 319780 - DNA, 12 bp, Artificial Sequence
  Oligonucleotide primer for the detection of SNP TSC0029401
acatacatctta

SEQ ID NO: 319781 - DNA, 12 bp, Artificial Sequence
  Oligonucleotide primer for the detection of SNP TSC0029401
acatacgtctta

SEQ ID NO: 319782 - DNA, 12 bp, Artificial Sequence
  Oligonucleotide primer for the detection of SNP TSC0029401
ttaaaaatttcc

SEQ ID NO: 319783 - DNA, 12 bp, Artificial Sequence
  Oligonucleotide primer for the detection of SNP TSC0029401
atatacgtttta

SEQ ID NO: 319784 - DNA, 12 bp, Artificial Sequence
  Oligonucleotide primer for the detection of SNP TSC0029402
ttacaaactact

SEQ ID NO: 319785 - DNA, 12 bp, Artificial Sequence
  Oligonukleotid-Primer
ctctcaaaccta

SEQ ID NO: 319786 - DNA, 12 bp, Artificial Sequence
  Oligonucleotide primer for the detection of SNP TSC0029402
ttgtaggttgtt

SEQ ID NO: 319787 - DNA, 12 bp, Artificial Sequence
  Oligonucleotide primer for the detection of SNP TSC0029403
ttagattttgtg

SEQ ID NO: 319788 - DNA, 12 bp, Artificial Sequence
  Oligonucleotide primer for the detection of SNP TSC0029403
ttagatttcgtg

SEQ ID NO: 319789 - DNA, 12 bp, Artificial Sequence
  Oligonucleotide primer for the detection of SNP TSC0029403
ccaaacctcata

SEQ ID NO: 319790 - DNA, 12 bp, Artificial Sequence
  Oligonucleotide primer for the detection of SNP TSC0029403
ccaaacctcgta

SEQ ID NO: 319791 - DNA, 12 bp, Artificial Sequence
  Oligonucleotide primer for the detection of SNP TSC0029403
agagttggggag

SEQ ID NO: 319792 - DNA, 12 bp, Artificial Sequence
  Oligonucleotide primer for the detection of SNP TSC0029404
cttactccctcc

SEQ ID NO: 319793 - DNA, 12 bp, Artificial Sequence
  Oligonucleotide primer for the detection of SNP TSC0029404
agggatttgagg

SEQ ID NO: 319794 - DNA, 12 bp, Artificial Sequence
  Oligonucleotide primer for the detection of SNP TSC0029404
agggattcgagg

SEQ ID NO: 319795 - DNA, 12 bp, Artificial Sequence
  Oligonucleotide primer for the detection of SNP TSC0029405
acacaatataat

SEQ ID NO: 319796 - DNA, 12 bp, Artificial Sequence
  Oligonucleotide primer for the detection of SNP TSC0029405
tttttagttatg

SEQ ID NO: 319797 - DNA, 12 bp, Artificial Sequence
  Oligonucleotide primer for the detection of SNP TSC0029405
tttttagttacg

SEQ ID NO: 319798 - DNA, 12 bp, Artificial Sequence
  Oligonucleotide primer for the detection of SNP TSC0029406
ttaattaaaaac

SEQ ID NO: 319799 - DNA, 12 bp, Artificial Sequence
  Oligonucleotide primer for the detection of SNP TSC0029406
agttatgagata

SEQ ID NO: 319800 - DNA, 12 bp, Artificial Sequence
  Oligonucleotide primer for the detection of SNP TSC0029406
agttacgagata

SEQ ID NO: 319801 - DNA, 12 bp, Artificial Sequence
  Oligonucleotide primer for the detection of SNP TSC0029407
atatacctaatt

SEQ ID NO: 319802 - DNA, 12 bp, Artificial Sequence
  Oligonucleotide primer for the detection of SNP TSC0029407
ataataaagaaa

SEQ ID NO: 319803 - DNA, 12 bp, Artificial Sequence
  Oligonucleotide primer for the detection of SNP TSC0029412
catatttcatat

SEQ ID NO: 319804 - DNA, 12 bp, Artificial Sequence
  Oligonucleotide primer for the detection of SNP TSC0029412
catatttcgtat

SEQ ID NO: 319805 - DNA, 12 bp, Artificial Sequence
  Oligonucleotide primer for the detection of SNP TSC0029412
ggttaattattg

SEQ ID NO: 319806 - DNA, 12 bp, Artificial Sequence
  Oligonucleotide primer for the detection of SNP TSC0029414
ccctatccactc

SEQ ID NO: 319807 - DNA, 12 bp, Artificial Sequence
  Oligonucleotide primer for the detection of SNP TSC0029414
gtaggaggtggg

SEQ ID NO: 319808 - DNA, 12 bp, Artificial Sequence
  Oligonucleotide primer for the detection of SNP TSC0029417
acatttccactt

SEQ ID NO: 319809 - DNA, 12 bp, Artificial Sequence
  Oligonucleotide primer for the detection of SNP TSC0029418
tataaacaatac

SEQ ID NO: 319810 - DNA, 12 bp, Artificial Sequence
  Oligonucleotide primer for the detection of SNP TSC0029418
tataattttagg

SEQ ID NO: 319811 - DNA, 12 bp, Artificial Sequence
  Oligonucleotide primer for the detection of SNP TSC0029422
taaaaaaatcaa

SEQ ID NO: 319812 - DNA, 12 bp, Artificial Sequence
  Oligonucleotide primer for the detection of SNP TSC0029422
aattttttttgt

SEQ ID NO: 319813 - DNA, 12 bp, Artificial Sequence
  Oligonucleotide primer for the detection of SNP TSC0029422
aactccttttac

SEQ ID NO: 319814 - DNA, 12 bp, Artificial Sequence
  Oligonucleotide primer for the detection of SNP TSC0029422
tgagaggattag

SEQ ID NO: 319815 - DNA, 12 bp, Artificial Sequence
  Oligonucleotide primer for the detection of SNP TSC0029423
acacttaacaac

SEQ ID NO: 319816 - DNA, 12 bp, Artificial Sequence
  Oligonucleotide primer for the detection of SNP TSC0029423
tttataaagtag

SEQ ID NO: 319817 - DNA, 12 bp, Artificial Sequence
  Oligonucleotide primer for the detection of SNP TSC0029424
aatacttaaaac

SEQ ID NO: 319818 - DNA, 12 bp, Artificial Sequence
  Oligonucleotide primer for the detection of SNP TSC0029425
cttactctctac

SEQ ID NO: 319819 - DNA, 12 bp, Artificial Sequence
  Oligonucleotide primer for the detection of SNP TSC0029425
gttgggaagtag

SEQ ID NO: 319820 - DNA, 12 bp, Artificial Sequence
  Oligonucleotide primer for the detection of SNP TSC0029426
ctccacttataa

SEQ ID NO: 319821 - DNA, 12 bp, Artificial Sequence
  Oligonucleotide primer for the detection of SNP TSC0029426
atatagttggaa

SEQ ID NO: 319822 - DNA, 12 bp, Artificial Sequence
  Oligonucleotide primer for the detection of SNP TSC0029426
acacaattaaaa

SEQ ID NO: 319823 - DNA, 12 bp, Artificial Sequence
  Oligonucleotide primer for the detection of SNP TSC0029427
caatcaaacatt

SEQ ID NO: 319824 - DNA, 12 bp, Artificial Sequence
  Oligonucleotide primer for the detection of SNP TSC0029427
caatcgaacatt

SEQ ID NO: 319825 - DNA, 12 bp, Artificial Sequence
  Oligonucleotide primer for the detection of SNP TSC0029427
ttatgagtatta

SEQ ID NO: 319826 - DNA, 12 bp, Artificial Sequence
  Oligonucleotide primer for the detection of SNP TSC0029428
atcaaaataaat

SEQ ID NO: 319827 - DNA, 12 bp, Artificial Sequence
  Oligonucleotide primer for the detection of SNP TSC0029431
tcctaaatccca

SEQ ID NO: 319828 - DNA, 12 bp, Artificial Sequence
  Oligonucleotide primer for the detection of SNP TSC0029431
ggagtttttttg

SEQ ID NO: 319829 - DNA, 12 bp, Artificial Sequence
  Oligonucleotide primer for the detection of SNP TSC0029434
acaataataaaa

SEQ ID NO: 319830 - DNA, 12 bp, Artificial Sequence
  Oligonucleotide primer for the detection of SNP TSC0029434
tgtagtatttgt

SEQ ID NO: 319831 - DNA, 12 bp, Artificial Sequence
  Oligonucleotide primer for the detection of SNP TSC0029434
agtagtggtaag

SEQ ID NO: 319832 - DNA, 12 bp, Artificial Sequence
  Oligonucleotide primer for the detection of SNP TSC0029435
tatattatttta

SEQ ID NO: 319833 - DNA, 12 bp, Artificial Sequence
  Oligonucleotide primer for the detection of SNP TSC0029435
tgggaatgtagt

SEQ ID NO: 319834 - DNA, 12 bp, Artificial Sequence
  Oligonucleotide primer for the detection of SNP TSC0029435
tgtgttgttttg

SEQ ID NO: 319835 - DNA, 12 bp, Artificial Sequence
  Oligonucleotide primer for the detection of SNP TSC0029437
aattctattctc

SEQ ID NO: 319836 - DNA, 12 bp, Artificial Sequence
  Oligonucleotide primer for the detection of SNP TSC0029437
ttttgtgtataa

SEQ ID NO: 319837 - DNA, 12 bp, Artificial Sequence
  Oligonucleotide primer for the detection of SNP TSC0029438
tatataatacac

SEQ ID NO: 319838 - DNA, 12 bp, Artificial Sequence
  Oligonucleotide primer for the detection of SNP TSC0029438
tatgtttagggt

SEQ ID NO: 319839 - DNA, 12 bp, Artificial Sequence
  Oligonucleotide primer for the detection of SNP TSC0029438
tatgtttagggc

SEQ ID NO: 319840 - DNA, 12 bp, Artificial Sequence
  Oligonucleotide primer for the detection of SNP TSC0029438
ccatattcaaaa

SEQ ID NO: 319841 - DNA, 12 bp, Artificial Sequence
  Oligonucleotide primer for the detection of SNP TSC0029438
tgtgtggtgtat

SEQ ID NO: 319842 - DNA, 12 bp, Artificial Sequence
  Oligonucleotide primer for the detection of SNP TSC0029439
ttaaaaaacaat

SEQ ID NO: 319843 - DNA, 12 bp, Artificial Sequence
  Oligonucleotide primer for the detection of SNP TSC0029439
taaggttataag

SEQ ID NO: 319844 - DNA, 12 bp, Artificial Sequence
  Oligonucleotide primer for the detection of SNP TSC0029440
taaggttttgtt

SEQ ID NO: 319845 - DNA, 12 bp, Artificial Sequence
  Oligonucleotide primer for the detection of SNP TSC0029440
aaaattctatca

SEQ ID NO: 319846 - DNA, 12 bp, Artificial Sequence
  Oligonucleotide primer for the detection of SNP TSC0029440
atagagattttt

SEQ ID NO: 319847 - DNA, 12 bp, Artificial Sequence
  Oligonucleotide primer for the detection of SNP TSC0029441
ctaataccccta

SEQ ID NO: 319848 - DNA, 12 bp, Artificial Sequence
  Oligonucleotide primer for the detection of SNP TSC0029441
tattttattttt

SEQ ID NO: 319849 - DNA, 12 bp, Artificial Sequence
  Oligonucleotide primer for the detection of SNP TSC0029441
catctcactccc

SEQ ID NO: 319850 - DNA, 12 bp, Artificial Sequence
  Oligonucleotide primer for the detection of SNP TSC0029441
ttagtgtttttg

SEQ ID NO: 319851 - DNA, 12 bp, Artificial Sequence
  Oligonucleotide primer for the detection of SNP TSC0029442
cttataaaatat

SEQ ID NO: 319852 - DNA, 12 bp, Artificial Sequence
  Oligonucleotide primer for the detection of SNP TSC0029442
ggttagtaatta

SEQ ID NO: 319853 - DNA, 12 bp, Artificial Sequence
  Oligonucleotide primer for the detection of SNP TSC0029443
aataaactactc

SEQ ID NO: 319854 - DNA, 12 bp, Artificial Sequence
  Oligonucleotide primer for the detection of SNP TSC0029443
ttaaaattaaat

SEQ ID NO: 319855 - DNA, 12 bp, Artificial Sequence
  Oligonucleotide primer for the detection of SNP TSC0029443
attaaaaccaaa

SEQ ID NO: 319856 - DNA, 12 bp, Artificial Sequence
  Oligonucleotide primer for the detection of SNP TSC0029443
gatgaattgttt

SEQ ID NO: 319857 - DNA, 12 bp, Artificial Sequence
  Oligonucleotide primer for the detection of SNP TSC0029443
gatgaattgttc

SEQ ID NO: 319858 - DNA, 12 bp, Artificial Sequence
  Oligonucleotide primer for the detection of SNP TSC0029444
ataattctacat

SEQ ID NO: 319859 - DNA, 12 bp, Artificial Sequence
  Oligonucleotide primer for the detection of SNP TSC0029444
tagttattttta

SEQ ID NO: 319860 - DNA, 12 bp, Artificial Sequence
  Oligonucleotide primer for the detection of SNP TSC0029444
caattaccttta

SEQ ID NO: 319861 - DNA, 12 bp, Artificial Sequence
  Oligonucleotide primer for the detection of SNP TSC0029444
gtgattttatat

SEQ ID NO: 319862 - DNA, 12 bp, Artificial Sequence
  Oligonucleotide primer for the detection of SNP TSC0029445
ccttaatactat

SEQ ID NO: 319863 - DNA, 12 bp, Artificial Sequence
  Oligonucleotide primer for the detection of SNP TSC0029445
gatgaagtgaaa

SEQ ID NO: 319864 - DNA, 12 bp, Artificial Sequence
  Oligonucleotide primer for the detection of SNP TSC0029446
aaaaatttattt

SEQ ID NO: 319865 - DNA, 12 bp, Artificial Sequence
  Oligonucleotide primer for the detection of SNP TSC0029446
aaaaaataatga

SEQ ID NO: 319866 - DNA, 12 bp, Artificial Sequence
  Oligonucleotide primer for the detection of SNP TSC0029447
ctatacttaata

SEQ ID NO: 319867 - DNA, 12 bp, Artificial Sequence
  Oligonucleotide primer for the detection of SNP TSC0029447
aaaatgatattt

SEQ ID NO: 319868 - DNA, 12 bp, Artificial Sequence
  Oligonucleotide primer for the detection of SNP TSC0029447
aaaacgatattt

SEQ ID NO: 319869 - DNA, 12 bp, Artificial Sequence
  Oligonucleotide primer for the detection of SNP TSC0029447
aaaacaacattt

SEQ ID NO: 319870 - DNA, 12 bp, Artificial Sequence
  Oligonucleotide primer for the detection of SNP TSC0029447
aaaacgacattt

SEQ ID NO: 319871 - DNA, 12 bp, Artificial Sequence
  Oligonucleotide primer for the detection of SNP TSC0029447
ttatgtttggtg

SEQ ID NO: 319872 - DNA, 12 bp, Artificial Sequence
  Oligonucleotide primer for the detection of SNP TSC0029448
ttactatcccca

SEQ ID NO: 319873 - DNA, 12 bp, Artificial Sequence
  Oligonucleotide primer for the detection of SNP TSC0029448
actatcctctta

SEQ ID NO: 319874 - DNA, 12 bp, Artificial Sequence
  Oligonucleotide primer for the detection of SNP TSC0029448
gttgttattttt

SEQ ID NO: 319875 - DNA, 12 bp, Artificial Sequence
  Oligonucleotide primer for the detection of SNP TSC0029449
aacaaaaaccaa

SEQ ID NO: 319876 - DNA, 12 bp, Artificial Sequence
  Oligonucleotide primer for the detection of SNP TSC0029449
agatgaggagtt

SEQ ID NO: 319877 - DNA, 12 bp, Artificial Sequence
  Oligonucleotide primer for the detection of SNP TSC0029449
ggtagaagttag

SEQ ID NO: 319878 - DNA, 12 bp, Artificial Sequence
  Oligonucleotide primer for the detection of SNP TSC0029450
tttattctatct

SEQ ID NO: 319879 - DNA, 12 bp, Artificial Sequence
  Oligonucleotide primer for the detection of SNP TSC0029451
acatttcccaac

SEQ ID NO: 319880 - DNA, 12 bp, Artificial Sequence
  Oligonucleotide primer for the detection of SNP TSC0029451
aggttggttaaa

SEQ ID NO: 319881 - DNA, 12 bp, Artificial Sequence
  Oligonucleotide primer for the detection of SNP TSC0029451
aaactaatcaaa

SEQ ID NO: 319882 - DNA, 12 bp, Artificial Sequence
  Oligonucleotide primer for the detection of SNP TSC0029451
gtattttttagt

SEQ ID NO: 319883 - DNA, 12 bp, Artificial Sequence
  Oligonucleotide primer for the detection of SNP TSC0029452
tattcctaactt

SEQ ID NO: 319884 - DNA, 12 bp, Artificial Sequence
  Oligonucleotide primer for the detection of SNP TSC0029452
attagaaataag

SEQ ID NO: 319885 - DNA, 12 bp, Artificial Sequence
  Oligonucleotide primer for the detection of SNP TSC0029452
actaaaaacaaa

SEQ ID NO: 319886 - DNA, 12 bp, Artificial Sequence
  Oligonucleotide primer for the detection of SNP TSC0029453
attattaaacaa

SEQ ID NO: 319887 - DNA, 12 bp, Artificial Sequence
  Oligonucleotide primer for the detection of SNP TSC0029453
tttttagaattt

SEQ ID NO: 319888 - DNA, 12 bp, Artificial Sequence
  Oligonucleotide primer for the detection of SNP TSC0029453
ttcccaaaactc

SEQ ID NO: 319889 - DNA, 12 bp, Artificial Sequence
  Oligonucleotide primer for the detection of SNP TSC0029453
ttgttgggtaat

SEQ ID NO: 319890 - DNA, 12 bp, Artificial Sequence
  Oligonucleotide primer for the detection of SNP TSC0029453
ttgttgggtaac

SEQ ID NO: 319891 - DNA, 12 bp, Artificial Sequence
  Oligonucleotide primer for the detection of SNP TSC0029454
cctatcctttac

SEQ ID NO: 319892 - DNA, 12 bp, Artificial Sequence
  Oligonucleotide primer for the detection of SNP TSC0029454
gtagtgtttttt

SEQ ID NO: 319893 - DNA, 12 bp, Artificial Sequence
  Oligonucleotide primer for the detection of SNP TSC0029454
gtagtgtttttc

SEQ ID NO: 319894 - DNA, 12 bp, Artificial Sequence
  Oligonucleotide primer for the detection of SNP TSC0029454
acaatactcccc

SEQ ID NO: 319895 - DNA, 12 bp, Artificial Sequence
  Oligonucleotide primer for the detection of SNP TSC0029454
gcaatactcccc

SEQ ID NO: 319896 - DNA, 12 bp, Artificial Sequence
  Oligonucleotide primer for the detection of SNP TSC0029455
ttctaaaaatac

SEQ ID NO: 319897 - DNA, 12 bp, Artificial Sequence
  Oligonucleotide primer for the detection of SNP TSC0029455
attaatattagg

SEQ ID NO: 319898 - DNA, 12 bp, Artificial Sequence
  Oligonucleotide primer for the detection of SNP TSC0029456
ttagcgtttttg

SEQ ID NO: 319899 - DNA, 12 bp, Artificial Sequence
  Oligonucleotide primer for the detection of SNP TSC0029459
aacccccacccc

SEQ ID NO: 319900 - DNA, 12 bp, Artificial Sequence
  Oligonucleotide primer for the detection of SNP TSC0029459
tgtaggggtgtg

SEQ ID NO: 319901 - DNA, 12 bp, Artificial Sequence
  Oligonucleotide primer for the detection of SNP TSC0029459
tgtaggggtgcg

SEQ ID NO: 319902 - DNA, 12 bp, Artificial Sequence
  Oligonukleotid-Primer
tacaaaaataca

SEQ ID NO: 319903 - DNA, 12 bp, Artificial Sequence
  Oligonucleotide primer for the detection of SNP TSC0029459
tacaaaaatacg

SEQ ID NO: 319904 - DNA, 12 bp, Artificial Sequence
  Oligonucleotide primer for the detection of SNP TSC0029459
gatttttatttt

SEQ ID NO: 319905 - DNA, 12 bp, Artificial Sequence
  Oligonucleotide primer for the detection of SNP TSC0029460
ttgtcgtttttt

SEQ ID NO: 319906 - DNA, 12 bp, Artificial Sequence
  Oligonucleotide primer for the detection of SNP TSC0029460
ttaccatttttt

SEQ ID NO: 319907 - DNA, 12 bp, Artificial Sequence
  Oligonucleotide primer for the detection of SNP TSC0029460
ttaccgtttttt

SEQ ID NO: 319908 - DNA, 12 bp, Artificial Sequence
  Oligonucleotide primer for the detection of SNP TSC0029460
ttaaaatagtaa

SEQ ID NO: 319909 - DNA, 12 bp, Artificial Sequence
  Oligonucleotide primer for the detection of SNP TSC0029461
ataacaacactt

SEQ ID NO: 319910 - DNA, 12 bp, Artificial Sequence
  Oligonucleotide primer for the detection of SNP TSC0029461
aaagtgtaaggg

SEQ ID NO: 319911 - DNA, 12 bp, Artificial Sequence
  Oligonucleotide primer for the detection of SNP TSC0029462
actcatatatat

SEQ ID NO: 319912 - DNA, 12 bp, Artificial Sequence
  Oligonucleotide primer for the detection of SNP TSC0029462
ttattattgtag

SEQ ID NO: 319913 - DNA, 12 bp, Artificial Sequence
  Oligonucleotide primer for the detection of SNP TSC0029463
actactataaac

SEQ ID NO: 319914 - DNA, 12 bp, Artificial Sequence
  Oligonucleotide primer for the detection of SNP TSC0029463
ataattgtttag

SEQ ID NO: 319915 - DNA, 12 bp, Artificial Sequence
  Oligonucleotide primer for the detection of SNP TSC0029466
ttaaacataaat

SEQ ID NO: 319916 - DNA, 12 bp, Artificial Sequence
  Oligonucleotide primer for the detection of SNP TSC0029466
tgagaggtgttg

SEQ ID NO: 319917 - DNA, 12 bp, Artificial Sequence
  Oligonucleotide primer for the detection of SNP TSC0029467
tgaatataatta

SEQ ID NO: 319918 - DNA, 12 bp, Artificial Sequence
  Oligonucleotide primer for the detection of SNP TSC0029471
aaacaatttata

SEQ ID NO: 319919 - DNA, 12 bp, Artificial Sequence
  Oligonucleotide primer for the detection of SNP TSC0029471
aaataacatata

SEQ ID NO: 319920 - DNA, 12 bp, Artificial Sequence
  Oligonucleotide primer for the detection of SNP TSC0029471
aaagtaatttat

SEQ ID NO: 319921 - DNA, 12 bp, Artificial Sequence
  Oligonucleotide primer for the detection of SNP TSC0029472
cttacttatttt

SEQ ID NO: 319922 - DNA, 12 bp, Artificial Sequence
  Oligonucleotide primer for the detection of SNP TSC0029472
tagtataaattg

SEQ ID NO: 319923 - DNA, 12 bp, Artificial Sequence
  Oligonucleotide primer for the detection of SNP TSC0029473
aaccacctttac

SEQ ID NO: 319924 - DNA, 12 bp, Artificial Sequence
  Oligonucleotide primer for the detection of SNP TSC0029473
atgtatgtatgg

SEQ ID NO: 319925 - DNA, 12 bp, Artificial Sequence
  Oligonucleotide primer for the detection of SNP TSC0029473
acgtatgtatgg

SEQ ID NO: 319926 - DNA, 12 bp, Artificial Sequence
  Oligonucleotide primer for the detection of SNP TSC0029474
cctttaccccat

SEQ ID NO: 319927 - DNA, 12 bp, Artificial Sequence
  Oligonucleotide primer for the detection of SNP TSC0029474
tattttaatgta

SEQ ID NO: 319928 - DNA, 12 bp, Artificial Sequence
  Oligonucleotide primer for the detection of SNP TSC0029474
tattttaacgta

SEQ ID NO: 319929 - DNA, 12 bp, Artificial Sequence
  Oligonucleotide primer for the detection of SNP TSC0029476
acattattcaaa

SEQ ID NO: 319930 - DNA, 12 bp, Artificial Sequence
  Oligonucleotide primer for the detection of SNP TSC0029476
aagtggaataat

SEQ ID NO: 319931 - DNA, 12 bp, Artificial Sequence
  Oligonucleotide primer for the detection of SNP TSC0029476
atattatttaga

SEQ ID NO: 319932 - DNA, 12 bp, Artificial Sequence
  Oligonucleotide primer for the detection of SNP TSC0029477
caataaatccta

SEQ ID NO: 319933 - DNA, 12 bp, Artificial Sequence
  Oligonucleotide primer for the detection of SNP TSC0029477
attagttttgta

SEQ ID NO: 319934 - DNA, 12 bp, Artificial Sequence
  Oligonucleotide primer for the detection of SNP TSC0029477
atgaattttatt

SEQ ID NO: 319935 - DNA, 12 bp, Artificial Sequence
  Oligonucleotide primer for the detection of SNP TSC0029478
aacaataaatct

SEQ ID NO: 319936 - DNA, 12 bp, Artificial Sequence
  Oligonucleotide primer for the detection of SNP TSC0029478
gtagggttttta

SEQ ID NO: 319937 - DNA, 12 bp, Artificial Sequence
  Oligonucleotide primer for the detection of SNP TSC0029479
atcatctctaac

SEQ ID NO: 319938 - DNA, 12 bp, Artificial Sequence
  Oligonucleotide primer for the detection of SNP TSC0029479
agttaagttata

SEQ ID NO: 319939 - DNA, 12 bp, Artificial Sequence
  Oligonucleotide primer for the detection of SNP TSC0029480
taaaactcacat

SEQ ID NO: 319940 - DNA, 12 bp, Artificial Sequence
  Oligonucleotide primer for the detection of SNP TSC0029480
ttagtgaagaaa

SEQ ID NO: 319941 - DNA, 12 bp, Artificial Sequence
  Oligonucleotide primer for the detection of SNP TSC0029481
ggatataggtgt

SEQ ID NO: 319942 - DNA, 12 bp, Artificial Sequence
  Oligonucleotide primer for the detection of SNP TSC0029482
gttaaagattag

SEQ ID NO: 319943 - DNA, 12 bp, Artificial Sequence
  Oligonucleotide primer for the detection of SNP TSC0029482
attaaaaactaa

SEQ ID NO: 319944 - DNA, 12 bp, Artificial Sequence
  Oligonucleotide primer for the detection of SNP TSC0029482
gagataggttag

SEQ ID NO: 319945 - DNA, 12 bp, Artificial Sequence
  Oligonucleotide primer for the detection of SNP TSC0029483
agtttggtttgt

SEQ ID NO: 319946 - DNA, 12 bp, Artificial Sequence
  Oligonucleotide primer for the detection of SNP TSC0029483
taacctaaccta

SEQ ID NO: 319947 - DNA, 12 bp, Artificial Sequence
  Oligonucleotide primer for the detection of SNP TSC0029483
tatttttagtag

SEQ ID NO: 319948 - DNA, 12 bp, Artificial Sequence
  Oligonucleotide primer for the detection of SNP TSC0029484
acacataccact

SEQ ID NO: 319949 - DNA, 12 bp, Artificial Sequence
  Oligonucleotide primer for the detection of SNP TSC0029484
acacgtaccact

SEQ ID NO: 319950 - DNA, 12 bp, Artificial Sequence
  Oligonucleotide primer for the detection of SNP TSC0029484
attagttgggta

SEQ ID NO: 319951 - DNA, 12 bp, Artificial Sequence
  Oligonucleotide primer for the detection of SNP TSC0029484
attaactaaaca

SEQ ID NO: 319952 - DNA, 12 bp, Artificial Sequence
  Oligonucleotide primer for the detection of SNP TSC0029484
gtatgtgttatt

SEQ ID NO: 319953 - DNA, 12 bp, Artificial Sequence
  Oligonucleotide primer for the detection of SNP TSC0029484
gtacgtgttatt

SEQ ID NO: 319954 - DNA, 12 bp, Artificial Sequence
  Oligonucleotide primer for the detection of SNP TSC0029488
aaatctcatact

SEQ ID NO: 319955 - DNA, 12 bp, Artificial Sequence
  Oligonucleotide primer for the detection of SNP TSC0029489
ttatccacatat

SEQ ID NO: 319956 - DNA, 12 bp, Artificial Sequence
  Oligonucleotide primer for the detection of SNP TSC0029489
tagttagaatag

SEQ ID NO: 319957 - DNA, 12 bp, Artificial Sequence
  Oligonucleotide primer for the detection of SNP TSC0029493
cctaaccttaat

SEQ ID NO: 319958 - DNA, 12 bp, Artificial Sequence
  Oligonucleotide primer for the detection of SNP TSC0029493
ttttagtttttg

SEQ ID NO: 319959 - DNA, 12 bp, Artificial Sequence
  Oligonucleotide primer for the detection of SNP TSC0029494
tgtcgggattat

SEQ ID NO: 319960 - DNA, 12 bp, Artificial Sequence
  Oligonucleotide primer for the detection of SNP TSC0029494
taccaaaattac

SEQ ID NO: 319961 - DNA, 12 bp, Artificial Sequence
  Oligonucleotide primer for the detection of SNP TSC0029494
taccgaaattac

SEQ ID NO: 319962 - DNA, 12 bp, Artificial Sequence
  Oligonucleotide primer for the detection of SNP TSC0029494
tatagtggttta

SEQ ID NO: 319963 - DNA, 12 bp, Artificial Sequence
  Oligonucleotide primer for the detection of SNP TSC0029495
taagagtaggta

SEQ ID NO: 319964 - DNA, 12 bp, Artificial Sequence
  Oligonucleotide primer for the detection of SNP TSC0029497
atctaacaatta

SEQ ID NO: 319965 - DNA, 12 bp, Artificial Sequence
  Oligonucleotide primer for the detection of SNP TSC0029497
atataattatat

SEQ ID NO: 319966 - DNA, 12 bp, Artificial Sequence
  Oligonucleotide primer for the detection of SNP TSC0029497
atataattacat

SEQ ID NO: 319967 - DNA, 12 bp, Artificial Sequence
  Oligonucleotide primer for the detection of SNP TSC0029497
tttagtagttat

SEQ ID NO: 319968 - DNA, 12 bp, Artificial Sequence
  Oligonucleotide primer for the detection of SNP TSC0029498
ataatctaacaa

SEQ ID NO: 319969 - DNA, 12 bp, Artificial Sequence
  Oligonucleotide primer for the detection of SNP TSC0029498
aattatatagta

SEQ ID NO: 319970 - DNA, 12 bp, Artificial Sequence
  Oligonucleotide primer for the detection of SNP TSC0029498
aattacataata

SEQ ID NO: 319971 - DNA, 12 bp, Artificial Sequence
  Oligonucleotide primer for the detection of SNP TSC0029498
atggtttagtag

SEQ ID NO: 319972 - DNA, 12 bp, Artificial Sequence
  Oligonucleotide primer for the detection of SNP TSC0029500
aggtagtaaagt

SEQ ID NO: 319973 - DNA, 12 bp, Artificial Sequence
  Oligonucleotide primer for the detection of SNP TSC0029500
aaacaacaaaac

SEQ ID NO: 319974 - DNA, 12 bp, Artificial Sequence
  Oligonucleotide primer for the detection of SNP TSC0029500
tagatgtattgg

SEQ ID NO: 319975 - DNA, 12 bp, Artificial Sequence
  Oligonucleotide primer for the detection of SNP TSC0029501
ttaccaacactt

SEQ ID NO: 319976 - DNA, 12 bp, Artificial Sequence
  Oligonucleotide primer for the detection of SNP TSC0029501
aagtgttgttta

SEQ ID NO: 319977 - DNA, 12 bp, Artificial Sequence
  Oligonucleotide primer for the detection of SNP TSC0029502
ttactaaacaac

SEQ ID NO: 319978 - DNA, 12 bp, Artificial Sequence
  Oligonucleotide primer for the detection of SNP TSC0029502
atgttggtagaa

SEQ ID NO: 319979 - DNA, 12 bp, Artificial Sequence
  Oligonucleotide primer for the detection of SNP TSC0029503
gagttatgatta

SEQ ID NO: 319980 - DNA, 12 bp, Artificial Sequence
  Oligonucleotide primer for the detection of SNP TSC0029505
gtaaagtttaaa

SEQ ID NO: 319981 - DNA, 12 bp, Artificial Sequence
  Oligonucleotide primer for the detection of SNP TSC0029509
ttctatccctac

SEQ ID NO: 319982 - DNA, 12 bp, Artificial Sequence
  Oligonucleotide primer for the detection of SNP TSC0029509
tgattttgtaga

SEQ ID NO: 319983 - DNA, 12 bp, Artificial Sequence
  Oligonucleotide primer for the detection of SNP TSC0029511
ctccctaaaccc

SEQ ID NO: 319984 - DNA, 12 bp, Artificial Sequence
  Oligonucleotide primer for the detection of SNP TSC0029511
ttttgtgttata

SEQ ID NO: 319985 - DNA, 12 bp, Artificial Sequence
  Oligonucleotide primer for the detection of SNP TSC0029515
ttacaatatact

SEQ ID NO: 319986 - DNA, 12 bp, Artificial Sequence
  Oligonucleotide primer for the detection of SNP TSC0029515
atatttagtaga

SEQ ID NO: 319987 - DNA, 12 bp, Artificial Sequence
  Oligonucleotide primer for the detection of SNP TSC0029516
tctctataattt

SEQ ID NO: 319988 - DNA, 12 bp, Artificial Sequence
  Oligonucleotide primer for the detection of SNP TSC0029517
tctacaccctac

SEQ ID NO: 319989 - DNA, 12 bp, Artificial Sequence
  Oligonucleotide primer for the detection of SNP TSC0029517
tctacgccctac

SEQ ID NO: 319990 - DNA, 12 bp, Artificial Sequence
  Oligonucleotide primer for the detection of SNP TSC0029517
tgggttattagg

SEQ ID NO: 319991 - DNA, 12 bp, Artificial Sequence
  Oligonucleotide primer for the detection of SNP TSC0029521
atcctcacccaa

SEQ ID NO: 319992 - DNA, 12 bp, Artificial Sequence
  Oligonucleotide primer for the detection of SNP TSC0029521
gatgttagtttt

SEQ ID NO: 319993 - DNA, 12 bp, Artificial Sequence
  Oligonucleotide primer for the detection of SNP TSC0029521
aaataccaatcc

SEQ ID NO: 319994 - DNA, 12 bp, Artificial Sequence
  Oligonucleotide primer for the detection of SNP TSC0029522
aaccacataaat

SEQ ID NO: 319995 - DNA, 12 bp, Artificial Sequence
  Oligonucleotide primer for the detection of SNP TSC0029522
aaccgcataaat

SEQ ID NO: 319996 - DNA, 12 bp, Artificial Sequence
  Oligonucleotide primer for the detection of SNP TSC0029522
ttttgggtgagg

SEQ ID NO: 319997 - DNA, 12 bp, Artificial Sequence
  Oligonucleotide primer for the detection of SNP TSC0029523
taaaataaaacc

SEQ ID NO: 319998 - DNA, 12 bp, Artificial Sequence
  Oligonucleotide primer for the detection of SNP TSC0029523
gatttatttatg

SEQ ID NO: 319999 - DNA, 12 bp, Artificial Sequence
  Oligonucleotide primer for the detection of SNP TSC0029523
aacctacccata

SEQ ID NO: 320000 - DNA, 12 bp, Artificial Sequence
  Oligonucleotide primer for the detection of SNP TSC0029523
taaaataaggtt

SEQ ID NO: 320001 - DNA, 12 bp, Artificial Sequence
  Oligonucleotide primer for the detection of SNP TSC0029523
taaaataaggtc

SEQ ID NO: 320002 - DNA, 12 bp, Artificial Sequence
  Oligonucleotide primer for the detection of SNP TSC0029524
caaacccaaata

SEQ ID NO: 320003 - DNA, 12 bp, Artificial Sequence
  Oligonucleotide primer for the detection of SNP TSC0029524
atccctctattc

SEQ ID NO: 320004 - DNA, 12 bp, Artificial Sequence
  Oligonucleotide primer for the detection of SNP TSC0029529
ctatttttcatc

SEQ ID NO: 320005 - DNA, 12 bp, Artificial Sequence
  Oligonucleotide primer for the detection of SNP TSC0029530
tactctacattc

SEQ ID NO: 320006 - DNA, 12 bp, Artificial Sequence
  Oligonucleotide primer for the detection of SNP TSC0029530
tactctacgttc

SEQ ID NO: 320007 - DNA, 12 bp, Artificial Sequence
  Oligonucleotide primer for the detection of SNP TSC0029531
aaccctaaatct

SEQ ID NO: 320008 - DNA, 12 bp, Artificial Sequence
  Oligonucleotide primer for the detection of SNP TSC0029531
accatctccaaa

SEQ ID NO: 320009 - DNA, 12 bp, Artificial Sequence
  Oligonucleotide primer for the detection of SNP TSC0029532
tcaattttaaat

SEQ ID NO: 320010 - DNA, 12 bp, Artificial Sequence
  Oligonucleotide primer for the detection of SNP TSC0029532
tcgattttaaat

SEQ ID NO: 320011 - DNA, 12 bp, Artificial Sequence
  Oligonucleotide primer for the detection of SNP TSC0029532
tttagaggagaa

SEQ ID NO: 320012 - DNA, 12 bp, Artificial Sequence
  Oligonucleotide primer for the detection of SNP TSC0029535
tctacttttata

SEQ ID NO: 320013 - DNA, 12 bp, Artificial Sequence
  Oligonucleotide primer for the detection of SNP TSC0029535
attttgagagtt

SEQ ID NO: 320014 - DNA, 12 bp, Artificial Sequence
  Oligonucleotide primer for the detection of SNP TSC0029535
atttcgagagtt

SEQ ID NO: 320015 - DNA, 12 bp, Artificial Sequence
  Oligonucleotide primer for the detection of SNP TSC0029535
atttcaaaaacc

SEQ ID NO: 320016 - DNA, 12 bp, Artificial Sequence
  Oligonucleotide primer for the detection of SNP TSC0029535
atttcgaaaacc

SEQ ID NO: 320017 - DNA, 12 bp, Artificial Sequence
  Oligonucleotide primer for the detection of SNP TSC0029536
aaaaaccacatt

SEQ ID NO: 320018 - DNA, 12 bp, Artificial Sequence
  Oligonucleotide primer for the detection of SNP TSC0029540
tttccaccccac

SEQ ID NO: 320019 - DNA, 12 bp, Artificial Sequence
  Oligonucleotide primer for the detection of SNP TSC0029540
tttccaccccgc

SEQ ID NO: 320020 - DNA, 12 bp, Artificial Sequence
  Oligonucleotide primer for the detection of SNP TSC0029540
tgtttgtagtaa

SEQ ID NO: 320021 - DNA, 12 bp, Artificial Sequence
  Oligonucleotide primer for the detection of SNP TSC0029543
caccaaaaatct

SEQ ID NO: 320022 - DNA, 12 bp, Artificial Sequence
  Oligonucleotide primer for the detection of SNP TSC0029543
aggatattttga

SEQ ID NO: 320023 - DNA, 12 bp, Artificial Sequence
  Oligonucleotide primer for the detection of SNP TSC0029543
aaaacaccctaa

SEQ ID NO: 320024 - DNA, 12 bp, Artificial Sequence
  Oligonucleotide primer for the detection of SNP TSC0029543
tattaggggttt

SEQ ID NO: 320025 - DNA, 12 bp, Artificial Sequence
  Oligonucleotide primer for the detection of SNP TSC0029544
tttagtattagg

SEQ ID NO: 320026 - DNA, 12 bp, Artificial Sequence
  Oligonucleotide primer for the detection of SNP TSC0029545
tattccctaact

SEQ ID NO: 320027 - DNA, 12 bp, Artificial Sequence
  Oligonucleotide primer for the detection of SNP TSC0029545
taggggttgggg

SEQ ID NO: 320028 - DNA, 12 bp, Artificial Sequence
  Oligonucleotide primer for the detection of SNP TSC0029545
taggggtcgggg

SEQ ID NO: 320029 - DNA, 12 bp, Artificial Sequence
  Oligonucleotide primer for the detection of SNP TSC0029547
cataactaccat

SEQ ID NO: 320030 - DNA, 12 bp, Artificial Sequence
  Oligonucleotide primer for the detection of SNP TSC0029547
cgtaactaccat

SEQ ID NO: 320031 - DNA, 12 bp, Artificial Sequence
  Oligonucleotide primer for the detection of SNP TSC0029547
ggagagttagta

SEQ ID NO: 320032 - DNA, 12 bp, Artificial Sequence
  Oligonucleotide primer for the detection of SNP TSC0029547
gtgattgttatt

SEQ ID NO: 320033 - DNA, 12 bp, Artificial Sequence
  Oligonucleotide primer for the detection of SNP TSC0029550
caaccctctccc

SEQ ID NO: 320034 - DNA, 12 bp, Artificial Sequence
  Oligonucleotide primer for the detection of SNP TSC0029550
gggtttcgggag

SEQ ID NO: 320035 - DNA, 12 bp, Artificial Sequence
  Oligonucleotide primer for the detection of SNP TSC0029550
aaacttcaaaaa

SEQ ID NO: 320036 - DNA, 12 bp, Artificial Sequence
  Oligonucleotide primer for the detection of SNP TSC0029550
aaacttcgaaaa

SEQ ID NO: 320037 - DNA, 12 bp, Artificial Sequence
  Oligonucleotide primer for the detection of SNP TSC0029551
ataaatacaaac

SEQ ID NO: 320038 - DNA, 12 bp, Artificial Sequence
  Oligonucleotide primer for the detection of SNP TSC0029551
atattagggaat

SEQ ID NO: 320039 - DNA, 12 bp, Artificial Sequence
  Oligonucleotide primer for the detection of SNP TSC0029551
gtgagtatagat

SEQ ID NO: 320040 - DNA, 12 bp, Artificial Sequence
  Oligonucleotide primer for the detection of SNP TSC0029552
actctcaaaccc

SEQ ID NO: 320041 - DNA, 12 bp, Artificial Sequence
  Oligonucleotide primer for the detection of SNP TSC0029552
agtaggtttgag

SEQ ID NO: 320042 - DNA, 12 bp, Artificial Sequence
  Oligonucleotide primer for the detection of SNP TSC0029553
aacaaaacacac

SEQ ID NO: 320043 - DNA, 12 bp, Artificial Sequence
  Oligonucleotide primer for the detection of SNP TSC0029553
acctttctctct

SEQ ID NO: 320044 - DNA, 12 bp, Artificial Sequence
  Oligonucleotide primer for the detection of SNP TSC0029553
aatagagtatat

SEQ ID NO: 320045 - DNA, 12 bp, Artificial Sequence
  Oligonucleotide primer for the detection of SNP TSC0029554
ctcaacaaaaac

SEQ ID NO: 320046 - DNA, 12 bp, Artificial Sequence
  Oligonucleotide primer for the detection of SNP TSC0029554
ttttgggggttg

SEQ ID NO: 320047 - DNA, 12 bp, Artificial Sequence
  Oligonucleotide primer for the detection of SNP TSC0029554
tttcgggggttg

SEQ ID NO: 320048 - DNA, 12 bp, Artificial Sequence
  Oligonucleotide primer for the detection of SNP TSC0029555
ccccaaactata

SEQ ID NO: 320049 - DNA, 12 bp, Artificial Sequence
  Oligonucleotide primer for the detection of SNP TSC0029555
tttgggggtttt

SEQ ID NO: 320050 - DNA, 12 bp, Artificial Sequence
  Oligonucleotide primer for the detection of SNP TSC0029555
cctaaaaaccct

SEQ ID NO: 320051 - DNA, 12 bp, Artificial Sequence
  Oligonukleotid-Primer
ttttaggttgtg

SEQ ID NO: 320052 - DNA, 12 bp, Artificial Sequence
  Oligonucleotide primer for the detection of SNP TSC0029556
acaacccaccca

SEQ ID NO: 320053 - DNA, 12 bp, Artificial Sequence
  Oligonucleotide primer for the detection of SNP TSC0029556
acaacccgccca

SEQ ID NO: 320054 - DNA, 12 bp, Artificial Sequence
  Oligonucleotide primer for the detection of SNP TSC0029556
agtgaatgtttt

SEQ ID NO: 320055 - DNA, 12 bp, Artificial Sequence
  Oligonucleotide primer for the detection of SNP TSC0029556
aataaatatcct

SEQ ID NO: 320056 - DNA, 12 bp, Artificial Sequence
  Oligonucleotide primer for the detection of SNP TSC0029556
gtagtttgttta

SEQ ID NO: 320057 - DNA, 12 bp, Artificial Sequence
  Oligonucleotide primer for the detection of SNP TSC0029556
gtagttcgttta

SEQ ID NO: 320058 - DNA, 12 bp, Artificial Sequence
  Oligonucleotide primer for the detection of SNP TSC0029557
aatctaaccgat

SEQ ID NO: 320059 - DNA, 12 bp, Artificial Sequence
  Oligonucleotide primer for the detection of SNP TSC0029557
aactccctaata

SEQ ID NO: 320060 - DNA, 12 bp, Artificial Sequence
  Oligonucleotide primer for the detection of SNP TSC0029557
agtttgattgat

SEQ ID NO: 320061 - DNA, 12 bp, Artificial Sequence
  Oligonucleotide primer for the detection of SNP TSC0029557
agtttgatcgat

SEQ ID NO: 320062 - DNA, 12 bp, Artificial Sequence
  Oligonucleotide primer for the detection of SNP TSC0029558
tatatttaagat

SEQ ID NO: 320063 - DNA, 12 bp, Artificial Sequence
  Oligonucleotide primer for the detection of SNP TSC0029558
cacacttaaaac

SEQ ID NO: 320064 - DNA, 12 bp, Artificial Sequence
  Oligonucleotide primer for the detection of SNP TSC0029558
aggtaggtgagg

SEQ ID NO: 320065 - DNA, 12 bp, Artificial Sequence
  Oligonucleotide primer for the detection of SNP TSC0029560
ataacaaaacca

SEQ ID NO: 320066 - DNA, 12 bp, Artificial Sequence
  Oligonucleotide primer for the detection of SNP TSC0029560
ataacaaaaccg

SEQ ID NO: 320067 - DNA, 12 bp, Artificial Sequence
  Oligonucleotide primer for the detection of SNP TSC0029560
tttaagtatggt

SEQ ID NO: 320068 - DNA, 12 bp, Artificial Sequence
  Oligonucleotide primer for the detection of SNP TSC0029560
tttaagtacggt

SEQ ID NO: 320069 - DNA, 12 bp, Artificial Sequence
  Oligonucleotide primer for the detection of SNP TSC0029560
tctaaacacaac

SEQ ID NO: 320070 - DNA, 12 bp, Artificial Sequence
  Oligonucleotide primer for the detection of SNP TSC0029560
tctaaacacgac

SEQ ID NO: 320071 - DNA, 12 bp, Artificial Sequence
  Oligonucleotide primer for the detection of SNP TSC0029560
atggtagagttg

SEQ ID NO: 320072 - DNA, 12 bp, Artificial Sequence
  Oligonucleotide primer for the detection of SNP TSC0029560
atggtagagtcg

SEQ ID NO: 320073 - DNA, 12 bp, Artificial Sequence
  Oligonucleotide primer for the detection of SNP TSC0029561
caaacatcaccc

SEQ ID NO: 320074 - DNA, 12 bp, Artificial Sequence
  Oligonucleotide primer for the detection of SNP TSC0029561
caaacgtcaccc

SEQ ID NO: 320075 - DNA, 12 bp, Artificial Sequence
  Oligonucleotide primer for the detection of SNP TSC0029561
aatataatttta

SEQ ID NO: 320076 - DNA, 12 bp, Artificial Sequence
  Oligonucleotide primer for the detection of SNP TSC0029561
aacataatttta

SEQ ID NO: 320077 - DNA, 12 bp, Artificial Sequence
  Oligonucleotide primer for the detection of SNP TSC0029561
taaacgttattt

SEQ ID NO: 320078 - DNA, 12 bp, Artificial Sequence
  Oligonucleotide primer for the detection of SNP TSC0029562
acaatcaaataa

SEQ ID NO: 320079 - DNA, 12 bp, Artificial Sequence
  Oligonucleotide primer for the detection of SNP TSC0029562
tatattataatt

SEQ ID NO: 320080 - DNA, 12 bp, Artificial Sequence
  Oligonucleotide primer for the detection of SNP TSC0029562
tatattataatc

SEQ ID NO: 320081 - DNA, 12 bp, Artificial Sequence
  Oligonucleotide primer for the detection of SNP TSC0029562
cacattacaatc

SEQ ID NO: 320082 - DNA, 12 bp, Artificial Sequence
  Oligonucleotide primer for the detection of SNP TSC0029562
aatagttaggtg

SEQ ID NO: 320083 - DNA, 12 bp, Artificial Sequence
  Oligonucleotide primer for the detection of SNP TSC0029563
acaccacttcct

SEQ ID NO: 320084 - DNA, 12 bp, Artificial Sequence
  Oligonucleotide primer for the detection of SNP TSC0029563
gttttatttaag

SEQ ID NO: 320085 - DNA, 12 bp, Artificial Sequence
  Oligonucleotide primer for the detection of SNP TSC0029564
atcatcccaacc

SEQ ID NO: 320086 - DNA, 12 bp, Artificial Sequence
  Oligonucleotide primer for the detection of SNP TSC0029564
atcatcccgacc

SEQ ID NO: 320087 - DNA, 12 bp, Artificial Sequence
  Oligonucleotide primer for the detection of SNP TSC0029564
atcgtcccaacc

SEQ ID NO: 320088 - DNA, 12 bp, Artificial Sequence
  Oligonucleotide primer for the detection of SNP TSC0029564
atcgtcccgacc

SEQ ID NO: 320089 - DNA, 12 bp, Artificial Sequence
  Oligonucleotide primer for the detection of SNP TSC0029564
gtgggtgttgag

SEQ ID NO: 320090 - DNA, 12 bp, Artificial Sequence
  Oligonucleotide primer for the detection of SNP TSC0029564
gcgggtgttgag

SEQ ID NO: 320091 - DNA, 12 bp, Artificial Sequence
  Oligonucleotide primer for the detection of SNP TSC0029564
acaaatactaaa

SEQ ID NO: 320092 - DNA, 12 bp, Artificial Sequence
  Oligonucleotide primer for the detection of SNP TSC0029564
acgaatactaaa

SEQ ID NO: 320093 - DNA, 12 bp, Artificial Sequence
  Oligonucleotide primer for the detection of SNP TSC0029564
attgttttggtt

SEQ ID NO: 320094 - DNA, 12 bp, Artificial Sequence
  Oligonucleotide primer for the detection of SNP TSC0029564
atcgttttggtt

SEQ ID NO: 320095 - DNA, 12 bp, Artificial Sequence
  Oligonucleotide primer for the detection of SNP TSC0029564
attgtttcggtt

SEQ ID NO: 320096 - DNA, 12 bp, Artificial Sequence
  Oligonucleotide primer for the detection of SNP TSC0029564
attgttttggtc

SEQ ID NO: 320097 - DNA, 12 bp, Artificial Sequence
  Oligonucleotide primer for the detection of SNP TSC0029564
atcgtttcggtt

SEQ ID NO: 320098 - DNA, 12 bp, Artificial Sequence
  Oligonucleotide primer for the detection of SNP TSC0029564
atcgttttggtc

SEQ ID NO: 320099 - DNA, 12 bp, Artificial Sequence
  Oligonucleotide primer for the detection of SNP TSC0029564
attgtttcggtc

SEQ ID NO: 320100 - DNA, 12 bp, Artificial Sequence
  Oligonukleotid-Primer
atcgtttcggtc

SEQ ID NO: 320101 - DNA, 12 bp, Artificial Sequence
  Oligonucleotide primer for the detection of SNP TSC0029565
atataaaacaca

SEQ ID NO: 320102 - DNA, 12 bp, Artificial Sequence
  Oligonucleotide primer for the detection of SNP TSC0029565
agaaatatattt

SEQ ID NO: 320103 - DNA, 12 bp, Artificial Sequence
  Oligonucleotide primer for the detection of SNP TSC0029565
aaaacacaccta

SEQ ID NO: 320104 - DNA, 12 bp, Artificial Sequence
  Oligonucleotide primer for the detection of SNP TSC0029565
tatgtggggtat

SEQ ID NO: 320105 - DNA, 12 bp, Artificial Sequence
  Oligonucleotide primer for the detection of SNP TSC0029566
actccaaaatta

SEQ ID NO: 320106 - DNA, 12 bp, Artificial Sequence
  Oligonucleotide primer for the detection of SNP TSC0029567
tccatataaaac

SEQ ID NO: 320107 - DNA, 12 bp, Artificial Sequence
  Oligonucleotide primer for the detection of SNP TSC0029567
tatatattgaga

SEQ ID NO: 320108 - DNA, 12 bp, Artificial Sequence
  Oligonukleotid-Primer
aaacaccaaaca

SEQ ID NO: 320109 - DNA, 12 bp, Artificial Sequence
  Oligonucleotide primer for the detection of SNP TSC0029568
aaacaccaaacg

SEQ ID NO: 320110 - DNA, 12 bp, Artificial Sequence
  Oligonucleotide primer for the detection of SNP TSC0029568
aaacgccaaaca

SEQ ID NO: 320111 - DNA, 12 bp, Artificial Sequence
  Oligonucleotide primer for the detection of SNP TSC0029568
aaacgccaaacg

SEQ ID NO: 320112 - DNA, 12 bp, Artificial Sequence
  Oligonucleotide primer for the detection of SNP TSC0029568
aagtgttaggtg

SEQ ID NO: 320113 - DNA, 12 bp, Artificial Sequence
  Oligonucleotide primer for the detection of SNP TSC0029568
aagcgttaggtg

SEQ ID NO: 320114 - DNA, 12 bp, Artificial Sequence
  Oligonucleotide primer for the detection of SNP TSC0029568
aagtgttaggcg

SEQ ID NO: 320115 - DNA, 12 bp, Artificial Sequence
  Oligonucleotide primer for the detection of SNP TSC0029568
aagcgttaggcg

SEQ ID NO: 320116 - DNA, 12 bp, Artificial Sequence
  Oligonucleotide primer for the detection of SNP TSC0029572
tcttcctcctcc

SEQ ID NO: 320117 - DNA, 12 bp, Artificial Sequence
  Oligonucleotide primer for the detection of SNP TSC0029572
tataaagagaga

SEQ ID NO: 320118 - DNA, 12 bp, Artificial Sequence
  Oligonucleotide primer for the detection of SNP TSC0029573
atctttctttct

SEQ ID NO: 320119 - DNA, 12 bp, Artificial Sequence
  Oligonucleotide primer for the detection of SNP TSC0029573
tatgtagaaaga

SEQ ID NO: 320120 - DNA, 12 bp, Artificial Sequence
  Oligonucleotide primer for the detection of SNP TSC0029574
cacacctaacct

SEQ ID NO: 320121 - DNA, 12 bp, Artificial Sequence
  Oligonucleotide primer for the detection of SNP TSC0029574
cacgcctaacct

SEQ ID NO: 320122 - DNA, 12 bp, Artificial Sequence
  Oligonucleotide primer for the detection of SNP TSC0029574
cgcacctaacct

SEQ ID NO: 320123 - DNA, 12 bp, Artificial Sequence
  Oligonucleotide primer for the detection of SNP TSC0029574
cgcgcctaacct

SEQ ID NO: 320124 - DNA, 12 bp, Artificial Sequence
  Oligonucleotide primer for the detection of SNP TSC0029574
cgtgtttggttt

SEQ ID NO: 320125 - DNA, 12 bp, Artificial Sequence
  Oligonucleotide primer for the detection of SNP TSC0029574
cgcgtttggttt

SEQ ID NO: 320126 - DNA, 12 bp, Artificial Sequence
  Oligonucleotide primer for the detection of SNP TSC0029575
ttaaataactat

SEQ ID NO: 320127 - DNA, 12 bp, Artificial Sequence
  Oligonucleotide primer for the detection of SNP TSC0029575
ttagggagttag

SEQ ID NO: 320128 - DNA, 12 bp, Artificial Sequence
  Oligonucleotide primer for the detection of SNP TSC0029575
tcaaaaaaccaa

SEQ ID NO: 320129 - DNA, 12 bp, Artificial Sequence
  Oligonucleotide primer for the detection of SNP TSC0029575
ttgggtgattgt

SEQ ID NO: 320130 - DNA, 12 bp, Artificial Sequence
  Oligonucleotide primer for the detection of SNP TSC0029576
ccaaccttccac

SEQ ID NO: 320131 - DNA, 12 bp, Artificial Sequence
  Oligonucleotide primer for the detection of SNP TSC0029576
ccaaccttccgc

SEQ ID NO: 320132 - DNA, 12 bp, Artificial Sequence
  Oligonucleotide primer for the detection of SNP TSC0029576
ttttttgagaag

SEQ ID NO: 320133 - DNA, 12 bp, Artificial Sequence
  Oligonucleotide primer for the detection of SNP TSC0029576
tttttcgagaag

SEQ ID NO: 320134 - DNA, 12 bp, Artificial Sequence
  Oligonucleotide primer for the detection of SNP TSC0029577
tctccactattc

SEQ ID NO: 320135 - DNA, 12 bp, Artificial Sequence
  Oligonucleotide primer for the detection of SNP TSC0029578
actaactttatt

SEQ ID NO: 320136 - DNA, 12 bp, Artificial Sequence
  Oligonucleotide primer for the detection of SNP TSC0029578
taagattagttt

SEQ ID NO: 320137 - DNA, 12 bp, Artificial Sequence
  Oligonucleotide primer for the detection of SNP TSC0029578
attggttttgtt

SEQ ID NO: 320138 - DNA, 12 bp, Artificial Sequence
  Oligonucleotide primer for the detection of SNP TSC0029579
ctatatacctac

SEQ ID NO: 320139 - DNA, 12 bp, Artificial Sequence
  Oligonucleotide primer for the detection of SNP TSC0029579
agggtaggggtg

SEQ ID NO: 320140 - DNA, 12 bp, Artificial Sequence
  Oligonucleotide primer for the detection of SNP TSC0029580
cctacacacacc

SEQ ID NO: 320141 - DNA, 12 bp, Artificial Sequence
  Oligonucleotide primer for the detection of SNP TSC0029580
tttttagggtag

SEQ ID NO: 320142 - DNA, 12 bp, Artificial Sequence
  Oligonucleotide primer for the detection of SNP TSC0029581
aataataataca

SEQ ID NO: 320143 - DNA, 12 bp, Artificial Sequence
  Oligonucleotide primer for the detection of SNP TSC0029581
tttttggtaaag

SEQ ID NO: 320144 - DNA, 12 bp, Artificial Sequence
  Oligonucleotide primer for the detection of SNP TSC0029581
cccctaacaaaa

SEQ ID NO: 320145 - DNA, 12 bp, Artificial Sequence
  Oligonucleotide primer for the detection of SNP TSC0029581
taatggtggtgt

SEQ ID NO: 320146 - DNA, 12 bp, Artificial Sequence
  Oligonucleotide primer for the detection of SNP TSC0029582
tatttatataaa

SEQ ID NO: 320147 - DNA, 12 bp, Artificial Sequence
  Oligonucleotide primer for the detection of SNP TSC0029583
atgttaaagata

SEQ ID NO: 320148 - DNA, 12 bp, Artificial Sequence
  Oligonucleotide primer for the detection of SNP TSC0029583
acgttaaagata

SEQ ID NO: 320149 - DNA, 12 bp, Artificial Sequence
  Oligonucleotide primer for the detection of SNP TSC0029584
ggtggtagaagg

SEQ ID NO: 320150 - DNA, 12 bp, Artificial Sequence
  Oligonucleotide primer for the detection of SNP TSC0029585
tccttctcaaaa

SEQ ID NO: 320151 - DNA, 12 bp, Artificial Sequence
  Oligonucleotide primer for the detection of SNP TSC0029585
taatatttattg

SEQ ID NO: 320152 - DNA, 12 bp, Artificial Sequence
  Oligonucleotide primer for the detection of SNP TSC0029585
caacacccacta

SEQ ID NO: 320153 - DNA, 12 bp, Artificial Sequence
  Oligonucleotide primer for the detection of SNP TSC0029587
caacaacctaca

SEQ ID NO: 320154 - DNA, 12 bp, Artificial Sequence
  Oligonucleotide primer for the detection of SNP TSC0029587
caacaacctacg

SEQ ID NO: 320155 - DNA, 12 bp, Artificial Sequence
  Oligonucleotide primer for the detection of SNP TSC0029587
ttattaatattt

SEQ ID NO: 320156 - DNA, 12 bp, Artificial Sequence
  Oligonucleotide primer for the detection of SNP TSC0029587
ctatcaacattc

SEQ ID NO: 320157 - DNA, 12 bp, Artificial Sequence
  Oligonucleotide primer for the detection of SNP TSC0029587
taataatttgtg

SEQ ID NO: 320158 - DNA, 12 bp, Artificial Sequence
  Oligonucleotide primer for the detection of SNP TSC0029587
taataatttgcg

SEQ ID NO: 320159 - DNA, 12 bp, Artificial Sequence
  Oligonucleotide primer for the detection of SNP TSC0029588
aacataataaac

SEQ ID NO: 320160 - DNA, 12 bp, Artificial Sequence
  Oligonucleotide primer for the detection of SNP TSC0029588
tttaattgattg

SEQ ID NO: 320161 - DNA, 12 bp, Artificial Sequence
  Oligonucleotide primer for the detection of SNP TSC0029588
tttaattgatcg

SEQ ID NO: 320162 - DNA, 12 bp, Artificial Sequence
  Oligonucleotide primer for the detection of SNP TSC0029589
ttgtttatagat

SEQ ID NO: 320163 - DNA, 12 bp, Artificial Sequence
  Oligonucleotide primer for the detection of SNP TSC0029589
ctatctataaac

SEQ ID NO: 320164 - DNA, 12 bp, Artificial Sequence
  Oligonucleotide primer for the detection of SNP TSC0029590
aacctcctctac

SEQ ID NO: 320165 - DNA, 12 bp, Artificial Sequence
  Oligonucleotide primer for the detection of SNP TSC0029590
tagtaagttaga

SEQ ID NO: 320166 - DNA, 12 bp, Artificial Sequence
  Oligonucleotide primer for the detection of SNP TSC0029591
tacatcaaattc

SEQ ID NO: 320167 - DNA, 12 bp, Artificial Sequence
  Oligonucleotide primer for the detection of SNP TSC0029591
tagaatttgttg

SEQ ID NO: 320168 - DNA, 12 bp, Artificial Sequence
  Oligonucleotide primer for the detection of SNP TSC0029592
ggatggttaaga

SEQ ID NO: 320169 - DNA, 12 bp, Artificial Sequence
  Oligonucleotide primer for the detection of SNP TSC0029592
aaataatcaaaa

SEQ ID NO: 320170 - DNA, 12 bp, Artificial Sequence
  Oligonucleotide primer for the detection of SNP TSC0029592
tttggttagagt

SEQ ID NO: 320171 - DNA, 12 bp, Artificial Sequence
  Oligonucleotide primer for the detection of SNP TSC0029594
atactatttaat

SEQ ID NO: 320172 - DNA, 12 bp, Artificial Sequence
  Oligonucleotide primer for the detection of SNP TSC0029594
ttgtggttatta

SEQ ID NO: 320173 - DNA, 12 bp, Artificial Sequence
  Oligonucleotide primer for the detection of SNP TSC0029595
ttaactttctcc

SEQ ID NO: 320174 - DNA, 12 bp, Artificial Sequence
  Oligonucleotide primer for the detection of SNP TSC0029595
taggaaaagtga

SEQ ID NO: 320175 - DNA, 12 bp, Artificial Sequence
  Oligonucleotide primer for the detection of SNP TSC0029595
taggaaaagcga

SEQ ID NO: 320176 - DNA, 12 bp, Artificial Sequence
  Oligonucleotide primer for the detection of SNP TSC0029596
aaaaaactatac

SEQ ID NO: 320177 - DNA, 12 bp, Artificial Sequence
  Oligonucleotide primer for the detection of SNP TSC0029596
tatatctctcca

SEQ ID NO: 320178 - DNA, 12 bp, Artificial Sequence
  Oligonucleotide primer for the detection of SNP TSC0029596
gggaagttgtat

SEQ ID NO: 320179 - DNA, 12 bp, Artificial Sequence
  Oligonucleotide primer for the detection of SNP TSC0029597
aaacaactaaaa

SEQ ID NO: 320180 - DNA, 12 bp, Artificial Sequence
  Oligonucleotide primer for the detection of SNP TSC0029597
aaacgactaaaa

SEQ ID NO: 320181 - DNA, 12 bp, Artificial Sequence
  Oligonucleotide primer for the detection of SNP TSC0029597
tagagaatattt

SEQ ID NO: 320182 - DNA, 12 bp, Artificial Sequence
  Oligonucleotide primer for the detection of SNP TSC0029597
tagagaatattc

SEQ ID NO: 320183 - DNA, 12 bp, Artificial Sequence
  Oligonucleotide primer for the detection of SNP TSC0029597
ttaaaaaacatt

SEQ ID NO: 320184 - DNA, 12 bp, Artificial Sequence
  Oligonucleotide primer for the detection of SNP TSC0029597
taagtgattaaa

SEQ ID NO: 320185 - DNA, 12 bp, Artificial Sequence
  Oligonucleotide primer for the detection of SNP TSC0029597
taagcgattaaa

SEQ ID NO: 320186 - DNA, 12 bp, Artificial Sequence
  Oligonucleotide primer for the detection of SNP TSC0029598
taccaaactact

SEQ ID NO: 320187 - DNA, 12 bp, Artificial Sequence
  Oligonucleotide primer for the detection of SNP TSC0029598
tataggtttagg

SEQ ID NO: 320188 - DNA, 12 bp, Artificial Sequence
  Oligonucleotide primer for the detection of SNP TSC0029599
caaactactaac

SEQ ID NO: 320189 - DNA, 12 bp, Artificial Sequence
  Oligonucleotide primer for the detection of SNP TSC0029599
gtataggtttag

SEQ ID NO: 320190 - DNA, 12 bp, Artificial Sequence
  Oligonucleotide primer for the detection of SNP TSC0029600
ggatatgtattg

SEQ ID NO: 320191 - DNA, 12 bp, Artificial Sequence
  Oligonucleotide primer for the detection of SNP TSC0029600
ggatacgtattg

SEQ ID NO: 320192 - DNA, 12 bp, Artificial Sequence
  Oligonucleotide primer for the detection of SNP TSC0029600
aaacacatacta

SEQ ID NO: 320193 - DNA, 12 bp, Artificial Sequence
  Oligonucleotide primer for the detection of SNP TSC0029600
aaacacgtacta

SEQ ID NO: 320194 - DNA, 12 bp, Artificial Sequence
  Oligonucleotide primer for the detection of SNP TSC0029600
tagaaagttaaa

SEQ ID NO: 320195 - DNA, 12 bp, Artificial Sequence
  Oligonucleotide primer for the detection of SNP TSC0029601
tctatataacca

SEQ ID NO: 320196 - DNA, 12 bp, Artificial Sequence
  Oligonucleotide primer for the detection of SNP TSC0029601
gaaagtagattt

SEQ ID NO: 320197 - DNA, 12 bp, Artificial Sequence
  Oligonukleotid-Primer
gaaagtagattc

SEQ ID NO: 320198 - DNA, 12 bp, Artificial Sequence
  Oligonucleotide primer for the detection of SNP TSC0029601
aaaaaacaaact

SEQ ID NO: 320199 - DNA, 12 bp, Artificial Sequence
  Oligonucleotide primer for the detection of SNP TSC0029601
tttgtgtaatta

SEQ ID NO: 320200 - DNA, 12 bp, Artificial Sequence
  Oligonucleotide primer for the detection of SNP TSC0029602
acctataaacct

SEQ ID NO: 320201 - DNA, 12 bp, Artificial Sequence
  Oligonucleotide primer for the detection of SNP TSC0029602
gcctataaacct

SEQ ID NO: 320202 - DNA, 12 bp, Artificial Sequence
  Oligonucleotide primer for the detection of SNP TSC0029602
attttatgttta

SEQ ID NO: 320203 - DNA, 12 bp, Artificial Sequence
  Oligonucleotide primer for the detection of SNP TSC0029602
attttacgttta

SEQ ID NO: 320204 - DNA, 12 bp, Artificial Sequence
  Oligonucleotide primer for the detection of SNP TSC0029603
catctcacaccc

SEQ ID NO: 320205 - DNA, 12 bp, Artificial Sequence
  Oligonucleotide primer for the detection of SNP TSC0029603
catctcacgccc

SEQ ID NO: 320206 - DNA, 12 bp, Artificial Sequence
  Oligonucleotide primer for the detection of SNP TSC0029603
tataaacctaaa

SEQ ID NO: 320207 - DNA, 12 bp, Artificial Sequence
  Oligonucleotide primer for the detection of SNP TSC0029603
tattttacgttt

SEQ ID NO: 320208 - DNA, 12 bp, Artificial Sequence
  Oligonucleotide primer for the detection of SNP TSC0029604
aaataaactttc

SEQ ID NO: 320209 - DNA, 12 bp, Artificial Sequence
  Oligonucleotide primer for the detection of SNP TSC0029604
gtatggggtgtt

SEQ ID NO: 320210 - DNA, 12 bp, Artificial Sequence
  Oligonucleotide primer for the detection of SNP TSC0029604
acataaaatact

SEQ ID NO: 320211 - DNA, 12 bp, Artificial Sequence
  Oligonucleotide primer for the detection of SNP TSC0029604
aaatagattttt

SEQ ID NO: 320212 - DNA, 12 bp, Artificial Sequence
  Oligonucleotide primer for the detection of SNP TSC0029605
ggggttttgggt

SEQ ID NO: 320213 - DNA, 12 bp, Artificial Sequence
  Oligonucleotide primer for the detection of SNP TSC0029605
ggggtttcgggt

SEQ ID NO: 320214 - DNA, 12 bp, Artificial Sequence
  Oligonucleotide primer for the detection of SNP TSC0029605
aaaacctcgaac

SEQ ID NO: 320215 - DNA, 12 bp, Artificial Sequence
  Oligonucleotide primer for the detection of SNP TSC0029605
gtgaaatagatg

SEQ ID NO: 320216 - DNA, 12 bp, Artificial Sequence
  Oligonucleotide primer for the detection of SNP TSC0029606
ctatatttatat

SEQ ID NO: 320217 - DNA, 12 bp, Artificial Sequence
  Oligonucleotide primer for the detection of SNP TSC0029606
catccccataaa

SEQ ID NO: 320218 - DNA, 12 bp, Artificial Sequence
  Oligonucleotide primer for the detection of SNP TSC0029606
ttatatttgtat

SEQ ID NO: 320219 - DNA, 12 bp, Artificial Sequence
  Oligonucleotide primer for the detection of SNP TSC0029607
gattttttagta

SEQ ID NO: 320220 - DNA, 12 bp, Artificial Sequence
  Oligonucleotide primer for the detection of SNP TSC0029610
cacccccatccc

SEQ ID NO: 320221 - DNA, 12 bp, Artificial Sequence
  Oligonucleotide primer for the detection of SNP TSC0029610
aaagtatgggtg

SEQ ID NO: 320222 - DNA, 12 bp, Artificial Sequence
  Oligonucleotide primer for the detection of SNP TSC0029610
aaaacataaata

SEQ ID NO: 320223 - DNA, 12 bp, Artificial Sequence
  Oligonucleotide primer for the detection of SNP TSC0029611
ttctttcctaat

SEQ ID NO: 320224 - DNA, 12 bp, Artificial Sequence
  Oligonucleotide primer for the detection of SNP TSC0029611
gtattgagtttg

SEQ ID NO: 320225 - DNA, 12 bp, Artificial Sequence
  Oligonucleotide primer for the detection of SNP TSC0029612
tattccaatttt

SEQ ID NO: 320226 - DNA, 12 bp, Artificial Sequence
  Oligonucleotide primer for the detection of SNP TSC0029612
ttatagatgaaa

SEQ ID NO: 320227 - DNA, 12 bp, Artificial Sequence
  Oligonucleotide primer for the detection of SNP TSC0029613
aactactccaat

SEQ ID NO: 320228 - DNA, 12 bp, Artificial Sequence
  Oligonucleotide primer for the detection of SNP TSC0029613
aactactccgat

SEQ ID NO: 320229 - DNA, 12 bp, Artificial Sequence
  Oligonucleotide primer for the detection of SNP TSC0029613
tagttaggaata

SEQ ID NO: 320230 - DNA, 12 bp, Artificial Sequence
  Oligonucleotide primer for the detection of SNP TSC0029616
tttgggtggttg

SEQ ID NO: 320231 - DNA, 12 bp, Artificial Sequence
  Oligonucleotide primer for the detection of SNP TSC0029616
gaggttagtgtt

SEQ ID NO: 320232 - DNA, 12 bp, Artificial Sequence
  Oligonucleotide primer for the detection of SNP TSC0029617
cccaacaaaaac

SEQ ID NO: 320233 - DNA, 12 bp, Artificial Sequence
  Oligonucleotide primer for the detection of SNP TSC0029617
gttttggtttag

SEQ ID NO: 320234 - DNA, 12 bp, Artificial Sequence
  Oligonucleotide primer for the detection of SNP TSC0029618
accccaaaaacc

SEQ ID NO: 320235 - DNA, 12 bp, Artificial Sequence
  Oligonucleotide primer for the detection of SNP TSC0029618
accccgaaaacc

SEQ ID NO: 320236 - DNA, 12 bp, Artificial Sequence
  Oligonucleotide primer for the detection of SNP TSC0029618
tggtggtggtgg

SEQ ID NO: 320237 - DNA, 12 bp, Artificial Sequence
  Oligonucleotide primer for the detection of SNP TSC0029618
cggtggtggtgg

SEQ ID NO: 320238 - DNA, 12 bp, Artificial Sequence
  Oligonucleotide primer for the detection of SNP TSC0029618
tggcggtggtgg

SEQ ID NO: 320239 - DNA, 12 bp, Artificial Sequence
  Oligonucleotide primer for the detection of SNP TSC0029618
tggtggcggtgg

SEQ ID NO: 320240 - DNA, 12 bp, Artificial Sequence
  Oligonucleotide primer for the detection of SNP TSC0029618
tggtggtggcgg

SEQ ID NO: 320241 - DNA, 12 bp, Artificial Sequence
  Oligonucleotide primer for the detection of SNP TSC0029618
cggcggtggtgg

SEQ ID NO: 320242 - DNA, 12 bp, Artificial Sequence
  Oligonucleotide primer for the detection of SNP TSC0029618
cggtggcggtgg

SEQ ID NO: 320243 - DNA, 12 bp, Artificial Sequence
  Oligonucleotide primer for the detection of SNP TSC0029618
cggtggtggcgg

SEQ ID NO: 320244 - DNA, 12 bp, Artificial Sequence
  Oligonucleotide primer for the detection of SNP TSC0029618
tggcggcggtgg

SEQ ID NO: 320245 - DNA, 12 bp, Artificial Sequence
  Oligonucleotide primer for the detection of SNP TSC0029618
tggcggtggcgg

SEQ ID NO: 320246 - DNA, 12 bp, Artificial Sequence
  Oligonucleotide primer for the detection of SNP TSC0029618
tggtggcggcgg

SEQ ID NO: 320247 - DNA, 12 bp, Artificial Sequence
  Oligonucleotide primer for the detection of SNP TSC0029618
cggcggcggtgg

SEQ ID NO: 320248 - DNA, 12 bp, Artificial Sequence
  Oligonucleotide primer for the detection of SNP TSC0029618
cggcggtggcgg

SEQ ID NO: 320249 - DNA, 12 bp, Artificial Sequence
  Oligonucleotide primer for the detection of SNP TSC0029618
cggtggcggcgg

SEQ ID NO: 320250 - DNA, 12 bp, Artificial Sequence
  Oligonucleotide primer for the detection of SNP TSC0029618
tggcggcggcgg

SEQ ID NO: 320251 - DNA, 12 bp, Artificial Sequence
  Oligonucleotide primer for the detection of SNP TSC0029618
cggcggcggcgg

SEQ ID NO: 320252 - DNA, 12 bp, Artificial Sequence
  Oligonucleotide primer for the detection of SNP TSC0029619
tataaaaaaaat

SEQ ID NO: 320253 - DNA, 12 bp, Artificial Sequence
  Oligonucleotide primer for the detection of SNP TSC0029619
aattttatccaa

SEQ ID NO: 320254 - DNA, 12 bp, Artificial Sequence
  Oligonucleotide primer for the detection of SNP TSC0029619
tatggggagaat

SEQ ID NO: 320255 - DNA, 12 bp, Artificial Sequence
  Oligonucleotide primer for the detection of SNP TSC0029620
aaaaaccctcat

SEQ ID NO: 320256 - DNA, 12 bp, Artificial Sequence
  Oligonucleotide primer for the detection of SNP TSC0029620
aaaaaccctcgt

SEQ ID NO: 320257 - DNA, 12 bp, Artificial Sequence
  Oligonucleotide primer for the detection of SNP TSC0029620
acccctaataaa

SEQ ID NO: 320258 - DNA, 12 bp, Artificial Sequence
  Oligonucleotide primer for the detection of SNP TSC0029620
ggaaatttttgt

SEQ ID NO: 320259 - DNA, 12 bp, Artificial Sequence
  Oligonucleotide primer for the detection of SNP TSC0029620
ggaaattttcgt

SEQ ID NO: 320260 - DNA, 12 bp, Artificial Sequence
  Oligonucleotide primer for the detection of SNP TSC0029621
aaaaaaaccctc

SEQ ID NO: 320261 - DNA, 12 bp, Artificial Sequence
  Oligonucleotide primer for the detection of SNP TSC0029622
acttctatactt

SEQ ID NO: 320262 - DNA, 12 bp, Artificial Sequence
  Oligonucleotide primer for the detection of SNP TSC0029622
taaaatgtagta

SEQ ID NO: 320263 - DNA, 12 bp, Artificial Sequence
  Oligonucleotide primer for the detection of SNP TSC0029622
taaaatataata

SEQ ID NO: 320264 - DNA, 12 bp, Artificial Sequence
  Oligonucleotide primer for the detection of SNP TSC0029622
atttttgtattt

SEQ ID NO: 320265 - DNA, 12 bp, Artificial Sequence
  Oligonucleotide primer for the detection of SNP TSC0029623
aaaatttataaa

SEQ ID NO: 320266 - DNA, 12 bp, Artificial Sequence
  Oligonukleotid-Primer
gatatggattat

SEQ ID NO: 320267 - DNA, 12 bp, Artificial Sequence
  Oligonucleotide primer for the detection of SNP TSC0029624
aaatacatcaac

SEQ ID NO: 320268 - DNA, 12 bp, Artificial Sequence
  Oligonucleotide primer for the detection of SNP TSC0029624
agtgttttttaa

SEQ ID NO: 320269 - DNA, 12 bp, Artificial Sequence
  Oligonucleotide primer for the detection of SNP TSC0029625
acatcattttct

SEQ ID NO: 320270 - DNA, 12 bp, Artificial Sequence
  Oligonucleotide primer for the detection of SNP TSC0029626
tttttaatttcc

SEQ ID NO: 320271 - DNA, 12 bp, Artificial Sequence
  Oligonucleotide primer for the detection of SNP TSC0029626
agtttgtgttag

SEQ ID NO: 320272 - DNA, 12 bp, Artificial Sequence
  Oligonucleotide primer for the detection of SNP TSC0029627
ctacttataaat

SEQ ID NO: 320273 - DNA, 12 bp, Artificial Sequence
  Oligonucleotide primer for the detection of SNP TSC0029627
ttgttaaaggta

SEQ ID NO: 320274 - DNA, 12 bp, Artificial Sequence
  Oligonucleotide primer for the detection of SNP TSC0029628
tgtaatgtggat

SEQ ID NO: 320275 - DNA, 12 bp, Artificial Sequence
  Oligonucleotide primer for the detection of SNP TSC0029628
tgtaatgcggat

SEQ ID NO: 320276 - DNA, 12 bp, Artificial Sequence
  Oligonucleotide primer for the detection of SNP TSC0029628
tataatacaaat

SEQ ID NO: 320277 - DNA, 12 bp, Artificial Sequence
  Oligonucleotide primer for the detection of SNP TSC0029628
tataatacgaat

SEQ ID NO: 320278 - DNA, 12 bp, Artificial Sequence
  Oligonucleotide primer for the detection of SNP TSC0029628
ataaaagagtta

SEQ ID NO: 320279 - DNA, 12 bp, Artificial Sequence
  Oligonucleotide primer for the detection of SNP TSC0029629
ataaatttacct

SEQ ID NO: 320280 - DNA, 12 bp, Artificial Sequence
  Oligonucleotide primer for the detection of SNP TSC0029629
taatagtattgg

SEQ ID NO: 320281 - DNA, 12 bp, Artificial Sequence
  Oligonucleotide primer for the detection of SNP TSC0029630
aaaaaattaaat

SEQ ID NO: 320282 - DNA, 12 bp, Artificial Sequence
  Oligonucleotide primer for the detection of SNP TSC0029630
ttaattttaata

SEQ ID NO: 320283 - DNA, 12 bp, Artificial Sequence
  Oligonucleotide primer for the detection of SNP TSC0029631
atccaaaaaata

SEQ ID NO: 320284 - DNA, 12 bp, Artificial Sequence
  Oligonucleotide primer for the detection of SNP TSC0029631
tggttggaaagg

SEQ ID NO: 320285 - DNA, 12 bp, Artificial Sequence
  Oligonucleotide primer for the detection of SNP TSC0029631
tgtttaagaagt

SEQ ID NO: 320286 - DNA, 12 bp, Artificial Sequence
  Oligonucleotide primer for the detection of SNP TSC0029632
ccaaataaccac

SEQ ID NO: 320287 - DNA, 12 bp, Artificial Sequence
  Oligonucleotide primer for the detection of SNP TSC0029632
tggtgggtgtta

SEQ ID NO: 320288 - DNA, 12 bp, Artificial Sequence
  Oligonucleotide primer for the detection of SNP TSC0029633
atactatacaaa

SEQ ID NO: 320289 - DNA, 12 bp, Artificial Sequence
  Oligonucleotide primer for the detection of SNP TSC0029633
atactatacgaa

SEQ ID NO: 320290 - DNA, 12 bp, Artificial Sequence
  Oligonucleotide primer for the detection of SNP TSC0029633
agtgtagtttat

SEQ ID NO: 320291 - DNA, 12 bp, Artificial Sequence
  Oligonucleotide primer for the detection of SNP TSC0029633
aatacaactcac

SEQ ID NO: 320292 - DNA, 12 bp, Artificial Sequence
  Oligonucleotide primer for the detection of SNP TSC0029634
cctttcctttaa

SEQ ID NO: 320293 - DNA, 12 bp, Artificial Sequence
  Oligonucleotide primer for the detection of SNP TSC0029634
ttggggtatatg

SEQ ID NO: 320294 - DNA, 12 bp, Artificial Sequence
  Oligonucleotide primer for the detection of SNP TSC0029634
ttaaaacatata

SEQ ID NO: 320295 - DNA, 12 bp, Artificial Sequence
  Oligonucleotide primer for the detection of SNP TSC0029637
tcactccacaaa

SEQ ID NO: 320296 - DNA, 12 bp, Artificial Sequence
  Oligonucleotide primer for the detection of SNP TSC0029637
tatatttaacct

SEQ ID NO: 320297 - DNA, 12 bp, Artificial Sequence
  Oligonucleotide primer for the detection of SNP TSC0029637
ttattttataag

SEQ ID NO: 320298 - DNA, 12 bp, Artificial Sequence
  Oligonucleotide primer for the detection of SNP TSC0029639
cccttatatatc

SEQ ID NO: 320299 - DNA, 12 bp, Artificial Sequence
  Oligonucleotide primer for the detection of SNP TSC0029639
tttggagtttaa

SEQ ID NO: 320300 - DNA, 12 bp, Artificial Sequence
  Oligonucleotide primer for the detection of SNP TSC0029640
atataataaaat

SEQ ID NO: 320301 - DNA, 12 bp, Artificial Sequence
  Oligonucleotide primer for the detection of SNP TSC0029640
ggatgataattg

SEQ ID NO: 320302 - DNA, 12 bp, Artificial Sequence
  Oligonucleotide primer for the detection of SNP TSC0029641
gggtaaggtttt

SEQ ID NO: 320303 - DNA, 12 bp, Artificial Sequence
  Oligonucleotide primer for the detection of SNP TSC0029643
tatattccaaat

SEQ ID NO: 320304 - DNA, 12 bp, Artificial Sequence
  Oligonucleotide primer for the detection of SNP TSC0029643
tttttataatta

SEQ ID NO: 320305 - DNA, 12 bp, Artificial Sequence
  Oligonucleotide primer for the detection of SNP TSC0029643
tccccacaacca

SEQ ID NO: 320306 - DNA, 12 bp, Artificial Sequence
  Oligonucleotide primer for the detection of SNP TSC0029643
tatattttaggt

SEQ ID NO: 320307 - DNA, 12 bp, Artificial Sequence
  Oligonucleotide primer for the detection of SNP TSC0029644
aaacccctctaa

SEQ ID NO: 320308 - DNA, 12 bp, Artificial Sequence
  Oligonucleotide primer for the detection of SNP TSC0029644
gttggaatattt

SEQ ID NO: 320309 - DNA, 12 bp, Artificial Sequence
  Oligonucleotide primer for the detection of SNP TSC0029644
ctaaaacactta

SEQ ID NO: 320310 - DNA, 12 bp, Artificial Sequence
  Oligonucleotide primer for the detection of SNP TSC0029644
aggtttttttga

SEQ ID NO: 320311 - DNA, 12 bp, Artificial Sequence
  Oligonucleotide primer for the detection of SNP TSC0029646
tttcgaattttt

SEQ ID NO: 320312 - DNA, 12 bp, Artificial Sequence
  Oligonucleotide primer for the detection of SNP TSC0029647
aatctaaaaaac

SEQ ID NO: 320313 - DNA, 12 bp, Artificial Sequence
  Oligonucleotide primer for the detection of SNP TSC0029647
gtgattcgttta

SEQ ID NO: 320314 - DNA, 12 bp, Artificial Sequence
  Oligonucleotide primer for the detection of SNP TSC0029647
ataatccaccca

SEQ ID NO: 320315 - DNA, 12 bp, Artificial Sequence
  Oligonucleotide primer for the detection of SNP TSC0029647
ataatccgccca

SEQ ID NO: 320316 - DNA, 12 bp, Artificial Sequence
  Oligonucleotide primer for the detection of SNP TSC0029647
agtttgggaggt

SEQ ID NO: 320317 - DNA, 12 bp, Artificial Sequence
  Oligonucleotide primer for the detection of SNP TSC0029649
ccatcaataaat

SEQ ID NO: 320318 - DNA, 12 bp, Artificial Sequence
  Oligonucleotide primer for the detection of SNP TSC0029649
ttattgttgggg

SEQ ID NO: 320319 - DNA, 12 bp, Artificial Sequence
  Oligonucleotide primer for the detection of SNP TSC0029649
ttatcgttgggg

SEQ ID NO: 320320 - DNA, 12 bp, Artificial Sequence
  Oligonucleotide primer for the detection of SNP TSC0029651
cccccaatcacc

SEQ ID NO: 320321 - DNA, 12 bp, Artificial Sequence
  Oligonucleotide primer for the detection of SNP TSC0029651
cccccgatcacc

SEQ ID NO: 320322 - DNA, 12 bp, Artificial Sequence
  Oligonucleotide primer for the detection of SNP TSC0029651
ggttggggtgag

SEQ ID NO: 320323 - DNA, 12 bp, Artificial Sequence
  Oligonucleotide primer for the detection of SNP TSC0029652
taggtggtattg

SEQ ID NO: 320324 - DNA, 12 bp, Artificial Sequence
  Oligonucleotide primer for the detection of SNP TSC0029653
cctacctacccc

SEQ ID NO: 320325 - DNA, 12 bp, Artificial Sequence
  Oligonucleotide primer for the detection of SNP TSC0029653
atttatagttta

SEQ ID NO: 320326 - DNA, 12 bp, Artificial Sequence
  Oligonucleotide primer for the detection of SNP TSC0029654
attatatacacc

SEQ ID NO: 320327 - DNA, 12 bp, Artificial Sequence
  Oligonucleotide primer for the detection of SNP TSC0029654
ggtgtgtgagtt

SEQ ID NO: 320328 - DNA, 12 bp, Artificial Sequence
  Oligonucleotide primer for the detection of SNP TSC0029654
ggtgcgtgagtt

SEQ ID NO: 320329 - DNA, 12 bp, Artificial Sequence
  Oligonucleotide primer for the detection of SNP TSC0029657
tactaatcaaca

SEQ ID NO: 320330 - DNA, 12 bp, Artificial Sequence
  Oligonucleotide primer for the detection of SNP TSC0029657
ataaagattaat

SEQ ID NO: 320331 - DNA, 12 bp, Artificial Sequence
  Oligonucleotide primer for the detection of SNP TSC0029657
ataaagattaac

SEQ ID NO: 320332 - DNA, 12 bp, Artificial Sequence
  Oligonucleotide primer for the detection of SNP TSC0029657
tgttaattagta

SEQ ID NO: 320333 - DNA, 12 bp, Artificial Sequence
  Oligonucleotide primer for the detection of SNP TSC0029658
atgttgattagt

SEQ ID NO: 320334 - DNA, 12 bp, Artificial Sequence
  Oligonucleotide primer for the detection of SNP TSC0029658
atactaattaac

SEQ ID NO: 320335 - DNA, 12 bp, Artificial Sequence
  Oligonucleotide primer for the detection of SNP TSC0029658
ttaaaagattta

SEQ ID NO: 320336 - DNA, 12 bp, Artificial Sequence
  Oligonucleotide primer for the detection of SNP TSC0029663
ccatatccacta

SEQ ID NO: 320337 - DNA, 12 bp, Artificial Sequence
  Oligonucleotide primer for the detection of SNP TSC0029663
attttgttaatt

SEQ ID NO: 320338 - DNA, 12 bp, Artificial Sequence
  Oligonucleotide primer for the detection of SNP TSC0029663
actctattaatt

SEQ ID NO: 320339 - DNA, 12 bp, Artificial Sequence
  Oligonucleotide primer for the detection of SNP TSC0029663
ttatgtttattg

SEQ ID NO: 320340 - DNA, 12 bp, Artificial Sequence
  Oligonucleotide primer for the detection of SNP TSC0029664
taattctctaaa

SEQ ID NO: 320341 - DNA, 12 bp, Artificial Sequence
  Oligonucleotide primer for the detection of SNP TSC0029664
atattatattgt

SEQ ID NO: 320342 - DNA, 12 bp, Artificial Sequence
  Oligonucleotide primer for the detection of SNP TSC0029664
atattatattgc

SEQ ID NO: 320343 - DNA, 12 bp, Artificial Sequence
  Oligonucleotide primer for the detection of SNP TSC0029664
atactatactac

SEQ ID NO: 320344 - DNA, 12 bp, Artificial Sequence
  Oligonucleotide primer for the detection of SNP TSC0029668
tttaaataatct

SEQ ID NO: 320345 - DNA, 12 bp, Artificial Sequence
  Oligonucleotide primer for the detection of SNP TSC0029668
atttaatgtttg

SEQ ID NO: 320346 - DNA, 12 bp, Artificial Sequence
  Oligonucleotide primer for the detection of SNP TSC0029671
ataccataatac

SEQ ID NO: 320347 - DNA, 12 bp, Artificial Sequence
  Oligonucleotide primer for the detection of SNP TSC0029671
gtaccataatac

SEQ ID NO: 320348 - DNA, 12 bp, Artificial Sequence
  Oligonucleotide primer for the detection of SNP TSC0029672
aacatataaaat

SEQ ID NO: 320349 - DNA, 12 bp, Artificial Sequence
  Oligonucleotide primer for the detection of SNP TSC0029672
gttttgggtggg

SEQ ID NO: 320350 - DNA, 12 bp, Artificial Sequence
  Oligonucleotide primer for the detection of SNP TSC0029674
aattttaaggga

SEQ ID NO: 320351 - DNA, 12 bp, Artificial Sequence
  Oligonucleotide primer for the detection of SNP TSC0029674
aatcccaaaaaa

SEQ ID NO: 320352 - DNA, 12 bp, Artificial Sequence
  Oligonucleotide primer for the detection of SNP TSC0029674
ggtaggaggtag

SEQ ID NO: 320353 - DNA, 12 bp, Artificial Sequence
  Oligonucleotide primer for the detection of SNP TSC0029675
ttttgagattgt

SEQ ID NO: 320354 - DNA, 12 bp, Artificial Sequence
  Oligonucleotide primer for the detection of SNP TSC0029675
tttcgagattgt

SEQ ID NO: 320355 - DNA, 12 bp, Artificial Sequence
  Oligonucleotide primer for the detection of SNP TSC0029675
ttttgagatcgt

SEQ ID NO: 320356 - DNA, 12 bp, Artificial Sequence
  Oligonucleotide primer for the detection of SNP TSC0029675
tttcgagatcgt

SEQ ID NO: 320357 - DNA, 12 bp, Artificial Sequence
  Oligonucleotide primer for the detection of SNP TSC0029675
ttttgagattgc

SEQ ID NO: 320358 - DNA, 12 bp, Artificial Sequence
  Oligonucleotide primer for the detection of SNP TSC0029675
tttcgagattgc

SEQ ID NO: 320359 - DNA, 12 bp, Artificial Sequence
  Oligonucleotide primer for the detection of SNP TSC0029675
ttttgagatcgc

SEQ ID NO: 320360 - DNA, 12 bp, Artificial Sequence
  Oligonucleotide primer for the detection of SNP TSC0029675
tttcgagatcgc

SEQ ID NO: 320361 - DNA, 12 bp, Artificial Sequence
  Oligonucleotide primer for the detection of SNP TSC0029675
tcccaaaaccac

SEQ ID NO: 320362 - DNA, 12 bp, Artificial Sequence
  Oligonucleotide primer for the detection of SNP TSC0029675
tcccaaaaccgc

SEQ ID NO: 320363 - DNA, 12 bp, Artificial Sequence
  Oligonucleotide primer for the detection of SNP TSC0029675
tcccgaaaccac

SEQ ID NO: 320364 - DNA, 12 bp, Artificial Sequence
  Oligonucleotide primer for the detection of SNP TSC0029675
tcccgaaaccgc

SEQ ID NO: 320365 - DNA, 12 bp, Artificial Sequence
  Oligonucleotide primer for the detection of SNP TSC0029675
tttggggaggtt

SEQ ID NO: 320366 - DNA, 12 bp, Artificial Sequence
  Oligonucleotide primer for the detection of SNP TSC0029676
cgaaactcaaca

SEQ ID NO: 320367 - DNA, 12 bp, Artificial Sequence
  Oligonukleotid-Primer
ttgggagggttt

SEQ ID NO: 320368 - DNA, 12 bp, Artificial Sequence
  Oligonucleotide primer for the detection of SNP TSC0029676
tcgggagggttt

SEQ ID NO: 320369 - DNA, 12 bp, Artificial Sequence
  Oligonucleotide primer for the detection of SNP TSC0029676
ccgaaaaaaccc

SEQ ID NO: 320370 - DNA, 12 bp, Artificial Sequence
  Oligonucleotide primer for the detection of SNP TSC0029676
tggagtttagta

SEQ ID NO: 320371 - DNA, 12 bp, Artificial Sequence
  Oligonucleotide primer for the detection of SNP TSC0029676
cggagtttagta

SEQ ID NO: 320372 - DNA, 12 bp, Artificial Sequence
  Oligonucleotide primer for the detection of SNP TSC0029677
gttgtttgtggg

SEQ ID NO: 320373 - DNA, 12 bp, Artificial Sequence
  Oligonucleotide primer for the detection of SNP TSC0029677
gttgttcgtggg

SEQ ID NO: 320374 - DNA, 12 bp, Artificial Sequence
  Oligonucleotide primer for the detection of SNP TSC0029677
attattcataaa

SEQ ID NO: 320375 - DNA, 12 bp, Artificial Sequence
  Oligonucleotide primer for the detection of SNP TSC0029677
attattcgtaaa

SEQ ID NO: 320376 - DNA, 12 bp, Artificial Sequence
  Oligonucleotide primer for the detection of SNP TSC0029677
gttattcataaa

SEQ ID NO: 320377 - DNA, 12 bp, Artificial Sequence
  Oligonucleotide primer for the detection of SNP TSC0029677
gttattcgtaaa

SEQ ID NO: 320378 - DNA, 12 bp, Artificial Sequence
  Oligonucleotide primer for the detection of SNP TSC0029677
ggggaaaaaaaa

SEQ ID NO: 320379 - DNA, 12 bp, Artificial Sequence
  Oligonucleotide primer for the detection of SNP TSC0029678
atataaacttta

SEQ ID NO: 320380 - DNA, 12 bp, Artificial Sequence
  Oligonucleotide primer for the detection of SNP TSC0029678
taagttttgttt

SEQ ID NO: 320381 - DNA, 12 bp, Artificial Sequence
  Oligonucleotide primer for the detection of SNP TSC0029678
atgtgaattttg

SEQ ID NO: 320382 - DNA, 12 bp, Artificial Sequence
  Oligonucleotide primer for the detection of SNP TSC0029682
aatataaaaacc

SEQ ID NO: 320383 - DNA, 12 bp, Artificial Sequence
  Oligonucleotide primer for the detection of SNP TSC0029684
cccctctccctc

SEQ ID NO: 320384 - DNA, 12 bp, Artificial Sequence
  Oligonucleotide primer for the detection of SNP TSC0029684
agtgtggagatg

SEQ ID NO: 320385 - DNA, 12 bp, Artificial Sequence
  Oligonucleotide primer for the detection of SNP TSC0029685
ccctctccctcc

SEQ ID NO: 320386 - DNA, 12 bp, Artificial Sequence
  Oligonucleotide primer for the detection of SNP TSC0029685
atagtgtggaga

SEQ ID NO: 320387 - DNA, 12 bp, Artificial Sequence
  Oligonucleotide primer for the detection of SNP TSC0029686
ccaacaaccccc

SEQ ID NO: 320388 - DNA, 12 bp, Artificial Sequence
  Oligonucleotide primer for the detection of SNP TSC0029686
ccaacgaccccc

SEQ ID NO: 320389 - DNA, 12 bp, Artificial Sequence
  Oligonucleotide primer for the detection of SNP TSC0029686
ttagtggttttt

SEQ ID NO: 320390 - DNA, 12 bp, Artificial Sequence
  Oligonucleotide primer for the detection of SNP TSC0029686
ttagcggttttt

SEQ ID NO: 320391 - DNA, 12 bp, Artificial Sequence
  Oligonucleotide primer for the detection of SNP TSC0029687
aaattaacaaac

SEQ ID NO: 320392 - DNA, 12 bp, Artificial Sequence
  Oligonucleotide primer for the detection of SNP TSC0029687
gtggttttataa

SEQ ID NO: 320393 - DNA, 12 bp, Artificial Sequence
  Oligonucleotide primer for the detection of SNP TSC0029690
taaaattcactt

SEQ ID NO: 320394 - DNA, 12 bp, Artificial Sequence
  Oligonucleotide primer for the detection of SNP TSC0029690
agaagttagaat

SEQ ID NO: 320395 - DNA, 12 bp, Artificial Sequence
  Oligonucleotide primer for the detection of SNP TSC0029690
tggagtttattt

SEQ ID NO: 320396 - DNA, 12 bp, Artificial Sequence
  Oligonucleotide primer for the detection of SNP TSC0029693
gttggttaatta

SEQ ID NO: 320397 - DNA, 12 bp, Artificial Sequence
  Oligonucleotide primer for the detection of SNP TSC0029694
caatttcttaat

SEQ ID NO: 320398 - DNA, 12 bp, Artificial Sequence
  Oligonucleotide primer for the detection of SNP TSC0029694
gtagtttgatga

SEQ ID NO: 320399 - DNA, 12 bp, Artificial Sequence
  Oligonucleotide primer for the detection of SNP TSC0029694
gtagtttgacga

SEQ ID NO: 320400 - DNA, 12 bp, Artificial Sequence
  Oligonucleotide primer for the detection of SNP TSC0029695
tcaatttcttaa

SEQ ID NO: 320401 - DNA, 12 bp, Artificial Sequence
  Oligonucleotide primer for the detection of SNP TSC0029695
gtttgatgaatt

SEQ ID NO: 320402 - DNA, 12 bp, Artificial Sequence
  Oligonucleotide primer for the detection of SNP TSC0029695
gtttgacgaatt

SEQ ID NO: 320403 - DNA, 12 bp, Artificial Sequence
  Oligonucleotide primer for the detection of SNP TSC0029695
caacctaacaaa

SEQ ID NO: 320404 - DNA, 12 bp, Artificial Sequence
  Oligonucleotide primer for the detection of SNP TSC0029695
caacctaacgaa

SEQ ID NO: 320405 - DNA, 12 bp, Artificial Sequence
  Oligonucleotide primer for the detection of SNP TSC0029696
tagttatagaag

SEQ ID NO: 320406 - DNA, 12 bp, Artificial Sequence
  Oligonucleotide primer for the detection of SNP TSC0029696
caatcacaaaaa

SEQ ID NO: 320407 - DNA, 12 bp, Artificial Sequence
  Oligonucleotide primer for the detection of SNP TSC0029697
caaactatcctt

SEQ ID NO: 320408 - DNA, 12 bp, Artificial Sequence
  Oligonucleotide primer for the detection of SNP TSC0029697
ttaaaggtatag

SEQ ID NO: 320409 - DNA, 12 bp, Artificial Sequence
  Oligonucleotide primer for the detection of SNP TSC0029698
gtttttgtgagg

SEQ ID NO: 320410 - DNA, 12 bp, Artificial Sequence
  Oligonucleotide primer for the detection of SNP TSC0029699
actaccacacac

SEQ ID NO: 320411 - DNA, 12 bp, Artificial Sequence
  Oligonucleotide primer for the detection of SNP TSC0029699
tatttttttggg

SEQ ID NO: 320412 - DNA, 12 bp, Artificial Sequence
  Oligonucleotide primer for the detection of SNP TSC0029699
tacttttttaaa

SEQ ID NO: 320413 - DNA, 12 bp, Artificial Sequence
  Oligonucleotide primer for the detection of SNP TSC0029699
attgttatatat

SEQ ID NO: 320414 - DNA, 12 bp, Artificial Sequence
  Oligonucleotide primer for the detection of SNP TSC0029702
tcctctcccacc

SEQ ID NO: 320415 - DNA, 12 bp, Artificial Sequence
  Oligonucleotide primer for the detection of SNP TSC0029702
aaatgagatagt

SEQ ID NO: 320416 - DNA, 12 bp, Artificial Sequence
  Oligonucleotide primer for the detection of SNP TSC0029702
aataaaataaca

SEQ ID NO: 320417 - DNA, 12 bp, Artificial Sequence
  Oligonucleotide primer for the detection of SNP TSC0029706
atatattaaaaa

SEQ ID NO: 320418 - DNA, 12 bp, Artificial Sequence
  Oligonucleotide primer for the detection of SNP TSC0029706
tttaaatatttc

SEQ ID NO: 320419 - DNA, 12 bp, Artificial Sequence
  Oligonucleotide primer for the detection of SNP TSC0029706
ttttaaatattt

SEQ ID NO: 320420 - DNA, 12 bp, Artificial Sequence
  Oligonucleotide primer for the detection of SNP TSC0029706
atgtattaaaaa

SEQ ID NO: 320421 - DNA, 12 bp, Artificial Sequence
  Oligonucleotide primer for the detection of SNP TSC0029710
ttttacattttc

SEQ ID NO: 320422 - DNA, 12 bp, Artificial Sequence
  Oligonucleotide primer for the detection of SNP TSC0029710
tttaaataaaag

SEQ ID NO: 320423 - DNA, 12 bp, Artificial Sequence
  Oligonucleotide primer for the detection of SNP TSC0029711
aactccatctct

SEQ ID NO: 320424 - DNA, 12 bp, Artificial Sequence
  Oligonucleotide primer for the detection of SNP TSC0029711
tttttatgttaa

SEQ ID NO: 320425 - DNA, 12 bp, Artificial Sequence
  Oligonucleotide primer for the detection of SNP TSC0029716
taaaacatatcc

SEQ ID NO: 320426 - DNA, 12 bp, Artificial Sequence
  Oligonucleotide primer for the detection of SNP TSC0029716
attagtaggggg

SEQ ID NO: 320427 - DNA, 12 bp, Artificial Sequence
  Oligonucleotide primer for the detection of SNP TSC0029716
taaagtatgttt

SEQ ID NO: 320428 - DNA, 12 bp, Artificial Sequence
  Oligonucleotide primer for the detection of SNP TSC0029717
ttttcttccaaa

SEQ ID NO: 320429 - DNA, 12 bp, Artificial Sequence
  Oligonucleotide primer for the detection of SNP TSC0029717
gtttattataat

SEQ ID NO: 320430 - DNA, 12 bp, Artificial Sequence
  Oligonucleotide primer for the detection of SNP TSC0029717
acctattacaac

SEQ ID NO: 320431 - DNA, 12 bp, Artificial Sequence
  Oligonucleotide primer for the detection of SNP TSC0029718
tcataatttttt

SEQ ID NO: 320432 - DNA, 12 bp, Artificial Sequence
  Oligonucleotide primer for the detection of SNP TSC0029718
gtaatgtttttt

SEQ ID NO: 320433 - DNA, 12 bp, Artificial Sequence
  Oligonucleotide primer for the detection of SNP TSC0029720
ccctcccaacac

SEQ ID NO: 320434 - DNA, 12 bp, Artificial Sequence
  Oligonucleotide primer for the detection of SNP TSC0029720
ccctcccaacgc

SEQ ID NO: 320435 - DNA, 12 bp, Artificial Sequence
  Oligonucleotide primer for the detection of SNP TSC0029720
ttgagatgtttg

SEQ ID NO: 320436 - DNA, 12 bp, Artificial Sequence
  Oligonucleotide primer for the detection of SNP TSC0029720
tcgagatgtttg

SEQ ID NO: 320437 - DNA, 12 bp, Artificial Sequence
  Oligonucleotide primer for the detection of SNP TSC0029720
ttgagatgttcg

SEQ ID NO: 320438 - DNA, 12 bp, Artificial Sequence
  Oligonucleotide primer for the detection of SNP TSC0029720
tcgagatgttcg

SEQ ID NO: 320439 - DNA, 12 bp, Artificial Sequence
  Oligonucleotide primer for the detection of SNP TSC0029720
ccaaaataccca

SEQ ID NO: 320440 - DNA, 12 bp, Artificial Sequence
  Oligonucleotide primer for the detection of SNP TSC0029720
ccaaaatacccg

SEQ ID NO: 320441 - DNA, 12 bp, Artificial Sequence
  Oligonucleotide primer for the detection of SNP TSC0029720
ccgaaataccca

SEQ ID NO: 320442 - DNA, 12 bp, Artificial Sequence
  Oligonucleotide primer for the detection of SNP TSC0029720
ccgaaatacccg

SEQ ID NO: 320443 - DNA, 12 bp, Artificial Sequence
  Oligonucleotide primer for the detection of SNP TSC0029722
ggtatgttagat

SEQ ID NO: 320444 - DNA, 12 bp, Artificial Sequence
  Oligonucleotide primer for the detection of SNP TSC0029722
aacataccaaat

SEQ ID NO: 320445 - DNA, 12 bp, Artificial Sequence
  Oligonucleotide primer for the detection of SNP TSC0029725
ggatgattgttt

SEQ ID NO: 320446 - DNA, 12 bp, Artificial Sequence
  Oligonucleotide primer for the detection of SNP TSC0029725
taaataactatc

SEQ ID NO: 320447 - DNA, 12 bp, Artificial Sequence
  Oligonucleotide primer for the detection of SNP TSC0029725
ttaaaaaaagat

SEQ ID NO: 320448 - DNA, 12 bp, Artificial Sequence
  Oligonucleotide primer for the detection of SNP TSC0029726
cataaacacaaa

SEQ ID NO: 320449 - DNA, 12 bp, Artificial Sequence
  Oligonucleotide primer for the detection of SNP TSC0029728
tcatcctaacca

SEQ ID NO: 320450 - DNA, 12 bp, Artificial Sequence
  Oligonucleotide primer for the detection of SNP TSC0029728
gtataaatgatt

SEQ ID NO: 320451 - DNA, 12 bp, Artificial Sequence
  Oligonucleotide primer for the detection of SNP TSC0029728
gtataaacgatt

SEQ ID NO: 320452 - DNA, 12 bp, Artificial Sequence
  Oligonucleotide primer for the detection of SNP TSC0029728
ataaacgatcaa

SEQ ID NO: 320453 - DNA, 12 bp, Artificial Sequence
  Oligonucleotide primer for the detection of SNP TSC0029728
attttggttatt

SEQ ID NO: 320454 - DNA, 12 bp, Artificial Sequence
  Oligonucleotide primer for the detection of SNP TSC0029732
aaaatttatcat

SEQ ID NO: 320455 - DNA, 12 bp, Artificial Sequence
  Oligonucleotide primer for the detection of SNP TSC0029732
tgaggttttgta

SEQ ID NO: 320456 - DNA, 12 bp, Artificial Sequence
  Oligonucleotide primer for the detection of SNP TSC0029734
ttttgtgattat

SEQ ID NO: 320457 - DNA, 12 bp, Artificial Sequence
  Oligonucleotide primer for the detection of SNP TSC0029734
ccttataatcat

SEQ ID NO: 320458 - DNA, 12 bp, Artificial Sequence
  Oligonucleotide primer for the detection of SNP TSC0029734
attaatattaag

SEQ ID NO: 320459 - DNA, 12 bp, Artificial Sequence
  Oligonucleotide primer for the detection of SNP TSC0029735
gagggatttata

SEQ ID NO: 320460 - DNA, 12 bp, Artificial Sequence
  Oligonucleotide primer for the detection of SNP TSC0029735
aaaaaactcaca

SEQ ID NO: 320461 - DNA, 12 bp, Artificial Sequence
  Oligonucleotide primer for the detection of SNP TSC0029735
gggagtgtaagg

SEQ ID NO: 320462 - DNA, 12 bp, Artificial Sequence
  Oligonucleotide primer for the detection of SNP TSC0029737
atacactacacc

SEQ ID NO: 320463 - DNA, 12 bp, Artificial Sequence
  Oligonucleotide primer for the detection of SNP TSC0029737
ttggtgggagta

SEQ ID NO: 320464 - DNA, 12 bp, Artificial Sequence
  Oligonucleotide primer for the detection of SNP TSC0029737
gtgtattgtatt

SEQ ID NO: 320465 - DNA, 12 bp, Artificial Sequence
  Oligonucleotide primer for the detection of SNP TSC0029738
actcaactcaac

SEQ ID NO: 320466 - DNA, 12 bp, Artificial Sequence
  Oligonucleotide primer for the detection of SNP TSC0029738
ggaggttataga

SEQ ID NO: 320467 - DNA, 12 bp, Artificial Sequence
  Oligonucleotide primer for the detection of SNP TSC0029739
atatcaaaactt

SEQ ID NO: 320468 - DNA, 12 bp, Artificial Sequence
  Oligonucleotide primer for the detection of SNP TSC0029739
ggtgaataggaa

SEQ ID NO: 320469 - DNA, 12 bp, Artificial Sequence
  Oligonucleotide primer for the detection of SNP TSC0029741
aaacaaatacac

SEQ ID NO: 320470 - DNA, 12 bp, Artificial Sequence
  Oligonucleotide primer for the detection of SNP TSC0029741
agatagatatat

SEQ ID NO: 320471 - DNA, 12 bp, Artificial Sequence
  Oligonucleotide primer for the detection of SNP TSC0029742
aaatcaaaaacc

SEQ ID NO: 320472 - DNA, 12 bp, Artificial Sequence
  Oligonucleotide primer for the detection of SNP TSC0029742
attgatgagttt

SEQ ID NO: 320473 - DNA, 12 bp, Artificial Sequence
  Oligonucleotide primer for the detection of SNP TSC0029742
attgacgagttt

SEQ ID NO: 320474 - DNA, 12 bp, Artificial Sequence
  Oligonucleotide primer for the detection of SNP TSC0029742
cactaacaaacc

SEQ ID NO: 320475 - DNA, 12 bp, Artificial Sequence
  Oligonucleotide primer for the detection of SNP TSC0029742
cactaacgaacc

SEQ ID NO: 320476 - DNA, 12 bp, Artificial Sequence
  Oligonucleotide primer for the detection of SNP TSC0029742
gaattaggagtt

SEQ ID NO: 320477 - DNA, 12 bp, Artificial Sequence
  Oligonucleotide primer for the detection of SNP TSC0029742
gaattaggagtc

SEQ ID NO: 320478 - DNA, 12 bp, Artificial Sequence
  Oligonucleotide primer for the detection of SNP TSC0029745
cactttaaaaat

SEQ ID NO: 320479 - DNA, 12 bp, Artificial Sequence
  Oligonucleotide primer for the detection of SNP TSC0029745
atttggtaaata

SEQ ID NO: 320480 - DNA, 12 bp, Artificial Sequence
  Oligonucleotide primer for the detection of SNP TSC0029745
atttaacaaata

SEQ ID NO: 320481 - DNA, 12 bp, Artificial Sequence
  Oligonucleotide primer for the detection of SNP TSC0029745
tattttaggaat

SEQ ID NO: 320482 - DNA, 12 bp, Artificial Sequence
  Oligonucleotide primer for the detection of SNP TSC0029746
tacatacacata

SEQ ID NO: 320483 - DNA, 12 bp, Artificial Sequence
  Oligonucleotide primer for the detection of SNP TSC0029746
atttatgtatgt

SEQ ID NO: 320484 - DNA, 12 bp, Artificial Sequence
  Oligonucleotide primer for the detection of SNP TSC0029746
atccatacatat

SEQ ID NO: 320485 - DNA, 12 bp, Artificial Sequence
  Oligonucleotide primer for the detection of SNP TSC0029748
cccctaaaaacc

SEQ ID NO: 320486 - DNA, 12 bp, Artificial Sequence
  Oligonucleotide primer for the detection of SNP TSC0029748
aggagtgtaaag

SEQ ID NO: 320487 - DNA, 12 bp, Artificial Sequence
  Oligonucleotide primer for the detection of SNP TSC0029748
aggagcgtaaag

SEQ ID NO: 320488 - DNA, 12 bp, Artificial Sequence
  Oligonucleotide primer for the detection of SNP TSC0029749
acaaaattctac

SEQ ID NO: 320489 - DNA, 12 bp, Artificial Sequence
  Oligonucleotide primer for the detection of SNP TSC0029749
ggtttattgggg

SEQ ID NO: 320490 - DNA, 12 bp, Artificial Sequence
  Oligonucleotide primer for the detection of SNP TSC0029750
aataccaatcta

SEQ ID NO: 320491 - DNA, 12 bp, Artificial Sequence
  Oligonucleotide primer for the detection of SNP TSC0029750
ataggtgtatgt

SEQ ID NO: 320492 - DNA, 12 bp, Artificial Sequence
  Oligonucleotide primer for the detection of SNP TSC0029750
agtattaatttg

SEQ ID NO: 320493 - DNA, 12 bp, Artificial Sequence
  Oligonucleotide primer for the detection of SNP TSC0029751
atacctaataac

SEQ ID NO: 320494 - DNA, 12 bp, Artificial Sequence
  Oligonucleotide primer for the detection of SNP TSC0029751
atattgaggtta

SEQ ID NO: 320495 - DNA, 12 bp, Artificial Sequence
  Oligonucleotide primer for the detection of SNP TSC0029751
acactaaaacca

SEQ ID NO: 320496 - DNA, 12 bp, Artificial Sequence
  Oligonucleotide primer for the detection of SNP TSC0029751
atgtttgatgat

SEQ ID NO: 320497 - DNA, 12 bp, Artificial Sequence
  Oligonucleotide primer for the detection of SNP TSC0029758
tttaaaatttca

SEQ ID NO: 320498 - DNA, 12 bp, Artificial Sequence
  Oligonucleotide primer for the detection of SNP TSC0029758
taatttaaaaat

SEQ ID NO: 320499 - DNA, 12 bp, Artificial Sequence
  Oligonucleotide primer for the detection of SNP TSC0029758
ctaacccaaaaa

SEQ ID NO: 320500 - DNA, 12 bp, Artificial Sequence
  Oligonucleotide primer for the detection of SNP TSC0029758
atttggggtttt

SEQ ID NO: 320501 - DNA, 12 bp, Artificial Sequence
  Oligonucleotide primer for the detection of SNP TSC0029759
accaactcctct

SEQ ID NO: 320502 - DNA, 12 bp, Artificial Sequence
  Oligonucleotide primer for the detection of SNP TSC0029759
agattgggaagg

SEQ ID NO: 320503 - DNA, 12 bp, Artificial Sequence
  Oligonucleotide primer for the detection of SNP TSC0029759
attagttttttt

SEQ ID NO: 320504 - DNA, 12 bp, Artificial Sequence
  Oligonucleotide primer for the detection of SNP TSC0029760
acaattcctact

SEQ ID NO: 320505 - DNA, 12 bp, Artificial Sequence
  Oligonucleotide primer for the detection of SNP TSC0029760
tgtgggagggag

SEQ ID NO: 320506 - DNA, 12 bp, Artificial Sequence
  Oligonucleotide primer for the detection of SNP TSC0029761
aactttcttact

SEQ ID NO: 320507 - DNA, 12 bp, Artificial Sequence
  Oligonucleotide primer for the detection of SNP TSC0029761
taggatgtaatg

SEQ ID NO: 320508 - DNA, 12 bp, Artificial Sequence
  Oligonucleotide primer for the detection of SNP TSC0029762
ccaaattatatt

SEQ ID NO: 320509 - DNA, 12 bp, Artificial Sequence
  Oligonucleotide primer for the detection of SNP TSC0029762
ccgaattatatt

SEQ ID NO: 320510 - DNA, 12 bp, Artificial Sequence
  Oligonucleotide primer for the detection of SNP TSC0029762
gaatagatattg

SEQ ID NO: 320511 - DNA, 12 bp, Artificial Sequence
  Oligonucleotide primer for the detection of SNP TSC0029762
aaacaaacatta

SEQ ID NO: 320512 - DNA, 12 bp, Artificial Sequence
  Oligonucleotide primer for the detection of SNP TSC0029762
ttgagttatatt

SEQ ID NO: 320513 - DNA, 12 bp, Artificial Sequence
  Oligonucleotide primer for the detection of SNP TSC0029762
tcgagttatatt

SEQ ID NO: 320514 - DNA, 12 bp, Artificial Sequence
  Oligonucleotide primer for the detection of SNP TSC0029763
tcttaaacttat

SEQ ID NO: 320515 - DNA, 12 bp, Artificial Sequence
  Oligonucleotide primer for the detection of SNP TSC0029763
gtaatgttgagg

SEQ ID NO: 320516 - DNA, 12 bp, Artificial Sequence
  Oligonucleotide primer for the detection of SNP TSC0029765
actatattcatc

SEQ ID NO: 320517 - DNA, 12 bp, Artificial Sequence
  Oligonucleotide primer for the detection of SNP TSC0029766
aacttcatatca

SEQ ID NO: 320518 - DNA, 12 bp, Artificial Sequence
  Oligonucleotide primer for the detection of SNP TSC0029766
aacttcatatcg

SEQ ID NO: 320519 - DNA, 12 bp, Artificial Sequence
  Oligonucleotide primer for the detection of SNP TSC0029766
tttaagaattga

SEQ ID NO: 320520 - DNA, 12 bp, Artificial Sequence
  Oligonucleotide primer for the detection of SNP TSC0029766
aattttatattg

SEQ ID NO: 320521 - DNA, 12 bp, Artificial Sequence
  Oligonucleotide primer for the detection of SNP TSC0029766
aattttatatcg

SEQ ID NO: 320522 - DNA, 12 bp, Artificial Sequence
  Oligonucleotide primer for the detection of SNP TSC0029767
caaattaaacat

SEQ ID NO: 320523 - DNA, 12 bp, Artificial Sequence
  Oligonucleotide primer for the detection of SNP TSC0029768
aaatatcattac

SEQ ID NO: 320524 - DNA, 12 bp, Artificial Sequence
  Oligonucleotide primer for the detection of SNP TSC0029768
gaggttatatag

SEQ ID NO: 320525 - DNA, 12 bp, Artificial Sequence
  Oligonucleotide primer for the detection of SNP TSC0029768
aaaatcacacaa

SEQ ID NO: 320526 - DNA, 12 bp, Artificial Sequence
  Oligonucleotide primer for the detection of SNP TSC0029768
ggtattattatt

SEQ ID NO: 320527 - DNA, 12 bp, Artificial Sequence
  Oligonucleotide primer for the detection of SNP TSC0029769
aaaaactctcaa

SEQ ID NO: 320528 - DNA, 12 bp, Artificial Sequence
  Oligonucleotide primer for the detection of SNP TSC0029769
ccttcatataaa

SEQ ID NO: 320529 - DNA, 12 bp, Artificial Sequence
  Oligonucleotide primer for the detection of SNP TSC0029769
gaggtttttaat

SEQ ID NO: 320530 - DNA, 12 bp, Artificial Sequence
  Oligonucleotide primer for the detection of SNP TSC0029774
actatcaacact

SEQ ID NO: 320531 - DNA, 12 bp, Artificial Sequence
  Oligonucleotide primer for the detection of SNP TSC0029774
actatcaacgct

SEQ ID NO: 320532 - DNA, 12 bp, Artificial Sequence
  Oligonucleotide primer for the detection of SNP TSC0029774
ggggtgtgggaa

SEQ ID NO: 320533 - DNA, 12 bp, Artificial Sequence
  Oligonucleotide primer for the detection of SNP TSC0029774
ggggcgtgggaa

SEQ ID NO: 320534 - DNA, 12 bp, Artificial Sequence
  Oligonucleotide primer for the detection of SNP TSC0029775
cctaaactctta

SEQ ID NO: 320535 - DNA, 12 bp, Artificial Sequence
  Oligonucleotide primer for the detection of SNP TSC0029775
tgatagttagat

SEQ ID NO: 320536 - DNA, 12 bp, Artificial Sequence
  Oligonucleotide primer for the detection of SNP TSC0029775
taacaattaaac

SEQ ID NO: 320537 - DNA, 12 bp, Artificial Sequence
  Oligonucleotide primer for the detection of SNP TSC0029781
aacctaaaacac

SEQ ID NO: 320538 - DNA, 12 bp, Artificial Sequence
  Oligonucleotide primer for the detection of SNP TSC0029781
aacctaaaacgc

SEQ ID NO: 320539 - DNA, 12 bp, Artificial Sequence
  Oligonucleotide primer for the detection of SNP TSC0029781
tggagatattaa

SEQ ID NO: 320540 - DNA, 12 bp, Artificial Sequence
  Oligonucleotide primer for the detection of SNP TSC0029782
acctccactaaa

SEQ ID NO: 320541 - DNA, 12 bp, Artificial Sequence
  Oligonucleotide primer for the detection of SNP TSC0029782
catctcttctac

SEQ ID NO: 320542 - DNA, 12 bp, Artificial Sequence
  Oligonucleotide primer for the detection of SNP TSC0029783
accataaactcc

SEQ ID NO: 320543 - DNA, 12 bp, Artificial Sequence
  Oligonucleotide primer for the detection of SNP TSC0029783
ttgttggagtgg

SEQ ID NO: 320544 - DNA, 12 bp, Artificial Sequence
  Oligonucleotide primer for the detection of SNP TSC0029783
ttactaaaataa

SEQ ID NO: 320545 - DNA, 12 bp, Artificial Sequence
  Oligonucleotide primer for the detection of SNP TSC0029783
gttatgagtttt

SEQ ID NO: 320546 - DNA, 12 bp, Artificial Sequence
  Oligonucleotide primer for the detection of SNP TSC0029784
accttcaatacc

SEQ ID NO: 320547 - DNA, 12 bp, Artificial Sequence
  Oligonucleotide primer for the detection of SNP TSC0029784
tctttaaattta

SEQ ID NO: 320548 - DNA, 12 bp, Artificial Sequence
  Oligonucleotide primer for the detection of SNP TSC0029785
aatatttctttc

SEQ ID NO: 320549 - DNA, 12 bp, Artificial Sequence
  Oligonucleotide primer for the detection of SNP TSC0029785
tattttgtttaa

SEQ ID NO: 320550 - DNA, 12 bp, Artificial Sequence
  Oligonucleotide primer for the detection of SNP TSC0029787
cacctacaatac

SEQ ID NO: 320551 - DNA, 12 bp, Artificial Sequence
  Oligonucleotide primer for the detection of SNP TSC0029787
aagaggaggttg

SEQ ID NO: 320552 - DNA, 12 bp, Artificial Sequence
  Oligonucleotide primer for the detection of SNP TSC0029787
tatttgtagtgt

SEQ ID NO: 320553 - DNA, 12 bp, Artificial Sequence
  Oligonucleotide primer for the detection of SNP TSC0029788
aaataaaaacca

SEQ ID NO: 320554 - DNA, 12 bp, Artificial Sequence
  Oligonucleotide primer for the detection of SNP TSC0029788
tcacttcctatc

SEQ ID NO: 320555 - DNA, 12 bp, Artificial Sequence
  Oligonucleotide primer for the detection of SNP TSC0029788
ggatgaaaatta

SEQ ID NO: 320556 - DNA, 12 bp, Artificial Sequence
  Oligonucleotide primer for the detection of SNP TSC0029789
ataacacctctt

SEQ ID NO: 320557 - DNA, 12 bp, Artificial Sequence
  Oligonucleotide primer for the detection of SNP TSC0029789
tgtatattgttg

SEQ ID NO: 320558 - DNA, 12 bp, Artificial Sequence
  Oligonucleotide primer for the detection of SNP TSC0029790
aaaaactccctt

SEQ ID NO: 320559 - DNA, 12 bp, Artificial Sequence
  Oligonucleotide primer for the detection of SNP TSC0029790
gaaagattagga

SEQ ID NO: 320560 - DNA, 12 bp, Artificial Sequence
  Oligonucleotide primer for the detection of SNP TSC0029791
aaacaatcacta

SEQ ID NO: 320561 - DNA, 12 bp, Artificial Sequence
  Oligonucleotide primer for the detection of SNP TSC0029791
tagtttggtggt

SEQ ID NO: 320562 - DNA, 12 bp, Artificial Sequence
  Oligonucleotide primer for the detection of SNP TSC0029791
caacctaataat

SEQ ID NO: 320563 - DNA, 12 bp, Artificial Sequence
  Oligonucleotide primer for the detection of SNP TSC0029791
gggtagttatta

SEQ ID NO: 320564 - DNA, 12 bp, Artificial Sequence
  Oligonucleotide primer for the detection of SNP TSC0029792
aaaaatataaca

SEQ ID NO: 320565 - DNA, 12 bp, Artificial Sequence
  Oligonucleotide primer for the detection of SNP TSC0029792
aggttggaattt

SEQ ID NO: 320566 - DNA, 12 bp, Artificial Sequence
  Oligonucleotide primer for the detection of SNP TSC0029792
attaaaacccaa

SEQ ID NO: 320567 - DNA, 12 bp, Artificial Sequence
  Oligonucleotide primer for the detection of SNP TSC0029792
gggaagtgtggt

SEQ ID NO: 320568 - DNA, 12 bp, Artificial Sequence
  Oligonucleotide primer for the detection of SNP TSC0029795
aaatactaaatt

SEQ ID NO: 320569 - DNA, 12 bp, Artificial Sequence
  Oligonucleotide primer for the detection of SNP TSC0029796
aaaatatattat

SEQ ID NO: 320570 - DNA, 12 bp, Artificial Sequence
  Oligonucleotide primer for the detection of SNP TSC0029796
atgtagtattag

SEQ ID NO: 320571 - DNA, 12 bp, Artificial Sequence
  Oligonucleotide primer for the detection of SNP TSC0029796
acgtagtattag

SEQ ID NO: 320572 - DNA, 12 bp, Artificial Sequence
  Oligonucleotide primer for the detection of SNP TSC0029799
ttttaaataccc

SEQ ID NO: 320573 - DNA, 12 bp, Artificial Sequence
  Oligonukleotid-Primer
atttttttttac

SEQ ID NO: 320574 - DNA, 12 bp, Artificial Sequence
  Oligonucleotide primer for the detection of SNP TSC0029799
aatttctttcca

SEQ ID NO: 320575 - DNA, 12 bp, Artificial Sequence
  Oligonucleotide primer for the detection of SNP TSC0029799
ttttgagtgttt

SEQ ID NO: 320576 - DNA, 12 bp, Artificial Sequence
  Oligonucleotide primer for the detection of SNP TSC0029800
cccccaccaccc

SEQ ID NO: 320577 - DNA, 12 bp, Artificial Sequence
  Oligonucleotide primer for the detection of SNP TSC0029800
cccccaccgccc

SEQ ID NO: 320578 - DNA, 12 bp, Artificial Sequence
  Oligonucleotide primer for the detection of SNP TSC0029800
ataaagtgtata

SEQ ID NO: 320579 - DNA, 12 bp, Artificial Sequence
  Oligonucleotide primer for the detection of SNP TSC0029801
caactaattttt

SEQ ID NO: 320580 - DNA, 12 bp, Artificial Sequence
  Oligonucleotide primer for the detection of SNP TSC0029801
tctactaaaata

SEQ ID NO: 320581 - DNA, 12 bp, Artificial Sequence
  Oligonucleotide primer for the detection of SNP TSC0029804
taacctcctaaa

SEQ ID NO: 320582 - DNA, 12 bp, Artificial Sequence
  Oligonucleotide primer for the detection of SNP TSC0029804
tatttttatgtt

SEQ ID NO: 320583 - DNA, 12 bp, Artificial Sequence
  Oligonucleotide primer for the detection of SNP TSC0029804
tatttttatgtc

SEQ ID NO: 320584 - DNA, 12 bp, Artificial Sequence
  Oligonucleotide primer for the detection of SNP TSC0029804
cacctttatatc

SEQ ID NO: 320585 - DNA, 12 bp, Artificial Sequence
  Oligonucleotide primer for the detection of SNP TSC0029804
tgattttttgag

SEQ ID NO: 320586 - DNA, 12 bp, Artificial Sequence
  Oligonucleotide primer for the detection of SNP TSC0029805
tctttacactta

SEQ ID NO: 320587 - DNA, 12 bp, Artificial Sequence
  Oligonucleotide primer for the detection of SNP TSC0029805
tgtgatattatt

SEQ ID NO: 320588 - DNA, 12 bp, Artificial Sequence
  Oligonucleotide primer for the detection of SNP TSC0029805
tataacactatt

SEQ ID NO: 320589 - DNA, 12 bp, Artificial Sequence
  Oligonucleotide primer for the detection of SNP TSC0029806
tataacaactta

SEQ ID NO: 320590 - DNA, 12 bp, Artificial Sequence
  Oligonucleotide primer for the detection of SNP TSC0029806
aagtggtgaaat

SEQ ID NO: 320591 - DNA, 12 bp, Artificial Sequence
  Oligonucleotide primer for the detection of SNP TSC0029806
tgtaatagttta

SEQ ID NO: 320592 - DNA, 12 bp, Artificial Sequence
  Oligonucleotide primer for the detection of SNP TSC0029808
ctccaaaaatac

SEQ ID NO: 320593 - DNA, 12 bp, Artificial Sequence
  Oligonucleotide primer for the detection of SNP TSC0029808
ggagttttaata

SEQ ID NO: 320594 - DNA, 12 bp, Artificial Sequence
  Oligonucleotide primer for the detection of SNP TSC0029809
cccttcaaaaac

SEQ ID NO: 320595 - DNA, 12 bp, Artificial Sequence
  Oligonucleotide primer for the detection of SNP TSC0029809
aaaattgggtag

SEQ ID NO: 320596 - DNA, 12 bp, Artificial Sequence
  Oligonucleotide primer for the detection of SNP TSC0029809
aaaactaaacaa

SEQ ID NO: 320597 - DNA, 12 bp, Artificial Sequence
  Oligonucleotide primer for the detection of SNP TSC0029809
ttttttagagat

SEQ ID NO: 320598 - DNA, 12 bp, Artificial Sequence
  Oligonucleotide primer for the detection of SNP TSC0029809
ttttttagagac

SEQ ID NO: 320599 - DNA, 12 bp, Artificial Sequence
  Oligonucleotide primer for the detection of SNP TSC0029810
tcccaaacccct

SEQ ID NO: 320600 - DNA, 12 bp, Artificial Sequence
  Oligonucleotide primer for the detection of SNP TSC0029810
taaatggtgaaa

SEQ ID NO: 320601 - DNA, 12 bp, Artificial Sequence
  Oligonucleotide primer for the detection of SNP TSC0029810
taaacggtgaaa

SEQ ID NO: 320602 - DNA, 12 bp, Artificial Sequence
  Oligonucleotide primer for the detection of SNP TSC0029810
taaatggcgaaa

SEQ ID NO: 320603 - DNA, 12 bp, Artificial Sequence
  Oligonucleotide primer for the detection of SNP TSC0029810
taaacggcgaaa

SEQ ID NO: 320604 - DNA, 12 bp, Artificial Sequence
  Oligonucleotide primer for the detection of SNP TSC0029810
caaacaacgaaa

SEQ ID NO: 320605 - DNA, 12 bp, Artificial Sequence
  Oligonucleotide primer for the detection of SNP TSC0029810
caaacgacaaaa

SEQ ID NO: 320606 - DNA, 12 bp, Artificial Sequence
  Oligonucleotide primer for the detection of SNP TSC0029810
caaacgacgaaa

SEQ ID NO: 320607 - DNA, 12 bp, Artificial Sequence
  Oligonucleotide primer for the detection of SNP TSC0029811
acaacaaaacac

SEQ ID NO: 320608 - DNA, 12 bp, Artificial Sequence
  Oligonucleotide primer for the detection of SNP TSC0029811
acaacgaaacac

SEQ ID NO: 320609 - DNA, 12 bp, Artificial Sequence
  Oligonucleotide primer for the detection of SNP TSC0029811
acgacaaaacac

SEQ ID NO: 320610 - DNA, 12 bp, Artificial Sequence
  Oligonucleotide primer for the detection of SNP TSC0029811
acgacgaaacac

SEQ ID NO: 320611 - DNA, 12 bp, Artificial Sequence
  Oligonucleotide primer for the detection of SNP TSC0029812
aataaaaaacct

SEQ ID NO: 320612 - DNA, 12 bp, Artificial Sequence
  Oligonucleotide primer for the detection of SNP TSC0029812
aatattgttata

SEQ ID NO: 320613 - DNA, 12 bp, Artificial Sequence
  Oligonucleotide primer for the detection of SNP TSC0029813
ataattatttgg

SEQ ID NO: 320614 - DNA, 12 bp, Artificial Sequence
  Oligonucleotide primer for the detection of SNP TSC0029813
ataattatttaa

SEQ ID NO: 320615 - DNA, 12 bp, Artificial Sequence
  Oligonucleotide primer for the detection of SNP TSC0029814
taaaactctatc

SEQ ID NO: 320616 - DNA, 12 bp, Artificial Sequence
  Oligonucleotide primer for the detection of SNP TSC0029815
caccaaatcatt

SEQ ID NO: 320617 - DNA, 12 bp, Artificial Sequence
  Oligonucleotide primer for the detection of SNP TSC0029815
caccgaatcatt

SEQ ID NO: 320618 - DNA, 12 bp, Artificial Sequence
  Oligonucleotide primer for the detection of SNP TSC0029815
gggatttttgta

SEQ ID NO: 320619 - DNA, 12 bp, Artificial Sequence
  Oligonucleotide primer for the detection of SNP TSC0029815
aaaatccttaca

SEQ ID NO: 320620 - DNA, 12 bp, Artificial Sequence
  Oligonucleotide primer for the detection of SNP TSC0029815
tatcggattatt

SEQ ID NO: 320621 - DNA, 12 bp, Artificial Sequence
  Oligonucleotide primer for the detection of SNP TSC0029816
ataaatataata

SEQ ID NO: 320622 - DNA, 12 bp, Artificial Sequence
  Oligonucleotide primer for the detection of SNP TSC0029816
gtaaatatatgt

SEQ ID NO: 320623 - DNA, 12 bp, Artificial Sequence
  Oligonucleotide primer for the detection of SNP TSC0029816
cataaacacata

SEQ ID NO: 320624 - DNA, 12 bp, Artificial Sequence
  Oligonucleotide primer for the detection of SNP TSC0029816
cgtaaacacata

SEQ ID NO: 320625 - DNA, 12 bp, Artificial Sequence
  Oligonucleotide primer for the detection of SNP TSC0029816
taagtataatat

SEQ ID NO: 320626 - DNA, 12 bp, Artificial Sequence
  Oligonucleotide primer for the detection of SNP TSC0029817
aatactattaac

SEQ ID NO: 320627 - DNA, 12 bp, Artificial Sequence
  Oligonucleotide primer for the detection of SNP TSC0029820
aaccaaaaatcc

SEQ ID NO: 320628 - DNA, 12 bp, Artificial Sequence
  Oligonucleotide primer for the detection of SNP TSC0029820
tatagatttggg

SEQ ID NO: 320629 - DNA, 12 bp, Artificial Sequence
  Oligonucleotide primer for the detection of SNP TSC0029823
acctcctaaaac

SEQ ID NO: 320630 - DNA, 12 bp, Artificial Sequence
  Oligonucleotide primer for the detection of SNP TSC0029823
ttttattttgag

SEQ ID NO: 320631 - DNA, 12 bp, Artificial Sequence
  Oligonucleotide primer for the detection of SNP TSC0029824
ttaataatttca

SEQ ID NO: 320632 - DNA, 12 bp, Artificial Sequence
  Oligonucleotide primer for the detection of SNP TSC0029824
ttttatagagga

SEQ ID NO: 320633 - DNA, 12 bp, Artificial Sequence
  Oligonucleotide primer for the detection of SNP TSC0029824
cccacaaaaaaa

SEQ ID NO: 320634 - DNA, 12 bp, Artificial Sequence
  Oligonucleotide primer for the detection of SNP TSC0029824
tttggtggtttt

SEQ ID NO: 320635 - DNA, 12 bp, Artificial Sequence
  Oligonucleotide primer for the detection of SNP TSC0029825
tttcctaaatcc

SEQ ID NO: 320636 - DNA, 12 bp, Artificial Sequence
  Oligonucleotide primer for the detection of SNP TSC0029825
gttgtggataag

SEQ ID NO: 320637 - DNA, 12 bp, Artificial Sequence
  Oligonucleotide primer for the detection of SNP TSC0029825
actataaacaaa

SEQ ID NO: 320638 - DNA, 12 bp, Artificial Sequence
  Oligonucleotide primer for the detection of SNP TSC0029825
ttttttgagttc

SEQ ID NO: 320639 - DNA, 12 bp, Artificial Sequence
  Oligonucleotide primer for the detection of SNP TSC0029828
aaaacctctctc

SEQ ID NO: 320640 - DNA, 12 bp, Artificial Sequence
  Oligonucleotide primer for the detection of SNP TSC0029828
gtaaaagtttta

SEQ ID NO: 320641 - DNA, 12 bp, Artificial Sequence
  Oligonucleotide primer for the detection of SNP TSC0029829
accaacaccttc

SEQ ID NO: 320642 - DNA, 12 bp, Artificial Sequence
  Oligonucleotide primer for the detection of SNP TSC0029829
aaagttgttggg

SEQ ID NO: 320643 - DNA, 12 bp, Artificial Sequence
  Oligonucleotide primer for the detection of SNP TSC0029830
aatccaataaac

SEQ ID NO: 320644 - DNA, 12 bp, Artificial Sequence
  Oligonucleotide primer for the detection of SNP TSC0029830
tatatttaatgg

SEQ ID NO: 320645 - DNA, 12 bp, Artificial Sequence
  Oligonucleotide primer for the detection of SNP TSC0029830
catatctaataa

SEQ ID NO: 320646 - DNA, 12 bp, Artificial Sequence
  Oligonucleotide primer for the detection of SNP TSC0029830
aatttaatagat

SEQ ID NO: 320647 - DNA, 12 bp, Artificial Sequence
  Oligonucleotide primer for the detection of SNP TSC0029831
ttctaaaaataa

SEQ ID NO: 320648 - DNA, 12 bp, Artificial Sequence
  Oligonucleotide primer for the detection of SNP TSC0029831
atcaacctctcc

SEQ ID NO: 320649 - DNA, 12 bp, Artificial Sequence
  Oligonucleotide primer for the detection of SNP TSC0029831
ttttgagagtga

SEQ ID NO: 320650 - DNA, 12 bp, Artificial Sequence
  Oligonucleotide primer for the detection of SNP TSC0029832
tttttcctcaca

SEQ ID NO: 320651 - DNA, 12 bp, Artificial Sequence
  Oligonucleotide primer for the detection of SNP TSC0029832
taaaaatggtta

SEQ ID NO: 320652 - DNA, 12 bp, Artificial Sequence
  Oligonucleotide primer for the detection of SNP TSC0029833
aataaacttttc

SEQ ID NO: 320653 - DNA, 12 bp, Artificial Sequence
  Oligonucleotide primer for the detection of SNP TSC0029833
aaaggtaagaga

SEQ ID NO: 320654 - DNA, 12 bp, Artificial Sequence
  Oligonucleotide primer for the detection of SNP TSC0029834
ttaaaccatttt

SEQ ID NO: 320655 - DNA, 12 bp, Artificial Sequence
  Oligonucleotide primer for the detection of SNP TSC0029834
ataaaatacatt

SEQ ID NO: 320656 - DNA, 12 bp, Artificial Sequence
  Oligonucleotide primer for the detection of SNP TSC0029834
ttgagttatttt

SEQ ID NO: 320657 - DNA, 12 bp, Artificial Sequence
  Oligonucleotide primer for the detection of SNP TSC0029835
tcaaacacactc

SEQ ID NO: 320658 - DNA, 12 bp, Artificial Sequence
  Oligonucleotide primer for the detection of SNP TSC0029835
taagattaaaat

SEQ ID NO: 320659 - DNA, 12 bp, Artificial Sequence
  Oligonucleotide primer for the detection of SNP TSC0029835
aaaattaaaata

SEQ ID NO: 320660 - DNA, 12 bp, Artificial Sequence
  Oligonucleotide primer for the detection of SNP TSC0029836
aatatataacct

SEQ ID NO: 320661 - DNA, 12 bp, Artificial Sequence
  Oligonucleotide primer for the detection of SNP TSC0029836
aataaatagaga

SEQ ID NO: 320662 - DNA, 12 bp, Artificial Sequence
  Oligonucleotide primer for the detection of SNP TSC0029837
cttcattaaata

SEQ ID NO: 320663 - DNA, 12 bp, Artificial Sequence
  Oligonucleotide primer for the detection of SNP TSC0029837
tggttttattac

SEQ ID NO: 320664 - DNA, 12 bp, Artificial Sequence
  Oligonucleotide primer for the detection of SNP TSC0029837
taattttactac

SEQ ID NO: 320665 - DNA, 12 bp, Artificial Sequence
  Oligonucleotide primer for the detection of SNP TSC0029837
tattaaatgttt

SEQ ID NO: 320666 - DNA, 12 bp, Artificial Sequence
  Oligonukleotid-Primer
atttttatacta

SEQ ID NO: 320667 - DNA, 12 bp, Artificial Sequence
  Oligonucleotide primer for the detection of SNP TSC0029838
gtttttaataat

SEQ ID NO: 320668 - DNA, 12 bp, Artificial Sequence
  Oligonucleotide primer for the detection of SNP TSC0029838
atttttaataat

SEQ ID NO: 320669 - DNA, 12 bp, Artificial Sequence
  Oligonucleotide primer for the detection of SNP TSC0029838
atttttatgtta

SEQ ID NO: 320670 - DNA, 12 bp, Artificial Sequence
  Oligonucleotide primer for the detection of SNP TSC0029839
aaaaatacactc

SEQ ID NO: 320671 - DNA, 12 bp, Artificial Sequence
  Oligonucleotide primer for the detection of SNP TSC0029839
gttttttggatg

SEQ ID NO: 320672 - DNA, 12 bp, Artificial Sequence
  Oligonucleotide primer for the detection of SNP TSC0029839
accccctaaata

SEQ ID NO: 320673 - DNA, 12 bp, Artificial Sequence
  Oligonucleotide primer for the detection of SNP TSC0029839
gagggtatattt

SEQ ID NO: 320674 - DNA, 12 bp, Artificial Sequence
  Oligonucleotide primer for the detection of SNP TSC0029840
aactataatata

SEQ ID NO: 320675 - DNA, 12 bp, Artificial Sequence
  Oligonucleotide primer for the detection of SNP TSC0029840
gaggaaaaatgt

SEQ ID NO: 320676 - DNA, 12 bp, Artificial Sequence
  Oligonucleotide primer for the detection of SNP TSC0029840
attgtggtatgt

SEQ ID NO: 320677 - DNA, 12 bp, Artificial Sequence
  Oligonucleotide primer for the detection of SNP TSC0029841
aactacctcatt

SEQ ID NO: 320678 - DNA, 12 bp, Artificial Sequence
  Oligonucleotide primer for the detection of SNP TSC0029841
gtgaaatttata

SEQ ID NO: 320679 - DNA, 12 bp, Artificial Sequence
  Oligonucleotide primer for the detection of SNP TSC0029841
ataaaactcaca

SEQ ID NO: 320680 - DNA, 12 bp, Artificial Sequence
  Oligonucleotide primer for the detection of SNP TSC0029842
taaaattaaaat

SEQ ID NO: 320681 - DNA, 12 bp, Artificial Sequence
  Oligonucleotide primer for the detection of SNP TSC0029843
catatcgattaa

SEQ ID NO: 320682 - DNA, 12 bp, Artificial Sequence
  Oligonucleotide primer for the detection of SNP TSC0029843
cgtatcaattaa

SEQ ID NO: 320683 - DNA, 12 bp, Artificial Sequence
  Oligonucleotide primer for the detection of SNP TSC0029843
cgtatcgattaa

SEQ ID NO: 320684 - DNA, 12 bp, Artificial Sequence
  Oligonucleotide primer for the detection of SNP TSC0029843
ctcttaaacaac

SEQ ID NO: 320685 - DNA, 12 bp, Artificial Sequence
  Oligonucleotide primer for the detection of SNP TSC0029843
tgtgttgattaa

SEQ ID NO: 320686 - DNA, 12 bp, Artificial Sequence
  Oligonucleotide primer for the detection of SNP TSC0029843
cgtgttgattaa

SEQ ID NO: 320687 - DNA, 12 bp, Artificial Sequence
  Oligonucleotide primer for the detection of SNP TSC0029843
tgtgtcgattaa

SEQ ID NO: 320688 - DNA, 12 bp, Artificial Sequence
  Oligonucleotide primer for the detection of SNP TSC0029843
cgtgtcgattaa

SEQ ID NO: 320689 - DNA, 12 bp, Artificial Sequence
  Oligonucleotide primer for the detection of SNP TSC0029844
ataccatccttt

SEQ ID NO: 320690 - DNA, 12 bp, Artificial Sequence
  Oligonucleotide primer for the detection of SNP TSC0029844
ttttattttaga

SEQ ID NO: 320691 - DNA, 12 bp, Artificial Sequence
  Oligonucleotide primer for the detection of SNP TSC0029845
gatagtatgatg

SEQ ID NO: 320692 - DNA, 12 bp, Artificial Sequence
  Oligonucleotide primer for the detection of SNP TSC0029845
gatagtatgacg

SEQ ID NO: 320693 - DNA, 12 bp, Artificial Sequence
  Oligonucleotide primer for the detection of SNP TSC0029846
cccataatttat

SEQ ID NO: 320694 - DNA, 12 bp, Artificial Sequence
  Oligonucleotide primer for the detection of SNP TSC0029846
cccgtaatttat

SEQ ID NO: 320695 - DNA, 12 bp, Artificial Sequence
  Oligonucleotide primer for the detection of SNP TSC0029846
ttttattaaaag

SEQ ID NO: 320696 - DNA, 12 bp, Artificial Sequence
  Oligonucleotide primer for the detection of SNP TSC0029847
acacattctttt

SEQ ID NO: 320697 - DNA, 12 bp, Artificial Sequence
  Oligonucleotide primer for the detection of SNP TSC0029847
aaatgagtgtta

SEQ ID NO: 320698 - DNA, 12 bp, Artificial Sequence
  Oligonucleotide primer for the detection of SNP TSC0029848
ctactcaatttt

SEQ ID NO: 320699 - DNA, 12 bp, Artificial Sequence
  Oligonucleotide primer for the detection of SNP TSC0029848
ctactcgatttt

SEQ ID NO: 320700 - DNA, 12 bp, Artificial Sequence
  Oligonucleotide primer for the detection of SNP TSC0029848
tgattgttatta

SEQ ID NO: 320701 - DNA, 12 bp, Artificial Sequence
  Oligonucleotide primer for the detection of SNP TSC0029849
aaccccaccccc

SEQ ID NO: 320702 - DNA, 12 bp, Artificial Sequence
  Oligonucleotide primer for the detection of SNP TSC0029849
gaccccaccccc

SEQ ID NO: 320703 - DNA, 12 bp, Artificial Sequence
  Oligonucleotide primer for the detection of SNP TSC0029849
gtttttgtgggg

SEQ ID NO: 320704 - DNA, 12 bp, Artificial Sequence
  Oligonucleotide primer for the detection of SNP TSC0029849
acccttataaaa

SEQ ID NO: 320705 - DNA, 12 bp, Artificial Sequence
  Oligonucleotide primer for the detection of SNP TSC0029851
cttatacaaaat

SEQ ID NO: 320706 - DNA, 12 bp, Artificial Sequence
  Oligonucleotide primer for the detection of SNP TSC0029851
cttatacgaaat

SEQ ID NO: 320707 - DNA, 12 bp, Artificial Sequence
  Oligonucleotide primer for the detection of SNP TSC0029851
tgttgatttaaa

SEQ ID NO: 320708 - DNA, 12 bp, Artificial Sequence
  Oligonucleotide primer for the detection of SNP TSC0029851
cgttgatttaaa

SEQ ID NO: 320709 - DNA, 12 bp, Artificial Sequence
  Oligonucleotide primer for the detection of SNP TSC0029852
aaaatagggaga

SEQ ID NO: 320710 - DNA, 12 bp, Artificial Sequence
  Oligonucleotide primer for the detection of SNP TSC0029854
ttaatataataa

SEQ ID NO: 320711 - DNA, 12 bp, Artificial Sequence
  Oligonucleotide primer for the detection of SNP TSC0029854
ggagagtttttt

SEQ ID NO: 320712 - DNA, 12 bp, Artificial Sequence
  Oligonucleotide primer for the detection of SNP TSC0029854
taaaaaatcttc

SEQ ID NO: 320713 - DNA, 12 bp, Artificial Sequence
  Oligonucleotide primer for the detection of SNP TSC0029854
tttaatatagtg

SEQ ID NO: 320714 - DNA, 12 bp, Artificial Sequence
  Oligonucleotide primer for the detection of SNP TSC0029857
ccttccctataa

SEQ ID NO: 320715 - DNA, 12 bp, Artificial Sequence
  Oligonucleotide primer for the detection of SNP TSC0029857
aatttttaggga

SEQ ID NO: 320716 - DNA, 12 bp, Artificial Sequence
  Oligonucleotide primer for the detection of SNP TSC0029858
ccacctaaccca

SEQ ID NO: 320717 - DNA, 12 bp, Artificial Sequence
  Oligonucleotide primer for the detection of SNP TSC0029858
tggttttatgtg

SEQ ID NO: 320718 - DNA, 12 bp, Artificial Sequence
  Oligonucleotide primer for the detection of SNP TSC0029858
taactccatata

SEQ ID NO: 320719 - DNA, 12 bp, Artificial Sequence
  Oligonucleotide primer for the detection of SNP TSC0029859
ctctccccttac

SEQ ID NO: 320720 - DNA, 12 bp, Artificial Sequence
  Oligonucleotide primer for the detection of SNP TSC0029859
tagtagtttaag

SEQ ID NO: 320721 - DNA, 12 bp, Artificial Sequence
  Oligonucleotide primer for the detection of SNP TSC0029859
taacaactcaaa

SEQ ID NO: 320722 - DNA, 12 bp, Artificial Sequence
  Oligonucleotide primer for the detection of SNP TSC0029860
aaaatcttttaa

SEQ ID NO: 320723 - DNA, 12 bp, Artificial Sequence
  Oligonucleotide primer for the detection of SNP TSC0029860
ttttgaaagtat

SEQ ID NO: 320724 - DNA, 12 bp, Artificial Sequence
  Oligonucleotide primer for the detection of SNP TSC0029860
aaattttttagt

SEQ ID NO: 320725 - DNA, 12 bp, Artificial Sequence
  Oligonucleotide primer for the detection of SNP TSC0029861
caccacacaaca

SEQ ID NO: 320726 - DNA, 12 bp, Artificial Sequence
  Oligonucleotide primer for the detection of SNP TSC0029861
caccacgcaaca

SEQ ID NO: 320727 - DNA, 12 bp, Artificial Sequence
  Oligonucleotide primer for the detection of SNP TSC0029861
caccgcacaaca

SEQ ID NO: 320728 - DNA, 12 bp, Artificial Sequence
  Oligonucleotide primer for the detection of SNP TSC0029861
cgccacacaaca

SEQ ID NO: 320729 - DNA, 12 bp, Artificial Sequence
  Oligonucleotide primer for the detection of SNP TSC0029861
caccgcgcaaca

SEQ ID NO: 320730 - DNA, 12 bp, Artificial Sequence
  Oligonucleotide primer for the detection of SNP TSC0029861
cgccacgcaaca

SEQ ID NO: 320731 - DNA, 12 bp, Artificial Sequence
  Oligonucleotide primer for the detection of SNP TSC0029861
cgccgcacaaca

SEQ ID NO: 320732 - DNA, 12 bp, Artificial Sequence
  Oligonucleotide primer for the detection of SNP TSC0029861
cgccgcgcaaca

SEQ ID NO: 320733 - DNA, 12 bp, Artificial Sequence
  Oligonucleotide primer for the detection of SNP TSC0029861
atttttggtaat

SEQ ID NO: 320734 - DNA, 12 bp, Artificial Sequence
  Oligonucleotide primer for the detection of SNP TSC0029861
actcttaataat

SEQ ID NO: 320735 - DNA, 12 bp, Artificial Sequence
  Oligonucleotide primer for the detection of SNP TSC0029861
tgttgtgtagta

SEQ ID NO: 320736 - DNA, 12 bp, Artificial Sequence
  Oligonucleotide primer for the detection of SNP TSC0029861
cgttgtgtagta

SEQ ID NO: 320737 - DNA, 12 bp, Artificial Sequence
  Oligonucleotide primer for the detection of SNP TSC0029861
tgtcgtgtagta

SEQ ID NO: 320738 - DNA, 12 bp, Artificial Sequence
  Oligonucleotide primer for the detection of SNP TSC0029861
tgttgcgtagta

SEQ ID NO: 320739 - DNA, 12 bp, Artificial Sequence
  Oligonukleotid-Primer
cgtcgtgtagta

SEQ ID NO: 320740 - DNA, 12 bp, Artificial Sequence
  Oligonucleotide primer for the detection of SNP TSC0029861
cgttgcgtagta

SEQ ID NO: 320741 - DNA, 12 bp, Artificial Sequence
  Oligonucleotide primer for the detection of SNP TSC0029861
tgtcgcgtagta

SEQ ID NO: 320742 - DNA, 12 bp, Artificial Sequence
  Oligonucleotide primer for the detection of SNP TSC0029861
cgtcgcgtagta

SEQ ID NO: 320743 - DNA, 12 bp, Artificial Sequence
  Oligonucleotide primer for the detection of SNP TSC0029862
atctaactcaaa

SEQ ID NO: 320744 - DNA, 12 bp, Artificial Sequence
  Oligonucleotide primer for the detection of SNP TSC0029862
tagtttaagatt

SEQ ID NO: 320745 - DNA, 12 bp, Artificial Sequence
  Oligonucleotide primer for the detection of SNP TSC0029862
taatctaaaatc

SEQ ID NO: 320746 - DNA, 12 bp, Artificial Sequence
  Oligonucleotide primer for the detection of SNP TSC0029862
gtttggtttaaa

SEQ ID NO: 320747 - DNA, 12 bp, Artificial Sequence
  Oligonucleotide primer for the detection of SNP TSC0029865
aaaatttaattc

SEQ ID NO: 320748 - DNA, 12 bp, Artificial Sequence
  Oligonucleotide primer for the detection of SNP TSC0029865
ttttaatttaac

SEQ ID NO: 320749 - DNA, 12 bp, Artificial Sequence
  Oligonucleotide primer for the detection of SNP TSC0029865
ttttaatccaac

SEQ ID NO: 320750 - DNA, 12 bp, Artificial Sequence
  Oligonucleotide primer for the detection of SNP TSC0029865
ggatttgatttt

SEQ ID NO: 320751 - DNA, 12 bp, Artificial Sequence
  Oligonucleotide primer for the detection of SNP TSC0029866
ctacctattatt

SEQ ID NO: 320752 - DNA, 12 bp, Artificial Sequence
  Oligonucleotide primer for the detection of SNP TSC0029867
ctaaaacaaata

SEQ ID NO: 320753 - DNA, 12 bp, Artificial Sequence
  Oligonucleotide primer for the detection of SNP TSC0029867
gttttaagtggt

SEQ ID NO: 320754 - DNA, 12 bp, Artificial Sequence
  Oligonucleotide primer for the detection of SNP TSC0029867
ttggggtagatg

SEQ ID NO: 320755 - DNA, 12 bp, Artificial Sequence
  Oligonucleotide primer for the detection of SNP TSC0029868
tttaaaatctta

SEQ ID NO: 320756 - DNA, 12 bp, Artificial Sequence
  Oligonucleotide primer for the detection of SNP TSC0029868
ttgttatgtgtt

SEQ ID NO: 320757 - DNA, 12 bp, Artificial Sequence
  Oligonucleotide primer for the detection of SNP TSC0029868
tattatatacta

SEQ ID NO: 320758 - DNA, 12 bp, Artificial Sequence
  Oligonucleotide primer for the detection of SNP TSC0029868
ttagaattttgt

SEQ ID NO: 320759 - DNA, 12 bp, Artificial Sequence
  Oligonucleotide primer for the detection of SNP TSC0029869
tttacaacacca

SEQ ID NO: 320760 - DNA, 12 bp, Artificial Sequence
  Oligonucleotide primer for the detection of SNP TSC0029869
tttacaacgcca

SEQ ID NO: 320761 - DNA, 12 bp, Artificial Sequence
  Oligonucleotide primer for the detection of SNP TSC0029869
gaagttatagag

SEQ ID NO: 320762 - DNA, 12 bp, Artificial Sequence
  Oligonucleotide primer for the detection of SNP TSC0029869
aaatcacaaaaa

SEQ ID NO: 320763 - DNA, 12 bp, Artificial Sequence
  Oligonucleotide primer for the detection of SNP TSC0029869
ttatagtgttat

SEQ ID NO: 320764 - DNA, 12 bp, Artificial Sequence
  Oligonucleotide primer for the detection of SNP TSC0029869
ttatagcgttat

SEQ ID NO: 320765 - DNA, 12 bp, Artificial Sequence
  Oligonucleotide primer for the detection of SNP TSC0029870
attcctctcttc

SEQ ID NO: 320766 - DNA, 12 bp, Artificial Sequence
  Oligonucleotide primer for the detection of SNP TSC0029870
aatagagggtag

SEQ ID NO: 320767 - DNA, 12 bp, Artificial Sequence
  Oligonucleotide primer for the detection of SNP TSC0029871
ctatttttatta

SEQ ID NO: 320768 - DNA, 12 bp, Artificial Sequence
  Oligonucleotide primer for the detection of SNP TSC0029871
tttataaagaga

SEQ ID NO: 320769 - DNA, 12 bp, Artificial Sequence
  Oligonucleotide primer for the detection of SNP TSC0029872
ttttaggggatt

SEQ ID NO: 320770 - DNA, 12 bp, Artificial Sequence
  Oligonucleotide primer for the detection of SNP TSC0029872
ccccaaaaaact

SEQ ID NO: 320771 - DNA, 12 bp, Artificial Sequence
  Oligonucleotide primer for the detection of SNP TSC0029872
ttaatgtgtaaa

SEQ ID NO: 320772 - DNA, 12 bp, Artificial Sequence
  Oligonucleotide primer for the detection of SNP TSC0029873
catatacttaat

SEQ ID NO: 320773 - DNA, 12 bp, Artificial Sequence
  Oligonucleotide primer for the detection of SNP TSC0029873
aggttttgagag

SEQ ID NO: 320774 - DNA, 12 bp, Artificial Sequence
  Oligonucleotide primer for the detection of SNP TSC0029874
aaaaccaacaat

SEQ ID NO: 320775 - DNA, 12 bp, Artificial Sequence
  Oligonucleotide primer for the detection of SNP TSC0029874
agtttggatttt

SEQ ID NO: 320776 - DNA, 12 bp, Artificial Sequence
  Oligonucleotide primer for the detection of SNP TSC0029874
caacctaaatct

SEQ ID NO: 320777 - DNA, 12 bp, Artificial Sequence
  Oligonucleotide primer for the detection of SNP TSC0029874
aagttagtagtt

SEQ ID NO: 320778 - DNA, 12 bp, Artificial Sequence
  Oligonucleotide primer for the detection of SNP TSC0029875
taccttctaaat

SEQ ID NO: 320779 - DNA, 12 bp, Artificial Sequence
  Oligonucleotide primer for the detection of SNP TSC0029875
tatatagtttta

SEQ ID NO: 320780 - DNA, 12 bp, Artificial Sequence
  Oligonucleotide primer for the detection of SNP TSC0029876
tccaataaaatt

SEQ ID NO: 320781 - DNA, 12 bp, Artificial Sequence
  Oligonucleotide primer for the detection of SNP TSC0029876
atttgggaagaa

SEQ ID NO: 320782 - DNA, 12 bp, Artificial Sequence
  Oligonucleotide primer for the detection of SNP TSC0029876
tttaatgaaatt

SEQ ID NO: 320783 - DNA, 12 bp, Artificial Sequence
  Oligonucleotide primer for the detection of SNP TSC0029877
aagtataataga

SEQ ID NO: 320784 - DNA, 12 bp, Artificial Sequence
  Oligonucleotide primer for the detection of SNP TSC0029877
aaatataacaaa

SEQ ID NO: 320785 - DNA, 12 bp, Artificial Sequence
  Oligonucleotide primer for the detection of SNP TSC0029877
attattttgttt

SEQ ID NO: 320786 - DNA, 12 bp, Artificial Sequence
  Oligonucleotide primer for the detection of SNP TSC0029882
aaataactataa

SEQ ID NO: 320787 - DNA, 12 bp, Artificial Sequence
  Oligonucleotide primer for the detection of SNP TSC0029882
ttaaaatttatt

SEQ ID NO: 320788 - DNA, 12 bp, Artificial Sequence
  Oligonucleotide primer for the detection of SNP TSC0029882
ttaaaatttatc

SEQ ID NO: 320789 - DNA, 12 bp, Artificial Sequence
  Oligonucleotide primer for the detection of SNP TSC0029882
aatcaaaactta

SEQ ID NO: 320790 - DNA, 12 bp, Artificial Sequence
  Oligonucleotide primer for the detection of SNP TSC0029882
aatggttataat

SEQ ID NO: 320791 - DNA, 12 bp, Artificial Sequence
  Oligonucleotide primer for the detection of SNP TSC0029883
aaatagagtttt

SEQ ID NO: 320792 - DNA, 12 bp, Artificial Sequence
  Oligonucleotide primer for the detection of SNP TSC0029883
aaataaaactct

SEQ ID NO: 320793 - DNA, 12 bp, Artificial Sequence
  Oligonucleotide primer for the detection of SNP TSC0029883
ataagatttggt

SEQ ID NO: 320794 - DNA, 12 bp, Artificial Sequence
  Oligonucleotide primer for the detection of SNP TSC0029884
ctcccccaaaaa

SEQ ID NO: 320795 - DNA, 12 bp, Artificial Sequence
  Oligonucleotide primer for the detection of SNP TSC0029884
tttttattggtt

SEQ ID NO: 320796 - DNA, 12 bp, Artificial Sequence
  Oligonucleotide primer for the detection of SNP TSC0029884
ccctcactaatt

SEQ ID NO: 320797 - DNA, 12 bp, Artificial Sequence
  Oligonucleotide primer for the detection of SNP TSC0029887
taccttttatct

SEQ ID NO: 320798 - DNA, 12 bp, Artificial Sequence
  Oligonucleotide primer for the detection of SNP TSC0029889
caatcttccatc

SEQ ID NO: 320799 - DNA, 12 bp, Artificial Sequence
  Oligonucleotide primer for the detection of SNP TSC0029889
ttgttttgttat

SEQ ID NO: 320800 - DNA, 12 bp, Artificial Sequence
  Oligonucleotide primer for the detection of SNP TSC0029889
atcctactataa

SEQ ID NO: 320801 - DNA, 12 bp, Artificial Sequence
  Oligonucleotide primer for the detection of SNP TSC0029890
gtttttatagga

SEQ ID NO: 320802 - DNA, 12 bp, Artificial Sequence
  Oligonucleotide primer for the detection of SNP TSC0029892
taaaaaactctc

SEQ ID NO: 320803 - DNA, 12 bp, Artificial Sequence
  Oligonucleotide primer for the detection of SNP TSC0029893
ttcctttaataa

SEQ ID NO: 320804 - DNA, 12 bp, Artificial Sequence
  Oligonucleotide primer for the detection of SNP TSC0029893
aaggaagataaa

SEQ ID NO: 320805 - DNA, 12 bp, Artificial Sequence
  Oligonucleotide primer for the detection of SNP TSC0029894
caaccctatatc

SEQ ID NO: 320806 - DNA, 12 bp, Artificial Sequence
  Oligonucleotide primer for the detection of SNP TSC0029894
agtttttagtaa

SEQ ID NO: 320807 - DNA, 12 bp, Artificial Sequence
  Oligonucleotide primer for the detection of SNP TSC0029894
aatccccaataa

SEQ ID NO: 320808 - DNA, 12 bp, Artificial Sequence
  Oligonucleotide primer for the detection of SNP TSC0029895
tataatttatat

SEQ ID NO: 320809 - DNA, 12 bp, Artificial Sequence
  Oligonucleotide primer for the detection of SNP TSC0029895
ataatttatata

SEQ ID NO: 320810 - DNA, 12 bp, Artificial Sequence
  Oligonucleotide primer for the detection of SNP TSC0029895
tattttaagggt

SEQ ID NO: 320811 - DNA, 12 bp, Artificial Sequence
  Oligonucleotide primer for the detection of SNP TSC0029900
aattacttcttt

SEQ ID NO: 320812 - DNA, 12 bp, Artificial Sequence
  Oligonucleotide primer for the detection of SNP TSC0029901
actataataaat

SEQ ID NO: 320813 - DNA, 12 bp, Artificial Sequence
  Oligonucleotide primer for the detection of SNP TSC0029901
ttattgtatttg

SEQ ID NO: 320814 - DNA, 12 bp, Artificial Sequence
  Oligonucleotide primer for the detection of SNP TSC0029901
ttatcgtatttg

SEQ ID NO: 320815 - DNA, 12 bp, Artificial Sequence
  Oligonucleotide primer for the detection of SNP TSC0029902
catataacatac

SEQ ID NO: 320816 - DNA, 12 bp, Artificial Sequence
  Oligonucleotide primer for the detection of SNP TSC0029902
ttattaaatcaa

SEQ ID NO: 320817 - DNA, 12 bp, Artificial Sequence
  Oligonucleotide primer for the detection of SNP TSC0029902
tatatagtatat

SEQ ID NO: 320818 - DNA, 12 bp, Artificial Sequence
  Oligonucleotide primer for the detection of SNP TSC0029902
tatatagtatac

SEQ ID NO: 320819 - DNA, 12 bp, Artificial Sequence
  Oligonucleotide primer for the detection of SNP TSC0029903
aaaaatacaacc

SEQ ID NO: 320820 - DNA, 12 bp, Artificial Sequence
  Oligonucleotide primer for the detection of SNP TSC0029903
gaatggaaatga

SEQ ID NO: 320821 - DNA, 12 bp, Artificial Sequence
  Oligonucleotide primer for the detection of SNP TSC0029904
aactaaaaaacc

SEQ ID NO: 320822 - DNA, 12 bp, Artificial Sequence
  Oligonucleotide primer for the detection of SNP TSC0029904
tttatcttccta

SEQ ID NO: 320823 - DNA, 12 bp, Artificial Sequence
  Oligonucleotide primer for the detection of SNP TSC0029904
aattggaagatt

SEQ ID NO: 320824 - DNA, 12 bp, Artificial Sequence
  Oligonucleotide primer for the detection of SNP TSC0029905
acaataaatatt

SEQ ID NO: 320825 - DNA, 12 bp, Artificial Sequence
  Oligonucleotide primer for the detection of SNP TSC0029906
tccttccaaact

SEQ ID NO: 320826 - DNA, 12 bp, Artificial Sequence
  Oligonucleotide primer for the detection of SNP TSC0029906
tgtaattttaag

SEQ ID NO: 320827 - DNA, 12 bp, Artificial Sequence
  Oligonucleotide primer for the detection of SNP TSC0029906
cgtaattttaag

SEQ ID NO: 320828 - DNA, 12 bp, Artificial Sequence
  Oligonucleotide primer for the detection of SNP TSC0029910
ttctataatact

SEQ ID NO: 320829 - DNA, 12 bp, Artificial Sequence
  Oligonucleotide primer for the detection of SNP TSC0029910
tagtaatttgta

SEQ ID NO: 320830 - DNA, 12 bp, Artificial Sequence
  Oligonucleotide primer for the detection of SNP TSC0029912
ataactatatat

SEQ ID NO: 320831 - DNA, 12 bp, Artificial Sequence
  Oligonucleotide primer for the detection of SNP TSC0029912
aatattgtagta

SEQ ID NO: 320832 - DNA, 12 bp, Artificial Sequence
  Oligonucleotide primer for the detection of SNP TSC0029917
gtttaggtttgg

SEQ ID NO: 320833 - DNA, 12 bp, Artificial Sequence
  Oligonucleotide primer for the detection of SNP TSC0029918
tataaaccaacc

SEQ ID NO: 320834 - DNA, 12 bp, Artificial Sequence
  Oligonucleotide primer for the detection of SNP TSC0029918
ttggttgtatta

SEQ ID NO: 320835 - DNA, 12 bp, Artificial Sequence
  Oligonucleotide primer for the detection of SNP TSC0029924
ttagtttggata

SEQ ID NO: 320836 - DNA, 12 bp, Artificial Sequence
  Oligonucleotide primer for the detection of SNP TSC0029925
aaataaccacca

SEQ ID NO: 320837 - DNA, 12 bp, Artificial Sequence
  Oligonucleotide primer for the detection of SNP TSC0029925
aaataaccaccg

SEQ ID NO: 320838 - DNA, 12 bp, Artificial Sequence
  Oligonucleotide primer for the detection of SNP TSC0029925
aaggttttttta

SEQ ID NO: 320839 - DNA, 12 bp, Artificial Sequence
  Oligonucleotide primer for the detection of SNP TSC0029925
aaaatcttccca

SEQ ID NO: 320840 - DNA, 12 bp, Artificial Sequence
  Oligonucleotide primer for the detection of SNP TSC0029925
gatgattattgt

SEQ ID NO: 320841 - DNA, 12 bp, Artificial Sequence
  Oligonucleotide primer for the detection of SNP TSC0029925
gatgattatcgt

SEQ ID NO: 320842 - DNA, 12 bp, Artificial Sequence
  Oligonucleotide primer for the detection of SNP TSC0029926
actctctctata

SEQ ID NO: 320843 - DNA, 12 bp, Artificial Sequence
  Oligonucleotide primer for the detection of SNP TSC0029926
aattttgtatgt

SEQ ID NO: 320844 - DNA, 12 bp, Artificial Sequence
  Oligonucleotide primer for the detection of SNP TSC0029927
aagggatgttgg

SEQ ID NO: 320845 - DNA, 12 bp, Artificial Sequence
  Oligonucleotide primer for the detection of SNP TSC0029928
aaacctaaatta

SEQ ID NO: 320846 - DNA, 12 bp, Artificial Sequence
  Oligonucleotide primer for the detection of SNP TSC0029928
gttttatataaa

SEQ ID NO: 320847 - DNA, 12 bp, Artificial Sequence
  Oligonucleotide primer for the detection of SNP TSC0029928
acttcacataaa

SEQ ID NO: 320848 - DNA, 12 bp, Artificial Sequence
  Oligonucleotide primer for the detection of SNP TSC0029928
taagtttaggtt

SEQ ID NO: 320849 - DNA, 12 bp, Artificial Sequence
  Oligonucleotide primer for the detection of SNP TSC0029929
ctcaaattcccc

SEQ ID NO: 320850 - DNA, 12 bp, Artificial Sequence
  Oligonucleotide primer for the detection of SNP TSC0029929
tttttgtagagg

SEQ ID NO: 320851 - DNA, 12 bp, Artificial Sequence
  Oligonucleotide primer for the detection of SNP TSC0029930
ggttgttgttag

SEQ ID NO: 320852 - DNA, 12 bp, Artificial Sequence
  Oligonucleotide primer for the detection of SNP TSC0029931
ttaggttaggtg

SEQ ID NO: 320853 - DNA, 12 bp, Artificial Sequence
  Oligonucleotide primer for the detection of SNP TSC0029932
accaaaaaaaaa

SEQ ID NO: 320854 - DNA, 12 bp, Artificial Sequence
  Oligonucleotide primer for the detection of SNP TSC0029932
gtttcgtttttc

SEQ ID NO: 320855 - DNA, 12 bp, Artificial Sequence
  Oligonucleotide primer for the detection of SNP TSC0029932
atcccatttttc

SEQ ID NO: 320856 - DNA, 12 bp, Artificial Sequence
  Oligonucleotide primer for the detection of SNP TSC0029932
atcccgtttttc

SEQ ID NO: 320857 - DNA, 12 bp, Artificial Sequence
  Oligonucleotide primer for the detection of SNP TSC0029932
tagttaaggagg

SEQ ID NO: 320858 - DNA, 12 bp, Artificial Sequence
  Oligonucleotide primer for the detection of SNP TSC0029934
caactctataat

SEQ ID NO: 320859 - DNA, 12 bp, Artificial Sequence
  Oligonucleotide primer for the detection of SNP TSC0029934
cgactctataat

SEQ ID NO: 320860 - DNA, 12 bp, Artificial Sequence
  Oligonucleotide primer for the detection of SNP TSC0029934
gtagggagagag

SEQ ID NO: 320861 - DNA, 12 bp, Artificial Sequence
  Oligonucleotide primer for the detection of SNP TSC0029935
atacctctctcc

SEQ ID NO: 320862 - DNA, 12 bp, Artificial Sequence
  Oligonucleotide primer for the detection of SNP TSC0029936
aataactctact

SEQ ID NO: 320863 - DNA, 12 bp, Artificial Sequence
  Oligonucleotide primer for the detection of SNP TSC0029936
ttattagagagt

SEQ ID NO: 320864 - DNA, 12 bp, Artificial Sequence
  Oligonucleotide primer for the detection of SNP TSC0029936
cttaccaaaaaa

SEQ ID NO: 320865 - DNA, 12 bp, Artificial Sequence
  Oligonucleotide primer for the detection of SNP TSC0029940
caatatacttcc

SEQ ID NO: 320866 - DNA, 12 bp, Artificial Sequence
  Oligonucleotide primer for the detection of SNP TSC0029940
gtggggttagtg

SEQ ID NO: 320867 - DNA, 12 bp, Artificial Sequence
  Oligonucleotide primer for the detection of SNP TSC0029940
ataaaaccaata

SEQ ID NO: 320868 - DNA, 12 bp, Artificial Sequence
  Oligonucleotide primer for the detection of SNP TSC0029941
taataactctaa

SEQ ID NO: 320869 - DNA, 12 bp, Artificial Sequence
  Oligonucleotide primer for the detection of SNP TSC0029941
caaacctcctcc

SEQ ID NO: 320870 - DNA, 12 bp, Artificial Sequence
  Oligonucleotide primer for the detection of SNP TSC0029941
tggtggttttgg

SEQ ID NO: 320871 - DNA, 12 bp, Artificial Sequence
  Oligonucleotide primer for the detection of SNP TSC0029942
gaaaccaaaacc

SEQ ID NO: 320872 - DNA, 12 bp, Artificial Sequence
  Oligonukleotid-Primer
tgtgttttaatg

SEQ ID NO: 320873 - DNA, 12 bp, Artificial Sequence
  Oligonucleotide primer for the detection of SNP TSC0029943
aaactattctat

SEQ ID NO: 320874 - DNA, 12 bp, Artificial Sequence
  Oligonucleotide primer for the detection of SNP TSC0029943
ttgttagtagta

SEQ ID NO: 320875 - DNA, 12 bp, Artificial Sequence
  Oligonucleotide primer for the detection of SNP TSC0029945
aaccttaaaaat

SEQ ID NO: 320876 - DNA, 12 bp, Artificial Sequence
  Oligonukleotid-Primer
gaccttaaaaat

SEQ ID NO: 320877 - DNA, 12 bp, Artificial Sequence
  Oligonucleotide primer for the detection of SNP TSC0029945
gtttgattattt

SEQ ID NO: 320878 - DNA, 12 bp, Artificial Sequence
  Oligonucleotide primer for the detection of SNP TSC0029945
acctaaccaccc

SEQ ID NO: 320879 - DNA, 12 bp, Artificial Sequence
  Oligonucleotide primer for the detection of SNP TSC0029945
ggttttgggggt

SEQ ID NO: 320880 - DNA, 12 bp, Artificial Sequence
  Oligonucleotide primer for the detection of SNP TSC0029946
aaaatacaacct

SEQ ID NO: 320881 - DNA, 12 bp, Artificial Sequence
  Oligonucleotide primer for the detection of SNP TSC0029946
aaaatacgacct

SEQ ID NO: 320882 - DNA, 12 bp, Artificial Sequence
  Oligonucleotide primer for the detection of SNP TSC0029946
tatttaattttt

SEQ ID NO: 320883 - DNA, 12 bp, Artificial Sequence
  Oligonucleotide primer for the detection of SNP TSC0029946
cacccaaccccc

SEQ ID NO: 320884 - DNA, 12 bp, Artificial Sequence
  Oligonucleotide primer for the detection of SNP TSC0029946
ggggtgtggttt

SEQ ID NO: 320885 - DNA, 12 bp, Artificial Sequence
  Oligonucleotide primer for the detection of SNP TSC0029946
ggggtgcggttt

SEQ ID NO: 320886 - DNA, 12 bp, Artificial Sequence
  Oligonucleotide primer for the detection of SNP TSC0029947
cacaaatctacc

SEQ ID NO: 320887 - DNA, 12 bp, Artificial Sequence
  Oligonucleotide primer for the detection of SNP TSC0029947
gatgtttttttg

SEQ ID NO: 320888 - DNA, 12 bp, Artificial Sequence
  Oligonucleotide primer for the detection of SNP TSC0029948
accatctcttca

SEQ ID NO: 320889 - DNA, 12 bp, Artificial Sequence
  Oligonucleotide primer for the detection of SNP TSC0029948
attttattgaat

SEQ ID NO: 320890 - DNA, 12 bp, Artificial Sequence
  Oligonucleotide primer for the detection of SNP TSC0029948
attttatcgaat

SEQ ID NO: 320891 - DNA, 12 bp, Artificial Sequence
  Oligonucleotide primer for the detection of SNP TSC0029948
accccatcaaac

SEQ ID NO: 320892 - DNA, 12 bp, Artificial Sequence
  Oligonucleotide primer for the detection of SNP TSC0029948
accccatcgaac

SEQ ID NO: 320893 - DNA, 12 bp, Artificial Sequence
  Oligonucleotide primer for the detection of SNP TSC0029951
taatactttttt

SEQ ID NO: 320894 - DNA, 12 bp, Artificial Sequence
  Oligonucleotide primer for the detection of SNP TSC0029951
attgttgagggg

SEQ ID NO: 320895 - DNA, 12 bp, Artificial Sequence
  Oligonucleotide primer for the detection of SNP TSC0029954
ggagtttgtgat

SEQ ID NO: 320896 - DNA, 12 bp, Artificial Sequence
  Oligonucleotide primer for the detection of SNP TSC0029954
ggagtttgtgac

SEQ ID NO: 320897 - DNA, 12 bp, Artificial Sequence
  Oligonucleotide primer for the detection of SNP TSC0029954
gttggttaggtt

SEQ ID NO: 320898 - DNA, 12 bp, Artificial Sequence
  Oligonucleotide primer for the detection of SNP TSC0029955
atcacccaaact

SEQ ID NO: 320899 - DNA, 12 bp, Artificial Sequence
  Oligonucleotide primer for the detection of SNP TSC0029955
atcgtgttattg

SEQ ID NO: 320900 - DNA, 12 bp, Artificial Sequence
  Oligonucleotide primer for the detection of SNP TSC0029955
atcataccacta

SEQ ID NO: 320901 - DNA, 12 bp, Artificial Sequence
  Oligonucleotide primer for the detection of SNP TSC0029955
atcgtaccacta

SEQ ID NO: 320902 - DNA, 12 bp, Artificial Sequence
  Oligonucleotide primer for the detection of SNP TSC0029955
gttatttaggtt

SEQ ID NO: 320903 - DNA, 12 bp, Artificial Sequence
  Oligonucleotide primer for the detection of SNP TSC0029956
cctttcctaacc

SEQ ID NO: 320904 - DNA, 12 bp, Artificial Sequence
  Oligonucleotide primer for the detection of SNP TSC0029956
ttatctataaaa

SEQ ID NO: 320905 - DNA, 12 bp, Artificial Sequence
  Oligonucleotide primer for the detection of SNP TSC0029958
tatttacctact

SEQ ID NO: 320906 - DNA, 12 bp, Artificial Sequence
  Oligonucleotide primer for the detection of SNP TSC0029958
gaggtaatgtaa

SEQ ID NO: 320907 - DNA, 12 bp, Artificial Sequence
  Oligonucleotide primer for the detection of SNP TSC0029958
aaaacaatataa

SEQ ID NO: 320908 - DNA, 12 bp, Artificial Sequence
  Oligonucleotide primer for the detection of SNP TSC0029961
aaataacttttc

SEQ ID NO: 320909 - DNA, 12 bp, Artificial Sequence
  Oligonucleotide primer for the detection of SNP TSC0029961
ttatagtttata

SEQ ID NO: 320910 - DNA, 12 bp, Artificial Sequence
  Oligonucleotide primer for the detection of SNP TSC0029969
catacccaccct

SEQ ID NO: 320911 - DNA, 12 bp, Artificial Sequence
  Oligonucleotide primer for the detection of SNP TSC0029969
tggatttgggta

SEQ ID NO: 320912 - DNA, 12 bp, Artificial Sequence
  Oligonucleotide primer for the detection of SNP TSC0029970
ctaaacctaaat

SEQ ID NO: 320913 - DNA, 12 bp, Artificial Sequence
  Oligonucleotide primer for the detection of SNP TSC0029970
atgtttattttg

SEQ ID NO: 320914 - DNA, 12 bp, Artificial Sequence
  Oligonucleotide primer for the detection of SNP TSC0029970
atacccacccta

SEQ ID NO: 320915 - DNA, 12 bp, Artificial Sequence
  Oligonucleotide primer for the detection of SNP TSC0029970
ttggatttgggt

SEQ ID NO: 320916 - DNA, 12 bp, Artificial Sequence
  Oligonucleotide primer for the detection of SNP TSC0029972
aactctaattct

SEQ ID NO: 320917 - DNA, 12 bp, Artificial Sequence
  Oligonucleotide primer for the detection of SNP TSC0029972
taattaggtttt

SEQ ID NO: 320918 - DNA, 12 bp, Artificial Sequence
  Oligonucleotide primer for the detection of SNP TSC0029972
gattttggtttt

SEQ ID NO: 320919 - DNA, 12 bp, Artificial Sequence
  Oligonucleotide primer for the detection of SNP TSC0029973
taacaaatttaa

SEQ ID NO: 320920 - DNA, 12 bp, Artificial Sequence
  Oligonucleotide primer for the detection of SNP TSC0029973
taacgaatttaa

SEQ ID NO: 320921 - DNA, 12 bp, Artificial Sequence
  Oligonucleotide primer for the detection of SNP TSC0029973
ggggttgttttg

SEQ ID NO: 320922 - DNA, 12 bp, Artificial Sequence
  Oligonucleotide primer for the detection of SNP TSC0029973
attattttaaaa

SEQ ID NO: 320923 - DNA, 12 bp, Artificial Sequence
  Oligonucleotide primer for the detection of SNP TSC0029973
acgaatttaatt

SEQ ID NO: 320924 - DNA, 12 bp, Artificial Sequence
  Oligonucleotide primer for the detection of SNP TSC0029974
ccataatctatc

SEQ ID NO: 320925 - DNA, 12 bp, Artificial Sequence
  Oligonucleotide primer for the detection of SNP TSC0029974
ccgtaatctatc

SEQ ID NO: 320926 - DNA, 12 bp, Artificial Sequence
  Oligonucleotide primer for the detection of SNP TSC0029974
ttatttatttga

SEQ ID NO: 320927 - DNA, 12 bp, Artificial Sequence
  Oligonucleotide primer for the detection of SNP TSC0029974
ttatttattcga

SEQ ID NO: 320928 - DNA, 12 bp, Artificial Sequence
  Oligonucleotide primer for the detection of SNP TSC0029975
cctttacctctc

SEQ ID NO: 320929 - DNA, 12 bp, Artificial Sequence
  Oligonucleotide primer for the detection of SNP TSC0029975
atttttggagag

SEQ ID NO: 320930 - DNA, 12 bp, Artificial Sequence
  Oligonucleotide primer for the detection of SNP TSC0029976
accatatctaaa

SEQ ID NO: 320931 - DNA, 12 bp, Artificial Sequence
  Oligonucleotide primer for the detection of SNP TSC0029976
gaattttttggg

SEQ ID NO: 320932 - DNA, 12 bp, Artificial Sequence
  Oligonucleotide primer for the detection of SNP TSC0029976
attatgtttgga

SEQ ID NO: 320933 - DNA, 12 bp, Artificial Sequence
  Oligonucleotide primer for the detection of SNP TSC0029977
tatatactcaca

SEQ ID NO: 320934 - DNA, 12 bp, Artificial Sequence
  Oligonucleotide primer for the detection of SNP TSC0029977
cttattcaaata

SEQ ID NO: 320935 - DNA, 12 bp, Artificial Sequence
  Oligonucleotide primer for the detection of SNP TSC0029978
aaatgaattaaa

SEQ ID NO: 320936 - DNA, 12 bp, Artificial Sequence
  Oligonucleotide primer for the detection of SNP TSC0029979
tttctttctaac

SEQ ID NO: 320937 - DNA, 12 bp, Artificial Sequence
  Oligonucleotide primer for the detection of SNP TSC0029979
ttttttttaaga

SEQ ID NO: 320938 - DNA, 12 bp, Artificial Sequence
  Oligonucleotide primer for the detection of SNP TSC0029980
aaccacacttct

SEQ ID NO: 320939 - DNA, 12 bp, Artificial Sequence
  Oligonucleotide primer for the detection of SNP TSC0029980
aaccgcacttct

SEQ ID NO: 320940 - DNA, 12 bp, Artificial Sequence
  Oligonucleotide primer for the detection of SNP TSC0029980
gaggggaattga

SEQ ID NO: 320941 - DNA, 12 bp, Artificial Sequence
  Oligonucleotide primer for the detection of SNP TSC0029980
agtcgtattttt

SEQ ID NO: 320942 - DNA, 12 bp, Artificial Sequence
  Oligonucleotide primer for the detection of SNP TSC0029981
tctctaaataaa

SEQ ID NO: 320943 - DNA, 12 bp, Artificial Sequence
  Oligonucleotide primer for the detection of SNP TSC0029981
ggtttgaattgt

SEQ ID NO: 320944 - DNA, 12 bp, Artificial Sequence
  Oligonucleotide primer for the detection of SNP TSC0029981
aatttaaactat

SEQ ID NO: 320945 - DNA, 12 bp, Artificial Sequence
  Oligonucleotide primer for the detection of SNP TSC0029981
gatttaaactat

SEQ ID NO: 320946 - DNA, 12 bp, Artificial Sequence
  Oligonucleotide primer for the detection of SNP TSC0029981
tttttaagtgga

SEQ ID NO: 320947 - DNA, 12 bp, Artificial Sequence
  Oligonucleotide primer for the detection of SNP TSC0029982
ttcccatttatc

SEQ ID NO: 320948 - DNA, 12 bp, Artificial Sequence
  Oligonucleotide primer for the detection of SNP TSC0029982
agagttttagtt

SEQ ID NO: 320949 - DNA, 12 bp, Artificial Sequence
  Oligonucleotide primer for the detection of SNP TSC0029982
aaaatctcaatt

SEQ ID NO: 320950 - DNA, 12 bp, Artificial Sequence
  Oligonucleotide primer for the detection of SNP TSC0029983
attatactttct

SEQ ID NO: 320951 - DNA, 12 bp, Artificial Sequence
  Oligonucleotide primer for the detection of SNP TSC0029983
ttagaagagtat

SEQ ID NO: 320952 - DNA, 12 bp, Artificial Sequence
  Oligonucleotide primer for the detection of SNP TSC0029983
ctaaaaaaatat

SEQ ID NO: 320953 - DNA, 12 bp, Artificial Sequence
  Oligonucleotide primer for the detection of SNP TSC0029984
tcacaataaaat

SEQ ID NO: 320954 - DNA, 12 bp, Artificial Sequence
  Oligonucleotide primer for the detection of SNP TSC0029984
tatagtgatttg

SEQ ID NO: 320955 - DNA, 12 bp, Artificial Sequence
  Oligonucleotide primer for the detection of SNP TSC0029985
cctcaccttaat

SEQ ID NO: 320956 - DNA, 12 bp, Artificial Sequence
  Oligonucleotide primer for the detection of SNP TSC0029985
cctcgccttaat

SEQ ID NO: 320957 - DNA, 12 bp, Artificial Sequence
  Oligonucleotide primer for the detection of SNP TSC0029985
caaccatccccc

SEQ ID NO: 320958 - DNA, 12 bp, Artificial Sequence
  Oligonucleotide primer for the detection of SNP TSC0029985
tttcgttttagt

SEQ ID NO: 320959 - DNA, 12 bp, Artificial Sequence
  Oligonucleotide primer for the detection of SNP TSC0029986
aaaaacctacac

SEQ ID NO: 320960 - DNA, 12 bp, Artificial Sequence
  Oligonucleotide primer for the detection of SNP TSC0029986
atttttgtatta

SEQ ID NO: 320961 - DNA, 12 bp, Artificial Sequence
  Oligonucleotide primer for the detection of SNP TSC0029986
attttcgtatta

SEQ ID NO: 320962 - DNA, 12 bp, Artificial Sequence
  Oligonucleotide primer for the detection of SNP TSC0029992
cattctctacct

SEQ ID NO: 320963 - DNA, 12 bp, Artificial Sequence
  Oligonucleotide primer for the detection of SNP TSC0029992
agtaagatagga

SEQ ID NO: 320964 - DNA, 12 bp, Artificial Sequence
  Oligonucleotide primer for the detection of SNP TSC0029993
aatattttttaa

SEQ ID NO: 320965 - DNA, 12 bp, Artificial Sequence
  Oligonucleotide primer for the detection of SNP TSC0029993
atgatgggatgt

SEQ ID NO: 320966 - DNA, 12 bp, Artificial Sequence
  Oligonucleotide primer for the detection of SNP TSC0029993
atgatgggatgc

SEQ ID NO: 320967 - DNA, 12 bp, Artificial Sequence
  Oligonucleotide primer for the detection of SNP TSC0029993
ataataaaatac

SEQ ID NO: 320968 - DNA, 12 bp, Artificial Sequence
  Oligonucleotide primer for the detection of SNP TSC0029994
attctaaaaaca

SEQ ID NO: 320969 - DNA, 12 bp, Artificial Sequence
  Oligonukleotid-Primer
tttatattaaat

SEQ ID NO: 320970 - DNA, 12 bp, Artificial Sequence
  Oligonucleotide primer for the detection of SNP TSC0029994
tttataccaaat

SEQ ID NO: 320971 - DNA, 12 bp, Artificial Sequence
  Oligonucleotide primer for the detection of SNP TSC0029994
gttttgagaata

SEQ ID NO: 320972 - DNA, 12 bp, Artificial Sequence
  Oligonucleotide primer for the detection of SNP TSC0029995
tgattatgggag

SEQ ID NO: 320973 - DNA, 12 bp, Artificial Sequence
  Oligonukleotid-Primer
aaaaataccata

SEQ ID NO: 320974 - DNA, 12 bp, Artificial Sequence
  Oligonucleotide primer for the detection of SNP TSC0029996
aaaaataccgta

SEQ ID NO: 320975 - DNA, 12 bp, Artificial Sequence
  Oligonucleotide primer for the detection of SNP TSC0029996
attatttggttt

SEQ ID NO: 320976 - DNA, 12 bp, Artificial Sequence
  Oligonucleotide primer for the detection of SNP TSC0029996
accatttaactc

SEQ ID NO: 320977 - DNA, 12 bp, Artificial Sequence
  Oligonucleotide primer for the detection of SNP TSC0029996
aagagtgttgtg

SEQ ID NO: 320978 - DNA, 12 bp, Artificial Sequence
  Oligonucleotide primer for the detection of SNP TSC0029996
aagagtgtcgtg

SEQ ID NO: 320979 - DNA, 12 bp, Artificial Sequence
  Oligonucleotide primer for the detection of SNP TSC0029997
cacatattaata

SEQ ID NO: 320980 - DNA, 12 bp, Artificial Sequence
  Oligonucleotide primer for the detection of SNP TSC0029997
agaatatatatt

SEQ ID NO: 320981 - DNA, 12 bp, Artificial Sequence
  Oligonucleotide primer for the detection of SNP TSC0029997
aaaatacacatc

SEQ ID NO: 320982 - DNA, 12 bp, Artificial Sequence
  Oligonucleotide primer for the detection of SNP TSC0029997
tatatgttagta

SEQ ID NO: 320983 - DNA, 12 bp, Artificial Sequence
  Oligonucleotide primer for the detection of SNP TSC0029998
aacactttttcc

SEQ ID NO: 320984 - DNA, 12 bp, Artificial Sequence
  Oligonucleotide primer for the detection of SNP TSC0029998
tagataagttag

SEQ ID NO: 320985 - DNA, 12 bp, Artificial Sequence
  Oligonucleotide primer for the detection of SNP TSC0030000
ctaacccccaaa

SEQ ID NO: 320986 - DNA, 12 bp, Artificial Sequence
  Oligonucleotide primer for the detection of SNP TSC0030000
ttcctcacacaa

SEQ ID NO: 320987 - DNA, 12 bp, Artificial Sequence
  Oligonucleotide primer for the detection of SNP TSC0030001
ctattacccccc

SEQ ID NO: 320988 - DNA, 12 bp, Artificial Sequence
  Oligonucleotide primer for the detection of SNP TSC0030002
taaaaaccactc

SEQ ID NO: 320989 - DNA, 12 bp, Artificial Sequence
  Oligonucleotide primer for the detection of SNP TSC0030002
taggggttattt

SEQ ID NO: 320990 - DNA, 12 bp, Artificial Sequence
  Oligonucleotide primer for the detection of SNP TSC0030002
taggggttattc

SEQ ID NO: 320991 - DNA, 12 bp, Artificial Sequence
  Oligonucleotide primer for the detection of SNP TSC0030004
cattatccttat

SEQ ID NO: 320992 - DNA, 12 bp, Artificial Sequence
  Oligonucleotide primer for the detection of SNP TSC0030005
tttaggtttatt

SEQ ID NO: 320993 - DNA, 12 bp, Artificial Sequence
  Oligonucleotide primer for the detection of SNP TSC0030005
ccaaattcatta

SEQ ID NO: 320994 - DNA, 12 bp, Artificial Sequence
  Oligonucleotide primer for the detection of SNP TSC0030005
tagtaaatatgt

SEQ ID NO: 320995 - DNA, 12 bp, Artificial Sequence
  Oligonucleotide primer for the detection of SNP TSC0030005
tagtaaatacgt

SEQ ID NO: 320996 - DNA, 12 bp, Artificial Sequence
  Oligonucleotide primer for the detection of SNP TSC0030006
ttgagtgtattt

SEQ ID NO: 320997 - DNA, 12 bp, Artificial Sequence
  Oligonucleotide primer for the detection of SNP TSC0030006
ttgagcgtattt

SEQ ID NO: 320998 - DNA, 12 bp, Artificial Sequence
  Oligonucleotide primer for the detection of SNP TSC0030006
tcattaaacata

SEQ ID NO: 320999 - DNA, 12 bp, Artificial Sequence
  Oligonucleotide primer for the detection of SNP TSC0030006
tcattaaacgta

SEQ ID NO: 321000 - DNA, 12 bp, Artificial Sequence
  Oligonucleotide primer for the detection of SNP TSC0030006
ggataggggtag

SEQ ID NO: 321001 - DNA, 12 bp, Artificial Sequence
  Oligonucleotide primer for the detection of SNP TSC0030007
aaataccccaac

SEQ ID NO: 321002 - DNA, 12 bp, Artificial Sequence
  Oligonucleotide primer for the detection of SNP TSC0030007
tttgaagtttgg

SEQ ID NO: 321003 - DNA, 12 bp, Artificial Sequence
  Oligonucleotide primer for the detection of SNP TSC0030007
ttcgaagtttgg

SEQ ID NO: 321004 - DNA, 12 bp, Artificial Sequence
  Oligonucleotide primer for the detection of SNP TSC0030007
tccaaaatctaa

SEQ ID NO: 321005 - DNA, 12 bp, Artificial Sequence
  Oligonucleotide primer for the detection of SNP TSC0030007
tccgaaatctaa

SEQ ID NO: 321006 - DNA, 12 bp, Artificial Sequence
  Oligonucleotide primer for the detection of SNP TSC0030007
aagtgttttagt

SEQ ID NO: 321007 - DNA, 12 bp, Artificial Sequence
  Oligonucleotide primer for the detection of SNP TSC0030011
tgagttgggagg

SEQ ID NO: 321008 - DNA, 12 bp, Artificial Sequence
  Oligonucleotide primer for the detection of SNP TSC0030012
tatacaatctaa

SEQ ID NO: 321009 - DNA, 12 bp, Artificial Sequence
  Oligonucleotide primer for the detection of SNP TSC0030012
tatacgatctaa

SEQ ID NO: 321010 - DNA, 12 bp, Artificial Sequence
  Oligonucleotide primer for the detection of SNP TSC0030012
ttagatgtggtt

SEQ ID NO: 321011 - DNA, 12 bp, Artificial Sequence
  Oligonucleotide primer for the detection of SNP TSC0030012
ccaaatataacc

SEQ ID NO: 321012 - DNA, 12 bp, Artificial Sequence
  Oligonucleotide primer for the detection of SNP TSC0030012
tatatgatttgg

SEQ ID NO: 321013 - DNA, 12 bp, Artificial Sequence
  Oligonucleotide primer for the detection of SNP TSC0030012
tatacgatttgg

SEQ ID NO: 321014 - DNA, 12 bp, Artificial Sequence
  Oligonucleotide primer for the detection of SNP TSC0030016
ttgtttgggtat

SEQ ID NO: 321015 - DNA, 12 bp, Artificial Sequence
  Oligonucleotide primer for the detection of SNP TSC0030016
ttatctaaatac

SEQ ID NO: 321016 - DNA, 12 bp, Artificial Sequence
  Oligonucleotide primer for the detection of SNP TSC0030017
ctatctttcttt

SEQ ID NO: 321017 - DNA, 12 bp, Artificial Sequence
  Oligonucleotide primer for the detection of SNP TSC0030018
gaatgttttgta

SEQ ID NO: 321018 - DNA, 12 bp, Artificial Sequence
  Oligonucleotide primer for the detection of SNP TSC0030019
aaaaaattatat

SEQ ID NO: 321019 - DNA, 12 bp, Artificial Sequence
  Oligonucleotide primer for the detection of SNP TSC0030019
agaatttgtggg

SEQ ID NO: 321020 - DNA, 12 bp, Artificial Sequence
  Oligonucleotide primer for the detection of SNP TSC0030020
acaaaaatcaca

SEQ ID NO: 321021 - DNA, 12 bp, Artificial Sequence
  Oligonucleotide primer for the detection of SNP TSC0030020
gtgtatgtttgt

SEQ ID NO: 321022 - DNA, 12 bp, Artificial Sequence
  Oligonucleotide primer for the detection of SNP TSC0030020
tatacttataaa

SEQ ID NO: 321023 - DNA, 12 bp, Artificial Sequence
  Oligonucleotide primer for the detection of SNP TSC0030020
atagaagttata

SEQ ID NO: 321024 - DNA, 12 bp, Artificial Sequence
  Oligonucleotide primer for the detection of SNP TSC0030022
actaaaaccaac

SEQ ID NO: 321025 - DNA, 12 bp, Artificial Sequence
  Oligonucleotide primer for the detection of SNP TSC0030027
ccctcccataca

SEQ ID NO: 321026 - DNA, 12 bp, Artificial Sequence
  Oligonucleotide primer for the detection of SNP TSC0030027
ttatggatgggg

SEQ ID NO: 321027 - DNA, 12 bp, Artificial Sequence
  Oligonucleotide primer for the detection of SNP TSC0030027
ccataaataaaa

SEQ ID NO: 321028 - DNA, 12 bp, Artificial Sequence
  Oligonucleotide primer for the detection of SNP TSC0030028
tgaagtggtgag

SEQ ID NO: 321029 - DNA, 12 bp, Artificial Sequence
  Oligonucleotide primer for the detection of SNP TSC0030028
tgaagtggcgag

SEQ ID NO: 321030 - DNA, 12 bp, Artificial Sequence
  Oligonucleotide primer for the detection of SNP TSC0030028
taaaataacgaa

SEQ ID NO: 321031 - DNA, 12 bp, Artificial Sequence
  Oligonucleotide primer for the detection of SNP TSC0030028
aataaattttgt

SEQ ID NO: 321032 - DNA, 12 bp, Artificial Sequence
  Oligonucleotide primer for the detection of SNP TSC0030029
aaatattatttt

SEQ ID NO: 321033 - DNA, 12 bp, Artificial Sequence
  Oligonucleotide primer for the detection of SNP TSC0030029
ggtagaagaaag

SEQ ID NO: 321034 - DNA, 12 bp, Artificial Sequence
  Oligonucleotide primer for the detection of SNP TSC0030030
ctcccatttctc

SEQ ID NO: 321035 - DNA, 12 bp, Artificial Sequence
  Oligonucleotide primer for the detection of SNP TSC0030030
gtttgaaggtta

SEQ ID NO: 321036 - DNA, 12 bp, Artificial Sequence
  Oligonucleotide primer for the detection of SNP TSC0030031
acttaacaacct

SEQ ID NO: 321037 - DNA, 12 bp, Artificial Sequence
  Oligonucleotide primer for the detection of SNP TSC0030031
gtggagtgtttg

SEQ ID NO: 321038 - DNA, 12 bp, Artificial Sequence
  Oligonucleotide primer for the detection of SNP TSC0030031
ataaaatatcta

SEQ ID NO: 321039 - DNA, 12 bp, Artificial Sequence
  Oligonucleotide primer for the detection of SNP TSC0030031
gtttggtagttt

SEQ ID NO: 321040 - DNA, 12 bp, Artificial Sequence
  Oligonucleotide primer for the detection of SNP TSC0030035
atataatattat

SEQ ID NO: 321041 - DNA, 12 bp, Artificial Sequence
  Oligonucleotide primer for the detection of SNP TSC0030035
ttatttaattag

SEQ ID NO: 321042 - DNA, 12 bp, Artificial Sequence
  Oligonucleotide primer for the detection of SNP TSC0030036
taaactcaaacc

SEQ ID NO: 321043 - DNA, 12 bp, Artificial Sequence
  Oligonucleotide primer for the detection of SNP TSC0030036
tagataggagga

SEQ ID NO: 321044 - DNA, 12 bp, Artificial Sequence
  Oligonucleotide primer for the detection of SNP TSC0030038
acctcttacatt

SEQ ID NO: 321045 - DNA, 12 bp, Artificial Sequence
  Oligonucleotide primer for the detection of SNP TSC0030038
agagatttatta

SEQ ID NO: 321046 - DNA, 12 bp, Artificial Sequence
  Oligonucleotide primer for the detection of SNP TSC0030038
aaaaacctacca

SEQ ID NO: 321047 - DNA, 12 bp, Artificial Sequence
  Oligonucleotide primer for the detection of SNP TSC0030038
ttttttgtattc

SEQ ID NO: 321048 - DNA, 12 bp, Artificial Sequence
  Oligonucleotide primer for the detection of SNP TSC0030045
acttttcttaat

SEQ ID NO: 321049 - DNA, 12 bp, Artificial Sequence
  Oligonucleotide primer for the detection of SNP TSC0030045
tatagattgaga

SEQ ID NO: 321050 - DNA, 12 bp, Artificial Sequence
  Oligonucleotide primer for the detection of SNP TSC0030046
ccaaccaatcat

SEQ ID NO: 321051 - DNA, 12 bp, Artificial Sequence
  Oligonucleotide primer for the detection of SNP TSC0030047
ccataaacacat

SEQ ID NO: 321052 - DNA, 12 bp, Artificial Sequence
  Oligonucleotide primer for the detection of SNP TSC0030047
ccataaacgcat

SEQ ID NO: 321053 - DNA, 12 bp, Artificial Sequence
  Oligonucleotide primer for the detection of SNP TSC0030047
gtttggtgtgat

SEQ ID NO: 321054 - DNA, 12 bp, Artificial Sequence
  Oligonucleotide primer for the detection of SNP TSC0030047
ctaatataataa

SEQ ID NO: 321055 - DNA, 12 bp, Artificial Sequence
  Oligonucleotide primer for the detection of SNP TSC0030047
ttatgggtgtat

SEQ ID NO: 321056 - DNA, 12 bp, Artificial Sequence
  Oligonucleotide primer for the detection of SNP TSC0030047
ttatgggcgtat

SEQ ID NO: 321057 - DNA, 12 bp, Artificial Sequence
  Oligonucleotide primer for the detection of SNP TSC0030048
cctaaaatcaaa

SEQ ID NO: 321058 - DNA, 12 bp, Artificial Sequence
  Oligonucleotide primer for the detection of SNP TSC0030048
attttaaggggt

SEQ ID NO: 321059 - DNA, 12 bp, Artificial Sequence
  Oligonucleotide primer for the detection of SNP TSC0030048
actctaaaaaac

SEQ ID NO: 321060 - DNA, 12 bp, Artificial Sequence
  Oligonucleotide primer for the detection of SNP TSC0030048
tttggagttaaa

SEQ ID NO: 321061 - DNA, 12 bp, Artificial Sequence
  Oligonucleotide primer for the detection of SNP TSC0030049
actaatataaat

SEQ ID NO: 321062 - DNA, 12 bp, Artificial Sequence
  Oligonucleotide primer for the detection of SNP TSC0030050
ggttatattgtt

SEQ ID NO: 321063 - DNA, 12 bp, Artificial Sequence
  Oligonucleotide primer for the detection of SNP TSC0030050
aactacattatt

SEQ ID NO: 321064 - DNA, 12 bp, Artificial Sequence
  Oligonucleotide primer for the detection of SNP TSC0030050
aagtagggaagt

SEQ ID NO: 321065 - DNA, 12 bp, Artificial Sequence
  Oligonucleotide primer for the detection of SNP TSC0030051
taaaaaccataa

SEQ ID NO: 321066 - DNA, 12 bp, Artificial Sequence
  Oligonucleotide primer for the detection of SNP TSC0030051
taaaaaccgtaa

SEQ ID NO: 321067 - DNA, 12 bp, Artificial Sequence
  Oligonucleotide primer for the detection of SNP TSC0030051
cctacctccatc

SEQ ID NO: 321068 - DNA, 12 bp, Artificial Sequence
  Oligonucleotide primer for the detection of SNP TSC0030051
ggaagttgtggt

SEQ ID NO: 321069 - DNA, 12 bp, Artificial Sequence
  Oligonucleotide primer for the detection of SNP TSC0030051
ggaagtcgtggt

SEQ ID NO: 321070 - DNA, 12 bp, Artificial Sequence
  Oligonucleotide primer for the detection of SNP TSC0030052
aaaataactcac

SEQ ID NO: 321071 - DNA, 12 bp, Artificial Sequence
  Oligonucleotide primer for the detection of SNP TSC0030052
gggggattaggg

SEQ ID NO: 321072 - DNA, 12 bp, Artificial Sequence
  Oligonucleotide primer for the detection of SNP TSC0030053
agatagatagat

SEQ ID NO: 321073 - DNA, 12 bp, Artificial Sequence
  Oligonucleotide primer for the detection of SNP TSC0030057
taaacataccta

SEQ ID NO: 321074 - DNA, 12 bp, Artificial Sequence
  Oligonucleotide primer for the detection of SNP TSC0030057
atattaaaatag

SEQ ID NO: 321075 - DNA, 12 bp, Artificial Sequence
  Oligonucleotide primer for the detection of SNP TSC0030057
acaccaaaataa

SEQ ID NO: 321076 - DNA, 12 bp, Artificial Sequence
  Oligonucleotide primer for the detection of SNP TSC0030058
tactctacccaa

SEQ ID NO: 321077 - DNA, 12 bp, Artificial Sequence
  Oligonucleotide primer for the detection of SNP TSC0030058
aggattaaagtt

SEQ ID NO: 321078 - DNA, 12 bp, Artificial Sequence
  Oligonucleotide primer for the detection of SNP TSC0030058
aaaatcaaaacc

SEQ ID NO: 321079 - DNA, 12 bp, Artificial Sequence
  Oligonucleotide primer for the detection of SNP TSC0030058
tgttttgtttag

SEQ ID NO: 321080 - DNA, 12 bp, Artificial Sequence
  Oligonucleotide primer for the detection of SNP TSC0030067
caaatatctata

SEQ ID NO: 321081 - DNA, 12 bp, Artificial Sequence
  Oligonucleotide primer for the detection of SNP TSC0030067
atttagatttat

SEQ ID NO: 321082 - DNA, 12 bp, Artificial Sequence
  Oligonucleotide primer for the detection of SNP TSC0030067
tttaaatctata

SEQ ID NO: 321083 - DNA, 12 bp, Artificial Sequence
  Oligonucleotide primer for the detection of SNP TSC0030067
aaatatttgtat

SEQ ID NO: 321084 - DNA, 12 bp, Artificial Sequence
  Oligonucleotide primer for the detection of SNP TSC0030068
cccacactaacc

SEQ ID NO: 321085 - DNA, 12 bp, Artificial Sequence
  Oligonucleotide primer for the detection of SNP TSC0030068
cccacgctaacc

SEQ ID NO: 321086 - DNA, 12 bp, Artificial Sequence
  Oligonucleotide primer for the detection of SNP TSC0030068
cccgcactaacc

SEQ ID NO: 321087 - DNA, 12 bp, Artificial Sequence
  Oligonucleotide primer for the detection of SNP TSC0030068
cccgcgctaacc

SEQ ID NO: 321088 - DNA, 12 bp, Artificial Sequence
  Oligonucleotide primer for the detection of SNP TSC0030068
atggggagttag

SEQ ID NO: 321089 - DNA, 12 bp, Artificial Sequence
  Oligonucleotide primer for the detection of SNP TSC0030068
acggggagttag

SEQ ID NO: 321090 - DNA, 12 bp, Artificial Sequence
  Oligonukleotid-Primer
tgttgtttttgt

SEQ ID NO: 321091 - DNA, 12 bp, Artificial Sequence
  Oligonucleotide primer for the detection of SNP TSC0030069
cgttgtttttgt

SEQ ID NO: 321092 - DNA, 12 bp, Artificial Sequence
  Oligonucleotide primer for the detection of SNP TSC0030069
cactactcctat

SEQ ID NO: 321093 - DNA, 12 bp, Artificial Sequence
  Oligonucleotide primer for the detection of SNP TSC0030069
cgctactcctat

SEQ ID NO: 321094 - DNA, 12 bp, Artificial Sequence
  Oligonucleotide primer for the detection of SNP TSC0030069
gaagagagaatg

SEQ ID NO: 321095 - DNA, 12 bp, Artificial Sequence
  Oligonucleotide primer for the detection of SNP TSC0030070
cctctaacaatc

SEQ ID NO: 321096 - DNA, 12 bp, Artificial Sequence
  Oligonucleotide primer for the detection of SNP TSC0030070
gggtagtggggt

SEQ ID NO: 321097 - DNA, 12 bp, Artificial Sequence
  Oligonucleotide primer for the detection of SNP TSC0030070
gggtagcggggt

SEQ ID NO: 321098 - DNA, 12 bp, Artificial Sequence
  Oligonucleotide primer for the detection of SNP TSC0030070
gggtagtggggc

SEQ ID NO: 321099 - DNA, 12 bp, Artificial Sequence
  Oligonucleotide primer for the detection of SNP TSC0030070
gggtagcggggc

SEQ ID NO: 321100 - DNA, 12 bp, Artificial Sequence
  Oligonucleotide primer for the detection of SNP TSC0030070
cgaacaacaaaa

SEQ ID NO: 321101 - DNA, 12 bp, Artificial Sequence
  Oligonucleotide primer for the detection of SNP TSC0030070
cgaacaacgaaa

SEQ ID NO: 321102 - DNA, 12 bp, Artificial Sequence
  Oligonucleotide primer for the detection of SNP TSC0030072
caacactattat

SEQ ID NO: 321103 - DNA, 12 bp, Artificial Sequence
  Oligonucleotide primer for the detection of SNP TSC0030072
tttagtttaaaa

SEQ ID NO: 321104 - DNA, 12 bp, Artificial Sequence
  Oligonucleotide primer for the detection of SNP TSC0030074
cctaacctatca

SEQ ID NO: 321105 - DNA, 12 bp, Artificial Sequence
  Oligonucleotide primer for the detection of SNP TSC0030074
cctaacctatcg

SEQ ID NO: 321106 - DNA, 12 bp, Artificial Sequence
  Oligonucleotide primer for the detection of SNP TSC0030074
ggagtatgagtt

SEQ ID NO: 321107 - DNA, 12 bp, Artificial Sequence
  Oligonucleotide primer for the detection of SNP TSC0030074
aaatataaatca

SEQ ID NO: 321108 - DNA, 12 bp, Artificial Sequence
  Oligonucleotide primer for the detection of SNP TSC0030074
ttttggtttgtt

SEQ ID NO: 321109 - DNA, 12 bp, Artificial Sequence
  Oligonucleotide primer for the detection of SNP TSC0030074
ttttggtttgtc

SEQ ID NO: 321110 - DNA, 12 bp, Artificial Sequence
  Oligonucleotide primer for the detection of SNP TSC0030076
aacgaaaattac

SEQ ID NO: 321111 - DNA, 12 bp, Artificial Sequence
  Oligonucleotide primer for the detection of SNP TSC0030076
agtggagattgt

SEQ ID NO: 321112 - DNA, 12 bp, Artificial Sequence
  Oligonucleotide primer for the detection of SNP TSC0030076
agcggagattgt

SEQ ID NO: 321113 - DNA, 12 bp, Artificial Sequence
  Oligonucleotide primer for the detection of SNP TSC0030077
tcccaataaaac

SEQ ID NO: 321114 - DNA, 12 bp, Artificial Sequence
  Oligonucleotide primer for the detection of SNP TSC0030077
agttaagataga

SEQ ID NO: 321115 - DNA, 12 bp, Artificial Sequence
  Oligonucleotide primer for the detection of SNP TSC0030078
acaccataaaac

SEQ ID NO: 321116 - DNA, 12 bp, Artificial Sequence
  Oligonucleotide primer for the detection of SNP TSC0030078
acaccgtaaaac

SEQ ID NO: 321117 - DNA, 12 bp, Artificial Sequence
  Oligonucleotide primer for the detection of SNP TSC0030078
acgccataaaac

SEQ ID NO: 321118 - DNA, 12 bp, Artificial Sequence
  Oligonucleotide primer for the detection of SNP TSC0030078
acgccgtaaaac

SEQ ID NO: 321119 - DNA, 12 bp, Artificial Sequence
  Oligonucleotide primer for the detection of SNP TSC0030078
atattttgtgga

SEQ ID NO: 321120 - DNA, 12 bp, Artificial Sequence
  Oligonucleotide primer for the detection of SNP TSC0030078
atatttcgtgga

SEQ ID NO: 321121 - DNA, 12 bp, Artificial Sequence
  Oligonucleotide primer for the detection of SNP TSC0030078
atattttgcgga

SEQ ID NO: 321122 - DNA, 12 bp, Artificial Sequence
  Oligonucleotide primer for the detection of SNP TSC0030078
atatttcgcgga

SEQ ID NO: 321123 - DNA, 12 bp, Artificial Sequence
  Oligonucleotide primer for the detection of SNP TSC0030078
atacctcacaaa

SEQ ID NO: 321124 - DNA, 12 bp, Artificial Sequence
  Oligonucleotide primer for the detection of SNP TSC0030078
atacctcacgaa

SEQ ID NO: 321125 - DNA, 12 bp, Artificial Sequence
  Oligonucleotide primer for the detection of SNP TSC0030078
atacctcgcaaa

SEQ ID NO: 321126 - DNA, 12 bp, Artificial Sequence
  Oligonucleotide primer for the detection of SNP TSC0030078
atacctcgcgaa

SEQ ID NO: 321127 - DNA, 12 bp, Artificial Sequence
  Oligonucleotide primer for the detection of SNP TSC0030078
gtgttgtaagat

SEQ ID NO: 321128 - DNA, 12 bp, Artificial Sequence
  Oligonucleotide primer for the detection of SNP TSC0030078
gcgttgtaagat

SEQ ID NO: 321129 - DNA, 12 bp, Artificial Sequence
  Oligonucleotide primer for the detection of SNP TSC0030078
gtgtcgtaagat

SEQ ID NO: 321130 - DNA, 12 bp, Artificial Sequence
  Oligonucleotide primer for the detection of SNP TSC0030078
gcgtcgtaagat

SEQ ID NO: 321131 - DNA, 12 bp, Artificial Sequence
  Oligonucleotide primer for the detection of SNP TSC0030079
aataatactttc

SEQ ID NO: 321132 - DNA, 12 bp, Artificial Sequence
  Oligonucleotide primer for the detection of SNP TSC0030079
tgttttatggtg

SEQ ID NO: 321133 - DNA, 12 bp, Artificial Sequence
  Oligonucleotide primer for the detection of SNP TSC0030079
tgttttacggtg

SEQ ID NO: 321134 - DNA, 12 bp, Artificial Sequence
  Oligonucleotide primer for the detection of SNP TSC0030079
tgttttatggcg

SEQ ID NO: 321135 - DNA, 12 bp, Artificial Sequence
  Oligonucleotide primer for the detection of SNP TSC0030079
tgttttacggcg

SEQ ID NO: 321136 - DNA, 12 bp, Artificial Sequence
  Oligonucleotide primer for the detection of SNP TSC0030079
tatcttacaaca

SEQ ID NO: 321137 - DNA, 12 bp, Artificial Sequence
  Oligonucleotide primer for the detection of SNP TSC0030079
tatcttacaacg

SEQ ID NO: 321138 - DNA, 12 bp, Artificial Sequence
  Oligonucleotide primer for the detection of SNP TSC0030079
tatcttacgaca

SEQ ID NO: 321139 - DNA, 12 bp, Artificial Sequence
  Oligonucleotide primer for the detection of SNP TSC0030079
tatcttacgacg

SEQ ID NO: 321140 - DNA, 12 bp, Artificial Sequence
  Oligonucleotide primer for the detection of SNP TSC0030079
ggtgatgttttt

SEQ ID NO: 321141 - DNA, 12 bp, Artificial Sequence
  Oligonucleotide primer for the detection of SNP TSC0030081
ataacactattc

SEQ ID NO: 321142 - DNA, 12 bp, Artificial Sequence
  Oligonucleotide primer for the detection of SNP TSC0030081
ttataatgttag

SEQ ID NO: 321143 - DNA, 12 bp, Artificial Sequence
  Oligonucleotide primer for the detection of SNP TSC0030082
caacccaaaaca

SEQ ID NO: 321144 - DNA, 12 bp, Artificial Sequence
  Oligonucleotide primer for the detection of SNP TSC0030082
cgacccaaaaca

SEQ ID NO: 321145 - DNA, 12 bp, Artificial Sequence
  Oligonucleotide primer for the detection of SNP TSC0030082
tgtattgtgttt

SEQ ID NO: 321146 - DNA, 12 bp, Artificial Sequence
  Oligonucleotide primer for the detection of SNP TSC0030082
cgtattgtgttt

SEQ ID NO: 321147 - DNA, 12 bp, Artificial Sequence
  Oligonucleotide primer for the detection of SNP TSC0030082
tgtatcgtgttt

SEQ ID NO: 321148 - DNA, 12 bp, Artificial Sequence
  Oligonucleotide primer for the detection of SNP TSC0030082
tgtattgcgttt

SEQ ID NO: 321149 - DNA, 12 bp, Artificial Sequence
  Oligonucleotide primer for the detection of SNP TSC0030082
cgtatcgtgttt

SEQ ID NO: 321150 - DNA, 12 bp, Artificial Sequence
  Oligonucleotide primer for the detection of SNP TSC0030082
cgtattgcgttt

SEQ ID NO: 321151 - DNA, 12 bp, Artificial Sequence
  Oligonucleotide primer for the detection of SNP TSC0030082
tgtatcgcgttt

SEQ ID NO: 321152 - DNA, 12 bp, Artificial Sequence
  Oligonucleotide primer for the detection of SNP TSC0030082
cgtatcgcgttt

SEQ ID NO: 321153 - DNA, 12 bp, Artificial Sequence
  Oligonucleotide primer for the detection of SNP TSC0030082
acacatcacacc

SEQ ID NO: 321154 - DNA, 12 bp, Artificial Sequence
  Oligonucleotide primer for the detection of SNP TSC0030082
acacatcacgcc

SEQ ID NO: 321155 - DNA, 12 bp, Artificial Sequence
  Oligonucleotide primer for the detection of SNP TSC0030082
acacatcgcacc

SEQ ID NO: 321156 - DNA, 12 bp, Artificial Sequence
  Oligonucleotide primer for the detection of SNP TSC0030082
acgcatcacacc

SEQ ID NO: 321157 - DNA, 12 bp, Artificial Sequence
  Oligonucleotide primer for the detection of SNP TSC0030082
acacatcgcgcc

SEQ ID NO: 321158 - DNA, 12 bp, Artificial Sequence
  Oligonucleotide primer for the detection of SNP TSC0030082
acgcatcacgcc

SEQ ID NO: 321159 - DNA, 12 bp, Artificial Sequence
  Oligonucleotide primer for the detection of SNP TSC0030082
acgcatcgcacc

SEQ ID NO: 321160 - DNA, 12 bp, Artificial Sequence
  Oligonucleotide primer for the detection of SNP TSC0030082
acgcatcgcgcc

SEQ ID NO: 321161 - DNA, 12 bp, Artificial Sequence
  Oligonucleotide primer for the detection of SNP TSC0030082
ggtttagagtat

SEQ ID NO: 321162 - DNA, 12 bp, Artificial Sequence
  Oligonucleotide primer for the detection of SNP TSC0030084
ataccataaaat

SEQ ID NO: 321163 - DNA, 12 bp, Artificial Sequence
  Oligonucleotide primer for the detection of SNP TSC0030084
gttttgtgttta

SEQ ID NO: 321164 - DNA, 12 bp, Artificial Sequence
  Oligonucleotide primer for the detection of SNP TSC0030085
atttcaatacct

SEQ ID NO: 321165 - DNA, 12 bp, Artificial Sequence
  Oligonucleotide primer for the detection of SNP TSC0030085
tgttaggagttg

SEQ ID NO: 321166 - DNA, 12 bp, Artificial Sequence
  Oligonucleotide primer for the detection of SNP TSC0030086
tgtggatgaggt

SEQ ID NO: 321167 - DNA, 12 bp, Artificial Sequence
  Oligonucleotide primer for the detection of SNP TSC0030087
aataccactact

SEQ ID NO: 321168 - DNA, 12 bp, Artificial Sequence
  Oligonucleotide primer for the detection of SNP TSC0030087
gtgatatgagga

SEQ ID NO: 321169 - DNA, 12 bp, Artificial Sequence
  Oligonucleotide primer for the detection of SNP TSC0030088
ctaacccacatt

SEQ ID NO: 321170 - DNA, 12 bp, Artificial Sequence
  Oligonucleotide primer for the detection of SNP TSC0030088
ctaacccacgtt

SEQ ID NO: 321171 - DNA, 12 bp, Artificial Sequence
  Oligonucleotide primer for the detection of SNP TSC0030088
tttagtagtata

SEQ ID NO: 321172 - DNA, 12 bp, Artificial Sequence
  Oligonucleotide primer for the detection of SNP TSC0030089
atattgtgatta

SEQ ID NO: 321173 - DNA, 12 bp, Artificial Sequence
  Oligonucleotide primer for the detection of SNP TSC0030092
tcattttttatt

SEQ ID NO: 321174 - DNA, 12 bp, Artificial Sequence
  Oligonucleotide primer for the detection of SNP TSC0030092
tcgttttttatt

SEQ ID NO: 321175 - DNA, 12 bp, Artificial Sequence
  Oligonucleotide primer for the detection of SNP TSC0030093
tcataaaattat

SEQ ID NO: 321176 - DNA, 12 bp, Artificial Sequence
  Oligonucleotide primer for the detection of SNP TSC0030093
atttattgaatt

SEQ ID NO: 321177 - DNA, 12 bp, Artificial Sequence
  Oligonucleotide primer for the detection of SNP TSC0030093
attcattaaatc

SEQ ID NO: 321178 - DNA, 12 bp, Artificial Sequence
  Oligonucleotide primer for the detection of SNP TSC0030093
ttatagggttgt

SEQ ID NO: 321179 - DNA, 12 bp, Artificial Sequence
  Oligonucleotide primer for the detection of SNP TSC0030094
catataaacaaa

SEQ ID NO: 321180 - DNA, 12 bp, Artificial Sequence
  Oligonucleotide primer for the detection of SNP TSC0030094
taaatgattttt

SEQ ID NO: 321181 - DNA, 12 bp, Artificial Sequence
  Oligonucleotide primer for the detection of SNP TSC0030094
caaataacttcc

SEQ ID NO: 321182 - DNA, 12 bp, Artificial Sequence
  Oligonucleotide primer for the detection of SNP TSC0030094
tatataggtaaa

SEQ ID NO: 321183 - DNA, 12 bp, Artificial Sequence
  Oligonucleotide primer for the detection of SNP TSC0030095
acattctcacat

SEQ ID NO: 321184 - DNA, 12 bp, Artificial Sequence
  Oligonucleotide primer for the detection of SNP TSC0030095
acgttctcacat

SEQ ID NO: 321185 - DNA, 12 bp, Artificial Sequence
  Oligonucleotide primer for the detection of SNP TSC0030095
tttttatgtttg

SEQ ID NO: 321186 - DNA, 12 bp, Artificial Sequence
  Oligonucleotide primer for the detection of SNP TSC0030095
tttttacgtttg

SEQ ID NO: 321187 - DNA, 12 bp, Artificial Sequence
  Oligonucleotide primer for the detection of SNP TSC0030096
taccaccaaact

SEQ ID NO: 321188 - DNA, 12 bp, Artificial Sequence
  Oligonucleotide primer for the detection of SNP TSC0030096
taccgccaaact

SEQ ID NO: 321189 - DNA, 12 bp, Artificial Sequence
  Oligonucleotide primer for the detection of SNP TSC0030096
agtagagttttg

SEQ ID NO: 321190 - DNA, 12 bp, Artificial Sequence
  Oligonucleotide primer for the detection of SNP TSC0030097
acaacaaaactc

SEQ ID NO: 321191 - DNA, 12 bp, Artificial Sequence
  Oligonucleotide primer for the detection of SNP TSC0030097
tttgttgttagg

SEQ ID NO: 321192 - DNA, 12 bp, Artificial Sequence
  Oligonucleotide primer for the detection of SNP TSC0030097
tttgtcgttagg

SEQ ID NO: 321193 - DNA, 12 bp, Artificial Sequence
  Oligonucleotide primer for the detection of SNP TSC0030097
tctaccaccaaa

SEQ ID NO: 321194 - DNA, 12 bp, Artificial Sequence
  Oligonucleotide primer for the detection of SNP TSC0030097
tctaccgccaaa

SEQ ID NO: 321195 - DNA, 12 bp, Artificial Sequence
  Oligonucleotide primer for the detection of SNP TSC0030097
atagtagagttt

SEQ ID NO: 321196 - DNA, 12 bp, Artificial Sequence
  Oligonucleotide primer for the detection of SNP TSC0030107
tatattaataac

SEQ ID NO: 321197 - DNA, 12 bp, Artificial Sequence
  Oligonucleotide primer for the detection of SNP TSC0030107
tgataatgttag

SEQ ID NO: 321198 - DNA, 12 bp, Artificial Sequence
  Oligonucleotide primer for the detection of SNP TSC0030107
tgataacgttag

SEQ ID NO: 321199 - DNA, 12 bp, Artificial Sequence
  Oligonucleotide primer for the detection of SNP TSC0030107
taataacattaa

SEQ ID NO: 321200 - DNA, 12 bp, Artificial Sequence
  Oligonucleotide primer for the detection of SNP TSC0030107
taataacgttaa

SEQ ID NO: 321201 - DNA, 12 bp, Artificial Sequence
  Oligonucleotide primer for the detection of SNP TSC0030107
tgtattagtaat

SEQ ID NO: 321202 - DNA, 12 bp, Artificial Sequence
  Oligonucleotide primer for the detection of SNP TSC0030108
catattactaat

SEQ ID NO: 321203 - DNA, 12 bp, Artificial Sequence
  Oligonucleotide primer for the detection of SNP TSC0030109
aaatcctttcaa

SEQ ID NO: 321204 - DNA, 12 bp, Artificial Sequence
  Oligonucleotide primer for the detection of SNP TSC0030109
atctctctcacc

SEQ ID NO: 321205 - DNA, 12 bp, Artificial Sequence
  Oligonucleotide primer for the detection of SNP TSC0030109
gtctctctcacc

SEQ ID NO: 321206 - DNA, 12 bp, Artificial Sequence
  Oligonucleotide primer for the detection of SNP TSC0030109
aatttttttaat

SEQ ID NO: 321207 - DNA, 12 bp, Artificial Sequence
  Oligonucleotide primer for the detection of SNP TSC0030109
aatttttttaac

SEQ ID NO: 321208 - DNA, 12 bp, Artificial Sequence
  Oligonukleotid-Primer
tataaaccctaa

SEQ ID NO: 321209 - DNA, 12 bp, Artificial Sequence
  Oligonucleotide primer for the detection of SNP TSC0030110
cctccaaaatat

SEQ ID NO: 321210 - DNA, 12 bp, Artificial Sequence
  Oligonucleotide primer for the detection of SNP TSC0030110
taaattttggtt

SEQ ID NO: 321211 - DNA, 12 bp, Artificial Sequence
  Oligonucleotide primer for the detection of SNP TSC0030111
ttaaaccaatat

SEQ ID NO: 321212 - DNA, 12 bp, Artificial Sequence
  Oligonukleotid-Primer
ttaatttagttg

SEQ ID NO: 321213 - DNA, 12 bp, Artificial Sequence
  Oligonucleotide primer for the detection of SNP TSC0030112
ttaatttagtcg

SEQ ID NO: 321214 - DNA, 12 bp, Artificial Sequence
  Oligonucleotide primer for the detection of SNP TSC0030113
atctataactat

SEQ ID NO: 321215 - DNA, 12 bp, Artificial Sequence
  Oligonucleotide primer for the detection of SNP TSC0030113
tttaagtgttta

SEQ ID NO: 321216 - DNA, 12 bp, Artificial Sequence
  Oligonukleotid-Primer
catttaaaaata

SEQ ID NO: 321217 - DNA, 12 bp, Artificial Sequence
  Oligonucleotide primer for the detection of SNP TSC0030114
atagtaaagaga

SEQ ID NO: 321218 - DNA, 12 bp, Artificial Sequence
  Oligonucleotide primer for the detection of SNP TSC0030123
cccctctcatcc

SEQ ID NO: 321219 - DNA, 12 bp, Artificial Sequence
  Oligonucleotide primer for the detection of SNP TSC0030123
cccctctcgtcc

SEQ ID NO: 321220 - DNA, 12 bp, Artificial Sequence
  Oligonucleotide primer for the detection of SNP TSC0030123
tgttggttttat

SEQ ID NO: 321221 - DNA, 12 bp, Artificial Sequence
  Oligonucleotide primer for the detection of SNP TSC0030123
tgtcggttttat

SEQ ID NO: 321222 - DNA, 12 bp, Artificial Sequence
  Oligonucleotide primer for the detection of SNP TSC0030123
tgttggttttac

SEQ ID NO: 321223 - DNA, 12 bp, Artificial Sequence
  Oligonucleotide primer for the detection of SNP TSC0030123
tgtcggttttac

SEQ ID NO: 321224 - DNA, 12 bp, Artificial Sequence
  Oligonucleotide primer for the detection of SNP TSC0030123
taccaaccctac

SEQ ID NO: 321225 - DNA, 12 bp, Artificial Sequence
  Oligonucleotide primer for the detection of SNP TSC0030123
taccgaccctac

SEQ ID NO: 321226 - DNA, 12 bp, Artificial Sequence
  Oligonucleotide primer for the detection of SNP TSC0030123
ttttttttgttc

SEQ ID NO: 321227 - DNA, 12 bp, Artificial Sequence
  Oligonucleotide primer for the detection of SNP TSC0030123
tttttttcgttc

SEQ ID NO: 321228 - DNA, 12 bp, Artificial Sequence
  Oligonucleotide primer for the detection of SNP TSC0030124
ctttaattaacc

SEQ ID NO: 321229 - DNA, 12 bp, Artificial Sequence
  Oligonucleotide primer for the detection of SNP TSC0030124
aataaaagttaa

SEQ ID NO: 321230 - DNA, 12 bp, Artificial Sequence
  Oligonucleotide primer for the detection of SNP TSC0030127
tacccctaccct

SEQ ID NO: 321231 - DNA, 12 bp, Artificial Sequence
  Oligonucleotide primer for the detection of SNP TSC0030127
atgatggagtta

SEQ ID NO: 321232 - DNA, 12 bp, Artificial Sequence
  Oligonucleotide primer for the detection of SNP TSC0030127
atgacggagtta

SEQ ID NO: 321233 - DNA, 12 bp, Artificial Sequence
  Oligonucleotide primer for the detection of SNP TSC0030127
ataacgaaacca

SEQ ID NO: 321234 - DNA, 12 bp, Artificial Sequence
  Oligonucleotide primer for the detection of SNP TSC0030133
ttctcttttttt

SEQ ID NO: 321235 - DNA, 12 bp, Artificial Sequence
  Oligonucleotide primer for the detection of SNP TSC0030133
tgttgatagata

SEQ ID NO: 321236 - DNA, 12 bp, Artificial Sequence
  Oligonucleotide primer for the detection of SNP TSC0030137
agtatagatttt

SEQ ID NO: 321237 - DNA, 12 bp, Artificial Sequence
  Oligonucleotide primer for the detection of SNP TSC0030137
aatacaaaccct

SEQ ID NO: 321238 - DNA, 12 bp, Artificial Sequence
  Oligonucleotide primer for the detection of SNP TSC0030137
aaggggttattt

SEQ ID NO: 321239 - DNA, 12 bp, Artificial Sequence
  Oligonucleotide primer for the detection of SNP TSC0030138
aataaacttccc

SEQ ID NO: 321240 - DNA, 12 bp, Artificial Sequence
  Oligonucleotide primer for the detection of SNP TSC0030138
gtttaagttttg

SEQ ID NO: 321241 - DNA, 12 bp, Artificial Sequence
  Oligonucleotide primer for the detection of SNP TSC0030139
aacctccccaaa

SEQ ID NO: 321242 - DNA, 12 bp, Artificial Sequence
  Oligonucleotide primer for the detection of SNP TSC0030139
gaggattgattt

SEQ ID NO: 321243 - DNA, 12 bp, Artificial Sequence
  Oligonucleotide primer for the detection of SNP TSC0030139
gaggatcgattt

SEQ ID NO: 321244 - DNA, 12 bp, Artificial Sequence
  Oligonucleotide primer for the detection of SNP TSC0030139
aaaatcaactta

SEQ ID NO: 321245 - DNA, 12 bp, Artificial Sequence
  Oligonucleotide primer for the detection of SNP TSC0030139
aaaatcgactta

SEQ ID NO: 321246 - DNA, 12 bp, Artificial Sequence
  Oligonucleotide primer for the detection of SNP TSC0030139
ttgattttttta

SEQ ID NO: 321247 - DNA, 12 bp, Artificial Sequence
  Oligonucleotide primer for the detection of SNP TSC0030141
aacattttaaaa

SEQ ID NO: 321248 - DNA, 12 bp, Artificial Sequence
  Oligonucleotide primer for the detection of SNP TSC0030141
tgaaaattgtga

SEQ ID NO: 321249 - DNA, 12 bp, Artificial Sequence
  Oligonucleotide primer for the detection of SNP TSC0030141
tgaaaattgcga

SEQ ID NO: 321250 - DNA, 12 bp, Artificial Sequence
  Oligonucleotide primer for the detection of SNP TSC0030141
taaaaattacga

SEQ ID NO: 321251 - DNA, 12 bp, Artificial Sequence
  Oligonucleotide primer for the detection of SNP TSC0030141
tgtaagtatttt

SEQ ID NO: 321252 - DNA, 12 bp, Artificial Sequence
  Oligonucleotide primer for the detection of SNP TSC0030142
aacacacaaaaa

SEQ ID NO: 321253 - DNA, 12 bp, Artificial Sequence
  Oligonucleotide primer for the detection of SNP TSC0030142
aggttgtggttt

SEQ ID NO: 321254 - DNA, 12 bp, Artificial Sequence
  Oligonucleotide primer for the detection of SNP TSC0030142
aaactataacct

SEQ ID NO: 321255 - DNA, 12 bp, Artificial Sequence
  Oligonucleotide primer for the detection of SNP TSC0030142
ggtatatagagg

SEQ ID NO: 321256 - DNA, 12 bp, Artificial Sequence
  Oligonucleotide primer for the detection of SNP TSC0030144
atcataaaacta

SEQ ID NO: 321257 - DNA, 12 bp, Artificial Sequence
  Oligonucleotide primer for the detection of SNP TSC0030144
atcgtaaaacta

SEQ ID NO: 321258 - DNA, 12 bp, Artificial Sequence
  Oligonucleotide primer for the detection of SNP TSC0030144
tcctccctaaat

SEQ ID NO: 321259 - DNA, 12 bp, Artificial Sequence
  Oligonucleotide primer for the detection of SNP TSC0030144
ttgtggagttgt

SEQ ID NO: 321260 - DNA, 12 bp, Artificial Sequence
  Oligonucleotide primer for the detection of SNP TSC0030144
tcgtggagttgt

SEQ ID NO: 321261 - DNA, 12 bp, Artificial Sequence
  Oligonucleotide primer for the detection of SNP TSC0030145
tccaactataac

SEQ ID NO: 321262 - DNA, 12 bp, Artificial Sequence
  Oligonucleotide primer for the detection of SNP TSC0030145
gtggtaggagta

SEQ ID NO: 321263 - DNA, 12 bp, Artificial Sequence
  Oligonucleotide primer for the detection of SNP TSC0030145
gcggtaggagta

SEQ ID NO: 321264 - DNA, 12 bp, Artificial Sequence
  Oligonucleotide primer for the detection of SNP TSC0030146
aactataaacta

SEQ ID NO: 321265 - DNA, 12 bp, Artificial Sequence
  Oligonucleotide primer for the detection of SNP TSC0030146
aatgtttttgtt

SEQ ID NO: 321266 - DNA, 12 bp, Artificial Sequence
  Oligonucleotide primer for the detection of SNP TSC0030146
aatgtttttgtc

SEQ ID NO: 321267 - DNA, 12 bp, Artificial Sequence
  Oligonucleotide primer for the detection of SNP TSC0030146
acaatactccta

SEQ ID NO: 321268 - DNA, 12 bp, Artificial Sequence
  Oligonucleotide primer for the detection of SNP TSC0030146
gagttgtagatt

SEQ ID NO: 321269 - DNA, 12 bp, Artificial Sequence
  Oligonucleotide primer for the detection of SNP TSC0030147
aatcataaaact

SEQ ID NO: 321270 - DNA, 12 bp, Artificial Sequence
  Oligonucleotide primer for the detection of SNP TSC0030147
aatcgtaaaact

SEQ ID NO: 321271 - DNA, 12 bp, Artificial Sequence
  Oligonucleotide primer for the detection of SNP TSC0030147
tttttgtcgtag

SEQ ID NO: 321272 - DNA, 12 bp, Artificial Sequence
  Oligonucleotide primer for the detection of SNP TSC0030148
aagtgttaagga

SEQ ID NO: 321273 - DNA, 12 bp, Artificial Sequence
  Oligonucleotide primer for the detection of SNP TSC0030149
taacacaactac

SEQ ID NO: 321274 - DNA, 12 bp, Artificial Sequence
  Oligonucleotide primer for the detection of SNP TSC0030149
tgggatagttta

SEQ ID NO: 321275 - DNA, 12 bp, Artificial Sequence
  Oligonucleotide primer for the detection of SNP TSC0030149
taaaacaaccca

SEQ ID NO: 321276 - DNA, 12 bp, Artificial Sequence
  Oligonucleotide primer for the detection of SNP TSC0030149
tggtatagttat

SEQ ID NO: 321277 - DNA, 12 bp, Artificial Sequence
  Oligonucleotide primer for the detection of SNP TSC0030151
taatacctatat

SEQ ID NO: 321278 - DNA, 12 bp, Artificial Sequence
  Oligonucleotide primer for the detection of SNP TSC0030151
tgaaggtttatt

SEQ ID NO: 321279 - DNA, 12 bp, Artificial Sequence
  Oligonucleotide primer for the detection of SNP TSC0030152
tcatataaatat

SEQ ID NO: 321280 - DNA, 12 bp, Artificial Sequence
  Oligonucleotide primer for the detection of SNP TSC0030152
tgtgttttatta

SEQ ID NO: 321281 - DNA, 12 bp, Artificial Sequence
  Oligonucleotide primer for the detection of SNP TSC0030152
cgtgttttatta

SEQ ID NO: 321282 - DNA, 12 bp, Artificial Sequence
  Oligonucleotide primer for the detection of SNP TSC0030156
taaatcataaat

SEQ ID NO: 321283 - DNA, 12 bp, Artificial Sequence
  Oligonucleotide primer for the detection of SNP TSC0030156
tgagttatgaat

SEQ ID NO: 321284 - DNA, 12 bp, Artificial Sequence
  Oligonucleotide primer for the detection of SNP TSC0030157
acaaaataatat

SEQ ID NO: 321285 - DNA, 12 bp, Artificial Sequence
  Oligonucleotide primer for the detection of SNP TSC0030157
tttaaatggtta

SEQ ID NO: 321286 - DNA, 12 bp, Artificial Sequence
  Oligonucleotide primer for the detection of SNP TSC0030158
tctataatactc

SEQ ID NO: 321287 - DNA, 12 bp, Artificial Sequence
  Oligonucleotide primer for the detection of SNP TSC0030158
aaagtaggaata

SEQ ID NO: 321288 - DNA, 12 bp, Artificial Sequence
  Oligonucleotide primer for the detection of SNP TSC0030159
ccacactaataa

SEQ ID NO: 321289 - DNA, 12 bp, Artificial Sequence
  Oligonucleotide primer for the detection of SNP TSC0030159
atccctcccata

SEQ ID NO: 321290 - DNA, 12 bp, Artificial Sequence
  Oligonucleotide primer for the detection of SNP TSC0030159
ttatattaatga

SEQ ID NO: 321291 - DNA, 12 bp, Artificial Sequence
  Oligonucleotide primer for the detection of SNP TSC0030160
cttcccatatat

SEQ ID NO: 321292 - DNA, 12 bp, Artificial Sequence
  Oligonucleotide primer for the detection of SNP TSC0030160
ttaaagatattt

SEQ ID NO: 321293 - DNA, 12 bp, Artificial Sequence
  Oligonucleotide primer for the detection of SNP TSC0030162
tctttacacact

SEQ ID NO: 321294 - DNA, 12 bp, Artificial Sequence
  Oligonucleotide primer for the detection of SNP TSC0030162
tctttacgcact

SEQ ID NO: 321295 - DNA, 12 bp, Artificial Sequence
  Oligonucleotide primer for the detection of SNP TSC0030164
tcccccctccca

SEQ ID NO: 321296 - DNA, 12 bp, Artificial Sequence
  Oligonucleotide primer for the detection of SNP TSC0030164
aaatgaagttgg

SEQ ID NO: 321297 - DNA, 12 bp, Artificial Sequence
  Oligonucleotide primer for the detection of SNP TSC0030164
aaacgaagttgg

SEQ ID NO: 321298 - DNA, 12 bp, Artificial Sequence
  Oligonucleotide primer for the detection of SNP TSC0030164
aaacgaaattaa

SEQ ID NO: 321299 - DNA, 12 bp, Artificial Sequence
  Oligonucleotide primer for the detection of SNP TSC0030165
ggtttataaaat

SEQ ID NO: 321300 - DNA, 12 bp, Artificial Sequence
  Oligonucleotide primer for the detection of SNP TSC0030165
aacctataaaat

SEQ ID NO: 321301 - DNA, 12 bp, Artificial Sequence
  Oligonucleotide primer for the detection of SNP TSC0030165
atgtttggtaaa

SEQ ID NO: 321302 - DNA, 12 bp, Artificial Sequence
  Oligonucleotide primer for the detection of SNP TSC0030166
atctctattaaa

SEQ ID NO: 321303 - DNA, 12 bp, Artificial Sequence
  Oligonucleotide primer for the detection of SNP TSC0030166
atccttatcaac

SEQ ID NO: 321304 - DNA, 12 bp, Artificial Sequence
  Oligonucleotide primer for the detection of SNP TSC0030166
atttttgttggg

SEQ ID NO: 321305 - DNA, 12 bp, Artificial Sequence
  Oligonucleotide primer for the detection of SNP TSC0030167
atatttacaaac

SEQ ID NO: 321306 - DNA, 12 bp, Artificial Sequence
  Oligonucleotide primer for the detection of SNP TSC0030167
ataaaataagga

SEQ ID NO: 321307 - DNA, 12 bp, Artificial Sequence
  Oligonucleotide primer for the detection of SNP TSC0030168
aaaatacccaaa

SEQ ID NO: 321308 - DNA, 12 bp, Artificial Sequence
  Oligonucleotide primer for the detection of SNP TSC0030168
atttgtgttgtt

SEQ ID NO: 321309 - DNA, 12 bp, Artificial Sequence
  Oligonukleotid-Primer
atttatactact

SEQ ID NO: 321310 - DNA, 12 bp, Artificial Sequence
  Oligonucleotide primer for the detection of SNP TSC0030168
agggtgtttaga

SEQ ID NO: 321311 - DNA, 12 bp, Artificial Sequence
  Oligonucleotide primer for the detection of SNP TSC0030169
tttccttacttc

SEQ ID NO: 321312 - DNA, 12 bp, Artificial Sequence
  Oligonucleotide primer for the detection of SNP TSC0030169
ttggtagagaag

SEQ ID NO: 321313 - DNA, 12 bp, Artificial Sequence
  Oligonukleotid-Primer
ctttaaactaat

SEQ ID NO: 321314 - DNA, 12 bp, Artificial Sequence
  Oligonucleotide primer for the detection of SNP TSC0030170
tttgtaatgtga

SEQ ID NO: 321315 - DNA, 12 bp, Artificial Sequence
  Oligonucleotide primer for the detection of SNP TSC0030170
ttcgtaatgtga

SEQ ID NO: 321316 - DNA, 12 bp, Artificial Sequence
  Oligonucleotide primer for the detection of SNP TSC0030170
tttgtaatgcga

SEQ ID NO: 321317 - DNA, 12 bp, Artificial Sequence
  Oligonucleotide primer for the detection of SNP TSC0030170
ttcgtaatgcga

SEQ ID NO: 321318 - DNA, 12 bp, Artificial Sequence
  Oligonucleotide primer for the detection of SNP TSC0030170
cccacaatacaa

SEQ ID NO: 321319 - DNA, 12 bp, Artificial Sequence
  Oligonucleotide primer for the detection of SNP TSC0030170
cccacaatacga

SEQ ID NO: 321320 - DNA, 12 bp, Artificial Sequence
  Oligonucleotide primer for the detection of SNP TSC0030170
cccgcaatacaa

SEQ ID NO: 321321 - DNA, 12 bp, Artificial Sequence
  Oligonucleotide primer for the detection of SNP TSC0030170
cccgcaatacga

SEQ ID NO: 321322 - DNA, 12 bp, Artificial Sequence
  Oligonucleotide primer for the detection of SNP TSC0030171
caacatattaac

SEQ ID NO: 321323 - DNA, 12 bp, Artificial Sequence
  Oligonucleotide primer for the detection of SNP TSC0030171
cgacatattaac

SEQ ID NO: 321324 - DNA, 12 bp, Artificial Sequence
  Oligonucleotide primer for the detection of SNP TSC0030171
cggtttattttg

SEQ ID NO: 321325 - DNA, 12 bp, Artificial Sequence
  Oligonucleotide primer for the detection of SNP TSC0030172
acccacccctcc

SEQ ID NO: 321326 - DNA, 12 bp, Artificial Sequence
  Oligonucleotide primer for the detection of SNP TSC0030172
ttaagatataga

SEQ ID NO: 321327 - DNA, 12 bp, Artificial Sequence
  Oligonucleotide primer for the detection of SNP TSC0030174
caaaacatttat

SEQ ID NO: 321328 - DNA, 12 bp, Artificial Sequence
  Oligonucleotide primer for the detection of SNP TSC0030174
tagttaaatata

SEQ ID NO: 321329 - DNA, 12 bp, Artificial Sequence
  Oligonucleotide primer for the detection of SNP TSC0030178
ttttctttaaat

SEQ ID NO: 321330 - DNA, 12 bp, Artificial Sequence
  Oligonucleotide primer for the detection of SNP TSC0030178
taattgtataga

SEQ ID NO: 321331 - DNA, 12 bp, Artificial Sequence
  Oligonucleotide primer for the detection of SNP TSC0030178
taactacataaa

SEQ ID NO: 321332 - DNA, 12 bp, Artificial Sequence
  Oligonucleotide primer for the detection of SNP TSC0030179
tacaaaaacaat

SEQ ID NO: 321333 - DNA, 12 bp, Artificial Sequence
  Oligonucleotide primer for the detection of SNP TSC0030179
aaagaattattg

SEQ ID NO: 321334 - DNA, 12 bp, Artificial Sequence
  Oligonucleotide primer for the detection of SNP TSC0030179
aaaaaactacta

SEQ ID NO: 321335 - DNA, 12 bp, Artificial Sequence
  Oligonucleotide primer for the detection of SNP TSC0030179
tgtaaggatagt

SEQ ID NO: 321336 - DNA, 12 bp, Artificial Sequence
  Oligonucleotide primer for the detection of SNP TSC0030181
ctcctttaaaaa

SEQ ID NO: 321337 - DNA, 12 bp, Artificial Sequence
  Oligonucleotide primer for the detection of SNP TSC0030181
tttttgttttac

SEQ ID NO: 321338 - DNA, 12 bp, Artificial Sequence
  Oligonucleotide primer for the detection of SNP TSC0030181
tctctaccccac

SEQ ID NO: 321339 - DNA, 12 bp, Artificial Sequence
  Oligonucleotide primer for the detection of SNP TSC0030182
ttccctaatttt

SEQ ID NO: 321340 - DNA, 12 bp, Artificial Sequence
  Oligonucleotide primer for the detection of SNP TSC0030182
tattggaagaaa

SEQ ID NO: 321341 - DNA, 12 bp, Artificial Sequence
  Oligonucleotide primer for the detection of SNP TSC0030183
ctaattttcttt

SEQ ID NO: 321342 - DNA, 12 bp, Artificial Sequence
  Oligonucleotide primer for the detection of SNP TSC0030183
aatgtattggaa

SEQ ID NO: 321343 - DNA, 12 bp, Artificial Sequence
  Oligonucleotide primer for the detection of SNP TSC0030187
actaaaaacccc

SEQ ID NO: 321344 - DNA, 12 bp, Artificial Sequence
  Oligonucleotide primer for the detection of SNP TSC0030187
aaactaaaaact

SEQ ID NO: 321345 - DNA, 12 bp, Artificial Sequence
  Oligonucleotide primer for the detection of SNP TSC0030187
attgggagtttt

SEQ ID NO: 321346 - DNA, 12 bp, Artificial Sequence
  Oligonucleotide primer for the detection of SNP TSC0030193
ttgggatggtta

SEQ ID NO: 321347 - DNA, 12 bp, Artificial Sequence
  Oligonucleotide primer for the detection of SNP TSC0030193
aaaggggtttat

SEQ ID NO: 321348 - DNA, 12 bp, Artificial Sequence
  Oligonucleotide primer for the detection of SNP TSC0030194
ctctcttttttt

SEQ ID NO: 321349 - DNA, 12 bp, Artificial Sequence
  Oligonucleotide primer for the detection of SNP TSC0030194
accctacccccc

SEQ ID NO: 321350 - DNA, 12 bp, Artificial Sequence
  Oligonucleotide primer for the detection of SNP TSC0030195
ccaaaaattcta

SEQ ID NO: 321351 - DNA, 12 bp, Artificial Sequence
  Oligonucleotide primer for the detection of SNP TSC0030195
ccaaaataaccc

SEQ ID NO: 321352 - DNA, 12 bp, Artificial Sequence
  Oligonucleotide primer for the detection of SNP TSC0030195
ttaggagttttg

SEQ ID NO: 321353 - DNA, 12 bp, Artificial Sequence
  Oligonucleotide primer for the detection of SNP TSC0030196
ctctacccaatt

SEQ ID NO: 321354 - DNA, 12 bp, Artificial Sequence
  Oligonucleotide primer for the detection of SNP TSC0030196
ttataaagtata

SEQ ID NO: 321355 - DNA, 12 bp, Artificial Sequence
  Oligonucleotide primer for the detection of SNP TSC0030198
cactcttacttt

SEQ ID NO: 321356 - DNA, 12 bp, Artificial Sequence
  Oligonucleotide primer for the detection of SNP TSC0030198
taagatggtgag

SEQ ID NO: 321357 - DNA, 12 bp, Artificial Sequence
  Oligonucleotide primer for the detection of SNP TSC0030198
taagatggcgag

SEQ ID NO: 321358 - DNA, 12 bp, Artificial Sequence
  Oligonucleotide primer for the detection of SNP TSC0030199
tacatatctata

SEQ ID NO: 321359 - DNA, 12 bp, Artificial Sequence
  Oligonucleotide primer for the detection of SNP TSC0030199
agtagtggaaat

SEQ ID NO: 321360 - DNA, 12 bp, Artificial Sequence
  Oligonucleotide primer for the detection of SNP TSC0030199
tgtatgtttgtg

SEQ ID NO: 321361 - DNA, 12 bp, Artificial Sequence
  Oligonucleotide primer for the detection of SNP TSC0030200
tgttgatatttg

SEQ ID NO: 321362 - DNA, 12 bp, Artificial Sequence
  Oligonucleotide primer for the detection of SNP TSC0030200
tactaacaccta

SEQ ID NO: 321363 - DNA, 12 bp, Artificial Sequence
  Oligonucleotide primer for the detection of SNP TSC0030200
gaagtttgaaag

SEQ ID NO: 321364 - DNA, 12 bp, Artificial Sequence
  Oligonucleotide primer for the detection of SNP TSC0030202
cacaccacacca

SEQ ID NO: 321365 - DNA, 12 bp, Artificial Sequence
  Oligonucleotide primer for the detection of SNP TSC0030202
cacaccgcacca

SEQ ID NO: 321366 - DNA, 12 bp, Artificial Sequence
  Oligonucleotide primer for the detection of SNP TSC0030202
cacgccacacca

SEQ ID NO: 321367 - DNA, 12 bp, Artificial Sequence
  Oligonucleotide primer for the detection of SNP TSC0030202
cacgccgcacca

SEQ ID NO: 321368 - DNA, 12 bp, Artificial Sequence
  Oligonucleotide primer for the detection of SNP TSC0030202
atagtgggattt

SEQ ID NO: 321369 - DNA, 12 bp, Artificial Sequence
  Oligonucleotide primer for the detection of SNP TSC0030202
atagcgggattt

SEQ ID NO: 321370 - DNA, 12 bp, Artificial Sequence
  Oligonucleotide primer for the detection of SNP TSC0030202
acaacaaaacct

SEQ ID NO: 321371 - DNA, 12 bp, Artificial Sequence
  Oligonucleotide primer for the detection of SNP TSC0030202
acaacgaaacct

SEQ ID NO: 321372 - DNA, 12 bp, Artificial Sequence
  Oligonucleotide primer for the detection of SNP TSC0030202
tatgttgtatta

SEQ ID NO: 321373 - DNA, 12 bp, Artificial Sequence
  Oligonucleotide primer for the detection of SNP TSC0030202
tacgttgtatta

SEQ ID NO: 321374 - DNA, 12 bp, Artificial Sequence
  Oligonucleotide primer for the detection of SNP TSC0030202
tatgtcgtatta

SEQ ID NO: 321375 - DNA, 12 bp, Artificial Sequence
  Oligonucleotide primer for the detection of SNP TSC0030202
tacgtcgtatta

SEQ ID NO: 321376 - DNA, 12 bp, Artificial Sequence
  Oligonucleotide primer for the detection of SNP TSC0030203
atccaaaccaaa

SEQ ID NO: 321377 - DNA, 12 bp, Artificial Sequence
  Oligonucleotide primer for the detection of SNP TSC0030203
atccgaaccaaa

SEQ ID NO: 321378 - DNA, 12 bp, Artificial Sequence
  Oligonucleotide primer for the detection of SNP TSC0030203
gtccaaaccaaa

SEQ ID NO: 321379 - DNA, 12 bp, Artificial Sequence
  Oligonucleotide primer for the detection of SNP TSC0030203
gtccgaaccaaa

SEQ ID NO: 321380 - DNA, 12 bp, Artificial Sequence
  Oligonucleotide primer for the detection of SNP TSC0030203
ttgtgtgtattt

SEQ ID NO: 321381 - DNA, 12 bp, Artificial Sequence
  Oligonucleotide primer for the detection of SNP TSC0030203
ttgtgcgtattt

SEQ ID NO: 321382 - DNA, 12 bp, Artificial Sequence
  Oligonukleotid-Primer
ttatacatattt

SEQ ID NO: 321383 - DNA, 12 bp, Artificial Sequence
  Oligonucleotide primer for the detection of SNP TSC0030203
ttatacgtattt

SEQ ID NO: 321384 - DNA, 12 bp, Artificial Sequence
  Oligonucleotide primer for the detection of SNP TSC0030203
gtttgggttaag

SEQ ID NO: 321385 - DNA, 12 bp, Artificial Sequence
  Oligonucleotide primer for the detection of SNP TSC0030203
gttcgggttaag

SEQ ID NO: 321386 - DNA, 12 bp, Artificial Sequence
  Oligonucleotide primer for the detection of SNP TSC0030204
aacaaataaaca

SEQ ID NO: 321387 - DNA, 12 bp, Artificial Sequence
  Oligonucleotide primer for the detection of SNP TSC0030204
aacaaataaacg

SEQ ID NO: 321388 - DNA, 12 bp, Artificial Sequence
  Oligonucleotide primer for the detection of SNP TSC0030204
ttgaatttggtt

SEQ ID NO: 321389 - DNA, 12 bp, Artificial Sequence
  Oligonucleotide primer for the detection of SNP TSC0030204
tcgaatttggtt

SEQ ID NO: 321390 - DNA, 12 bp, Artificial Sequence
  Oligonucleotide primer for the detection of SNP TSC0030204
tcaaacttaacc

SEQ ID NO: 321391 - DNA, 12 bp, Artificial Sequence
  Oligonucleotide primer for the detection of SNP TSC0030204
tcgaacttaacc

SEQ ID NO: 321392 - DNA, 12 bp, Artificial Sequence
  Oligonucleotide primer for the detection of SNP TSC0030204
ggtaagtaggtg

SEQ ID NO: 321393 - DNA, 12 bp, Artificial Sequence
  Oligonucleotide primer for the detection of SNP TSC0030204
ggtaagtaggcg

SEQ ID NO: 321394 - DNA, 12 bp, Artificial Sequence
  Oligonucleotide primer for the detection of SNP TSC0030205
cattataaatca

SEQ ID NO: 321395 - DNA, 12 bp, Artificial Sequence
  Oligonucleotide primer for the detection of SNP TSC0030205
ttttttttaagt

SEQ ID NO: 321396 - DNA, 12 bp, Artificial Sequence
  Oligonucleotide primer for the detection of SNP TSC0030205
tctctcctaaac

SEQ ID NO: 321397 - DNA, 12 bp, Artificial Sequence
  Oligonucleotide primer for the detection of SNP TSC0030206
atatcaaccccc

SEQ ID NO: 321398 - DNA, 12 bp, Artificial Sequence
  Oligonucleotide primer for the detection of SNP TSC0030206
atgatggggggg

SEQ ID NO: 321399 - DNA, 12 bp, Artificial Sequence
  Oligonucleotide primer for the detection of SNP TSC0030207
gatgatgggggg

SEQ ID NO: 321400 - DNA, 12 bp, Artificial Sequence
  Oligonucleotide primer for the detection of SNP TSC0030210
ctcctaaaatac

SEQ ID NO: 321401 - DNA, 12 bp, Artificial Sequence
  Oligonucleotide primer for the detection of SNP TSC0030211
actcctaaaccc

SEQ ID NO: 321402 - DNA, 12 bp, Artificial Sequence
  Oligonucleotide primer for the detection of SNP TSC0030211
gaggtaggagga

SEQ ID NO: 321403 - DNA, 12 bp, Artificial Sequence
  Oligonucleotide primer for the detection of SNP TSC0030212
cccaacctcttt

SEQ ID NO: 321404 - DNA, 12 bp, Artificial Sequence
  Oligonucleotide primer for the detection of SNP TSC0030212
tttgtagaaaaa

SEQ ID NO: 321405 - DNA, 12 bp, Artificial Sequence
  Oligonucleotide primer for the detection of SNP TSC0030219
taactataaaat

SEQ ID NO: 321406 - DNA, 12 bp, Artificial Sequence
  Oligonucleotide primer for the detection of SNP TSC0030223
cctctaccttcc

SEQ ID NO: 321407 - DNA, 12 bp, Artificial Sequence
  Oligonucleotide primer for the detection of SNP TSC0030224
ttcaataacttc

SEQ ID NO: 321408 - DNA, 12 bp, Artificial Sequence
  Oligonucleotide primer for the detection of SNP TSC0030224
tagagtatttta

SEQ ID NO: 321409 - DNA, 12 bp, Artificial Sequence
  Oligonucleotide primer for the detection of SNP TSC0030225
tatactacaaaa

SEQ ID NO: 321410 - DNA, 12 bp, Artificial Sequence
  Oligonucleotide primer for the detection of SNP TSC0030225
tttgtgttgatt

SEQ ID NO: 321411 - DNA, 12 bp, Artificial Sequence
  Oligonucleotide primer for the detection of SNP TSC0030225
ttcgtgttgatt

SEQ ID NO: 321412 - DNA, 12 bp, Artificial Sequence
  Oligonucleotide primer for the detection of SNP TSC0030225
ttcatactaatc

SEQ ID NO: 321413 - DNA, 12 bp, Artificial Sequence
  Oligonucleotide primer for the detection of SNP TSC0030225
ttcgtactaatc

SEQ ID NO: 321414 - DNA, 12 bp, Artificial Sequence
  Oligonucleotide primer for the detection of SNP TSC0030225
tgtattataaaa

SEQ ID NO: 321415 - DNA, 12 bp, Artificial Sequence
  Oligonucleotide primer for the detection of SNP TSC0030226
aaccaacctact

SEQ ID NO: 321416 - DNA, 12 bp, Artificial Sequence
  Oligonucleotide primer for the detection of SNP TSC0030226
tttagttggtta

SEQ ID NO: 321417 - DNA, 12 bp, Artificial Sequence
  Oligonucleotide primer for the detection of SNP TSC0030226
tttagtcggtta

SEQ ID NO: 321418 - DNA, 12 bp, Artificial Sequence
  Oligonucleotide primer for the detection of SNP TSC0030227
ttttcaaccaac

SEQ ID NO: 321419 - DNA, 12 bp, Artificial Sequence
  Oligonucleotide primer for the detection of SNP TSC0030227
ttttcaaccgac

SEQ ID NO: 321420 - DNA, 12 bp, Artificial Sequence
  Oligonucleotide primer for the detection of SNP TSC0030227
aatttgtttagt

SEQ ID NO: 321421 - DNA, 12 bp, Artificial Sequence
  Oligonucleotide primer for the detection of SNP TSC0030227
aacctactcaat

SEQ ID NO: 321422 - DNA, 12 bp, Artificial Sequence
  Oligonucleotide primer for the detection of SNP TSC0030227
tttttagttggt

SEQ ID NO: 321423 - DNA, 12 bp, Artificial Sequence
  Oligonucleotide primer for the detection of SNP TSC0030227
tttttagtcggt

SEQ ID NO: 321424 - DNA, 12 bp, Artificial Sequence
  Oligonucleotide primer for the detection of SNP TSC0030231
caacctttacct

SEQ ID NO: 321425 - DNA, 12 bp, Artificial Sequence
  Oligonucleotide primer for the detection of SNP TSC0030232
atttttttcttt

SEQ ID NO: 321426 - DNA, 12 bp, Artificial Sequence
  Oligonucleotide primer for the detection of SNP TSC0030232
aaaatagagtta

SEQ ID NO: 321427 - DNA, 12 bp, Artificial Sequence
  Oligonucleotide primer for the detection of SNP TSC0030233
acccatttcttc

SEQ ID NO: 321428 - DNA, 12 bp, Artificial Sequence
  Oligonucleotide primer for the detection of SNP TSC0030233
acccgtttcttc

SEQ ID NO: 321429 - DNA, 12 bp, Artificial Sequence
  Oligonucleotide primer for the detection of SNP TSC0030233
ttgttttgataa

SEQ ID NO: 321430 - DNA, 12 bp, Artificial Sequence
  Oligonucleotide primer for the detection of SNP TSC0030234
acccaactatcc

SEQ ID NO: 321431 - DNA, 12 bp, Artificial Sequence
  Oligonucleotide primer for the detection of SNP TSC0030234
acccgactatcc

SEQ ID NO: 321432 - DNA, 12 bp, Artificial Sequence
  Oligonucleotide primer for the detection of SNP TSC0030234
ggatggttttgg

SEQ ID NO: 321433 - DNA, 12 bp, Artificial Sequence
  Oligonucleotide primer for the detection of SNP TSC0030235
ttacaccaaaac

SEQ ID NO: 321434 - DNA, 12 bp, Artificial Sequence
  Oligonucleotide primer for the detection of SNP TSC0030235
ttacgccaaaac

SEQ ID NO: 321435 - DNA, 12 bp, Artificial Sequence
  Oligonucleotide primer for the detection of SNP TSC0030238
actactattaat

SEQ ID NO: 321436 - DNA, 12 bp, Artificial Sequence
  Oligonucleotide primer for the detection of SNP TSC0030238
aaggtttttatg

SEQ ID NO: 321437 - DNA, 12 bp, Artificial Sequence
  Oligonucleotide primer for the detection of SNP TSC0030239
aaaaaaacaccc

SEQ ID NO: 321438 - DNA, 12 bp, Artificial Sequence
  Oligonucleotide primer for the detection of SNP TSC0030239
ttttcgatttta

SEQ ID NO: 321439 - DNA, 12 bp, Artificial Sequence
  Oligonucleotide primer for the detection of SNP TSC0030240
tttaaaattaaa

SEQ ID NO: 321440 - DNA, 12 bp, Artificial Sequence
  Oligonucleotide primer for the detection of SNP TSC0030240
aaccactatctc

SEQ ID NO: 321441 - DNA, 12 bp, Artificial Sequence
  Oligonucleotide primer for the detection of SNP TSC0030240
tttagggttggg

SEQ ID NO: 321442 - DNA, 12 bp, Artificial Sequence
  Oligonucleotide primer for the detection of SNP TSC0030241
atctcaataatc

SEQ ID NO: 321443 - DNA, 12 bp, Artificial Sequence
  Oligonucleotide primer for the detection of SNP TSC0030241
agatttgatgga

SEQ ID NO: 321444 - DNA, 12 bp, Artificial Sequence
  Oligonucleotide primer for the detection of SNP TSC0030247
aaaacataaatt

SEQ ID NO: 321445 - DNA, 12 bp, Artificial Sequence
  Oligonucleotide primer for the detection of SNP TSC0030247
taaatttagagg

SEQ ID NO: 321446 - DNA, 12 bp, Artificial Sequence
  Oligonucleotide primer for the detection of SNP TSC0030251
aagttaggagtt

SEQ ID NO: 321447 - DNA, 12 bp, Artificial Sequence
  Oligonucleotide primer for the detection of SNP TSC0030253
tattttatatag

SEQ ID NO: 321448 - DNA, 12 bp, Artificial Sequence
  Oligonucleotide primer for the detection of SNP TSC0030254
cctaaaataata

SEQ ID NO: 321449 - DNA, 12 bp, Artificial Sequence
  Oligonucleotide primer for the detection of SNP TSC0030254
tgatgtttttat

SEQ ID NO: 321450 - DNA, 12 bp, Artificial Sequence
  Oligonucleotide primer for the detection of SNP TSC0030254
taatattcttat

SEQ ID NO: 321451 - DNA, 12 bp, Artificial Sequence
  Oligonucleotide primer for the detection of SNP TSC0030254
tttgaaatagta

SEQ ID NO: 321452 - DNA, 12 bp, Artificial Sequence
  Oligonucleotide primer for the detection of SNP TSC0030256
caaaaatataat

SEQ ID NO: 321453 - DNA, 12 bp, Artificial Sequence
  Oligonucleotide primer for the detection of SNP TSC0030256
cgaaaatataat

SEQ ID NO: 321454 - DNA, 12 bp, Artificial Sequence
  Oligonucleotide primer for the detection of SNP TSC0030256
gatatattgaaa

SEQ ID NO: 321455 - DNA, 12 bp, Artificial Sequence
  Oligonucleotide primer for the detection of SNP TSC0030257
cccaactctcct

SEQ ID NO: 321456 - DNA, 12 bp, Artificial Sequence
  Oligonucleotide primer for the detection of SNP TSC0030257
cccgactctcct

SEQ ID NO: 321457 - DNA, 12 bp, Artificial Sequence
  Oligonucleotide primer for the detection of SNP TSC0030257
taggtttttgga

SEQ ID NO: 321458 - DNA, 12 bp, Artificial Sequence
  Oligonucleotide primer for the detection of SNP TSC0030257
taggttttcgga

SEQ ID NO: 321459 - DNA, 12 bp, Artificial Sequence
  Oligonucleotide primer for the detection of SNP TSC0030257
caaatccccaaa

SEQ ID NO: 321460 - DNA, 12 bp, Artificial Sequence
  Oligonucleotide primer for the detection of SNP TSC0030257
caaatccccgaa

SEQ ID NO: 321461 - DNA, 12 bp, Artificial Sequence
  Oligonucleotide primer for the detection of SNP TSC0030260
cccatttcccac

SEQ ID NO: 321462 - DNA, 12 bp, Artificial Sequence
  Oligonucleotide primer for the detection of SNP TSC0030260
cccgtttcccac

SEQ ID NO: 321463 - DNA, 12 bp, Artificial Sequence
  Oligonucleotide primer for the detection of SNP TSC0030260
aaatggagaagg

SEQ ID NO: 321464 - DNA, 12 bp, Artificial Sequence
  Oligonucleotide primer for the detection of SNP TSC0030260
aaacggagaagg

SEQ ID NO: 321465 - DNA, 12 bp, Artificial Sequence
  Oligonucleotide primer for the detection of SNP TSC0030261
ctaaacccaaaa

SEQ ID NO: 321466 - DNA, 12 bp, Artificial Sequence
  Oligonucleotide primer for the detection of SNP TSC0030261
aggttttgaggt

SEQ ID NO: 321467 - DNA, 12 bp, Artificial Sequence
  Oligonucleotide primer for the detection of SNP TSC0030261
aggtttcgaggt

SEQ ID NO: 321468 - DNA, 12 bp, Artificial Sequence
  Oligonucleotide primer for the detection of SNP TSC0030261
ttgggtttagaa

SEQ ID NO: 321469 - DNA, 12 bp, Artificial Sequence
  Oligonucleotide primer for the detection of SNP TSC0030265
tttgttattagg

SEQ ID NO: 321470 - DNA, 12 bp, Artificial Sequence
  Oligonucleotide primer for the detection of SNP TSC0030269
cactaacttcca

SEQ ID NO: 321471 - DNA, 12 bp, Artificial Sequence
  Oligonucleotide primer for the detection of SNP TSC0030269
cactaacttccg

SEQ ID NO: 321472 - DNA, 12 bp, Artificial Sequence
  Oligonucleotide primer for the detection of SNP TSC0030269
tgggggatttta

SEQ ID NO: 321473 - DNA, 12 bp, Artificial Sequence
  Oligonucleotide primer for the detection of SNP TSC0030269
taaaaaacttta

SEQ ID NO: 321474 - DNA, 12 bp, Artificial Sequence
  Oligonucleotide primer for the detection of SNP TSC0030269
tattagtttttg

SEQ ID NO: 321475 - DNA, 12 bp, Artificial Sequence
  Oligonucleotide primer for the detection of SNP TSC0030269
tattagttttcg

SEQ ID NO: 321476 - DNA, 12 bp, Artificial Sequence
  Oligonucleotide primer for the detection of SNP TSC0030272
tactaaacttct

SEQ ID NO: 321477 - DNA, 12 bp, Artificial Sequence
  Oligonucleotide primer for the detection of SNP TSC0030272
ttttattgttaa

SEQ ID NO: 321478 - DNA, 12 bp, Artificial Sequence
  Oligonucleotide primer for the detection of SNP TSC0030272
tttcattatcaa

SEQ ID NO: 321479 - DNA, 12 bp, Artificial Sequence
  Oligonucleotide primer for the detection of SNP TSC0030272
tgttaggttttt

SEQ ID NO: 321480 - DNA, 12 bp, Artificial Sequence
  Oligonucleotide primer for the detection of SNP TSC0030273
ataaaaaattat

SEQ ID NO: 321481 - DNA, 12 bp, Artificial Sequence
  Oligonucleotide primer for the detection of SNP TSC0030273
agaagttattta

SEQ ID NO: 321482 - DNA, 12 bp, Artificial Sequence
  Oligonucleotide primer for the detection of SNP TSC0030274
aatcaaattttc

SEQ ID NO: 321483 - DNA, 12 bp, Artificial Sequence
  Oligonucleotide primer for the detection of SNP TSC0030274
tagtgggatggg

SEQ ID NO: 321484 - DNA, 12 bp, Artificial Sequence
  Oligonucleotide primer for the detection of SNP TSC0030274
tagtgggacggg

SEQ ID NO: 321485 - DNA, 12 bp, Artificial Sequence
  Oligonucleotide primer for the detection of SNP TSC0030274
caataaaacaaa

SEQ ID NO: 321486 - DNA, 12 bp, Artificial Sequence
  Oligonucleotide primer for the detection of SNP TSC0030274
caataaaacgaa

SEQ ID NO: 321487 - DNA, 12 bp, Artificial Sequence
  Oligonucleotide primer for the detection of SNP TSC0030274
aattagattttt

SEQ ID NO: 321488 - DNA, 12 bp, Artificial Sequence
  Oligonucleotide primer for the detection of SNP TSC0030282
atataaaaactc

SEQ ID NO: 321489 - DNA, 12 bp, Artificial Sequence
  Oligonucleotide primer for the detection of SNP TSC0030282
taatgtaattta

SEQ ID NO: 321490 - DNA, 12 bp, Artificial Sequence
  Oligonucleotide primer for the detection of SNP TSC0030282
caatataatcca

SEQ ID NO: 321491 - DNA, 12 bp, Artificial Sequence
  Oligonucleotide primer for the detection of SNP TSC0030282
gtataaggattt

SEQ ID NO: 321492 - DNA, 12 bp, Artificial Sequence
  Oligonucleotide primer for the detection of SNP TSC0030283
cattaatatccc

SEQ ID NO: 321493 - DNA, 12 bp, Artificial Sequence
  Oligonucleotide primer for the detection of SNP TSC0030283
cgttaatatccc

SEQ ID NO: 321494 - DNA, 12 bp, Artificial Sequence
  Oligonucleotide primer for the detection of SNP TSC0030283
ggatattattag

SEQ ID NO: 321495 - DNA, 12 bp, Artificial Sequence
  Oligonucleotide primer for the detection of SNP TSC0030284
taccacttcaac

SEQ ID NO: 321496 - DNA, 12 bp, Artificial Sequence
  Oligonucleotide primer for the detection of SNP TSC0030284
tatggtagaaat

SEQ ID NO: 321497 - DNA, 12 bp, Artificial Sequence
  Oligonucleotide primer for the detection of SNP TSC0030284
tacggtagaaat

SEQ ID NO: 321498 - DNA, 12 bp, Artificial Sequence
  Oligonucleotide primer for the detection of SNP TSC0030284
tacaacaaaaat

SEQ ID NO: 321499 - DNA, 12 bp, Artificial Sequence
  Oligonucleotide primer for the detection of SNP TSC0030284
tacgacaaaaat

SEQ ID NO: 321500 - DNA, 12 bp, Artificial Sequence
  Oligonucleotide primer for the detection of SNP TSC0030284
tattattttaat

SEQ ID NO: 321501 - DNA, 12 bp, Artificial Sequence
  Oligonucleotide primer for the detection of SNP TSC0030288
aatcaaaactca

SEQ ID NO: 321502 - DNA, 12 bp, Artificial Sequence
  Oligonucleotide primer for the detection of SNP TSC0030288
ttagaagttgtt

SEQ ID NO: 321503 - DNA, 12 bp, Artificial Sequence
  Oligonucleotide primer for the detection of SNP TSC0030288
ttagaagttgtc

SEQ ID NO: 321504 - DNA, 12 bp, Artificial Sequence
  Oligonucleotide primer for the detection of SNP TSC0030288
ctaaaaattacc

SEQ ID NO: 321505 - DNA, 12 bp, Artificial Sequence
  Oligonucleotide primer for the detection of SNP TSC0030288
gattagagttta

SEQ ID NO: 321506 - DNA, 12 bp, Artificial Sequence
  Oligonucleotide primer for the detection of SNP TSC0030291
tactatctactt

SEQ ID NO: 321507 - DNA, 12 bp, Artificial Sequence
  Oligonucleotide primer for the detection of SNP TSC0030291
agttgtttttta

SEQ ID NO: 321508 - DNA, 12 bp, Artificial Sequence
  Oligonucleotide primer for the detection of SNP TSC0030291
agtcgtttttta

SEQ ID NO: 321509 - DNA, 12 bp, Artificial Sequence
  Oligonucleotide primer for the detection of SNP TSC0030292
ccctctaaaaac

SEQ ID NO: 321510 - DNA, 12 bp, Artificial Sequence
  Oligonucleotide primer for the detection of SNP TSC0030292
tgtgttaattta

SEQ ID NO: 321511 - DNA, 12 bp, Artificial Sequence
  Oligonucleotide primer for the detection of SNP TSC0030293
caatatataaac

SEQ ID NO: 321512 - DNA, 12 bp, Artificial Sequence
  Oligonucleotide primer for the detection of SNP TSC0030293
ggttaatgatag

SEQ ID NO: 321513 - DNA, 12 bp, Artificial Sequence
  Oligonucleotide primer for the detection of SNP TSC0030294
ttactaaataac

SEQ ID NO: 321514 - DNA, 12 bp, Artificial Sequence
  Oligonucleotide primer for the detection of SNP TSC0030294
ttatggtggtta

SEQ ID NO: 321515 - DNA, 12 bp, Artificial Sequence
  Oligonucleotide primer for the detection of SNP TSC0030295
ttgttggttttt

SEQ ID NO: 321516 - DNA, 12 bp, Artificial Sequence
  Oligonucleotide primer for the detection of SNP TSC0030295
tcgttggttttt

SEQ ID NO: 321517 - DNA, 12 bp, Artificial Sequence
  Oligonucleotide primer for the detection of SNP TSC0030295
ccattaattctc

SEQ ID NO: 321518 - DNA, 12 bp, Artificial Sequence
  Oligonucleotide primer for the detection of SNP TSC0030295
ccgttaattctc

SEQ ID NO: 321519 - DNA, 12 bp, Artificial Sequence
  Oligonucleotide primer for the detection of SNP TSC0030295
tggaggattttg

SEQ ID NO: 321520 - DNA, 12 bp, Artificial Sequence
  Oligonucleotide primer for the detection of SNP TSC0030298
ggtttttttatt

SEQ ID NO: 321521 - DNA, 12 bp, Artificial Sequence
  Oligonucleotide primer for the detection of SNP TSC0030298
aatctccttatc

SEQ ID NO: 321522 - DNA, 12 bp, Artificial Sequence
  Oligonucleotide primer for the detection of SNP TSC0030298
gatctccttatc

SEQ ID NO: 321523 - DNA, 12 bp, Artificial Sequence
  Oligonucleotide primer for the detection of SNP TSC0030298
aagataagtgag

SEQ ID NO: 321524 - DNA, 12 bp, Artificial Sequence
  Oligonucleotide primer for the detection of SNP TSC0030299
atactcaccaaa

SEQ ID NO: 321525 - DNA, 12 bp, Artificial Sequence
  Oligonucleotide primer for the detection of SNP TSC0030310
gggggatgttgg

SEQ ID NO: 321526 - DNA, 12 bp, Artificial Sequence
  Oligonucleotide primer for the detection of SNP TSC0030310
gggggacgttgg

SEQ ID NO: 321527 - DNA, 12 bp, Artificial Sequence
  Oligonucleotide primer for the detection of SNP TSC0030311
tctaaaatcata

SEQ ID NO: 321528 - DNA, 12 bp, Artificial Sequence
  Oligonucleotide primer for the detection of SNP TSC0030311
tagattattaat

SEQ ID NO: 321529 - DNA, 12 bp, Artificial Sequence
  Oligonucleotide primer for the detection of SNP TSC0030311
taaatcaccaat

SEQ ID NO: 321530 - DNA, 12 bp, Artificial Sequence
  Oligonucleotide primer for the detection of SNP TSC0030311
tttggggttata

SEQ ID NO: 321531 - DNA, 12 bp, Artificial Sequence
  Oligonucleotide primer for the detection of SNP TSC0030313
tatatattaatt

SEQ ID NO: 321532 - DNA, 12 bp, Artificial Sequence
  Oligonucleotide primer for the detection of SNP TSC0030313
ttaaaagtaaaa

SEQ ID NO: 321533 - DNA, 12 bp, Artificial Sequence
  Oligonucleotide primer for the detection of SNP TSC0030313
tgtgtgttggtt

SEQ ID NO: 321534 - DNA, 12 bp, Artificial Sequence
  Oligonucleotide primer for the detection of SNP TSC0030314
caaactccccaa

SEQ ID NO: 321535 - DNA, 12 bp, Artificial Sequence
  Oligonucleotide primer for the detection of SNP TSC0030314
caaactccccga

SEQ ID NO: 321536 - DNA, 12 bp, Artificial Sequence
  Oligonucleotide primer for the detection of SNP TSC0030314
agtagaatggga

SEQ ID NO: 321537 - DNA, 12 bp, Artificial Sequence
  Oligonucleotide primer for the detection of SNP TSC0030314
taggttttttgg

SEQ ID NO: 321538 - DNA, 12 bp, Artificial Sequence
  Oligonucleotide primer for the detection of SNP TSC0030314
taggtttttcgg

SEQ ID NO: 321539 - DNA, 12 bp, Artificial Sequence
  Oligonucleotide primer for the detection of SNP TSC0030315
tcccctacaccc

SEQ ID NO: 321540 - DNA, 12 bp, Artificial Sequence
  Oligonucleotide primer for the detection of SNP TSC0030315
gtttggagttta

SEQ ID NO: 321541 - DNA, 12 bp, Artificial Sequence
  Oligonucleotide primer for the detection of SNP TSC0030316
tacccaacccct

SEQ ID NO: 321542 - DNA, 12 bp, Artificial Sequence
  Oligonucleotide primer for the detection of SNP TSC0030316
gatggttttgaa

SEQ ID NO: 321543 - DNA, 12 bp, Artificial Sequence
  Oligonucleotide primer for the detection of SNP TSC0030316
tgtttagttttt

SEQ ID NO: 321544 - DNA, 12 bp, Artificial Sequence
  Oligonucleotide primer for the detection of SNP TSC0030317
ttaccataattt

SEQ ID NO: 321545 - DNA, 12 bp, Artificial Sequence
  Oligonucleotide primer for the detection of SNP TSC0030317
aaggaaaagagg

SEQ ID NO: 321546 - DNA, 12 bp, Artificial Sequence
  Oligonucleotide primer for the detection of SNP TSC0030319
ttttgatttagg

SEQ ID NO: 321547 - DNA, 12 bp, Artificial Sequence
  Oligonucleotide primer for the detection of SNP TSC0030320
atatctttaaaa

SEQ ID NO: 321548 - DNA, 12 bp, Artificial Sequence
  Oligonucleotide primer for the detection of SNP TSC0030320
aaatgaagaaaa

SEQ ID NO: 321549 - DNA, 12 bp, Artificial Sequence
  Oligonucleotide primer for the detection of SNP TSC0030321
aaacaaaatatc

SEQ ID NO: 321550 - DNA, 12 bp, Artificial Sequence
  Oligonucleotide primer for the detection of SNP TSC0030321
gaagaaaaattt

SEQ ID NO: 321551 - DNA, 12 bp, Artificial Sequence
  Oligonucleotide primer for the detection of SNP TSC0030321
tagagtattttt

SEQ ID NO: 321552 - DNA, 12 bp, Artificial Sequence
  Oligonucleotide primer for the detection of SNP TSC0030322
caaatacaaaaa

SEQ ID NO: 321553 - DNA, 12 bp, Artificial Sequence
  Oligonucleotide primer for the detection of SNP TSC0030322
atgtttggttaa

SEQ ID NO: 321554 - DNA, 12 bp, Artificial Sequence
  Oligonucleotide primer for the detection of SNP TSC0030322
atacctaactaa

SEQ ID NO: 321555 - DNA, 12 bp, Artificial Sequence
  Oligonucleotide primer for the detection of SNP TSC0030323
attttactcaac

SEQ ID NO: 321556 - DNA, 12 bp, Artificial Sequence
  Oligonucleotide primer for the detection of SNP TSC0030323
atttagatagta

SEQ ID NO: 321557 - DNA, 12 bp, Artificial Sequence
  Oligonucleotide primer for the detection of SNP TSC0030324
accaccaattta

SEQ ID NO: 321558 - DNA, 12 bp, Artificial Sequence
  Oligonucleotide primer for the detection of SNP TSC0030324
gccaccaattta

SEQ ID NO: 321559 - DNA, 12 bp, Artificial Sequence
  Oligonucleotide primer for the detection of SNP TSC0030324
gttattaattta

SEQ ID NO: 321560 - DNA, 12 bp, Artificial Sequence
  Oligonucleotide primer for the detection of SNP TSC0030325
tcaaccatatat

SEQ ID NO: 321561 - DNA, 12 bp, Artificial Sequence
  Oligonucleotide primer for the detection of SNP TSC0030325
aaaggataggta

SEQ ID NO: 321562 - DNA, 12 bp, Artificial Sequence
  Oligonucleotide primer for the detection of SNP TSC0030326
agtaatagtttt

SEQ ID NO: 321563 - DNA, 12 bp, Artificial Sequence
  Oligonucleotide primer for the detection of SNP TSC0030326
aataacaactct

SEQ ID NO: 321564 - DNA, 12 bp, Artificial Sequence
  Oligonucleotide primer for the detection of SNP TSC0030326
agtaggagattt

SEQ ID NO: 321565 - DNA, 12 bp, Artificial Sequence
  Oligonucleotide primer for the detection of SNP TSC0030327
tactactaatca

SEQ ID NO: 321566 - DNA, 12 bp, Artificial Sequence
  Oligonucleotide primer for the detection of SNP TSC0030327
aatttttttgtg

SEQ ID NO: 321567 - DNA, 12 bp, Artificial Sequence
  Oligonucleotide primer for the detection of SNP TSC0030327
aattttttcgtg

SEQ ID NO: 321568 - DNA, 12 bp, Artificial Sequence
  Oligonucleotide primer for the detection of SNP TSC0030327
aaccctcccata

SEQ ID NO: 321569 - DNA, 12 bp, Artificial Sequence
  Oligonucleotide primer for the detection of SNP TSC0030327
aaccctcccgta

SEQ ID NO: 321570 - DNA, 12 bp, Artificial Sequence
  Oligonucleotide primer for the detection of SNP TSC0030327
ttattgttgatt

SEQ ID NO: 321571 - DNA, 12 bp, Artificial Sequence
  Oligonucleotide primer for the detection of SNP TSC0030328
gttgattagtag

SEQ ID NO: 321572 - DNA, 12 bp, Artificial Sequence
  Oligonucleotide primer for the detection of SNP TSC0030329
tatatattattc

SEQ ID NO: 321573 - DNA, 12 bp, Artificial Sequence
  Oligonucleotide primer for the detection of SNP TSC0030329
tttagtaagttg

SEQ ID NO: 321574 - DNA, 12 bp, Artificial Sequence
  Oligonucleotide primer for the detection of SNP TSC0030330
tttaattgtgtt

SEQ ID NO: 321575 - DNA, 12 bp, Artificial Sequence
  Oligonucleotide primer for the detection of SNP TSC0030330
ccaattatacca

SEQ ID NO: 321576 - DNA, 12 bp, Artificial Sequence
  Oligonucleotide primer for the detection of SNP TSC0030330
taatagtagtag

SEQ ID NO: 321577 - DNA, 12 bp, Artificial Sequence
  Oligonucleotide primer for the detection of SNP TSC0030331
ttagattagtta

SEQ ID NO: 321578 - DNA, 12 bp, Artificial Sequence
  Oligonucleotide primer for the detection of SNP TSC0030335
actcctaatatc

SEQ ID NO: 321579 - DNA, 12 bp, Artificial Sequence
  Oligonucleotide primer for the detection of SNP TSC0030335
atataatgatga

SEQ ID NO: 321580 - DNA, 12 bp, Artificial Sequence
  Oligonucleotide primer for the detection of SNP TSC0030336
atattaggagtt

SEQ ID NO: 321581 - DNA, 12 bp, Artificial Sequence
  Oligonucleotide primer for the detection of SNP TSC0030336
taacaccaaaaa

SEQ ID NO: 321582 - DNA, 12 bp, Artificial Sequence
  Oligonucleotide primer for the detection of SNP TSC0030336
tgtttttaggtt

SEQ ID NO: 321583 - DNA, 12 bp, Artificial Sequence
  Oligonucleotide primer for the detection of SNP TSC0030337
tactaacacaac

SEQ ID NO: 321584 - DNA, 12 bp, Artificial Sequence
  Oligonucleotide primer for the detection of SNP TSC0030337
tgaaagaggaga

SEQ ID NO: 321585 - DNA, 12 bp, Artificial Sequence
  Oligonucleotide primer for the detection of SNP TSC0030339
tttatagtaaaa

SEQ ID NO: 321586 - DNA, 12 bp, Artificial Sequence
  Oligonucleotide primer for the detection of SNP TSC0030339
tctacaataaaa

SEQ ID NO: 321587 - DNA, 12 bp, Artificial Sequence
  Oligonucleotide primer for the detection of SNP TSC0030340
gatgttattgtg

SEQ ID NO: 321588 - DNA, 12 bp, Artificial Sequence
  Oligonucleotide primer for the detection of SNP TSC0030340
gatgttatcgtg

SEQ ID NO: 321589 - DNA, 12 bp, Artificial Sequence
  Oligonucleotide primer for the detection of SNP TSC0030342
aaataataattt

SEQ ID NO: 321590 - DNA, 12 bp, Artificial Sequence
  Oligonucleotide primer for the detection of SNP TSC0030342
aaataacaatct

SEQ ID NO: 321591 - DNA, 12 bp, Artificial Sequence
  Oligonucleotide primer for the detection of SNP TSC0030342
taagaaaagtga

SEQ ID NO: 321592 - DNA, 12 bp, Artificial Sequence
  Oligonucleotide primer for the detection of SNP TSC0030343
aaaatatttatc

SEQ ID NO: 321593 - DNA, 12 bp, Artificial Sequence
  Oligonucleotide primer for the detection of SNP TSC0030343
atgatttatttg

SEQ ID NO: 321594 - DNA, 12 bp, Artificial Sequence
  Oligonucleotide primer for the detection of SNP TSC0030343
ataattcattta

SEQ ID NO: 321595 - DNA, 12 bp, Artificial Sequence
  Oligonucleotide primer for the detection of SNP TSC0030343
aagatatttatt

SEQ ID NO: 321596 - DNA, 12 bp, Artificial Sequence
  Oligonucleotide primer for the detection of SNP TSC0030343
aagatatttatc

SEQ ID NO: 321597 - DNA, 12 bp, Artificial Sequence
  Oligonucleotide primer for the detection of SNP TSC0030344
tccattctacca

SEQ ID NO: 321598 - DNA, 12 bp, Artificial Sequence
  Oligonucleotide primer for the detection of SNP TSC0030344
attttttgtggt

SEQ ID NO: 321599 - DNA, 12 bp, Artificial Sequence
  Oligonucleotide primer for the detection of SNP TSC0030344
atttcctataac

SEQ ID NO: 321600 - DNA, 12 bp, Artificial Sequence
  Oligonucleotide primer for the detection of SNP TSC0030344
tttattttgtta

SEQ ID NO: 321601 - DNA, 12 bp, Artificial Sequence
  Oligonucleotide primer for the detection of SNP TSC0030352
actaatcaaccc

SEQ ID NO: 321602 - DNA, 12 bp, Artificial Sequence
  Oligonucleotide primer for the detection of SNP TSC0030352
ggtggttgaggg

SEQ ID NO: 321603 - DNA, 12 bp, Artificial Sequence
  Oligonucleotide primer for the detection of SNP TSC0030364
tttgttgagatg

SEQ ID NO: 321604 - DNA, 12 bp, Artificial Sequence
  Oligonucleotide primer for the detection of SNP TSC0030364
tttgttgagacg

SEQ ID NO: 321605 - DNA, 12 bp, Artificial Sequence
  Oligonucleotide primer for the detection of SNP TSC0030365
ttaatttattga

SEQ ID NO: 321606 - DNA, 12 bp, Artificial Sequence
  Oligonucleotide primer for the detection of SNP TSC0030365
ttaattcactaa

SEQ ID NO: 321607 - DNA, 12 bp, Artificial Sequence
  Oligonucleotide primer for the detection of SNP TSC0030365
tttattagaaat

SEQ ID NO: 321608 - DNA, 12 bp, Artificial Sequence
  Oligonucleotide primer for the detection of SNP TSC0030366
aaaaatatatat

SEQ ID NO: 321609 - DNA, 12 bp, Artificial Sequence
  Oligonucleotide primer for the detection of SNP TSC0030366
tatatatgtata

SEQ ID NO: 321610 - DNA, 12 bp, Artificial Sequence
  Oligonucleotide primer for the detection of SNP TSC0030367
taattaaactct

SEQ ID NO: 321611 - DNA, 12 bp, Artificial Sequence
  Oligonucleotide primer for the detection of SNP TSC0030367
gatgtgtgtata

SEQ ID NO: 321612 - DNA, 12 bp, Artificial Sequence
  Oligonukleotid-Primer
gatgtgcgtata

SEQ ID NO: 321613 - DNA, 12 bp, Artificial Sequence
  Oligonucleotide primer for the detection of SNP TSC0030373
ccactcatataa

SEQ ID NO: 321614 - DNA, 12 bp, Artificial Sequence
  Oligonucleotide primer for the detection of SNP TSC0030373
ccactcgtataa

SEQ ID NO: 321615 - DNA, 12 bp, Artificial Sequence
  Oligonucleotide primer for the detection of SNP TSC0030373
gttattttcgtt

SEQ ID NO: 321616 - DNA, 12 bp, Artificial Sequence
  Oligonucleotide primer for the detection of SNP TSC0030373
ccacccccatca

SEQ ID NO: 321617 - DNA, 12 bp, Artificial Sequence
  Oligonucleotide primer for the detection of SNP TSC0030373
ccacccccgtca

SEQ ID NO: 321618 - DNA, 12 bp, Artificial Sequence
  Oligonucleotide primer for the detection of SNP TSC0030373
ttatttgtatgg

SEQ ID NO: 321619 - DNA, 12 bp, Artificial Sequence
  Oligonucleotide primer for the detection of SNP TSC0030373
ttattcgtatgg

SEQ ID NO: 321620 - DNA, 12 bp, Artificial Sequence
  Oligonucleotide primer for the detection of SNP TSC0030374
ctctacactcac

SEQ ID NO: 321621 - DNA, 12 bp, Artificial Sequence
  Oligonucleotide primer for the detection of SNP TSC0030374
ctctacgctcac

SEQ ID NO: 321622 - DNA, 12 bp, Artificial Sequence
  Oligonucleotide primer for the detection of SNP TSC0030375
ccataccactat

SEQ ID NO: 321623 - DNA, 12 bp, Artificial Sequence
  Oligonucleotide primer for the detection of SNP TSC0030375
atttatgttgga

SEQ ID NO: 321624 - DNA, 12 bp, Artificial Sequence
  Oligonucleotide primer for the detection of SNP TSC0030375
atttacgttgga

SEQ ID NO: 321625 - DNA, 12 bp, Artificial Sequence
  Oligonucleotide primer for the detection of SNP TSC0030376
ttatatttagat

SEQ ID NO: 321626 - DNA, 12 bp, Artificial Sequence
  Oligonucleotide primer for the detection of SNP TSC0030376
acacccaaataa

SEQ ID NO: 321627 - DNA, 12 bp, Artificial Sequence
  Oligonucleotide primer for the detection of SNP TSC0030377
ccctaccaaaaa

SEQ ID NO: 321628 - DNA, 12 bp, Artificial Sequence
  Oligonucleotide primer for the detection of SNP TSC0030377
attatgagttat

SEQ ID NO: 321629 - DNA, 12 bp, Artificial Sequence
  Oligonucleotide primer for the detection of SNP TSC0030377
accataaactat

SEQ ID NO: 321630 - DNA, 12 bp, Artificial Sequence
  Oligonucleotide primer for the detection of SNP TSC0030377
ttttgttagggg

SEQ ID NO: 321631 - DNA, 12 bp, Artificial Sequence
  Oligonucleotide primer for the detection of SNP TSC0030378
ctaattattacc

SEQ ID NO: 321632 - DNA, 12 bp, Artificial Sequence
  Oligonucleotide primer for the detection of SNP TSC0030378
tgatataagaaa

SEQ ID NO: 321633 - DNA, 12 bp, Artificial Sequence
  Oligonucleotide primer for the detection of SNP TSC0030379
ttatccaaccct

SEQ ID NO: 321634 - DNA, 12 bp, Artificial Sequence
  Oligonucleotide primer for the detection of SNP TSC0030379
agtttaagtgag

SEQ ID NO: 321635 - DNA, 12 bp, Artificial Sequence
  Oligonucleotide primer for the detection of SNP TSC0030384
tttttgtttgag

SEQ ID NO: 321636 - DNA, 12 bp, Artificial Sequence
  Oligonucleotide primer for the detection of SNP TSC0030385
cccctacacttt

SEQ ID NO: 321637 - DNA, 12 bp, Artificial Sequence
  Oligonucleotide primer for the detection of SNP TSC0030385
cccctacgcttt

SEQ ID NO: 321638 - DNA, 12 bp, Artificial Sequence
  Oligonucleotide primer for the detection of SNP TSC0030385
atttcttaaata

SEQ ID NO: 321639 - DNA, 12 bp, Artificial Sequence
  Oligonucleotide primer for the detection of SNP TSC0030385
tttttacgtttt

SEQ ID NO: 321640 - DNA, 12 bp, Artificial Sequence
  Oligonucleotide primer for the detection of SNP TSC0030386
atcatataaaca

SEQ ID NO: 321641 - DNA, 12 bp, Artificial Sequence
  Oligonucleotide primer for the detection of SNP TSC0030386
tcctcttacccc

SEQ ID NO: 321642 - DNA, 12 bp, Artificial Sequence
  Oligonucleotide primer for the detection of SNP TSC0030386
ttatgtgggtat

SEQ ID NO: 321643 - DNA, 12 bp, Artificial Sequence
  Oligonucleotide primer for the detection of SNP TSC0030386
ttatgtgggtac

SEQ ID NO: 321644 - DNA, 12 bp, Artificial Sequence
  Oligonucleotide primer for the detection of SNP TSC0030388
ccaaaattactt

SEQ ID NO: 321645 - DNA, 12 bp, Artificial Sequence
  Oligonucleotide primer for the detection of SNP TSC0030388
gatattaaataa

SEQ ID NO: 321646 - DNA, 12 bp, Artificial Sequence
  Oligonucleotide primer for the detection of SNP TSC0030388
aacattaaataa

SEQ ID NO: 321647 - DNA, 12 bp, Artificial Sequence
  Oligonucleotide primer for the detection of SNP TSC0030392
accaccatacct

SEQ ID NO: 321648 - DNA, 12 bp, Artificial Sequence
  Oligonucleotide primer for the detection of SNP TSC0030392
atatataaatta

SEQ ID NO: 321649 - DNA, 12 bp, Artificial Sequence
  Oligonucleotide primer for the detection of SNP TSC0030393
tagttttggaag

SEQ ID NO: 321650 - DNA, 12 bp, Artificial Sequence
  Oligonucleotide primer for the detection of SNP TSC0030393
taatcttaaaaa

SEQ ID NO: 321651 - DNA, 12 bp, Artificial Sequence
  Oligonucleotide primer for the detection of SNP TSC0030393
aatgatgttttt

SEQ ID NO: 321652 - DNA, 12 bp, Artificial Sequence
  Oligonucleotide primer for the detection of SNP TSC0030394
taaactactacc

SEQ ID NO: 321653 - DNA, 12 bp, Artificial Sequence
  Oligonucleotide primer for the detection of SNP TSC0030394
ggtagtggttag

SEQ ID NO: 321654 - DNA, 12 bp, Artificial Sequence
  Oligonucleotide primer for the detection of SNP TSC0030394
aacaataatcaa

SEQ ID NO: 321655 - DNA, 12 bp, Artificial Sequence
  Oligonucleotide primer for the detection of SNP TSC0030394
tgagttgttgtt

SEQ ID NO: 321656 - DNA, 12 bp, Artificial Sequence
  Oligonucleotide primer for the detection of SNP TSC0030398
gagattgtgttt

SEQ ID NO: 321657 - DNA, 12 bp, Artificial Sequence
  Oligonucleotide primer for the detection of SNP TSC0030398
gagattgcgttt

SEQ ID NO: 321658 - DNA, 12 bp, Artificial Sequence
  Oligonucleotide primer for the detection of SNP TSC0030398
aaaactacatct

SEQ ID NO: 321659 - DNA, 12 bp, Artificial Sequence
  Oligonucleotide primer for the detection of SNP TSC0030398
aaaactacgtct

SEQ ID NO: 321660 - DNA, 12 bp, Artificial Sequence
  Oligonucleotide primer for the detection of SNP TSC0030400
cctccctacaaa

SEQ ID NO: 321661 - DNA, 12 bp, Artificial Sequence
  Oligonucleotide primer for the detection of SNP TSC0030401
atcctaaataac

SEQ ID NO: 321662 - DNA, 12 bp, Artificial Sequence
  Oligonucleotide primer for the detection of SNP TSC0030401
gttttaagggaa

SEQ ID NO: 321663 - DNA, 12 bp, Artificial Sequence
  Oligonucleotide primer for the detection of SNP TSC0030403
tctcttctattc

SEQ ID NO: 321664 - DNA, 12 bp, Artificial Sequence
  Oligonucleotide primer for the detection of SNP TSC0030403
ttggggtatgga

SEQ ID NO: 321665 - DNA, 12 bp, Artificial Sequence
  Oligonucleotide primer for the detection of SNP TSC0030404
aattccaaaaac

SEQ ID NO: 321666 - DNA, 12 bp, Artificial Sequence
  Oligonucleotide primer for the detection of SNP TSC0030404
gtaatttaaaaa

SEQ ID NO: 321667 - DNA, 12 bp, Artificial Sequence
  Oligonucleotide primer for the detection of SNP TSC0030405
tcattaacttac

SEQ ID NO: 321668 - DNA, 12 bp, Artificial Sequence
  Oligonucleotide primer for the detection of SNP TSC0030405
taatattaagta

SEQ ID NO: 321669 - DNA, 12 bp, Artificial Sequence
  Oligonucleotide primer for the detection of SNP TSC0030406
tataaatacctc

SEQ ID NO: 321670 - DNA, 12 bp, Artificial Sequence
  Oligonucleotide primer for the detection of SNP TSC0030406
aggttgaaggag

SEQ ID NO: 321671 - DNA, 12 bp, Artificial Sequence
  Oligonucleotide primer for the detection of SNP TSC0030406
tatgagtatttt

SEQ ID NO: 321672 - DNA, 12 bp, Artificial Sequence
  Oligonucleotide primer for the detection of SNP TSC0030407
aaacctttaacc

SEQ ID NO: 321673 - DNA, 12 bp, Artificial Sequence
  Oligonucleotide primer for the detection of SNP TSC0030407
aagtataatata

SEQ ID NO: 321674 - DNA, 12 bp, Artificial Sequence
  Oligonucleotide primer for the detection of SNP TSC0030408
taacatcccccc

SEQ ID NO: 321675 - DNA, 12 bp, Artificial Sequence
  Oligonucleotide primer for the detection of SNP TSC0030408
taacgtcccccc

SEQ ID NO: 321676 - DNA, 12 bp, Artificial Sequence
  Oligonucleotide primer for the detection of SNP TSC0030408
atgagatagttg

SEQ ID NO: 321677 - DNA, 12 bp, Artificial Sequence
  Oligonucleotide primer for the detection of SNP TSC0030408
ataaaacaatta

SEQ ID NO: 321678 - DNA, 12 bp, Artificial Sequence
  Oligonucleotide primer for the detection of SNP TSC0030408
gatgtttttttt

SEQ ID NO: 321679 - DNA, 12 bp, Artificial Sequence
  Oligonucleotide primer for the detection of SNP TSC0030408
gacgtttttttt

SEQ ID NO: 321680 - DNA, 12 bp, Artificial Sequence
  Oligonucleotide primer for the detection of SNP TSC0030413
atatttacccaa

SEQ ID NO: 321681 - DNA, 12 bp, Artificial Sequence
  Oligonucleotide primer for the detection of SNP TSC0030413
gtgtgtgtgtat

SEQ ID NO: 321682 - DNA, 12 bp, Artificial Sequence
  Oligonucleotide primer for the detection of SNP TSC0030413
gtgtgtgcgtat

SEQ ID NO: 321683 - DNA, 12 bp, Artificial Sequence
  Oligonucleotide primer for the detection of SNP TSC0030413
gtgtgtgtgtac

SEQ ID NO: 321684 - DNA, 12 bp, Artificial Sequence
  Oligonucleotide primer for the detection of SNP TSC0030413
gtgtgtgcgtac

SEQ ID NO: 321685 - DNA, 12 bp, Artificial Sequence
  Oligonucleotide primer for the detection of SNP TSC0030413
gtatatacacac

SEQ ID NO: 321686 - DNA, 12 bp, Artificial Sequence
  Oligonucleotide primer for the detection of SNP TSC0030413
gtatatacgcac

SEQ ID NO: 321687 - DNA, 12 bp, Artificial Sequence
  Oligonucleotide primer for the detection of SNP TSC0030413
gtgtttatttag

SEQ ID NO: 321688 - DNA, 12 bp, Artificial Sequence
  Oligonucleotide primer for the detection of SNP TSC0030415
ctaatccacaat

SEQ ID NO: 321689 - DNA, 12 bp, Artificial Sequence
  Oligonucleotide primer for the detection of SNP TSC0030415
ggtgtttttagg

SEQ ID NO: 321690 - DNA, 12 bp, Artificial Sequence
  Oligonucleotide primer for the detection of SNP TSC0030417
ataactaatact

SEQ ID NO: 321691 - DNA, 12 bp, Artificial Sequence
  Oligonucleotide primer for the detection of SNP TSC0030417
aaagttagaaag

SEQ ID NO: 321692 - DNA, 12 bp, Artificial Sequence
  Oligonucleotide primer for the detection of SNP TSC0030418
taattttttatg

SEQ ID NO: 321693 - DNA, 12 bp, Artificial Sequence
  Oligonucleotide primer for the detection of SNP TSC0030418
caactcctcata

SEQ ID NO: 321694 - DNA, 12 bp, Artificial Sequence
  Oligonucleotide primer for the detection of SNP TSC0030418
aaagttaggaag

SEQ ID NO: 321695 - DNA, 12 bp, Artificial Sequence
  Oligonucleotide primer for the detection of SNP TSC0030421
tcctcatcacca

SEQ ID NO: 321696 - DNA, 12 bp, Artificial Sequence
  Oligonucleotide primer for the detection of SNP TSC0030421
ggtgatgatagt

SEQ ID NO: 321697 - DNA, 12 bp, Artificial Sequence
  Oligonucleotide primer for the detection of SNP TSC0030422
tactataattaa

SEQ ID NO: 321698 - DNA, 12 bp, Artificial Sequence
  Oligonucleotide primer for the detection of SNP TSC0030422
ttaataattaca

SEQ ID NO: 321699 - DNA, 12 bp, Artificial Sequence
  Oligonucleotide primer for the detection of SNP TSC0030422
ttgtgattaatt

SEQ ID NO: 321700 - DNA, 12 bp, Artificial Sequence
  Oligonucleotide primer for the detection of SNP TSC0030423
tattcttattcc

SEQ ID NO: 321701 - DNA, 12 bp, Artificial Sequence
  Oligonucleotide primer for the detection of SNP TSC0030423
agtaattataga

SEQ ID NO: 321702 - DNA, 12 bp, Artificial Sequence
  Oligonucleotide primer for the detection of SNP TSC0030423
aacaactataaa

SEQ ID NO: 321703 - DNA, 12 bp, Artificial Sequence
  Oligonucleotide primer for the detection of SNP TSC0030424
aataaatataat

SEQ ID NO: 321704 - DNA, 12 bp, Artificial Sequence
  Oligonucleotide primer for the detection of SNP TSC0030424
gtttttggttag

SEQ ID NO: 321705 - DNA, 12 bp, Artificial Sequence
  Oligonucleotide primer for the detection of SNP TSC0030424
acctttaattaa

SEQ ID NO: 321706 - DNA, 12 bp, Artificial Sequence
  Oligonucleotide primer for the detection of SNP TSC0030424
aataaatgtaat

SEQ ID NO: 321707 - DNA, 12 bp, Artificial Sequence
  Oligonucleotide primer for the detection of SNP TSC0030428
atttggtaagta

SEQ ID NO: 321708 - DNA, 12 bp, Artificial Sequence
  Oligonucleotide primer for the detection of SNP TSC0030429
cttcattttcct

SEQ ID NO: 321709 - DNA, 12 bp, Artificial Sequence
  Oligonucleotide primer for the detection of SNP TSC0030430
aacaaaaaccct

SEQ ID NO: 321710 - DNA, 12 bp, Artificial Sequence
  Oligonucleotide primer for the detection of SNP TSC0030430
ttagttagtgta

SEQ ID NO: 321711 - DNA, 12 bp, Artificial Sequence
  Oligonucleotide primer for the detection of SNP TSC0030431
tttcctaattta

SEQ ID NO: 321712 - DNA, 12 bp, Artificial Sequence
  Oligonucleotide primer for the detection of SNP TSC0030431
attgtattaatt

SEQ ID NO: 321713 - DNA, 12 bp, Artificial Sequence
  Oligonucleotide primer for the detection of SNP TSC0030431
actacactaact

SEQ ID NO: 321714 - DNA, 12 bp, Artificial Sequence
  Oligonucleotide primer for the detection of SNP TSC0030431
ttttttggtttg

SEQ ID NO: 321715 - DNA, 12 bp, Artificial Sequence
  Oligonucleotide primer for the detection of SNP TSC0030434
ttttcaacttta

SEQ ID NO: 321716 - DNA, 12 bp, Artificial Sequence
  Oligonucleotide primer for the detection of SNP TSC0030434
ggtaaggtattt

SEQ ID NO: 321717 - DNA, 12 bp, Artificial Sequence
  Oligonukleotid-Primer
tttttagtttta

SEQ ID NO: 321718 - DNA, 12 bp, Artificial Sequence
  Oligonucleotide primer for the detection of SNP TSC0030435
ttcctactcctc

SEQ ID NO: 321719 - DNA, 12 bp, Artificial Sequence
  Oligonucleotide primer for the detection of SNP TSC0030435
tattagagttag

SEQ ID NO: 321720 - DNA, 12 bp, Artificial Sequence
  Oligonucleotide primer for the detection of SNP TSC0030436
taggataaatta

SEQ ID NO: 321721 - DNA, 12 bp, Artificial Sequence
  Oligonucleotide primer for the detection of SNP TSC0030438
aaatctacaaaa

SEQ ID NO: 321722 - DNA, 12 bp, Artificial Sequence
  Oligonucleotide primer for the detection of SNP TSC0030438
gtttgttggttt

SEQ ID NO: 321723 - DNA, 12 bp, Artificial Sequence
  Oligonucleotide primer for the detection of SNP TSC0030438
acctactaactt

SEQ ID NO: 321724 - DNA, 12 bp, Artificial Sequence
  Oligonucleotide primer for the detection of SNP TSC0030438
gaaatttgtaga

SEQ ID NO: 321725 - DNA, 12 bp, Artificial Sequence
  Oligonukleotid-Primer
aataaaatccta

SEQ ID NO: 321726 - DNA, 12 bp, Artificial Sequence
  Oligonucleotide primer for the detection of SNP TSC0030444
gttaaaatttat

SEQ ID NO: 321727 - DNA, 12 bp, Artificial Sequence
  Oligonucleotide primer for the detection of SNP TSC0030444
tattaaaatcta

SEQ ID NO: 321728 - DNA, 12 bp, Artificial Sequence
  Oligonucleotide primer for the detection of SNP TSC0030444
aataaaattttg

SEQ ID NO: 321729 - DNA, 12 bp, Artificial Sequence
  Oligonucleotide primer for the detection of SNP TSC0030445
tatatattaaaa

SEQ ID NO: 321730 - DNA, 12 bp, Artificial Sequence
  Oligonucleotide primer for the detection of SNP TSC0030445
ttatttatatac

SEQ ID NO: 321731 - DNA, 12 bp, Artificial Sequence
  Oligonucleotide primer for the detection of SNP TSC0030445
tgtgtattaaga

SEQ ID NO: 321732 - DNA, 12 bp, Artificial Sequence
  Oligonucleotide primer for the detection of SNP TSC0030447
ctaccctcttac

SEQ ID NO: 321733 - DNA, 12 bp, Artificial Sequence
  Oligonucleotide primer for the detection of SNP TSC0030447
gaaggagatggt

SEQ ID NO: 321734 - DNA, 12 bp, Artificial Sequence
  Oligonucleotide primer for the detection of SNP TSC0030448
tcctactttcat

SEQ ID NO: 321735 - DNA, 12 bp, Artificial Sequence
  Oligonucleotide primer for the detection of SNP TSC0030448
tttttgtgggta

SEQ ID NO: 321736 - DNA, 12 bp, Artificial Sequence
  Oligonucleotide primer for the detection of SNP TSC0030449
ttaaaaaattac

SEQ ID NO: 321737 - DNA, 12 bp, Artificial Sequence
  Oligonucleotide primer for the detection of SNP TSC0030449
atttctaaataa

SEQ ID NO: 321738 - DNA, 12 bp, Artificial Sequence
  Oligonucleotide primer for the detection of SNP TSC0030449
ttggaaggttgt

SEQ ID NO: 321739 - DNA, 12 bp, Artificial Sequence
  Oligonucleotide primer for the detection of SNP TSC0030449
ttggaaggttgc

SEQ ID NO: 321740 - DNA, 12 bp, Artificial Sequence
  Oligonucleotide primer for the detection of SNP TSC0030450
cccctctcaacc

SEQ ID NO: 321741 - DNA, 12 bp, Artificial Sequence
  Oligonucleotide primer for the detection of SNP TSC0030450
tgtaagttatta

SEQ ID NO: 321742 - DNA, 12 bp, Artificial Sequence
  Oligonucleotide primer for the detection of SNP TSC0030450
cgtaagttatta

SEQ ID NO: 321743 - DNA, 12 bp, Artificial Sequence
  Oligonucleotide primer for the detection of SNP TSC0030451
atctccaatttc

SEQ ID NO: 321744 - DNA, 12 bp, Artificial Sequence
  Oligonucleotide primer for the detection of SNP TSC0030451
agttgttgtgtg

SEQ ID NO: 321745 - DNA, 12 bp, Artificial Sequence
  Oligonucleotide primer for the detection of SNP TSC0030451
aattactatata

SEQ ID NO: 321746 - DNA, 12 bp, Artificial Sequence
  Oligonucleotide primer for the detection of SNP TSC0030456
aggataaatgat

SEQ ID NO: 321747 - DNA, 12 bp, Artificial Sequence
  Oligonucleotide primer for the detection of SNP TSC0030456
aggataaatgac

SEQ ID NO: 321748 - DNA, 12 bp, Artificial Sequence
  Oligonucleotide primer for the detection of SNP TSC0030456
tgttgaagaatt

SEQ ID NO: 321749 - DNA, 12 bp, Artificial Sequence
  Oligonucleotide primer for the detection of SNP TSC0030457
atccaaacgaaa

SEQ ID NO: 321750 - DNA, 12 bp, Artificial Sequence
  Oligonucleotide primer for the detection of SNP TSC0030457
aatataaatttc

SEQ ID NO: 321751 - DNA, 12 bp, Artificial Sequence
  Oligonucleotide primer for the detection of SNP TSC0030457
gtttaagtggag

SEQ ID NO: 321752 - DNA, 12 bp, Artificial Sequence
  Oligonucleotide primer for the detection of SNP TSC0030457
gtttaagcggag

SEQ ID NO: 321753 - DNA, 12 bp, Artificial Sequence
  Oligonucleotide primer for the detection of SNP TSC0030458
aaataaattatt

SEQ ID NO: 321754 - DNA, 12 bp, Artificial Sequence
  Oligonucleotide primer for the detection of SNP TSC0030458
ggggtagtttta

SEQ ID NO: 321755 - DNA, 12 bp, Artificial Sequence
  Oligonucleotide primer for the detection of SNP TSC0030459
tatccttcaaaa

SEQ ID NO: 321756 - DNA, 12 bp, Artificial Sequence
  Oligonucleotide primer for the detection of SNP TSC0030459
aatttacaacac

SEQ ID NO: 321757 - DNA, 12 bp, Artificial Sequence
  Oligonucleotide primer for the detection of SNP TSC0030460
ctcataaatccc

SEQ ID NO: 321758 - DNA, 12 bp, Artificial Sequence
  Oligonucleotide primer for the detection of SNP TSC0030460
gtgggaataaga

SEQ ID NO: 321759 - DNA, 12 bp, Artificial Sequence
  Oligonucleotide primer for the detection of SNP TSC0030461
aatacacaaaat

SEQ ID NO: 321760 - DNA, 12 bp, Artificial Sequence
  Oligonucleotide primer for the detection of SNP TSC0030461
taatttttttag

SEQ ID NO: 321761 - DNA, 12 bp, Artificial Sequence
  Oligonucleotide primer for the detection of SNP TSC0030470
caccataaccta

SEQ ID NO: 321762 - DNA, 12 bp, Artificial Sequence
  Oligonucleotide primer for the detection of SNP TSC0030470
ttgttggaggta

SEQ ID NO: 321763 - DNA, 12 bp, Artificial Sequence
  Oligonucleotide primer for the detection of SNP TSC0030470
tattatgatttg

SEQ ID NO: 321764 - DNA, 12 bp, Artificial Sequence
  Oligonucleotide primer for the detection of SNP TSC0030471
aagatgtttggg

SEQ ID NO: 321765 - DNA, 12 bp, Artificial Sequence
  Oligonucleotide primer for the detection of SNP TSC0030472
tttccatctatt

SEQ ID NO: 321766 - DNA, 12 bp, Artificial Sequence
  Oligonucleotide primer for the detection of SNP TSC0030472
ttgagtttgtat

SEQ ID NO: 321767 - DNA, 12 bp, Artificial Sequence
  Oligonucleotide primer for the detection of SNP TSC0030474
tcttttaaaatt

SEQ ID NO: 321768 - DNA, 12 bp, Artificial Sequence
  Oligonucleotide primer for the detection of SNP TSC0030474
aagataaaaagt

SEQ ID NO: 321769 - DNA, 12 bp, Artificial Sequence
  Oligonucleotide primer for the detection of SNP TSC0030479
taatacactcct

SEQ ID NO: 321770 - DNA, 12 bp, Artificial Sequence
  Oligonucleotide primer for the detection of SNP TSC0030479
aagtagttggga

SEQ ID NO: 321771 - DNA, 12 bp, Artificial Sequence
  Oligonucleotide primer for the detection of SNP TSC0030480
ttcatctatttt

SEQ ID NO: 321772 - DNA, 12 bp, Artificial Sequence
  Oligonucleotide primer for the detection of SNP TSC0030480
ttcgtctatttt

SEQ ID NO: 321773 - DNA, 12 bp, Artificial Sequence
  Oligonucleotide primer for the detection of SNP TSC0030480
ggaaaaaaaatt

SEQ ID NO: 321774 - DNA, 12 bp, Artificial Sequence
  Oligonucleotide primer for the detection of SNP TSC0030480
ttcgtttatttt

SEQ ID NO: 321775 - DNA, 12 bp, Artificial Sequence
  Oligonucleotide primer for the detection of SNP TSC0030481
tctatcttattt

SEQ ID NO: 321776 - DNA, 12 bp, Artificial Sequence
  Oligonucleotide primer for the detection of SNP TSC0030481
gttgttaaaaaa

SEQ ID NO: 321777 - DNA, 12 bp, Artificial Sequence
  Oligonucleotide primer for the detection of SNP TSC0030481
actattaaaaaa

SEQ ID NO: 321778 - DNA, 12 bp, Artificial Sequence
  Oligonucleotide primer for the detection of SNP TSC0030482
tccataatactt

SEQ ID NO: 321779 - DNA, 12 bp, Artificial Sequence
  Oligonucleotide primer for the detection of SNP TSC0030482
tccgtaatactt

SEQ ID NO: 321780 - DNA, 12 bp, Artificial Sequence
  Oligonucleotide primer for the detection of SNP TSC0030483
ttaaacccctca

SEQ ID NO: 321781 - DNA, 12 bp, Artificial Sequence
  Oligonucleotide primer for the detection of SNP TSC0030483
aattttaggatt

SEQ ID NO: 321782 - DNA, 12 bp, Artificial Sequence
  Oligonucleotide primer for the detection of SNP TSC0030483
taatttcaaaac

SEQ ID NO: 321783 - DNA, 12 bp, Artificial Sequence
  Oligonucleotide primer for the detection of SNP TSC0030484
gagaatgggata

SEQ ID NO: 321784 - DNA, 12 bp, Artificial Sequence
  Oligonucleotide primer for the detection of SNP TSC0030486
tttatttgtttg

SEQ ID NO: 321785 - DNA, 12 bp, Artificial Sequence
  Oligonucleotide primer for the detection of SNP TSC0030489
ttttgatataaa

SEQ ID NO: 321786 - DNA, 12 bp, Artificial Sequence
  Oligonucleotide primer for the detection of SNP TSC0030489
tttagagaaaaa

SEQ ID NO: 321787 - DNA, 12 bp, Artificial Sequence
  Oligonucleotide primer for the detection of SNP TSC0030493
taactacctttc

SEQ ID NO: 321788 - DNA, 12 bp, Artificial Sequence
  Oligonucleotide primer for the detection of SNP TSC0030493
aggtttatttag

SEQ ID NO: 321789 - DNA, 12 bp, Artificial Sequence
  Oligonucleotide primer for the detection of SNP TSC0030494
ccatatttttta

SEQ ID NO: 321790 - DNA, 12 bp, Artificial Sequence
  Oligonucleotide primer for the detection of SNP TSC0030494
ttgttagtagtt

SEQ ID NO: 321791 - DNA, 12 bp, Artificial Sequence
  Oligonucleotide primer for the detection of SNP TSC0030494
ctaccaacaact

SEQ ID NO: 321792 - DNA, 12 bp, Artificial Sequence
  Oligonucleotide primer for the detection of SNP TSC0030494
ttatgtttttta

SEQ ID NO: 321793 - DNA, 12 bp, Artificial Sequence
  Oligonucleotide primer for the detection of SNP TSC0030495
acatatcctcca

SEQ ID NO: 321794 - DNA, 12 bp, Artificial Sequence
  Oligonucleotide primer for the detection of SNP TSC0030495
ctccctatacaa

SEQ ID NO: 321795 - DNA, 12 bp, Artificial Sequence
  Oligonucleotide primer for the detection of SNP TSC0030496
ataggtggagga

SEQ ID NO: 321796 - DNA, 12 bp, Artificial Sequence
  Oligonucleotide primer for the detection of SNP TSC0030497
aatcttctacct

SEQ ID NO: 321797 - DNA, 12 bp, Artificial Sequence
  Oligonucleotide primer for the detection of SNP TSC0030497
ttgttgtaggta

SEQ ID NO: 321798 - DNA, 12 bp, Artificial Sequence
  Oligonucleotide primer for the detection of SNP TSC0030498
cctacaatcact

SEQ ID NO: 321799 - DNA, 12 bp, Artificial Sequence
  Oligonucleotide primer for the detection of SNP TSC0030498
atttaggaaggg

SEQ ID NO: 321800 - DNA, 12 bp, Artificial Sequence
  Oligonucleotide primer for the detection of SNP TSC0030499
tccttaactatt

SEQ ID NO: 321801 - DNA, 12 bp, Artificial Sequence
  Oligonucleotide primer for the detection of SNP TSC0030499
tgaaagaaaata

SEQ ID NO: 321802 - DNA, 12 bp, Artificial Sequence
  Oligonucleotide primer for the detection of SNP TSC0030504
tttgtattttgt

SEQ ID NO: 321803 - DNA, 12 bp, Artificial Sequence
  Oligonucleotide primer for the detection of SNP TSC0030504
ttctacacttta

SEQ ID NO: 321804 - DNA, 12 bp, Artificial Sequence
  Oligonucleotide primer for the detection of SNP TSC0030505
aaataacttctc

SEQ ID NO: 321805 - DNA, 12 bp, Artificial Sequence
  Oligonucleotide primer for the detection of SNP TSC0030505
aggaaagttaag

SEQ ID NO: 321806 - DNA, 12 bp, Artificial Sequence
  Oligonucleotide primer for the detection of SNP TSC0030506
acaccaaaaacc

SEQ ID NO: 321807 - DNA, 12 bp, Artificial Sequence
  Oligonucleotide primer for the detection of SNP TSC0030506
gtagtggtgaag

SEQ ID NO: 321808 - DNA, 12 bp, Artificial Sequence
  Oligonucleotide primer for the detection of SNP TSC0030506
atattagaagtt

SEQ ID NO: 321809 - DNA, 12 bp, Artificial Sequence
  Oligonucleotide primer for the detection of SNP TSC0030509
taaaaacaattt

SEQ ID NO: 321810 - DNA, 12 bp, Artificial Sequence
  Oligonucleotide primer for the detection of SNP TSC0030509
aggtatttggta

SEQ ID NO: 321811 - DNA, 12 bp, Artificial Sequence
  Oligonucleotide primer for the detection of SNP TSC0030510
ttactataaaac

SEQ ID NO: 321812 - DNA, 12 bp, Artificial Sequence
  Oligonucleotide primer for the detection of SNP TSC0030510
gtttttgtgtta

SEQ ID NO: 321813 - DNA, 12 bp, Artificial Sequence
  Oligonucleotide primer for the detection of SNP TSC0030510
gttttcgtgtta

SEQ ID NO: 321814 - DNA, 12 bp, Artificial Sequence
  Oligonucleotide primer for the detection of SNP TSC0030510
accttcatatta

SEQ ID NO: 321815 - DNA, 12 bp, Artificial Sequence
  Oligonucleotide primer for the detection of SNP TSC0030510
accttcgtatta

SEQ ID NO: 321816 - DNA, 12 bp, Artificial Sequence
  Oligonucleotide primer for the detection of SNP TSC0030510
ttgttgtgagat

SEQ ID NO: 321817 - DNA, 12 bp, Artificial Sequence
  Oligonucleotide primer for the detection of SNP TSC0030511
aaattaaatccc

SEQ ID NO: 321818 - DNA, 12 bp, Artificial Sequence
  Oligonucleotide primer for the detection of SNP TSC0030514
cacactaacatc

SEQ ID NO: 321819 - DNA, 12 bp, Artificial Sequence
  Oligonucleotide primer for the detection of SNP TSC0030514
tatattgatatt

SEQ ID NO: 321820 - DNA, 12 bp, Artificial Sequence
  Oligonucleotide primer for the detection of SNP TSC0030515
aaacaaccacta

SEQ ID NO: 321821 - DNA, 12 bp, Artificial Sequence
  Oligonucleotide primer for the detection of SNP TSC0030515
agtgttggtttt

SEQ ID NO: 321822 - DNA, 12 bp, Artificial Sequence
  Oligonucleotide primer for the detection of SNP TSC0030515
agcgttggtttt

SEQ ID NO: 321823 - DNA, 12 bp, Artificial Sequence
  Oligonucleotide primer for the detection of SNP TSC0030515
aacactaacccc

SEQ ID NO: 321824 - DNA, 12 bp, Artificial Sequence
  Oligonucleotide primer for the detection of SNP TSC0030515
aacgctaacccc

SEQ ID NO: 321825 - DNA, 12 bp, Artificial Sequence
  Oligonucleotide primer for the detection of SNP TSC0030515
aggtagttatta

SEQ ID NO: 321826 - DNA, 12 bp, Artificial Sequence
  Oligonucleotide primer for the detection of SNP TSC0030517
ttctatcttcaa

SEQ ID NO: 321827 - DNA, 12 bp, Artificial Sequence
  Oligonucleotide primer for the detection of SNP TSC0030517
agatatagggag

SEQ ID NO: 321828 - DNA, 12 bp, Artificial Sequence
  Oligonucleotide primer for the detection of SNP TSC0030520
tttaggtatttt

SEQ ID NO: 321829 - DNA, 12 bp, Artificial Sequence
  Oligonucleotide primer for the detection of SNP TSC0030520
tttaaatatctc

SEQ ID NO: 321830 - DNA, 12 bp, Artificial Sequence
  Oligonucleotide primer for the detection of SNP TSC0030520
aaatgattatta

SEQ ID NO: 321831 - DNA, 12 bp, Artificial Sequence
  Oligonucleotide primer for the detection of SNP TSC0030521
tattaaacatct

SEQ ID NO: 321832 - DNA, 12 bp, Artificial Sequence
  Oligonucleotide primer for the detection of SNP TSC0030521
atttttcttaca

SEQ ID NO: 321833 - DNA, 12 bp, Artificial Sequence
  Oligonucleotide primer for the detection of SNP TSC0030521
tattgagtattt

SEQ ID NO: 321834 - DNA, 12 bp, Artificial Sequence
  Oligonucleotide primer for the detection of SNP TSC0030523
taaaaacaacaa

SEQ ID NO: 321835 - DNA, 12 bp, Artificial Sequence
  Oligonucleotide primer for the detection of SNP TSC0030523
tggttatgttgt

SEQ ID NO: 321836 - DNA, 12 bp, Artificial Sequence
  Oligonucleotide primer for the detection of SNP TSC0030523
taattatactat

SEQ ID NO: 321837 - DNA, 12 bp, Artificial Sequence
  Oligonucleotide primer for the detection of SNP TSC0030523
tagagatagtag

SEQ ID NO: 321838 - DNA, 12 bp, Artificial Sequence
  Oligonucleotide primer for the detection of SNP TSC0030525
ctacaaactacc

SEQ ID NO: 321839 - DNA, 12 bp, Artificial Sequence
  Oligonucleotide primer for the detection of SNP TSC0030525
ctacgaactacc

SEQ ID NO: 321840 - DNA, 12 bp, Artificial Sequence
  Oligonucleotide primer for the detection of SNP TSC0030525
atttgatttata

SEQ ID NO: 321841 - DNA, 12 bp, Artificial Sequence
  Oligonucleotide primer for the detection of SNP TSC0030526
aatatttgtatg

SEQ ID NO: 321842 - DNA, 12 bp, Artificial Sequence
  Oligonucleotide primer for the detection of SNP TSC0030527
aatgtatttttg

SEQ ID NO: 321843 - DNA, 12 bp, Artificial Sequence
  Oligonucleotide primer for the detection of SNP TSC0030527
aatacatttcta

SEQ ID NO: 321844 - DNA, 12 bp, Artificial Sequence
  Oligonucleotide primer for the detection of SNP TSC0030527
tagagatttagt

SEQ ID NO: 321845 - DNA, 12 bp, Artificial Sequence
  Oligonucleotide primer for the detection of SNP TSC0030528
caaccttaactt

SEQ ID NO: 321846 - DNA, 12 bp, Artificial Sequence
  Oligonucleotide primer for the detection of SNP TSC0030529
tttattaataag

SEQ ID NO: 321847 - DNA, 12 bp, Artificial Sequence
  Oligonucleotide primer for the detection of SNP TSC0030530
actaaaaaaaca

SEQ ID NO: 321848 - DNA, 12 bp, Artificial Sequence
  Oligonucleotide primer for the detection of SNP TSC0030530
gttgggtgtgat

SEQ ID NO: 321849 - DNA, 12 bp, Artificial Sequence
  Oligonucleotide primer for the detection of SNP TSC0030530
attagagaagta

SEQ ID NO: 321850 - DNA, 12 bp, Artificial Sequence
  Oligonucleotide primer for the detection of SNP TSC0030531
aataaaattcca

SEQ ID NO: 321851 - DNA, 12 bp, Artificial Sequence
  Oligonucleotide primer for the detection of SNP TSC0030531
tgggtatggggt

SEQ ID NO: 321852 - DNA, 12 bp, Artificial Sequence
  Oligonucleotide primer for the detection of SNP TSC0030531
ttaaatataaaa

SEQ ID NO: 321853 - DNA, 12 bp, Artificial Sequence
  Oligonucleotide primer for the detection of SNP TSC0030531
ggtaagatttta

SEQ ID NO: 321854 - DNA, 12 bp, Artificial Sequence
  Oligonucleotide primer for the detection of SNP TSC0030532
aaccaaataacc

SEQ ID NO: 321855 - DNA, 12 bp, Artificial Sequence
  Oligonucleotide primer for the detection of SNP TSC0030532
gaaagagtttga

SEQ ID NO: 321856 - DNA, 12 bp, Artificial Sequence
  Oligonucleotide primer for the detection of SNP TSC0030533
taaatataaccc

SEQ ID NO: 321857 - DNA, 12 bp, Artificial Sequence
  Oligonucleotide primer for the detection of SNP TSC0030533
ttttttggggta

SEQ ID NO: 321858 - DNA, 12 bp, Artificial Sequence
  Oligonucleotide primer for the detection of SNP TSC0030534
aaaactctaaat

SEQ ID NO: 321859 - DNA, 12 bp, Artificial Sequence
  Oligonucleotide primer for the detection of SNP TSC0030534
ttggggtaaggg

SEQ ID NO: 321860 - DNA, 12 bp, Artificial Sequence
  Oligonucleotide primer for the detection of SNP TSC0030534
aaaattttgaat

SEQ ID NO: 321861 - DNA, 12 bp, Artificial Sequence
  Oligonucleotide primer for the detection of SNP TSC0030535
ccacctcatact

SEQ ID NO: 321862 - DNA, 12 bp, Artificial Sequence
  Oligonucleotide primer for the detection of SNP TSC0030535
ccgcctcatact

SEQ ID NO: 321863 - DNA, 12 bp, Artificial Sequence
  Oligonucleotide primer for the detection of SNP TSC0030535
acccttccaaaa

SEQ ID NO: 321864 - DNA, 12 bp, Artificial Sequence
  Oligonucleotide primer for the detection of SNP TSC0030535
ttgttttatgtt

SEQ ID NO: 321865 - DNA, 12 bp, Artificial Sequence
  Oligonucleotide primer for the detection of SNP TSC0030535
tcgttttatgtt

SEQ ID NO: 321866 - DNA, 12 bp, Artificial Sequence
  Oligonucleotide primer for the detection of SNP TSC0030537
ataacacaattc

SEQ ID NO: 321867 - DNA, 12 bp, Artificial Sequence
  Oligonucleotide primer for the detection of SNP TSC0030537
gtaacacaattc

SEQ ID NO: 321868 - DNA, 12 bp, Artificial Sequence
  Oligonucleotide primer for the detection of SNP TSC0030537
tagttgttgatt

SEQ ID NO: 321869 - DNA, 12 bp, Artificial Sequence
  Oligonucleotide primer for the detection of SNP TSC0030537
tagttgttgatc

SEQ ID NO: 321870 - DNA, 12 bp, Artificial Sequence
  Oligonucleotide primer for the detection of SNP TSC0030537
atcaattattaa

SEQ ID NO: 321871 - DNA, 12 bp, Artificial Sequence
  Oligonucleotide primer for the detection of SNP TSC0030537
gtggtataattt

SEQ ID NO: 321872 - DNA, 12 bp, Artificial Sequence
  Oligonucleotide primer for the detection of SNP TSC0030538
aaattttaccaa

SEQ ID NO: 321873 - DNA, 12 bp, Artificial Sequence
  Oligonucleotide primer for the detection of SNP TSC0030538
tggaattgtgtt

SEQ ID NO: 321874 - DNA, 12 bp, Artificial Sequence
  Oligonucleotide primer for the detection of SNP TSC0030538
cggaattgtgtt

SEQ ID NO: 321875 - DNA, 12 bp, Artificial Sequence
  Oligonucleotide primer for the detection of SNP TSC0030538
cgaaattatacc

SEQ ID NO: 321876 - DNA, 12 bp, Artificial Sequence
  Oligonucleotide primer for the detection of SNP TSC0030538
gaattttattag

SEQ ID NO: 321877 - DNA, 12 bp, Artificial Sequence
  Oligonucleotide primer for the detection of SNP TSC0030539
aaataaactaaa

SEQ ID NO: 321878 - DNA, 12 bp, Artificial Sequence
  Oligonucleotide primer for the detection of SNP TSC0030539
ttttttctatat

SEQ ID NO: 321879 - DNA, 12 bp, Artificial Sequence
  Oligonucleotide primer for the detection of SNP TSC0030539
aaataaattaaa

SEQ ID NO: 321880 - DNA, 12 bp, Artificial Sequence
  Oligonucleotide primer for the detection of SNP TSC0030540
aaactccacctc

SEQ ID NO: 321881 - DNA, 12 bp, Artificial Sequence
  Oligonucleotide primer for the detection of SNP TSC0030540
aaactccgcctc

SEQ ID NO: 321882 - DNA, 12 bp, Artificial Sequence
  Oligonukleotid-Primer
ggtgtggatttg

SEQ ID NO: 321883 - DNA, 12 bp, Artificial Sequence
  Oligonucleotide primer for the detection of SNP TSC0030540
ggcgtggatttg

SEQ ID NO: 321884 - DNA, 12 bp, Artificial Sequence
  Oligonucleotide primer for the detection of SNP TSC0030543
ttctctcctaac

SEQ ID NO: 321885 - DNA, 12 bp, Artificial Sequence
  Oligonucleotide primer for the detection of SNP TSC0030543
aagaaataagaa

SEQ ID NO: 321886 - DNA, 12 bp, Artificial Sequence
  Oligonukleotid-Primer
ctctactcaaaa

SEQ ID NO: 321887 - DNA, 12 bp, Artificial Sequence
  Oligonucleotide primer for the detection of SNP TSC0030548
ctctactcgaaa

SEQ ID NO: 321888 - DNA, 12 bp, Artificial Sequence
  Oligonucleotide primer for the detection of SNP TSC0030548
ttgtatttttat

SEQ ID NO: 321889 - DNA, 12 bp, Artificial Sequence
  Oligonucleotide primer for the detection of SNP TSC0030548
ttgtatttttac

SEQ ID NO: 321890 - DNA, 12 bp, Artificial Sequence
  Oligonucleotide primer for the detection of SNP TSC0030548
ttacatttttac

SEQ ID NO: 321891 - DNA, 12 bp, Artificial Sequence
  Oligonucleotide primer for the detection of SNP TSC0030548
tttgtttggggt

SEQ ID NO: 321892 - DNA, 12 bp, Artificial Sequence
  Oligonucleotide primer for the detection of SNP TSC0030548
tttgttcggggt

SEQ ID NO: 321893 - DNA, 12 bp, Artificial Sequence
  Oligonucleotide primer for the detection of SNP TSC0030549
tatcctaaatca

SEQ ID NO: 321894 - DNA, 12 bp, Artificial Sequence
  Oligonucleotide primer for the detection of SNP TSC0030549
gggatttagtat

SEQ ID NO: 321895 - DNA, 12 bp, Artificial Sequence
  Oligonucleotide primer for the detection of SNP TSC0030549
aaatttaacata

SEQ ID NO: 321896 - DNA, 12 bp, Artificial Sequence
  Oligonucleotide primer for the detection of SNP TSC0030550
ttactttttctt

SEQ ID NO: 321897 - DNA, 12 bp, Artificial Sequence
  Oligonucleotide primer for the detection of SNP TSC0030550
agtagatgagaa

SEQ ID NO: 321898 - DNA, 12 bp, Artificial Sequence
  Oligonucleotide primer for the detection of SNP TSC0030551
tagaaataatgt

SEQ ID NO: 321899 - DNA, 12 bp, Artificial Sequence
  Oligonucleotide primer for the detection of SNP TSC0030551
aaaaataataca

SEQ ID NO: 321900 - DNA, 12 bp, Artificial Sequence
  Oligonucleotide primer for the detection of SNP TSC0030551
tttttttgaaat

SEQ ID NO: 321901 - DNA, 12 bp, Artificial Sequence
  Oligonucleotide primer for the detection of SNP TSC0030552
aaccccaatttt

SEQ ID NO: 321902 - DNA, 12 bp, Artificial Sequence
  Oligonucleotide primer for the detection of SNP TSC0030552
ggtaagggttta

SEQ ID NO: 321903 - DNA, 12 bp, Artificial Sequence
  Oligonucleotide primer for the detection of SNP TSC0030553
tacaaaaacccc

SEQ ID NO: 321904 - DNA, 12 bp, Artificial Sequence
  Oligonucleotide primer for the detection of SNP TSC0030553
gggatatttttg

SEQ ID NO: 321905 - DNA, 12 bp, Artificial Sequence
  Oligonucleotide primer for the detection of SNP TSC0030553
aaaacactccta

SEQ ID NO: 321906 - DNA, 12 bp, Artificial Sequence
  Oligonucleotide primer for the detection of SNP TSC0030553
tgtaaaggtttt

SEQ ID NO: 321907 - DNA, 12 bp, Artificial Sequence
  Oligonucleotide primer for the detection of SNP TSC0030557
cataaaaactac

SEQ ID NO: 321908 - DNA, 12 bp, Artificial Sequence
  Oligonucleotide primer for the detection of SNP TSC0030557
cgtaaaaactac

SEQ ID NO: 321909 - DNA, 12 bp, Artificial Sequence
  Oligonucleotide primer for the detection of SNP TSC0030557
tttattttgttg

SEQ ID NO: 321910 - DNA, 12 bp, Artificial Sequence
  Oligonucleotide primer for the detection of SNP TSC0030557
tttattttgtcg

SEQ ID NO: 321911 - DNA, 12 bp, Artificial Sequence
  Oligonucleotide primer for the detection of SNP TSC0030559
accataaaccat

SEQ ID NO: 321912 - DNA, 12 bp, Artificial Sequence
  Oligonucleotide primer for the detection of SNP TSC0030559
atagaaagtatt

SEQ ID NO: 321913 - DNA, 12 bp, Artificial Sequence
  Oligonucleotide primer for the detection of SNP TSC0030563
aaccactatcat

SEQ ID NO: 321914 - DNA, 12 bp, Artificial Sequence
  Oligonucleotide primer for the detection of SNP TSC0030563
agaaaggttgta

SEQ ID NO: 321915 - DNA, 12 bp, Artificial Sequence
  Oligonucleotide primer for the detection of SNP TSC0030564
aaataaatttac

SEQ ID NO: 321916 - DNA, 12 bp, Artificial Sequence
  Oligonucleotide primer for the detection of SNP TSC0030564
tgtatttaagta

SEQ ID NO: 321917 - DNA, 12 bp, Artificial Sequence
  Oligonucleotide primer for the detection of SNP TSC0030566
tctttatccttc

SEQ ID NO: 321918 - DNA, 12 bp, Artificial Sequence
  Oligonucleotide primer for the detection of SNP TSC0030566
ttatgagaggag

SEQ ID NO: 321919 - DNA, 12 bp, Artificial Sequence
  Oligonucleotide primer for the detection of SNP TSC0030566
ttacgagaggag

SEQ ID NO: 321920 - DNA, 12 bp, Artificial Sequence
  Oligonucleotide primer for the detection of SNP TSC0030568
acttctaaaatt

SEQ ID NO: 321921 - DNA, 12 bp, Artificial Sequence
  Oligonucleotide primer for the detection of SNP TSC0030568
aggtttagtggg

SEQ ID NO: 321922 - DNA, 12 bp, Artificial Sequence
  Oligonucleotide primer for the detection of SNP TSC0030569
ataaaactcaat

SEQ ID NO: 321923 - DNA, 12 bp, Artificial Sequence
  Oligonucleotide primer for the detection of SNP TSC0030569
ttttggagttta

SEQ ID NO: 321924 - DNA, 12 bp, Artificial Sequence
  Oligonucleotide primer for the detection of SNP TSC0030570
agatggttatat

SEQ ID NO: 321925 - DNA, 12 bp, Artificial Sequence
  Oligonucleotide primer for the detection of SNP TSC0030570
aaataatcacat

SEQ ID NO: 321926 - DNA, 12 bp, Artificial Sequence
  Oligonucleotide primer for the detection of SNP TSC0030570
atttgttaaaaa

SEQ ID NO: 321927 - DNA, 12 bp, Artificial Sequence
  Oligonucleotide primer for the detection of SNP TSC0030571
cattcaatcttt

SEQ ID NO: 321928 - DNA, 12 bp, Artificial Sequence
  Oligonucleotide primer for the detection of SNP TSC0030571
aattgaggttta

SEQ ID NO: 321929 - DNA, 12 bp, Artificial Sequence
  Oligonucleotide primer for the detection of SNP TSC0030571
aactaaaattca

SEQ ID NO: 321930 - DNA, 12 bp, Artificial Sequence
  Oligonucleotide primer for the detection of SNP TSC0030572
aattaccaaatt

SEQ ID NO: 321931 - DNA, 12 bp, Artificial Sequence
  Oligonucleotide primer for the detection of SNP TSC0030572
gtatagtgttgg

SEQ ID NO: 321932 - DNA, 12 bp, Artificial Sequence
  Oligonucleotide primer for the detection of SNP TSC0030573
ccccccacaaat

SEQ ID NO: 321933 - DNA, 12 bp, Artificial Sequence
  Oligonucleotide primer for the detection of SNP TSC0030573
ccccccgcaaat

SEQ ID NO: 321934 - DNA, 12 bp, Artificial Sequence
  Oligonucleotide primer for the detection of SNP TSC0030573
tttttcgtagat

SEQ ID NO: 321935 - DNA, 12 bp, Artificial Sequence
  Oligonucleotide primer for the detection of SNP TSC0030575
aatactatatat

SEQ ID NO: 321936 - DNA, 12 bp, Artificial Sequence
  Oligonucleotide primer for the detection of SNP TSC0030575
tattagtgttta

SEQ ID NO: 321937 - DNA, 12 bp, Artificial Sequence
  Oligonucleotide primer for the detection of SNP TSC0030575
tattagcgttta

SEQ ID NO: 321938 - DNA, 12 bp, Artificial Sequence
  Oligonucleotide primer for the detection of SNP TSC0030576
ctataacattct

SEQ ID NO: 321939 - DNA, 12 bp, Artificial Sequence
  Oligonucleotide primer for the detection of SNP TSC0030576
tttttagagata

SEQ ID NO: 321940 - DNA, 12 bp, Artificial Sequence
  Oligonucleotide primer for the detection of SNP TSC0030576
tccttaaaaata

SEQ ID NO: 321941 - DNA, 12 bp, Artificial Sequence
  Oligonucleotide primer for the detection of SNP TSC0030576
ttgtaatatttt

SEQ ID NO: 321942 - DNA, 12 bp, Artificial Sequence
  Oligonucleotide primer for the detection of SNP TSC0030577
cctactctacct

SEQ ID NO: 321943 - DNA, 12 bp, Artificial Sequence
  Oligonucleotide primer for the detection of SNP TSC0030577
aaagaaggggtg

SEQ ID NO: 321944 - DNA, 12 bp, Artificial Sequence
  Oligonucleotide primer for the detection of SNP TSC0030578
aaccctaaaata

SEQ ID NO: 321945 - DNA, 12 bp, Artificial Sequence
  Oligonucleotide primer for the detection of SNP TSC0030578
gatatatttatt

SEQ ID NO: 321946 - DNA, 12 bp, Artificial Sequence
  Oligonucleotide primer for the detection of SNP TSC0030578
atatacccacta

SEQ ID NO: 321947 - DNA, 12 bp, Artificial Sequence
  Oligonucleotide primer for the detection of SNP TSC0030579
ctctaaaacact

SEQ ID NO: 321948 - DNA, 12 bp, Artificial Sequence
  Oligonucleotide primer for the detection of SNP TSC0030579
aatgggaaaaga

SEQ ID NO: 321949 - DNA, 12 bp, Artificial Sequence
  Oligonucleotide primer for the detection of SNP TSC0030579
aacgggaaaaga

SEQ ID NO: 321950 - DNA, 12 bp, Artificial Sequence
  Oligonucleotide primer for the detection of SNP TSC0030579
ttttggggtatt

SEQ ID NO: 321951 - DNA, 12 bp, Artificial Sequence
  Oligonucleotide primer for the detection of SNP TSC0030583
ccaccacaacta

SEQ ID NO: 321952 - DNA, 12 bp, Artificial Sequence
  Oligonucleotide primer for the detection of SNP TSC0030583
ccaccacgacta

SEQ ID NO: 321953 - DNA, 12 bp, Artificial Sequence
  Oligonucleotide primer for the detection of SNP TSC0030583
ccaccgcaacta

SEQ ID NO: 321954 - DNA, 12 bp, Artificial Sequence
  Oligonucleotide primer for the detection of SNP TSC0030583
ccgccacaacta

SEQ ID NO: 321955 - DNA, 12 bp, Artificial Sequence
  Oligonucleotide primer for the detection of SNP TSC0030583
ccaccgcgacta

SEQ ID NO: 321956 - DNA, 12 bp, Artificial Sequence
  Oligonucleotide primer for the detection of SNP TSC0030583
ccgccacgacta

SEQ ID NO: 321957 - DNA, 12 bp, Artificial Sequence
  Oligonucleotide primer for the detection of SNP TSC0030583
ccgccgcaacta

SEQ ID NO: 321958 - DNA, 12 bp, Artificial Sequence
  Oligonucleotide primer for the detection of SNP TSC0030583
ccgccgcgacta

SEQ ID NO: 321959 - DNA, 12 bp, Artificial Sequence
  Oligonucleotide primer for the detection of SNP TSC0030583
taatgttgtttt

SEQ ID NO: 321960 - DNA, 12 bp, Artificial Sequence
  Oligonucleotide primer for the detection of SNP TSC0030583
taatgtcgtttt

SEQ ID NO: 321961 - DNA, 12 bp, Artificial Sequence
  Oligonucleotide primer for the detection of SNP TSC0030583
taatgttgtttc

SEQ ID NO: 321962 - DNA, 12 bp, Artificial Sequence
  Oligonucleotide primer for the detection of SNP TSC0030583
taatgtcgtttc

SEQ ID NO: 321963 - DNA, 12 bp, Artificial Sequence
  Oligonucleotide primer for the detection of SNP TSC0030583
aataccactcca

SEQ ID NO: 321964 - DNA, 12 bp, Artificial Sequence
  Oligonucleotide primer for the detection of SNP TSC0030583
aataccactccg

SEQ ID NO: 321965 - DNA, 12 bp, Artificial Sequence
  Oligonucleotide primer for the detection of SNP TSC0030583
aataccgctcca

SEQ ID NO: 321966 - DNA, 12 bp, Artificial Sequence
  Oligonucleotide primer for the detection of SNP TSC0030583
aataccgctccg

SEQ ID NO: 321967 - DNA, 12 bp, Artificial Sequence
  Oligonucleotide primer for the detection of SNP TSC0030583
ttgttgtggttg

SEQ ID NO: 321968 - DNA, 12 bp, Artificial Sequence
  Oligonucleotide primer for the detection of SNP TSC0030583
tcgttgtggttg

SEQ ID NO: 321969 - DNA, 12 bp, Artificial Sequence
  Oligonucleotide primer for the detection of SNP TSC0030583
ttgtcgtggttg

SEQ ID NO: 321970 - DNA, 12 bp, Artificial Sequence
  Oligonucleotide primer for the detection of SNP TSC0030583
ttgttgcggttg

SEQ ID NO: 321971 - DNA, 12 bp, Artificial Sequence
  Oligonucleotide primer for the detection of SNP TSC0030583
tcgtcgtggttg

SEQ ID NO: 321972 - DNA, 12 bp, Artificial Sequence
  Oligonucleotide primer for the detection of SNP TSC0030583
tcgttgcggttg

SEQ ID NO: 321973 - DNA, 12 bp, Artificial Sequence
  Oligonucleotide primer for the detection of SNP TSC0030583
ttgtcgcggttg

SEQ ID NO: 321974 - DNA, 12 bp, Artificial Sequence
  Oligonucleotide primer for the detection of SNP TSC0030583
tcgtcgcggttg

SEQ ID NO: 321975 - DNA, 12 bp, Artificial Sequence
  Oligonucleotide primer for the detection of SNP TSC0030584
aaaactcaatca

SEQ ID NO: 321976 - DNA, 12 bp, Artificial Sequence
  Oligonucleotide primer for the detection of SNP TSC0030584
gggtaagttatt

SEQ ID NO: 321977 - DNA, 12 bp, Artificial Sequence
  Oligonucleotide primer for the detection of SNP TSC0030584
aaacaaattacc

SEQ ID NO: 321978 - DNA, 12 bp, Artificial Sequence
  Oligonucleotide primer for the detection of SNP TSC0030584
gaacaaattacc

SEQ ID NO: 321979 - DNA, 12 bp, Artificial Sequence
  Oligonucleotide primer for the detection of SNP TSC0030584
agaagtttagtt

SEQ ID NO: 321980 - DNA, 12 bp, Artificial Sequence
  Oligonucleotide primer for the detection of SNP TSC0030585
aactttacatat

SEQ ID NO: 321981 - DNA, 12 bp, Artificial Sequence
  Oligonucleotide primer for the detection of SNP TSC0030585
agttatatgtga

SEQ ID NO: 321982 - DNA, 12 bp, Artificial Sequence
  Oligonucleotide primer for the detection of SNP TSC0030585
aattacatataa

SEQ ID NO: 321983 - DNA, 12 bp, Artificial Sequence
  Oligonucleotide primer for the detection of SNP TSC0030585
agttttatatat

SEQ ID NO: 321984 - DNA, 12 bp, Artificial Sequence
  Oligonucleotide primer for the detection of SNP TSC0030586
ttaaaataaatt

SEQ ID NO: 321985 - DNA, 12 bp, Artificial Sequence
  Oligonucleotide primer for the detection of SNP TSC0030586
tagtatttagta

SEQ ID NO: 321986 - DNA, 12 bp, Artificial Sequence
  Oligonucleotide primer for the detection of SNP TSC0030587
taagttagttgg

SEQ ID NO: 321987 - DNA, 12 bp, Artificial Sequence
  Oligonucleotide primer for the detection of SNP TSC0030587
caaactaattaa

SEQ ID NO: 321988 - DNA, 12 bp, Artificial Sequence
  Oligonucleotide primer for the detection of SNP TSC0030589
aacacaatttaa

SEQ ID NO: 321989 - DNA, 12 bp, Artificial Sequence
  Oligonucleotide primer for the detection of SNP TSC0030589
taattaaggtgt

SEQ ID NO: 321990 - DNA, 12 bp, Artificial Sequence
  Oligonucleotide primer for the detection of SNP TSC0030589
caatcaaaatac

SEQ ID NO: 321991 - DNA, 12 bp, Artificial Sequence
  Oligonucleotide primer for the detection of SNP TSC0030589
aatatagtttaa

SEQ ID NO: 321992 - DNA, 12 bp, Artificial Sequence
  Oligonucleotide primer for the detection of SNP TSC0030592
atatatcccaaa

SEQ ID NO: 321993 - DNA, 12 bp, Artificial Sequence
  Oligonucleotide primer for the detection of SNP TSC0030592
ttgaaattagtt

SEQ ID NO: 321994 - DNA, 12 bp, Artificial Sequence
  Oligonucleotide primer for the detection of SNP TSC0030592
cctaaaatcaac

SEQ ID NO: 321995 - DNA, 12 bp, Artificial Sequence
  Oligonucleotide primer for the detection of SNP TSC0030592
tgtgtattttag

SEQ ID NO: 321996 - DNA, 12 bp, Artificial Sequence
  Oligonucleotide primer for the detection of SNP TSC0030593
ctctcattcata

SEQ ID NO: 321997 - DNA, 12 bp, Artificial Sequence
  Oligonucleotide primer for the detection of SNP TSC0030593
atgagtgtgttt

SEQ ID NO: 321998 - DNA, 12 bp, Artificial Sequence
  Oligonucleotide primer for the detection of SNP TSC0030594
caaacacttaaa

SEQ ID NO: 321999 - DNA, 12 bp, Artificial Sequence
  Oligonucleotide primer for the detection of SNP TSC0030594
aaaacttactca

SEQ ID NO: 322000 - DNA, 12 bp, Artificial Sequence
  Oligonucleotide primer for the detection of SNP TSC0030594
taggtatttgag

SEQ ID NO: 322001 - DNA, 12 bp, Artificial Sequence
  Oligonucleotide primer for the detection of SNP TSC0030597
ctacaatcttaa

SEQ ID NO: 322002 - DNA, 12 bp, Artificial Sequence
  Oligonucleotide primer for the detection of SNP TSC0030597
tagtatattaat

SEQ ID NO: 322003 - DNA, 12 bp, Artificial Sequence
  Oligonucleotide primer for the detection of SNP TSC0030597
ataacacatcaa

SEQ ID NO: 322004 - DNA, 12 bp, Artificial Sequence
  Oligonucleotide primer for the detection of SNP TSC0030597
gtttatagtttt

SEQ ID NO: 322005 - DNA, 12 bp, Artificial Sequence
  Oligonucleotide primer for the detection of SNP TSC0030598
aaaacaacctcc

SEQ ID NO: 322006 - DNA, 12 bp, Artificial Sequence
  Oligonucleotide primer for the detection of SNP TSC0030598
ctccaaccctaa

SEQ ID NO: 322007 - DNA, 12 bp, Artificial Sequence
  Oligonucleotide primer for the detection of SNP TSC0030598
ggagtagttttt

SEQ ID NO: 322008 - DNA, 12 bp, Artificial Sequence
  Oligonucleotide primer for the detection of SNP TSC0030599
cttcatacaacc

SEQ ID NO: 322009 - DNA, 12 bp, Artificial Sequence
  Oligonucleotide primer for the detection of SNP TSC0030599
tttttggggtta

SEQ ID NO: 322010 - DNA, 12 bp, Artificial Sequence
  Oligonucleotide primer for the detection of SNP TSC0030599
tttctaaaacca

SEQ ID NO: 322011 - DNA, 12 bp, Artificial Sequence
  Oligonucleotide primer for the detection of SNP TSC0030600
acaacacatttt

SEQ ID NO: 322012 - DNA, 12 bp, Artificial Sequence
  Oligonucleotide primer for the detection of SNP TSC0030600
atgattttttgt

SEQ ID NO: 322013 - DNA, 12 bp, Artificial Sequence
  Oligonucleotide primer for the detection of SNP TSC0030600
acgattttttgt

SEQ ID NO: 322014 - DNA, 12 bp, Artificial Sequence
  Oligonucleotide primer for the detection of SNP TSC0030601
caacaatactat

SEQ ID NO: 322015 - DNA, 12 bp, Artificial Sequence
  Oligonucleotide primer for the detection of SNP TSC0030601
taataatattgt

SEQ ID NO: 322016 - DNA, 12 bp, Artificial Sequence
  Oligonucleotide primer for the detection of SNP TSC0030602
atttctattact

SEQ ID NO: 322017 - DNA, 12 bp, Artificial Sequence
  Oligonucleotide primer for the detection of SNP TSC0030603
ctcaaccacaaa

SEQ ID NO: 322018 - DNA, 12 bp, Artificial Sequence
  Oligonucleotide primer for the detection of SNP TSC0030603
ctcaaccgcaaa

SEQ ID NO: 322019 - DNA, 12 bp, Artificial Sequence
  Oligonucleotide primer for the detection of SNP TSC0030603
tttggtggagtt

SEQ ID NO: 322020 - DNA, 12 bp, Artificial Sequence
  Oligonucleotide primer for the detection of SNP TSC0030603
ttcggtggagtt

SEQ ID NO: 322021 - DNA, 12 bp, Artificial Sequence
  Oligonucleotide primer for the detection of SNP TSC0030603
acccaataaaac

SEQ ID NO: 322022 - DNA, 12 bp, Artificial Sequence
  Oligonucleotide primer for the detection of SNP TSC0030603
acccgataaaac

SEQ ID NO: 322023 - DNA, 12 bp, Artificial Sequence
  Oligonucleotide primer for the detection of SNP TSC0030603
tttagtcgtagg

SEQ ID NO: 322024 - DNA, 12 bp, Artificial Sequence
  Oligonucleotide primer for the detection of SNP TSC0030605
tacccaatccta

SEQ ID NO: 322025 - DNA, 12 bp, Artificial Sequence
  Oligonucleotide primer for the detection of SNP TSC0030605
ggtgttttgaat

SEQ ID NO: 322026 - DNA, 12 bp, Artificial Sequence
  Oligonucleotide primer for the detection of SNP TSC0030605
ggtgtttcgaat

SEQ ID NO: 322027 - DNA, 12 bp, Artificial Sequence
  Oligonucleotide primer for the detection of SNP TSC0030605
aataccccaaac

SEQ ID NO: 322028 - DNA, 12 bp, Artificial Sequence
  Oligonucleotide primer for the detection of SNP TSC0030605
aataccccgaac

SEQ ID NO: 322029 - DNA, 12 bp, Artificial Sequence
  Oligonucleotide primer for the detection of SNP TSC0030605
gataccccaaac

SEQ ID NO: 322030 - DNA, 12 bp, Artificial Sequence
  Oligonucleotide primer for the detection of SNP TSC0030605
gataccccgaac

SEQ ID NO: 322031 - DNA, 12 bp, Artificial Sequence
  Oligonucleotide primer for the detection of SNP TSC0030606
ccttaaaataac

SEQ ID NO: 322032 - DNA, 12 bp, Artificial Sequence
  Oligonukleotid-Primer
ttaggaagagaa

SEQ ID NO: 322033 - DNA, 12 bp, Artificial Sequence
  Oligonucleotide primer for the detection of SNP TSC0030609
tcaaatacaaaa

SEQ ID NO: 322034 - DNA, 12 bp, Artificial Sequence
  Oligonucleotide primer for the detection of SNP TSC0030609
tcaaatacgaaa

SEQ ID NO: 322035 - DNA, 12 bp, Artificial Sequence
  Oligonucleotide primer for the detection of SNP TSC0030609
tcgaatacaaaa

SEQ ID NO: 322036 - DNA, 12 bp, Artificial Sequence
  Oligonucleotide primer for the detection of SNP TSC0030609
tcgaatacgaaa

SEQ ID NO: 322037 - DNA, 12 bp, Artificial Sequence
  Oligonucleotide primer for the detection of SNP TSC0030609
gagttttttttc

SEQ ID NO: 322038 - DNA, 12 bp, Artificial Sequence
  Oligonucleotide primer for the detection of SNP TSC0030609
cttcttccaaaa

SEQ ID NO: 322039 - DNA, 12 bp, Artificial Sequence
  Oligonucleotide primer for the detection of SNP TSC0030609
cttcttccgaaa

SEQ ID NO: 322040 - DNA, 12 bp, Artificial Sequence
  Oligonucleotide primer for the detection of SNP TSC0030609
ttggatgtgaag

SEQ ID NO: 322041 - DNA, 12 bp, Artificial Sequence
  Oligonucleotide primer for the detection of SNP TSC0030609
tcggatgtgaag

SEQ ID NO: 322042 - DNA, 12 bp, Artificial Sequence
  Oligonucleotide primer for the detection of SNP TSC0030609
ttggatgcgaag

SEQ ID NO: 322043 - DNA, 12 bp, Artificial Sequence
  Oligonucleotide primer for the detection of SNP TSC0030609
tcggatgcgaag

SEQ ID NO: 322044 - DNA, 12 bp, Artificial Sequence
  Oligonucleotide primer for the detection of SNP TSC0030611
aaacatatcctt

SEQ ID NO: 322045 - DNA, 12 bp, Artificial Sequence
  Oligonucleotide primer for the detection of SNP TSC0030611
tgtgagaaatta

SEQ ID NO: 322046 - DNA, 12 bp, Artificial Sequence
  Oligonucleotide primer for the detection of SNP TSC0030616
acacacaccacc

SEQ ID NO: 322047 - DNA, 12 bp, Artificial Sequence
  Oligonucleotide primer for the detection of SNP TSC0030616
acacacaccgcc

SEQ ID NO: 322048 - DNA, 12 bp, Artificial Sequence
  Oligonucleotide primer for the detection of SNP TSC0030616
tatatgtataaa

SEQ ID NO: 322049 - DNA, 12 bp, Artificial Sequence
  Oligonucleotide primer for the detection of SNP TSC0030622
accaccacccca

SEQ ID NO: 322050 - DNA, 12 bp, Artificial Sequence
  Oligonucleotide primer for the detection of SNP TSC0030622
tttatatgggat

SEQ ID NO: 322051 - DNA, 12 bp, Artificial Sequence
  Oligonucleotide primer for the detection of SNP TSC0030622
tttatatgggac

SEQ ID NO: 322052 - DNA, 12 bp, Artificial Sequence
  Oligonucleotide primer for the detection of SNP TSC0030622
cctacataaaac

SEQ ID NO: 322053 - DNA, 12 bp, Artificial Sequence
  Oligonucleotide primer for the detection of SNP TSC0030622
tgttattatttt

SEQ ID NO: 322054 - DNA, 12 bp, Artificial Sequence
  Oligonucleotide primer for the detection of SNP TSC0030625
ctcttaaacata

SEQ ID NO: 322055 - DNA, 12 bp, Artificial Sequence
  Oligonucleotide primer for the detection of SNP TSC0030625
gtgttttgattt

SEQ ID NO: 322056 - DNA, 12 bp, Artificial Sequence
  Oligonucleotide primer for the detection of SNP TSC0030625
gcgttttgattt

SEQ ID NO: 322057 - DNA, 12 bp, Artificial Sequence
  Oligonucleotide primer for the detection of SNP TSC0030625
ttttaactcaaa

SEQ ID NO: 322058 - DNA, 12 bp, Artificial Sequence
  Oligonucleotide primer for the detection of SNP TSC0030625
ttttaaatatgt

SEQ ID NO: 322059 - DNA, 12 bp, Artificial Sequence
  Oligonucleotide primer for the detection of SNP TSC0030626
ccaatcctttac

SEQ ID NO: 322060 - DNA, 12 bp, Artificial Sequence
  Oligonucleotide primer for the detection of SNP TSC0030626
attatagttgtg

SEQ ID NO: 322061 - DNA, 12 bp, Artificial Sequence
  Oligonucleotide primer for the detection of SNP TSC0030626
attatagtcgtg

SEQ ID NO: 322062 - DNA, 12 bp, Artificial Sequence
  Oligonucleotide primer for the detection of SNP TSC0030632
actcaaaatcct

SEQ ID NO: 322063 - DNA, 12 bp, Artificial Sequence
  Oligonucleotide primer for the detection of SNP TSC0030632
ggttaaggtttt

SEQ ID NO: 322064 - DNA, 12 bp, Artificial Sequence
  Oligonucleotide primer for the detection of SNP TSC0030632
atcaaaacttta

SEQ ID NO: 322065 - DNA, 12 bp, Artificial Sequence
  Oligonucleotide primer for the detection of SNP TSC0030632
tttagggttttt

SEQ ID NO: 322066 - DNA, 12 bp, Artificial Sequence
  Oligonucleotide primer for the detection of SNP TSC0030632
tttagggttttc

SEQ ID NO: 322067 - DNA, 12 bp, Artificial Sequence
  Oligonucleotide primer for the detection of SNP TSC0030639
tttaaaaacaaa

SEQ ID NO: 322068 - DNA, 12 bp, Artificial Sequence
  Oligonucleotide primer for the detection of SNP TSC0030639
tgatagtgtatt

SEQ ID NO: 322069 - DNA, 12 bp, Artificial Sequence
  Oligonucleotide primer for the detection of SNP TSC0030639
ttaacaatacat

SEQ ID NO: 322070 - DNA, 12 bp, Artificial Sequence
  Oligonucleotide primer for the detection of SNP TSC0030643
ccaaacaaacaa

SEQ ID NO: 322071 - DNA, 12 bp, Artificial Sequence
  Oligonucleotide primer for the detection of SNP TSC0030643
ccaaacaaacga

SEQ ID NO: 322072 - DNA, 12 bp, Artificial Sequence
  Oligonucleotide primer for the detection of SNP TSC0030643
aaagtttatata

SEQ ID NO: 322073 - DNA, 12 bp, Artificial Sequence
  Oligonucleotide primer for the detection of SNP TSC0030643
aaaacccacaca

SEQ ID NO: 322074 - DNA, 12 bp, Artificial Sequence
  Oligonucleotide primer for the detection of SNP TSC0030643
ttaggtaggtgg

SEQ ID NO: 322075 - DNA, 12 bp, Artificial Sequence
  Oligonucleotide primer for the detection of SNP TSC0030643
ttaggtaggcgg

SEQ ID NO: 322076 - DNA, 12 bp, Artificial Sequence
  Oligonucleotide primer for the detection of SNP TSC0030644
ctacaccctccc

SEQ ID NO: 322077 - DNA, 12 bp, Artificial Sequence
  Oligonucleotide primer for the detection of SNP TSC0030644
gggaggggggag

SEQ ID NO: 322078 - DNA, 12 bp, Artificial Sequence
  Oligonucleotide primer for the detection of SNP TSC0030647
aacctcaactca

SEQ ID NO: 322079 - DNA, 12 bp, Artificial Sequence
  Oligonucleotide primer for the detection of SNP TSC0030647
gacctcaactca

SEQ ID NO: 322080 - DNA, 12 bp, Artificial Sequence
  Oligonucleotide primer for the detection of SNP TSC0030647
ggtgaaggttgt

SEQ ID NO: 322081 - DNA, 12 bp, Artificial Sequence
  Oligonucleotide primer for the detection of SNP TSC0030647
ggcgaaggttgt

SEQ ID NO: 322082 - DNA, 12 bp, Artificial Sequence
  Oligonucleotide primer for the detection of SNP TSC0030647
acaaaaattaca

SEQ ID NO: 322083 - DNA, 12 bp, Artificial Sequence
  Oligonucleotide primer for the detection of SNP TSC0030647
acgaaaattaca

SEQ ID NO: 322084 - DNA, 12 bp, Artificial Sequence
  Oligonucleotide primer for the detection of SNP TSC0030649
acctctaaaaac

SEQ ID NO: 322085 - DNA, 12 bp, Artificial Sequence
  Oligonucleotide primer for the detection of SNP TSC0030649
agtggaaaggga

SEQ ID NO: 322086 - DNA, 12 bp, Artificial Sequence
  Oligonucleotide primer for the detection of SNP TSC0030653
aaccccacattt

SEQ ID NO: 322087 - DNA, 12 bp, Artificial Sequence
  Oligonucleotide primer for the detection of SNP TSC0030653
gaggaaagttta

SEQ ID NO: 322088 - DNA, 12 bp, Artificial Sequence
  Oligonucleotide primer for the detection of SNP TSC0030654
aatcaaacatta

SEQ ID NO: 322089 - DNA, 12 bp, Artificial Sequence
  Oligonucleotide primer for the detection of SNP TSC0030654
tgtgaatttatt

SEQ ID NO: 322090 - DNA, 12 bp, Artificial Sequence
  Oligonucleotide primer for the detection of SNP TSC0030654
tataaattcatt

SEQ ID NO: 322091 - DNA, 12 bp, Artificial Sequence
  Oligonucleotide primer for the detection of SNP TSC0030654
aattagatatta

SEQ ID NO: 322092 - DNA, 12 bp, Artificial Sequence
  Oligonucleotide primer for the detection of SNP TSC0030655
aaaaacctccac

SEQ ID NO: 322093 - DNA, 12 bp, Artificial Sequence
  Oligonucleotide primer for the detection of SNP TSC0030660
aaaatttaaaac

SEQ ID NO: 322094 - DNA, 12 bp, Artificial Sequence
  Oligonucleotide primer for the detection of SNP TSC0030660
gaaatttaaaac

SEQ ID NO: 322095 - DNA, 12 bp, Artificial Sequence
  Oligonucleotide primer for the detection of SNP TSC0030660
gttgattaagtt

SEQ ID NO: 322096 - DNA, 12 bp, Artificial Sequence
  Oligonucleotide primer for the detection of SNP TSC0030660
tattaatcaaac

SEQ ID NO: 322097 - DNA, 12 bp, Artificial Sequence
  Oligonukleotid-Primer
ggagtttgagat

SEQ ID NO: 322098 - DNA, 12 bp, Artificial Sequence
  Oligonucleotide primer for the detection of SNP TSC0030660
ggagtttgagac

SEQ ID NO: 322099 - DNA, 12 bp, Artificial Sequence
  Oligonucleotide primer for the detection of SNP TSC0030665
taaattaaaatt

SEQ ID NO: 322100 - DNA, 12 bp, Artificial Sequence
  Oligonucleotide primer for the detection of SNP TSC0030665
tatgagtgatag

SEQ ID NO: 322101 - DNA, 12 bp, Artificial Sequence
  Oligonucleotide primer for the detection of SNP TSC0030665
tacgagtgatag

SEQ ID NO: 322102 - DNA, 12 bp, Artificial Sequence
  Oligonucleotide primer for the detection of SNP TSC0030666
caccaaataaat

SEQ ID NO: 322103 - DNA, 12 bp, Artificial Sequence
  Oligonucleotide primer for the detection of SNP TSC0030666
ttaaatggattg

SEQ ID NO: 322104 - DNA, 12 bp, Artificial Sequence
  Oligonucleotide primer for the detection of SNP TSC0030666
ttaaataaacta

SEQ ID NO: 322105 - DNA, 12 bp, Artificial Sequence
  Oligonucleotide primer for the detection of SNP TSC0030666
tattaaatagat

SEQ ID NO: 322106 - DNA, 12 bp, Artificial Sequence
  Oligonucleotide primer for the detection of SNP TSC0030667
tgtatgatttat

SEQ ID NO: 322107 - DNA, 12 bp, Artificial Sequence
  Oligonucleotide primer for the detection of SNP TSC0030667
tatataattcac

SEQ ID NO: 322108 - DNA, 12 bp, Artificial Sequence
  Oligonucleotide primer for the detection of SNP TSC0030667
ggtttttggttg

SEQ ID NO: 322109 - DNA, 12 bp, Artificial Sequence
  Oligonucleotide primer for the detection of SNP TSC0030668
ccaaataaaaaa

SEQ ID NO: 322110 - DNA, 12 bp, Artificial Sequence
  Oligonucleotide primer for the detection of SNP TSC0030668
tgtgttgttttt

SEQ ID NO: 322111 - DNA, 12 bp, Artificial Sequence
  Oligonucleotide primer for the detection of SNP TSC0030668
atatactactcc

SEQ ID NO: 322112 - DNA, 12 bp, Artificial Sequence
  Oligonucleotide primer for the detection of SNP TSC0030668
ttaggtgagagg

SEQ ID NO: 322113 - DNA, 12 bp, Artificial Sequence
  Oligonucleotide primer for the detection of SNP TSC0030669
ttctatttatta

SEQ ID NO: 322114 - DNA, 12 bp, Artificial Sequence
  Oligonucleotide primer for the detection of SNP TSC0030669
ttataaaatatt

SEQ ID NO: 322115 - DNA, 12 bp, Artificial Sequence
  Oligonucleotide primer for the detection of SNP TSC0030669
tcataaaatatt

SEQ ID NO: 322116 - DNA, 12 bp, Artificial Sequence
  Oligonucleotide primer for the detection of SNP TSC0030669
ttttgtttatta

SEQ ID NO: 322117 - DNA, 12 bp, Artificial Sequence
  Oligonucleotide primer for the detection of SNP TSC0030671
ctactttaaaac

SEQ ID NO: 322118 - DNA, 12 bp, Artificial Sequence
  Oligonucleotide primer for the detection of SNP TSC0030671
gtgagttgaaaa

SEQ ID NO: 322119 - DNA, 12 bp, Artificial Sequence
  Oligonucleotide primer for the detection of SNP TSC0030672
acatataaaaac

SEQ ID NO: 322120 - DNA, 12 bp, Artificial Sequence
  Oligonucleotide primer for the detection of SNP TSC0030672
gttttttatacg

SEQ ID NO: 322121 - DNA, 12 bp, Artificial Sequence
  Oligonucleotide primer for the detection of SNP TSC0030672
acctcctacaca

SEQ ID NO: 322122 - DNA, 12 bp, Artificial Sequence
  Oligonucleotide primer for the detection of SNP TSC0030672
acctcctacacg

SEQ ID NO: 322123 - DNA, 12 bp, Artificial Sequence
  Oligonucleotide primer for the detection of SNP TSC0030672
gtatataaaggt

SEQ ID NO: 322124 - DNA, 12 bp, Artificial Sequence
  Oligonucleotide primer for the detection of SNP TSC0030673
aattaactaatt

SEQ ID NO: 322125 - DNA, 12 bp, Artificial Sequence
  Oligonucleotide primer for the detection of SNP TSC0030673
atatgagaaatt

SEQ ID NO: 322126 - DNA, 12 bp, Artificial Sequence
  Oligonucleotide primer for the detection of SNP TSC0030673
aattaattagtt

SEQ ID NO: 322127 - DNA, 12 bp, Artificial Sequence
  Oligonucleotide primer for the detection of SNP TSC0030674
tacctcctttcc

SEQ ID NO: 322128 - DNA, 12 bp, Artificial Sequence
  Oligonucleotide primer for the detection of SNP TSC0030674
agaaagtggtag

SEQ ID NO: 322129 - DNA, 12 bp, Artificial Sequence
  Oligonucleotide primer for the detection of SNP TSC0030675
ttaaggtgataa

SEQ ID NO: 322130 - DNA, 12 bp, Artificial Sequence
  Oligonucleotide primer for the detection of SNP TSC0030675
agagggagggtt

SEQ ID NO: 322131 - DNA, 12 bp, Artificial Sequence
  Oligonucleotide primer for the detection of SNP TSC0030675
agagggagggtc

SEQ ID NO: 322132 - DNA, 12 bp, Artificial Sequence
  Oligonucleotide primer for the detection of SNP TSC0030676
agatataaaaat

SEQ ID NO: 322133 - DNA, 12 bp, Artificial Sequence
  Oligonucleotide primer for the detection of SNP TSC0030676
aaacacaaaaat

SEQ ID NO: 322134 - DNA, 12 bp, Artificial Sequence
  Oligonucleotide primer for the detection of SNP TSC0030676
aattttggtatt

SEQ ID NO: 322135 - DNA, 12 bp, Artificial Sequence
  Oligonucleotide primer for the detection of SNP TSC0030679
tttatttgggtt

SEQ ID NO: 322136 - DNA, 12 bp, Artificial Sequence
  Oligonucleotide primer for the detection of SNP TSC0030679
cctacttaaact

SEQ ID NO: 322137 - DNA, 12 bp, Artificial Sequence
  Oligonucleotide primer for the detection of SNP TSC0030679
gtgtattttata

SEQ ID NO: 322138 - DNA, 12 bp, Artificial Sequence
  Oligonucleotide primer for the detection of SNP TSC0030687
aaatccccgaac

SEQ ID NO: 322139 - DNA, 12 bp, Artificial Sequence
  Oligonucleotide primer for the detection of SNP TSC0030687
attgaggttttg

SEQ ID NO: 322140 - DNA, 12 bp, Artificial Sequence
  Oligonucleotide primer for the detection of SNP TSC0030688
aactaaacaaac

SEQ ID NO: 322141 - DNA, 12 bp, Artificial Sequence
  Oligonucleotide primer for the detection of SNP TSC0030691
aaaatataaact

SEQ ID NO: 322142 - DNA, 12 bp, Artificial Sequence
  Oligonucleotide primer for the detection of SNP TSC0030691
agatttatgtaa

SEQ ID NO: 322143 - DNA, 12 bp, Artificial Sequence
  Oligonucleotide primer for the detection of SNP TSC0030692
cataatccaaat

SEQ ID NO: 322144 - DNA, 12 bp, Artificial Sequence
  Oligonucleotide primer for the detection of SNP TSC0030692
taataggataag

SEQ ID NO: 322145 - DNA, 12 bp, Artificial Sequence
  Oligonucleotide primer for the detection of SNP TSC0030692
tatggtttaaat

SEQ ID NO: 322146 - DNA, 12 bp, Artificial Sequence
  Oligonucleotide primer for the detection of SNP TSC0030696
aaaaaatacatc

SEQ ID NO: 322147 - DNA, 12 bp, Artificial Sequence
  Oligonucleotide primer for the detection of SNP TSC0030696
ttagaggtttta

SEQ ID NO: 322148 - DNA, 12 bp, Artificial Sequence
  Oligonucleotide primer for the detection of SNP TSC0030697
gttttagatttg

SEQ ID NO: 322149 - DNA, 12 bp, Artificial Sequence
  Oligonucleotide primer for the detection of SNP TSC0030697
accccaaatcta

SEQ ID NO: 322150 - DNA, 12 bp, Artificial Sequence
  Oligonucleotide primer for the detection of SNP TSC0030697
ttggtggtttta

SEQ ID NO: 322151 - DNA, 12 bp, Artificial Sequence
  Oligonucleotide primer for the detection of SNP TSC0030698
cttcaaaactcc

SEQ ID NO: 322152 - DNA, 12 bp, Artificial Sequence
  Oligonucleotide primer for the detection of SNP TSC0030698
atgtaagttgta

SEQ ID NO: 322153 - DNA, 12 bp, Artificial Sequence
  Oligonucleotide primer for the detection of SNP TSC0030698
acgtaagttgta

SEQ ID NO: 322154 - DNA, 12 bp, Artificial Sequence
  Oligonucleotide primer for the detection of SNP TSC0030699
caaatcttccta

SEQ ID NO: 322155 - DNA, 12 bp, Artificial Sequence
  Oligonucleotide primer for the detection of SNP TSC0030699
agttttattgtt

SEQ ID NO: 322156 - DNA, 12 bp, Artificial Sequence
  Oligonucleotide primer for the detection of SNP TSC0030699
agttttattgtc

SEQ ID NO: 322157 - DNA, 12 bp, Artificial Sequence
  Oligonucleotide primer for the detection of SNP TSC0030699
aaccccactatc

SEQ ID NO: 322158 - DNA, 12 bp, Artificial Sequence
  Oligonucleotide primer for the detection of SNP TSC0030700
catttcttataa

SEQ ID NO: 322159 - DNA, 12 bp, Artificial Sequence
  Oligonucleotide primer for the detection of SNP TSC0030700
aatgattaattg

SEQ ID NO: 322160 - DNA, 12 bp, Artificial Sequence
  Oligonucleotide primer for the detection of SNP TSC0030700
aataattaatta

SEQ ID NO: 322161 - DNA, 12 bp, Artificial Sequence
  Oligonucleotide primer for the detection of SNP TSC0030700
tttttatggttt

SEQ ID NO: 322162 - DNA, 12 bp, Artificial Sequence
  Oligonucleotide primer for the detection of SNP TSC0030701
cataaatacaaa

SEQ ID NO: 322163 - DNA, 12 bp, Artificial Sequence
  Oligonucleotide primer for the detection of SNP TSC0030701
ttctctacccta

SEQ ID NO: 322164 - DNA, 12 bp, Artificial Sequence
  Oligonucleotide primer for the detection of SNP TSC0030701
ttataagtatag

SEQ ID NO: 322165 - DNA, 12 bp, Artificial Sequence
  Oligonucleotide primer for the detection of SNP TSC0030703
aactcctatcct

SEQ ID NO: 322166 - DNA, 12 bp, Artificial Sequence
  Oligonucleotide primer for the detection of SNP TSC0030707
tcaccaaaaacc

SEQ ID NO: 322167 - DNA, 12 bp, Artificial Sequence
  Oligonucleotide primer for the detection of SNP TSC0030707
tcgccaaaaacc

SEQ ID NO: 322168 - DNA, 12 bp, Artificial Sequence
  Oligonucleotide primer for the detection of SNP TSC0030707
ggtgtgggggta

SEQ ID NO: 322169 - DNA, 12 bp, Artificial Sequence
  Oligonucleotide primer for the detection of SNP TSC0030707
ggtgcgggggta

SEQ ID NO: 322170 - DNA, 12 bp, Artificial Sequence
  Oligonucleotide primer for the detection of SNP TSC0030707
aatacaaaaaca

SEQ ID NO: 322171 - DNA, 12 bp, Artificial Sequence
  Oligonucleotide primer for the detection of SNP TSC0030707
aatacgaaaaca

SEQ ID NO: 322172 - DNA, 12 bp, Artificial Sequence
  Oligonucleotide primer for the detection of SNP TSC0030707
ttgttaggaatt

SEQ ID NO: 322173 - DNA, 12 bp, Artificial Sequence
  Oligonucleotide primer for the detection of SNP TSC0030707
tcgttaggaatt

SEQ ID NO: 322174 - DNA, 12 bp, Artificial Sequence
  Oligonucleotide primer for the detection of SNP TSC0030708
taaaaaactcct

SEQ ID NO: 322175 - DNA, 12 bp, Artificial Sequence
  Oligonucleotide primer for the detection of SNP TSC0030708
agttttttaggg

SEQ ID NO: 322176 - DNA, 12 bp, Artificial Sequence
  Oligonucleotide primer for the detection of SNP TSC0030709
taaaacacccta

SEQ ID NO: 322177 - DNA, 12 bp, Artificial Sequence
  Oligonucleotide primer for the detection of SNP TSC0030709
ttttttattaga

SEQ ID NO: 322178 - DNA, 12 bp, Artificial Sequence
  Oligonucleotide primer for the detection of SNP TSC0030710
caacaaaaaccc

SEQ ID NO: 322179 - DNA, 12 bp, Artificial Sequence
  Oligonucleotide primer for the detection of SNP TSC0030710
atttgtaaatgg

SEQ ID NO: 322180 - DNA, 12 bp, Artificial Sequence
  Oligonucleotide primer for the detection of SNP TSC0030710
atttgtaaacgg

SEQ ID NO: 322181 - DNA, 12 bp, Artificial Sequence
  Oligonucleotide primer for the detection of SNP TSC0030712
aaatctaaaaat

SEQ ID NO: 322182 - DNA, 12 bp, Artificial Sequence
  Oligonucleotide primer for the detection of SNP TSC0030712
cttaatttatac

SEQ ID NO: 322183 - DNA, 12 bp, Artificial Sequence
  Oligonucleotide primer for the detection of SNP TSC0030712
agatttagaagt

SEQ ID NO: 322184 - DNA, 12 bp, Artificial Sequence
  Oligonucleotide primer for the detection of SNP TSC0030714
ccaaaacccaat

SEQ ID NO: 322185 - DNA, 12 bp, Artificial Sequence
  Oligonucleotide primer for the detection of SNP TSC0030714
aatttaaaattg

SEQ ID NO: 322186 - DNA, 12 bp, Artificial Sequence
  Oligonucleotide primer for the detection of SNP TSC0030718
ttaaggtagtgt

SEQ ID NO: 322187 - DNA, 12 bp, Artificial Sequence
  Oligonucleotide primer for the detection of SNP TSC0030718
ttaaggtagtgc

SEQ ID NO: 322188 - DNA, 12 bp, Artificial Sequence
  Oligonucleotide primer for the detection of SNP TSC0030718
ccaaaacaatac

SEQ ID NO: 322189 - DNA, 12 bp, Artificial Sequence
  Oligonucleotide primer for the detection of SNP TSC0030718
tttaaggagtgt

SEQ ID NO: 322190 - DNA, 12 bp, Artificial Sequence
  Oligonucleotide primer for the detection of SNP TSC0030718
tttaaggagtgc

SEQ ID NO: 322191 - DNA, 12 bp, Artificial Sequence
  Oligonucleotide primer for the detection of SNP TSC0030724
acctatcttcta

SEQ ID NO: 322192 - DNA, 12 bp, Artificial Sequence
  Oligonucleotide primer for the detection of SNP TSC0030724
tttagagtgagt

SEQ ID NO: 322193 - DNA, 12 bp, Artificial Sequence
  Oligonucleotide primer for the detection of SNP TSC0030724
cccaaaataaac

SEQ ID NO: 322194 - DNA, 12 bp, Artificial Sequence
  Oligonukleotid-Primer
atttgttttttg

SEQ ID NO: 322195 - DNA, 12 bp, Artificial Sequence
  Oligonucleotide primer for the detection of SNP TSC0030727
aaaaactatata

SEQ ID NO: 322196 - DNA, 12 bp, Artificial Sequence
  Oligonucleotide primer for the detection of SNP TSC0030727
tgtttggttggt

SEQ ID NO: 322197 - DNA, 12 bp, Artificial Sequence
  Oligonucleotide primer for the detection of SNP TSC0030727
cgtttggttggt

SEQ ID NO: 322198 - DNA, 12 bp, Artificial Sequence
  Oligonucleotide primer for the detection of SNP TSC0030727
ttaactaataaa

SEQ ID NO: 322199 - DNA, 12 bp, Artificial Sequence
  Oligonucleotide primer for the detection of SNP TSC0030727
gggagattgtat

SEQ ID NO: 322200 - DNA, 12 bp, Artificial Sequence
  Oligonucleotide primer for the detection of SNP TSC0030730
tataataaaaaa

SEQ ID NO: 322201 - DNA, 12 bp, Artificial Sequence
  Oligonucleotide primer for the detection of SNP TSC0030730
aaccctatttac

SEQ ID NO: 322202 - DNA, 12 bp, Artificial Sequence
  Oligonucleotide primer for the detection of SNP TSC0030730
atgtagtaggag

SEQ ID NO: 322203 - DNA, 12 bp, Artificial Sequence
  Oligonucleotide primer for the detection of SNP TSC0030731
actcctataaaa

SEQ ID NO: 322204 - DNA, 12 bp, Artificial Sequence
  Oligonucleotide primer for the detection of SNP TSC0030731
agataaaatgat

SEQ ID NO: 322205 - DNA, 12 bp, Artificial Sequence
  Oligonucleotide primer for the detection of SNP TSC0030731
atttttgtgggg

SEQ ID NO: 322206 - DNA, 12 bp, Artificial Sequence
  Oligonucleotide primer for the detection of SNP TSC0030732
attttccaaata

SEQ ID NO: 322207 - DNA, 12 bp, Artificial Sequence
  Oligonucleotide primer for the detection of SNP TSC0030732
tgggtgataatt

SEQ ID NO: 322208 - DNA, 12 bp, Artificial Sequence
  Oligonucleotide primer for the detection of SNP TSC0030732
attttttaaata

SEQ ID NO: 322209 - DNA, 12 bp, Artificial Sequence
  Oligonucleotide primer for the detection of SNP TSC0030733
caaaacttttta

SEQ ID NO: 322210 - DNA, 12 bp, Artificial Sequence
  Oligonucleotide primer for the detection of SNP TSC0030733
ggttattaataa

SEQ ID NO: 322211 - DNA, 12 bp, Artificial Sequence
  Oligonucleotide primer for the detection of SNP TSC0030734
tataatgaatag

SEQ ID NO: 322212 - DNA, 12 bp, Artificial Sequence
  Oligonucleotide primer for the detection of SNP TSC0030735
tacctaaaaatt

SEQ ID NO: 322213 - DNA, 12 bp, Artificial Sequence
  Oligonucleotide primer for the detection of SNP TSC0030735
tatttagaaatt

SEQ ID NO: 322214 - DNA, 12 bp, Artificial Sequence
  Oligonucleotide primer for the detection of SNP TSC0030736
ataatcccaact

SEQ ID NO: 322215 - DNA, 12 bp, Artificial Sequence
  Oligonucleotide primer for the detection of SNP TSC0030738
aagaagtttatt

SEQ ID NO: 322216 - DNA, 12 bp, Artificial Sequence
  Oligonucleotide primer for the detection of SNP TSC0030738
taaaaaatccac

SEQ ID NO: 322217 - DNA, 12 bp, Artificial Sequence
  Oligonucleotide primer for the detection of SNP TSC0030738
ttgattttttag

SEQ ID NO: 322218 - DNA, 12 bp, Artificial Sequence
  Oligonucleotide primer for the detection of SNP TSC0030739
taaaaaacttac

SEQ ID NO: 322219 - DNA, 12 bp, Artificial Sequence
  Oligonucleotide primer for the detection of SNP TSC0030739
ggttagagtaat

SEQ ID NO: 322220 - DNA, 12 bp, Artificial Sequence
  Oligonucleotide primer for the detection of SNP TSC0030739
aatcaaaacaac

SEQ ID NO: 322221 - DNA, 12 bp, Artificial Sequence
  Oligonucleotide primer for the detection of SNP TSC0030739
tggggagtttgt

SEQ ID NO: 322222 - DNA, 12 bp, Artificial Sequence
  Oligonucleotide primer for the detection of SNP TSC0030740
tctctaattaat

SEQ ID NO: 322223 - DNA, 12 bp, Artificial Sequence
  Oligonucleotide primer for the detection of SNP TSC0030740
tatattttaata

SEQ ID NO: 322224 - DNA, 12 bp, Artificial Sequence
  Oligonucleotide primer for the detection of SNP TSC0030741
tttatactacct

SEQ ID NO: 322225 - DNA, 12 bp, Artificial Sequence
  Oligonucleotide primer for the detection of SNP TSC0030741
aaatggtaggaa

SEQ ID NO: 322226 - DNA, 12 bp, Artificial Sequence
  Oligonucleotide primer for the detection of SNP TSC0030741
tttgtgttgttt

SEQ ID NO: 322227 - DNA, 12 bp, Artificial Sequence
  Oligonucleotide primer for the detection of SNP TSC0030742
aaatcatcccta

SEQ ID NO: 322228 - DNA, 12 bp, Artificial Sequence
  Oligonucleotide primer for the detection of SNP TSC0030742
tttcctatttac

SEQ ID NO: 322229 - DNA, 12 bp, Artificial Sequence
  Oligonucleotide primer for the detection of SNP TSC0030742
gaattatttttg

SEQ ID NO: 322230 - DNA, 12 bp, Artificial Sequence
  Oligonucleotide primer for the detection of SNP TSC0030743
cctaatatatac

SEQ ID NO: 322231 - DNA, 12 bp, Artificial Sequence
  Oligonucleotide primer for the detection of SNP TSC0030744
tatagtatttgt

SEQ ID NO: 322232 - DNA, 12 bp, Artificial Sequence
  Oligonucleotide primer for the detection of SNP TSC0030744
atataacaccta

SEQ ID NO: 322233 - DNA, 12 bp, Artificial Sequence
  Oligonucleotide primer for the detection of SNP TSC0030744
gaaattaaattt

SEQ ID NO: 322234 - DNA, 12 bp, Artificial Sequence
  Oligonucleotide primer for the detection of SNP TSC0030745
tgtttgtagtag

SEQ ID NO: 322235 - DNA, 12 bp, Artificial Sequence
  Oligonucleotide primer for the detection of SNP TSC0030746
atcacttaaaac

SEQ ID NO: 322236 - DNA, 12 bp, Artificial Sequence
  Oligonucleotide primer for the detection of SNP TSC0030746
gttggtttttat

SEQ ID NO: 322237 - DNA, 12 bp, Artificial Sequence
  Oligonucleotide primer for the detection of SNP TSC0030747
aaataatctact

SEQ ID NO: 322238 - DNA, 12 bp, Artificial Sequence
  Oligonucleotide primer for the detection of SNP TSC0030747
gggaggttaaag

SEQ ID NO: 322239 - DNA, 12 bp, Artificial Sequence
  Oligonucleotide primer for the detection of SNP TSC0030748
aaacaaaatttc

SEQ ID NO: 322240 - DNA, 12 bp, Artificial Sequence
  Oligonucleotide primer for the detection of SNP TSC0030748
taataggttgga

SEQ ID NO: 322241 - DNA, 12 bp, Artificial Sequence
  Oligonucleotide primer for the detection of SNP TSC0030749
attatatccccc

SEQ ID NO: 322242 - DNA, 12 bp, Artificial Sequence
  Oligonucleotide primer for the detection of SNP TSC0030749
taaatttaataa

SEQ ID NO: 322243 - DNA, 12 bp, Artificial Sequence
  Oligonucleotide primer for the detection of SNP TSC0030750
aactattatcac

SEQ ID NO: 322244 - DNA, 12 bp, Artificial Sequence
  Oligonucleotide primer for the detection of SNP TSC0030750
tatgtgtattta

SEQ ID NO: 322245 - DNA, 12 bp, Artificial Sequence
  Oligonucleotide primer for the detection of SNP TSC0030750
tatatacaccta

SEQ ID NO: 322246 - DNA, 12 bp, Artificial Sequence
  Oligonucleotide primer for the detection of SNP TSC0030750
agttattattat

SEQ ID NO: 322247 - DNA, 12 bp, Artificial Sequence
  Oligonucleotide primer for the detection of SNP TSC0030755
caacacaaaaaa

SEQ ID NO: 322248 - DNA, 12 bp, Artificial Sequence
  Oligonucleotide primer for the detection of SNP TSC0030755
caacgcaaaaaa

SEQ ID NO: 322249 - DNA, 12 bp, Artificial Sequence
  Oligonucleotide primer for the detection of SNP TSC0030755
cgacacaaaaaa

SEQ ID NO: 322250 - DNA, 12 bp, Artificial Sequence
  Oligonucleotide primer for the detection of SNP TSC0030755
cgacgcaaaaaa

SEQ ID NO: 322251 - DNA, 12 bp, Artificial Sequence
  Oligonucleotide primer for the detection of SNP TSC0030755
tagaaattattt

SEQ ID NO: 322252 - DNA, 12 bp, Artificial Sequence
  Oligonucleotide primer for the detection of SNP TSC0030755
atacaaaaatca

SEQ ID NO: 322253 - DNA, 12 bp, Artificial Sequence
  Oligonucleotide primer for the detection of SNP TSC0030755
tgatgtagaaga

SEQ ID NO: 322254 - DNA, 12 bp, Artificial Sequence
  Oligonucleotide primer for the detection of SNP TSC0030755
cgatgtagaaga

SEQ ID NO: 322255 - DNA, 12 bp, Artificial Sequence
  Oligonucleotide primer for the detection of SNP TSC0030755
tgacgtagaaga

SEQ ID NO: 322256 - DNA, 12 bp, Artificial Sequence
  Oligonucleotide primer for the detection of SNP TSC0030755
cgacgtagaaga

SEQ ID NO: 322257 - DNA, 12 bp, Artificial Sequence
  Oligonucleotide primer for the detection of SNP TSC0030756
atcctaaacata

SEQ ID NO: 322258 - DNA, 12 bp, Artificial Sequence
  Oligonucleotide primer for the detection of SNP TSC0030756
ttggttgaagta

SEQ ID NO: 322259 - DNA, 12 bp, Artificial Sequence
  Oligonucleotide primer for the detection of SNP TSC0030756
ctaattaaaata

SEQ ID NO: 322260 - DNA, 12 bp, Artificial Sequence
  Oligonucleotide primer for the detection of SNP TSC0030756
tattttaaatat

SEQ ID NO: 322261 - DNA, 12 bp, Artificial Sequence
  Oligonucleotide primer for the detection of SNP TSC0030757
cgaaaaaaaaat

SEQ ID NO: 322262 - DNA, 12 bp, Artificial Sequence
  Oligonucleotide primer for the detection of SNP TSC0030757
gtaaggtagtta

SEQ ID NO: 322263 - DNA, 12 bp, Artificial Sequence
  Oligonucleotide primer for the detection of SNP TSC0030763
gttattgtaata

SEQ ID NO: 322264 - DNA, 12 bp, Artificial Sequence
  Oligonucleotide primer for the detection of SNP TSC0030764
tttaaaaaaaat

SEQ ID NO: 322265 - DNA, 12 bp, Artificial Sequence
  Oligonucleotide primer for the detection of SNP TSC0030764
ttgttttttgta

SEQ ID NO: 322266 - DNA, 12 bp, Artificial Sequence
  Oligonucleotide primer for the detection of SNP TSC0030767
atatattaaaca

SEQ ID NO: 322267 - DNA, 12 bp, Artificial Sequence
  Oligonucleotide primer for the detection of SNP TSC0030767
ctcctaatacat

SEQ ID NO: 322268 - DNA, 12 bp, Artificial Sequence
  Oligonucleotide primer for the detection of SNP TSC0030767
atgtattgaata

SEQ ID NO: 322269 - DNA, 12 bp, Artificial Sequence
  Oligonucleotide primer for the detection of SNP TSC0030768
tccaaatttaat

SEQ ID NO: 322270 - DNA, 12 bp, Artificial Sequence
  Oligonucleotide primer for the detection of SNP TSC0030768
tattgtggtaaa

SEQ ID NO: 322271 - DNA, 12 bp, Artificial Sequence
  Oligonucleotide primer for the detection of SNP TSC0030768
cattataacaaa

SEQ ID NO: 322272 - DNA, 12 bp, Artificial Sequence
  Oligonucleotide primer for the detection of SNP TSC0030768
tttagatttgat

SEQ ID NO: 322273 - DNA, 12 bp, Artificial Sequence
  Oligonucleotide primer for the detection of SNP TSC0030769
aaataactttaa

SEQ ID NO: 322274 - DNA, 12 bp, Artificial Sequence
  Oligonucleotide primer for the detection of SNP TSC0030769
tctacccattca

SEQ ID NO: 322275 - DNA, 12 bp, Artificial Sequence
  Oligonucleotide primer for the detection of SNP TSC0030769
taagatggtttt

SEQ ID NO: 322276 - DNA, 12 bp, Artificial Sequence
  Oligonucleotide primer for the detection of SNP TSC0030774
actcatttttct

SEQ ID NO: 322277 - DNA, 12 bp, Artificial Sequence
  Oligonucleotide primer for the detection of SNP TSC0030774
aggtaaatttaa

SEQ ID NO: 322278 - DNA, 12 bp, Artificial Sequence
  Oligonucleotide primer for the detection of SNP TSC0030775
actcaaataatc

SEQ ID NO: 322279 - DNA, 12 bp, Artificial Sequence
  Oligonucleotide primer for the detection of SNP TSC0030775
gattgaggtggg

SEQ ID NO: 322280 - DNA, 12 bp, Artificial Sequence
  Oligonucleotide primer for the detection of SNP TSC0030775
gattgaggcggg

SEQ ID NO: 322281 - DNA, 12 bp, Artificial Sequence
  Oligonucleotide primer for the detection of SNP TSC0030775
aactaaaacgaa

SEQ ID NO: 322282 - DNA, 12 bp, Artificial Sequence
  Oligonucleotide primer for the detection of SNP TSC0030776
aaaatcctaaca

SEQ ID NO: 322283 - DNA, 12 bp, Artificial Sequence
  Oligonucleotide primer for the detection of SNP TSC0030776
ttttccatttta

SEQ ID NO: 322284 - DNA, 12 bp, Artificial Sequence
  Oligonucleotide primer for the detection of SNP TSC0030776
aaagttttaata

SEQ ID NO: 322285 - DNA, 12 bp, Artificial Sequence
  Oligonucleotide primer for the detection of SNP TSC0030780
taactaatacaa

SEQ ID NO: 322286 - DNA, 12 bp, Artificial Sequence
  Oligonucleotide primer for the detection of SNP TSC0030780
atattctctatc

SEQ ID NO: 322287 - DNA, 12 bp, Artificial Sequence
  Oligonucleotide primer for the detection of SNP TSC0030780
taattgatgtag

SEQ ID NO: 322288 - DNA, 12 bp, Artificial Sequence
  Oligonucleotide primer for the detection of SNP TSC0030781
cctaaccaacat

SEQ ID NO: 322289 - DNA, 12 bp, Artificial Sequence
  Oligonucleotide primer for the detection of SNP TSC0030781
gtagaggtgggg

SEQ ID NO: 322290 - DNA, 12 bp, Artificial Sequence
  Oligonucleotide primer for the detection of SNP TSC0030782
aagaagataggt

SEQ ID NO: 322291 - DNA, 12 bp, Artificial Sequence
  Oligonucleotide primer for the detection of SNP TSC0030782
taagagtttttt

SEQ ID NO: 322292 - DNA, 12 bp, Artificial Sequence
  Oligonucleotide primer for the detection of SNP TSC0030783
tcaccctaaaca

SEQ ID NO: 322293 - DNA, 12 bp, Artificial Sequence
  Oligonucleotide primer for the detection of SNP TSC0030783
aggttaagatat

SEQ ID NO: 322294 - DNA, 12 bp, Artificial Sequence
  Oligonucleotide primer for the detection of SNP TSC0030783
aaatcaaaacac

SEQ ID NO: 322295 - DNA, 12 bp, Artificial Sequence
  Oligonucleotide primer for the detection of SNP TSC0030784
tcataaactcat

SEQ ID NO: 322296 - DNA, 12 bp, Artificial Sequence
  Oligonucleotide primer for the detection of SNP TSC0030785
aaactcaaaaat

SEQ ID NO: 322297 - DNA, 12 bp, Artificial Sequence
  Oligonucleotide primer for the detection of SNP TSC0030785
ttaaggtttata

SEQ ID NO: 322298 - DNA, 12 bp, Artificial Sequence
  Oligonucleotide primer for the detection of SNP TSC0030787
aaaatactaaaa

SEQ ID NO: 322299 - DNA, 12 bp, Artificial Sequence
  Oligonucleotide primer for the detection of SNP TSC0030787
tttatgtttgta

SEQ ID NO: 322300 - DNA, 12 bp, Artificial Sequence
  Oligonucleotide primer for the detection of SNP TSC0030787
ctcatacctaca

SEQ ID NO: 322301 - DNA, 12 bp, Artificial Sequence
  Oligonucleotide primer for the detection of SNP TSC0030788
aaactcaaataa

SEQ ID NO: 322302 - DNA, 12 bp, Artificial Sequence
  Oligonucleotide primer for the detection of SNP TSC0030788
gagtttaagtga

SEQ ID NO: 322303 - DNA, 12 bp, Artificial Sequence
  Oligonucleotide primer for the detection of SNP TSC0030790
aaaaacatcaat

SEQ ID NO: 322304 - DNA, 12 bp, Artificial Sequence
  Oligonucleotide primer for the detection of SNP TSC0030790
tcatactcaaaa

SEQ ID NO: 322305 - DNA, 12 bp, Artificial Sequence
  Oligonucleotide primer for the detection of SNP TSC0030790
ggatattagttt

SEQ ID NO: 322306 - DNA, 12 bp, Artificial Sequence
  Oligonucleotide primer for the detection of SNP TSC0030790
ggatattagttc

SEQ ID NO: 322307 - DNA, 12 bp, Artificial Sequence
  Oligonucleotide primer for the detection of SNP TSC0030791
caaaattcaatc

SEQ ID NO: 322308 - DNA, 12 bp, Artificial Sequence
  Oligonucleotide primer for the detection of SNP TSC0030791
atcttactccaa

SEQ ID NO: 322309 - DNA, 12 bp, Artificial Sequence
  Oligonucleotide primer for the detection of SNP TSC0030794
taaattctatca

SEQ ID NO: 322310 - DNA, 12 bp, Artificial Sequence
  Oligonucleotide primer for the detection of SNP TSC0030794
tagtttaaagat

SEQ ID NO: 322311 - DNA, 12 bp, Artificial Sequence
  Oligonucleotide primer for the detection of SNP TSC0030794
aatttaaaaata

SEQ ID NO: 322312 - DNA, 12 bp, Artificial Sequence
  Oligonucleotide primer for the detection of SNP TSC0030794
tgaattttatta

SEQ ID NO: 322313 - DNA, 12 bp, Artificial Sequence
  Oligonucleotide primer for the detection of SNP TSC0030796
taaaaactatat

SEQ ID NO: 322314 - DNA, 12 bp, Artificial Sequence
  Oligonucleotide primer for the detection of SNP TSC0030796
atttataggtta

SEQ ID NO: 322315 - DNA, 12 bp, Artificial Sequence
  Oligonukleotid-Primer
acccacaaacta

SEQ ID NO: 322316 - DNA, 12 bp, Artificial Sequence
  Oligonucleotide primer for the detection of SNP TSC0030796
tggagattatgt

SEQ ID NO: 322317 - DNA, 12 bp, Artificial Sequence
  Oligonucleotide primer for the detection of SNP TSC0030797
taatattacaaa

SEQ ID NO: 322318 - DNA, 12 bp, Artificial Sequence
  Oligonucleotide primer for the detection of SNP TSC0030797
tggtattatagg

SEQ ID NO: 322319 - DNA, 12 bp, Artificial Sequence
  Oligonukleotid-Primer
ccccattaacac

SEQ ID NO: 322320 - DNA, 12 bp, Artificial Sequence
  Oligonucleotide primer for the detection of SNP TSC0030798
actaccccacta

SEQ ID NO: 322321 - DNA, 12 bp, Artificial Sequence
  Oligonucleotide primer for the detection of SNP TSC0030798
ttttattggtat

SEQ ID NO: 322322 - DNA, 12 bp, Artificial Sequence
  Oligonucleotide primer for the detection of SNP TSC0030799
ccaccccactct

SEQ ID NO: 322323 - DNA, 12 bp, Artificial Sequence
  Oligonucleotide primer for the detection of SNP TSC0030799
tcctttatactc

SEQ ID NO: 322324 - DNA, 12 bp, Artificial Sequence
  Oligonucleotide primer for the detection of SNP TSC0030799
tattttattttc

SEQ ID NO: 322325 - DNA, 12 bp, Artificial Sequence
  Oligonucleotide primer for the detection of SNP TSC0030802
caccaatcaaat

SEQ ID NO: 322326 - DNA, 12 bp, Artificial Sequence
  Oligonucleotide primer for the detection of SNP TSC0030802
gtgatgattttg

SEQ ID NO: 322327 - DNA, 12 bp, Artificial Sequence
  Oligonucleotide primer for the detection of SNP TSC0030807
tatccctaaccc

SEQ ID NO: 322328 - DNA, 12 bp, Artificial Sequence
  Oligonucleotide primer for the detection of SNP TSC0030807
aggaagtttatg

SEQ ID NO: 322329 - DNA, 12 bp, Artificial Sequence
  Oligonucleotide primer for the detection of SNP TSC0030807
aggaagtttacg

SEQ ID NO: 322330 - DNA, 12 bp, Artificial Sequence
  Oligonucleotide primer for the detection of SNP TSC0030807
aaaaaatccaca

SEQ ID NO: 322331 - DNA, 12 bp, Artificial Sequence
  Oligonucleotide primer for the detection of SNP TSC0030807
aaaaaatccacg

SEQ ID NO: 322332 - DNA, 12 bp, Artificial Sequence
  Oligonucleotide primer for the detection of SNP TSC0030809
ataatccacccg

SEQ ID NO: 322333 - DNA, 12 bp, Artificial Sequence
  Oligonucleotide primer for the detection of SNP TSC0030809
gtaatccaccca

SEQ ID NO: 322334 - DNA, 12 bp, Artificial Sequence
  Oligonucleotide primer for the detection of SNP TSC0030809
ataatccgcccg

SEQ ID NO: 322335 - DNA, 12 bp, Artificial Sequence
  Oligonucleotide primer for the detection of SNP TSC0030809
gtaatccacccg

SEQ ID NO: 322336 - DNA, 12 bp, Artificial Sequence
  Oligonucleotide primer for the detection of SNP TSC0030809
gtaatccgccca

SEQ ID NO: 322337 - DNA, 12 bp, Artificial Sequence
  Oligonucleotide primer for the detection of SNP TSC0030809
gtaatccgcccg

SEQ ID NO: 322338 - DNA, 12 bp, Artificial Sequence
  Oligonucleotide primer for the detection of SNP TSC0030810
aatacataatat

SEQ ID NO: 322339 - DNA, 12 bp, Artificial Sequence
  Oligonucleotide primer for the detection of SNP TSC0030810
aatacgtaatat

SEQ ID NO: 322340 - DNA, 12 bp, Artificial Sequence
  Oligonucleotide primer for the detection of SNP TSC0030810
tatttagattgg

SEQ ID NO: 322341 - DNA, 12 bp, Artificial Sequence
  Oligonucleotide primer for the detection of SNP TSC0030810
tatttagatcgg

SEQ ID NO: 322342 - DNA, 12 bp, Artificial Sequence
  Oligonucleotide primer for the detection of SNP TSC0030812
ctaacaacccta

SEQ ID NO: 322343 - DNA, 12 bp, Artificial Sequence
  Oligonucleotide primer for the detection of SNP TSC0030812
gggttgtgatat

SEQ ID NO: 322344 - DNA, 12 bp, Artificial Sequence
  Oligonucleotide primer for the detection of SNP TSC0030812
aaactataacat

SEQ ID NO: 322345 - DNA, 12 bp, Artificial Sequence
  Oligonucleotide primer for the detection of SNP TSC0030812
ttgatagttttg

SEQ ID NO: 322346 - DNA, 12 bp, Artificial Sequence
  Oligonucleotide primer for the detection of SNP TSC0030813
caattccttcat

SEQ ID NO: 322347 - DNA, 12 bp, Artificial Sequence
  Oligonucleotide primer for the detection of SNP TSC0030813
tgggagatagaa

SEQ ID NO: 322348 - DNA, 12 bp, Artificial Sequence
  Oligonucleotide primer for the detection of SNP TSC0030814
caacattaattc

SEQ ID NO: 322349 - DNA, 12 bp, Artificial Sequence
  Oligonucleotide primer for the detection of SNP TSC0030814
aaataaagtggg

SEQ ID NO: 322350 - DNA, 12 bp, Artificial Sequence
  Oligonucleotide primer for the detection of SNP TSC0030814
tagtattggttt

SEQ ID NO: 322351 - DNA, 12 bp, Artificial Sequence
  Oligonucleotide primer for the detection of SNP TSC0030817
caactatttaaa

SEQ ID NO: 322352 - DNA, 12 bp, Artificial Sequence
  Oligonucleotide primer for the detection of SNP TSC0030817
cgactatttaaa

SEQ ID NO: 322353 - DNA, 12 bp, Artificial Sequence
  Oligonucleotide primer for the detection of SNP TSC0030817
ggtttgtttttt

SEQ ID NO: 322354 - DNA, 12 bp, Artificial Sequence
  Oligonucleotide primer for the detection of SNP TSC0030817
ggttcgtttttt

SEQ ID NO: 322355 - DNA, 12 bp, Artificial Sequence
  Oligonucleotide primer for the detection of SNP TSC0030817
actcactcctta

SEQ ID NO: 322356 - DNA, 12 bp, Artificial Sequence
  Oligonucleotide primer for the detection of SNP TSC0030817
actcgctcctta

SEQ ID NO: 322357 - DNA, 12 bp, Artificial Sequence
  Oligonucleotide primer for the detection of SNP TSC0030817
ttggttgtttgg

SEQ ID NO: 322358 - DNA, 12 bp, Artificial Sequence
  Oligonucleotide primer for the detection of SNP TSC0030817
tcggttgtttgg

SEQ ID NO: 322359 - DNA, 12 bp, Artificial Sequence
  Oligonucleotide primer for the detection of SNP TSC0030818
tacacatcttta

SEQ ID NO: 322360 - DNA, 12 bp, Artificial Sequence
  Oligonucleotide primer for the detection of SNP TSC0030818
tgtatatttttg

SEQ ID NO: 322361 - DNA, 12 bp, Artificial Sequence
  Oligonucleotide primer for the detection of SNP TSC0030819
tatactctatta

SEQ ID NO: 322362 - DNA, 12 bp, Artificial Sequence
  Oligonucleotide primer for the detection of SNP TSC0030819
tcctttcacaca

SEQ ID NO: 322363 - DNA, 12 bp, Artificial Sequence
  Oligonucleotide primer for the detection of SNP TSC0030824
ctaaaatattaa

SEQ ID NO: 322364 - DNA, 12 bp, Artificial Sequence
  Oligonucleotide primer for the detection of SNP TSC0030824
gagatttttgag

SEQ ID NO: 322365 - DNA, 12 bp, Artificial Sequence
  Oligonucleotide primer for the detection of SNP TSC0030824
gagattttcgag

SEQ ID NO: 322366 - DNA, 12 bp, Artificial Sequence
  Oligonucleotide primer for the detection of SNP TSC0030824
aaaaccctcaaa

SEQ ID NO: 322367 - DNA, 12 bp, Artificial Sequence
  Oligonucleotide primer for the detection of SNP TSC0030824
aaaaccctcgaa

SEQ ID NO: 322368 - DNA, 12 bp, Artificial Sequence
  Oligonucleotide primer for the detection of SNP TSC0030824
ttaaggtgttaa

SEQ ID NO: 322369 - DNA, 12 bp, Artificial Sequence
  Oligonucleotide primer for the detection of SNP TSC0030825
cctatcttaacc

SEQ ID NO: 322370 - DNA, 12 bp, Artificial Sequence
  Oligonucleotide primer for the detection of SNP TSC0030826
acaataacctac

SEQ ID NO: 322371 - DNA, 12 bp, Artificial Sequence
  Oligonucleotide primer for the detection of SNP TSC0030826
tatgagttttgg

SEQ ID NO: 322372 - DNA, 12 bp, Artificial Sequence
  Oligonucleotide primer for the detection of SNP TSC0030829
attgttaaaaaa

SEQ ID NO: 322373 - DNA, 12 bp, Artificial Sequence
  Oligonucleotide primer for the detection of SNP TSC0030829
atcgttaaaaaa

SEQ ID NO: 322374 - DNA, 12 bp, Artificial Sequence
  Oligonucleotide primer for the detection of SNP TSC0030829
accattaaaaaa

SEQ ID NO: 322375 - DNA, 12 bp, Artificial Sequence
  Oligonucleotide primer for the detection of SNP TSC0030829
accgttaaaaaa

SEQ ID NO: 322376 - DNA, 12 bp, Artificial Sequence
  Oligonucleotide primer for the detection of SNP TSC0030829
gttgttgttgtt

SEQ ID NO: 322377 - DNA, 12 bp, Artificial Sequence
  Oligonucleotide primer for the detection of SNP TSC0030830
tattatttatta

SEQ ID NO: 322378 - DNA, 12 bp, Artificial Sequence
  Oligonucleotide primer for the detection of SNP TSC0030833
taactatacttt

SEQ ID NO: 322379 - DNA, 12 bp, Artificial Sequence
  Oligonucleotide primer for the detection of SNP TSC0030833
gttatttttgta

SEQ ID NO: 322380 - DNA, 12 bp, Artificial Sequence
  Oligonucleotide primer for the detection of SNP TSC0030834
aatcctttcata

SEQ ID NO: 322381 - DNA, 12 bp, Artificial Sequence
  Oligonucleotide primer for the detection of SNP TSC0030834
taagtttgaatt

SEQ ID NO: 322382 - DNA, 12 bp, Artificial Sequence
  Oligonucleotide primer for the detection of SNP TSC0030834
caaatttaaatt

SEQ ID NO: 322383 - DNA, 12 bp, Artificial Sequence
  Oligonucleotide primer for the detection of SNP TSC0030834
gtttttttatat

SEQ ID NO: 322384 - DNA, 12 bp, Artificial Sequence
  Oligonucleotide primer for the detection of SNP TSC0030835
ctaacctaacat

SEQ ID NO: 322385 - DNA, 12 bp, Artificial Sequence
  Oligonucleotide primer for the detection of SNP TSC0030835
aaccacatacca

SEQ ID NO: 322386 - DNA, 12 bp, Artificial Sequence
  Oligonucleotide primer for the detection of SNP TSC0030835
ggtttggtattt

SEQ ID NO: 322387 - DNA, 12 bp, Artificial Sequence
  Oligonucleotide primer for the detection of SNP TSC0030835
ggtttggtattc

SEQ ID NO: 322388 - DNA, 12 bp, Artificial Sequence
  Oligonucleotide primer for the detection of SNP TSC0030836
ctaaacccctcc

SEQ ID NO: 322389 - DNA, 12 bp, Artificial Sequence
  Oligonucleotide primer for the detection of SNP TSC0030836
ttgaatgtggtg

SEQ ID NO: 322390 - DNA, 12 bp, Artificial Sequence
  Oligonucleotide primer for the detection of SNP TSC0030836
ttgaacgtggtg

SEQ ID NO: 322391 - DNA, 12 bp, Artificial Sequence
  Oligonucleotide primer for the detection of SNP TSC0030837
atactaattact

SEQ ID NO: 322392 - DNA, 12 bp, Artificial Sequence
  Oligonucleotide primer for the detection of SNP TSC0030837
gaagagagaaaa

SEQ ID NO: 322393 - DNA, 12 bp, Artificial Sequence
  Oligonucleotide primer for the detection of SNP TSC0030838
aaacctatctct

SEQ ID NO: 322394 - DNA, 12 bp, Artificial Sequence
  Oligonucleotide primer for the detection of SNP TSC0030839
aaaaaaccttcc

SEQ ID NO: 322395 - DNA, 12 bp, Artificial Sequence
  Oligonucleotide primer for the detection of SNP TSC0030839
aggaagttgagg

SEQ ID NO: 322396 - DNA, 12 bp, Artificial Sequence
  Oligonucleotide primer for the detection of SNP TSC0030839
aggagatttttt

SEQ ID NO: 322397 - DNA, 12 bp, Artificial Sequence
  Oligonucleotide primer for the detection of SNP TSC0030840
atcaaaactcac

SEQ ID NO: 322398 - DNA, 12 bp, Artificial Sequence
  Oligonucleotide primer for the detection of SNP TSC0030840
gttggaagttgg

SEQ ID NO: 322399 - DNA, 12 bp, Artificial Sequence
  Oligonucleotide primer for the detection of SNP TSC0030841
taaactaaaata

SEQ ID NO: 322400 - DNA, 12 bp, Artificial Sequence
  Oligonucleotide primer for the detection of SNP TSC0030841
attgaaggaaat

SEQ ID NO: 322401 - DNA, 12 bp, Artificial Sequence
  Oligonucleotide primer for the detection of SNP TSC0030841
agattgaaatat

SEQ ID NO: 322402 - DNA, 12 bp, Artificial Sequence
  Oligonucleotide primer for the detection of SNP TSC0030841
agattgaaatac

SEQ ID NO: 322403 - DNA, 12 bp, Artificial Sequence
  Oligonucleotide primer for the detection of SNP TSC0030847
aaacttaaatat

SEQ ID NO: 322404 - DNA, 12 bp, Artificial Sequence
  Oligonukleotid-Primer
gtttatttttaa

SEQ ID NO: 322405 - DNA, 12 bp, Artificial Sequence
  Oligonucleotide primer for the detection of SNP TSC0030847
attcatccttaa

SEQ ID NO: 322406 - DNA, 12 bp, Artificial Sequence
  Oligonucleotide primer for the detection of SNP TSC0030848
ccttaatttcat

SEQ ID NO: 322407 - DNA, 12 bp, Artificial Sequence
  Oligonucleotide primer for the detection of SNP TSC0030848
tgtaggtttgag

SEQ ID NO: 322408 - DNA, 12 bp, Artificial Sequence
  Oligonukleotid-Primer
atttaaaaattc

SEQ ID NO: 322409 - DNA, 12 bp, Artificial Sequence
  Oligonucleotide primer for the detection of SNP TSC0030852
tagataatagtg

SEQ ID NO: 322410 - DNA, 12 bp, Artificial Sequence
  Oligonucleotide primer for the detection of SNP TSC0030854
ttatatatacct

SEQ ID NO: 322411 - DNA, 12 bp, Artificial Sequence
  Oligonucleotide primer for the detection of SNP TSC0030855
tattttaacaaa

SEQ ID NO: 322412 - DNA, 12 bp, Artificial Sequence
  Oligonukleotid-Primer
catcttctatac

SEQ ID NO: 322413 - DNA, 12 bp, Artificial Sequence
  Oligonucleotide primer for the detection of SNP TSC0030855
ttgttttagtag

SEQ ID NO: 322414 - DNA, 12 bp, Artificial Sequence
  Oligonucleotide primer for the detection of SNP TSC0030857
cttaaaactcat

SEQ ID NO: 322415 - DNA, 12 bp, Artificial Sequence
  Oligonucleotide primer for the detection of SNP TSC0030857
ggtatgagataa

SEQ ID NO: 322416 - DNA, 12 bp, Artificial Sequence
  Oligonukleotid-Primer
atccccatatcc

SEQ ID NO: 322417 - DNA, 12 bp, Artificial Sequence
  Oligonucleotide primer for the detection of SNP TSC0030859
gtccccatatcc

SEQ ID NO: 322418 - DNA, 12 bp, Artificial Sequence
  Oligonucleotide primer for the detection of SNP TSC0030859
tatggtaggttg

SEQ ID NO: 322419 - DNA, 12 bp, Artificial Sequence
  Oligonucleotide primer for the detection of SNP TSC0030860
agagtttgatga

SEQ ID NO: 322420 - DNA, 12 bp, Artificial Sequence
  Oligonucleotide primer for the detection of SNP TSC0030860
atgaaaaattta

SEQ ID NO: 322421 - DNA, 12 bp, Artificial Sequence
  Oligonucleotide primer for the detection of SNP TSC0030864
aaaaccacccac

SEQ ID NO: 322422 - DNA, 12 bp, Artificial Sequence
  Oligonucleotide primer for the detection of SNP TSC0030865
attttaaattac

SEQ ID NO: 322423 - DNA, 12 bp, Artificial Sequence
  Oligonucleotide primer for the detection of SNP TSC0030865
tagaaaaattta

SEQ ID NO: 322424 - DNA, 12 bp, Artificial Sequence
  Oligonukleotid-Primer
cctcatccatta

SEQ ID NO: 322425 - DNA, 12 bp, Artificial Sequence
  Oligonucleotide primer for the detection of SNP TSC0030870
acccaacccccc

SEQ ID NO: 322426 - DNA, 12 bp, Artificial Sequence
  Oligonucleotide primer for the detection of SNP TSC0030870
ttaaggagttaa

SEQ ID NO: 322427 - DNA, 12 bp, Artificial Sequence
  Oligonucleotide primer for the detection of SNP TSC0030871
attattaatcac

SEQ ID NO: 322428 - DNA, 12 bp, Artificial Sequence
  Oligonukleotid-Primer
ggtattttatta

SEQ ID NO: 322429 - DNA, 12 bp, Artificial Sequence
  Oligonucleotide primer for the detection of SNP TSC0030872
atcaaaaaatac

SEQ ID NO: 322430 - DNA, 12 bp, Artificial Sequence
  Oligonucleotide primer for the detection of SNP TSC0030872
atatagttgttg

SEQ ID NO: 322431 - DNA, 12 bp, Artificial Sequence
  Oligonucleotide primer for the detection of SNP TSC0030872
atatagtcgttg

SEQ ID NO: 322432 - DNA, 12 bp, Artificial Sequence
  Oligonucleotide primer for the detection of SNP TSC0030872
atatagttgtcg

SEQ ID NO: 322433 - DNA, 12 bp, Artificial Sequence
  Oligonucleotide primer for the detection of SNP TSC0030872
atatagtcgtcg

SEQ ID NO: 322434 - DNA, 12 bp, Artificial Sequence
  Oligonucleotide primer for the detection of SNP TSC0030873
acaaaaataaaa

SEQ ID NO: 322435 - DNA, 12 bp, Artificial Sequence
  Oligonucleotide primer for the detection of SNP TSC0030873
taacccactcac

SEQ ID NO: 322436 - DNA, 12 bp, Artificial Sequence
  Oligonucleotide primer for the detection of SNP TSC0030873
gtagaagtggag

SEQ ID NO: 322437 - DNA, 12 bp, Artificial Sequence
  Oligonucleotide primer for the detection of SNP TSC0030874
aattctaaaccc

SEQ ID NO: 322438 - DNA, 12 bp, Artificial Sequence
  Oligonucleotide primer for the detection of SNP TSC0030875
ttcaataatttt

SEQ ID NO: 322439 - DNA, 12 bp, Artificial Sequence
  Oligonucleotide primer for the detection of SNP TSC0030876
tataatcatatc

SEQ ID NO: 322440 - DNA, 12 bp, Artificial Sequence
  Oligonucleotide primer for the detection of SNP TSC0030876
tatttagtggag

SEQ ID NO: 322441 - DNA, 12 bp, Artificial Sequence
  Oligonucleotide primer for the detection of SNP TSC0030876
cactcaataaaa

SEQ ID NO: 322442 - DNA, 12 bp, Artificial Sequence
  Oligonucleotide primer for the detection of SNP TSC0030876
tgtggttatatt

SEQ ID NO: 322443 - DNA, 12 bp, Artificial Sequence
  Oligonucleotide primer for the detection of SNP TSC0030877
tcacaaatttta

SEQ ID NO: 322444 - DNA, 12 bp, Artificial Sequence
  Oligonucleotide primer for the detection of SNP TSC0030877
caatttattaac

SEQ ID NO: 322445 - DNA, 12 bp, Artificial Sequence
  Oligonucleotide primer for the detection of SNP TSC0030877
tatagattttgt

SEQ ID NO: 322446 - DNA, 12 bp, Artificial Sequence
  Oligonucleotide primer for the detection of SNP TSC0030877
tatagattttgc

SEQ ID NO: 322447 - DNA, 12 bp, Artificial Sequence
  Oligonucleotide primer for the detection of SNP TSC0030878
actccccaatat

SEQ ID NO: 322448 - DNA, 12 bp, Artificial Sequence
  Oligonucleotide primer for the detection of SNP TSC0030878
attttttagtat

SEQ ID NO: 322449 - DNA, 12 bp, Artificial Sequence
  Oligonucleotide primer for the detection of SNP TSC0030879
aaaaattaaaac

SEQ ID NO: 322450 - DNA, 12 bp, Artificial Sequence
  Oligonucleotide primer for the detection of SNP TSC0030879
tttgataagtaa

SEQ ID NO: 322451 - DNA, 12 bp, Artificial Sequence
  Oligonucleotide primer for the detection of SNP TSC0030884
cttaaaaaaata

SEQ ID NO: 322452 - DNA, 12 bp, Artificial Sequence
  Oligonucleotide primer for the detection of SNP TSC0030884
tttatttgttgg

SEQ ID NO: 322453 - DNA, 12 bp, Artificial Sequence
  Oligonucleotide primer for the detection of SNP TSC0030884
tttattcgttgg

SEQ ID NO: 322454 - DNA, 12 bp, Artificial Sequence
  Oligonucleotide primer for the detection of SNP TSC0030884
tttatttgtcgg

SEQ ID NO: 322455 - DNA, 12 bp, Artificial Sequence
  Oligonucleotide primer for the detection of SNP TSC0030884
tttattcgtcgg

SEQ ID NO: 322456 - DNA, 12 bp, Artificial Sequence
  Oligonucleotide primer for the detection of SNP TSC0030884
cccacccaccaa

SEQ ID NO: 322457 - DNA, 12 bp, Artificial Sequence
  Oligonucleotide primer for the detection of SNP TSC0030884
cccacccaccga

SEQ ID NO: 322458 - DNA, 12 bp, Artificial Sequence
  Oligonucleotide primer for the detection of SNP TSC0030884
cccacccgccaa

SEQ ID NO: 322459 - DNA, 12 bp, Artificial Sequence
  Oligonucleotide primer for the detection of SNP TSC0030884
cccacccgccga

SEQ ID NO: 322460 - DNA, 12 bp, Artificial Sequence
  Oligonucleotide primer for the detection of SNP TSC0030884
ttttgggaaggt

SEQ ID NO: 322461 - DNA, 12 bp, Artificial Sequence
  Oligonucleotide primer for the detection of SNP TSC0030888
tacacacaaaat

SEQ ID NO: 322462 - DNA, 12 bp, Artificial Sequence
  Oligonucleotide primer for the detection of SNP TSC0030888
tattttttagag

SEQ ID NO: 322463 - DNA, 12 bp, Artificial Sequence
  Oligonucleotide primer for the detection of SNP TSC0030889
caaccattaccc

SEQ ID NO: 322464 - DNA, 12 bp, Artificial Sequence
  Oligonucleotide primer for the detection of SNP TSC0030889
cgttgtaatttt

SEQ ID NO: 322465 - DNA, 12 bp, Artificial Sequence
  Oligonucleotide primer for the detection of SNP TSC0030889
tgttgtaatttc

SEQ ID NO: 322466 - DNA, 12 bp, Artificial Sequence
  Oligonucleotide primer for the detection of SNP TSC0030889
cgttgtaatttc

SEQ ID NO: 322467 - DNA, 12 bp, Artificial Sequence
  Oligonucleotide primer for the detection of SNP TSC0030889
acactataactt

SEQ ID NO: 322468 - DNA, 12 bp, Artificial Sequence
  Oligonucleotide primer for the detection of SNP TSC0030889
acgctataactt

SEQ ID NO: 322469 - DNA, 12 bp, Artificial Sequence
  Oligonucleotide primer for the detection of SNP TSC0030890
tcactaaactat

SEQ ID NO: 322470 - DNA, 12 bp, Artificial Sequence
  Oligonucleotide primer for the detection of SNP TSC0030890
tcgctaaactat

SEQ ID NO: 322471 - DNA, 12 bp, Artificial Sequence
  Oligonucleotide primer for the detection of SNP TSC0030890
ttgttaaattgt

SEQ ID NO: 322472 - DNA, 12 bp, Artificial Sequence
  Oligonucleotide primer for the detection of SNP TSC0030890
tcgttaaattgt

SEQ ID NO: 322473 - DNA, 12 bp, Artificial Sequence
  Oligonucleotide primer for the detection of SNP TSC0030891
caacatattaaa

SEQ ID NO: 322474 - DNA, 12 bp, Artificial Sequence
  Oligonucleotide primer for the detection of SNP TSC0030891
gttttaggaaat

SEQ ID NO: 322475 - DNA, 12 bp, Artificial Sequence
  Oligonucleotide primer for the detection of SNP TSC0030891
gtttcaaaaaat

SEQ ID NO: 322476 - DNA, 12 bp, Artificial Sequence
  Oligonucleotide primer for the detection of SNP TSC0030891
agtatgttaaat

SEQ ID NO: 322477 - DNA, 12 bp, Artificial Sequence
  Oligonucleotide primer for the detection of SNP TSC0030894
atccctaaaatc

SEQ ID NO: 322478 - DNA, 12 bp, Artificial Sequence
  Oligonucleotide primer for the detection of SNP TSC0030894
ttaggatggtgg

SEQ ID NO: 322479 - DNA, 12 bp, Artificial Sequence
  Oligonucleotide primer for the detection of SNP TSC0030894
ttaggatggcgg

SEQ ID NO: 322480 - DNA, 12 bp, Artificial Sequence
  Oligonucleotide primer for the detection of SNP TSC0030894
tcaaaataacaa

SEQ ID NO: 322481 - DNA, 12 bp, Artificial Sequence
  Oligonucleotide primer for the detection of SNP TSC0030894
tcaaaataacga

SEQ ID NO: 322482 - DNA, 12 bp, Artificial Sequence
  Oligonucleotide primer for the detection of SNP TSC0030894
gtttttggggtt

SEQ ID NO: 322483 - DNA, 12 bp, Artificial Sequence
  Oligonucleotide primer for the detection of SNP TSC0030895
tcaaatcacccc

SEQ ID NO: 322484 - DNA, 12 bp, Artificial Sequence
  Oligonucleotide primer for the detection of SNP TSC0030895
ggtttgtggtga

SEQ ID NO: 322485 - DNA, 12 bp, Artificial Sequence
  Oligonucleotide primer for the detection of SNP TSC0030897
aattttaaactc

SEQ ID NO: 322486 - DNA, 12 bp, Artificial Sequence
  Oligonucleotide primer for the detection of SNP TSC0030897
ttagtagtagat

SEQ ID NO: 322487 - DNA, 12 bp, Artificial Sequence
  Oligonucleotide primer for the detection of SNP TSC0030898
atattagaaaat

SEQ ID NO: 322488 - DNA, 12 bp, Artificial Sequence
  Oligonucleotide primer for the detection of SNP TSC0030898
cactaaaaaaca

SEQ ID NO: 322489 - DNA, 12 bp, Artificial Sequence
  Oligonucleotide primer for the detection of SNP TSC0030898
gaggtataaaat

SEQ ID NO: 322490 - DNA, 12 bp, Artificial Sequence
  Oligonucleotide primer for the detection of SNP TSC0030899
atccataccaaa

SEQ ID NO: 322491 - DNA, 12 bp, Artificial Sequence
  Oligonucleotide primer for the detection of SNP TSC0030899
atccataccgaa

SEQ ID NO: 322492 - DNA, 12 bp, Artificial Sequence
  Oligonucleotide primer for the detection of SNP TSC0030899
atccgtaccaaa

SEQ ID NO: 322493 - DNA, 12 bp, Artificial Sequence
  Oligonucleotide primer for the detection of SNP TSC0030899
atccgtaccgaa

SEQ ID NO: 322494 - DNA, 12 bp, Artificial Sequence
  Oligonucleotide primer for the detection of SNP TSC0030899
cctcaataactt

SEQ ID NO: 322495 - DNA, 12 bp, Artificial Sequence
  Oligonucleotide primer for the detection of SNP TSC0030899
gtttgtgttggg

SEQ ID NO: 322496 - DNA, 12 bp, Artificial Sequence
  Oligonucleotide primer for the detection of SNP TSC0030899
gttcgtgttggg

SEQ ID NO: 322497 - DNA, 12 bp, Artificial Sequence
  Oligonukleotid-Primer
gtttgtgtcggg

SEQ ID NO: 322498 - DNA, 12 bp, Artificial Sequence
  Oligonucleotide primer for the detection of SNP TSC0030899
gttcgtgtcggg

SEQ ID NO: 322499 - DNA, 12 bp, Artificial Sequence
  Oligonucleotide primer for the detection of SNP TSC0030900
ggttattaatgt

SEQ ID NO: 322500 - DNA, 12 bp, Artificial Sequence
  Oligonucleotide primer for the detection of SNP TSC0030900
accaccaatata

SEQ ID NO: 322501 - DNA, 12 bp, Artificial Sequence
  Oligonukleotid-Primer
gagaattgggtt

SEQ ID NO: 322502 - DNA, 12 bp, Artificial Sequence
  Oligonucleotide primer for the detection of SNP TSC0030904
aaaataaaatta

SEQ ID NO: 322503 - DNA, 12 bp, Artificial Sequence
  Oligonucleotide primer for the detection of SNP TSC0030904
taaactataatc

SEQ ID NO: 322504 - DNA, 12 bp, Artificial Sequence
  Oligonucleotide primer for the detection of SNP TSC0030904
ggagtggagttg

SEQ ID NO: 322505 - DNA, 12 bp, Artificial Sequence
  Oligonukleotid-Primer
caaaaataaccc

SEQ ID NO: 322506 - DNA, 12 bp, Artificial Sequence
  Oligonucleotide primer for the detection of SNP TSC0030905
atatgagagaga

SEQ ID NO: 322507 - DNA, 12 bp, Artificial Sequence
  Oligonucleotide primer for the detection of SNP TSC0030907
tccaataaatat

SEQ ID NO: 322508 - DNA, 12 bp, Artificial Sequence
  Oligonucleotide primer for the detection of SNP TSC0030907
tttattttagga

SEQ ID NO: 322509 - DNA, 12 bp, Artificial Sequence
  Oligonukleotid-Primer
cccttcctaaaa

SEQ ID NO: 322510 - DNA, 12 bp, Artificial Sequence
  Oligonucleotide primer for the detection of SNP TSC0030908
gtgaatgaaagt

SEQ ID NO: 322511 - DNA, 12 bp, Artificial Sequence
  Oligonucleotide primer for the detection of SNP TSC0030916
tactttacccac

SEQ ID NO: 322512 - DNA, 12 bp, Artificial Sequence
  Oligonucleotide primer for the detection of SNP TSC0030916
agttatatggtg

SEQ ID NO: 322513 - DNA, 12 bp, Artificial Sequence
  Oligonucleotide primer for the detection of SNP TSC0030916
agttatacggtg

SEQ ID NO: 322514 - DNA, 12 bp, Artificial Sequence
  Oligonucleotide primer for the detection of SNP TSC0030916
agttatatggcg

SEQ ID NO: 322515 - DNA, 12 bp, Artificial Sequence
  Oligonucleotide primer for the detection of SNP TSC0030916
agttatacggcg

SEQ ID NO: 322516 - DNA, 12 bp, Artificial Sequence
  Oligonucleotide primer for the detection of SNP TSC0030916
aaccacacaaca

SEQ ID NO: 322517 - DNA, 12 bp, Artificial Sequence
  Oligonucleotide primer for the detection of SNP TSC0030916
aaccacacaacg

SEQ ID NO: 322518 - DNA, 12 bp, Artificial Sequence
  Oligonucleotide primer for the detection of SNP TSC0030916
aaccacacgaca

SEQ ID NO: 322519 - DNA, 12 bp, Artificial Sequence
  Oligonucleotide primer for the detection of SNP TSC0030916
aaccacacgacg

SEQ ID NO: 322520 - DNA, 12 bp, Artificial Sequence
  Oligonucleotide primer for the detection of SNP TSC0030916
tgttttgtttat

SEQ ID NO: 322521 - DNA, 12 bp, Artificial Sequence
  Oligonucleotide primer for the detection of SNP TSC0030920
caacattatatt

SEQ ID NO: 322522 - DNA, 12 bp, Artificial Sequence
  Oligonucleotide primer for the detection of SNP TSC0030920
ttttattgtgtg

SEQ ID NO: 322523 - DNA, 12 bp, Artificial Sequence
  Oligonucleotide primer for the detection of SNP TSC0030920
tcctactatata

SEQ ID NO: 322524 - DNA, 12 bp, Artificial Sequence
  Oligonucleotide primer for the detection of SNP TSC0030920
tagtattgtatt

SEQ ID NO: 322525 - DNA, 12 bp, Artificial Sequence
  Oligonucleotide primer for the detection of SNP TSC0030921
tagtgaatggaa

SEQ ID NO: 322526 - DNA, 12 bp, Artificial Sequence
  Oligonucleotide primer for the detection of SNP TSC0030922
tcaactaactaa

SEQ ID NO: 322527 - DNA, 12 bp, Artificial Sequence
  Oligonucleotide primer for the detection of SNP TSC0030922
tcgactaactaa

SEQ ID NO: 322528 - DNA, 12 bp, Artificial Sequence
  Oligonucleotide primer for the detection of SNP TSC0030922
cgttgttttttt

SEQ ID NO: 322529 - DNA, 12 bp, Artificial Sequence
  Oligonucleotide primer for the detection of SNP TSC0030922
actatcttccca

SEQ ID NO: 322530 - DNA, 12 bp, Artificial Sequence
  Oligonucleotide primer for the detection of SNP TSC0030922
gctatcttccca

SEQ ID NO: 322531 - DNA, 12 bp, Artificial Sequence
  Oligonucleotide primer for the detection of SNP TSC0030922
ttggttggttgg

SEQ ID NO: 322532 - DNA, 12 bp, Artificial Sequence
  Oligonucleotide primer for the detection of SNP TSC0030922
tcggttggttgg

SEQ ID NO: 322533 - DNA, 12 bp, Artificial Sequence
  Oligonucleotide primer for the detection of SNP TSC0030923
aaacctaattca

SEQ ID NO: 322534 - DNA, 12 bp, Artificial Sequence
  Oligonucleotide primer for the detection of SNP TSC0030923
gatttttgggaa

SEQ ID NO: 322535 - DNA, 12 bp, Artificial Sequence
  Oligonucleotide primer for the detection of SNP TSC0030923
gattttcgggaa

SEQ ID NO: 322536 - DNA, 12 bp, Artificial Sequence
  Oligonucleotide primer for the detection of SNP TSC0030923
aactctcgaaaa

SEQ ID NO: 322537 - DNA, 12 bp, Artificial Sequence
  Oligonucleotide primer for the detection of SNP TSC0030923
ggggtttgattt

SEQ ID NO: 322538 - DNA, 12 bp, Artificial Sequence
  Oligonucleotide primer for the detection of SNP TSC0030924
tattccattaat

SEQ ID NO: 322539 - DNA, 12 bp, Artificial Sequence
  Oligonucleotide primer for the detection of SNP TSC0030925
tacctacctctc

SEQ ID NO: 322540 - DNA, 12 bp, Artificial Sequence
  Oligonucleotide primer for the detection of SNP TSC0030925
ataggaggtgtg

SEQ ID NO: 322541 - DNA, 12 bp, Artificial Sequence
  Oligonucleotide primer for the detection of SNP TSC0030926
aacacaactaaa

SEQ ID NO: 322542 - DNA, 12 bp, Artificial Sequence
  Oligonucleotide primer for the detection of SNP TSC0030926
aacgcaactaaa

SEQ ID NO: 322543 - DNA, 12 bp, Artificial Sequence
  Oligonucleotide primer for the detection of SNP TSC0030926
attttttataat

SEQ ID NO: 322544 - DNA, 12 bp, Artificial Sequence
  Oligonucleotide primer for the detection of SNP TSC0030926
cacctcctataa

SEQ ID NO: 322545 - DNA, 12 bp, Artificial Sequence
  Oligonucleotide primer for the detection of SNP TSC0030926
aatgtaattggg

SEQ ID NO: 322546 - DNA, 12 bp, Artificial Sequence
  Oligonucleotide primer for the detection of SNP TSC0030926
aacgtaattggg

SEQ ID NO: 322547 - DNA, 12 bp, Artificial Sequence
  Oligonucleotide primer for the detection of SNP TSC0030927
gtattttttaga

SEQ ID NO: 322548 - DNA, 12 bp, Artificial Sequence
  Oligonucleotide primer for the detection of SNP TSC0030927
atacttcttaaa

SEQ ID NO: 322549 - DNA, 12 bp, Artificial Sequence
  Oligonucleotide primer for the detection of SNP TSC0030927
tttaaaataaat

SEQ ID NO: 322550 - DNA, 12 bp, Artificial Sequence
  Oligonucleotide primer for the detection of SNP TSC0030928
cacaattctctt

SEQ ID NO: 322551 - DNA, 12 bp, Artificial Sequence
  Oligonucleotide primer for the detection of SNP TSC0030928
cacgattctctt

SEQ ID NO: 322552 - DNA, 12 bp, Artificial Sequence
  Oligonucleotide primer for the detection of SNP TSC0030928
tttgtaagaggg

SEQ ID NO: 322553 - DNA, 12 bp, Artificial Sequence
  Oligonucleotide primer for the detection of SNP TSC0030929
tatccaacacaa

SEQ ID NO: 322554 - DNA, 12 bp, Artificial Sequence
  Oligonucleotide primer for the detection of SNP TSC0030929
tcccctcactat

SEQ ID NO: 322555 - DNA, 12 bp, Artificial Sequence
  Oligonucleotide primer for the detection of SNP TSC0030929
ttgtttagtata

SEQ ID NO: 322556 - DNA, 12 bp, Artificial Sequence
  Oligonucleotide primer for the detection of SNP TSC0030930
aataaataccaa

SEQ ID NO: 322557 - DNA, 12 bp, Artificial Sequence
  Oligonucleotide primer for the detection of SNP TSC0030930
aatcccattttc

SEQ ID NO: 322558 - DNA, 12 bp, Artificial Sequence
  Oligonucleotide primer for the detection of SNP TSC0030930
ttggtgaatgtt

SEQ ID NO: 322559 - DNA, 12 bp, Artificial Sequence
  Oligonucleotide primer for the detection of SNP TSC0030932
taaccccatccc

SEQ ID NO: 322560 - DNA, 12 bp, Artificial Sequence
  Oligonucleotide primer for the detection of SNP TSC0030932
taaccccgtccc

SEQ ID NO: 322561 - DNA, 12 bp, Artificial Sequence
  Oligonucleotide primer for the detection of SNP TSC0030932
attgaaatagtg

SEQ ID NO: 322562 - DNA, 12 bp, Artificial Sequence
  Oligonucleotide primer for the detection of SNP TSC0030932
attgaaatagcg

SEQ ID NO: 322563 - DNA, 12 bp, Artificial Sequence
  Oligonucleotide primer for the detection of SNP TSC0030932
attaaaacaaca

SEQ ID NO: 322564 - DNA, 12 bp, Artificial Sequence
  Oligonucleotide primer for the detection of SNP TSC0030932
attaaaacaacg

SEQ ID NO: 322565 - DNA, 12 bp, Artificial Sequence
  Oligonucleotide primer for the detection of SNP TSC0030932
taatttcgtttt

SEQ ID NO: 322566 - DNA, 12 bp, Artificial Sequence
  Oligonucleotide primer for the detection of SNP TSC0030933
aataacacaacc

SEQ ID NO: 322567 - DNA, 12 bp, Artificial Sequence
  Oligonucleotide primer for the detection of SNP TSC0030933
attttagttttg

SEQ ID NO: 322568 - DNA, 12 bp, Artificial Sequence
  Oligonucleotide primer for the detection of SNP TSC0030934
accattaaaaat

SEQ ID NO: 322569 - DNA, 12 bp, Artificial Sequence
  Oligonucleotide primer for the detection of SNP TSC0030934
tgttaggttgtg

SEQ ID NO: 322570 - DNA, 12 bp, Artificial Sequence
  Oligonucleotide primer for the detection of SNP TSC0030934
tactaaattata

SEQ ID NO: 322571 - DNA, 12 bp, Artificial Sequence
  Oligonucleotide primer for the detection of SNP TSC0030934
gttattaaaagt

SEQ ID NO: 322572 - DNA, 12 bp, Artificial Sequence
  Oligonucleotide primer for the detection of SNP TSC0030936
attgatttttta

SEQ ID NO: 322573 - DNA, 12 bp, Artificial Sequence
  Oligonucleotide primer for the detection of SNP TSC0030936
actaattctcta

SEQ ID NO: 322574 - DNA, 12 bp, Artificial Sequence
  Oligonukleotid-Primer
gaggttaaaggt

SEQ ID NO: 322575 - DNA, 12 bp, Artificial Sequence
  Oligonucleotide primer for the detection of SNP TSC0030937
acatctctctat

SEQ ID NO: 322576 - DNA, 12 bp, Artificial Sequence
  Oligonucleotide primer for the detection of SNP TSC0030937
gagtagattgag

SEQ ID NO: 322577 - DNA, 12 bp, Artificial Sequence
  Oligonucleotide primer for the detection of SNP TSC0030942
aaaaccttaaca

SEQ ID NO: 322578 - DNA, 12 bp, Artificial Sequence
  Oligonukleotid-Primer
agagggaatagt

SEQ ID NO: 322579 - DNA, 12 bp, Artificial Sequence
  Oligonucleotide primer for the detection of SNP TSC0030947
acaaatatctac

SEQ ID NO: 322580 - DNA, 12 bp, Artificial Sequence
  Oligonucleotide primer for the detection of SNP TSC0030947
gtagtgttatgg

SEQ ID NO: 322581 - DNA, 12 bp, Artificial Sequence
  Oligonucleotide primer for the detection of SNP TSC0030949
cttcaaaactct

SEQ ID NO: 322582 - DNA, 12 bp, Artificial Sequence
  Oligonukleotid-Primer
ggttttttgggg

SEQ ID NO: 322583 - DNA, 12 bp, Artificial Sequence
  Oligonucleotide primer for the detection of SNP TSC0030950
aaccaacgaccc

SEQ ID NO: 322584 - DNA, 12 bp, Artificial Sequence
  Oligonucleotide primer for the detection of SNP TSC0030950
aaccgacaaccc

SEQ ID NO: 322585 - DNA, 12 bp, Artificial Sequence
  Oligonucleotide primer for the detection of SNP TSC0030950
aaccgacgaccc

SEQ ID NO: 322586 - DNA, 12 bp, Artificial Sequence
  Oligonucleotide primer for the detection of SNP TSC0030950
gggttagggtga

SEQ ID NO: 322587 - DNA, 12 bp, Artificial Sequence
  Oligonucleotide primer for the detection of SNP TSC0030950
gattggtggttt

SEQ ID NO: 322588 - DNA, 12 bp, Artificial Sequence
  Oligonucleotide primer for the detection of SNP TSC0030950
gatcggtggttt

SEQ ID NO: 322589 - DNA, 12 bp, Artificial Sequence
  Oligonucleotide primer for the detection of SNP TSC0030950
gattggcggttt

SEQ ID NO: 322590 - DNA, 12 bp, Artificial Sequence
  Oligonucleotide primer for the detection of SNP TSC0030950
gatcggcggttt

SEQ ID NO: 322591 - DNA, 12 bp, Artificial Sequence
  Oligonucleotide primer for the detection of SNP TSC0030951
cctaaccctcaa

SEQ ID NO: 322592 - DNA, 12 bp, Artificial Sequence
  Oligonucleotide primer for the detection of SNP TSC0030951
tgttatagtttt

SEQ ID NO: 322593 - DNA, 12 bp, Artificial Sequence
  Oligonucleotide primer for the detection of SNP TSC0030951
tatcacaatcct

SEQ ID NO: 322594 - DNA, 12 bp, Artificial Sequence
  Oligonucleotide primer for the detection of SNP TSC0030952
caatcatcttat

SEQ ID NO: 322595 - DNA, 12 bp, Artificial Sequence
  Oligonucleotide primer for the detection of SNP TSC0030952
tgtgaggtaggg

SEQ ID NO: 322596 - DNA, 12 bp, Artificial Sequence
  Oligonucleotide primer for the detection of SNP TSC0030952
tgcgaggtaggg

SEQ ID NO: 322597 - DNA, 12 bp, Artificial Sequence
  Oligonucleotide primer for the detection of SNP TSC0030953
cttccataacta

SEQ ID NO: 322598 - DNA, 12 bp, Artificial Sequence
  Oligonucleotide primer for the detection of SNP TSC0030953
gaggttggaggt

SEQ ID NO: 322599 - DNA, 12 bp, Artificial Sequence
  Oligonucleotide primer for the detection of SNP TSC0030953
tttttatggttg

SEQ ID NO: 322600 - DNA, 12 bp, Artificial Sequence
  Oligonucleotide primer for the detection of SNP TSC0030956
actttaccaaac
